United States Patent Application Publication US 2022/0213167 A1 - sequence listing, part 11

SEQ ID NO: 218431 - protein, 16 aa, Homo sapiens
  CDR3 for alpha chain variable domain of TCR clone 109216 (TRAV21, TRAJ33)
CAVSPASIDSNYQLIW

SEQ ID NO: 218432 - protein, 17 aa, Homo sapiens
  CDR3 for beta chain variable domain of TCR clone 109216 (TRBV2, TRBJ1-4)
CASSKRELTQGEEKLFF

SEQ ID NO: 218433 - protein, 13 aa, Homo sapiens
  CDR3 for alpha chain variable domain of TCR clone 109217 (TRAV8-3, TRAJ34)
CAVGPYNTDKLIF

SEQ ID NO: 218434 - protein, 17 aa, Homo sapiens
  CDR3 for beta chain variable domain of TCR clone 109217 (TRBV13, TRBJ2-3)
CASSLSRVAGGRNTQYF

SEQ ID NO: 218435 - protein, 14 aa, Homo sapiens
  CDR3 for alpha chain variable domain of TCR clone 109218 (TRAV12-2, TRAJ53)
CAVKGGGSNYKRTF

SEQ ID NO: 218436 - protein, 14 aa, Homo sapiens
  CDR3 for beta chain variable domain of TCR clone 109218 (TRBV7-7, TRBJ2-2)
CATRQDSDTGELFF

SEQ ID NO: 218437 - protein, 14 aa, Homo sapiens
  CDR3 for alpha chain variable domain of TCR clone 109219 (TRAV1-2, TRAJ16)
CAVNRFSDGQKLLF

SEQ ID NO: 218438 - protein, 12 aa, Homo sapiens
  CDR3 for beta chain variable domain of TCR clone 109219 (TRBV11-2, TRBJ2-1)
CAGSPGNNEQFF

SEQ ID NO: 218439 - protein, 13 aa, Homo sapiens
  CDR3 for alpha chain variable domain of TCR clone 109220 (TRAV2, TRAJ36)
CAVDQTVANNLFF

SEQ ID NO: 218440 - protein, 12 aa, Homo sapiens
  CDR3 for beta chain variable domain of TCR clone 109220 (TRBV19, TRBJ1-1)
CASMNRYTEAFF

SEQ ID NO: 218441 - protein, 15 aa, Homo sapiens
  CDR3 for alpha chain variable domain of TCR clone 109221 (TRAV1-2, TRAJ12)
CAVRDWMDSSYKLIF

SEQ ID NO: 218442 - protein, 14 aa, Homo sapiens
  CDR3 for beta chain variable domain of TCR clone 109221 (TRBV7-3, TRBJ2-1)
CASSLAGGTNEQFF

SEQ ID NO: 218443 - protein, 10 aa, Homo sapiens
  CDR3 for alpha chain variable domain of TCR clone 109222 (TRAV13-1, TRAJ43)
CAASKNDMRF

SEQ ID NO: 218444 - protein, 13 aa, Homo sapiens
  CDR3 for beta chain variable domain of TCR clone 109222 (TRBV20-1, TRBJ1-5)
CSARTGVNQPQHC

SEQ ID NO: 218445 - protein, 14 aa, Homo sapiens
  CDR3 for alpha chain variable domain of TCR clone 109223 (TRAV12-1, TRAJ9)
CVVNIITGGFKTIF

SEQ ID NO: 218446 - protein, 17 aa, Homo sapiens
  CDR3 for beta chain variable domain of TCR clone 109223 (TRBV9, TRBJ2-1)
CASSVGPTGMARDEQFF

SEQ ID NO: 218447 - protein, 14 aa, Homo sapiens
  CDR3 for alpha chain variable domain of TCR clone 109224 (TRAV1-2, TRAJ16)
CAVNRISDGQKLLF

SEQ ID NO: 218448 - protein, 11 aa, Homo sapiens
  CDR3 for beta chain variable domain of TCR clone 109224 (TRBV29-1, TRBJ2-5)
CSEDRTGTQYF

SEQ ID NO: 218449 - protein, 15 aa, Homo sapiens
  CDR3 for alpha chain variable domain of TCR clone 109225 (TRAV27, TRAJ38)
CAGRFNAGNNRKLIW

SEQ ID NO: 218450 - protein, 20 aa, Homo sapiens
  CDR3 for beta chain variable domain of TCR clone 109225 (TRBV28, TRBJ2-1)
CASTPIGRSPGLAGGNEQFF

SEQ ID NO: 218451 - protein, 13 aa, Homo sapiens
  CDR3 for alpha chain variable domain of TCR clone 109226 (TRAV12-2, TRAJ24)
CAVSTDSWGKLQF

SEQ ID NO: 218452 - protein, 20 aa, Homo sapiens
  CDR3 for beta chain variable domain of TCR clone 109226 (TRBV7-8, TRBJ2-2)
CASSHLFPGPTIHITGELFF

SEQ ID NO: 218453 - protein, 11 aa, Homo sapiens
  CDR3 for alpha chain variable domain of TCR clone 109227 (TRAV35, TRAJ34)
CWARNTDKLIY

SEQ ID NO: 218454 - protein, 14 aa, Homo sapiens
  CDR3 for beta chain variable domain of TCR clone 109227 (TRBV5-1, TRBJ2-7)
CASSRGESLYEQYF

SEQ ID NO: 218455 - protein, 16 aa, Homo sapiens
  CDR3 for alpha chain variable domain of TCR clone 109228 (TRAV30, TRAJ24)
CGPEIGDADSWGKFQF

SEQ ID NO: 218456 - protein, 14 aa, Homo sapiens
  CDR3 for beta chain variable domain of TCR clone 109228 (TRBV12-5, TRBJ2-5)
CASGSRTHQETQYF

SEQ ID NO: 218457 - protein, 16 aa, Homo sapiens
  CDR3 for alpha chain variable domain of TCR clone 109229 (TRAV12-1, TRAJ53)
CVVNGRGGGSNYKLTF

SEQ ID NO: 218458 - protein, 12 aa, Homo sapiens
  CDR3 for beta chain variable domain of TCR clone 109229 (TRBV28, TRBJ2-6)
CAIQAGANVLTF

SEQ ID NO: 218459 - protein, 14 aa, Homo sapiens
  CDR3 for alpha chain variable domain of TCR clone 109230 (TRAV8-4, TRAJ9)
CAVRINTGGFKTIF

SEQ ID NO: 218460 - protein, 15 aa, Homo sapiens
  CDR3 for beta chain variable domain of TCR clone 109230 (TRBV10-2, TRBJ2-6)
CASSGQGTGANDLTF

SEQ ID NO: 218461 - protein, 14 aa, Homo sapiens
  CDR3 for alpha chain variable domain of TCR clone 109231 (TRAV1-2, TRAJ16)
CAVNRLSDGQKLLF

SEQ ID NO: 218462 - protein, 15 aa, Homo sapiens
  CDR3 for beta chain variable domain of TCR clone 109231 (TRBV7-8, TRBJ2-1)
CASSLADSLYNEQFF

SEQ ID NO: 218463 - protein, 14 aa, Homo sapiens
  CDR3 for alpha chain variable domain of TCR clone 109232 (TRAV25, TRAJ22)
CAVRSSGSSRQLTF

SEQ ID NO: 218464 - protein, 16 aa, Homo sapiens
  CDR3 for beta chain variable domain of TCR clone 109232 (TRBV4-2, TRBJ1-1)
CASSPSPGRAAPEAFF

SEQ ID NO: 218465 - protein, 12 aa, Homo sapiens
  CDR3 for alpha chain variable domain of TCR clone 109233 (TRAV12-3, TRAJ17)
CAMTLTGNKLTF

SEQ ID NO: 218466 - protein, 16 aa, Homo sapiens
  CDR3 for beta chain variable domain of TCR clone 109233 (TRBV28, TRBJ2-6)
CASSFRTYSGANVLTF

SEQ ID NO: 218467 - protein, 16 aa, Homo sapiens
  CDR3 for alpha chain variable domain of TCR clone 109234 (TRAV12-2, TRAJ43)
CAGDDMRFGAGTRLTV

SEQ ID NO: 218468 - protein, 13 aa, Homo sapiens
  CDR3 for beta chain variable domain of TCR clone 109234 (TRBV12-4, TRBJ1-1)
CASSPGTGFEAFF

SEQ ID NO: 218469 - protein, 13 aa, Homo sapiens
  CDR3 for alpha chain variable domain of TCR clone 109235 (TRAV12-3, TRAJ54)
CALVPQGAQELVF

SEQ ID NO: 218470 - protein, 15 aa, Homo sapiens
  CDR3 for beta chain variable domain of TCR clone 109235 (TRBV4-1, TRBJ2-2)
CASSQDARGTGELFF

SEQ ID NO: 218471 - protein, 13 aa, Homo sapiens
  CDR3 for alpha chain variable domain of TCR clone 109236 (TRAV20, TRAJ37)
CAGCSSNTGKLIF

SEQ ID NO: 218472 - protein, 21 aa, Homo sapiens
  CDR3 for beta chain variable domain of TCR clone 109236 (TRBV4-2, TRBJ2-3)
PCSKKTRPCISVPAAPDTQYF

SEQ ID NO: 218473 - protein, 14 aa, Homo sapiens
  CDR3 for alpha chain variable domain of TCR clone 109237 (TRAV1-2, TRAJ8)
CAVREDTGFQKLVF

SEQ ID NO: 218474 - protein, 16 aa, Homo sapiens
  CDR3 for beta chain variable domain of TCR clone 109237 (TRBV12-4, TRBJ1-5)
CASSRPVWGSNQPQHF

SEQ ID NO: 218475 - protein, 10 aa, Homo sapiens
  CDR3 for alpha chain variable domain of TCR clone 109238 (TRAV26-1, TRAJ40)
CIAGTYKYIF

SEQ ID NO: 218476 - protein, 16 aa, Homo sapiens
  CDR3 for beta chain variable domain of TCR clone 109238 (TRBV12-4, TRBJ1-5)
CASSRPVGGSNQPQHF

SEQ ID NO: 218477 - protein, 11 aa, Homo sapiens
  CDR3 for alpha chain variable domain of TCR clone 109239 (TRAV12-2, TRAJ29)
CAVTPRSPLVF

SEQ ID NO: 218478 - protein, 14 aa, Homo sapiens
  CDR3 for beta chain variable domain of TCR clone 109239 (TRBV9, TRBJ1-2)
CASSVSTRSYGYTF

SEQ ID NO: 218479 - protein, 14 aa, Homo sapiens
  CDR3 for alpha chain variable domain of TCR clone 109240 (TRAV38-1, TRAJ29)
CAFITPSGNTPLVF

SEQ ID NO: 218480 - protein, 14 aa, Homo sapiens
  CDR3 for beta chain variable domain of TCR clone 109240 (TRBV6-1, TRBJ1-3)
CASVQGGGGNTMYF

SEQ ID NO: 218481 - protein, 14 aa, Homo sapiens
  CDR3 for alpha chain variable domain of TCR clone 109241 (TRAV9-2, TRAJ39)
CALYIYSAGNMLTF

SEQ ID NO: 218482 - protein, 13 aa, Homo sapiens
  CDR3 for beta chain variable domain of TCR clone 109241 (TRBV7-3, TRBJ1-1)
CASSQDWGAEAFF

SEQ ID NO: 218483 - protein, 14 aa, Homo sapiens
  CDR3 for alpha chain variable domain of TCR clone 109242 (TRAV21, TRAJ52)
CGRAGGTSHGKLTF

SEQ ID NO: 218484 - protein, 14 aa, Homo sapiens
  CDR3 for beta chain variable domain of TCR clone 109242 (TRBV19, TRBJ1-2)
CASSVLGYNYGYTF

SEQ ID NO: 218485 - protein, 15 aa, Homo sapiens
  CDR3 for alpha chain variable domain of TCR clone 109243 (TRAV17, TRAJ35)
CATAFVIGFGNVLHC

SEQ ID NO: 218486 - protein, 13 aa, Homo sapiens
  CDR3 for beta chain variable domain of TCR clone 109243 (TRBV7-3, TRBJ1-1)
CASSQDWGAEAFF

SEQ ID NO: 218487 - protein, 15 aa, Homo sapiens
  CDR3 for alpha chain variable domain of TCR clone 109244 (TRAV27, TRAJ38)
CAARRNAGNNRKLLW

SEQ ID NO: 218488 - protein, 13 aa, Homo sapiens
  CDR3 for beta chain variable domain of TCR clone 109244 (TRBV28, TRBJ2-5)
CAGVSRGEETQYF

SEQ ID NO: 218489 - protein, 14 aa, Homo sapiens
  CDR3 for alpha chain variable domain of TCR clone 109245 (TRAV8-2, TRAJ37)
CVVSISGNTGNLIF

SEQ ID NO: 218490 - protein, 11 aa, Homo sapiens
  CDR3 for beta chain variable domain of TCR clone 109245 (TRBV18, TRBJ2-5)
CASSPRETQYF

SEQ ID NO: 218491 - protein, 13 aa, Homo sapiens
  CDR3 for alpha chain variable domain of TCR clone 109246 (TRAV1-2, TRAJ9)
CAALNTGGFKTIF

SEQ ID NO: 218492 - protein, 13 aa, Homo sapiens
  CDR3 for beta chain variable domain of TCR clone 109246 (TRBV19, TRBJ2-5)
CASSIHSQETQYF

SEQ ID NO: 218493 - protein, 13 aa, Homo sapiens
  CDR3 for alpha chain variable domain of TCR clone 109247 (TRAV20, TRAJ40)
CAVPFSGTYKCIF

SEQ ID NO: 218494 - protein, 13 aa, Homo sapiens
  CDR3 for beta chain variable domain of TCR clone 109247 (TRBV15, TRBJ2-5)
CATSQIGEETQYF

SEQ ID NO: 218495 - protein, 17 aa, Homo sapiens
  CDR3 for alpha chain variable domain of TCR clone 109248 (TRAV3, TRAJ6)
CAVRDGPRAGGSYKPTF

SEQ ID NO: 218496 - protein, 12 aa, Homo sapiens
  CDR3 for beta chain variable domain of TCR clone 109248 (TRBV11-2, TRBJ2-2)
CASSLGGGELFF

SEQ ID NO: 218497 - protein, 14 aa, Homo sapiens
  CDR3 for alpha chain variable domain of TCR clone 109249 (TRAV12-1, TRAJ38)
CVVNNAGNNRKLIW

SEQ ID NO: 218498 - protein, 13 aa, Homo sapiens
  CDR3 for beta chain variable domain of TCR clone 109249 (TRBV27, TRBJ1-1)
CASSLSIGAEAFF

SEQ ID NO: 218499 - protein, 11 aa, Homo sapiens
  CDR3 for alpha chain variable domain of TCR clone 109250 (TRAV13-1, TRAJ40)
CAVSGTYNYIF

SEQ ID NO: 218500 - protein, 13 aa, Homo sapiens
  CDR3 for beta chain variable domain of TCR clone 109250 (TRBV19, TRBJ1-5)
CASSIGGNQPQHF

SEQ ID NO: 218501 - protein, 16 aa, Homo sapiens
  CDR3 for alpha chain variable domain of TCR clone 109251 (TRAV16, TRAJ42)
CARKMNYGGSQGNLIF

SEQ ID NO: 218502 - protein, 15 aa, Homo sapiens
  CDR3 for beta chain variable domain of TCR clone 109251 (TRBV20-1, TRBJ2-7)
CSAREGRDRLYEQYF

SEQ ID NO: 218503 - protein, 12 aa, Homo sapiens
  CDR3 for alpha chain variable domain of TCR clone 109252 (TRAV1-1, TRAJ8)
CAGGTGFQKLVF

SEQ ID NO: 218504 - protein, 15 aa, Homo sapiens
  CDR3 for beta chain variable domain of TCR clone 109252 (TRBV9, TRBJ1-6)
CASSVAGTGDSPLHF

SEQ ID NO: 218505 - protein, 22 aa, Homo sapiens
  CDR3 for alpha chain variable domain of TCR clone 109253 (TRAV3, TRAJ38)
CAVRDCLNAGNNHIQNPDPAVY

SEQ ID NO: 218506 - protein, 13 aa, Homo sapiens
  CDR3 for beta chain variable domain of TCR clone 109253 (TRBV7-2, TRBJ2-5)
CASSRGGLETQYF

SEQ ID NO: 218507 - protein, 12 aa, Homo sapiens
  CDR3 for alpha chain variable domain of TCR clone 109254 (TRAV21, TRAJ33)
WAKMDSNYQLIW

SEQ ID NO: 218508 - protein, 14 aa, Homo sapiens
  CDR3 for beta chain variable domain of TCR clone 109254 (TRBV2, TRBJ2-7)
CASSLTSGGYEQYF

SEQ ID NO: 218509 - protein, 13 aa, Homo sapiens
  CDR3 for alpha chain variable domain of TCR clone 109255 (TRAV23/DV6, TRAJ6)
CAAKTGGSYIPTF

SEQ ID NO: 218510 - protein, 15 aa, Homo sapiens
  CDR3 for beta chain variable domain of TCR clone 109255 (TRBV5-1, TRBJ1-2)
CASSSYGEFDCGYTF

SEQ ID NO: 218511 - protein, 14 aa, Homo sapiens
  CDR3 for alpha chain variable domain of TCR clone 109256 (TRAV38-1, TRAJ45)
CASHSGGGADGLTL

SEQ ID NO: 218512 - protein, 16 aa, Homo sapiens
  CDR3 for beta chain variable domain of TCR clone 109256 (TRBV27, TRBJ2-2)
CASSFRGLVRTGELFF

SEQ ID NO: 218513 - protein, 17 aa, Homo sapiens
  CDR3 for alpha chain variable domain of TCR clone 109257 (TRAV16, TRAJ42)
CALSPKLYGGSQGNLIF

SEQ ID NO: 218514 - protein, 13 aa, Homo sapiens
  CDR3 for beta chain variable domain of TCR clone 109257 (TRBV19, TRBJ1-5)
CASSRRRDQSQHF

SEQ ID NO: 218515 - protein, 15 aa, Homo sapiens
  CDR3 for alpha chain variable domain of TCR clone 109258 (TRAV4, TRAJ42)
CLVGGNGGSQGNLIF

SEQ ID NO: 218516 - protein, 16 aa, Homo sapiens
  CDR3 for beta chain variable domain of TCR clone 109258 (TRBV27, TRBJ1-1)
CASSTRTGGVGTEAFF

SEQ ID NO: 218517 - protein, 10 aa, Homo sapiens
  CDR3 for alpha chain variable domain of TCR clone 109259 (TRAV12-3, TRAJ49)
CAMNDDQFYF

SEQ ID NO: 218518 - protein, 15 aa, Homo sapiens
  CDR3 for beta chain variable domain of TCR clone 109259 (TRBV19, TRBJ1-1)
CASSIRRQMNTEAFF

SEQ ID NO: 218519 - protein, 10 aa, Homo sapiens
  CDR3 for alpha chain variable domain of TCR clone 109260 (TRAV38-1, TRAJ34)
CAFMDDKLIF

SEQ ID NO: 218520 - protein, 17 aa, Homo sapiens
  CDR3 for beta chain variable domain of TCR clone 109260 (TRBV11-1, TRBJ2-3)
CASSLGLTGGGTDTQYF

SEQ ID NO: 218521 - protein, 11 aa, Homo sapiens
  CDR3 for alpha chain variable domain of TCR clone 109261 (TRAV12-1, TRAJ30)
CVVNGQDKIIF

SEQ ID NO: 218522 - protein, 15 aa, Homo sapiens
  CDR3 for beta chain variable domain of TCR clone 109261 (TRBV11-3, TRBJ1-1)
CASSLGGPGDTGAFF

SEQ ID NO: 218523 - protein, 13 aa, Homo sapiens
  CDR3 for alpha chain variable domain of TCR clone 109262 (TRAV29/DV5, TRAJ31)
CAASRNNNARLMF

SEQ ID NO: 218524 - protein, 14 aa, Homo sapiens
  CDR3 for beta chain variable domain of TCR clone 109262 (TRBV4-2, TRBJ2-1)
CASGLDRAYNEQFF

SEQ ID NO: 218525 - protein, 16 aa, Homo sapiens
  CDR3 for alpha chain variable domain of TCR clone 109263 (TRAV26-2, TRAJ13)
CILRRRGSGGYQKVTF

SEQ ID NO: 218526 - protein, 15 aa, Homo sapiens
  CDR3 for beta chain variable domain of TCR clone 109263 (TRBV11-1, TRBJ2-7)
CASSLNYGASYEQYF

SEQ ID NO: 218527 - protein, 15 aa, Homo sapiens
  CDR3 for alpha chain variable domain of TCR clone 109264 (TRAV8-3, TRAJ45)
CASPYSGGGADGLTF

SEQ ID NO: 218528 - protein, 16 aa, Homo sapiens
  CDR3 for beta chain variable domain of TCR clone 109264 (TRBV20-1, TRBJ2-2)
CSASASGIPGAGELFF

SEQ ID NO: 218529 - protein, 17 aa, Homo sapiens
  CDR3 for alpha chain variable domain of TCR clone 109265 (TRAV4, TRAJ42)
CLVGVLNYGGSQGNLSF

SEQ ID NO: 218530 - protein, 12 aa, Homo sapiens
  CDR3 for beta chain variable domain of TCR clone 109265 (TRBV20-1, TRBJ2-1)
CSAQYTYNEQFF

SEQ ID NO: 218531 - protein, 12 aa, Homo sapiens
  CDR3 for alpha chain variable domain of TCR clone 109266 (TRAV12-3, TRAJ34)
FAMGYNTDKLIF

SEQ ID NO: 218532 - protein, 15 aa, Homo sapiens
  CDR3 for beta chain variable domain of TCR clone 109266 (TRBV28, TRBJ2-1)
CASSIIAGGRSEQFF

SEQ ID NO: 218533 - protein, 15 aa, Homo sapiens
  CDR3 for alpha chain variable domain of TCR clone 109267 (TRAV17, TRAJ57)
CATGPSQGGSEKLAF

SEQ ID NO: 218534 - protein, 13 aa, Homo sapiens
  CDR3 for beta chain variable domain of TCR clone 109267 (TRBV27, TRBJ1-4)
CASSLMGDEKLFF

SEQ ID NO: 218535 - protein, 14 aa, Homo sapiens
  CDR3 for alpha chain variable domain of TCR clone 109268 (TRAV12-2, TRAJ40)
CAVKIPSGTYKYIF

SEQ ID NO: 218536 - protein, 12 aa, Homo sapiens
  CDR3 for beta chain variable domain of TCR clone 109268 (TRBV2, TRBJ2-7)
CASKRGSYEQYF

SEQ ID NO: 218537 - protein, 18 aa, Homo sapiens
  CDR3 for alpha chain variable domain of TCR clone 109269 (TRAV3, TRAJ32)
CAVRDIRGYGGATNNLIF

SEQ ID NO: 218538 - protein, 15 aa, Homo sapiens
  CDR3 for beta chain variable domain of TCR clone 109269 (TRBV12-4, TRBJ2-2)
CASSLGVRHTGELFF

SEQ ID NO: 218539 - protein, 11 aa, Homo sapiens
  CDR3 for alpha chain variable domain of TCR clone 109270 (TRAV35, TRAJ34)
CWSRNTDKLIF

SEQ ID NO: 218540 - protein, 13 aa, Homo sapiens
  CDR3 for beta chain variable domain of TCR clone 109270 (TRBV19, TRBJ2-7)
CASSIDRTYEQYF

SEQ ID NO: 218541 - protein, 14 aa, Homo sapiens
  CDR3 for alpha chain variable domain of TCR clone 109271 (TRAV2, TRAJ9)
CAVEDRSGGFKTIF

SEQ ID NO: 218542 - protein, 14 aa, Homo sapiens
  CDR3 for beta chain variable domain of TCR clone 109271 (TRBV12-4, TRBJ1-3)
CASGQTVSGNTIYF

SEQ ID NO: 218543 - protein, 14 aa, Homo sapiens
  CDR3 for alpha chain variable domain of TCR clone 109272 (TRAV3, TRAJ21)
CAVRDAYNFNNFYF

SEQ ID NO: 218544 - protein, 17 aa, Homo sapiens
  CDR3 for beta chain variable domain of TCR clone 109272 (TRBV20-1, TRBJ1-6)
CSARGGYTFSYNSPLHF

SEQ ID NO: 218545 - protein, 15 aa, Homo sapiens
  CDR3 for alpha chain variable domain of TCR clone 109273 (TRAV4, TRAJ36)
CLVGDRQTGANNLFF

SEQ ID NO: 218546 - protein, 14 aa, Homo sapiens
  CDR3 for beta chain variable domain of TCR clone 109273 (TRBV19, TRBJ2-1)
CASPTFVLSGEQFF

SEQ ID NO: 218547 - protein, 14 aa, Homo sapiens
  CDR3 for alpha chain variable domain of TCR clone 109274 (TRAV17, TRAJ57)
CATDPQGGSEKPVF

SEQ ID NO: 218548 - protein, 18 aa, Homo sapiens
  CDR3 for beta chain variable domain of TCR clone 109274 (TRBV6-6, TRBJ1-3)
CASSYSKWDSISGNTIYF

SEQ ID NO: 218549 - protein, 14 aa, Homo sapiens
  CDR3 for alpha chain variable domain of TCR clone 109275 (TRAV9-2, TRAJ39)
CALYIYNAGNMLTF

SEQ ID NO: 218550 - protein, 14 aa, Homo sapiens
  CDR3 for beta chain variable domain of TCR clone 109275 (TRBV27, TRBJ2-2)
CASSLSVVDGRMFF

SEQ ID NO: 218551 - protein, 17 aa, Homo sapiens
  CDR3 for alpha chain variable domain of TCR clone 109276 (TRAV13-1, TRAJ28)
SAASPPYSGAGSYQLTF

SEQ ID NO: 218552 - protein, 15 aa, Homo sapiens
  CDR3 for beta chain variable domain of TCR clone 109276 (TRBV6-3, TRBJ2-2)
CASSFLATLTGELFF

SEQ ID NO: 218553 - protein, 17 aa, Homo sapiens
  CDR3 for alpha chain variable domain of TCR clone 109277 (TRAV26-2, TRAJ42)
CILRDVGYGGSQGNLIF

SEQ ID NO: 218554 - protein, 16 aa, Homo sapiens
  CDR3 for beta chain variable domain of TCR clone 109277 (TRBV12-4, TRBJ2-7)
CASGLIGGTGTYEQYF

SEQ ID NO: 218555 - protein, 10 aa, Homo sapiens
  CDR3 for alpha chain variable domain of TCR clone 109278 (TRAV12-1, TRAJ37)
ARGNTGKLIF

SEQ ID NO: 218556 - protein, 15 aa, Homo sapiens
  CDR3 for beta chain variable domain of TCR clone 109278 (TRBV7-2, TRBJ2-3)
CASSSEQGGTDTQYF

SEQ ID NO: 218557 - protein, 14 aa, Homo sapiens
  CDR3 for alpha chain variable domain of TCR clone 109279 (TRAV12-1, TRAJ17)
CVVNYKAAGNELTF

SEQ ID NO: 218558 - protein, 14 aa, Homo sapiens
  CDR3 for beta chain variable domain of TCR clone 109279 (TRBV20-1, TRBJ1-1)
CSAQTRIGGTEAFF

SEQ ID NO: 218559 - protein, 11 aa, Homo sapiens
  CDR3 for alpha chain variable domain of TCR clone 109280 (TRAV1-2, TRAJ11)
CAVRGYSTLTF

SEQ ID NO: 218560 - protein, 15 aa, Homo sapiens
  CDR3 for beta chain variable domain of TCR clone 109280 (TRBV27, TRBJ2-1)
CASSNGGGSSNEQFF

SEQ ID NO: 218561 - protein, 14 aa, Homo sapiens
  CDR3 for alpha chain variable domain of TCR clone 109281 (TRAV23/DV6, TRAJ13)
CAAMYSGGYQKVTF

SEQ ID NO: 218562 - protein, 14 aa, Homo sapiens
  CDR3 for beta chain variable domain of TCR clone 109281 (TRBV7-9, TRBJ2-1)
CASNPRDSLYEQFF

SEQ ID NO: 218563 - protein, 17 aa, Homo sapiens
  CDR3 for alpha chain variable domain of TCR clone 109282 (TRAV3, TRAJ6)
RAVRDGPRAGGSYIPTF

SEQ ID NO: 218564 - protein, 16 aa, Homo sapiens
  CDR3 for beta chain variable domain of TCR clone 109282 (TRBV7-8, TRBJ2-3)
CASSTEGQRETDTQYF

SEQ ID NO: 218565 - protein, 11 aa, Homo sapiens
  CDR3 for alpha chain variable domain of TCR clone 109283 (TRAV3, TRAJ17)
PRGAAGNKLTF

SEQ ID NO: 218566 - protein, 15 aa, Homo sapiens
  CDR3 for beta chain variable domain of TCR clone 109283 (TRBV7-6, TRBJ2-1)
CQQRSGASSYNEQFF

SEQ ID NO: 218567 - protein, 14 aa, Homo sapiens
  CDR3 for alpha chain variable domain of TCR clone 109284 (TRAV12-3, TRAJ12)
CVMSEVDSSYKLIF

SEQ ID NO: 218568 - protein, 12 aa, Homo sapiens
  CDR3 for beta chain variable domain of TCR clone 109284 (TRBV18, TRBJ1-4)
CASSPSREKLFF

SEQ ID NO: 218569 - protein, 16 aa, Homo sapiens
  CDR3 for alpha chain variable domain of TCR clone 109285 (TRAV3, TRAJ37)
CAVRVRGSGNTGKLIF

SEQ ID NO: 218570 - protein, 16 aa, Homo sapiens
  CDR3 for beta chain variable domain of TCR clone 109285 (TRBV19, TRBJ2-1)
CASSKAGPSYYNEQFF

SEQ ID NO: 218571 - protein, 12 aa, Homo sapiens
  CDR3 for alpha chain variable domain of TCR clone 109286 (TRAV12-3, TRAJ20)
CAMVRGDYKLSF

SEQ ID NO: 218572 - protein, 13 aa, Homo sapiens
  CDR3 for beta chain variable domain of TCR clone 109286 (TRBV5-1, TRBJ2-1)
CASRPFGYNEQFF

SEQ ID NO: 218573 - protein, 13 aa, Homo sapiens
  CDR3 for alpha chain variable domain of TCR clone 109287 (TRAV8-6, TRAJ40)
CAVSVTGTYKYIF

SEQ ID NO: 218574 - protein, 14 aa, Homo sapiens
  CDR3 for beta chain variable domain of TCR clone 109287 (TRBV7-2, TRBJ2-7)
CASSLPPGQGPQYF

SEQ ID NO: 218575 - protein, 14 aa, Homo sapiens
  CDR3 for alpha chain variable domain of TCR clone 109288 (TRAV12-1, TRAJ17)
CVVNYKAAGNKLTF

SEQ ID NO: 218576 - protein, 16 aa, Homo sapiens
  CDR3 for beta chain variable domain of TCR clone 109288 (TRBV11-2, TRBJ2-1)
CASSPRLAGVYNEQFF

SEQ ID NO: 218577 - protein, 12 aa, Homo sapiens
  CDR3 for alpha chain variable domain of TCR clone 109289 (TRAV3, TRAJ7)
CTPFMGTTDSLL

SEQ ID NO: 218578 - protein, 15 aa, Homo sapiens
  CDR3 for beta chain variable domain of TCR clone 109289 (TRBV12-4, TRBJ2-1)
CASSLGTSAVNEQFF

SEQ ID NO: 218579 - protein, 14 aa, Homo sapiens
  CDR3 for alpha chain variable domain of TCR clone 109290 (TRAV4, TRAJ17)
CLVGDMAEGNKLTF

SEQ ID NO: 218580 - protein, 14 aa, Homo sapiens
  CDR3 for beta chain variable domain of TCR clone 109290 (TRBV4-1, TRBJ2-7)
CASSPVAGGDEQYF

SEQ ID NO: 218581 - protein, 14 aa, Homo sapiens
  CDR3 for alpha chain variable domain of TCR clone 109291 (TRAV12-2, TRAJ9)
CAVNVEGGGFKTIF

SEQ ID NO: 218582 - protein, 14 aa, Homo sapiens
  CDR3 for beta chain variable domain of TCR clone 109291 (TRBV2, TRBJ2-5)
CASSEVLAQETQYF

SEQ ID NO: 218583 - protein, 13 aa, Homo sapiens
  CDR3 for alpha chain variable domain of TCR clone 109292 (TRAV2, TRAJ15)
CAVASQAGTALIF

SEQ ID NO: 218584 - protein, 10 aa, Homo sapiens
  CDR3 for beta chain variable domain of TCR clone 109292 (TRBV7-3, TRBJ2-2)
CASSETGQGT

SEQ ID NO: 218585 - protein, 12 aa, Homo sapiens
  CDR3 for alpha chain variable domain of TCR clone 109293 (TRAV13-1, TRAJ27)
CAAHTNAGKSTF

SEQ ID NO: 218586 - protein, 14 aa, Homo sapiens
  CDR3 for beta chain variable domain of TCR clone 109293 (TRBV19, TRBJ2-2)
CASSGQGIARELFF

SEQ ID NO: 218587 - protein, 15 aa, Homo sapiens
  CDR3 for alpha chain variable domain of TCR clone 109294 (TRAV13-1, TRAJ36)
CAASIRQTGANNLFF

SEQ ID NO: 218588 - protein, 14 aa, Homo sapiens
  CDR3 for beta chain variable domain of TCR clone 109294 (TRBV6-1, TRBJ1-3)
CASVQGGGGNTMYF

SEQ ID NO: 218589 - protein, 15 aa, Homo sapiens
  CDR3 for alpha chain variable domain of TCR clone 109295 (TRAV2, TRAJ37)
CAVEDGSSNTGKLIF

SEQ ID NO: 218590 - protein, 13 aa, Homo sapiens
  CDR3 for beta chain variable domain of TCR clone 109295 (TRBV20-1, TRBJ1-6)
CSTFREGNSPLHV

SEQ ID NO: 218591 - protein, 14 aa, Homo sapiens
  CDR3 for alpha chain variable domain of TCR clone 109296 (TRAV12-2, TRAJ18)
CAVKRGSTLGRLYF

SEQ ID NO: 218592 - protein, 16 aa, Homo sapiens
  CDR3 for beta chain variable domain of TCR clone 109296 (TRBV27, TRBJ2-3)
CASSFRGQLLRDTQHF

SEQ ID NO: 218593 - protein, 13 aa, Homo sapiens
  CDR3 for alpha chain variable domain of TCR clone 109297 (TRAV23/DV6, TRAJ12)
CAPRVDSSYKLIF

SEQ ID NO: 218594 - protein, 12 aa, Homo sapiens
  CDR3 for beta chain variable domain of TCR clone 109297 (TRBV7-6, TRBJ2-5)
CASSLSQETQCF

SEQ ID NO: 218595 - protein, 14 aa, Homo sapiens
  CDR3 for alpha chain variable domain of TCR clone 109298 (TRAV2, TRAJ37)
CAVDFTSNTGKLIF

SEQ ID NO: 218596 - protein, 16 aa, Homo sapiens
  CDR3 for beta chain variable domain of TCR clone 109298 (TRBV4-2, TRBJ1-1)
CASSQAGFGMNTEAFF

SEQ ID NO: 218597 - protein, 12 aa, Homo sapiens
  CDR3 for alpha chain variable domain of TCR clone 109299 (TRAV4, TRAJ26)
CLVGDYGQNFVF

SEQ ID NO: 218598 - protein, 15 aa, Homo sapiens
  CDR3 for beta chain variable domain of TCR clone 109299 (TRBV10-2, TRBJ2-6)
CASSEQGTGANVLTF

SEQ ID NO: 218599 - protein, 11 aa, Homo sapiens
  CDR3 for alpha chain variable domain of TCR clone 109300 (TRAV1-1, TRAJ23)
CAVRQGGKLIF

SEQ ID NO: 218600 - protein, 16 aa, Homo sapiens
  CDR3 for beta chain variable domain of TCR clone 109300 (TRBV28, TRBJ2-1)
CASSSRVRDSYNEQFF

SEQ ID NO: 218601 - protein, 11 aa, Homo sapiens
  CDR3 for alpha chain variable domain of TCR clone 109301 (TRAV12-3, TRAJ43)
CAMSVSNDMRF

SEQ ID NO: 218602 - protein, 13 aa, Homo sapiens
  CDR3 for beta chain variable domain of TCR clone 109301 (TRBV20-1, TRBJ1-1)
CSAPLGGVTEAFF

SEQ ID NO: 218603 - protein, 10 aa, Homo sapiens
  CDR3 for alpha chain variable domain of TCR clone 109302 (TRAV26-1, TRAJ40)
CIAGTYKYIF

SEQ ID NO: 218604 - protein, 14 aa, Homo sapiens
  CDR3 for beta chain variable domain of TCR clone 109302 (TRBV7-6, TRBJ2-3)
CASSLGTVTDTQYF

SEQ ID NO: 218605 - protein, 15 aa, Homo sapiens
  CDR3 for alpha chain variable domain of TCR clone 109303 (TRAV3, TRAJ45)
CAVRTPWGGADGRTF

SEQ ID NO: 218606 - protein, 16 aa, Homo sapiens
  CDR3 for beta chain variable domain of TCR clone 109303 (TRBV6-1, TRBJ2-2)
CASSFGQGANTGELFF

SEQ ID NO: 218607 - protein, 13 aa, Homo sapiens
  CDR3 for alpha chain variable domain of TCR clone 109304 (TRAV12-2, TRAJ20)
CAVYPSNDYKLTF

SEQ ID NO: 218608 - protein, 15 aa, Homo sapiens
  CDR3 for beta chain variable domain of TCR clone 109304 (TRBV27, TRBJ2-5)
CASSLYPRGGETQYF

SEQ ID NO: 218609 - protein, 11 aa, Homo sapiens
  CDR3 for alpha chain variable domain of TCR clone 109305 (TRAV21, TRAJ34)
CAVTNTDRLIF

SEQ ID NO: 218610 - protein, 16 aa, Homo sapiens
  CDR3 for beta chain variable domain of TCR clone 109305 (TRBV6-1, TRBJ2-5)
CASSETLDRGAETQYF

SEQ ID NO: 218611 - protein, 12 aa, Homo sapiens
  CDR3 for alpha chain variable domain of TCR clone 109306 (TRAV20, TRAJ54)
CAVQEGAQKLVF

SEQ ID NO: 218612 - protein, 15 aa, Homo sapiens
  CDR3 for beta chain variable domain of TCR clone 109306 (TRBV11-3, TRBJ2-3)
CASLKDGREGDTQYF

SEQ ID NO: 218613 - protein, 12 aa, Homo sapiens
  CDR3 for alpha chain variable domain of TCR clone 109307 (TRAV2, TRAJ33)
CAFMDSNYQLIW

SEQ ID NO: 218614 - protein, 16 aa, Homo sapiens
  CDR3 for beta chain variable domain of TCR clone 109307 (TRBV2, TRBJ2-7)
CASSERWTGPSYEQYF

SEQ ID NO: 218615 - protein, 18 aa, Homo sapiens
  CDR3 for alpha chain variable domain of TCR clone 109308 (TRAV12-3, TRAJ52)
CAMSVGGAGGTSYGKLTF

SEQ ID NO: 218616 - protein, 19 aa, Homo sapiens
  CDR3 for beta chain variable domain of TCR clone 109308 (TRBV25-1, TRBJ2-2)
RAILVYRVDRGRKTGELFF

SEQ ID NO: 218617 - protein, 16 aa, Homo sapiens
  CDR3 for alpha chain variable domain of TCR clone 109309 (TRAV17, TRAJ17)
CATALQEEAAGNKLTF

SEQ ID NO: 218618 - protein, 12 aa, Homo sapiens
  CDR3 for beta chain variable domain of TCR clone 109309 (TRBV4-2, TRBJ2-5)
CASGRAQETQYF

SEQ ID NO: 218619 - protein, 18 aa, Homo sapiens
  CDR3 for alpha chain variable domain of TCR clone 109310 (TRAV21, TRAJ52)
CAVRPSPAGGTSYGKLTF

SEQ ID NO: 218620 - protein, 13 aa, Homo sapiens
  CDR3 for beta chain variable domain of TCR clone 109310 (TRBV19, TRBJ2-7)
CASSPRQSYEQYF

SEQ ID NO: 218621 - protein, 12 aa, Homo sapiens
  CDR3 for alpha chain variable domain of TCR clone 109311 (TRAV16, TRAJ27)
CALNHQCRQINL

SEQ ID NO: 218622 - protein, 13 aa, Homo sapiens
  CDR3 for beta chain variable domain of TCR clone 109311 (TRBV4-2, TRBJ1-1)
CASSQAGNIEAFF

SEQ ID NO: 218623 - protein, 12 aa, Homo sapiens
  CDR3 for alpha chain variable domain of TCR clone 109312 (TRAV12-2, TRAJ21)
CAPSDNFNKFYF

SEQ ID NO: 218624 - protein, 13 aa, Homo sapiens
  CDR3 for beta chain variable domain of TCR clone 109312 (TRBV4-2, TRBJ2-3)
CASSQGNTDTQYF

SEQ ID NO: 218625 - protein, 14 aa, Homo sapiens
  CDR3 for alpha chain variable domain of TCR clone 109313 (TRAV12-2, TRAJ17)
CAALFKAAGNKLTF

SEQ ID NO: 218626 - protein, 16 aa, Homo sapiens
  CDR3 for beta chain variable domain of TCR clone 109313 (TRBV20-1, TRBJ2-2)
CSASANGIPGAGELFF

SEQ ID NO: 218627 - protein, 14 aa, Homo sapiens
  CDR3 for alpha chain variable domain of TCR clone 109314 (TRAV20, TRAJ10)
CAVRVEGGGSKLTF

SEQ ID NO: 218628 - protein, 13 aa, Homo sapiens
  CDR3 for beta chain variable domain of TCR clone 109314 (TRBV13, TRBJ2-2)
CASSPGLTGELFF

SEQ ID NO: 218629 - protein, 14 aa, Homo sapiens
  CDR3 for alpha chain variable domain of TCR clone 109315 (TRAV16, TRAJ33)
CAVSAMDSNYQLIW

SEQ ID NO: 218630 - protein, 12 aa, Homo sapiens
  CDR3 for beta chain variable domain of TCR clone 109315 (TRBV5-1, TRBJ1-2)
CASSQDTYGYTF

SEQ ID NO: 218631 - protein, 13 aa, Homo sapiens
  CDR3 for alpha chain variable domain of TCR clone 109316 (TRAV16, TRAJ9)
CALLNTGGFKTIF

SEQ ID NO: 218632 - protein, 13 aa, Homo sapiens
  CDR3 for beta chain variable domain of TCR clone 109316 (TRBV4-2, TRBJ1-1)
CASSQAGNTEAFF

SEQ ID NO: 218633 - protein, 13 aa, Homo sapiens
  CDR3 for alpha chain variable domain of TCR clone 109317 (TRAV17, TRAJ26)
CATVDNYGQNFVF

SEQ ID NO: 218634 - protein, 16 aa, Homo sapiens
  CDR3 for beta chain variable domain of TCR clone 109317 (TRBV2, TRBJ2-1)
CASSVGGSLLYNEQFF

SEQ ID NO: 218635 - protein, 11 aa, Homo sapiens
  CDR3 for alpha chain variable domain of TCR clone 109318 (TRAV17, TRAJ36)
CASTGANNLFF

SEQ ID NO: 218636 - protein, 12 aa, Homo sapiens
  CDR3 for beta chain variable domain of TCR clone 109318 (TRBV29-1, TRBJ2-3)
CSVTGGADTQYF

SEQ ID NO: 218637 - protein, 16 aa, Homo sapiens
  CDR3 for alpha chain variable domain of TCR clone 109319 (TRAV16, TRAJ52)
CALSAAGGTSYGKLTF

SEQ ID NO: 218638 - protein, 17 aa, Homo sapiens
  CDR3 for beta chain variable domain of TCR clone 109319 (TRBV13, TRBJ2-3)
CASSLSRVAGGRNTQYF

SEQ ID NO: 218639 - protein, 12 aa, Homo sapiens
  CDR3 for alpha chain variable domain of TCR clone 109320 (TRAV16, TRAJ26)
CALRSYGQNFVF

SEQ ID NO: 218640 - protein, 14 aa, Homo sapiens
  CDR3 for beta chain variable domain of TCR clone 109320 (TRBV10-3, TRBJ2-1)
CAISSDIAYNEQFS

SEQ ID NO: 218641 - protein, 14 aa, Homo sapiens
  CDR3 for alpha chain variable domain of TCR clone 109321 (TRAV2, TRAJ37)
CAVDFTSNTGKLIF

SEQ ID NO: 218642 - protein, 15 aa, Homo sapiens
  CDR3 for beta chain variable domain of TCR clone 109321 (TRBV7-9, TRBJ2-2)
CASGPLDTFPGELFF

SEQ ID NO: 218643 - protein, 12 aa, Homo sapiens
  CDR3 for alpha chain variable domain of TCR clone 109322 (TRAV12-3, TRAJ40)
CAMSSGTYKYIF

SEQ ID NO: 218644 - protein, 14 aa, Homo sapiens
  CDR3 for beta chain variable domain of TCR clone 109322 (TRBV12-5, TRBJ2-5)
CASGSRTHQETQYF

SEQ ID NO: 218645 - protein, 14 aa, Homo sapiens
  CDR3 for alpha chain variable domain of TCR clone 109323 (TRAV20, TRAJ53)
CAVQAGSSNYKLTF

SEQ ID NO: 218646 - protein, 17 aa, Homo sapiens
  CDR3 for beta chain variable domain of TCR clone 109323 (TRBV3-1, TRBJ2-2)
CASSQFRDKVDTGELFF

SEQ ID NO: 218647 - protein, 15 aa, Homo sapiens
  CDR3 for alpha chain variable domain of TCR clone 109324 (TRAV1-2, TRAJ38)
CAVSENAGNNRKLIW

SEQ ID NO: 218648 - protein, 16 aa, Homo sapiens
  CDR3 for beta chain variable domain of TCR clone 109324 (TRBV4-1, TRBJ2-7)
CASSLAAGQATYEQYF

SEQ ID NO: 218649 - protein, 11 aa, Homo sapiens
  CDR3 for alpha chain variable domain of TCR clone 109325 (TRAV12-3, TRAJ43)
CAMSVSNDMRF

SEQ ID NO: 218650 - protein, 13 aa, Homo sapiens
  CDR3 for beta chain variable domain of TCR clone 109325 (TRBV27, TRBJ2-1)
CASRTLGVGEQFF

SEQ ID NO: 218651 - protein, 14 aa, Homo sapiens
  CDR3 for alpha chain variable domain of TCR clone 109326 (TRAV13-1, TRAJ44)
CAAKATATASKLTF

SEQ ID NO: 218652 - protein, 17 aa, Homo sapiens
  CDR3 for beta chain variable domain of TCR clone 109326 (TRBV7-3, TRBJ2-3)
CASSLMKRMRGADTQYF

SEQ ID NO: 218653 - protein, 17 aa, Homo sapiens
  CDR3 for alpha chain variable domain of TCR clone 109327 (TRAV38-1, TRAJ28)
CAFMRPTSGAGSYQLTF

SEQ ID NO: 218654 - protein, 14 aa, Homo sapiens
  CDR3 for beta chain variable domain of TCR clone 109327 (TRBV18, TRBJ2-7)
CASSPRGGAYEQYF

SEQ ID NO: 218655 - protein, 15 aa, Homo sapiens
  CDR3 for alpha chain variable domain of TCR clone 109328 (TRAV12-2, TRAJ53)
CAVNGGGGSNYKMTF

SEQ ID NO: 218656 - protein, 14 aa, Homo sapiens
  CDR3 for beta chain variable domain of TCR clone 109328 (TRBV18, TRBJ2-7)
CASSPRGGAYEQYF

SEQ ID NO: 218657 - protein, 12 aa, Homo sapiens
  CDR3 for alpha chain variable domain of TCR clone 109329 (TRAV16, TRAJ10)
CYRTGGGNKLTF

SEQ ID NO: 218658 - protein, 12 aa, Homo sapiens
  CDR3 for beta chain variable domain of TCR clone 109329 (TRBV11-3, TRBJ1-1)
CASSHRQGEAFF

SEQ ID NO: 218659 - protein, 16 aa, Homo sapiens
  CDR3 for alpha chain variable domain of TCR clone 109330 (TRAV12-2, TRAJ40)
CAVIRGGTSGTYKYIF

SEQ ID NO: 218660 - protein, 14 aa, Homo sapiens
  CDR3 for beta chain variable domain of TCR clone 109330 (TRBV20-1, TRBJ2-5)
CSARDGRAGETQYL

SEQ ID NO: 218661 - protein, 12 aa, Homo sapiens
  CDR3 for alpha chain variable domain of TCR clone 109331 (TRAV2, TRAJ33)
CAFMDSNYQLIW

SEQ ID NO: 218662 - protein, 16 aa, Homo sapiens
  CDR3 for beta chain variable domain of TCR clone 109331 (TRBV2, TRBJ2-7)
CASSEPCTGPSYEQYF

SEQ ID NO: 218663 - protein, 12 aa, Homo sapiens
  CDR3 for alpha chain variable domain of TCR clone 109332 (TRAV36/DV7, TRAJ37)
CACYGNTGRLIF

SEQ ID NO: 218664 - protein, 14 aa, Homo sapiens
  CDR3 for beta chain variable domain of TCR clone 109332 (TRBV6-3, TRBJ1-4)
CASSGQNLNEKLFF

SEQ ID NO: 218665 - protein, 15 aa, Homo sapiens
  CDR3 for alpha chain variable domain of TCR clone 109333 (TRAV26-1, TRAJ17)
CIVRVVKAAGNKPTF

SEQ ID NO: 218666 - protein, 16 aa, Homo sapiens
  CDR3 for beta chain variable domain of TCR clone 109333 (TRBV7-9, TRBJ2-1)
CASSLVSGPSYNEQFF

SEQ ID NO: 218667 - protein, 12 aa, Homo sapiens
  CDR3 for alpha chain variable domain of TCR clone 109334 (TRAV35, TRAJ39)
LAPNNAGNMLTF

SEQ ID NO: 218668 - protein, 16 aa, Homo sapiens
  CDR3 for beta chain variable domain of TCR clone 109334 (TRBV2, TRBJ2-3)
CASSTSVEGVTDTHYF

SEQ ID NO: 218669 - protein, 13 aa, Homo sapiens
  CDR3 for alpha chain variable domain of TCR clone 109335 (TRAV8-3, TRAJ28)
CAVGAVGSYQLTF

SEQ ID NO: 218670 - protein, 14 aa, Homo sapiens
  CDR3 for beta chain variable domain of TCR clone 109335 (TRBV7-2, TRBJ2-7)
CASRSQGAAYKQYF

SEQ ID NO: 218671 - protein, 14 aa, Homo sapiens
  CDR3 for alpha chain variable domain of TCR clone 109336 (TRAV12-2, TRAJ40)
CAVKIPSGTYTYIF

SEQ ID NO: 218672 - protein, 12 aa, Homo sapiens
  CDR3 for beta chain variable domain of TCR clone 109336 (TRBV11-2, TRBJ2-2)
CASSLGGGELFF

SEQ ID NO: 218673 - protein, 14 aa, Homo sapiens
  CDR3 for alpha chain variable domain of TCR clone 109337 (TRAV29/DV5, TRAJ5)
CAASGYTGRRALTF

SEQ ID NO: 218674 - protein, 12 aa, Homo sapiens
  CDR3 for beta chain variable domain of TCR clone 109337 (TRBV29-1, TRBJ2-3)
CSVTGGADTQYF

SEQ ID NO: 218675 - protein, 12 aa, Homo sapiens
  CDR3 for alpha chain variable domain of TCR clone 109338 (TRAV13-1, TRAJ20)
CAASMGDYKLSF

SEQ ID NO: 218676 - protein, 15 aa, Homo sapiens
  CDR3 for beta chain variable domain of TCR clone 109338 (TRBV20-1, TRBJ2-7)
CSARDRVSGMDEQYF

SEQ ID NO: 218677 - protein, 16 aa, Homo sapiens
  CDR3 for alpha chain variable domain of TCR clone 109339 (TRAV14/DV4, TRAJ53)
CAMREGGGGSNYKLTF

SEQ ID NO: 218678 - protein, 17 aa, Homo sapiens
  CDR3 for beta chain variable domain of TCR clone 109339 (TRBV28, TRBJ2-5)
CASSRQGGLAGAETQYF

SEQ ID NO: 218679 - protein, 15 aa, Homo sapiens
  CDR3 for alpha chain variable domain of TCR clone 109340 (TRAV26-1, TRAJ44)
CIVRIGTGPASKLTF

SEQ ID NO: 218680 - protein, 15 aa, Homo sapiens
  CDR3 for beta chain variable domain of TCR clone 109340 (TRBV7-6, TRBJ2-1)
CASSSLAGEGNEQFF

SEQ ID NO: 218681 - protein, 16 aa, Homo sapiens
  CDR3 for alpha chain variable domain of TCR clone 109341 (TRAV3, TRAJ10)
CAVRDMRAGGGNKLNF

SEQ ID NO: 218682 - protein, 16 aa, Homo sapiens
  CDR3 for beta chain variable domain of TCR clone 109341 (TRBV20-1, TRBJ1-4)
CSAPGQGLLTNEKLFF

SEQ ID NO: 218683 - protein, 13 aa, Homo sapiens
  CDR3 for alpha chain variable domain of TCR clone 109342 (TRAV21, TRAJ27)
CAARPGNAGKSTF

SEQ ID NO: 218684 - protein, 14 aa, Homo sapiens
  CDR3 for beta chain variable domain of TCR clone 109342 (TRBV7-3, TRBJ2-1)
CASSLAGGTNEQFF

SEQ ID NO: 218685 - protein, 18 aa, Homo sapiens
  CDR3 for alpha chain variable domain of TCR clone 109343 (TRAV13-1, TRAJ52)
CAASKRSAGGTSYGKLTF

SEQ ID NO: 218686 - protein, 13 aa, Homo sapiens
  CDR3 for beta chain variable domain of TCR clone 109343 (TRBV12-4, TRBJ1-2)
CASSLRKGKGYTF

SEQ ID NO: 218687 - protein, 13 aa, Homo sapiens
  CDR3 for alpha chain variable domain of TCR clone 109344 (TRAV8-3, TRAJ43)
CAVVPYNNNDMRF

SEQ ID NO: 218688 - protein, 17 aa, Homo sapiens
  CDR3 for beta chain variable domain of TCR clone 109344 (TRBV7-7, TRBJ1-1)
CASIGDRPNLGVTEALF

SEQ ID NO: 218689 - protein, 16 aa, Homo sapiens
  CDR3 for alpha chain variable domain of TCR clone 109345 (TRAV30, TRAJ24)
CGAEIVDADSWGKSQF

SEQ ID NO: 218690 - protein, 14 aa, Homo sapiens
  CDR3 for beta chain variable domain of TCR clone 109345 (TRBV12-5, TRBJ2-5)
CASGSRTHQETQYF

SEQ ID NO: 218691 - protein, 18 aa, Homo sapiens
  CDR3 for alpha chain variable domain of TCR clone 109346 (TRAV8-4, TRAJ52)
CAVTRANAGGTSCGKLTF

SEQ ID NO: 218692 - protein, 20 aa, Homo sapiens
  CDR3 for beta chain variable domain of TCR clone 109346 (TRBV19, TRBJ2-1)
CASSISRTVTSTRLNNEQFF

SEQ ID NO: 218693 - protein, 15 aa, Homo sapiens
  CDR3 for alpha chain variable domain of TCR clone 109347 (TRAV17, TRAJ56)
CATDANTGANSKLTV

SEQ ID NO: 218694 - protein, 14 aa, Homo sapiens
  CDR3 for beta chain variable domain of TCR clone 109347 (TRBV19, TRBJ1-5)
CASSLGTGGQPQHF

SEQ ID NO: 218695 - protein, 15 aa, Homo sapiens
  CDR3 for alpha chain variable domain of TCR clone 109348 (TRAV8-3, TRAJ45)
CASSYSGGGADGLTF

SEQ ID NO: 218696 - protein, 17 aa, Homo sapiens
  CDR3 for beta chain variable domain of TCR clone 109348 (TRBV10-3, TRBJ2-7)
CASKLGELRAVLRAGHQ

SEQ ID NO: 218697 - protein, 19 aa, Homo sapiens
  CDR3 for alpha chain variable domain of TCR clone 109349 (TRAV1-2, TRAJ26)
CLLPLCCERPDNYGQNFVF

SEQ ID NO: 218698 - protein, 13 aa, Homo sapiens
  CDR3 for beta chain variable domain of TCR clone 109349 (TRBV12-4, TRBJ1-2)
CASSLRQGKGYTF

SEQ ID NO: 218699 - protein, 15 aa, Homo sapiens
  CDR3 for alpha chain variable domain of TCR clone 109350 (TRAV8-3, TRAJ45)
CASSYSGGGADGLTF

SEQ ID NO: 218700 - protein, 12 aa, Homo sapiens
  CDR3 for beta chain variable domain of TCR clone 109350 (TRBV6-3, TRBJ2-7)
CASSLTPYEQYF

SEQ ID NO: 218701 - protein, 13 aa, Homo sapiens
  CDR3 for alpha chain variable domain of TCR clone 109351 (TRAV12-1, TRAJ11)
CVVTRGGYSTLTF

SEQ ID NO: 218702 - protein, 13 aa, Homo sapiens
  CDR3 for beta chain variable domain of TCR clone 109351 (TRBV20-1, TRBJ1-2)
CNARDQGAYGYTF

SEQ ID NO: 218703 - protein, 15 aa, Homo sapiens
  CDR3 for alpha chain variable domain of TCR clone 109352 (TRAV12-1, TRAJ6)
CVVNCPLRRKLHTYI

SEQ ID NO: 218704 - protein, 12 aa, Homo sapiens
  CDR3 for beta chain variable domain of TCR clone 109352 (TRBV29-1, TRBJ2-3)
CSVTGGADTQYF

SEQ ID NO: 218705 - protein, 15 aa, Homo sapiens
  CDR3 for alpha chain variable domain of TCR clone 109353 (TRAV35, TRAJ50)
CAGQLRKNSYDKVIF

SEQ ID NO: 218706 - protein, 12 aa, Homo sapiens
  CDR3 for beta chain variable domain of TCR clone 109353 (TRBV5-1, TRBJ2-5)
CASSLGLETQYF

SEQ ID NO: 218707 - protein, 11 aa, Homo sapiens
  CDR3 for alpha chain variable domain of TCR clone 109354 (TRAV1-2, TRAJ40)
CAVPGTYKYIF

SEQ ID NO: 218708 - protein, 14 aa, Homo sapiens
  CDR3 for beta chain variable domain of TCR clone 109354 (TRBV12-4, TRBJ1-1)
CASSLGTGGTEAFF

SEQ ID NO: 218709 - protein, 14 aa, Homo sapiens
  CDR3 for alpha chain variable domain of TCR clone 109355 (TRAV26-1, TRAJ45)
CIEVTGGGADGLTF

SEQ ID NO: 218710 - protein, 19 aa, Homo sapiens
  CDR3 for beta chain variable domain of TCR clone 109355 (TRBV19, TRBJ2-2)
CASTRPGLAGGRGTGELFF

SEQ ID NO: 218711 - protein, 16 aa, Homo sapiens
  CDR3 for alpha chain variable domain of TCR clone 109356 (TRAV3, TRAJ37)
CAVRPHGSGNTGQLIF

SEQ ID NO: 218712 - protein, 17 aa, Homo sapiens
  CDR3 for beta chain variable domain of TCR clone 109356 (TRBV20-1, TRBJ2-1)
CSASSSGLAGSYNEQFF

SEQ ID NO: 218713 - protein, 11 aa, Homo sapiens
  CDR3 for alpha chain variable domain of TCR clone 109357 (TRAV22, TRAJ20)
CAPLHDYKLSF

SEQ ID NO: 218714 - protein, 12 aa, Homo sapiens
  CDR3 for beta chain variable domain of TCR clone 109357 (TRBV11-2, TRBJ2-2)
CASSLGGGELFF

SEQ ID NO: 218715 - protein, 14 aa, Homo sapiens
  CDR3 for alpha chain variable domain of TCR clone 109358 (TRAV26-1, TRAJ39)
CIVRGSRAGNMLTF

SEQ ID NO: 218716 - protein, 13 aa, Homo sapiens
  CDR3 for beta chain variable domain of TCR clone 109358 (TRBV5-5, TRBJ1-2)
CASSFWRGEDYTF

SEQ ID NO: 218717 - protein, 12 aa, Homo sapiens
  CDR3 for alpha chain variable domain of TCR clone 109359 (TRAV12-3, TRAJ17)
CAMTLTGAKLTF

SEQ ID NO: 218718 - protein, 15 aa, Homo sapiens
  CDR3 for beta chain variable domain of TCR clone 109359 (TRBV20-1, TRBJ2-7)
CSARDRVSGMDEQYF

SEQ ID NO: 218719 - protein, 11 aa, Homo sapiens
  CDR3 for alpha chain variable domain of TCR clone 109360 (TRAV2, TRAJ13)
FASGGYQKVTF

SEQ ID NO: 218720 - protein, 13 aa, Homo sapiens
  CDR3 for beta chain variable domain of TCR clone 109360 (TRBV7-2, TRBJ2-3)
CASSFTSGDTQYF

SEQ ID NO: 218721 - protein, 15 aa, Homo sapiens
  CDR3 for alpha chain variable domain of TCR clone 109361 (TRAV12-1, TRAJ44)
CVADLPTGTASKLTF

SEQ ID NO: 218722 - protein, 14 aa, Homo sapiens
  CDR3 for beta chain variable domain of TCR clone 109361 (TRBV18, TRBJ2-7)
CASSPRGGAYEQYF

SEQ ID NO: 218723 - protein, 14 aa, Homo sapiens
  CDR3 for alpha chain variable domain of TCR clone 109362 (TRAV38-1, TRAJ54)
CAFMSPSGAQKLVF

SEQ ID NO: 218724 - protein, 16 aa, Homo sapiens
  CDR3 for beta chain variable domain of TCR clone 109362 (TRBV28, TRBJ2-1)
CASSLGGSGSYNEQSF

SEQ ID NO: 218725 - protein, 11 aa, Homo sapiens
  CDR3 for alpha chain variable domain of TCR clone 109363 (TRAV12-1, TRAJ26)
CVVAYGQNFVF

SEQ ID NO: 218726 - protein, 15 aa, Homo sapiens
  CDR3 for beta chain variable domain of TCR clone 109363 (TRBV12-4, TRBJ2-5)
CDSSGTGQAQETQYF

SEQ ID NO: 218727 - protein, 17 aa, Homo sapiens
  CDR3 for alpha chain variable domain of TCR clone 109364 (TRAV26-1, TRAJ47)
CIVPSLLYMVYGNKLVF

SEQ ID NO: 218728 - protein, 14 aa, Homo sapiens
  CDR3 for beta chain variable domain of TCR clone 109364 (TRBV7-3, TRBJ1-5)
RASSFSGCNQPQHF

SEQ ID NO: 218729 - protein, 11 aa, Homo sapiens
  CDR3 for alpha chain variable domain of TCR clone 109365 (TRAV12-1, TRAJ15)
CVGNAGTALIF

SEQ ID NO: 218730 - protein, 16 aa, Homo sapiens
  CDR3 for beta chain variable domain of TCR clone 109365 (TRBV28, TRBJ2-1)
CASSSRVRDSYNEQFF

SEQ ID NO: 218731 - protein, 14 aa, Homo sapiens
  CDR3 for alpha chain variable domain of TCR clone 109366 (TRAV12-2, TRAJ53)
CAAKGGGSNYKLTF

SEQ ID NO: 218732 - protein, 12 aa, Homo sapiens
  CDR3 for beta chain variable domain of TCR clone 109366 (TRBV12-4, TRBJ2-1)
CASRQTENEQFF

SEQ ID NO: 218733 - protein, 11 aa, Homo sapiens
  CDR3 for alpha chain variable domain of TCR clone 109367 (TRAV1-1, TRAJ23)
CAVRQGGKLIF

SEQ ID NO: 218734 - protein, 15 aa, Homo sapiens
  CDR3 for beta chain variable domain of TCR clone 109367 (TRBV29-1, TRBJ2-1)
CSGRDRKSSYNEQFF

SEQ ID NO: 218735 - protein, 12 aa, Homo sapiens
  CDR3 for alpha chain variable domain of TCR clone 109368 (TRAV16, TRAJ27)
CALNHQCRQINL

SEQ ID NO: 218736 - protein, 14 aa, Homo sapiens
  CDR3 for beta chain variable domain of TCR clone 109368 (TRBV11-3, TRBJ1-5)
CASSLDRGRQPQHF

SEQ ID NO: 218737 - protein, 13 aa, Homo sapiens
  CDR3 for alpha chain variable domain of TCR clone 109369 (TRAV25, TRAJ26)
CAGMDNYGQNFDF

SEQ ID NO: 218738 - protein, 15 aa, Homo sapiens
  CDR3 for beta chain variable domain of TCR clone 109369 (TRBV10-3, TRBJ2-1)
CAIRNGTSGHNEQFF

SEQ ID NO: 218739 - protein, 14 aa, Homo sapiens
  CDR3 for alpha chain variable domain of TCR clone 109370 (TRAV13-2, TRAJ17)
CAENGKAAGNKLTF

SEQ ID NO: 218740 - protein, 14 aa, Homo sapiens
  CDR3 for beta chain variable domain of TCR clone 109370 (TRBV11-2, TRBJ1-2)
CASSLGTANYGYTF

SEQ ID NO: 218741 - protein, 11 aa, Homo sapiens
  CDR3 for alpha chain variable domain of TCR clone 109371 (TRAV12-1, TRAJ30)
CVLNGQDKIIF

SEQ ID NO: 218742 - protein, 12 aa, Homo sapiens
  CDR3 for beta chain variable domain of TCR clone 109371 (TRBV27, TRBJ2-2)
CASKLFTGELFF

SEQ ID NO: 218743 - protein, 13 aa, Homo sapiens
  CDR3 for alpha chain variable domain of TCR clone 109372 (TRAV1-2, TRAJ9)
CAVLNTGGFKTIF

SEQ ID NO: 218744 - protein, 14 aa, Homo sapiens
  CDR3 for beta chain variable domain of TCR clone 109372 (TRBV20-1, TRBJ2-3)
CSARGGTSTDTQYF

SEQ ID NO: 218745 - protein, 14 aa, Homo sapiens
  CDR3 for alpha chain variable domain of TCR clone 109373 (TRAV38-1, TRAJ45)
SAYYSGGGADGLTF

SEQ ID NO: 218746 - protein, 20 aa, Homo sapiens
  CDR3 for beta chain variable domain of TCR clone 109373 (TRBV28, TRBJ2-1)
CASTPIGRSPGLAGGNEQFF

SEQ ID NO: 218747 - protein, 18 aa, Homo sapiens
  CDR3 for alpha chain variable domain of TCR clone 109374 (TRAV26-2, TRAJ54)
CILRDVEVGIQGAQKLVF

SEQ ID NO: 218748 - protein, 12 aa, Homo sapiens
  CDR3 for beta chain variable domain of TCR clone 109374 (TRBV7-2, TRBJ2-5)
CASSLYQETQYF

SEQ ID NO: 218749 - protein, 11 aa, Homo sapiens
  CDR3 for alpha chain variable domain of TCR clone 109375 (TRAV12-2, TRAJ39)
CAVNNMPTFGG

SEQ ID NO: 218750 - protein, 16 aa, Homo sapiens
  CDR3 for beta chain variable domain of TCR clone 109375 (TRBV5-3, TRBJ2-2)
CARSFGTGTNTGELFF

SEQ ID NO: 218751 - protein, 15 aa, Homo sapiens
  CDR3 for alpha chain variable domain of TCR clone 109376 (TRAV2, TRAJ22)
CAVPSRGGSARQRTF

SEQ ID NO: 218752 - protein, 11 aa, Homo sapiens
  CDR3 for beta chain variable domain of TCR clone 109376 (TRBV27, TRBJ2-3)
CASSLGDTQYF

SEQ ID NO: 218753 - protein, 11 aa, Homo sapiens
  CDR3 for alpha chain variable domain of TCR clone 109377 (TRAV12-2, TRAJ43)
CAAYNNNDMRF

SEQ ID NO: 218754 - protein, 14 aa, Homo sapiens
  CDR3 for beta chain variable domain of TCR clone 109377 (TRBV7-8, TRBJ1-2)
CASSVGTAIYGYTF

SEQ ID NO: 218755 - protein, 13 aa, Homo sapiens
  CDR3 for alpha chain variable domain of TCR clone 109378 (TRAV21, TRAJ45)
CAVMGGGADGLTF

SEQ ID NO: 218756 - protein, 14 aa, Homo sapiens
  CDR3 for beta chain variable domain of TCR clone 109378 (TRBV7-2, TRBJ2-7)
CASSPKTSFYEQYF

SEQ ID NO: 218757 - protein, 14 aa, Homo sapiens
  CDR3 for alpha chain variable domain of TCR clone 109379 (TRAV12-2, TRAJ24)
CAVTPADSWGKLQF

SEQ ID NO: 218758 - protein, 16 aa, Homo sapiens
  CDR3 for beta chain variable domain of TCR clone 109379 (TRBV11-2, TRBJ2-7)
CASSPTTGGVSYEQYF

SEQ ID NO: 218759 - protein, 12 aa, Homo sapiens
  CDR3 for alpha chain variable domain of TCR clone 109380 (TRAV25, TRAJ11)
CAGASGYITLTF

SEQ ID NO: 218760 - protein, 14 aa, Homo sapiens
  CDR3 for beta chain variable domain of TCR clone 109380 (TRBV5-8, TRBJ2-3)
CASSLGQGTDTQYF

SEQ ID NO: 218761 - protein, 12 aa, Homo sapiens
  CDR3 for alpha chain variable domain of TCR clone 109381 (TRAV1-2, TRAJ33)
CAAFDSNYQLIW

SEQ ID NO: 218762 - protein, 16 aa, Homo sapiens
  CDR3 for beta chain variable domain of TCR clone 109381 (TRBV6-4, TRBJ1-2)
CASSEAVGDPNYGYTF

SEQ ID NO: 218763 - protein, 23 aa, Homo sapiens
  CDR3 for alpha chain variable domain of TCR clone 109382 (TRAV25, TRAJ39)
TATQTTDVGTYFGENNAGNMLTF

SEQ ID NO: 218764 - protein, 13 aa, Homo sapiens
  CDR3 for beta chain variable domain of TCR clone 109382 (TRBV5-5, TRBJ1-2)
CASSFWRGEDYTF

SEQ ID NO: 218765 - protein, 16 aa, Homo sapiens
  CDR3 for alpha chain variable domain of TCR clone 109383 (TRAV12-2, TRAJ37)
CAVKEKGPSNTGKLIF

SEQ ID NO: 218766 - protein, 12 aa, Homo sapiens
  CDR3 for beta chain variable domain of TCR clone 109383 (TRBV10-1, TRBJ1-5)
CASSDSNQPQHF

SEQ ID NO: 218767 - protein, 13 aa, Homo sapiens
  CDR3 for alpha chain variable domain of TCR clone 109384 (TRAV12-2, TRAJ20)
CAGYPSNDYKLSF

SEQ ID NO: 218768 - protein, 15 aa, Homo sapiens
  CDR3 for beta chain variable domain of TCR clone 109384 (TRBV27, TRBJ2-5)
CASSLYPRGGETQYF

SEQ ID NO: 218769 - protein, 11 aa, Homo sapiens
  CDR3 for alpha chain variable domain of TCR clone 109385 (TRAV12-2, TRAJ49)
CAVNTGNQFYF

SEQ ID NO: 218770 - protein, 17 aa, Homo sapiens
  CDR3 for beta chain variable domain of TCR clone 109385 (TRBV7-8, TRBJ2-6)
CASSAGTGGAGANVLTF

SEQ ID NO: 218771 - protein, 13 aa, Homo sapiens
  CDR3 for alpha chain variable domain of TCR clone 109386 (TRAV1-1, TRAJ23)
CAVVANQGGKLIF

SEQ ID NO: 218772 - protein, 16 aa, Homo sapiens
  CDR3 for beta chain variable domain of TCR clone 109386 (TRBV7-3, TRBJ2-2)
CASSLKRGTLSGELFF

SEQ ID NO: 218773 - protein, 13 aa, Homo sapiens
  CDR3 for alpha chain variable domain of TCR clone 109387 (TRAV8-3, TRAJ44)
CAVVPGTASKLTF

SEQ ID NO: 218774 - protein, 15 aa, Homo sapiens
  CDR3 for beta chain variable domain of TCR clone 109387 (TRBV6-1, TRBJ2-3)
CASSERGGITDTQYF

SEQ ID NO: 218775 - protein, 13 aa, Homo sapiens
  CDR3 for alpha chain variable domain of TCR clone 109388 (TRAV13-1, TRAJ20)
CAARVSNDCKLSF

SEQ ID NO: 218776 - protein, 12 aa, Homo sapiens
  CDR3 for beta chain variable domain of TCR clone 109388 (TRBV20-1, TRBJ2-1)
CSARLGTDEQFF

SEQ ID NO: 218777 - protein, 14 aa, Homo sapiens
  CDR3 for alpha chain variable domain of TCR clone 109389 (TRAV3, TRAJ8)
CAVSLNTGFQKLVF

SEQ ID NO: 218778 - protein, 17 aa, Homo sapiens
  CDR3 for beta chain variable domain of TCR clone 109389 (TRBV15, TRBJ1-2)
CATSGREIDVVNYGYTF

SEQ ID NO: 218779 - protein, 14 aa, Homo sapiens
  CDR3 for alpha chain variable domain of TCR clone 109390 (TRAV26-1, TRAJ57)
CIVITQGGSEKLVF

SEQ ID NO: 218780 - protein, 16 aa, Homo sapiens
  CDR3 for beta chain variable domain of TCR clone 109390 (TRBV7-6, TRBJ2-1)
CASSLLTSGSINEQFF

SEQ ID NO: 218781 - protein, 17 aa, Homo sapiens
  CDR3 for alpha chain variable domain of TCR clone 109391 (TRAV8-3, TRAJ34)
CAIPGKLIFGTGTRLQV

SEQ ID NO: 218782 - protein, 13 aa, Homo sapiens
  CDR3 for beta chain variable domain of TCR clone 109391 (TRBV10-3, TRBJ2-7)
CASKLAVNYEQYF

SEQ ID NO: 218783 - protein, 17 aa, Homo sapiens
  CDR3 for alpha chain variable domain of TCR clone 109392 (TRAV3, TRAJ6)
CAMRDGPRAGGSYIPTF

SEQ ID NO: 218784 - protein, 13 aa, Homo sapiens
  CDR3 for beta chain variable domain of TCR clone 109392 (TRBV28, TRBJ2-7)
CASSPSGTYEQYF

SEQ ID NO: 218785 - protein, 11 aa, Homo sapiens
  CDR3 for alpha chain variable domain of TCR clone 109393 (TRAV1-2, TRAJ20)
CAVANDYKLSF

SEQ ID NO: 218786 - protein, 18 aa, Homo sapiens
  CDR3 for beta chain variable domain of TCR clone 109393 (TRBV20-1, TRBJ2-6)
CSAETTPTHGSGANVLNF

SEQ ID NO: 218787 - protein, 15 aa, Homo sapiens
  CDR3 for alpha chain variable domain of TCR clone 109394 (TRAV27, TRAJ38)
CAARRNAGNNRKLSL

SEQ ID NO: 218788 - protein, 13 aa, Homo sapiens
  CDR3 for beta chain variable domain of TCR clone 109394 (TRBV12-5, TRBJ2-3)
CASGDRQSDTQYF

SEQ ID NO: 218789 - protein, 16 aa, Homo sapiens
  CDR3 for alpha chain variable domain of TCR clone 109395 (TRAV30, TRAJ24)
CGTEIVDADSWGKFQF

SEQ ID NO: 218790 - protein, 13 aa, Homo sapiens
  CDR3 for beta chain variable domain of TCR clone 109395 (TRBV11-2, TRBJ2-1)
CASSLGLAGGRFF

SEQ ID NO: 218791 - protein, 14 aa, Homo sapiens
  CDR3 for alpha chain variable domain of TCR clone 109396 (TRAV35, TRAJ13)
CAGRSPGGYQKVTF

SEQ ID NO: 218792 - protein, 14 aa, Homo sapiens
  CDR3 for beta chain variable domain of TCR clone 109396 (TRBV19, TRBJ2-2)
CASSTVGLSGELFF

SEQ ID NO: 218793 - protein, 16 aa, Homo sapiens
  CDR3 for alpha chain variable domain of TCR clone 109397 (TRAV3, TRAJ10)
CAVRDMRAGGGNKLTF

SEQ ID NO: 218794 - protein, 17 aa, Homo sapiens
  CDR3 for beta chain variable domain of TCR clone 109397 (TRBV28, TRBJ2-5)
CASSKPEGDALQETQYF

SEQ ID NO: 218795 - protein, 14 aa, Homo sapiens
  CDR3 for alpha chain variable domain of TCR clone 109398 (TRAV12-2, TRAJ17)
CAVNIKAAGNKLTF

SEQ ID NO: 218796 - protein, 16 aa, Homo sapiens
  CDR3 for beta chain variable domain of TCR clone 109398 (TRBV20-1, TRBJ2-6)
CIASSQGYDGANVLTF

SEQ ID NO: 218797 - protein, 17 aa, Homo sapiens
  CDR3 for alpha chain variable domain of TCR clone 109399 (TRAV14/DV4, TRAJ28)
CAMREVSSGAGRYQLTF

SEQ ID NO: 218798 - protein, 15 aa, Homo sapiens
  CDR3 for beta chain variable domain of TCR clone 109399 (TRBV11-2, TRBJ1-6)
CASTLRETGNSPLHF

SEQ ID NO: 218799 - protein, 11 aa, Homo sapiens
  CDR3 for alpha chain variable domain of TCR clone 109400 (TRAV1-1, TRAJ23)
CAVRQGGKLIF

SEQ ID NO: 218800 - protein, 16 aa, Homo sapiens
  CDR3 for beta chain variable domain of TCR clone 109400 (TRBV2, TRBJ1-1)
CASSPPNRGMNTEAFF

SEQ ID NO: 218801 - protein, 18 aa, Homo sapiens
  CDR3 for alpha chain variable domain of TCR clone 109401 (TRAV26-1, TRAJ23)
CIVRVGLEVWNQGGKLIF

SEQ ID NO: 218802 - protein, 14 aa, Homo sapiens
  CDR3 for beta chain variable domain of TCR clone 109401 (TRBV6-3, TRBJ2-5)
CASRRDGGEETQYF

SEQ ID NO: 218803 - protein, 14 aa, Homo sapiens
  CDR3 for alpha chain variable domain of TCR clone 109402 (TRAV12-1, TRAJ17)
CVVNPKAAGNKLTF

SEQ ID NO: 218804 - protein, 16 aa, Homo sapiens
  CDR3 for beta chain variable domain of TCR clone 109402 (TRBV4-3, TRBJ2-2)
CASSHLQGSGTGELFF

SEQ ID NO: 218805 - protein, 16 aa, Homo sapiens
  CDR3 for alpha chain variable domain of TCR clone 109403 (TRAV26-1, TRAJ32)
CIVRTTYGGATNKLIF

SEQ ID NO: 218806 - protein, 14 aa, Homo sapiens
  CDR3 for beta chain variable domain of TCR clone 109403 (TRBV27, TRBJ1-1)
CASSLLSGLSEAFF

SEQ ID NO: 218807 - protein, 14 aa, Homo sapiens
  CDR3 for alpha chain variable domain of TCR clone 109404 (TRAV2, TRAJ9)
CAVEDRGGGFKTIF

SEQ ID NO: 218808 - protein, 13 aa, Homo sapiens
  CDR3 for beta chain variable domain of TCR clone 109404 (TRBV7-3, TRBJ2-5)
CASSFRGGETQYF

SEQ ID NO: 218809 - protein, 11 aa, Homo sapiens
  CDR3 for alpha chain variable domain of TCR clone 109405 (TRAV13-1, TRAJ39)
CASHAGNMLTF

SEQ ID NO: 218810 - protein, 15 aa, Homo sapiens
  CDR3 for beta chain variable domain of TCR clone 109405 (TRBV20-1, TRBJ2-7)
CSARDRVSGMDEHYF

SEQ ID NO: 218811 - protein, 15 aa, Homo sapiens
  CDR3 for alpha chain variable domain of TCR clone 109406 (TRAV17, TRAJ40)
YATVSSTSGTYKYIF

SEQ ID NO: 218812 - protein, 15 aa, Homo sapiens
  CDR3 for beta chain variable domain of TCR clone 109406 (TRBV5-1, TRBJ2-1)
CASSQAGYWWNEQFF

SEQ ID NO: 218813 - protein, 12 aa, Homo sapiens
  CDR3 for alpha chain variable domain of TCR clone 109407 (TRAV12-3, TRAJ17)
CAMTLTGIKLTF

SEQ ID NO: 218814 - protein, 15 aa, Homo sapiens
  CDR3 for beta chain variable domain of TCR clone 109407 (TRBV12-4, TRBJ2-5)
CASSPPTGLQETQYF

SEQ ID NO: 218815 - protein, 10 aa, Homo sapiens
  CDR3 for alpha chain variable domain of TCR clone 109408 (TRAV2, TRAJ34)
CAVVNDKLIF

SEQ ID NO: 218816 - protein, 15 aa, Homo sapiens
  CDR3 for beta chain variable domain of TCR clone 109408 (TRBV3-1, TRBJ2-2)
CASSQDWTRAGELFL

SEQ ID NO: 218817 - protein, 16 aa, Homo sapiens
  CDR3 for alpha chain variable domain of TCR clone 109409 (TRAV30, TRAJ24)
CGAEIVDADSWGKFQF

SEQ ID NO: 218818 - protein, 14 aa, Homo sapiens
  CDR3 for beta chain variable domain of TCR clone 109409 (TRBV12-5, TRBJ2-5)
CASGSRTHQGTQYF

SEQ ID NO: 218819 - protein, 16 aa, Homo sapiens
  CDR3 for alpha chain variable domain of TCR clone 109410 (TRAV12-3, TRAJ53)
CAMSPGGGGSNYKLTF

SEQ ID NO: 218820 - protein, 12 aa, Homo sapiens
  CDR3 for beta chain variable domain of TCR clone 109410 (TRBV11-2, TRBJ2-2)
CASSLGGGELFF

SEQ ID NO: 218821 - protein, 13 aa, Homo sapiens
  CDR3 for alpha chain variable domain of TCR clone 109411 (TRAV12-2, TRAJ30)
RAVNLNRDDKTIF

SEQ ID NO: 218822 - protein, 14 aa, Homo sapiens
  CDR3 for beta chain variable domain of TCR clone 109411 (TRBV7-2, TRBJ1-2)
CASSSQGAHYGYTF

SEQ ID NO: 218823 - protein, 13 aa, Homo sapiens
  CDR3 for alpha chain variable domain of TCR clone 109412 (TRAV12-1, TRAJ26)
GVVRRNYGQNFVF

SEQ ID NO: 218824 - protein, 14 aa, Homo sapiens
  CDR3 for beta chain variable domain of TCR clone 109412 (TRBV6-3, TRBJ1-1)
CASRYTGESTEAFF

SEQ ID NO: 218825 - protein, 12 aa, Homo sapiens
  CDR3 for alpha chain variable domain of TCR clone 109413 (TRAV16, TRAJ56)
CAPTGANSKLTF

SEQ ID NO: 218826 - protein, 15 aa, Homo sapiens
  CDR3 for beta chain variable domain of TCR clone 109413 (TRBV4-1, TRBJ1-4)
CASSDTGGTNEKLFF

SEQ ID NO: 218827 - protein, 11 aa, Homo sapiens
  CDR3 for alpha chain variable domain of TCR clone 109414 (TRAV17, TRAJ9)
CGFTGGFKTIF

SEQ ID NO: 218828 - protein, 13 aa, Homo sapiens
  CDR3 for beta chain variable domain of TCR clone 109414 (TRBV6-5, TRBJ2-1)
CASRGRVGNEQFF

SEQ ID NO: 218829 - protein, 15 aa, Homo sapiens
  CDR3 for alpha chain variable domain of TCR clone 109415 (TRAV3, TRAJ15)
CAVRPANQAGTARIF

SEQ ID NO: 218830 - protein, 14 aa, Homo sapiens
  CDR3 for beta chain variable domain of TCR clone 109415 (TRBV4-1, TRBJ2-2)
CASSQAVNTGELFF

SEQ ID NO: 218831 - protein, 11 aa, Homo sapiens
  CDR3 for alpha chain variable domain of TCR clone 109416 (TRAV12-3, TRAJ16)
LTWGDGQKLLF

SEQ ID NO: 218832 - protein, 13 aa, Homo sapiens
  CDR3 for beta chain variable domain of TCR clone 109416 (TRBV12-4, TRBJ1-4)
CASAMGHNEKLFF

SEQ ID NO: 218833 - protein, 13 aa, Homo sapiens
  CDR3 for alpha chain variable domain of TCR clone 109417 (TRAV21, TRAJ20)
CTVGLRVDYKLSF

SEQ ID NO: 218834 - protein, 13 aa, Homo sapiens
  CDR3 for beta chain variable domain of TCR clone 109417 (TRBV6-1, TRBJ1-1)
CASSRQGNTEAFF

SEQ ID NO: 218835 - protein, 12 aa, Homo sapiens
  CDR3 for alpha chain variable domain of TCR clone 109418 (TRAV8-3, TRAJ20)
CAVDFNDYKLSF

SEQ ID NO: 218836 - protein, 13 aa, Homo sapiens
  CDR3 for beta chain variable domain of TCR clone 109418 (TRBV5-7, TRBJ2-3)
CASSLGHTDTQYF

SEQ ID NO: 218837 - protein, 16 aa, Homo sapiens
  CDR3 for alpha chain variable domain of TCR clone 109419 (TRAV30, TRAJ24)
CGTEIVDADSWGKFQF

SEQ ID NO: 218838 - protein, 15 aa, Homo sapiens
  CDR3 for beta chain variable domain of TCR clone 109419 (TRBV3-1, TRBJ1-2)
CASSHPGTPGYGYTF

SEQ ID NO: 218839 - protein, 12 aa, Homo sapiens
  CDR3 for alpha chain variable domain of TCR clone 109420 (TRAV21, TRAJ27)
CAANTNAGKSTF

SEQ ID NO: 218840 - protein, 16 aa, Homo sapiens
  CDR3 for beta chain variable domain of TCR clone 109420 (TRBV5-1, TRBJ2-7)
CASSWGTGGRAWEQYF

SEQ ID NO: 218841 - protein, 14 aa, Homo sapiens
  CDR3 for alpha chain variable domain of TCR clone 109421 (TRAV38-1, TRAJ27)
CAFIHNTTAGKSTF

SEQ ID NO: 218842 - protein, 12 aa, Homo sapiens
  CDR3 for beta chain variable domain of TCR clone 109421 (TRBV7-8, TRBJ2-7)
CASSLGDREQYF

SEQ ID NO: 218843 - protein, 16 aa, Homo sapiens
  CDR3 for alpha chain variable domain of TCR clone 109422 (TRAV2, TRAJ23)
CVGGKLIFGQGTELSV

SEQ ID NO: 218844 - protein, 20 aa, Homo sapiens
  CDR3 for beta chain variable domain of TCR clone 109422 (TRBV20-1, TRBJ2-5)
CSVRAGLAGRLAGHLETQYF

SEQ ID NO: 218845 - protein, 14 aa, Homo sapiens
  CDR3 for alpha chain variable domain of TCR clone 109423 (TRAV26-1, TRAJ38)
CIADNAGNNRKLIW

SEQ ID NO: 218846 - protein, 13 aa, Homo sapiens
  CDR3 for beta chain variable domain of TCR clone 109423 (TRBV7-8, TRBJ2-2)
CASSHLFPGPTII

SEQ ID NO: 218847 - protein, 11 aa, Homo sapiens
  CDR3 for alpha chain variable domain of TCR clone 109424 (TRAV3, TRAJ21)
CAVGNFNKFYF

SEQ ID NO: 218848 - protein, 16 aa, Homo sapiens
  CDR3 for beta chain variable domain of TCR clone 109424 (TRBV7-2, TRBJ1-5)
CASSPWGPEGNQPQHF

SEQ ID NO: 218849 - protein, 13 aa, Homo sapiens
  CDR3 for alpha chain variable domain of TCR clone 109425 (TRAV14/DV4, TRAJ23)
CAMREVKGGKLIF

SEQ ID NO: 218850 - protein, 15 aa, Homo sapiens
  CDR3 for beta chain variable domain of TCR clone 109425 (TRBV6-3, TRBJ2-1)
CASSYASDAYNEQFF

SEQ ID NO: 218851 - protein, 14 aa, Homo sapiens
  CDR3 for alpha chain variable domain of TCR clone 109426 (TRAV17, TRAJ6)
CDTDERRGSYIPTF

SEQ ID NO: 218852 - protein, 13 aa, Homo sapiens
  CDR3 for beta chain variable domain of TCR clone 109426 (TRBV27, TRBJ2-1)
CASSLGRIWGQFF

SEQ ID NO: 218853 - protein, 19 aa, Homo sapiens
  CDR3 for alpha chain variable domain of TCR clone 109427 (TRAV3, TRAJ37)
CAVRDMVGGYPSNTGKLIF

SEQ ID NO: 218854 - protein, 15 aa, Homo sapiens
  CDR3 for beta chain variable domain of TCR clone 109427 (TRBV28, TRBJ2-7)
CASSQLGAGGHEQYF

SEQ ID NO: 218855 - protein, 14 aa, Homo sapiens
  CDR3 for alpha chain variable domain of TCR clone 109428 (TRAV12-2, TRAJ17)
CAVNIKVAGNKLTF

SEQ ID NO: 218856 - protein, 16 aa, Homo sapiens
  CDR3 for beta chain variable domain of TCR clone 109428 (TRBV20-1, TRBJ2-6)
CSASSQGYDGANVLTF

SEQ ID NO: 218857 - protein, 13 aa, Homo sapiens
  CDR3 for alpha chain variable domain of TCR clone 109429 (TRAV3, TRAJ36)
CAVRDTGANNLFF

SEQ ID NO: 218858 - protein, 15 aa, Homo sapiens
  CDR3 for beta chain variable domain of TCR clone 109429 (TRBV24-1, TRBJ2-1)
CATSGSGGFYSEQFF

SEQ ID NO: 218859 - protein, 14 aa, Homo sapiens
  CDR3 for alpha chain variable domain of TCR clone 109430 (TRAV23/DV6, TRAJ37)
CAASTSSNTGKLIF

SEQ ID NO: 218860 - protein, 18 aa, Homo sapiens
  CDR3 for beta chain variable domain of TCR clone 109430 (TRBV11-2, TRBJ2-3)
CASSLGGASRGAPNTQYF

SEQ ID NO: 218861 - protein, 16 aa, Homo sapiens
  CDR3 for alpha chain variable domain of TCR clone 109431 (TRAV3, TRAJ21)
CAVRDIERGNFNKFYF

SEQ ID NO: 218862 - protein, 13 aa, Homo sapiens
  CDR3 for beta chain variable domain of TCR clone 109431 (TRBV5-4, TRBJ1-1)
CASSFQVNTEAFF

SEQ ID NO: 218863 - protein, 14 aa, Homo sapiens
  CDR3 for alpha chain variable domain of TCR clone 109432 (TRAV1-2, TRAJ8)
CAVREDTGFQKLVF

SEQ ID NO: 218864 - protein, 14 aa, Homo sapiens
  CDR3 for beta chain variable domain of TCR clone 109432 (TRBV3-1, TRBJ2-7)
CASSRTSGKEEQYF

SEQ ID NO: 218865 - protein, 11 aa, Homo sapiens
  CDR3 for alpha chain variable domain of TCR clone 109433 (TRAV2, TRAJ33)
CAVESNYQLIW

SEQ ID NO: 218866 - protein, 15 aa, Homo sapiens
  CDR3 for beta chain variable domain of TCR clone 109433 (TRBV19, TRBJ1-1)
CASTAGQIQNTEAFF

SEQ ID NO: 218867 - protein, 14 aa, Homo sapiens
  CDR3 for alpha chain variable domain of TCR clone 109434 (TRAV26-1, TRAJ38)
CIADNAGNNRKLIW

SEQ ID NO: 218868 - protein, 13 aa, Homo sapiens
  CDR3 for beta chain variable domain of TCR clone 109434 (TRBV2, TRBJ1-5)
CATAGPGNQHQHF

SEQ ID NO: 218869 - protein, 16 aa, Homo sapiens
  CDR3 for alpha chain variable domain of TCR clone 109435 (TRAV3, TRAJ37)
CAVSGKGSGNTGKLIF

SEQ ID NO: 218870 - protein, 14 aa, Homo sapiens
  CDR3 for beta chain variable domain of TCR clone 109435 (TRBV7-2, TRBJ2-7)
CASSPKTSFYEQYF

SEQ ID NO: 218871 - protein, 12 aa, Homo sapiens
  CDR3 for alpha chain variable domain of TCR clone 109436 (TRAV20, TRAJ39)
CAVGNAGNMLTF

SEQ ID NO: 218872 - protein, 16 aa, Homo sapiens
  CDR3 for beta chain variable domain of TCR clone 109436 (TRBV28, TRBJ2-7)
CASSLFFETGGPEQYF

SEQ ID NO: 218873 - protein, 13 aa, Homo sapiens
  CDR3 for alpha chain variable domain of TCR clone 109437 (TRAV3, TRAJ31)
CAVREGNNARPMF

SEQ ID NO: 218874 - protein, 15 aa, Homo sapiens
  CDR3 for beta chain variable domain of TCR clone 109437 (TRBV6-1, TRBJ1-1)
CASRTPGQLNTEAFF

SEQ ID NO: 218875 - protein, 13 aa, Homo sapiens
  CDR3 for alpha chain variable domain of TCR clone 109438 (TRAV23/DV6, TRAJ22)
CASRAGSARQLTF

SEQ ID NO: 218876 - protein, 14 aa, Homo sapiens
  CDR3 for beta chain variable domain of TCR clone 109438 (TRBV7-2, TRBJ2-7)
CASSPKTSFYEQHF

SEQ ID NO: 218877 - protein, 17 aa, Homo sapiens
  CDR3 for alpha chain variable domain of TCR clone 109439 (TRAV12-3, TRAJ26)
CAMSGGRWDNYGQNFVF

SEQ ID NO: 218878 - protein, 18 aa, Homo sapiens
  CDR3 for beta chain variable domain of TCR clone 109439 (TRBV12-4, TRBJ2-2)
CASRPFGAGALNTGELFF

SEQ ID NO: 218879 - protein, 14 aa, Homo sapiens
  CDR3 for alpha chain variable domain of TCR clone 109440 (TRAV21, TRAJ35)
CAVMPIGFGNVLHC

SEQ ID NO: 218880 - protein, 14 aa, Homo sapiens
  CDR3 for beta chain variable domain of TCR clone 109440 (TRBV12-4, TRBJ1-1)
CASASSEFYTEAFF

SEQ ID NO: 218881 - protein, 13 aa, Homo sapiens
  CDR3 for alpha chain variable domain of TCR clone 109441 (TRAV35, TRAJ36)
CAGPRIGADNLFF

SEQ ID NO: 218882 - protein, 15 aa, Homo sapiens
  CDR3 for beta chain variable domain of TCR clone 109441 (TRBV28, TRBJ2-5)
CASSPPWSYQETQYF

SEQ ID NO: 218883 - protein, 15 aa, Homo sapiens
  CDR3 for alpha chain variable domain of TCR clone 109442 (TRAV27, TRAJ38)
CAARRNSGNNRKLLW

SEQ ID NO: 218884 - protein, 13 aa, Homo sapiens
  CDR3 for beta chain variable domain of TCR clone 109442 (TRBV12-5, TRBJ2-3)
CASGDRQSDTQYF

SEQ ID NO: 218885 - protein, 15 aa, Homo sapiens
  CDR3 for alpha chain variable domain of TCR clone 109443 (TRAV8-4, TRAJ37)
FAVTYGSSNTGKLIF

SEQ ID NO: 218886 - protein, 13 aa, Homo sapiens
  CDR3 for beta chain variable domain of TCR clone 109443 (TRBV12-4, TRBJ2-5)
CASSLGGSRTQYF

SEQ ID NO: 218887 - protein, 13 aa, Homo sapiens
  CDR3 for alpha chain variable domain of TCR clone 109444 (TRAV39, TRAJ33)
CAANPDSNYQLIW

SEQ ID NO: 218888 - protein, 13 aa, Homo sapiens
  CDR3 for beta chain variable domain of TCR clone 109444 (TRBV24-1, TRBJ2-1)
CATSAGPYNEQFF

SEQ ID NO: 218889 - protein, 12 aa, Homo sapiens
  CDR3 for alpha chain variable domain of TCR clone 109445 (TRAV8-3, TRAJ43)
CAVGAGNNDIRF

SEQ ID NO: 218890 - protein, 18 aa, Homo sapiens
  CDR3 for beta chain variable domain of TCR clone 109445 (TRBV11-2, TRBJ2-3)
CASSLGGASRGAPNTQYF

SEQ ID NO: 218891 - protein, 13 aa, Homo sapiens
  CDR3 for alpha chain variable domain of TCR clone 109446 (TRAV12-1, TRAJ7)
CVVNMRGNNRLAF

SEQ ID NO: 218892 - protein, 15 aa, Homo sapiens
  CDR3 for beta chain variable domain of TCR clone 109446 (TRBV20-1, TRBJ2-7)
CSARDRVSGMDEQYF

SEQ ID NO: 218893 - protein, 13 aa, Homo sapiens
  CDR3 for alpha chain variable domain of TCR clone 109447 (TRAV1-2, TRAJ9)
CAVLNTGGFKTIF

SEQ ID NO: 218894 - protein, 15 aa, Homo sapiens
  CDR3 for beta chain variable domain of TCR clone 109447 (TRBV11-2, TRBJ1-3)
CASSLDGTVGNTIYF

SEQ ID NO: 218895 - protein, 14 aa, Homo sapiens
  CDR3 for alpha chain variable domain of TCR clone 109448 (TRAV12-2, TRAJ24)
CAVTPADSWGKLPF

SEQ ID NO: 218896 - protein, 16 aa, Homo sapiens
  CDR3 for beta chain variable domain of TCR clone 109448 (TRBV6-4, TRBJ2-3)
APSEGGRAWGTDTQYF

SEQ ID NO: 218897 - protein, 17 aa, Homo sapiens
  CDR3 for alpha chain variable domain of TCR clone 109449 (TRAV13-1, TRAJ31)
CAPRDRLMFGDGTQLVV

SEQ ID NO: 218898 - protein, 12 aa, Homo sapiens
  CDR3 for beta chain variable domain of TCR clone 109449 (TRBV7-9, TRBJ2-7)
CASSLQGYEQYF

SEQ ID NO: 218899 - protein, 12 aa, Homo sapiens
  CDR3 for alpha chain variable domain of TCR clone 109450 (TRAV27, TRAJ58)
CAGARDTSRLTF

SEQ ID NO: 218900 - protein, 12 aa, Homo sapiens
  CDR3 for beta chain variable domain of TCR clone 109450 (TRBV19, TRBJ2-1)
CASSRQGAEQFF

SEQ ID NO: 218901 - protein, 14 aa, Homo sapiens
  CDR3 for alpha chain variable domain of TCR clone 109451 (TRAV13-1, TRAJ35)
CAASKGGFGNVLHC

SEQ ID NO: 218902 - protein, 15 aa, Homo sapiens
  CDR3 for beta chain variable domain of TCR clone 109451 (TRBV24-1, TRBJ2-4)
CATSDPRDRANIQCF

SEQ ID NO: 218903 - protein, 13 aa, Homo sapiens
  CDR3 for alpha chain variable domain of TCR clone 109452 (TRAV12-2, TRAJ37)
CAGGSGNTGKLIF

SEQ ID NO: 218904 - protein, 14 aa, Homo sapiens
  CDR3 for beta chain variable domain of TCR clone 109452 (TRBV7-2, TRBJ2-7)
CASRSQGAAYEQYF

SEQ ID NO: 218905 - protein, 14 aa, Homo sapiens
  CDR3 for alpha chain variable domain of TCR clone 109453 (TRAV26-2, TRAJ38)
CILYNAGNNCKLIW

SEQ ID NO: 218906 - protein, 14 aa, Homo sapiens
  CDR3 for beta chain variable domain of TCR clone 109453 (TRBV19, TRBJ2-1)
CASPTFVLSGEQFF

SEQ ID NO: 218907 - protein, 12 aa, Homo sapiens
  CDR3 for alpha chain variable domain of TCR clone 109454 (TRAV35, TRAJ39)
LAPNNAGNMLTF

SEQ ID NO: 218908 - protein, 16 aa, Homo sapiens
  CDR3 for beta chain variable domain of TCR clone 109454 (TRBV2, TRBJ2-3)
FASSTSVEGVTDTQYF

SEQ ID NO: 218909 - protein, 13 aa, Homo sapiens
  CDR3 for alpha chain variable domain of TCR clone 109455 (TRAV2, TRAJ23)
CAVMGNQGGKLIF

SEQ ID NO: 218910 - protein, 15 aa, Homo sapiens
  CDR3 for beta chain variable domain of TCR clone 109455 (TRBV11-2, TRBJ2-1)
CASSSSTISYNEKFF

SEQ ID NO: 218911 - protein, 18 aa, Homo sapiens
  CDR3 for alpha chain variable domain of TCR clone 109456 (TRAV21, TRAJ52)
CAVRPSPAGGTSYGKLTF

SEQ ID NO: 218912 - protein, 13 aa, Homo sapiens
  CDR3 for beta chain variable domain of TCR clone 109456 (TRBV25-1, TRBJ2-5)
CASSESGRETQYF

SEQ ID NO: 218913 - protein, 17 aa, Homo sapiens
  CDR3 for alpha chain variable domain of TCR clone 109457 (TRAV38-1, TRAJ28)
CAFMKPTSGAGSYQPTF

SEQ ID NO: 218914 - protein, 15 aa, Homo sapiens
  CDR3 for beta chain variable domain of TCR clone 109457 (TRBV5-1, TRBJ2-4)
CASSLGGGGSYIQYF

SEQ ID NO: 218915 - protein, 12 aa, Homo sapiens
  CDR3 for alpha chain variable domain of TCR clone 109458 (TRAV12-3, TRAJ20)
CAMVRGDYKLSF

SEQ ID NO: 218916 - protein, 14 aa, Homo sapiens
  CDR3 for beta chain variable domain of TCR clone 109458 (TRBV28, TRBJ2-1)
CASSLNGRNNEQFF

SEQ ID NO: 218917 - protein, 12 aa, Homo sapiens
  CDR3 for alpha chain variable domain of TCR clone 109459 (TRAV3, TRAJ43)
CAVRGPNNDMRF

SEQ ID NO: 218918 - protein, 13 aa, Homo sapiens
  CDR3 for beta chain variable domain of TCR clone 109459 (TRBV19, TRBJ1-2)
CASSVPGQDGYTF

SEQ ID NO: 218919 - protein, 15 aa, Homo sapiens
  CDR3 for alpha chain variable domain of TCR clone 109460 (TRAV3, TRAJ5)
CAVGDRKTGRRALTF

SEQ ID NO: 218920 - protein, 17 aa, Homo sapiens
  CDR3 for beta chain variable domain of TCR clone 109460 (TRBV3-1, TRBJ2-5)
CASSNWGGTSGQETQYF

SEQ ID NO: 218921 - protein, 13 aa, Homo sapiens
  CDR3 for alpha chain variable domain of TCR clone 109461 (TRAV13-2, TRAJ40)
CAELISGTYKYIL

SEQ ID NO: 218922 - protein, 14 aa, Homo sapiens
  CDR3 for beta chain variable domain of TCR clone 109461 (TRBV19, TRBJ1-5)
CASGTEVYNQPQHF

SEQ ID NO: 218923 - protein, 16 aa, Homo sapiens
  CDR3 for alpha chain variable domain of TCR clone 109462 (TRAV3, TRAJ37)
CAVRGKGSGNTGKLIF

SEQ ID NO: 218924 - protein, 12 aa, Homo sapiens
  CDR3 for beta chain variable domain of TCR clone 109462 (TRBV12-4, TRBJ2-3)
CASSPLPDTQYF

SEQ ID NO: 218925 - protein, 14 aa, Homo sapiens
  CDR3 for alpha chain variable domain of TCR clone 109463 (TRAV3, TRAJ40)
CAVRDRRGTYKYIF

SEQ ID NO: 218926 - protein, 14 aa, Homo sapiens
  CDR3 for beta chain variable domain of TCR clone 109463 (TRBV6-1, TRBJ1-3)
CASVQGGGGNTVYF

SEQ ID NO: 218927 - protein, 13 aa, Homo sapiens
  CDR3 for alpha chain variable domain of TCR clone 109464 (TRAV12-2, TRAJ20)
CAVYPSNDYKLSF

SEQ ID NO: 218928 - protein, 16 aa, Homo sapiens
  CDR3 for beta chain variable domain of TCR clone 109464 (TRBV7-9, TRBJ1-2)
CASSPGGGAINYGYTF

SEQ ID NO: 218929 - protein, 12 aa, Homo sapiens
  CDR3 for alpha chain variable domain of TCR clone 109465 (TRAV12-1, TRAJ40)
CVVYSGTYNYIF

SEQ ID NO: 218930 - protein, 17 aa, Homo sapiens
  CDR3 for beta chain variable domain of TCR clone 109465 (TRBV11-3, TRBJ1-5)
CASSPLTGLRGNQPQHF

SEQ ID NO: 218931 - protein, 16 aa, Homo sapiens
  CDR3 for alpha chain variable domain of TCR clone 109466 (TRAV30, TRAJ24)
CGTEIVDADSWGKSQF

SEQ ID NO: 218932 - protein, 14 aa, Homo sapiens
  CDR3 for beta chain variable domain of TCR clone 109466 (TRBV12-5, TRBJ2-5)
CASGSRTHQEAQYF

SEQ ID NO: 218933 - protein, 13 aa, Homo sapiens
  CDR3 for alpha chain variable domain of TCR clone 109467 (TRAV3, TRAJ41)
CAVSSNSGYALNL

SEQ ID NO: 218934 - protein, 14 aa, Homo sapiens
  CDR3 for beta chain variable domain of TCR clone 109467 (TRBV7-2, TRBJ2-7)
CASSPKTSFYEQYF

SEQ ID NO: 218935 - protein, 15 aa, Homo sapiens
  CDR3 for alpha chain variable domain of TCR clone 109468 (TRAV20, TRAJ38)
CAVQASNAGNNRKPI

SEQ ID NO: 218936 - protein, 16 aa, Homo sapiens
  CDR3 for beta chain variable domain of TCR clone 109468 (TRBV7-8, TRBJ2-6)
CASRVGDSSGANVLTF

SEQ ID NO: 218937 - protein, 14 aa, Homo sapiens
  CDR3 for alpha chain variable domain of TCR clone 109469 (TRAV20, TRAJ29)
CAVQAWVGNTPLVF

SEQ ID NO: 218938 - protein, 13 aa, Homo sapiens
  CDR3 for beta chain variable domain of TCR clone 109469 (TRBV10-3, TRBJ2-7)
CASKLAVNYEQYF

SEQ ID NO: 218939 - protein, 12 aa, Homo sapiens
  CDR3 for alpha chain variable domain of TCR clone 109470 (TRAV13-1, TRAJ15)
CAASQAGTTLIF

SEQ ID NO: 218940 - protein, 14 aa, Homo sapiens
  CDR3 for beta chain variable domain of TCR clone 109470 (TRBV19, TRBJ2-1)
CASPTFVLSGEQFF

SEQ ID NO: 218941 - protein, 12 aa, Homo sapiens
  CDR3 for alpha chain variable domain of TCR clone 109471 (TRAV3, TRAJ20)
CAVRDPDYKLSF

SEQ ID NO: 218942 - protein, 17 aa, Homo sapiens
  CDR3 for beta chain variable domain of TCR clone 109471 (TRBV11-2, TRBJ2-1)
CASSLSPPGVEYNEQFF

SEQ ID NO: 218943 - protein, 15 aa, Homo sapiens
  CDR3 for alpha chain variable domain of TCR clone 109472 (TRAV8-4, TRAJ47)
CAVSDPEEYGNKLVF

SEQ ID NO: 218944 - protein, 16 aa, Homo sapiens
  CDR3 for beta chain variable domain of TCR clone 109472 (TRBV19, TRBJ2-2)
CASRSPGTGATGELFF

SEQ ID NO: 218945 - protein, 13 aa, Homo sapiens
  CDR3 for alpha chain variable domain of TCR clone 109473 (TRAV8-6, TRAJ8)
CAFINTGFQKLVF

SEQ ID NO: 218946 - protein, 15 aa, Homo sapiens
  CDR3 for beta chain variable domain of TCR clone 109473 (TRBV28, TRBJ2-5)
CASSSGRVIQETQYF

SEQ ID NO: 218947 - protein, 15 aa, Homo sapiens
  CDR3 for alpha chain variable domain of TCR clone 109474 (TRAV13-2, TRAJ16)
CAENDRFSDGQKLLF

SEQ ID NO: 218948 - protein, 14 aa, Homo sapiens
  CDR3 for beta chain variable domain of TCR clone 109474 (TRBV4-2, TRBJ1-5)
CASSRDRGSQPQHF

SEQ ID NO: 218949 - protein, 17 aa, Homo sapiens
  CDR3 for alpha chain variable domain of TCR clone 109475 (TRAV13-1, TRAJ31)
CAPRDRLMFGDGTQLMV

SEQ ID NO: 218950 - protein, 12 aa, Homo sapiens
  CDR3 for beta chain variable domain of TCR clone 109475 (TRBV7-9, TRBJ2-7)
CASSLEGYEQYF

SEQ ID NO: 218951 - protein, 15 aa, Homo sapiens
  CDR3 for alpha chain variable domain of TCR clone 109476 (TRAV4, TRAJ5)
CLVSAMDTGRRALTF

SEQ ID NO: 218952 - protein, 13 aa, Homo sapiens
  CDR3 for beta chain variable domain of TCR clone 109476 (TRBV6-5, TRBJ2-7)
CASRTSGIHEQYF

SEQ ID NO: 218953 - protein, 15 aa, Homo sapiens
  CDR3 for alpha chain variable domain of TCR clone 109477 (TRAV38-1, TRAJ57)
CAFMDSQGGSEKLVF

SEQ ID NO: 218954 - protein, 16 aa, Homo sapiens
  CDR3 for beta chain variable domain of TCR clone 109477 (TRBV10-3, TRBJ2-1)
CAIRGGGKGDYNEQFF

SEQ ID NO: 218955 - protein, 15 aa, Homo sapiens
  CDR3 for alpha chain variable domain of TCR clone 109478 (TRAV21, TRAJ53)
CATLNSGGSNYKLTF

SEQ ID NO: 218956 - protein, 14 aa, Homo sapiens
  CDR3 for beta chain variable domain of TCR clone 109478 (TRBV7-2, TRBJ2-7)
CASRSQGAAYERYF

SEQ ID NO: 218957 - protein, 15 aa, Homo sapiens
  CDR3 for alpha chain variable domain of TCR clone 109479 (TRAV16, TRAJ10)
CALRELTGGGNKLTF

SEQ ID NO: 218958 - protein, 14 aa, Homo sapiens
  CDR3 for beta chain variable domain of TCR clone 109479 (TRBV5-5, TRBJ2-7)
CASSLGKGTYEQYF

SEQ ID NO: 218959 - protein, 15 aa, Homo sapiens
  CDR3 for alpha chain variable domain of TCR clone 109480 (TRAV3, TRAJ3)
CAVRDRDSSASKIIF

SEQ ID NO: 218960 - protein, 18 aa, Homo sapiens
  CDR3 for beta chain variable domain of TCR clone 109480 (TRBV25-1, TRBJ1-2)
CASSGLQNGQGLIFRYTF

SEQ ID NO: 218961 - protein, 13 aa, Homo sapiens
  CDR3 for alpha chain variable domain of TCR clone 109481 (TRAV8-1, TRAJ28)
CAVSGAGSYKLTF

SEQ ID NO: 218962 - protein, 14 aa, Homo sapiens
  CDR3 for beta chain variable domain of TCR clone 109481 (TRBV7-2, TRBJ2-2)
CASRGQGAAGELFF

SEQ ID NO: 218963 - protein, 17 aa, Homo sapiens
  CDR3 for alpha chain variable domain of TCR clone 109482 (TRAV13-1, TRAJ52)
CGASSGAGGTSYGKLTF

SEQ ID NO: 218964 - protein, 15 aa, Homo sapiens
  CDR3 for beta chain variable domain of TCR clone 109482 (TRBV2, TRBJ2-1)
CASSELAGSYNEQFF

SEQ ID NO: 218965 - protein, 15 aa, Homo sapiens
  CDR3 for alpha chain variable domain of TCR clone 109483 (TRAV12-3, TRAJ11)
CAMSEENSGYSTLTF

SEQ ID NO: 218966 - protein, 16 aa, Homo sapiens
  CDR3 for beta chain variable domain of TCR clone 109483 (TRBV5-1, TRBJ2-7)
CASSLEGPAGLYEQYF

SEQ ID NO: 218967 - protein, 15 aa, Homo sapiens
  CDR3 for alpha chain variable domain of TCR clone 109484 (TRAV26-1, TRAJ29)
CIVRVEGSGDTPLVF

SEQ ID NO: 218968 - protein, 15 aa, Homo sapiens
  CDR3 for beta chain variable domain of TCR clone 109484 (TRBV7-9, TRBJ1-5)
CASSQGHQPNQPHHF

SEQ ID NO: 218969 - protein, 14 aa, Homo sapiens
  CDR3 for alpha chain variable domain of TCR clone 109485 (TRAV12-1, TRAJ3)
CLVNPGSSASKIIF

SEQ ID NO: 218970 - protein, 14 aa, Homo sapiens
  CDR3 for beta chain variable domain of TCR clone 109485 (TRBV20-1, TRBJ2-3)
CSARGGTSTDTQYF

SEQ ID NO: 218971 - protein, 12 aa, Homo sapiens
  CDR3 for alpha chain variable domain of TCR clone 109486 (TRAV12-3, TRAJ17)
CAMTLTGNKLTF

SEQ ID NO: 218972 - protein, 13 aa, Homo sapiens
  CDR3 for beta chain variable domain of TCR clone 109486 (TRBV7-6, TRBJ2-7)
CASSLDHTHEQYF

SEQ ID NO: 218973 - protein, 12 aa, Homo sapiens
  CDR3 for alpha chain variable domain of TCR clone 109487 (TRAV27, TRAJ35)
CAGADFGNVLHC

SEQ ID NO: 218974 - protein, 16 aa, Homo sapiens
  CDR3 for beta chain variable domain of TCR clone 109487 (TRBV6-1, TRBJ2-1)
CASILRQGSSYNMQFF

SEQ ID NO: 218975 - protein, 14 aa, Homo sapiens
  CDR3 for alpha chain variable domain of TCR clone 109488 (TRAV1-2, TRAJ8)
CAVIEDTGFQKLVF

SEQ ID NO: 218976 - protein, 15 aa, Homo sapiens
  CDR3 for beta chain variable domain of TCR clone 109488 (TRBV27, TRBJ2-1)
CASSNGGGSSNEQFF

SEQ ID NO: 218977 - protein, 14 aa, Homo sapiens
  CDR3 for alpha chain variable domain of TCR clone 109489 (TRAV8-3, TRAJ42)
CAVGAWGSKGNLIF

SEQ ID NO: 218978 - protein, 15 aa, Homo sapiens
  CDR3 for beta chain variable domain of TCR clone 109489 (TRBV29-1, TRBJ1-2)
CSVVLEAGSNYGYTF

SEQ ID NO: 218979 - protein, 10 aa, Homo sapiens
  CDR3 for alpha chain variable domain of TCR clone 109490 (TRAV23/DV6, TRAJ57)
CAARSTLSQV

SEQ ID NO: 218980 - protein, 14 aa, Homo sapiens
  CDR3 for beta chain variable domain of TCR clone 109490 (TRBV25-1, TRBJ1-1)
CASTHLGGNTEAFF

SEQ ID NO: 218981 - protein, 13 aa, Homo sapiens
  CDR3 for alpha chain variable domain of TCR clone 109491 (TRAV27, TRAJ6)
CAGGTRGSYIPPF

SEQ ID NO: 218982 - protein, 15 aa, Homo sapiens
  CDR3 for beta chain variable domain of TCR clone 109491 (TRBV11-2, TRBJ1-3)
CASSLSPLVRDTIYF

SEQ ID NO: 218983 - protein, 12 aa, Homo sapiens
  CDR3 for alpha chain variable domain of TCR clone 109492 (TRAV3, TRAJ39)
CAVIEWSNMLTF

SEQ ID NO: 218984 - protein, 13 aa, Homo sapiens
  CDR3 for beta chain variable domain of TCR clone 109492 (TRBV10-3, TRBJ1-2)
CAISERDSYGYTF

SEQ ID NO: 218985 - protein, 16 aa, Homo sapiens
  CDR3 for alpha chain variable domain of TCR clone 109493 (TRAV23/DV6, )
CADIQNPDPAVYHLRD

SEQ ID NO: 218986 - protein, 13 aa, Homo sapiens
  CDR3 for beta chain variable domain of TCR clone 109493 (TRBV28, TRBJ2-7)
CASRSSGVYEQYF

SEQ ID NO: 218987 - protein, 15 aa, Homo sapiens
  CDR3 for alpha chain variable domain of TCR clone 109494 (TRAV17, TRAJ16)
CATALRFSDGQKLLF

SEQ ID NO: 218988 - protein, 12 aa, Homo sapiens
  CDR3 for beta chain variable domain of TCR clone 109494 (TRBV2, TRBJ2-7)
CASSDPNYEQYF

SEQ ID NO: 218989 - protein, 14 aa, Homo sapiens
  CDR3 for alpha chain variable domain of TCR clone 109495 (TRAV12-2, TRAJ40)
CAVKIPSGTYKYIF

SEQ ID NO: 218990 - protein, 15 aa, Homo sapiens
  CDR3 for beta chain variable domain of TCR clone 109495 (TRBV11-2, TRBJ2-2)
CASSSDRVNAGELFF

SEQ ID NO: 218991 - protein, 12 aa, Homo sapiens
  CDR3 for alpha chain variable domain of TCR clone 109496 (TRAV12-2, TRAJ31)
CAVNTPDARPMF

SEQ ID NO: 218992 - protein, 15 aa, Homo sapiens
  CDR3 for beta chain variable domain of TCR clone 109496 (TRBV20-1, TRBJ2-7)
CSAESGTSGAYEQYF

SEQ ID NO: 218993 - protein, 12 aa, Homo sapiens
  CDR3 for alpha chain variable domain of TCR clone 109497 (TRAV21, TRAJ11)
YAATSGYSTLTF

SEQ ID NO: 218994 - protein, 14 aa, Homo sapiens
  CDR3 for beta chain variable domain of TCR clone 109497 (TRBV20-1, TRBJ2-7)
CSDPELAGVGEQYF

SEQ ID NO: 218995 - protein, 17 aa, Homo sapiens
  CDR3 for alpha chain variable domain of TCR clone 109498 (TRAV3, TRAJ6)
CAVRDGPRAGVSYIPTF

SEQ ID NO: 218996 - protein, 20 aa, Homo sapiens
  CDR3 for beta chain variable domain of TCR clone 109498 (TRBV28, TRBJ2-1)
CASTPIGRSPGLAGGNEQLF

SEQ ID NO: 218997 - protein, 13 aa, Homo sapiens
  CDR3 for alpha chain variable domain of TCR clone 109499 (TRAV2, TRAJ40)
CAVVTSGTYKYIF

SEQ ID NO: 218998 - protein, 18 aa, Homo sapiens
  CDR3 for beta chain variable domain of TCR clone 109499 (TRBV4-3, TRBJ2-6)
CASSQDIQGGPGANVLTF

SEQ ID NO: 218999 - protein, 13 aa, Homo sapiens
  CDR3 for alpha chain variable domain of TCR clone 109500 (TRAV17, TRAJ5)
CALRGTGRRALTF

SEQ ID NO: 219000 - protein, 14 aa, Homo sapiens
  CDR3 for beta chain variable domain of TCR clone 109500 (TRBV4-2, TRBJ2-1)
CASGLDRAYNEQFF

SEQ ID NO: 219001 - protein, 13 aa, Homo sapiens
  CDR3 for alpha chain variable domain of TCR clone 109501 (TRAV21, TRAJ27)
CAARPGNAGKSTL

SEQ ID NO: 219002 - protein, 14 aa, Homo sapiens
  CDR3 for beta chain variable domain of TCR clone 109501 (TRBV7-6, TRBJ2-3)
CASSLGTVTYTQYF

SEQ ID NO: 219003 - protein, 11 aa, Homo sapiens
  CDR3 for alpha chain variable domain of TCR clone 109502 (TRAV38-1, TRAJ35)
CAFMSLDRLWE

SEQ ID NO: 219004 - protein, 17 aa, Homo sapiens
  CDR3 for beta chain variable domain of TCR clone 109502 (TRBV11-2, TRBJ2-1)
CASSLYPPGVEYNEQFF

SEQ ID NO: 219005 - protein, 12 aa, Homo sapiens
  CDR3 for alpha chain variable domain of TCR clone 109503 (TRAV8-3, TRAJ26)
CAGDNYGQNFVF

SEQ ID NO: 219006 - protein, 12 aa, Homo sapiens
  CDR3 for beta chain variable domain of TCR clone 109503 (TRBV11-2, TRBJ2-1)
CASSPGDNEQFF

SEQ ID NO: 219007 - protein, 15 aa, Homo sapiens
  CDR3 for alpha chain variable domain of TCR clone 109504 (TRAV25, TRAJ52)
CAGRPGGTSYGKLTF

SEQ ID NO: 219008 - protein, 17 aa, Homo sapiens
  CDR3 for beta chain variable domain of TCR clone 109504 (TRBV13, TRBJ2-3)
CASSLSRVAGGRNTQYF

SEQ ID NO: 219009 - protein, 21 aa, Homo sapiens
  CDR3 for alpha chain variable domain of TCR clone 109505 (TRAV30, TRAJ43)
GLPAQLLRNLLPIIELNDMRF

SEQ ID NO: 219010 - protein, 14 aa, Homo sapiens
  CDR3 for beta chain variable domain of TCR clone 109505 (TRBV27, TRBJ2-1)
CASRHLGGVKEQFF

SEQ ID NO: 219011 - protein, 15 aa, Homo sapiens
  CDR3 for alpha chain variable domain of TCR clone 109506 (TRAV8-4, TRAJ3)
CAVSDPYSSASKIIF

SEQ ID NO: 219012 - protein, 12 aa, Homo sapiens
  CDR3 for beta chain variable domain of TCR clone 109506 (TRBV11-2, TRBJ2-2)
CASSLGGGELFF

SEQ ID NO: 219013 - protein, 11 aa, Homo sapiens
  CDR3 for alpha chain variable domain of TCR clone 109507 (TRAV27, TRAJ47)
CRSNQGNKLIF

SEQ ID NO: 219014 - protein, 16 aa, Homo sapiens
  CDR3 for beta chain variable domain of TCR clone 109507 (TRBV7-9, TRBJ2-1)
CASSDVAGGSYNEQFF

SEQ ID NO: 219015 - protein, 23 aa, Homo sapiens
  CDR3 for alpha chain variable domain of TCR clone 109508 (TRAV26-1, TRAJ38)
CIADNAGNNHIQKPAPAVYQLRD

SEQ ID NO: 219016 - protein, 13 aa, Homo sapiens
  CDR3 for beta chain variable domain of TCR clone 109508 (TRBV20-1, TRBJ1-1)
CSARGGGNTEAFF

SEQ ID NO: 219017 - protein, 17 aa, Homo sapiens
  CDR3 for alpha chain variable domain of TCR clone 109509 (TRAV8-6, TRAJ58)
CSVSSWVGETSGSRLTF

SEQ ID NO: 219018 - protein, 14 aa, Homo sapiens
  CDR3 for beta chain variable domain of TCR clone 109509 (TRBV4-2, TRBJ2-1)
CASGLDRAYNEQFF

SEQ ID NO: 219019 - protein, 12 aa, Homo sapiens
  CDR3 for alpha chain variable domain of TCR clone 109510 (TRAV13-1, TRAJ21)
CAAKEGFNKFYF

SEQ ID NO: 219020 - protein, 14 aa, Homo sapiens
  CDR3 for beta chain variable domain of TCR clone 109510 (TRBV15, TRBJ2-1)
CATSGVEDYNEQFF

SEQ ID NO: 219021 - protein, 19 aa, Homo sapiens
  CDR3 for alpha chain variable domain of TCR clone 109511 (TRAV26-1, TRAJ52)
CTVRAHRNAGGTSYGKLTF

SEQ ID NO: 219022 - protein, 15 aa, Homo sapiens
  CDR3 for beta chain variable domain of TCR clone 109511 (TRBV12-4, TRBJ2-5)
CASSPPTGLQETQYF

SEQ ID NO: 219023 - protein, 14 aa, Homo sapiens
  CDR3 for alpha chain variable domain of TCR clone 109512 (TRAV13-1, TRAJ53)
CAANSGGSNYKLTF

SEQ ID NO: 219024 - protein, 13 aa, Homo sapiens
  CDR3 for beta chain variable domain of TCR clone 109512 (TRBV7-2, TRBJ2-2)
CASSLAVTGELFF

SEQ ID NO: 219025 - protein, 13 aa, Homo sapiens
  CDR3 for alpha chain variable domain of TCR clone 109513 (TRAV23/DV6, TRAJ27)
CAASKPMQANPPL

SEQ ID NO: 219026 - protein, 14 aa, Homo sapiens
  CDR3 for beta chain variable domain of TCR clone 109513 (TRBV5-4, TRBJ1-1)
CASSLDSRRDEAFF

SEQ ID NO: 219027 - protein, 21 aa, Homo sapiens
  CDR3 for alpha chain variable domain of TCR clone 109514 (TRAV1-2, TRAJ9)
CAALNTGGFKTILEQEQDYLL

SEQ ID NO: 219028 - protein, 12 aa, Homo sapiens
  CDR3 for beta chain variable domain of TCR clone 109514 (TRBV11-3, TRBJ1-1)
CASSHRQGEAFF

SEQ ID NO: 219029 - protein, 13 aa, Homo sapiens
  CDR3 for alpha chain variable domain of TCR clone 109515 (TRAV12-2, TRAJ40)
CAVAPSGTDKYIF

SEQ ID NO: 219030 - protein, 13 aa, Homo sapiens
  CDR3 for beta chain variable domain of TCR clone 109515 (TRBV11-3, TRBJ2-5)
CASSSGLQETQYF

SEQ ID NO: 219031 - protein, 14 aa, Homo sapiens
  CDR3 for alpha chain variable domain of TCR clone 109516 (TRAV1-2, TRAJ8)
CAVREDTGFQKLVF

SEQ ID NO: 219032 - protein, 16 aa, Homo sapiens
  CDR3 for beta chain variable domain of TCR clone 109516 (TRBV5-1, TRBJ1-1)
CACSSGGNSLNTEAFF

SEQ ID NO: 219033 - protein, 15 aa, Homo sapiens
  CDR3 for alpha chain variable domain of TCR clone 109517 (TRAV38-1, TRAJ57)
CAFMDSQGGSEKRVF

SEQ ID NO: 219034 - protein, 16 aa, Homo sapiens
  CDR3 for beta chain variable domain of TCR clone 109517 (TRBV10-3, TRBJ2-1)
CAIRGGGRGDYNEQFF

SEQ ID NO: 219035 - protein, 11 aa, Homo sapiens
  CDR3 for alpha chain variable domain of TCR clone 109518 (TRAV3, TRAJ21)
CAVGNFNKFYF

SEQ ID NO: 219036 - protein, 15 aa, Homo sapiens
  CDR3 for beta chain variable domain of TCR clone 109518 (TRBV2, TRBJ1-6)
CASRNGQHLGSPLHF

SEQ ID NO: 219037 - protein, 23 aa, Homo sapiens
  CDR3 for alpha chain variable domain of TCR clone 109519 (TRAV8-3, )
CAVVTTRIPDIQNPDPAVYQLKD

SEQ ID NO: 219038 - protein, 14 aa, Homo sapiens
  CDR3 for beta chain variable domain of TCR clone 109519 (TRBV11-2, TRBJ2-7)
CASSPSTTSYEQYF

SEQ ID NO: 219039 - protein, 14 aa, Homo sapiens
  CDR3 for alpha chain variable domain of TCR clone 109520 (TRAV38-1, TRAJ40)
CALRPTSGTYKYSF

SEQ ID NO: 219040 - protein, 14 aa, Homo sapiens
  CDR3 for beta chain variable domain of TCR clone 109520 (TRBV25-1, TRBJ1-1)
CASTHLGGNTEAFF

SEQ ID NO: 219041 - protein, 16 aa, Homo sapiens
  CDR3 for alpha chain variable domain of TCR clone 109521 (TRAV23/DV6, TRAJ9)
CAASIGVNTGGFKTIF

SEQ ID NO: 219042 - protein, 14 aa, Homo sapiens
  CDR3 for beta chain variable domain of TCR clone 109521 (TRBV9, TRBJ2-7)
CASSVGVGSYEQYF

SEQ ID NO: 219043 - protein, 15 aa, Homo sapiens
  CDR3 for alpha chain variable domain of TCR clone 109522 (TRAV12-2, TRAJ53)
CAVNGGGGSNYKLTF

SEQ ID NO: 219044 - protein, 17 aa, Homo sapiens
  CDR3 for beta chain variable domain of TCR clone 109522 (TRBV7-3, TRBJ2-3)
CASSLMKRMRGADTQHF

SEQ ID NO: 219045 - protein, 16 aa, Homo sapiens
  CDR3 for alpha chain variable domain of TCR clone 109523 (TRAV16, TRAJ52)
CALSAAGGTSYGKLTF

SEQ ID NO: 219046 - protein, 12 aa, Homo sapiens
  CDR3 for beta chain variable domain of TCR clone 109523 (TRBV12-4, TRBJ1-3)
CAISFSGNTIYF

SEQ ID NO: 219047 - protein, 13 aa, Homo sapiens
  CDR3 for alpha chain variable domain of TCR clone 109524 (TRAV1-2, TRAJ36)
CAVDQTGATNLFF

SEQ ID NO: 219048 - protein, 14 aa, Homo sapiens
  CDR3 for beta chain variable domain of TCR clone 109524 (TRBV20-1, TRBJ2-5)
CSAREMTKQETQYF

SEQ ID NO: 219049 - protein, 18 aa, Homo sapiens
  CDR3 for alpha chain variable domain of TCR clone 109525 (TRAV21, TRAJ52)
CAARPSPAGGTSYGKLTF

SEQ ID NO: 219050 - protein, 17 aa, Homo sapiens
  CDR3 for beta chain variable domain of TCR clone 109525 (TRBV13, TRBJ2-3)
CASSPSRVAGGRNTQYF

SEQ ID NO: 219051 - protein, 14 aa, Homo sapiens
  CDR3 for alpha chain variable domain of TCR clone 109526 (TRAV12-1, TRAJ12)
CVVIAMDSSYKLIF

SEQ ID NO: 219052 - protein, 13 aa, Homo sapiens
  CDR3 for beta chain variable domain of TCR clone 109526 (TRBV20-1, TRBJ1-1)
CSARGGGNTEAFF

SEQ ID NO: 219053 - protein, 15 aa, Homo sapiens
  CDR3 for alpha chain variable domain of TCR clone 109527 (TRAV12-2, TRAJ53)
RAVNGGGGSNYKLTF

SEQ ID NO: 219054 - protein, 17 aa, Homo sapiens
  CDR3 for beta chain variable domain of TCR clone 109527 (TRBV7-3, TRBJ2-3)
RASSLMKRMRGADTQYF

SEQ ID NO: 219055 - protein, 16 aa, Homo sapiens
  CDR3 for alpha chain variable domain of TCR clone 109528 (TRAV12-2, TRAJ32)
CAVNLGQGGATNKLIF

SEQ ID NO: 219056 - protein, 14 aa, Homo sapiens
  CDR3 for beta chain variable domain of TCR clone 109528 (TRBV7-9, TRBJ2-1)
CASSPRDSLYEQFF

SEQ ID NO: 219057 - protein, 18 aa, Homo sapiens
  CDR3 for alpha chain variable domain of TCR clone 109529 (TRAV13-1, TRAJ52)
CAAKNPNAGGTSYGKLTF

SEQ ID NO: 219058 - protein, 13 aa, Homo sapiens
  CDR3 for beta chain variable domain of TCR clone 109529 (TRBV11-2, TRBJ2-5)
CASSRGPSETQYF

SEQ ID NO: 219059 - protein, 13 aa, Homo sapiens
  CDR3 for alpha chain variable domain of TCR clone 109530 (TRAV12-2, TRAJ10)
CAISQGGGNKLTF

SEQ ID NO: 219060 - protein, 12 aa, Homo sapiens
  CDR3 for beta chain variable domain of TCR clone 109530 (TRBV5-7, TRBJ1-2)
CASSFSGAGYTF

SEQ ID NO: 219061 - protein, 14 aa, Homo sapiens
  CDR3 for alpha chain variable domain of TCR clone 109531 (TRAV27, TRAJ23)
CAGLSYNQGGKLIF

SEQ ID NO: 219062 - protein, 15 aa, Homo sapiens
  CDR3 for beta chain variable domain of TCR clone 109531 (TRBV19, TRBJ2-2)
CASSLNRGVTGELFL

SEQ ID NO: 219063 - protein, 14 aa, Homo sapiens
  CDR3 for alpha chain variable domain of TCR clone 109532 (TRAV26-1, TRAJ38)
CIADNAGNNCKLIW

SEQ ID NO: 219064 - protein, 17 aa, Homo sapiens
  CDR3 for beta chain variable domain of TCR clone 109532 (TRBV7-9, TRBJ2-3)
CASSPTVAGDLTDTQYF

SEQ ID NO: 219065 - protein, 14 aa, Homo sapiens
  CDR3 for alpha chain variable domain of TCR clone 109533 (TRAV1-1, TRAJ35)
CAVRSIGFGNVLHC

SEQ ID NO: 219066 - protein, 14 aa, Homo sapiens
  CDR3 for beta chain variable domain of TCR clone 109533 (TRBV4-1, TRBJ2-2)
CASSQAVNTGELFF

SEQ ID NO: 219067 - protein, 15 aa, Homo sapiens
  CDR3 for alpha chain variable domain of TCR clone 109534 (TRAV2, TRAJ15)
CAVEDRGQAGTALIF

SEQ ID NO: 219068 - protein, 13 aa, Homo sapiens
  CDR3 for beta chain variable domain of TCR clone 109534 (TRBV10-2, TRBJ2-7)
FASGASGGYEQYF

SEQ ID NO: 219069 - protein, 10 aa, Homo sapiens
  CDR3 for alpha chain variable domain of TCR clone 109535 (TRAV12-1, TRAJ43)
CVVHNNDLRF

SEQ ID NO: 219070 - protein, 13 aa, Homo sapiens
  CDR3 for beta chain variable domain of TCR clone 109535 (TRBV12-4, TRBJ1-2)
CASSSGLTVISTF

SEQ ID NO: 219071 - protein, 14 aa, Homo sapiens
  CDR3 for alpha chain variable domain of TCR clone 109536 (TRAV12-1, TRAJ12)
CVMGPSVSSYKLIF

SEQ ID NO: 219072 - protein, 14 aa, Homo sapiens
  CDR3 for beta chain variable domain of TCR clone 109536 (TRBV11-2, TRBJ2-7)
CASSSTGEGYEQYF

SEQ ID NO: 219073 - protein, 15 aa, Homo sapiens
  CDR3 for alpha chain variable domain of TCR clone 109537 (TRAV38-2/DV8, TRAJ47)
CAYRSTKGYGNKLVF

SEQ ID NO: 219074 - protein, 15 aa, Homo sapiens
  CDR3 for beta chain variable domain of TCR clone 109537 (TRBV6-6, TRBJ2-7)
CASSYSYGGSYEQYF

SEQ ID NO: 219075 - protein, 23 aa, Homo sapiens
  CDR3 for alpha chain variable domain of TCR clone 109538 (TRAV26-1, TRAJ38)
CIADNAGNNHIQNPDPAVYRLRD

SEQ ID NO: 219076 - protein, 13 aa, Homo sapiens
  CDR3 for beta chain variable domain of TCR clone 109538 (TRBV12-4, TRBJ1-2)
CASSLRQGKGYTF

SEQ ID NO: 219077 - protein, 15 aa, Homo sapiens
  CDR3 for alpha chain variable domain of TCR clone 109539 (TRAV21, TRAJ53)
CATLNSGGSNYKLKF

SEQ ID NO: 219078 - protein, 15 aa, Homo sapiens
  CDR3 for beta chain variable domain of TCR clone 109539 (TRBV20-1, TRBJ2-7)
CSARDRVSGMDEQYF

SEQ ID NO: 219079 - protein, 13 aa, Homo sapiens
  CDR3 for alpha chain variable domain of TCR clone 109540 (TRAV21, TRAJ58)
CAVKGASGSRLTF

SEQ ID NO: 219080 - protein, 13 aa, Homo sapiens
  CDR3 for beta chain variable domain of TCR clone 109540 (TRBV7-3, TRBJ1-5)
CASSLDSNQPQHF

SEQ ID NO: 219081 - protein, 14 aa, Homo sapiens
  CDR3 for alpha chain variable domain of TCR clone 109541 (TRAV14/DV4, TRAJ23)
CAMRYYNQGGKLIF

SEQ ID NO: 219082 - protein, 16 aa, Homo sapiens
  CDR3 for beta chain variable domain of TCR clone 109541 (TRBV7-2, TRBJ2-5)
CASSPGGARRGETQYF

SEQ ID NO: 219083 - protein, 11 aa, Homo sapiens
  CDR3 for alpha chain variable domain of TCR clone 109542 (TRAV26-2, TRAJ8)
CILTGFQKLVF

SEQ ID NO: 219084 - protein, 18 aa, Homo sapiens
  CDR3 for beta chain variable domain of TCR clone 109542 (TRBV11-2, TRBJ2-3)
CASSLGGASRGAPNTQYF

SEQ ID NO: 219085 - protein, 14 aa, Homo sapiens
  CDR3 for alpha chain variable domain of TCR clone 109543 (TRAV23/DV6, TRAJ39)
CAASIGNAGNILTF

SEQ ID NO: 219086 - protein, 12 aa, Homo sapiens
  CDR3 for beta chain variable domain of TCR clone 109543 (TRBV20-1, TRBJ2-5)
CSVGTGSETQYF

SEQ ID NO: 219087 - protein, 11 aa, Homo sapiens
  CDR3 for alpha chain variable domain of TCR clone 109544 (TRAV23/DV6, TRAJ48)
CVPRWGEKLTF

SEQ ID NO: 219088 - protein, 13 aa, Homo sapiens
  CDR3 for beta chain variable domain of TCR clone 109544 (TRBV12-4, TRBJ2-5)
CASSPGTEETQYF

SEQ ID NO: 219089 - protein, 14 aa, Homo sapiens
  CDR3 for alpha chain variable domain of TCR clone 109545 (TRAV13-1, TRAJ40)
CAASMTSGTYKYIF

SEQ ID NO: 219090 - protein, 15 aa, Homo sapiens
  CDR3 for beta chain variable domain of TCR clone 109545 (TRBV7-3, TRBJ2-1)
CASSPTVGGEVEQFF

SEQ ID NO: 219091 - protein, 13 aa, Homo sapiens
  CDR3 for alpha chain variable domain of TCR clone 109546 (TRAV21, TRAJ57)
CAVTQGGSEKLVF

SEQ ID NO: 219092 - protein, 16 aa, Homo sapiens
  CDR3 for beta chain variable domain of TCR clone 109546 (TRBV29-1, TRBJ2-7)
CSVEDAEDGTAYEQNF

SEQ ID NO: 219093 - protein, 14 aa, Homo sapiens
  CDR3 for alpha chain variable domain of TCR clone 109547 (TRAV17, TRAJ57)
CATDPQGGSEKLVF

SEQ ID NO: 219094 - protein, 16 aa, Homo sapiens
  CDR3 for beta chain variable domain of TCR clone 109547 (TRBV12-4, TRBJ2-5)
CASSFFVRGRQETQYF

SEQ ID NO: 219095 - protein, 15 aa, Homo sapiens
  CDR3 for alpha chain variable domain of TCR clone 109548 (TRAV12-1, TRAJ44)
CVVDTPQGTASKLTF

SEQ ID NO: 219096 - protein, 13 aa, Homo sapiens
  CDR3 for beta chain variable domain of TCR clone 109548 (TRBV27, TRBJ2-1)
RASSSGSYNEQFF

SEQ ID NO: 219097 - protein, 15 aa, Homo sapiens
  CDR3 for alpha chain variable domain of TCR clone 109549 (TRAV13-1, TRAJ27)
CAARELNTNAGKSTF

SEQ ID NO: 219098 - protein, 12 aa, Homo sapiens
  CDR3 for beta chain variable domain of TCR clone 109549 (TRBV11-2, TRBJ2-2)
CASSLGGGELFF

SEQ ID NO: 219099 - protein, 14 aa, Homo sapiens
  CDR3 for alpha chain variable domain of TCR clone 109550 (TRAV13-1, TRAJ44)
CAAKATGTASKLTF

SEQ ID NO: 219100 - protein, 17 aa, Homo sapiens
  CDR3 for beta chain variable domain of TCR clone 109550 (TRBV7-3, TRBJ2-3)
CASSLVKRMRGADTQYF

SEQ ID NO: 219101 - protein, 14 aa, Homo sapiens
  CDR3 for alpha chain variable domain of TCR clone 109551 (TRAV1-1, TRAJ28)
CASPSGAGSYQLTF

SEQ ID NO: 219102 - protein, 15 aa, Homo sapiens
  CDR3 for beta chain variable domain of TCR clone 109551 (TRBV7-2, TRBJ1-2)
CASSLVSGGDYGYTF

SEQ ID NO: 219103 - protein, 16 aa, Homo sapiens
  CDR3 for alpha chain variable domain of TCR clone 109552 (TRAV30, TRAJ24)
CGTEIVDADSWGKFQF

SEQ ID NO: 219104 - protein, 17 aa, Homo sapiens
  CDR3 for beta chain variable domain of TCR clone 109552 (TRBV4-3, TRBJ2-1)
CASSQELAIVSSNEQFF

SEQ ID NO: 219105 - protein, 15 aa, Homo sapiens
  CDR3 for alpha chain variable domain of TCR clone 109553 (TRAV4, TRAJ39)
CLVGPNNNAGNMLTF

SEQ ID NO: 219106 - protein, 13 aa, Homo sapiens
  CDR3 for beta chain variable domain of TCR clone 109553 (TRBV11-2, TRBJ2-5)
CASSLTGEETQYF

SEQ ID NO: 219107 - protein, 14 aa, Homo sapiens
  CDR3 for alpha chain variable domain of TCR clone 109554 (TRAV1-2, TRAJ16)
CAVNRFSDGQKLLF

SEQ ID NO: 219108 - protein, 16 aa, Homo sapiens
  CDR3 for beta chain variable domain of TCR clone 109554 (TRBV20-1, TRBJ2-1)
CSARDLKQGMNNEQFF

SEQ ID NO: 219109 - protein, 15 aa, Homo sapiens
  CDR3 for alpha chain variable domain of TCR clone 109555 (TRAV38-1, TRAJ37)
CAFIHGSGNTGKLIF

SEQ ID NO: 219110 - protein, 12 aa, Homo sapiens
  CDR3 for beta chain variable domain of TCR clone 109555 (TRBV12-4, TRBJ2-7)
CASSLGGYEQYF

SEQ ID NO: 219111 - protein, 15 aa, Homo sapiens
  CDR3 for alpha chain variable domain of TCR clone 109556 (TRAV34, TRAJ38)
CGADFTPGNNRKLIW

SEQ ID NO: 219112 - protein, 12 aa, Homo sapiens
  CDR3 for beta chain variable domain of TCR clone 109556 (TRBV7-8, TRBJ2-7)
CASSLGDREQYF

SEQ ID NO: 219113 - protein, 16 aa, Homo sapiens
  CDR3 for alpha chain variable domain of TCR clone 109557 (TRAV3, TRAJ21)
CAVRDIERVNLNKFYF

SEQ ID NO: 219114 - protein, 11 aa, Homo sapiens
  CDR3 for beta chain variable domain of TCR clone 109557 (TRBV11-2, TRBJ2-2)
CASSLPGELFF

SEQ ID NO: 219115 - protein, 15 aa, Homo sapiens
  CDR3 for alpha chain variable domain of TCR clone 109558 (TRAV3, TRAJ45)
CAVRTPWGGADGLTF

SEQ ID NO: 219116 - protein, 16 aa, Homo sapiens
  CDR3 for beta chain variable domain of TCR clone 109558 (TRBV6-1, TRBJ2-2)
CASSFGQGTNTGELFF

SEQ ID NO: 219117 - protein, 13 aa, Homo sapiens
  CDR3 for alpha chain variable domain of TCR clone 109559 (TRAV17, TRAJ4)
CATKSDGYNKLIF

SEQ ID NO: 219118 - protein, 14 aa, Homo sapiens
  CDR3 for beta chain variable domain of TCR clone 109559 (TRBV20-1, TRBJ1-5)
CSARDDRGNQPQHF

SEQ ID NO: 219119 - protein, 13 aa, Homo sapiens
  CDR3 for alpha chain variable domain of TCR clone 109560 (TRAV27, TRAJ17)
CAGAATAGNKLTF

SEQ ID NO: 219120 - protein, 15 aa, Homo sapiens
  CDR3 for beta chain variable domain of TCR clone 109560 (TRBV5-1, TRBJ2-3)
CASRNQAGSTDTQHF

SEQ ID NO: 219121 - protein, 13 aa, Homo sapiens
  CDR3 for alpha chain variable domain of TCR clone 109561 (TRAV38-2/DV8, TRAJ34)
CAYRNYNTDKLIF

SEQ ID NO: 219122 - protein, 15 aa, Homo sapiens
  CDR3 for beta chain variable domain of TCR clone 109561 (TRBV20-1, TRBJ2-5)
CSAEGTGGLQENQYF

SEQ ID NO: 219123 - protein, 13 aa, Homo sapiens
  CDR3 for alpha chain variable domain of TCR clone 109562 (TRAV8-6, TRAJ21)
CAVSPSSLNKLYF

SEQ ID NO: 219124 - protein, 14 aa, Homo sapiens
  CDR3 for beta chain variable domain of TCR clone 109562 (TRBV7-9, TRBJ2-5)
CASSLDTAQETQYF

SEQ ID NO: 219125 - protein, 13 aa, Homo sapiens
  CDR3 for alpha chain variable domain of TCR clone 109563 (TRAV13-2, TRAJ53)
CAENRGSNYKLTF

SEQ ID NO: 219126 - protein, 13 aa, Homo sapiens
  CDR3 for beta chain variable domain of TCR clone 109563 (TRBV4-1, TRBJ2-2)
CASSQENTGELFF

SEQ ID NO: 219127 - protein, 11 aa, Homo sapiens
  CDR3 for alpha chain variable domain of TCR clone 109564 (TRAV12-2, TRAJ54)
CAVEGAQKLVF

SEQ ID NO: 219128 - protein, 17 aa, Homo sapiens
  CDR3 for beta chain variable domain of TCR clone 109564 (TRBV18, TRBJ1-3)
CASSPYPTGPSGNTIYF

SEQ ID NO: 219129 - protein, 16 aa, Homo sapiens
  CDR3 for alpha chain variable domain of TCR clone 109565 (TRAV3, TRAJ37)
CAVRPHGSGNTGKRIF

SEQ ID NO: 219130 - protein, 11 aa, Homo sapiens
  CDR3 for beta chain variable domain of TCR clone 109565 (TRBV10-3, TRBJ2-7)
CAISEGLEQYF

SEQ ID NO: 219131 - protein, 14 aa, Homo sapiens
  CDR3 for alpha chain variable domain of TCR clone 109566 (TRAV12-1, TRAJ38)
CVVNNAGNNRKLIW

SEQ ID NO: 219132 - protein, 16 aa, Homo sapiens
  CDR3 for beta chain variable domain of TCR clone 109566 (TRBV7-2, TRBJ1-2)
CAWSRQGGGANYGYTF

SEQ ID NO: 219133 - protein, 14 aa, Homo sapiens
  CDR3 for alpha chain variable domain of TCR clone 109567 (TRAV17, TRAJ32)
CATDPGGTTNKLIF

SEQ ID NO: 219134 - protein, 14 aa, Homo sapiens
  CDR3 for beta chain variable domain of TCR clone 109567 (TRBV2, TRBJ1-5)
CASSENRGGQPQHF

SEQ ID NO: 219135 - protein, 12 aa, Homo sapiens
  CDR3 for alpha chain variable domain of TCR clone 109568 (TRAV13-1, TRAJ49)
CAASPMGNQFYC

SEQ ID NO: 219136 - protein, 13 aa, Homo sapiens
  CDR3 for beta chain variable domain of TCR clone 109568 (TRBV20-1, TRBJ2-2)
CSASAAGTGELFF

SEQ ID NO: 219137 - protein, 13 aa, Homo sapiens
  CDR3 for alpha chain variable domain of TCR clone 109569 (TRAV8-3, TRAJ28)
CAVGAVGSYQLTF

SEQ ID NO: 219138 - protein, 15 aa, Homo sapiens
  CDR3 for beta chain variable domain of TCR clone 109569 (TRBV7-9, TRBJ1-5)
CAISQGHQPNQPQHF

SEQ ID NO: 219139 - protein, 16 aa, Homo sapiens
  CDR3 for alpha chain variable domain of TCR clone 109570 (TRAV12-3, TRAJ45)
CAMGWGSGGGADGLTF

SEQ ID NO: 219140 - protein, 11 aa, Homo sapiens
  CDR3 for beta chain variable domain of TCR clone 109570 (TRBV19, TRBJ1-1)
CASSIGSEAFF

SEQ ID NO: 219141 - protein, 12 aa, Homo sapiens
  CDR3 for alpha chain variable domain of TCR clone 109571 (TRAV2, TRAJ9)
CAVGAGGFKTIF

SEQ ID NO: 219142 - protein, 12 aa, Homo sapiens
  CDR3 for beta chain variable domain of TCR clone 109571 (TRBV14, TRBJ2-7)
CASSSLKGEQYF

SEQ ID NO: 219143 - protein, 16 aa, Homo sapiens
  CDR3 for alpha chain variable domain of TCR clone 109572 (TRAV30, TRAJ24)
CGTEIVDADGWGKFQF

SEQ ID NO: 219144 - protein, 13 aa, Homo sapiens
  CDR3 for beta chain variable domain of TCR clone 109572 (TRBV18, TRBJ1-2)
CASSASATEGYTF

SEQ ID NO: 219145 - protein, 15 aa, Homo sapiens
  CDR3 for alpha chain variable domain of TCR clone 109573 (TRAV13-1, TRAJ44)
CAASRGGGTASKLTF

SEQ ID NO: 219146 - protein, 14 aa, Homo sapiens
  CDR3 for beta chain variable domain of TCR clone 109573 (TRBV7-3, TRBJ2-1)
CASSLAGGTNEQFF

SEQ ID NO: 219147 - protein, 13 aa, Homo sapiens
  CDR3 for alpha chain variable domain of TCR clone 109574 (TRAV12-3, TRAJ35)
CAMAIGFGNVLHC

SEQ ID NO: 219148 - protein, 14 aa, Homo sapiens
  CDR3 for beta chain variable domain of TCR clone 109574 (TRBV12-4, TRBJ1-1)
CASSLRSSGTEAFF

SEQ ID NO: 219149 - protein, 16 aa, Homo sapiens
  CDR3 for alpha chain variable domain of TCR clone 109575 (TRAV30, TRAJ24)
CGTEIVVADSWGKFQF

SEQ ID NO: 219150 - protein, 15 aa, Homo sapiens
  CDR3 for beta chain variable domain of TCR clone 109575 (TRBV7-9, TRBJ1-4)
CASSARTGGNEKLFF

SEQ ID NO: 219151 - protein, 11 aa, Homo sapiens
  CDR3 for alpha chain variable domain of TCR clone 109576 (TRAV12-2, TRAJ54)
CAVEGARKLVF

SEQ ID NO: 219152 - protein, 17 aa, Homo sapiens
  CDR3 for beta chain variable domain of TCR clone 109576 (TRBV18, TRBJ1-3)
CASSPYPTGPSGNTIYF

SEQ ID NO: 219153 - protein, 13 aa, Homo sapiens
  CDR3 for alpha chain variable domain of TCR clone 109577 (TRAV21, TRAJ11)
FAVPNSGYSTLTF

SEQ ID NO: 219154 - protein, 13 aa, Homo sapiens
  CDR3 for beta chain variable domain of TCR clone 109577 (TRBV3-1, TRBJ2-7)
CASSLRDGYEQYF

SEQ ID NO: 219155 - protein, 12 aa, Homo sapiens
  CDR3 for alpha chain variable domain of TCR clone 109578 (TRAV21, TRAJ23)
CAVMLQGGKLIF

SEQ ID NO: 219156 - protein, 14 aa, Homo sapiens
  CDR3 for beta chain variable domain of TCR clone 109578 (TRBV7-9, TRBJ1-4)
CSITEGEANEKLFF

SEQ ID NO: 219157 - protein, 12 aa, Homo sapiens
  CDR3 for alpha chain variable domain of TCR clone 109579 (TRAV16, TRAJ26)
CALRSYGQNFVF

SEQ ID NO: 219158 - protein, 12 aa, Homo sapiens
  CDR3 for beta chain variable domain of TCR clone 109579 (TRBV11-2, TRBJ2-1)
CASSPGNNEQFF

SEQ ID NO: 219159 - protein, 14 aa, Homo sapiens
  CDR3 for alpha chain variable domain of TCR clone 109580 (TRAV3, TRAJ37)
CAVKESGNTGKLIF

SEQ ID NO: 219160 - protein, 15 aa, Homo sapiens
  CDR3 for beta chain variable domain of TCR clone 109580 (TRBV10-2, TRBJ2-6)
CASSEQGTGANVLTF

SEQ ID NO: 219161 - protein, 12 aa, Homo sapiens
  CDR3 for alpha chain variable domain of TCR clone 109581 (TRAV26-2, TRAJ21)
CILKGNFNKFHF

SEQ ID NO: 219162 - protein, 14 aa, Homo sapiens
  CDR3 for beta chain variable domain of TCR clone 109581 (TRBV7-9, TRBJ1-1)
CASTPLQSYTEAFF

SEQ ID NO: 219163 - protein, 14 aa, Homo sapiens
  CDR3 for alpha chain variable domain of TCR clone 109582 (TRAV1-2, TRAJ8)
CAVRADTGFQKLVF

SEQ ID NO: 219164 - protein, 16 aa, Homo sapiens
  CDR3 for beta chain variable domain of TCR clone 109582 (TRBV7-9, TRBJ2-1)
CASSDVAGGSYNEQFF

SEQ ID NO: 219165 - protein, 14 aa, Homo sapiens
  CDR3 for alpha chain variable domain of TCR clone 109583 (TRAV21, TRAJ28)
CAVGFGAGSYQLTF

SEQ ID NO: 219166 - protein, 14 aa, Homo sapiens
  CDR3 for beta chain variable domain of TCR clone 109583 (TRBV18, TRBJ1-4)
CASSPGPNGEKLFF

SEQ ID NO: 219167 - protein, 17 aa, Homo sapiens
  CDR3 for alpha chain variable domain of TCR clone 109584 (TRAV3, TRAJ6)
CAVRDGSRAGGSYIPTF

SEQ ID NO: 219168 - protein, 15 aa, Homo sapiens
  CDR3 for beta chain variable domain of TCR clone 109584 (TRBV7-8, TRBJ1-5)
CASSLERRGLEPQHF

SEQ ID NO: 219169 - protein, 12 aa, Homo sapiens
  CDR3 for alpha chain variable domain of TCR clone 109585 (TRAV12-3, TRAJ40)
CAMSSGTYKNIF

SEQ ID NO: 219170 - protein, 15 aa, Homo sapiens
  CDR3 for beta chain variable domain of TCR clone 109585 (TRBV7-3, TRBJ2-2)
CASSETGQGTGELFF

SEQ ID NO: 219171 - protein, 15 aa, Homo sapiens
  CDR3 for alpha chain variable domain of TCR clone 109586 (TRAV27, TRAJ38)
CAARRNAGNNRKLIW

SEQ ID NO: 219172 - protein, 16 aa, Homo sapiens
  CDR3 for beta chain variable domain of TCR clone 109586 (TRBV7-8, TRBJ2-4)
CASSAERTLAKNIQYF

SEQ ID NO: 219173 - protein, 13 aa, Homo sapiens
  CDR3 for alpha chain variable domain of TCR clone 109587 (TRAV13-1, TRAJ39)
CAASIWAGNMLTF

SEQ ID NO: 219174 - protein, 15 aa, Homo sapiens
  CDR3 for beta chain variable domain of TCR clone 109587 (TRBV7-9, TRBJ1-1)
CASSLLEQGGSEAFF

SEQ ID NO: 219175 - protein, 10 aa, Homo sapiens
  CDR3 for alpha chain variable domain of TCR clone 109588 (TRAV23/DV6, TRAJ57)
CAASSTLSQG

SEQ ID NO: 219176 - protein, 14 aa, Homo sapiens
  CDR3 for beta chain variable domain of TCR clone 109588 (TRBV25-1, TRBJ1-1)
CASTHLGGNTEASL

SEQ ID NO: 219177 - protein, 17 aa, Homo sapiens
  CDR3 for alpha chain variable domain of TCR clone 109589 (TRAV3, TRAJ42)
CAVRDRDYGGSQGNLIF

SEQ ID NO: 219178 - protein, 17 aa, Homo sapiens
  CDR3 for beta chain variable domain of TCR clone 109589 (TRBV12-4, TRBJ2-1)
CASSPGLAGGRINEQFF

SEQ ID NO: 219179 - protein, 10 aa, Homo sapiens
  CDR3 for alpha chain variable domain of TCR clone 109590 (TRAV36/DV7, TRAJ48)
CAVGNEKLTF

SEQ ID NO: 219180 - protein, 16 aa, Homo sapiens
  CDR3 for beta chain variable domain of TCR clone 109590 (TRBV5-1, TRBJ2-2)
CASSSRTGGRTGELFF

SEQ ID NO: 219181 - protein, 14 aa, Homo sapiens
  CDR3 for alpha chain variable domain of TCR clone 109591 (TRAV8-1, TRAJ24)
CAVNAADSWGKLPF

SEQ ID NO: 219182 - protein, 16 aa, Homo sapiens
  CDR3 for beta chain variable domain of TCR clone 109591 (TRBV4-3, TRBJ2-1)
CASSPALDRGVNEQFF

SEQ ID NO: 219183 - protein, 13 aa, Homo sapiens
  CDR3 for alpha chain variable domain of TCR clone 109592 (TRAV27, TRAJ43)
CAGAGNNNNDIRF

SEQ ID NO: 219184 - protein, 15 aa, Homo sapiens
  CDR3 for beta chain variable domain of TCR clone 109592 (TRBV20-1, TRBJ2-7)
CSARDRVSGMDEQYF

SEQ ID NO: 219185 - protein, 12 aa, Homo sapiens
  CDR3 for alpha chain variable domain of TCR clone 109593 (TRAV13-1, TRAJ36)
WRGGAGANNPFF

SEQ ID NO: 219186 - protein, 16 aa, Homo sapiens
  CDR3 for beta chain variable domain of TCR clone 109593 (TRBV7-9, TRBJ2-5)
CASRLEIGTRKETQYF

SEQ ID NO: 219187 - protein, 15 aa, Homo sapiens
  CDR3 for alpha chain variable domain of TCR clone 109594 (TRAV12-1, TRAJ10)
CVVNKLTGGGNKLTF

SEQ ID NO: 219188 - protein, 17 aa, Homo sapiens
  CDR3 for beta chain variable domain of TCR clone 109594 (TRBV5-1, TRBJ1-6)
CASSPSLQGSVNSPLHF

SEQ ID NO: 219189 - protein, 14 aa, Homo sapiens
  CDR3 for alpha chain variable domain of TCR clone 109595 (TRAV12-2, TRAJ11)
CAVNMNSGYSTLTF

SEQ ID NO: 219190 - protein, 15 aa, Homo sapiens
  CDR3 for beta chain variable domain of TCR clone 109595 (TRBV11-3, TRBJ2-3)
CASLKDGREGDTQYF

SEQ ID NO: 219191 - protein, 11 aa, Homo sapiens
  CDR3 for alpha chain variable domain of TCR clone 109596 (TRAV2, TRAJ13)
CASGGYQKVTF

SEQ ID NO: 219192 - protein, 16 aa, Homo sapiens
  CDR3 for beta chain variable domain of TCR clone 109596 (TRBV20-1, TRBJ2-7)
CSASTSGRLSSYEQYF

SEQ ID NO: 219193 - protein, 12 aa, Homo sapiens
  CDR3 for alpha chain variable domain of TCR clone 109597 (TRAV2, TRAJ31)
CAVEDNNARLMF

SEQ ID NO: 219194 - protein, 12 aa, Homo sapiens
  CDR3 for beta chain variable domain of TCR clone 109597 (TRBV12-4, TRBJ2-7)
CASSLGGYEQYF

SEQ ID NO: 219195 - protein, 14 aa, Homo sapiens
  CDR3 for alpha chain variable domain of TCR clone 109598 (TRAV4, TRAJ17)
CLVGDMAAGNKLIF

SEQ ID NO: 219196 - protein, 15 aa, Homo sapiens
  CDR3 for beta chain variable domain of TCR clone 109598 (TRBV5-5, TRBJ1-5)
CASSSTPGSNQPQHF

SEQ ID NO: 219197 - protein, 12 aa, Homo sapiens
  CDR3 for alpha chain variable domain of TCR clone 109599 (TRAV29/DV5, TRAJ15)
CASNQAGIALIF

SEQ ID NO: 219198 - protein, 15 aa, Homo sapiens
  CDR3 for beta chain variable domain of TCR clone 109599 (TRBV11-2, TRBJ2-2)
CASSSDRVNAGELFF

SEQ ID NO: 219199 - protein, 12 aa, Homo sapiens
  CDR3 for alpha chain variable domain of TCR clone 109600 (TRAV12-1, TRAJ23)
CVVNSCGGKLIF

SEQ ID NO: 219200 - protein, 16 aa, Homo sapiens
  CDR3 for beta chain variable domain of TCR clone 109600 (TRBV20-1, TRBJ1-4)
CSAPGQGLLTNEKLFF

SEQ ID NO: 219201 - protein, 11 aa, Homo sapiens
  CDR3 for alpha chain variable domain of TCR clone 109601 (TRAV12-2, TRAJ33)
CAVTSNYHLIW

SEQ ID NO: 219202 - protein, 14 aa, Homo sapiens
  CDR3 for beta chain variable domain of TCR clone 109601 (TRBV28, TRBJ2-2)
CASRIRSGTGELFF

SEQ ID NO: 219203 - protein, 13 aa, Homo sapiens
  CDR3 for alpha chain variable domain of TCR clone 109602 (TRAV13-2, TRAJ13)
CAERTGGYQKVTF

SEQ ID NO: 219204 - protein, 16 aa, Homo sapiens
  CDR3 for beta chain variable domain of TCR clone 109602 (TRBV18, TRBJ2-5)
CASSPPSSGGAKTQYF

SEQ ID NO: 219205 - protein, 16 aa, Homo sapiens
  CDR3 for alpha chain variable domain of TCR clone 109603 (TRAV12-3, TRAJ53)
CAMSVGSGGSNYKPTF

SEQ ID NO: 219206 - protein, 13 aa, Homo sapiens
  CDR3 for beta chain variable domain of TCR clone 109603 (TRBV4-2, TRBJ1-1)
CASSQAGNTEAFF

SEQ ID NO: 219207 - protein, 11 aa, Homo sapiens
  CDR3 for alpha chain variable domain of TCR clone 109604 (TRAV2, TRAJ13)
CASGGYQKVTF

SEQ ID NO: 219208 - protein, 18 aa, Homo sapiens
  CDR3 for beta chain variable domain of TCR clone 109604 (TRBV20-1, TRBJ2-3)
CSASGLAGGPGTTDTQYF

SEQ ID NO: 219209 - protein, 12 aa, Homo sapiens
  CDR3 for alpha chain variable domain of TCR clone 109605 (TRAV13-2, TRAJ23)
CAERHRGGKLIS

SEQ ID NO: 219210 - protein, 15 aa, Homo sapiens
  CDR3 for beta chain variable domain of TCR clone 109605 (TRBV7-9, TRBJ1-6)
CASSSPGRGNSPLHF

SEQ ID NO: 219211 - protein, 12 aa, Homo sapiens
  CDR3 for alpha chain variable domain of TCR clone 109606 (TRAV8-3, TRAJ26)
CAGDNYGQNFVF

SEQ ID NO: 219212 - protein, 14 aa, Homo sapiens
  CDR3 for beta chain variable domain of TCR clone 109606 (TRBV11-2, TRBJ1-2)
CASSLGTANYGYTF

SEQ ID NO: 219213 - protein, 18 aa, Homo sapiens
  CDR3 for alpha chain variable domain of TCR clone 109607 (TRAV13-1, TRAJ52)
CAAKNPNAGGTSYGKLTF

SEQ ID NO: 219214 - protein, 15 aa, Homo sapiens
  CDR3 for beta chain variable domain of TCR clone 109607 (TRBV7-6, TRBJ2-1)
CASSSLAGEGNEQFF

SEQ ID NO: 219215 - protein, 14 aa, Homo sapiens
  CDR3 for alpha chain variable domain of TCR clone 109608 (TRAV17, TRAJ32)
CATDPGGATNKLIF

SEQ ID NO: 219216 - protein, 14 aa, Homo sapiens
  CDR3 for beta chain variable domain of TCR clone 109608 (TRBV2, TRBJ1-5)
CASSGNRGGQPQHF

SEQ ID NO: 219217 - protein, 12 aa, Homo sapiens
  CDR3 for alpha chain variable domain of TCR clone 109609 (TRAV21, TRAJ13)
PGPSGGYQKVTF

SEQ ID NO: 219218 - protein, 13 aa, Homo sapiens
  CDR3 for beta chain variable domain of TCR clone 109609 (TRBV7-9, TRBJ1-2)
CASSLKQNYGYAF

SEQ ID NO: 219219 - protein, 12 aa, Homo sapiens
  CDR3 for alpha chain variable domain of TCR clone 109610 (TRAV12-2, TRAJ4)
GWPEGGYSKLIF

SEQ ID NO: 219220 - protein, 14 aa, Homo sapiens
  CDR3 for beta chain variable domain of TCR clone 109610 (TRBV7-2, TRBJ2-7)
CASSPKTSFYEQYF

SEQ ID NO: 219221 - protein, 14 aa, Homo sapiens
  CDR3 for alpha chain variable domain of TCR clone 109611 (TRAV12-2, TRAJ13)
CAVKKTGGYQKVTF

SEQ ID NO: 219222 - protein, 11 aa, Homo sapiens
  CDR3 for beta chain variable domain of TCR clone 109611 (TRBV25-1, TRBJ1-1)
PTWGGNTEAFF

SEQ ID NO: 219223 - protein, 14 aa, Homo sapiens
  CDR3 for alpha chain variable domain of TCR clone 109612 (TRAV8-3, TRAJ23)
CSVIIYNQGGKLIF

SEQ ID NO: 219224 - protein, 15 aa, Homo sapiens
  CDR3 for beta chain variable domain of TCR clone 109612 (TRBV18, TRBJ2-1)
CASSPPSASYNEQFF

SEQ ID NO: 219225 - protein, 14 aa, Homo sapiens
  CDR3 for alpha chain variable domain of TCR clone 109613 (TRAV1-2, TRAJ16)
CAVNRFSDGQKLIF

SEQ ID NO: 219226 - protein, 16 aa, Homo sapiens
  CDR3 for beta chain variable domain of TCR clone 109613 (TRBV12-4, TRBJ1-5)
CASSRPVGGSNQPQHF

SEQ ID NO: 219227 - protein, 23 aa, Homo sapiens
  CDR3 for alpha chain variable domain of TCR clone 109614 (TRAV26-1, )
CIADNAGNNNIQNPDPAVYQLRD

SEQ ID NO: 219228 - protein, 12 aa, Homo sapiens
  CDR3 for beta chain variable domain of TCR clone 109614 (TRBV11-2, TRBJ2-2)
CASSLGGGELFF

SEQ ID NO: 219229 - protein, 14 aa, Homo sapiens
  CDR3 for alpha chain variable domain of TCR clone 109615 (TRAV12-1, TRAJ22)
CVVNVGGSARQLTF

SEQ ID NO: 219230 - protein, 15 aa, Homo sapiens
  CDR3 for beta chain variable domain of TCR clone 109615 (TRBV28, TRBJ2-7)
CASRPWDRFSYEQYF

SEQ ID NO: 219231 - protein, 15 aa, Homo sapiens
  CDR3 for alpha chain variable domain of TCR clone 109616 (TRAV12-1, TRAJ42)
CVVTRDGGSQGNLIF

SEQ ID NO: 219232 - protein, 14 aa, Homo sapiens
  CDR3 for beta chain variable domain of TCR clone 109616 (TRBV11-2, TRBJ2-3)
CASSLGGGANTQCF

SEQ ID NO: 219233 - protein, 13 aa, Homo sapiens
  CDR3 for alpha chain variable domain of TCR clone 109617 (TRAV26-1, TRAJ34)
WIVRPWITDKLIF

SEQ ID NO: 219234 - protein, 13 aa, Homo sapiens
  CDR3 for beta chain variable domain of TCR clone 109617 (TRBV5-1, TRBJ2-1)
CASSLGSYNEQFF

SEQ ID NO: 219235 - protein, 13 aa, Homo sapiens
  CDR3 for alpha chain variable domain of TCR clone 109618 (TRAV3, TRAJ27)
CAVRPLGAGKSTF

SEQ ID NO: 219236 - protein, 16 aa, Homo sapiens
  CDR3 for beta chain variable domain of TCR clone 109618 (TRBV7-9, TRBJ1-2)
CASSLGFSSGEDGYTF

SEQ ID NO: 219237 - protein, 12 aa, Homo sapiens
  CDR3 for alpha chain variable domain of TCR clone 109619 (TRAV3, TRAJ31)
CAVRDGNARLMF

SEQ ID NO: 219238 - protein, 18 aa, Homo sapiens
  CDR3 for beta chain variable domain of TCR clone 109619 (TRBV7-2, TRBJ2-3)
CASSLKKEGSGITDTQYF

SEQ ID NO: 219239 - protein, 16 aa, Homo sapiens
  CDR3 for alpha chain variable domain of TCR clone 109620 (TRAV26-1, )
CIAIQNPDPAVYQLRD

SEQ ID NO: 219240 - protein, 19 aa, Homo sapiens
  CDR3 for beta chain variable domain of TCR clone 109620 (TRBV19, TRBJ2-5)
CASSIGQVTDFFLGETQYF

SEQ ID NO: 219241 - protein, 15 aa, Homo sapiens
  CDR3 for alpha chain variable domain of TCR clone 109621 (TRAV3, TRAJ22)
CAVRDRGGSSRQLTF

SEQ ID NO: 219242 - protein, 14 aa, Homo sapiens
  CDR3 for beta chain variable domain of TCR clone 109621 (TRBV19, TRBJ1-5)
CASSLGLIGQPQHF

SEQ ID NO: 219243 - protein, 15 aa, Homo sapiens
  CDR3 for alpha chain variable domain of TCR clone 109622 (TRAV3, TRAJ4)
CAVRDGTGVYNKLIF

SEQ ID NO: 219244 - protein, 15 aa, Homo sapiens
  CDR3 for beta chain variable domain of TCR clone 109622 (TRBV27, TRBJ2-7)
CASSPDQGRLYEQYF

SEQ ID NO: 219245 - protein, 21 aa, Homo sapiens
  CDR3 for alpha chain variable domain of TCR clone 109623 (TRAV8-4, TRAJ47)
HLTKPSAHMSDAAERGNKLVF

SEQ ID NO: 219246 - protein, 14 aa, Homo sapiens
  CDR3 for beta chain variable domain of TCR clone 109623 (TRBV12-4, TRBJ2-5)
CASSLWQKQETQYL

SEQ ID NO: 219247 - protein, 18 aa, Homo sapiens
  CDR3 for alpha chain variable domain of TCR clone 109624 (TRAV26-2, TRAJ45)
CILRLWGYSGGGADGLTF

SEQ ID NO: 219248 - protein, 17 aa, Homo sapiens
  CDR3 for beta chain variable domain of TCR clone 109624 (TRBV28, TRBJ2-3)
CASSPTPAGGRVDKQYF

SEQ ID NO: 219249 - protein, 13 aa, Homo sapiens
  CDR3 for alpha chain variable domain of TCR clone 109625 (TRAV20, TRAJ37)
CAGCSSNTGKLIF

SEQ ID NO: 219250 - protein, 15 aa, Homo sapiens
  CDR3 for beta chain variable domain of TCR clone 109625 (TRBV20-1, TRBJ2-5)
CSAPPRTGFGETQYF

SEQ ID NO: 219251 - protein, 13 aa, Homo sapiens
  CDR3 for alpha chain variable domain of TCR clone 109626 (TRAV21, TRAJ37)
CAVSSGNTGKLIF

SEQ ID NO: 219252 - protein, 17 aa, Homo sapiens
  CDR3 for beta chain variable domain of TCR clone 109626 (TRBV5-1, TRBJ2-5)
CASSLLGLVANQETQYF

SEQ ID NO: 219253 - protein, 12 aa, Homo sapiens
  CDR3 for alpha chain variable domain of TCR clone 109627 (TRAV2, TRAJ26)
CAGSPGRLWSEF

SEQ ID NO: 219254 - protein, 13 aa, Homo sapiens
  CDR3 for beta chain variable domain of TCR clone 109627 (TRBV12-4, TRBJ1-1)
CASSPGTGFEAFF

SEQ ID NO: 219255 - protein, 15 aa, Homo sapiens
  CDR3 for alpha chain variable domain of TCR clone 109628 (TRAV26-1, TRAJ29)
CIVRVEGSGNTPLVF

SEQ ID NO: 219256 - protein, 13 aa, Homo sapiens
  CDR3 for beta chain variable domain of TCR clone 109628 (TRBV7-6, TRBJ1-2)
CASSLVADYGYTF

SEQ ID NO: 219257 - protein, 16 aa, Homo sapiens
  CDR3 for alpha chain variable domain of TCR clone 109629 (TRAV3, TRAJ37)
CAVRGKGSGNTGKLIF

SEQ ID NO: 219258 - protein, 13 aa, Homo sapiens
  CDR3 for beta chain variable domain of TCR clone 109629 (TRBV14, TRBJ2-7)
CASSQDRGYEQYF

SEQ ID NO: 219259 - protein, 13 aa, Homo sapiens
  CDR3 for alpha chain variable domain of TCR clone 109630 (TRAV21, TRAJ20)
CGVGLRVDYKLSF

SEQ ID NO: 219260 - protein, 13 aa, Homo sapiens
  CDR3 for beta chain variable domain of TCR clone 109630 (TRBV6-1, TRBJ1-1)
CASSRQGNTEAFF

SEQ ID NO: 219261 - protein, 13 aa, Homo sapiens
  CDR3 for alpha chain variable domain of TCR clone 109631 (TRAV8-3, TRAJ43)
CAVAPYNNNDMRF

SEQ ID NO: 219262 - protein, 16 aa, Homo sapiens
  CDR3 for beta chain variable domain of TCR clone 109631 (TRBV7-2, TRBJ2-5)
CASSPFPTGGEETQYF

SEQ ID NO: 219263 - protein, 16 aa, Homo sapiens
  CDR3 for alpha chain variable domain of TCR clone 109632 (TRAV3, TRAJ4)
RAVRPSPSGGYNKLIF

SEQ ID NO: 219264 - protein, 12 aa, Homo sapiens
  CDR3 for beta chain variable domain of TCR clone 109632 (TRBV7-9, TRBJ1-5)
CASSPQGQPQHF

SEQ ID NO: 219265 - protein, 15 aa, Homo sapiens
  CDR3 for alpha chain variable domain of TCR clone 109633 (TRAV29/DV5, TRAJ24)
CAASGATDSWGKFQF

SEQ ID NO: 219266 - protein, 13 aa, Homo sapiens
  CDR3 for beta chain variable domain of TCR clone 109633 (TRBV27, TRBJ1-4)
CASSLMGDEKLFF

SEQ ID NO: 219267 - protein, 13 aa, Homo sapiens
  CDR3 for alpha chain variable domain of TCR clone 109634 (TRAV3, TRAJ9)
CAFWNTGGFKTIF

SEQ ID NO: 219268 - protein, 13 aa, Homo sapiens
  CDR3 for beta chain variable domain of TCR clone 109634 (TRBV7-9, TRBJ2-2)
CASSLDPTGELFF

SEQ ID NO: 219269 - protein, 12 aa, Homo sapiens
  CDR3 for alpha chain variable domain of TCR clone 109635 (TRAV1-1, TRAJ8)
CAGGTGFQKLVF

SEQ ID NO: 219270 - protein, 15 aa, Homo sapiens
  CDR3 for beta chain variable domain of TCR clone 109635 (TRBV7-9, TRBJ1-4)
CASSRSGGFNEKLFF

SEQ ID NO: 219271 - protein, 17 aa, Homo sapiens
  CDR3 for alpha chain variable domain of TCR clone 109636 (TRAV13-1, TRAJ31)
CAPRDRLMFGDGTQLVV

SEQ ID NO: 219272 - protein, 12 aa, Homo sapiens
  CDR3 for beta chain variable domain of TCR clone 109636 (TRBV7-3, TRBJ1-1)
CQQPGLGAEAFF

SEQ ID NO: 219273 - protein, 15 aa, Homo sapiens
  CDR3 for alpha chain variable domain of TCR clone 109637 (TRAV25, TRAJ52)
CAGTSGGTSYGKLTF

SEQ ID NO: 219274 - protein, 14 aa, Homo sapiens
  CDR3 for beta chain variable domain of TCR clone 109637 (TRBV28, TRBJ1-5)
CASSLGVLVKPQHF

SEQ ID NO: 219275 - protein, 15 aa, Homo sapiens
  CDR3 for alpha chain variable domain of TCR clone 109638 (TRAV38-1, TRAJ37)
CAFIFDSGNTGKLIF

SEQ ID NO: 219276 - protein, 12 aa, Homo sapiens
  CDR3 for beta chain variable domain of TCR clone 109638 (TRBV7-9, TRBJ2-7)
CASSLEGYEQYF

SEQ ID NO: 219277 - protein, 18 aa, Homo sapiens
  CDR3 for alpha chain variable domain of TCR clone 109639 (TRAV1-1, TRAJ12)
CLLLLRCERGDSSYKLIF

SEQ ID NO: 219278 - protein, 15 aa, Homo sapiens
  CDR3 for beta chain variable domain of TCR clone 109639 (TRBV18, TRBJ2-5)
CASTDRGPREETQYF

SEQ ID NO: 219279 - protein, 14 aa, Homo sapiens
  CDR3 for alpha chain variable domain of TCR clone 109640 (TRAV1-2, TRAJ16)
CAVNRLSDGQKLLF

SEQ ID NO: 219280 - protein, 11 aa, Homo sapiens
  CDR3 for beta chain variable domain of TCR clone 109640 (TRBV11-2, TRBJ2-2)
CASSLPGELFF

SEQ ID NO: 219281 - protein, 15 aa, Homo sapiens
  CDR3 for alpha chain variable domain of TCR clone 109641 (TRAV23/DV6, TRAJ37)
CAAGEGSSNTVKLIF

SEQ ID NO: 219282 - protein, 17 aa, Homo sapiens
  CDR3 for beta chain variable domain of TCR clone 109641 (TRBV20-1, TRBJ2-7)
CSATRAGGVAGVEEQYF

SEQ ID NO: 219283 - protein, 13 aa, Homo sapiens
  CDR3 for alpha chain variable domain of TCR clone 109642 (TRAV1-2, TRAJ12)
CAVSMDSSYKLIF

SEQ ID NO: 219284 - protein, 14 aa, Homo sapiens
  CDR3 for beta chain variable domain of TCR clone 109642 (TRBV12-4, TRBJ2-2)
CASNQGANTGELFF

SEQ ID NO: 219285 - protein, 13 aa, Homo sapiens
  CDR3 for alpha chain variable domain of TCR clone 109643 (TRAV27, TRAJ45)
CRSSGGGADGLTF

SEQ ID NO: 219286 - protein, 16 aa, Homo sapiens
  CDR3 for beta chain variable domain of TCR clone 109643 (TRBV5-1, TRBJ2-3)
CASSSGRQDATDTQYF

SEQ ID NO: 219287 - protein, 14 aa, Homo sapiens
  CDR3 for alpha chain variable domain of TCR clone 109644 (TRAV16, TRAJ39)
CALSKNNAGNMLTF

SEQ ID NO: 219288 - protein, 15 aa, Homo sapiens
  CDR3 for beta chain variable domain of TCR clone 109644 (TRBV2, TRBJ2-1)
CASSELAGSYNEQFF

SEQ ID NO: 219289 - protein, 12 aa, Homo sapiens
  CDR3 for alpha chain variable domain of TCR clone 109645 (TRAV12-3, TRAJ17)
CAMTLTGNKLTF

SEQ ID NO: 219290 - protein, 14 aa, Homo sapiens
  CDR3 for beta chain variable domain of TCR clone 109645 (TRBV9, TRBJ2-4)
CASSPSGTSGFQYF

SEQ ID NO: 219291 - protein, 11 aa, Homo sapiens
  CDR3 for alpha chain variable domain of TCR clone 109646 (TRAV2, TRAJ13)
CASGGYQKGTF

SEQ ID NO: 219292 - protein, 15 aa, Homo sapiens
  CDR3 for beta chain variable domain of TCR clone 109646 (TRBV28, TRBJ1-3)
CASSMGWASGNTIYF

SEQ ID NO: 219293 - protein, 16 aa, Homo sapiens
  CDR3 for alpha chain variable domain of TCR clone 109647 (TRAV26-1, TRAJ53)
CIVRVAMGGSNYKLTF

SEQ ID NO: 219294 - protein, 17 aa, Homo sapiens
  CDR3 for beta chain variable domain of TCR clone 109647 (TRBV15, TRBJ1-4)
CATSRYVTGDPNEKLFF

SEQ ID NO: 219295 - protein, 13 aa, Homo sapiens
  CDR3 for alpha chain variable domain of TCR clone 109648 (TRAV13-2, TRAJ40)
CAGFTSGTYKYIF

SEQ ID NO: 219296 - protein, 14 aa, Homo sapiens
  CDR3 for beta chain variable domain of TCR clone 109648 (TRBV10-2, TRBJ1-5)
CASSSTGRNQPQHF

SEQ ID NO: 219297 - protein, 15 aa, Homo sapiens
  CDR3 for alpha chain variable domain of TCR clone 109649 (TRAV5, TRAJ33)
CAEAPATDSNYQLIW

SEQ ID NO: 219298 - protein, 14 aa, Homo sapiens
  CDR3 for beta chain variable domain of TCR clone 109649 (TRBV4-1, TRBJ2-2)
CASSQAVNTGELFF

SEQ ID NO: 219299 - protein, 17 aa, Homo sapiens
  CDR3 for alpha chain variable domain of TCR clone 109650 (TRAV12-2, TRAJ39)
CAVNNMLTSGGGTRLMV

SEQ ID NO: 219300 - protein, 17 aa, Homo sapiens
  CDR3 for beta chain variable domain of TCR clone 109650 (TRBV28, TRBJ2-5)
CASSRQGGLAGAETQYF

SEQ ID NO: 219301 - protein, 13 aa, Homo sapiens
  CDR3 for alpha chain variable domain of TCR clone 109651 (TRAV2, TRAJ15)
CAVASQAGTALIC

SEQ ID NO: 219302 - protein, 15 aa, Homo sapiens
  CDR3 for beta chain variable domain of TCR clone 109651 (TRBV7-3, TRBJ2-2)
CASSETGQGTGELFF

SEQ ID NO: 219303 - protein, 13 aa, Homo sapiens
  CDR3 for alpha chain variable domain of TCR clone 109652 (TRAV13-1, TRAJ43)
CAASKNNNNDMRC

SEQ ID NO: 219304 - protein, 15 aa, Homo sapiens
  CDR3 for beta chain variable domain of TCR clone 109652 (TRBV19, TRBJ1-1)
CASTSGQIQNTEAFF

SEQ ID NO: 219305 - protein, 14 aa, Homo sapiens
  CDR3 for alpha chain variable domain of TCR clone 109653 (TRAV1-2, TRAJ16)
CAVNRFSDGEKLLF

SEQ ID NO: 219306 - protein, 12 aa, Homo sapiens
  CDR3 for beta chain variable domain of TCR clone 109653 (TRBV11-2, TRBJ2-1)
CASSPGNNEQFF

SEQ ID NO: 219307 - protein, 10 aa, Homo sapiens
  CDR3 for alpha chain variable domain of TCR clone 109654 (TRAV8-3, TRAJ43)
CAVALADMRF

SEQ ID NO: 219308 - protein, 14 aa, Homo sapiens
  CDR3 for beta chain variable domain of TCR clone 109654 (TRBV4-2, TRBJ2-1)
CASGMDRAYNEQFF

SEQ ID NO: 219309 - protein, 16 aa, Homo sapiens
  CDR3 for alpha chain variable domain of TCR clone 109655 (TRAV12-1, TRAJ45)
CVVIRYSGGGADGLTF

SEQ ID NO: 219310 - protein, 14 aa, Homo sapiens
  CDR3 for beta chain variable domain of TCR clone 109655 (TRBV27, TRBJ1-1)
CASSLLSGLSEAFF

SEQ ID NO: 219311 - protein, 15 aa, Homo sapiens
  CDR3 for alpha chain variable domain of TCR clone 109656 (TRAV17, TRAJ4)
CATGTWSGGYNKLIF

SEQ ID NO: 219312 - protein, 14 aa, Homo sapiens
  CDR3 for beta chain variable domain of TCR clone 109656 (TRBV19, TRBJ2-1)
CASPTFVLSGEQFF

SEQ ID NO: 219313 - protein, 14 aa, Homo sapiens
  CDR3 for alpha chain variable domain of TCR clone 109657 (TRAV20, TRAJ42)
CAVQAGGSQGNLIF

SEQ ID NO: 219314 - protein, 18 aa, Homo sapiens
  CDR3 for beta chain variable domain of TCR clone 109657 (TRBV11-2, TRBJ2-3)
CASSLGGASRGAPNTQYF

SEQ ID NO: 219315 - protein, 14 aa, Homo sapiens
  CDR3 for alpha chain variable domain of TCR clone 109658 (TRAV36/DV7, TRAJ44)
CCGANTGTASKLTF

SEQ ID NO: 219316 - protein, 16 aa, Homo sapiens
  CDR3 for beta chain variable domain of TCR clone 109658 (TRBV7-9, TRBJ1-2)
CASSLGFSSGEDGYAF

SEQ ID NO: 219317 - protein, 14 aa, Homo sapiens
  CDR3 for alpha chain variable domain of TCR clone 109659 (TRAV12-1, TRAJ23)
CVVIVYNQGGKLIF

SEQ ID NO: 219318 - protein, 16 aa, Homo sapiens
  CDR3 for beta chain variable domain of TCR clone 109659 (TRBV20-1, TRBJ1-4)
CSAPGQGLLTNEKLFF

SEQ ID NO: 219319 - protein, 15 aa, Homo sapiens
  CDR3 for alpha chain variable domain of TCR clone 109660 (TRAV26-1, TRAJ22)
CIVRVSFRFCKATDL

SEQ ID NO: 219320 - protein, 16 aa, Homo sapiens
  CDR3 for beta chain variable domain of TCR clone 109660 (TRBV24-1, TRBJ2-3)
CATSDPGTGATDTQYF

SEQ ID NO: 219321 - protein, 13 aa, Homo sapiens
  CDR3 for alpha chain variable domain of TCR clone 109661 (TRAV21, TRAJ27)
CAALNTNAGKSTF

SEQ ID NO: 219322 - protein, 12 aa, Homo sapiens
  CDR3 for beta chain variable domain of TCR clone 109661 (TRBV7-8, TRBJ2-7)
CASEGGPHGQYF

SEQ ID NO: 219323 - protein, 10 aa, Homo sapiens
  CDR3 for alpha chain variable domain of TCR clone 109662 (TRAV23/DV6, TRAJ45)
TGGGADGLTF

SEQ ID NO: 219324 - protein, 15 aa, Homo sapiens
  CDR3 for beta chain variable domain of TCR clone 109662 (TRBV2, TRBJ2-3)
CASSDFEKATDTQYF

SEQ ID NO: 219325 - protein, 15 aa, Homo sapiens
  CDR3 for alpha chain variable domain of TCR clone 109663 (TRAV13-2, TRAJ6)
CAEKVLAGGSYIPTF

SEQ ID NO: 219326 - protein, 13 aa, Homo sapiens
  CDR3 for beta chain variable domain of TCR clone 109663 (TRBV7-3, TRBJ1-1)
CASSQDWGAEAFF

SEQ ID NO: 219327 - protein, 14 aa, Homo sapiens
  CDR3 for alpha chain variable domain of TCR clone 109664 (TRAV12-2, TRAJ11)
CAVEGGSGYSTLPF

SEQ ID NO: 219328 - protein, 16 aa, Homo sapiens
  CDR3 for beta chain variable domain of TCR clone 109664 (TRBV6-1, TRBJ1-2)
CASSGAWQGRSHGYTF

SEQ ID NO: 219329 - protein, 14 aa, Homo sapiens
  CDR3 for alpha chain variable domain of TCR clone 109665 (TRAV13-1, TRAJ52)
CAAAGGTSYGKLTF

SEQ ID NO: 219330 - protein, 12 aa, Homo sapiens
  CDR3 for beta chain variable domain of TCR clone 109665 (TRBV12-4, TRBJ2-7)
CASSLGGYEQYF

SEQ ID NO: 219331 - protein, 12 aa, Homo sapiens
  CDR3 for alpha chain variable domain of TCR clone 109666 (TRAV13-2, TRAJ23)
CAERHRGGKLIF

SEQ ID NO: 219332 - protein, 19 aa, Homo sapiens
  CDR3 for beta chain variable domain of TCR clone 109666 (TRBV7-9, TRBJ2-6)
CASSLESATVLPGANVLTF

SEQ ID NO: 219333 - protein, 11 aa, Homo sapiens
  CDR3 for alpha chain variable domain of TCR clone 109667 (TRAV21, TRAJ34)
CAHYNTDKLIF

SEQ ID NO: 219334 - protein, 13 aa, Homo sapiens
  CDR3 for beta chain variable domain of TCR clone 109667 (TRBV7-6, TRBJ1-2)
CTSSLVADYGYTF

SEQ ID NO: 219335 - protein, 13 aa, Homo sapiens
  CDR3 for alpha chain variable domain of TCR clone 109668 (TRAV27, TRAJ49)
CAPHPYTGNQFYF

SEQ ID NO: 219336 - protein, 18 aa, Homo sapiens
  CDR3 for beta chain variable domain of TCR clone 109668 (TRBV7-3, TRBJ2-5)
CASSLGGAAQGRWETQYF

SEQ ID NO: 219337 - protein, 14 aa, Homo sapiens
  CDR3 for alpha chain variable domain of TCR clone 109669 (TRAV35, TRAJ33)
CAGSSQDSNYQLIW

SEQ ID NO: 219338 - protein, 13 aa, Homo sapiens
  CDR3 for beta chain variable domain of TCR clone 109669 (TRBV28, TRBJ2-5)
CASSFAGGETQYF

SEQ ID NO: 219339 - protein, 13 aa, Homo sapiens
  CDR3 for alpha chain variable domain of TCR clone 109670 (TRAV16, TRAJ58)
CALRWASGPRLTF

SEQ ID NO: 219340 - protein, 16 aa, Homo sapiens
  CDR3 for beta chain variable domain of TCR clone 109670 (TRBV18, TRBJ2-2)
CASSPPRTANTGELFF

SEQ ID NO: 219341 - protein, 13 aa, Homo sapiens
  CDR3 for alpha chain variable domain of TCR clone 109671 (TRAV2, TRAJ40)
CAVVTSGTYKYIF

SEQ ID NO: 219342 - protein, 12 aa, Homo sapiens
  CDR3 for beta chain variable domain of TCR clone 109671 (TRBV28, TRBJ2-1)
CASSRLVGEQFF

SEQ ID NO: 219343 - protein, 14 aa, Homo sapiens
  CDR3 for alpha chain variable domain of TCR clone 109672 (TRAV35, TRAJ33)
CAGSSQDSNYQLIW

SEQ ID NO: 219344 - protein, 14 aa, Homo sapiens
  CDR3 for beta chain variable domain of TCR clone 109672 (TRBV7-3, TRBJ2-1)
CASSLAGGTNEQFF

SEQ ID NO: 219345 - protein, 11 aa, Homo sapiens
  CDR3 for alpha chain variable domain of TCR clone 109673 (TRAV8-3, TRAJ49)
FAVNTGNQFYF

SEQ ID NO: 219346 - protein, 12 aa, Homo sapiens
  CDR3 for beta chain variable domain of TCR clone 109673 (TRBV11-2, TRBJ2-7)
CASSPPADEQYF

SEQ ID NO: 219347 - protein, 20 aa, Homo sapiens
  CDR3 for alpha chain variable domain of TCR clone 109674 (TRAV12-1, TRAJ42)
SSVIQPPTSVKGGSQGNLIF

SEQ ID NO: 219348 - protein, 14 aa, Homo sapiens
  CDR3 for beta chain variable domain of TCR clone 109674 (TRBV20-1, TRBJ2-2)
CSARSGSNTGELFF

SEQ ID NO: 219349 - protein, 13 aa, Homo sapiens
  CDR3 for alpha chain variable domain of TCR clone 109675 (TRAV3, TRAJ21)
CAVREPDFNKFYF

SEQ ID NO: 219350 - protein, 16 aa, Homo sapiens
  CDR3 for beta chain variable domain of TCR clone 109675 (TRBV10-3, TRBJ2-1)
CAIRGGGRGDYNEQFF

SEQ ID NO: 219351 - protein, 13 aa, Homo sapiens
  CDR3 for alpha chain variable domain of TCR clone 109676 (TRAV8-3, TRAJ43)
CAVGIYNNNDMRF

SEQ ID NO: 219352 - protein, 16 aa, Homo sapiens
  CDR3 for beta chain variable domain of TCR clone 109676 (TRBV7-2, TRBJ2-5)
CASSLVLWTKQETQYV

SEQ ID NO: 219353 - protein, 11 aa, Homo sapiens
  CDR3 for alpha chain variable domain of TCR clone 109677 (TRAV2, TRAJ13)
CASGGYQKVTF

SEQ ID NO: 219354 - protein, 16 aa, Homo sapiens
  CDR3 for beta chain variable domain of TCR clone 109677 (TRBV2, TRBJ2-1)
CASGVGGSLSYNEQFF

SEQ ID NO: 219355 - protein, 15 aa, Homo sapiens
  CDR3 for alpha chain variable domain of TCR clone 109678 (TRAV12-3, TRAJ6)
CAMSATTGGSYIPTF

SEQ ID NO: 219356 - protein, 16 aa, Homo sapiens
  CDR3 for beta chain variable domain of TCR clone 109678 (TRBV20-1, TRBJ1-2)
CSASMGQGVANYGHTF

SEQ ID NO: 219357 - protein, 12 aa, Homo sapiens
  CDR3 for alpha chain variable domain of TCR clone 109679 (TRAV8-3, TRAJ26)
CAGDNYGQNFVF

SEQ ID NO: 219358 - protein, 15 aa, Homo sapiens
  CDR3 for beta chain variable domain of TCR clone 109679 (TRBV9, TRBJ2-1)
CPSSLAGSSYNEQFF

SEQ ID NO: 219359 - protein, 14 aa, Homo sapiens
  CDR3 for alpha chain variable domain of TCR clone 109680 (TRAV12-3, TRAJ10)
SHLPLTGGGNKLTF

SEQ ID NO: 219360 - protein, 15 aa, Homo sapiens
  CDR3 for beta chain variable domain of TCR clone 109680 (TRBV7-9, TRBJ1-4)
CASSRTGGFNDKLFF

SEQ ID NO: 219361 - protein, 15 aa, Homo sapiens
  CDR3 for alpha chain variable domain of TCR clone 109681 (TRAV29/DV5, TRAJ42)
CAAKTDGGSQGNRIF

SEQ ID NO: 219362 - protein, 15 aa, Homo sapiens
  CDR3 for beta chain variable domain of TCR clone 109681 (TRBV5-1, TRBJ2-2)
CASSSQGGNTGELFF

SEQ ID NO: 219363 - protein, 13 aa, Homo sapiens
  CDR3 for alpha chain variable domain of TCR clone 109682 (TRAV21, TRAJ57)
CAVTQGGSEMLVF

SEQ ID NO: 219364 - protein, 16 aa, Homo sapiens
  CDR3 for beta chain variable domain of TCR clone 109682 (TRBV29-1, TRBJ2-7)
CSVEDAEDGTAYEQYF

SEQ ID NO: 219365 - protein, 12 aa, Homo sapiens
  CDR3 for alpha chain variable domain of TCR clone 109683 (TRAV2, TRAJ31)
CAVEEGNARLMF

SEQ ID NO: 219366 - protein, 18 aa, Homo sapiens
  CDR3 for beta chain variable domain of TCR clone 109683 (TRBV7-9, TRBJ2-3)
CTSSLDLAGLATPDTQYF

SEQ ID NO: 219367 - protein, 14 aa, Homo sapiens
  CDR3 for alpha chain variable domain of TCR clone 109684 (TRAV4, TRAJ17)
CLVGDMAAGNTLTF

SEQ ID NO: 219368 - protein, 14 aa, Homo sapiens
  CDR3 for beta chain variable domain of TCR clone 109684 (TRBV4-1, TRBJ2-7)
CASSPVAGGDEQYF

SEQ ID NO: 219369 - protein, 15 aa, Homo sapiens
  CDR3 for alpha chain variable domain of TCR clone 109685 (TRAV3, TRAJ3)
CAVRDRDSSASKIIF

SEQ ID NO: 219370 - protein, 18 aa, Homo sapiens
  CDR3 for beta chain variable domain of TCR clone 109685 (TRBV25-1, TRBJ1-2)
CASSGLKNGQGLIFGYTF

SEQ ID NO: 219371 - protein, 14 aa, Homo sapiens
  CDR3 for alpha chain variable domain of TCR clone 109686 (TRAV26-1, TRAJ45)
CIEVTGGGADGLTF

SEQ ID NO: 219372 - protein, 16 aa, Homo sapiens
  CDR3 for beta chain variable domain of TCR clone 109686 (TRBV19, TRBJ2-1)
CASSKAGPSSYNEQFF

SEQ ID NO: 219373 - protein, 14 aa, Homo sapiens
  CDR3 for alpha chain variable domain of TCR clone 109687 (TRAV26-1, TRAJ38)
CIADNAGNNRKLIW

SEQ ID NO: 219374 - protein, 15 aa, Homo sapiens
  CDR3 for beta chain variable domain of TCR clone 109687 (TRBV7-2, TRBJ2-1)
CASSLVLAGGNEQFF

SEQ ID NO: 219375 - protein, 18 aa, Homo sapiens
  CDR3 for alpha chain variable domain of TCR clone 109688 (TRAV12-2, )
CAVEDIQNPDPAVYQLRD

SEQ ID NO: 219376 - protein, 15 aa, Homo sapiens
  CDR3 for beta chain variable domain of TCR clone 109688 (TRBV9, TRBJ1-6)
CASSVAGTGDSPLHF

SEQ ID NO: 219377 - protein, 13 aa, Homo sapiens
  CDR3 for alpha chain variable domain of TCR clone 109689 (TRAV1-2, TRAJ11)
CAVRDSGYSTLTF

SEQ ID NO: 219378 - protein, 16 aa, Homo sapiens
  CDR3 for beta chain variable domain of TCR clone 109689 (TRBV20-1, TRBJ1-4)
CSAPGQGLLTNEKPFF

SEQ ID NO: 219379 - protein, 17 aa, Homo sapiens
  CDR3 for alpha chain variable domain of TCR clone 109690 (TRAV3, TRAJ42)
CAVRDRNYGGSQGNLIF

SEQ ID NO: 219380 - protein, 14 aa, Homo sapiens
  CDR3 for beta chain variable domain of TCR clone 109690 (TRBV19, TRBJ2-5)
CASSMTGQQETQYF

SEQ ID NO: 219381 - protein, 11 aa, Homo sapiens
  CDR3 for alpha chain variable domain of TCR clone 109691 (TRAV17, TRAJ36)
CSPTGANNLFF

SEQ ID NO: 219382 - protein, 12 aa, Homo sapiens
  CDR3 for beta chain variable domain of TCR clone 109691 (TRBV29-1, TRBJ2-3)
CSVTGGADTQYF

SEQ ID NO: 219383 - protein, 14 aa, Homo sapiens
  CDR3 for alpha chain variable domain of TCR clone 109692 (TRAV34, TRAJ22)
CGADTSGSARQLTF

SEQ ID NO: 219384 - protein, 15 aa, Homo sapiens
  CDR3 for beta chain variable domain of TCR clone 109692 (TRBV5-1, TRBJ2-1)
GASSPPRAPYNEQFF

SEQ ID NO: 219385 - protein, 13 aa, Homo sapiens
  CDR3 for alpha chain variable domain of TCR clone 109693 (TRAV16, TRAJ31)
CALSAHNNARLMF

SEQ ID NO: 219386 - protein, 17 aa, Homo sapiens
  CDR3 for beta chain variable domain of TCR clone 109693 (TRBV12-4, TRBJ2-1)
CASSPGLAGGRIYEQFF

SEQ ID NO: 219387 - protein, 14 aa, Homo sapiens
  CDR3 for alpha chain variable domain of TCR clone 109694 (TRAV1-2, TRAJ16)
CAVNRFSDGQKLLF

SEQ ID NO: 219388 - protein, 18 aa, Homo sapiens
  CDR3 for beta chain variable domain of TCR clone 109694 (TRBV24-1, TRBJ2-1)
CATSDLMFLGRGVHEQFF

SEQ ID NO: 219389 - protein, 15 aa, Homo sapiens
  CDR3 for alpha chain variable domain of TCR clone 109695 (TRAV23/DV6, TRAJ18)
CAARYRGSTLGRLYF

SEQ ID NO: 219390 - protein, 13 aa, Homo sapiens
  CDR3 for beta chain variable domain of TCR clone 109695 (TRBV12-4, TRBJ1-2)
CASSLRQGKGYTF

SEQ ID NO: 219391 - protein, 16 aa, Homo sapiens
  CDR3 for alpha chain variable domain of TCR clone 109696 (TRAV8-3, TRAJ10)
CAVVPGVTGGGNKLTF

SEQ ID NO: 219392 - protein, 13 aa, Homo sapiens
  CDR3 for beta chain variable domain of TCR clone 109696 (TRBV18, TRBJ1-1)
CASSPGPSGEAFF

SEQ ID NO: 219393 - protein, 13 aa, Homo sapiens
  CDR3 for alpha chain variable domain of TCR clone 109697 (TRAV20, TRAJ31)
CAVQALGGARLMF

SEQ ID NO: 219394 - protein, 14 aa, Homo sapiens
  CDR3 for beta chain variable domain of TCR clone 109697 (TRBV2, TRBJ1-5)
CASSGTVSNQPQHF

SEQ ID NO: 219395 - protein, 12 aa, Homo sapiens
  CDR3 for alpha chain variable domain of TCR clone 109698 (TRAV3, TRAJ7)
CADLLWEQQTRF

SEQ ID NO: 219396 - protein, 13 aa, Homo sapiens
  CDR3 for beta chain variable domain of TCR clone 109698 (TRBV7-3, TRBJ2-5)
CASSFRGGEDQYF

SEQ ID NO: 219397 - protein, 15 aa, Homo sapiens
  CDR3 for alpha chain variable domain of TCR clone 109699 (TRAV36/DV7, TRAJ54)
CAVEKPVQGAQKLVF

SEQ ID NO: 219398 - protein, 17 aa, Homo sapiens
  CDR3 for beta chain variable domain of TCR clone 109699 (TRBV6-5, TRBJ1-2)
CASSSPWEGAFDYGDTF

SEQ ID NO: 219399 - protein, 19 aa, Homo sapiens
  CDR3 for alpha chain variable domain of TCR clone 109700 (TRAV12-3, TRAJ6)
CAMSARGGQEEATYLHLEE

SEQ ID NO: 219400 - protein, 12 aa, Homo sapiens
  CDR3 for beta chain variable domain of TCR clone 109700 (TRBV12-4, TRBJ2-3)
CASSTLPDTQYF

SEQ ID NO: 219401 - protein, 12 aa, Homo sapiens
  CDR3 for alpha chain variable domain of TCR clone 109701 (TRAV13-1, TRAJ42)
VNYGGSQGNLIF

SEQ ID NO: 219402 - protein, 12 aa, Homo sapiens
  CDR3 for beta chain variable domain of TCR clone 109701 (TRBV7-9, TRBJ2-7)
CASSLEGCEQYF

SEQ ID NO: 219403 - protein, 13 aa, Homo sapiens
  CDR3 for alpha chain variable domain of TCR clone 109702 (TRAV20, TRAJ37)
CAGCSSNTGKLIF

SEQ ID NO: 219404 - protein, 14 aa, Homo sapiens
  CDR3 for beta chain variable domain of TCR clone 109702 (TRBV18, TRBJ2-5)
CASSPGVSQETQYF

SEQ ID NO: 219405 - protein, 13 aa, Homo sapiens
  CDR3 for alpha chain variable domain of TCR clone 109703 (TRAV3, TRAJ21)
CAVREPDFNKFYF

SEQ ID NO: 219406 - protein, 17 aa, Homo sapiens
  CDR3 for beta chain variable domain of TCR clone 109703 (TRBV28, TRBJ2-5)
CASSTPEGDALQETQYF

SEQ ID NO: 219407 - protein, 17 aa, Homo sapiens
  CDR3 for alpha chain variable domain of TCR clone 109704 (TRAV8-6, TRAJ8)
CAVKEGIDNTGFQKLVF

SEQ ID NO: 219408 - protein, 12 aa, Homo sapiens
  CDR3 for beta chain variable domain of TCR clone 109704 (TRBV19, TRBJ1-4)
CASKDWPGGLFF

SEQ ID NO: 219409 - protein, 12 aa, Homo sapiens
  CDR3 for alpha chain variable domain of TCR clone 109705 (TRAV8-4, TRAJ37)
CAVRSNTGELIF

SEQ ID NO: 219410 - protein, 16 aa, Homo sapiens
  CDR3 for beta chain variable domain of TCR clone 109705 (TRBV7-2, TRBJ2-3)
CASSLVGDASTDTQYF

SEQ ID NO: 219411 - protein, 15 aa, Homo sapiens
  CDR3 for alpha chain variable domain of TCR clone 109706 (TRAV25, TRAJ52)
CAGRPGGTSYGKLTF

SEQ ID NO: 219412 - protein, 17 aa, Homo sapiens
  CDR3 for beta chain variable domain of TCR clone 109706 (TRBV7-8, TRBJ2-6)
CASSAGTGGAGANVVTF

SEQ ID NO: 219413 - protein, 13 aa, Homo sapiens
  CDR3 for alpha chain variable domain of TCR clone 109707 (TRAV12-2, TRAJ20)
CAVNRFDDYKLSF

SEQ ID NO: 219414 - protein, 12 aa, Homo sapiens
  CDR3 for beta chain variable domain of TCR clone 109707 (TRBV19, TRBJ2-1)
CASSQISNEQFL

SEQ ID NO: 219415 - protein, 14 aa, Homo sapiens
  CDR3 for alpha chain variable domain of TCR clone 109708 (TRAV12-2, TRAJ13)
CAVKKTGGYQKVTF

SEQ ID NO: 219416 - protein, 12 aa, Homo sapiens
  CDR3 for beta chain variable domain of TCR clone 109708 (TRBV2, TRBJ2-1)
CAKREGYNEQFF

SEQ ID NO: 219417 - protein, 15 aa, Homo sapiens
  CDR3 for alpha chain variable domain of TCR clone 109709 (TRAV12-1, TRAJ6)
CVVNCPLRRKLHTYI

SEQ ID NO: 219418 - protein, 15 aa, Homo sapiens
  CDR3 for beta chain variable domain of TCR clone 109709 (TRBV7-2, TRBJ2-1)
CASSSGLAGGNEQFF

SEQ ID NO: 219419 - protein, 15 aa, Homo sapiens
  CDR3 for alpha chain variable domain of TCR clone 109710 (TRAV3, TRAJ4)
CAVRDGTGSYNKLIF

SEQ ID NO: 219420 - protein, 16 aa, Homo sapiens
  CDR3 for beta chain variable domain of TCR clone 109710 (TRBV27, TRBJ2-2)
CASSSSGVSNTGELFF

SEQ ID NO: 219421 - protein, 12 aa, Homo sapiens
  CDR3 for alpha chain variable domain of TCR clone 109711 (TRAV30, TRAJ43)
CGTEERGNDTRF

SEQ ID NO: 219422 - protein, 15 aa, Homo sapiens
  CDR3 for beta chain variable domain of TCR clone 109711 (TRBV7-9, TRBJ1-5)
CASSQGHQPNQPQHF

SEQ ID NO: 219423 - protein, 15 aa, Homo sapiens
  CDR3 for alpha chain variable domain of TCR clone 109712 (TRAV13-1, TRAJ36)
CAASIRQTGANNLFF

SEQ ID NO: 219424 - protein, 14 aa, Homo sapiens
  CDR3 for beta chain variable domain of TCR clone 109712 (TRBV15, TRBJ2-5)
CATSMGGSGETQYF

SEQ ID NO: 219425 - protein, 17 aa, Homo sapiens
  CDR3 for alpha chain variable domain of TCR clone 109713 (TRAV3, TRAJ6)
CAVRDGPRAGGSYIPTF

SEQ ID NO: 219426 - protein, 14 aa, Homo sapiens
  CDR3 for beta chain variable domain of TCR clone 109713 (TRBV6-3, TRBJ2-2)
CASTYTPDTGELFF

SEQ ID NO: 219427 - protein, 15 aa, Homo sapiens
  CDR3 for alpha chain variable domain of TCR clone 109714 (TRAV26-1, TRAJ38)
CIVRAEGGNNRKLIG

SEQ ID NO: 219428 - protein, 14 aa, Homo sapiens
  CDR3 for beta chain variable domain of TCR clone 109714 (TRBV7-6, TRBJ2-5)
CASSSPSGSETQYF

SEQ ID NO: 219429 - protein, 15 aa, Homo sapiens
  CDR3 for alpha chain variable domain of TCR clone 109715 (TRAV21, TRAJ53)
CATLNSGGSNYKLTF

SEQ ID NO: 219430 - protein, 14 aa, Homo sapiens
  CDR3 for beta chain variable domain of TCR clone 109715 (TRBV15, TRBJ1-2)
CAASRASVNYGYTF

SEQ ID NO: 219431 - protein, 14 aa, Homo sapiens
  CDR3 for alpha chain variable domain of TCR clone 109716 (TRAV21, TRAJ35)
CAVMPIGFGNVLHC

SEQ ID NO: 219432 - protein, 15 aa, Homo sapiens
  CDR3 for beta chain variable domain of TCR clone 109716 (TRBV19, TRBJ1-2)
CASSVGQVLNYGYTF

SEQ ID NO: 219433 - protein, 13 aa, Homo sapiens
  CDR3 for alpha chain variable domain of TCR clone 109717 (TRAV12-1, TRAJ6)
CVVFPGGSYIPTF

SEQ ID NO: 219434 - protein, 13 aa, Homo sapiens
  CDR3 for beta chain variable domain of TCR clone 109717 (TRBV12-4, TRBJ1-2)
CASSLRQGKGYTF

SEQ ID NO: 219435 - protein, 12 aa, Homo sapiens
  CDR3 for alpha chain variable domain of TCR clone 109718 (TRAV1-2, TRAJ29)
CSVPSGNTPLVF

SEQ ID NO: 219436 - protein, 12 aa, Homo sapiens
  CDR3 for beta chain variable domain of TCR clone 109718 (TRBV7-9, TRBJ2-7)
CASSFGSYEQYF

SEQ ID NO: 219437 - protein, 13 aa, Homo sapiens
  CDR3 for alpha chain variable domain of TCR clone 109719 (TRAV35, TRAJ36)
CAWPRIGANNLFF

SEQ ID NO: 219438 - protein, 15 aa, Homo sapiens
  CDR3 for beta chain variable domain of TCR clone 109719 (TRBV28, TRBJ2-5)
CASSPPWSYQETQYF

SEQ ID NO: 219439 - protein, 14 aa, Homo sapiens
  CDR3 for alpha chain variable domain of TCR clone 109720 (TRAV1-2, TRAJ24)
CAVLTTDSWGKFQF

SEQ ID NO: 219440 - protein, 21 aa, Homo sapiens
  CDR3 for beta chain variable domain of TCR clone 109720 (TRBV6-5, TRBJ1-3)
CASSYWEKIAQGMSSGDTIYF

SEQ ID NO: 219441 - protein, 14 aa, Homo sapiens
  CDR3 for alpha chain variable domain of TCR clone 109721 (TRAV12-3, TRAJ10)
SHLPLTGGGNKLTF

SEQ ID NO: 219442 - protein, 20 aa, Homo sapiens
  CDR3 for beta chain variable domain of TCR clone 109721 (TRBV4-1, TRBJ2-2)
CASSQASPPGLASNTGELFF

SEQ ID NO: 219443 - protein, 10 aa, Homo sapiens
  CDR3 for alpha chain variable domain of TCR clone 109722 (TRAV23/DV6, TRAJ57)
CAASSTLSQG

SEQ ID NO: 219444 - protein, 14 aa, Homo sapiens
  CDR3 for beta chain variable domain of TCR clone 109722 (TRBV28, TRBJ1-2)
CASRIQGANYGYTF

SEQ ID NO: 219445 - protein, 13 aa, Homo sapiens
  CDR3 for alpha chain variable domain of TCR clone 109723 (TRAV1-2, TRAJ9)
CAALNTGGFKTIF

SEQ ID NO: 219446 - protein, 13 aa, Homo sapiens
  CDR3 for beta chain variable domain of TCR clone 109723 (TRBV7-6, TRBJ1-2)
CASSLVADYGYTF

SEQ ID NO: 219447 - protein, 14 aa, Homo sapiens
  CDR3 for alpha chain variable domain of TCR clone 109724 (TRAV1-2, TRAJ8)
CAVREDTGFQQLVF

SEQ ID NO: 219448 - protein, 16 aa, Homo sapiens
  CDR3 for beta chain variable domain of TCR clone 109724 (TRBV5-7, TRBJ2-5)
CASTLAPAGGRETQYF

SEQ ID NO: 219449 - protein, 14 aa, Homo sapiens
  CDR3 for alpha chain variable domain of TCR clone 109725 (TRAV12-1, TRAJ3)
CGAARYSSASKIIF

SEQ ID NO: 219450 - protein, 16 aa, Homo sapiens
  CDR3 for beta chain variable domain of TCR clone 109725 (TRBV15, TRBJ1-2)
CATSRGPRTGGGGYTF

SEQ ID NO: 219451 - protein, 14 aa, Homo sapiens
  CDR3 for alpha chain variable domain of TCR clone 109726 (TRAV8-3, TRAJ4)
CAVGAAGGYNKLIF

SEQ ID NO: 219452 - protein, 15 aa, Homo sapiens
  CDR3 for beta chain variable domain of TCR clone 109726 (TRBV6-5, TRBJ2-1)
CASSFDAGAGNEQFF

SEQ ID NO: 219453 - protein, 12 aa, Homo sapiens
  CDR3 for alpha chain variable domain of TCR clone 109727 (TRAV8-3, TRAJ20)
CAVGANDYKLSF

SEQ ID NO: 219454 - protein, 16 aa, Homo sapiens
  CDR3 for beta chain variable domain of TCR clone 109727 (TRBV24-1, TRBJ2-3)
CATSDPGTGATDTQYF

SEQ ID NO: 219455 - protein, 14 aa, Homo sapiens
  CDR3 for alpha chain variable domain of TCR clone 109728 (TRAV1-2, TRAJ8)
CAVREDTGFQKLVF

SEQ ID NO: 219456 - protein, 15 aa, Homo sapiens
  CDR3 for beta chain variable domain of TCR clone 109728 (TRBV5-5, TRBJ1-5)
CASSSTPGSKQPQHF

SEQ ID NO: 219457 - protein, 14 aa, Homo sapiens
  CDR3 for alpha chain variable domain of TCR clone 109729 (TRAV12-2, TRAJ40)
CAVKIPSGTYKYIF

SEQ ID NO: 219458 - protein, 15 aa, Homo sapiens
  CDR3 for beta chain variable domain of TCR clone 109729 (TRBV27, TRBJ2-7)
CASSLFGTGLDEQYF

SEQ ID NO: 219459 - protein, 13 aa, Homo sapiens
  CDR3 for alpha chain variable domain of TCR clone 109730 (TRAV12-3, TRAJ53)
CAMRGGSNYKLTF

SEQ ID NO: 219460 - protein, 15 aa, Homo sapiens
  CDR3 for beta chain variable domain of TCR clone 109730 (TRBV2, TRBJ2-1)
CATQARLVVIGEQFF

SEQ ID NO: 219461 - protein, 11 aa, Homo sapiens
  CDR3 for alpha chain variable domain of TCR clone 109731 (TRAV3, TRAJ21)
CAVGNFNKFYF

SEQ ID NO: 219462 - protein, 13 aa, Homo sapiens
  CDR3 for beta chain variable domain of TCR clone 109731 (TRBV5-5, TRBJ2-2)
CASTLGGAGELFF

SEQ ID NO: 219463 - protein, 15 aa, Homo sapiens
  CDR3 for alpha chain variable domain of TCR clone 109732 (TRAV8-2, TRAJ42)
CVVSAYMGSQGNLIF

SEQ ID NO: 219464 - protein, 12 aa, Homo sapiens
  CDR3 for beta chain variable domain of TCR clone 109732 (TRBV7-9, TRBJ2-7)
CASSIKREEQYF

SEQ ID NO: 219465 - protein, 13 aa, Homo sapiens
  CDR3 for alpha chain variable domain of TCR clone 109733 (TRAV23/DV6, TRAJ34)
CAASIEGTDKLIF

SEQ ID NO: 219466 - protein, 13 aa, Homo sapiens
  CDR3 for beta chain variable domain of TCR clone 109733 (TRBV4-2, TRBJ1-1)
CASSQAGNTEAFF

SEQ ID NO: 219467 - protein, 14 aa, Homo sapiens
  CDR3 for alpha chain variable domain of TCR clone 109734 (TRAV1-2, TRAJ16)
CDVNRFSDGQKLFF

SEQ ID NO: 219468 - protein, 15 aa, Homo sapiens
  CDR3 for beta chain variable domain of TCR clone 109734 (TRBV9, TRBJ1-6)
CASSVAGTGDSPLHF

SEQ ID NO: 219469 - protein, 14 aa, Homo sapiens
  CDR3 for alpha chain variable domain of TCR clone 109735 (TRAV9-2, TRAJ39)
CALYIYNAGNMLTF

SEQ ID NO: 219470 - protein, 14 aa, Homo sapiens
  CDR3 for beta chain variable domain of TCR clone 109735 (TRBV4-2, TRBJ2-1)
CASDLDRAYNEQFF

SEQ ID NO: 219471 - protein, 15 aa, Homo sapiens
  CDR3 for alpha chain variable domain of TCR clone 109736 (TRAV12-1, TRAJ44)
CVAYLPTGTASKLTF

SEQ ID NO: 219472 - protein, 13 aa, Homo sapiens
  CDR3 for beta chain variable domain of TCR clone 109736 (TRBV6-5, TRBJ2-5)
CASSPQGGETQYF

SEQ ID NO: 219473 - protein, 12 aa, Homo sapiens
  CDR3 for alpha chain variable domain of TCR clone 109737 (TRAV12-3, TRAJ17)
CAMTLTGNKLTC

SEQ ID NO: 219474 - protein, 13 aa, Homo sapiens
  CDR3 for beta chain variable domain of TCR clone 109737 (TRBV7-9, TRBJ1-2)
CASSLKQNYGYTF

SEQ ID NO: 219475 - protein, 13 aa, Homo sapiens
  CDR3 for alpha chain variable domain of TCR clone 109738 (TRAV27, TRAJ45)
CRSSGGGADGLTF

SEQ ID NO: 219476 - protein, 13 aa, Homo sapiens
  CDR3 for beta chain variable domain of TCR clone 109738 (TRBV11-2, TRBJ2-5)
CASSRGPSETQYF

SEQ ID NO: 219477 - protein, 23 aa, Homo sapiens
  CDR3 for alpha chain variable domain of TCR clone 109739 (TRAV8-4, TRAJ38)
CARLNAGNNHIQNPDPAVYKLRD

SEQ ID NO: 219478 - protein, 12 aa, Homo sapiens
  CDR3 for beta chain variable domain of TCR clone 109739 (TRBV6-1, TRBJ2-7)
CASSEPLYEQYF

SEQ ID NO: 219479 - protein, 18 aa, Homo sapiens
  CDR3 for alpha chain variable domain of TCR clone 109740 (TRAV21, TRAJ52)
CAVRPSPAGGTSYGKLTF

SEQ ID NO: 219480 - protein, 12 aa, Homo sapiens
  CDR3 for beta chain variable domain of TCR clone 109740 (TRBV12-4, TRBJ1-1)
CASSLVDTEAFF

SEQ ID NO: 219481 - protein, 15 aa, Homo sapiens
  CDR3 for alpha chain variable domain of TCR clone 109741 (TRAV3, TRAJ22)
CAVRDRGGSARQLTF

SEQ ID NO: 219482 - protein, 15 aa, Homo sapiens
  CDR3 for beta chain variable domain of TCR clone 109741 (TRBV27, TRBJ2-1)
CASSNGGGSANEQFF

SEQ ID NO: 219483 - protein, 15 aa, Homo sapiens
  CDR3 for alpha chain variable domain of TCR clone 109742 (TRAV29/DV5, TRAJ29)
CAASERSSGNTPLVF

SEQ ID NO: 219484 - protein, 15 aa, Homo sapiens
  CDR3 for beta chain variable domain of TCR clone 109742 (TRBV7-2, TRBJ2-7)
CASSLALGSAYEQYF

SEQ ID NO: 219485 - protein, 13 aa, Homo sapiens
  CDR3 for alpha chain variable domain of TCR clone 109743 (TRAV12-1, TRAJ39)
CVVPQRAGNMLTF

SEQ ID NO: 219486 - protein, 17 aa, Homo sapiens
  CDR3 for beta chain variable domain of TCR clone 109743 (TRBV4-1, TRBJ2-5)
CASSQDLTGGPTETQYF

SEQ ID NO: 219487 - protein, 16 aa, Homo sapiens
  CDR3 for alpha chain variable domain of TCR clone 109744 (TRAV12-1, TRAJ12)
CVVNTLLMDSSYKLIF

SEQ ID NO: 219488 - protein, 13 aa, Homo sapiens
  CDR3 for beta chain variable domain of TCR clone 109744 (TRBV11-2, TRBJ2-1)
CASSSEAYSEQFF

SEQ ID NO: 219489 - protein, 14 aa, Homo sapiens
  CDR3 for alpha chain variable domain of TCR clone 109745 (TRAV12-2, TRAJ17)
CAVLFKAAGNKLTF

SEQ ID NO: 219490 - protein, 16 aa, Homo sapiens
  CDR3 for beta chain variable domain of TCR clone 109745 (TRBV7-8, TRBJ2-6)
CASRVGDSSGANVLTF

SEQ ID NO: 219491 - protein, 13 aa, Homo sapiens
  CDR3 for alpha chain variable domain of TCR clone 109746 (TRAV21, TRAJ27)
FAALPGNAGKSTF

SEQ ID NO: 219492 - protein, 15 aa, Homo sapiens
  CDR3 for beta chain variable domain of TCR clone 109746 (TRBV9, TRBJ2-1)
CASSLAGSSYNEQFF

SEQ ID NO: 219493 - protein, 11 aa, Homo sapiens
  CDR3 for alpha chain variable domain of TCR clone 109747 (TRAV21, TRAJ48)
CAVDGNEKLTF

SEQ ID NO: 219494 - protein, 17 aa, Homo sapiens
  CDR3 for beta chain variable domain of TCR clone 109747 (TRBV11-2, TRBJ2-1)
CASSLYPPGVEYNEQFF

SEQ ID NO: 219495 - protein, 12 aa, Homo sapiens
  CDR3 for alpha chain variable domain of TCR clone 109748 (TRAV12-2, TRAJ10)
WGVTGGGNKLTF

SEQ ID NO: 219496 - protein, 12 aa, Homo sapiens
  CDR3 for beta chain variable domain of TCR clone 109748 (TRBV6-3, TRBJ2-7)
CASSEPGFEQYF

SEQ ID NO: 219497 - protein, 16 aa, Homo sapiens
  CDR3 for alpha chain variable domain of TCR clone 109749 (TRAV3, TRAJ37)
CAVRPHGSGNTGKLII

SEQ ID NO: 219498 - protein, 13 aa, Homo sapiens
  CDR3 for beta chain variable domain of TCR clone 109749 (TRBV2, TRBJ1-5)
CASGTGGYQPQHF

SEQ ID NO: 219499 - protein, 14 aa, Homo sapiens
  CDR3 for alpha chain variable domain of TCR clone 109750 (TRAV2, TRAJ37)
CAVDFTSNTGKLIF

SEQ ID NO: 219500 - protein, 13 aa, Homo sapiens
  CDR3 for beta chain variable domain of TCR clone 109750 (TRBV4-2, TRBJ1-1)
CGSSQAGNTEAFF

SEQ ID NO: 219501 - protein, 15 aa, Homo sapiens
  CDR3 for alpha chain variable domain of TCR clone 109751 (TRAV25, TRAJ52)
CAGRPGGTSYGKLTF

SEQ ID NO: 219502 - protein, 14 aa, Homo sapiens
  CDR3 for beta chain variable domain of TCR clone 109751 (TRBV2, TRBJ1-5)
CASSGTGFNQPQHF

SEQ ID NO: 219503 - protein, 17 aa, Homo sapiens
  CDR3 for alpha chain variable domain of TCR clone 109752 (TRAV3, TRAJ42)
CAVRDRDYGGSQGNLIF

SEQ ID NO: 219504 - protein, 14 aa, Homo sapiens
  CDR3 for beta chain variable domain of TCR clone 109752 (TRBV7-2, TRBJ2-5)
CASSPRGSSETQYL

SEQ ID NO: 219505 - protein, 14 aa, Homo sapiens
  CDR3 for alpha chain variable domain of TCR clone 109753 (TRAV23/DV6, TRAJ11)
FAASLESGYSTLTF

SEQ ID NO: 219506 - protein, 15 aa, Homo sapiens
  CDR3 for beta chain variable domain of TCR clone 109753 (TRBV28, TRBJ2-7)
CASSSPGTEPFEQYF

SEQ ID NO: 219507 - protein, 10 aa, Homo sapiens
  CDR3 for alpha chain variable domain of TCR clone 109754 (TRAV8-4, TRAJ43)
CAVSADDMRF

SEQ ID NO: 219508 - protein, 17 aa, Homo sapiens
  CDR3 for beta chain variable domain of TCR clone 109754 (TRBV7-3, TRBJ2-5)
CASSLGSGRSGSETQYF

SEQ ID NO: 219509 - protein, 15 aa, Homo sapiens
  CDR3 for alpha chain variable domain of TCR clone 109755 (TRAV8-3, TRAJ7)
CSVGSISYGNNRLAF

SEQ ID NO: 219510 - protein, 15 aa, Homo sapiens
  CDR3 for beta chain variable domain of TCR clone 109755 (TRBV4-2, TRBJ1-1)
CASSQEDLPRTEAFF

SEQ ID NO: 219511 - protein, 10 aa, Homo sapiens
  CDR3 for alpha chain variable domain of TCR clone 109756 (TRAV26-1, TRAJ22)
CIAGSRQLTF

SEQ ID NO: 219512 - protein, 18 aa, Homo sapiens
  CDR3 for beta chain variable domain of TCR clone 109756 (TRBV7-3, TRBJ2-5)
CASSLGGAAQGRWETQYF

SEQ ID NO: 219513 - protein, 10 aa, Homo sapiens
  CDR3 for alpha chain variable domain of TCR clone 109757 (TRAV12-1, TRAJ20)
CVVNPRKLSF

SEQ ID NO: 219514 - protein, 14 aa, Homo sapiens
  CDR3 for beta chain variable domain of TCR clone 109757 (TRBV12-4, TRBJ2-5)
CASSLWQKQETQYF

SEQ ID NO: 219515 - protein, 15 aa, Homo sapiens
  CDR3 for alpha chain variable domain of TCR clone 109758 (TRAV12-3, TRAJ53)
CASNASGGSNYKLTF

SEQ ID NO: 219516 - protein, 14 aa, Homo sapiens
  CDR3 for beta chain variable domain of TCR clone 109758 (TRBV27, TRBJ1-2)
CASKLQGAGYGYTF

SEQ ID NO: 219517 - protein, 13 aa, Homo sapiens
  CDR3 for alpha chain variable domain of TCR clone 109759 (TRAV21, TRAJ27)
CAARPGNAGKSTF

SEQ ID NO: 219518 - protein, 13 aa, Homo sapiens
  CDR3 for beta chain variable domain of TCR clone 109759 (TRBV7-6, TRBJ2-1)
CQQPGGGADEQFF

SEQ ID NO: 219519 - protein, 12 aa, Homo sapiens
  CDR3 for alpha chain variable domain of TCR clone 109760 (TRAV12-3, TRAJ20)
CAMVRGDYKLSF

SEQ ID NO: 219520 - protein, 12 aa, Homo sapiens
  CDR3 for beta chain variable domain of TCR clone 109760 (TRBV6-1, TRBJ2-7)
CASSDYSYEHYF

SEQ ID NO: 219521 - protein, 15 aa, Homo sapiens
  CDR3 for alpha chain variable domain of TCR clone 109761 (TRAV26-1, TRAJ29)
CIVRVTNSGNTPLFF

SEQ ID NO: 219522 - protein, 12 aa, Homo sapiens
  CDR3 for beta chain variable domain of TCR clone 109761 (TRBV20-1, TRBJ1-2)
CSASWQGYGYTF

SEQ ID NO: 219523 - protein, 16 aa, Homo sapiens
  CDR3 for alpha chain variable domain of TCR clone 109762 (TRAV12-2, TRAJ40)
CAVIRGGTSGTYKYIF

SEQ ID NO: 219524 - protein, 15 aa, Homo sapiens
  CDR3 for beta chain variable domain of TCR clone 109762 (TRBV25-1, TRBJ1-4)
CASSPGDSTNEKLFF

SEQ ID NO: 219525 - protein, 14 aa, Homo sapiens
  CDR3 for alpha chain variable domain of TCR clone 109763 (TRAV17, TRAJ16)
CATAEFSDGQKLLF

SEQ ID NO: 219526 - protein, 15 aa, Homo sapiens
  CDR3 for beta chain variable domain of TCR clone 109763 (TRBV18, TRBJ2-1)
CASSPPSASYNEQFF

SEQ ID NO: 219527 - protein, 14 aa, Homo sapiens
  CDR3 for alpha chain variable domain of TCR clone 109764 (TRAV23/DV6, TRAJ4)
CAAPSSGGYNKLIF

SEQ ID NO: 219528 - protein, 16 aa, Homo sapiens
  CDR3 for beta chain variable domain of TCR clone 109764 (TRBV19, TRBJ1-1)
CASRFGGPVTGTEAFL

SEQ ID NO: 219529 - protein, 14 aa, Homo sapiens
  CDR3 for alpha chain variable domain of TCR clone 109765 (TRAV8-3, TRAJ39)
CAVGANNAGNMLTL

SEQ ID NO: 219530 - protein, 12 aa, Homo sapiens
  CDR3 for beta chain variable domain of TCR clone 109765 (TRBV28, TRBJ1-3)
CASVSSGNTIYF

SEQ ID NO: 219531 - protein, 18 aa, Homo sapiens
  CDR3 for alpha chain variable domain of TCR clone 109766 (TRAV8-4, TRAJ52)
CAVTRANAGGTSYGKLTF

SEQ ID NO: 219532 - protein, 13 aa, Homo sapiens
  CDR3 for beta chain variable domain of TCR clone 109766 (TRBV7-3, TRBJ2-1)
CASSPVAYNEQFF

SEQ ID NO: 219533 - protein, 13 aa, Homo sapiens
  CDR3 for alpha chain variable domain of TCR clone 109767 (TRAV35, TRAJ57)
CAGSQGGSEKLVF

SEQ ID NO: 219534 - protein, 12 aa, Homo sapiens
  CDR3 for beta chain variable domain of TCR clone 109767 (TRBV24-1, TRBJ2-3)
CATSDSTDTQYF

SEQ ID NO: 219535 - protein, 10 aa, Homo sapiens
  CDR3 for alpha chain variable domain of TCR clone 109768 (TRAV21, TRAJ31)
CAVDNARLMF

SEQ ID NO: 219536 - protein, 12 aa, Homo sapiens
  CDR3 for beta chain variable domain of TCR clone 109768 (TRBV2, TRBJ2-1)
CAKREGYNEQFF

SEQ ID NO: 219537 - protein, 13 aa, Homo sapiens
  CDR3 for alpha chain variable domain of TCR clone 109769 (TRAV8-3, TRAJ6)
CAARRGGIYIPTF

SEQ ID NO: 219538 - protein, 15 aa, Homo sapiens
  CDR3 for beta chain variable domain of TCR clone 109769 (TRBV4-1, TRBJ2-3)
CASSNLAGGRDTQYF

SEQ ID NO: 219539 - protein, 14 aa, Homo sapiens
  CDR3 for alpha chain variable domain of TCR clone 109770 (TRAV13-2, TRAJ17)
CAENSKAAGNRLTF

SEQ ID NO: 219540 - protein, 14 aa, Homo sapiens
  CDR3 for beta chain variable domain of TCR clone 109770 (TRBV4-1, TRBJ2-2)
CASSQAVNTGELFF

SEQ ID NO: 219541 - protein, 14 aa, Homo sapiens
  CDR3 for alpha chain variable domain of TCR clone 109771 (TRAV17, TRAJ45)
CGTASGGGADGLTF

SEQ ID NO: 219542 - protein, 15 aa, Homo sapiens
  CDR3 for beta chain variable domain of TCR clone 109771 (TRBV11-2, TRBJ2-1)
CASSRNRGLMYEQFF

SEQ ID NO: 219543 - protein, 17 aa, Homo sapiens
  CDR3 for alpha chain variable domain of TCR clone 109772 (TRAV3, TRAJ6)
CAVRDGPRAGGSYIPTF

SEQ ID NO: 219544 - protein, 13 aa, Homo sapiens
  CDR3 for beta chain variable domain of TCR clone 109772 (TRBV19, TRBJ2-7)
CASSTDRTYEQYF

SEQ ID NO: 219545 - protein, 14 aa, Homo sapiens
  CDR3 for alpha chain variable domain of TCR clone 109773 (TRAV26-2, TRAJ27)
CILRDISDAGKSTF

SEQ ID NO: 219546 - protein, 15 aa, Homo sapiens
  CDR3 for beta chain variable domain of TCR clone 109773 (TRBV10-3, TRBJ2-7)
CATREQGLRAYEQYF

SEQ ID NO: 219547 - protein, 11 aa, Homo sapiens
  CDR3 for alpha chain variable domain of TCR clone 109774 (TRAV21, TRAJ31)
CAVRNNARLMF

SEQ ID NO: 219548 - protein, 16 aa, Homo sapiens
  CDR3 for beta chain variable domain of TCR clone 109774 (TRBV2, TRBJ2-3)
CASSTSVEGVTDTQYF

SEQ ID NO: 219549 - protein, 13 aa, Homo sapiens
  CDR3 for alpha chain variable domain of TCR clone 109775 (TRAV8-3, TRAJ36)
CAVGATGANNLFF

SEQ ID NO: 219550 - protein, 15 aa, Homo sapiens
  CDR3 for beta chain variable domain of TCR clone 109775 (TRBV7-2, TRBJ1-2)
CASGPRAGWNYGYTS

SEQ ID NO: 219551 - protein, 17 aa, Homo sapiens
  CDR3 for alpha chain variable domain of TCR clone 109776 (TRAV8-6, TRAJ58)
CAVSSWVGETSGSRLTF

SEQ ID NO: 219552 - protein, 13 aa, Homo sapiens
  CDR3 for beta chain variable domain of TCR clone 109776 (TRBV5-1, TRBJ1-2)
CASSIDRPEGYTF

SEQ ID NO: 219553 - protein, 13 aa, Homo sapiens
  CDR3 for alpha chain variable domain of TCR clone 109777 (TRAV36/DV7, TRAJ49)
CAVEANTGNQFYF

SEQ ID NO: 219554 - protein, 14 aa, Homo sapiens
  CDR3 for beta chain variable domain of TCR clone 109777 (TRBV19, TRBJ2-7)
CASSIEASSYEQYF

SEQ ID NO: 219555 - protein, 14 aa, Homo sapiens
  CDR3 for alpha chain variable domain of TCR clone 109778 (TRAV16, TRAJ33)
CVLSAMDSNYQLIW

SEQ ID NO: 219556 - protein, 12 aa, Homo sapiens
  CDR3 for beta chain variable domain of TCR clone 109778 (TRBV5-1, TRBJ1-2)
CASSQDTYGYTF

SEQ ID NO: 219557 - protein, 15 aa, Homo sapiens
  CDR3 for alpha chain variable domain of TCR clone 109779 (TRAV1-2, TRAJ30)
CAVRPHGNRDDKIIF

SEQ ID NO: 219558 - protein, 13 aa, Homo sapiens
  CDR3 for beta chain variable domain of TCR clone 109779 (TRBV4-1, TRBJ2-7)
CASSQGQAYKQYF

SEQ ID NO: 219559 - protein, 13 aa, Homo sapiens
  CDR3 for alpha chain variable domain of TCR clone 109780 (TRAV23/DV6, TRAJ22)
CAPYSGSARQLTF

SEQ ID NO: 219560 - protein, 16 aa, Homo sapiens
  CDR3 for beta chain variable domain of TCR clone 109780 (TRBV11-2, TRBJ2-2)
CASSLRTGNLIGELFF

SEQ ID NO: 219561 - protein, 11 aa, Homo sapiens
  CDR3 for alpha chain variable domain of TCR clone 109781 (TRAV35, TRAJ22)
CAGPGVGQLTF

SEQ ID NO: 219562 - protein, 13 aa, Homo sapiens
  CDR3 for beta chain variable domain of TCR clone 109781 (TRBV10-3, TRBJ2-7)
CASKLAVNYEQYF

SEQ ID NO: 219563 - protein, 12 aa, Homo sapiens
  CDR3 for alpha chain variable domain of TCR clone 109782 (TRAV13-1, TRAJ48)
CAANFGNEKLTF

SEQ ID NO: 219564 - protein, 13 aa, Homo sapiens
  CDR3 for beta chain variable domain of TCR clone 109782 (TRBV7-3, TRBJ1-1)
CASGQDWGAEAFF

SEQ ID NO: 219565 - protein, 14 aa, Homo sapiens
  CDR3 for alpha chain variable domain of TCR clone 109783 (TRAV12-2, TRAJ45)
CAAYSGGGADGLTF

SEQ ID NO: 219566 - protein, 14 aa, Homo sapiens
  CDR3 for beta chain variable domain of TCR clone 109783 (TRBV6-5, TRBJ1-2)
CASTRGGGSDGYTF

SEQ ID NO: 219567 - protein, 11 aa, Homo sapiens
  CDR3 for alpha chain variable domain of TCR clone 109784 (TRAV26-1, TRAJ37)
CIVRVGRKLIF

SEQ ID NO: 219568 - protein, 14 aa, Homo sapiens
  CDR3 for beta chain variable domain of TCR clone 109784 (TRBV12-5, TRBJ2-5)
CASGSRTHQETQYF

SEQ ID NO: 219569 - protein, 17 aa, Homo sapiens
  CDR3 for alpha chain variable domain of TCR clone 109785 (TRAV26-1, TRAJ22)
CIVRVPSHSGSVRQLTF

SEQ ID NO: 219570 - protein, 16 aa, Homo sapiens
  CDR3 for beta chain variable domain of TCR clone 109785 (TRBV28, TRBJ2-1)
CASRRSGRVVGNEQFF

SEQ ID NO: 219571 - protein, 14 aa, Homo sapiens
  CDR3 for alpha chain variable domain of TCR clone 109786 (TRAV12-2, TRAJ17)
RAVNIKAAGNKLTF

SEQ ID NO: 219572 - protein, 16 aa, Homo sapiens
  CDR3 for beta chain variable domain of TCR clone 109786 (TRBV20-1, TRBJ2-6)
CSASSQGYDGANVLTF

SEQ ID NO: 219573 - protein, 13 aa, Homo sapiens
  CDR3 for alpha chain variable domain of TCR clone 109787 (TRAV3, TRAJ29)
CAVRDIIDTPLVF

SEQ ID NO: 219574 - protein, 14 aa, Homo sapiens
  CDR3 for beta chain variable domain of TCR clone 109787 (TRBV27, TRBJ2-1)
CASRATGGYNEQFF

SEQ ID NO: 219575 - protein, 13 aa, Homo sapiens
  CDR3 for alpha chain variable domain of TCR clone 109788 (TRAV13-1, TRAJ12)
CAASPDSGYKLIF

SEQ ID NO: 219576 - protein, 14 aa, Homo sapiens
  CDR3 for beta chain variable domain of TCR clone 109788 (TRBV7-3, TRBJ2-1)
CASSLAGGTNEQFF

SEQ ID NO: 219577 - protein, 14 aa, Homo sapiens
  CDR3 for alpha chain variable domain of TCR clone 109789 (TRAV12-3, TRAJ10)
SHLPLTGGGNKLTF

SEQ ID NO: 219578 - protein, 13 aa, Homo sapiens
  CDR3 for beta chain variable domain of TCR clone 109789 (TRBV12-4, TRBJ2-7)
CASSFVPTAEQYF

SEQ ID NO: 219579 - protein, 14 aa, Homo sapiens
  CDR3 for alpha chain variable domain of TCR clone 109790 (TRAV1-2, TRAJ16)
CAVNRFSDGQKLLF

SEQ ID NO: 219580 - protein, 13 aa, Homo sapiens
  CDR3 for beta chain variable domain of TCR clone 109790 (TRBV19, TRBJ1-2)
CASSVSGQDGYTF

SEQ ID NO: 219581 - protein, 14 aa, Homo sapiens
  CDR3 for alpha chain variable domain of TCR clone 109791 (TRAV12-1, TRAJ30)
CVPTGTNSDDKIIF

SEQ ID NO: 219582 - protein, 11 aa, Homo sapiens
  CDR3 for beta chain variable domain of TCR clone 109791 (TRBV4-1, TRBJ2-2)
CASEHTGELFF

SEQ ID NO: 219583 - protein, 13 aa, Homo sapiens
  CDR3 for alpha chain variable domain of TCR clone 109792 (TRAV27, TRAJ49)
CAPRPYTGNQFYF

SEQ ID NO: 219584 - protein, 18 aa, Homo sapiens
  CDR3 for beta chain variable domain of TCR clone 109792 (TRBV7-3, TRBJ2-5)
FASSLGGAAQGRWETQYF

SEQ ID NO: 219585 - protein, 14 aa, Homo sapiens
  CDR3 for alpha chain variable domain of TCR clone 109793 (TRAV16, TRAJ39)
CALSKNNAGNMLTF

SEQ ID NO: 219586 - protein, 14 aa, Homo sapiens
  CDR3 for beta chain variable domain of TCR clone 109793 (TRBV7-9, TRBJ2-1)
CASSLGVADNEQFF

SEQ ID NO: 219587 - protein, 14 aa, Homo sapiens
  CDR3 for alpha chain variable domain of TCR clone 109794 (TRAV12-3, TRAJ15)
CAMITPQAGTALIF

SEQ ID NO: 219588 - protein, 12 aa, Homo sapiens
  CDR3 for beta chain variable domain of TCR clone 109794 (TRBV11-2, TRBJ2-2)
CASSFGGGELFF

SEQ ID NO: 219589 - protein, 18 aa, Homo sapiens
  CDR3 for alpha chain variable domain of TCR clone 109795 (TRAV1-2, TRAJ36)
CAVRDRRMGQTGANNLFF

SEQ ID NO: 219590 - protein, 14 aa, Homo sapiens
  CDR3 for beta chain variable domain of TCR clone 109795 (TRBV9, TRBJ2-7)
CASSQTSGFYEQYF

SEQ ID NO: 219591 - protein, 13 aa, Homo sapiens
  CDR3 for alpha chain variable domain of TCR clone 109796 (TRAV27, TRAJ8)
CAGGPTGFEKLVF

SEQ ID NO: 219592 - protein, 15 aa, Homo sapiens
  CDR3 for beta chain variable domain of TCR clone 109796 (TRBV6-1, TRBJ2-7)
CASSESMGDFYEQYF

SEQ ID NO: 219593 - protein, 12 aa, Homo sapiens
  CDR3 for alpha chain variable domain of TCR clone 109797 (TRAV1-2, TRAJ33)
CAALDSNYQLIW

SEQ ID NO: 219594 - protein, 15 aa, Homo sapiens
  CDR3 for beta chain variable domain of TCR clone 109797 (TRBV28, TRBJ2-3)
RASSPDRQGANTQYF

SEQ ID NO: 219595 - protein, 16 aa, Homo sapiens
  CDR3 for alpha chain variable domain of TCR clone 109798 (TRAV4, TRAJ22)
CLVGDLYSGSARQLTF

SEQ ID NO: 219596 - protein, 16 aa, Homo sapiens
  CDR3 for beta chain variable domain of TCR clone 109798 (TRBV7-9, TRBJ2-1)
CASSDGAGGSYNEQFF

SEQ ID NO: 219597 - protein, 13 aa, Homo sapiens
  CDR3 for alpha chain variable domain of TCR clone 109799 (TRAV27, TRAJ56)
CAGKPGANSKMTF

SEQ ID NO: 219598 - protein, 15 aa, Homo sapiens
  CDR3 for beta chain variable domain of TCR clone 109799 (TRBV6-1, TRBJ2-3)
CASSERWDSTDTQYF

SEQ ID NO: 219599 - protein, 15 aa, Homo sapiens
  CDR3 for alpha chain variable domain of TCR clone 109800 (TRAV13-1, TRAJ10)
CAATILTGGGNKLTF

SEQ ID NO: 219600 - protein, 12 aa, Homo sapiens
  CDR3 for beta chain variable domain of TCR clone 109800 (TRBV7-8, TRBJ2-7)
CASSLGDREQYF

SEQ ID NO: 219601 - protein, 12 aa, Homo sapiens
  CDR3 for alpha chain variable domain of TCR clone 109801 (TRAV21, TRAJ15)
CAVNRAGTALIF

SEQ ID NO: 219602 - protein, 13 aa, Homo sapiens
  CDR3 for beta chain variable domain of TCR clone 109801 (TRBV11-2, TRBJ2-5)
RASSSTGEETQYF

SEQ ID NO: 219603 - protein, 13 aa, Homo sapiens
  CDR3 for alpha chain variable domain of TCR clone 109802 (TRAV2, TRAJ40)
CAVVTSGTYKYIF

SEQ ID NO: 219604 - protein, 15 aa, Homo sapiens
  CDR3 for beta chain variable domain of TCR clone 109802 (TRBV11-3, TRBJ2-3)
CASLTDGREGDTQYF

SEQ ID NO: 219605 - protein, 14 aa, Homo sapiens
  CDR3 for alpha chain variable domain of TCR clone 109803 (TRAV22, TRAJ6)
CAGVGPGGSYIPTF

SEQ ID NO: 219606 - protein, 14 aa, Homo sapiens
  CDR3 for beta chain variable domain of TCR clone 109803 (TRBV7-6, TRBJ2-3)
CASSLGTVTDTQYF

SEQ ID NO: 219607 - protein, 16 aa, Homo sapiens
  CDR3 for alpha chain variable domain of TCR clone 109804 (TRAV17, TRAJ4)
CSTAAHSSGGYNKLIF

SEQ ID NO: 219608 - protein, 14 aa, Homo sapiens
  CDR3 for beta chain variable domain of TCR clone 109804 (TRBV20-1, TRBJ1-1)
CSAQTRIGGTEAFF

SEQ ID NO: 219609 - protein, 14 aa, Homo sapiens
  CDR3 for alpha chain variable domain of TCR clone 109805 (TRAV17, TRAJ22)
CATSPSGSARQLTF

SEQ ID NO: 219610 - protein, 15 aa, Homo sapiens
  CDR3 for beta chain variable domain of TCR clone 109805 (TRBV4-1, TRBJ2-5)
CASSQWDLYQETEYF

SEQ ID NO: 219611 - protein, 14 aa, Homo sapiens
  CDR3 for alpha chain variable domain of TCR clone 109806 (TRAV3, TRAJ20)
CAVPPAPNDYKLSF

SEQ ID NO: 219612 - protein, 13 aa, Homo sapiens
  CDR3 for beta chain variable domain of TCR clone 109806 (TRBV7-9, TRBJ1-2)
CASSLKQNYGYTF

SEQ ID NO: 219613 - protein, 13 aa, Homo sapiens
  CDR3 for alpha chain variable domain of TCR clone 109807 (TRAV12-3, TRAJ33)
CAMSVNSNYQLIW

SEQ ID NO: 219614 - protein, 15 aa, Homo sapiens
  CDR3 for beta chain variable domain of TCR clone 109807 (TRBV28, TRBJ1-1)
CASTSTRGLNTEAFF

SEQ ID NO: 219615 - protein, 13 aa, Homo sapiens
  CDR3 for alpha chain variable domain of TCR clone 109808 (TRAV2, TRAJ40)
CAVVTSGTYKYIF

SEQ ID NO: 219616 - protein, 11 aa, Homo sapiens
  CDR3 for beta chain variable domain of TCR clone 109808 (TRBV7-8, TRBJ2-7)
CASSLSLEQYF

SEQ ID NO: 219617 - protein, 12 aa, Homo sapiens
  CDR3 for alpha chain variable domain of TCR clone 109809 (TRAV17, TRAJ20)
CATLANDYKLSF

SEQ ID NO: 219618 - protein, 15 aa, Homo sapiens
  CDR3 for beta chain variable domain of TCR clone 109809 (TRBV7-2, TRBJ1-2)
CASSLVSGGDYGYTF

SEQ ID NO: 219619 - protein, 17 aa, Homo sapiens
  CDR3 for alpha chain variable domain of TCR clone 109810 (TRAV12-3, TRAJ6)
CAMSARGGAGGSYIPTF

SEQ ID NO: 219620 - protein, 13 aa, Homo sapiens
  CDR3 for beta chain variable domain of TCR clone 109810 (TRBV27, TRBJ2-1)
CASSSGSYNEQFF

SEQ ID NO: 219621 - protein, 15 aa, Homo sapiens
  CDR3 for alpha chain variable domain of TCR clone 109811 (TRAV2, TRAJ9)
CAVEDRCTGGFKTIF

SEQ ID NO: 219622 - protein, 14 aa, Homo sapiens
  CDR3 for beta chain variable domain of TCR clone 109811 (TRBV4-1, TRBJ2-2)
CASSQAVNTGELFF

SEQ ID NO: 219623 - protein, 15 aa, Homo sapiens
  CDR3 for alpha chain variable domain of TCR clone 109812 (TRAV12-2, TRAJ53)
CAVNGGGGGNYKLTF

SEQ ID NO: 219624 - protein, 15 aa, Homo sapiens
  CDR3 for beta chain variable domain of TCR clone 109812 (TRBV20-1, TRBJ2-7)
CSARDRVSGMDEQYF

SEQ ID NO: 219625 - protein, 17 aa, Homo sapiens
  CDR3 for alpha chain variable domain of TCR clone 109813 (TRAV3, TRAJ6)
CAVRDGPRAGGSYIPTF

SEQ ID NO: 219626 - protein, 14 aa, Homo sapiens
  CDR3 for beta chain variable domain of TCR clone 109813 (TRBV7-2, TRBJ2-7)
CASSPRNSFYEQYF

SEQ ID NO: 219627 - protein, 14 aa, Homo sapiens
  CDR3 for alpha chain variable domain of TCR clone 109814 (TRAV1-2, TRAJ16)
CAVNRFSDGQKLPF

SEQ ID NO: 219628 - protein, 15 aa, Homo sapiens
  CDR3 for beta chain variable domain of TCR clone 109814 (TRBV7-9, TRBJ2-2)
CASGPLDTFPGELFF

SEQ ID NO: 219629 - protein, 14 aa, Homo sapiens
  CDR3 for alpha chain variable domain of TCR clone 109815 (TRAV26-1, TRAJ34)
CIVRVAYNTDKPIF

SEQ ID NO: 219630 - protein, 12 aa, Homo sapiens
  CDR3 for beta chain variable domain of TCR clone 109815 (TRBV12-4, TRBJ2-7)
CASSLGGYEQYF

SEQ ID NO: 219631 - protein, 14 aa, Homo sapiens
  CDR3 for alpha chain variable domain of TCR clone 109816 (TRAV26-1, TRAJ34)
CIVIVAYNTDKLIF

SEQ ID NO: 219632 - protein, 15 aa, Homo sapiens
  CDR3 for beta chain variable domain of TCR clone 109816 (TRBV20-1, TRBJ2-7)
CSARVPAAYFYKHYF

SEQ ID NO: 219633 - protein, 17 aa, Homo sapiens
  CDR3 for alpha chain variable domain of TCR clone 109817 (TRAV3, TRAJ6)
CAVRDGPRAGGSYIPTF

SEQ ID NO: 219634 - protein, 17 aa, Homo sapiens
  CDR3 for beta chain variable domain of TCR clone 109817 (TRBV19, TRBJ2-6)
CASSTGQVFSGANVLTF

SEQ ID NO: 219635 - protein, 12 aa, Homo sapiens
  CDR3 for alpha chain variable domain of TCR clone 109818 (TRAV16, TRAJ56)
CAPTGANSKLTF

SEQ ID NO: 219636 - protein, 17 aa, Homo sapiens
  CDR3 for beta chain variable domain of TCR clone 109818 (TRBV27, TRBJ2-6)
CASSFTGFASGANVLTF

SEQ ID NO: 219637 - protein, 11 aa, Homo sapiens
  CDR3 for alpha chain variable domain of TCR clone 109819 (TRAV21, TRAJ11)
CAVNGYSTLTF

SEQ ID NO: 219638 - protein, 12 aa, Homo sapiens
  CDR3 for beta chain variable domain of TCR clone 109819 (TRBV7-9, TRBJ2-7)
CASSIKREEQYF

SEQ ID NO: 219639 - protein, 11 aa, Homo sapiens
  CDR3 for alpha chain variable domain of TCR clone 109820 (TRAV3, TRAJ31)
CAVRPDARLMF

SEQ ID NO: 219640 - protein, 16 aa, Homo sapiens
  CDR3 for beta chain variable domain of TCR clone 109820 (TRBV4-1, TRBJ1-1)
CASSQDAGMGNTEAFF

SEQ ID NO: 219641 - protein, 14 aa, Homo sapiens
  CDR3 for alpha chain variable domain of TCR clone 109821 (TRAV13-2, TRAJ41)
CAERPDWAGYALNF

SEQ ID NO: 219642 - protein, 16 aa, Homo sapiens
  CDR3 for beta chain variable domain of TCR clone 109821 (TRBV19, TRBJ1-5)
CASSTWTGGGNQPQHF

SEQ ID NO: 219643 - protein, 16 aa, Homo sapiens
  CDR3 for alpha chain variable domain of TCR clone 109822 (TRAV12-1, TRAJ43)
CVVNPHRFGAGTRLTV

SEQ ID NO: 219644 - protein, 16 aa, Homo sapiens
  CDR3 for beta chain variable domain of TCR clone 109822 (TRBV27, TRBJ2-2)
CASSSTGGGDTGVLFF

SEQ ID NO: 219645 - protein, 12 aa, Homo sapiens
  CDR3 for alpha chain variable domain of TCR clone 109823 (TRAV12-3, TRAJ17)
CAMTLTGNKLTF

SEQ ID NO: 219646 - protein, 14 aa, Homo sapiens
  CDR3 for beta chain variable domain of TCR clone 109823 (TRBV11-2, TRBJ2-1)
CASTTGRGNNEQFF

SEQ ID NO: 219647 - protein, 14 aa, Homo sapiens
  CDR3 for alpha chain variable domain of TCR clone 109824 (TRAV12-2, TRAJ53)
CAVKGGGRNYKLTF

SEQ ID NO: 219648 - protein, 14 aa, Homo sapiens
  CDR3 for beta chain variable domain of TCR clone 109824 (TRBV7-7, TRBJ2-2)
CATRQDSDTGELFF

SEQ ID NO: 219649 - protein, 15 aa, Homo sapiens
  CDR3 for alpha chain variable domain of TCR clone 109825 (TRAV13-1, TRAJ5)
CAVYIRDTGRRALTF

SEQ ID NO: 219650 - protein, 16 aa, Homo sapiens
  CDR3 for beta chain variable domain of TCR clone 109825 (TRBV12-4, TRBJ2-1)
CASTEQGVDRSNEQFF

SEQ ID NO: 219651 - protein, 11 aa, Homo sapiens
  CDR3 for alpha chain variable domain of TCR clone 109826 (TRAV2, TRAJ13)
CASGGYQKVTF

SEQ ID NO: 219652 - protein, 15 aa, Homo sapiens
  CDR3 for beta chain variable domain of TCR clone 109826 (TRBV5-8, TRBJ2-2)
CASSLDRGATGELFF

SEQ ID NO: 219653 - protein, 14 aa, Homo sapiens
  CDR3 for alpha chain variable domain of TCR clone 109827 (TRAV12-2, TRAJ40)
CAVKIPSGTYKYIF

SEQ ID NO: 219654 - protein, 14 aa, Homo sapiens
  CDR3 for beta chain variable domain of TCR clone 109827 (TRBV20-1, TRBJ2-1)
CSAQIGGSANEQFF

SEQ ID NO: 219655 - protein, 13 aa, Homo sapiens
  CDR3 for alpha chain variable domain of TCR clone 109828 (TRAV3, TRAJ21)
CAVREPDFNKFYF

SEQ ID NO: 219656 - protein, 16 aa, Homo sapiens
  CDR3 for beta chain variable domain of TCR clone 109828 (TRBV27, TRBJ2-2)
CASSFRGLVRTEELFF

SEQ ID NO: 219657 - protein, 13 aa, Homo sapiens
  CDR3 for alpha chain variable domain of TCR clone 109829 (TRAV36/DV7, TRAJ53)
CALSGGSNYKLTF

SEQ ID NO: 219658 - protein, 16 aa, Homo sapiens
  CDR3 for beta chain variable domain of TCR clone 109829 (TRBV7-3, TRBJ2-1)
CASSLEGYRSYNEQFF

SEQ ID NO: 219659 - protein, 16 aa, Homo sapiens
  CDR3 for alpha chain variable domain of TCR clone 109830 (TRAV30, TRAJ24)
CGTEIVDADSWGQFQF

SEQ ID NO: 219660 - protein, 13 aa, Homo sapiens
  CDR3 for beta chain variable domain of TCR clone 109830 (TRBV20-1, TRBJ1-1)
CSARGGGNTEAFF

SEQ ID NO: 219661 - protein, 18 aa, Homo sapiens
  CDR3 for alpha chain variable domain of TCR clone 109831 (TRAV26-2, TRAJ54)
CILRDVEVGIQGAQKLVF

SEQ ID NO: 219662 - protein, 14 aa, Homo sapiens
  CDR3 for beta chain variable domain of TCR clone 109831 (TRBV4-1, TRBJ2-2)
CASSQAVNTGELFF

SEQ ID NO: 219663 - protein, 14 aa, Homo sapiens
  CDR3 for alpha chain variable domain of TCR clone 109832 (TRAV27, TRAJ23)
CAGAFDNQGGKPIF

SEQ ID NO: 219664 - protein, 15 aa, Homo sapiens
  CDR3 for beta chain variable domain of TCR clone 109832 (TRBV7-3, TRBJ2-7)
CASSLTGQGKYEQYF

SEQ ID NO: 219665 - protein, 14 aa, Homo sapiens
  CDR3 for alpha chain variable domain of TCR clone 109833 (TRAV1-2, TRAJ16)
CAVNRFSDGQKLLF

SEQ ID NO: 219666 - protein, 16 aa, Homo sapiens
  CDR3 for beta chain variable domain of TCR clone 109833 (TRBV11-2, TRBJ2-1)
CQQLIPPGVEYNEQFF

SEQ ID NO: 219667 - protein, 13 aa, Homo sapiens
  CDR3 for alpha chain variable domain of TCR clone 109834 (TRAV23/DV6, TRAJ16)
CAASISDGQKLLF

SEQ ID NO: 219668 - protein, 15 aa, Homo sapiens
  CDR3 for beta chain variable domain of TCR clone 109834 (TRBV2, TRBJ2-2)
CANSRETVGTGELFF

SEQ ID NO: 219669 - protein, 15 aa, Homo sapiens
  CDR3 for alpha chain variable domain of TCR clone 109835 (TRAV12-3, TRAJ27)
CAMRGYNTNAGKSTF

SEQ ID NO: 219670 - protein, 13 aa, Homo sapiens
  CDR3 for beta chain variable domain of TCR clone 109835 (TRBV11-2, TRBJ2-5)
CASSRGPSETQYF

SEQ ID NO: 219671 - protein, 16 aa, Homo sapiens
  CDR3 for alpha chain variable domain of TCR clone 109836 (TRAV30, TRAJ24)
CGTEIVDADSWGNFQF

SEQ ID NO: 219672 - protein, 14 aa, Homo sapiens
  CDR3 for beta chain variable domain of TCR clone 109836 (TRBV12-5, TRBJ2-5)
CASGSRTHHETQYF

SEQ ID NO: 219673 - protein, 13 aa, Homo sapiens
  CDR3 for alpha chain variable domain of TCR clone 109837 (TRAV1-2, TRAJ9)
CAALNTGGFKTIF

SEQ ID NO: 219674 - protein, 20 aa, Homo sapiens
  CDR3 for beta chain variable domain of TCR clone 109837 (TRBV28, TRBJ2-1)
CASTTIGRSPGLAGGNEQLF

SEQ ID NO: 219675 - protein, 16 aa, Homo sapiens
  CDR3 for alpha chain variable domain of TCR clone 109838 (TRAV10, TRAJ13)
CVVSARNSGGYQKVTF

SEQ ID NO: 219676 - protein, 19 aa, Homo sapiens
  CDR3 for beta chain variable domain of TCR clone 109838 (TRBV12-4, TRBJ2-1)
CASTLAFAPRDKEANEQFF

SEQ ID NO: 219677 - protein, 19 aa, Homo sapiens
  CDR3 for alpha chain variable domain of TCR clone 109839 (TRAV26-1, TRAJ52)
CIVREHRNAGGTSYGKLTF

SEQ ID NO: 219678 - protein, 15 aa, Homo sapiens
  CDR3 for beta chain variable domain of TCR clone 109839 (TRBV12-4, TRBJ2-5)
CASSPPTGLQETQYF

SEQ ID NO: 219679 - protein, 14 aa, Homo sapiens
  CDR3 for alpha chain variable domain of TCR clone 109840 (TRAV12-2, TRAJ11)
CAVEGGSGYSTLTF

SEQ ID NO: 219680 - protein, 15 aa, Homo sapiens
  CDR3 for beta chain variable domain of TCR clone 109840 (TRBV2, TRBJ2-1)
CASSELAGSYNEQFF

SEQ ID NO: 219681 - protein, 14 aa, Homo sapiens
  CDR3 for alpha chain variable domain of TCR clone 109841 (TRAV12-3, TRAJ10)
SHLPLTGGGNKLTF

SEQ ID NO: 219682 - protein, 14 aa, Homo sapiens
  CDR3 for beta chain variable domain of TCR clone 109841 (TRBV7-7, TRBJ2-2)
CASSLGSTSGELFF

SEQ ID NO: 219683 - protein, 15 aa, Homo sapiens
  CDR3 for alpha chain variable domain of TCR clone 109842 (TRAV27, TRAJ38)
CAARRNAGNNHKLIW

SEQ ID NO: 219684 - protein, 11 aa, Homo sapiens
  CDR3 for beta chain variable domain of TCR clone 109842 (TRBV12-4, TRBJ2-2)
CASSSAGELFF

SEQ ID NO: 219685 - protein, 12 aa, Homo sapiens
  CDR3 for alpha chain variable domain of TCR clone 109843 (TRAV20, TRAJ39)
CAVGNTGNMLTF

SEQ ID NO: 219686 - protein, 16 aa, Homo sapiens
  CDR3 for beta chain variable domain of TCR clone 109843 (TRBV15, TRBJ1-2)
CATSRGPRTGGGGYTF

SEQ ID NO: 219687 - protein, 14 aa, Homo sapiens
  CDR3 for alpha chain variable domain of TCR clone 109844 (TRAV1-2, TRAJ16)
CAVNRFSDGQKLLF

SEQ ID NO: 219688 - protein, 15 aa, Homo sapiens
  CDR3 for beta chain variable domain of TCR clone 109844 (TRBV5-1, TRBJ1-1)
CASSPTGFDVTEAFF

SEQ ID NO: 219689 - protein, 12 aa, Homo sapiens
  CDR3 for alpha chain variable domain of TCR clone 109845 (TRAV21, TRAJ31)
CAVSPARGRLMF

SEQ ID NO: 219690 - protein, 14 aa, Homo sapiens
  CDR3 for beta chain variable domain of TCR clone 109845 (TRBV7-2, TRBJ1-1)
CASSFLTGTTEAFF

SEQ ID NO: 219691 - protein, 15 aa, Homo sapiens
  CDR3 for alpha chain variable domain of TCR clone 109846 (TRAV12-2, TRAJ56)
CAVNPFTGANSKLTF

SEQ ID NO: 219692 - protein, 13 aa, Homo sapiens
  CDR3 for beta chain variable domain of TCR clone 109846 (TRBV20-1, TRBJ1-2)
CSARDRVYGGDTF

SEQ ID NO: 219693 - protein, 13 aa, Homo sapiens
  CDR3 for alpha chain variable domain of TCR clone 109847 (TRAV2, TRAJ40)
CTVVTSGTYKYIF

SEQ ID NO: 219694 - protein, 16 aa, Homo sapiens
  CDR3 for beta chain variable domain of TCR clone 109847 (TRBV29-1, TRBJ1-2)
CSVEANRDIANYGYTF

SEQ ID NO: 219695 - protein, 16 aa, Homo sapiens
  CDR3 for alpha chain variable domain of TCR clone 109848 (TRAV8-3, TRAJ13)
CAVGAYPSGGYQKVTC

SEQ ID NO: 219696 - protein, 15 aa, Homo sapiens
  CDR3 for beta chain variable domain of TCR clone 109848 (TRBV19, TRBJ1-5)
CASSIVWADNQPQHF

SEQ ID NO: 219697 - protein, 14 aa, Homo sapiens
  CDR3 for alpha chain variable domain of TCR clone 109849 (TRAV8-4, TRAJ34)
CAVSDPGDTAKLIF

SEQ ID NO: 219698 - protein, 15 aa, Homo sapiens
  CDR3 for beta chain variable domain of TCR clone 109849 (TRBV6-6, TRBJ1-1)
CASSPRGDVETEAFF

SEQ ID NO: 219699 - protein, 12 aa, Homo sapiens
  CDR3 for alpha chain variable domain of TCR clone 109850 (TRAV16, TRAJ21)
CALLGNFNKFYF

SEQ ID NO: 219700 - protein, 15 aa, Homo sapiens
  CDR3 for beta chain variable domain of TCR clone 109850 (TRBV3-1, TRBJ2-2)
CASSQAVRETGELVF

SEQ ID NO: 219701 - protein, 16 aa, Homo sapiens
  CDR3 for alpha chain variable domain of TCR clone 109851 (TRAV3, TRAJ40)
CAVRDRIASGTYKYIF

SEQ ID NO: 219702 - protein, 15 aa, Homo sapiens
  CDR3 for beta chain variable domain of TCR clone 109851 (TRBV5-1, TRBJ2-1)
CASSPPRAPYNEQFF

SEQ ID NO: 219703 - protein, 14 aa, Homo sapiens
  CDR3 for alpha chain variable domain of TCR clone 109852 (TRAV12-1, TRAJ33)
CVVNPEDSNYQLIW

SEQ ID NO: 219704 - protein, 17 aa, Homo sapiens
  CDR3 for beta chain variable domain of TCR clone 109852 (TRBV7-3, TRBJ2-3)
CASSLMKRMRGADTQYF

SEQ ID NO: 219705 - protein, 11 aa, Homo sapiens
  CDR3 for alpha chain variable domain of TCR clone 109853 (TRAV35, TRAJ30)
CAGERDDNIIF

SEQ ID NO: 219706 - protein, 14 aa, Homo sapiens
  CDR3 for beta chain variable domain of TCR clone 109853 (TRBV15, TRBJ2-5)
CATSGDRGQETQYF

SEQ ID NO: 219707 - protein, 11 aa, Homo sapiens
  CDR3 for alpha chain variable domain of TCR clone 109854 (TRAV13-1, TRAJ43)
CAAHNNNDMRF

SEQ ID NO: 219708 - protein, 15 aa, Homo sapiens
  CDR3 for beta chain variable domain of TCR clone 109854 (TRBV6-1, TRBJ2-2)
CASGRLRGDTGELFF

SEQ ID NO: 219709 - protein, 14 aa, Homo sapiens
  CDR3 for alpha chain variable domain of TCR clone 109855 (TRAV8-4, TRAJ13)
CAVTLSGGYQKVTF

SEQ ID NO: 219710 - protein, 12 aa, Homo sapiens
  CDR3 for beta chain variable domain of TCR clone 109855 (TRBV7-9, TRBJ1-5)
CASSPQGQPQHF

SEQ ID NO: 219711 - protein, 14 aa, Homo sapiens
  CDR3 for alpha chain variable domain of TCR clone 109856 (TRAV1-2, TRAJ16)
CAVNRFSDGQKLLF

SEQ ID NO: 219712 - protein, 14 aa, Homo sapiens
  CDR3 for beta chain variable domain of TCR clone 109856 (TRBV19, TRBJ2-1)
CASPTFVLSGEKFF

SEQ ID NO: 219713 - protein, 12 aa, Homo sapiens
  CDR3 for alpha chain variable domain of TCR clone 109857 (TRAV20, TRAJ39)
CAVGNAGSMLTF

SEQ ID NO: 219714 - protein, 15 aa, Homo sapiens
  CDR3 for beta chain variable domain of TCR clone 109857 (TRBV27, TRBJ2-1)
CASSSGGGSSNEQFF

SEQ ID NO: 219715 - protein, 14 aa, Homo sapiens
  CDR3 for alpha chain variable domain of TCR clone 109858 (TRAV17, TRAJ54)
CTTDANQGAQKLVF

SEQ ID NO: 219716 - protein, 12 aa, Homo sapiens
  CDR3 for beta chain variable domain of TCR clone 109858 (TRBV6-3, TRBJ2-1)
CASSGSYNEQFF

SEQ ID NO: 219717 - protein, 18 aa, Homo sapiens
  CDR3 for alpha chain variable domain of TCR clone 109859 (TRAV21, TRAJ52)
CAVRPSPAGGTSYGKLTF

SEQ ID NO: 219718 - protein, 14 aa, Homo sapiens
  CDR3 for beta chain variable domain of TCR clone 109859 (TRBV4-1, TRBJ2-2)
CASSQAVNTGELFL

SEQ ID NO: 219719 - protein, 14 aa, Homo sapiens
  CDR3 for alpha chain variable domain of TCR clone 109860 (TRAV26-2, TRAJ23)
CIKGGPNQGGKLIF

SEQ ID NO: 219720 - protein, 15 aa, Homo sapiens
  CDR3 for beta chain variable domain of TCR clone 109860 (TRBV7-9, TRBJ2-7)
CASSLVPQGALEQYF

SEQ ID NO: 219721 - protein, 12 aa, Homo sapiens
  CDR3 for alpha chain variable domain of TCR clone 109861 (TRAV16, TRAJ10)
CSRTGGGNKLTF

SEQ ID NO: 219722 - protein, 15 aa, Homo sapiens
  CDR3 for beta chain variable domain of TCR clone 109861 (TRBV11-3, TRBJ1-6)
CASSLDWGANSPLHF

SEQ ID NO: 219723 - protein, 16 aa, Homo sapiens
  CDR3 for alpha chain variable domain of TCR clone 109862 (TRAV3, TRAJ10)
CAVRDMRAGGGNKLTF

SEQ ID NO: 219724 - protein, 17 aa, Homo sapiens
  CDR3 for beta chain variable domain of TCR clone 109862 (TRBV7-2, TRBJ2-3)
CASSLEARGTSTDTQYF

SEQ ID NO: 219725 - protein, 13 aa, Homo sapiens
  CDR3 for alpha chain variable domain of TCR clone 109863 (TRAV27, TRAJ45)
CRSSGGVADGLTF

SEQ ID NO: 219726 - protein, 17 aa, Homo sapiens
  CDR3 for beta chain variable domain of TCR clone 109863 (TRBV11-2, TRBJ2-1)
FASSLYPPGVEYNEQFF

SEQ ID NO: 219727 - protein, 15 aa, Homo sapiens
  CDR3 for alpha chain variable domain of TCR clone 109864 (TRAV17, TRAJ57)
CATGPSQGGSEKLVF

SEQ ID NO: 219728 - protein, 16 aa, Homo sapiens
  CDR3 for beta chain variable domain of TCR clone 109864 (TRBV2, TRBJ2-3)
CASSTSVEGVTDTQYF

SEQ ID NO: 219729 - protein, 13 aa, Homo sapiens
  CDR3 for alpha chain variable domain of TCR clone 109865 (TRAV12-1, TRAJ11)
CVVNRVGYSTLTF

SEQ ID NO: 219730 - protein, 15 aa, Homo sapiens
  CDR3 for beta chain variable domain of TCR clone 109865 (TRBV7-3, TRBJ2-2)
CASSETGQGTGELFF

SEQ ID NO: 219731 - protein, 15 aa, Homo sapiens
  CDR3 for alpha chain variable domain of TCR clone 109866 (TRAV2, TRAJ15)
CAVEDRSQAGTALIF

SEQ ID NO: 219732 - protein, 13 aa, Homo sapiens
  CDR3 for beta chain variable domain of TCR clone 109866 (TRBV4-1, TRBJ2-5)
CASSLTRGETQYF

SEQ ID NO: 219733 - protein, 14 aa, Homo sapiens
  CDR3 for alpha chain variable domain of TCR clone 109867 (TRAV29/DV5, TRAJ48)
CAARENFGNEKLTF

SEQ ID NO: 219734 - protein, 12 aa, Homo sapiens
  CDR3 for beta chain variable domain of TCR clone 109867 (TRBV11-2, TRBJ2-2)
CASSLPTGELFF

SEQ ID NO: 219735 - protein, 12 aa, Homo sapiens
  CDR3 for alpha chain variable domain of TCR clone 109868 (TRAV13-1, TRAJ27)
GAAHTNAGKSTF

SEQ ID NO: 219736 - protein, 14 aa, Homo sapiens
  CDR3 for beta chain variable domain of TCR clone 109868 (TRBV19, TRBJ2-2)
CASSGQGIAGELFF

SEQ ID NO: 219737 - protein, 14 aa, Homo sapiens
  CDR3 for alpha chain variable domain of TCR clone 109869 (TRAV12-2, TRAJ5)
CAVNRSMGRRALTF

SEQ ID NO: 219738 - protein, 12 aa, Homo sapiens
  CDR3 for beta chain variable domain of TCR clone 109869 (TRBV19, TRBJ1-5)
CASSIAQQPQHF

SEQ ID NO: 219739 - protein, 14 aa, Homo sapiens
  CDR3 for alpha chain variable domain of TCR clone 109870 (TRAV12-2, TRAJ17)
CAVNIKAAGNELTF

SEQ ID NO: 219740 - protein, 16 aa, Homo sapiens
  CDR3 for beta chain variable domain of TCR clone 109870 (TRBV20-1, TRBJ2-6)
CSASSQGYDGANVLTF

SEQ ID NO: 219741 - protein, 14 aa, Homo sapiens
  CDR3 for alpha chain variable domain of TCR clone 109871 (TRAV8-4, TRAJ17)
CAVSDQAAGNKLTF

SEQ ID NO: 219742 - protein, 16 aa, Homo sapiens
  CDR3 for beta chain variable domain of TCR clone 109871 (TRBV19, TRBJ2-1)
CASSKAGPSSYNEQFF

SEQ ID NO: 219743 - protein, 13 aa, Homo sapiens
  CDR3 for alpha chain variable domain of TCR clone 109872 (TRAV8-6, TRAJ8)
CAVSNTGFQKLVF

SEQ ID NO: 219744 - protein, 13 aa, Homo sapiens
  CDR3 for beta chain variable domain of TCR clone 109872 (TRBV11-2, TRBJ2-5)
CASSSTGEETQYF

SEQ ID NO: 219745 - protein, 14 aa, Homo sapiens
  CDR3 for alpha chain variable domain of TCR clone 109873 (TRAV12-3, TRAJ47)
FAMSVREYGNKLVF

SEQ ID NO: 219746 - protein, 15 aa, Homo sapiens
  CDR3 for beta chain variable domain of TCR clone 109873 (TRBV20-1, TRBJ2-2)
CSARDTRLNTGELFF

SEQ ID NO: 219747 - protein, 13 aa, Homo sapiens
  CDR3 for alpha chain variable domain of TCR clone 109874 (TRAV13-1, TRAJ39)
CAASIWAGNMLTF

SEQ ID NO: 219748 - protein, 15 aa, Homo sapiens
  CDR3 for beta chain variable domain of TCR clone 109874 (TRBV7-9, TRBJ1-1)
CASSSLEQGGTEAFF

SEQ ID NO: 219749 - protein, 14 aa, Homo sapiens
  CDR3 for alpha chain variable domain of TCR clone 109875 (TRAV38-1, TRAJ45)
CAYYSGGGADGLTF

SEQ ID NO: 219750 - protein, 12 aa, Homo sapiens
  CDR3 for beta chain variable domain of TCR clone 109875 (TRBV7-9, TRBJ2-7)
CASSIKREEQYF

SEQ ID NO: 219751 - protein, 17 aa, Homo sapiens
  CDR3 for alpha chain variable domain of TCR clone 109876 (TRAV14/DV4, TRAJ12)
CAMRELPWMDSSYKLIF

SEQ ID NO: 219752 - protein, 14 aa, Homo sapiens
  CDR3 for beta chain variable domain of TCR clone 109876 (TRBV18, TRBJ2-7)
CASSPRGGAYEQYL

SEQ ID NO: 219753 - protein, 15 aa, Homo sapiens
  CDR3 for alpha chain variable domain of TCR clone 109877 (TRAV17, TRAJ22)
CATAPISGSARQLTF

SEQ ID NO: 219754 - protein, 13 aa, Homo sapiens
  CDR3 for beta chain variable domain of TCR clone 109877 (TRBV6-5, TRBJ1-2)
CASSLDTYCGYTF

SEQ ID NO: 219755 - protein, 17 aa, Homo sapiens
  CDR3 for alpha chain variable domain of TCR clone 109878 (TRAV8-3, TRAJ50)
CAVGAVDTETSYDKVIF

SEQ ID NO: 219756 - protein, 13 aa, Homo sapiens
  CDR3 for beta chain variable domain of TCR clone 109878 (TRBV7-9, TRBJ2-2)
CASSSAGTGELFF

SEQ ID NO: 219757 - protein, 23 aa, Homo sapiens
  CDR3 for alpha chain variable domain of TCR clone 109879 (TRAV26-1, TRAJ38)
CIADNAGNNHIQNPDPALYQLRD

SEQ ID NO: 219758 - protein, 17 aa, Homo sapiens
  CDR3 for beta chain variable domain of TCR clone 109879 (TRBV11-2, TRBJ2-6)
CASSQRDIFSGANVLTF

SEQ ID NO: 219759 - protein, 17 aa, Homo sapiens
  CDR3 for alpha chain variable domain of TCR clone 109880 (TRAV3, TRAJ42)
CAVRDRDYGGSQGNLIF

SEQ ID NO: 219760 - protein, 16 aa, Homo sapiens
  CDR3 for beta chain variable domain of TCR clone 109880 (TRBV15, TRBJ2-6)
CATSVNGGFLASVLTF

SEQ ID NO: 219761 - protein, 17 aa, Homo sapiens
  CDR3 for alpha chain variable domain of TCR clone 109881 (TRAV12-2, TRAJ22)
CAVNRIPFSGSARQLTF

SEQ ID NO: 219762 - protein, 13 aa, Homo sapiens
  CDR3 for beta chain variable domain of TCR clone 109881 (TRBV11-3, TRBJ1-1)
CASSSNGGTEAFF

SEQ ID NO: 219763 - protein, 14 aa, Homo sapiens
  CDR3 for alpha chain variable domain of TCR clone 109882 (TRAV13-1, TRAJ9)
CAASALTEGFKTIF

SEQ ID NO: 219764 - protein, 16 aa, Homo sapiens
  CDR3 for beta chain variable domain of TCR clone 109882 (TRBV7-8, TRBJ2-4)
CASSAERTLAKNIQYF

SEQ ID NO: 219765 - protein, 12 aa, Homo sapiens
  CDR3 for alpha chain variable domain of TCR clone 109883 (TRAV12-2, TRAJ52)
IGGGTSYGKLTF

SEQ ID NO: 219766 - protein, 13 aa, Homo sapiens
  CDR3 for beta chain variable domain of TCR clone 109883 (TRBV12-4, TRBJ1-1)
CASSQGTGFEAFF

SEQ ID NO: 219767 - protein, 13 aa, Homo sapiens
  CDR3 for alpha chain variable domain of TCR clone 109884 (TRAV13-1, TRAJ37)
CAAVSGNTGKLIF

SEQ ID NO: 219768 - protein, 13 aa, Homo sapiens
  CDR3 for beta chain variable domain of TCR clone 109884 (TRBV7-9, TRBJ1-2)
CASSLKQNYGYAF

SEQ ID NO: 219769 - protein, 11 aa, Homo sapiens
  CDR3 for alpha chain variable domain of TCR clone 109885 (TRAV16, TRAJ26)
CALTRRSEFCL

SEQ ID NO: 219770 - protein, 15 aa, Homo sapiens
  CDR3 for beta chain variable domain of TCR clone 109885 (TRBV6-3, TRBJ2-7)
CASSSPGTVFYEQYF

SEQ ID NO: 219771 - protein, 13 aa, Homo sapiens
  CDR3 for alpha chain variable domain of TCR clone 109886 (TRAV8-3, TRAJ48)
CAVVPFGNEKLTF

SEQ ID NO: 219772 - protein, 15 aa, Homo sapiens
  CDR3 for beta chain variable domain of TCR clone 109886 (TRBV11-2, TRBJ2-1)
CASSSPTTRYNEQFF

SEQ ID NO: 219773 - protein, 13 aa, Homo sapiens
  CDR3 for alpha chain variable domain of TCR clone 109887 (TRAV21, TRAJ49)
CAVRQSTGNPFYF

SEQ ID NO: 219774 - protein, 13 aa, Homo sapiens
  CDR3 for beta chain variable domain of TCR clone 109887 (TRBV6-6, TRBJ1-5)
CASRAYQDQPQHF

SEQ ID NO: 219775 - protein, 13 aa, Homo sapiens
  CDR3 for alpha chain variable domain of TCR clone 109888 (TRAV12-1, TRAJ26)
SATYLYYGQNFVF

SEQ ID NO: 219776 - protein, 15 aa, Homo sapiens
  CDR3 for beta chain variable domain of TCR clone 109888 (TRBV6-1, TRBJ2-3)
CASSERGGITDTQYF

SEQ ID NO: 219777 - protein, 14 aa, Homo sapiens
  CDR3 for alpha chain variable domain of TCR clone 109889 (TRAV29/DV5, TRAJ48)
RAAMALFGNEKLTF

SEQ ID NO: 219778 - protein, 14 aa, Homo sapiens
  CDR3 for beta chain variable domain of TCR clone 109889 (TRBV18, TRBJ2-5)
CASSPGVSQETQYF

SEQ ID NO: 219779 - protein, 12 aa, Homo sapiens
  CDR3 for alpha chain variable domain of TCR clone 109890 (TRAV2, TRAJ10)
CASTGGGNKLTF

SEQ ID NO: 219780 - protein, 15 aa, Homo sapiens
  CDR3 for beta chain variable domain of TCR clone 109890 (TRBV4-1, TRBJ1-4)
CASSDTGGTNEKLFF

SEQ ID NO: 219781 - protein, 11 aa, Homo sapiens
  CDR3 for alpha chain variable domain of TCR clone 109891 (TRAV21, TRAJ11)
CAVNGYSTLTF

SEQ ID NO: 219782 - protein, 14 aa, Homo sapiens
  CDR3 for beta chain variable domain of TCR clone 109891 (TRBV18, TRBJ2-5)
CASSPGVSQETQYF

SEQ ID NO: 219783 - protein, 17 aa, Homo sapiens
  CDR3 for alpha chain variable domain of TCR clone 109892 (TRAV26-1, TRAJ46)
IASSESEKKSSGDKLTF

SEQ ID NO: 219784 - protein, 19 aa, Homo sapiens
  CDR3 for beta chain variable domain of TCR clone 109892 (TRBV7-2, TRBJ2-3)
CASSFLSRNWGGGTDTQYF

SEQ ID NO: 219785 - protein, 16 aa, Homo sapiens
  CDR3 for alpha chain variable domain of TCR clone 109893 (TRAV30, TRAJ24)
CGTEIVDADSWGKFQF

SEQ ID NO: 219786 - protein, 14 aa, Homo sapiens
  CDR3 for beta chain variable domain of TCR clone 109893 (TRBV28, TRBJ2-7)
CASSLGVPTYEQYF

SEQ ID NO: 219787 - protein, 16 aa, Homo sapiens
  CDR3 for alpha chain variable domain of TCR clone 109894 (TRAV22, TRAJ45)
CSVERGKRGGADGLTF

SEQ ID NO: 219788 - protein, 13 aa, Homo sapiens
  CDR3 for beta chain variable domain of TCR clone 109894 (TRBV27, TRBJ1-1)
CASSLSIGAEAFF

SEQ ID NO: 219789 - protein, 15 aa, Homo sapiens
  CDR3 for alpha chain variable domain of TCR clone 109895 (TRAV26-1, TRAJ44)
CIARVPFDTASKLTF

SEQ ID NO: 219790 - protein, 17 aa, Homo sapiens
  CDR3 for beta chain variable domain of TCR clone 109895 (TRBV24-1, TRBJ2-4)
CATSDAEARGVRNIQYF

SEQ ID NO: 219791 - protein, 13 aa, Homo sapiens
  CDR3 for alpha chain variable domain of TCR clone 109896 (TRAV13-1, TRAJ13)
CAASKGGYQKVAF

SEQ ID NO: 219792 - protein, 16 aa, Homo sapiens
  CDR3 for beta chain variable domain of TCR clone 109896 (TRBV18, TRBJ1-2)
CASSPPERVTIYGYTF

SEQ ID NO: 219793 - protein, 14 aa, Homo sapiens
  CDR3 for alpha chain variable domain of TCR clone 109897 (TRAV9-2, TRAJ4)
CALAFSGGYNKLIF

SEQ ID NO: 219794 - protein, 15 aa, Homo sapiens
  CDR3 for beta chain variable domain of TCR clone 109897 (TRBV20-1, TRBJ1-2)
CSARESLTLRYGYTF

SEQ ID NO: 219795 - protein, 16 aa, Homo sapiens
  CDR3 for alpha chain variable domain of TCR clone 109898 (TRAV30, TRAJ24)
CGTEIVDADSWGKFRF

SEQ ID NO: 219796 - protein, 14 aa, Homo sapiens
  CDR3 for beta chain variable domain of TCR clone 109898 (TRBV20-1, TRBJ1-1)
CSAQTRIGGTEAFF

SEQ ID NO: 219797 - protein, 12 aa, Homo sapiens
  CDR3 for alpha chain variable domain of TCR clone 109899 (TRAV13-2, TRAJ23)
CAERHRGGKRIF

SEQ ID NO: 219798 - protein, 15 aa, Homo sapiens
  CDR3 for beta chain variable domain of TCR clone 109899 (TRBV15, TRBJ2-1)
CATSRPGQGLHEQFF

SEQ ID NO: 219799 - protein, 10 aa, Homo sapiens
  CDR3 for alpha chain variable domain of TCR clone 109900 (TRAV12-1, TRAJ43)
CVVHNNDMRF

SEQ ID NO: 219800 - protein, 16 aa, Homo sapiens
  CDR3 for beta chain variable domain of TCR clone 109900 (TRBV12-4, TRBJ1-5)
CASSRPVGGSNQPQHF

SEQ ID NO: 219801 - protein, 11 aa, Homo sapiens
  CDR3 for alpha chain variable domain of TCR clone 109901 (TRAV26-2, TRAJ8)
CILTGFQKLVF

SEQ ID NO: 219802 - protein, 12 aa, Homo sapiens
  CDR3 for beta chain variable domain of TCR clone 109901 (TRBV12-4, TRBJ2-7)
CASNLGGYEQYF

SEQ ID NO: 219803 - protein, 13 aa, Homo sapiens
  CDR3 for alpha chain variable domain of TCR clone 109902 (TRAV13-1, TRAJ39)
CAASIWAGNVLTF

SEQ ID NO: 219804 - protein, 15 aa, Homo sapiens
  CDR3 for beta chain variable domain of TCR clone 109902 (TRBV7-9, TRBJ1-1)
CASSLLEQGGTEAFF

SEQ ID NO: 219805 - protein, 11 aa, Homo sapiens
  CDR3 for alpha chain variable domain of TCR clone 109903 (TRAV12-3, TRAJ43)
CAMSVSNDMRF

SEQ ID NO: 219806 - protein, 13 aa, Homo sapiens
  CDR3 for beta chain variable domain of TCR clone 109903 (TRBV4-2, TRBJ1-1)
CASSQAGNTEAFF

SEQ ID NO: 219807 - protein, 15 aa, Homo sapiens
  CDR3 for alpha chain variable domain of TCR clone 109904 (TRAV13-1, TRAJ50)
CAAKGSETSYDKGIF

SEQ ID NO: 219808 - protein, 18 aa, Homo sapiens
  CDR3 for beta chain variable domain of TCR clone 109904 (TRBV10-3, TRBJ2-1)
CTSVPSVSLRGGVDEQFF

SEQ ID NO: 219809 - protein, 14 aa, Homo sapiens
  CDR3 for alpha chain variable domain of TCR clone 109905 (TRAV13-1, TRAJ39)
CAASYNNACNMLTF

SEQ ID NO: 219810 - protein, 13 aa, Homo sapiens
  CDR3 for beta chain variable domain of TCR clone 109905 (TRBV24-1, TRBJ1-4)
CATNNGRSEKLFF

SEQ ID NO: 219811 - protein, 15 aa, Homo sapiens
  CDR3 for alpha chain variable domain of TCR clone 109906 (TRAV12-2, TRAJ43)
CAFDIRFGAGTRLTV

SEQ ID NO: 219812 - protein, 17 aa, Homo sapiens
  CDR3 for beta chain variable domain of TCR clone 109906 (TRBV13, TRBJ2-3)
CASSLSRVAGGRNTQYF

SEQ ID NO: 219813 - protein, 13 aa, Homo sapiens
  CDR3 for alpha chain variable domain of TCR clone 109907 (TRAV8-3, TRAJ44)
CAVVPGTASKLTF

SEQ ID NO: 219814 - protein, 14 aa, Homo sapiens
  CDR3 for beta chain variable domain of TCR clone 109907 (TRBV11-2, TRBJ2-3)
CASSRLARKDTQHF

SEQ ID NO: 219815 - protein, 11 aa, Homo sapiens
  CDR3 for alpha chain variable domain of TCR clone 109908 (TRAV12-3, TRAJ49)
CAANTGNQFYF

SEQ ID NO: 219816 - protein, 15 aa, Homo sapiens
  CDR3 for beta chain variable domain of TCR clone 109908 (TRBV11-2, TRBJ2-1)
CASSLGASGLNEQFF

SEQ ID NO: 219817 - protein, 13 aa, Homo sapiens
  CDR3 for alpha chain variable domain of TCR clone 109909 (TRAV1-2, TRAJ36)
CAVDQTGANNLFF

SEQ ID NO: 219818 - protein, 14 aa, Homo sapiens
  CDR3 for beta chain variable domain of TCR clone 109909 (TRBV20-1, TRBJ2-5)
CSAREMPKQETQYF

SEQ ID NO: 219819 - protein, 12 aa, Homo sapiens
  CDR3 for alpha chain variable domain of TCR clone 109910 (TRAV16, TRAJ10)
CSRTGGGNKLTF

SEQ ID NO: 219820 - protein, 15 aa, Homo sapiens
  CDR3 for beta chain variable domain of TCR clone 109910 (TRBV9, TRBJ1-6)
CASSVAGTGDSTLHF

SEQ ID NO: 219821 - protein, 14 aa, Homo sapiens
  CDR3 for alpha chain variable domain of TCR clone 109911 (TRAV35, TRAJ22)
CAGLRPGYARQLTF

SEQ ID NO: 219822 - protein, 14 aa, Homo sapiens
  CDR3 for beta chain variable domain of TCR clone 109911 (TRBV11-3, TRBJ2-3)
CASSSGQGPDTQYF

SEQ ID NO: 219823 - protein, 11 aa, Homo sapiens
  CDR3 for alpha chain variable domain of TCR clone 109912 (TRAV2, TRAJ33)
CAVDSNYPLIW

SEQ ID NO: 219824 - protein, 15 aa, Homo sapiens
  CDR3 for beta chain variable domain of TCR clone 109912 (TRBV19, TRBJ1-2)
CASSVGQVLNYGYTF

SEQ ID NO: 219825 - protein, 14 aa, Homo sapiens
  CDR3 for alpha chain variable domain of TCR clone 109913 (TRAV8-3, TRAJ15)
CAVGLNQAGTALIF

SEQ ID NO: 219826 - protein, 15 aa, Homo sapiens
  CDR3 for beta chain variable domain of TCR clone 109913 (TRBV18, TRBJ2-6)
CASSPSYAGANVLTF

SEQ ID NO: 219827 - protein, 15 aa, Homo sapiens
  CDR3 for alpha chain variable domain of TCR clone 109914 (TRAV2, TRAJ37)
CAVEDGSSNTGELIF

SEQ ID NO: 219828 - protein, 13 aa, Homo sapiens
  CDR3 for beta chain variable domain of TCR clone 109914 (TRBV20-1, TRBJ1-6)
CSTFREGNSPLHF

SEQ ID NO: 219829 - protein, 14 aa, Homo sapiens
  CDR3 for alpha chain variable domain of TCR clone 109915 (TRAV23/DV6, TRAJ4)
CAAPSSCGYNKLIF

SEQ ID NO: 219830 - protein, 16 aa, Homo sapiens
  CDR3 for beta chain variable domain of TCR clone 109915 (TRBV19, TRBJ1-1)
CASRFGGPVTGTEAFF

SEQ ID NO: 219831 - protein, 15 aa, Homo sapiens
  CDR3 for alpha chain variable domain of TCR clone 109916 (TRAV12-3, TRAJ27)
CAMRAYNTNAGKSTF

SEQ ID NO: 219832 - protein, 13 aa, Homo sapiens
  CDR3 for beta chain variable domain of TCR clone 109916 (TRBV11-2, TRBJ2-5)
CASSRGPSETRYF

SEQ ID NO: 219833 - protein, 13 aa, Homo sapiens
  CDR3 for alpha chain variable domain of TCR clone 109917 (TRAV13-1, TRAJ28)
CAANEAGSYQLTF

SEQ ID NO: 219834 - protein, 15 aa, Homo sapiens
  CDR3 for beta chain variable domain of TCR clone 109917 (TRBV7-9, TRBJ1-6)
CASSSPGRGNSPLLF

SEQ ID NO: 219835 - protein, 13 aa, Homo sapiens
  CDR3 for alpha chain variable domain of TCR clone 109918 (TRAV27, TRAJ6)
CAGGTRGSYIPTF

SEQ ID NO: 219836 - protein, 12 aa, Homo sapiens
  CDR3 for beta chain variable domain of TCR clone 109918 (TRBV11-2, TRBJ2-1)
CASSPGNNEQFF

SEQ ID NO: 219837 - protein, 13 aa, Homo sapiens
  CDR3 for alpha chain variable domain of TCR clone 109919 (TRAV16, TRAJ30)
CALAQNRDDKIIF

SEQ ID NO: 219838 - protein, 14 aa, Homo sapiens
  CDR3 for beta chain variable domain of TCR clone 109919 (TRBV25-1, TRBJ1-1)
CASTHLGGNTEAFF

SEQ ID NO: 219839 - protein, 14 aa, Homo sapiens
  CDR3 for alpha chain variable domain of TCR clone 109920 (TRAV35, TRAJ22)
CAGLRPGSARQLTF

SEQ ID NO: 219840 - protein, 16 aa, Homo sapiens
  CDR3 for beta chain variable domain of TCR clone 109920 (TRBV15, TRBJ1-2)
CATSRGPRTGGGGYTF

SEQ ID NO: 219841 - protein, 16 aa, Homo sapiens
  CDR3 for alpha chain variable domain of TCR clone 109921 (TRAV12-2, TRAJ40)
CAVIRGGTSGTYKYIF

SEQ ID NO: 219842 - protein, 14 aa, Homo sapiens
  CDR3 for beta chain variable domain of TCR clone 109921 (TRBV20-1, TRBJ2-5)
CSARDGRAGENQYF

SEQ ID NO: 219843 - protein, 13 aa, Homo sapiens
  CDR3 for alpha chain variable domain of TCR clone 109922 (TRAV12-2, TRAJ7)
CAMTPYGNNRLAF

SEQ ID NO: 219844 - protein, 16 aa, Homo sapiens
  CDR3 for beta chain variable domain of TCR clone 109922 (TRBV20-1, TRBJ1-4)
CSARPYGGELNEKLFF

SEQ ID NO: 219845 - protein, 13 aa, Homo sapiens
  CDR3 for alpha chain variable domain of TCR clone 109923 (TRAV13-2, TRAJ48)
CAEMNFGNEKLTF

SEQ ID NO: 219846 - protein, 15 aa, Homo sapiens
  CDR3 for beta chain variable domain of TCR clone 109923 (TRBV7-9, TRBJ1-6)
CASSSPGRGNSPLHF

SEQ ID NO: 219847 - protein, 14 aa, Homo sapiens
  CDR3 for alpha chain variable domain of TCR clone 109924 (TRAV1-2, TRAJ16)
CAVNRFSDGQKLLF

SEQ ID NO: 219848 - protein, 13 aa, Homo sapiens
  CDR3 for beta chain variable domain of TCR clone 109924 (TRBV4-1, TRBJ2-1)
CASSQAVGDEQFF

SEQ ID NO: 219849 - protein, 14 aa, Homo sapiens
  CDR3 for alpha chain variable domain of TCR clone 109925 (TRAV16, TRAJ39)
CALSKNNAGNMLTF

SEQ ID NO: 219850 - protein, 17 aa, Homo sapiens
  CDR3 for beta chain variable domain of TCR clone 109925 (TRBV7-3, TRBJ2-3)
CASSLMKRMRGADTQYF

SEQ ID NO: 219851 - protein, 11 aa, Homo sapiens
  CDR3 for alpha chain variable domain of TCR clone 109926 (TRAV1-2, TRAJ23)
CAVRQGGKLIF

SEQ ID NO: 219852 - protein, 12 aa, Homo sapiens
  CDR3 for beta chain variable domain of TCR clone 109926 (TRBV19, TRBJ1-5)
CASSIAQQPQHF

SEQ ID NO: 219853 - protein, 14 aa, Homo sapiens
  CDR3 for alpha chain variable domain of TCR clone 109927 (TRAV12-3, TRAJ29)
CAMILLSGNTPLVF

SEQ ID NO: 219854 - protein, 14 aa, Homo sapiens
  CDR3 for beta chain variable domain of TCR clone 109927 (TRBV4-2, TRBJ2-1)
CASGLDRAYNEQFF

SEQ ID NO: 219855 - protein, 19 aa, Homo sapiens
  CDR3 for alpha chain variable domain of TCR clone 109928 (TRAV8-3, TRAJ8)
LSTSVLWDPMHTGFQKLVF

SEQ ID NO: 219856 - protein, 13 aa, Homo sapiens
  CDR3 for beta chain variable domain of TCR clone 109928 (TRBV10-2, TRBJ2-3)
CASSESGDHTQYF

SEQ ID NO: 219857 - protein, 14 aa, Homo sapiens
  CDR3 for alpha chain variable domain of TCR clone 109929 (TRAV2, TRAJ9)
CAVEVRSGGFKTIF

SEQ ID NO: 219858 - protein, 14 aa, Homo sapiens
  CDR3 for beta chain variable domain of TCR clone 109929 (TRBV19, TRBJ2-1)
CASPTFVLSGEQFF

SEQ ID NO: 219859 - protein, 15 aa, Homo sapiens
  CDR3 for alpha chain variable domain of TCR clone 109930 (TRAV27, TRAJ22)
CAGAALKGSARQLTF

SEQ ID NO: 219860 - protein, 16 aa, Homo sapiens
  CDR3 for beta chain variable domain of TCR clone 109930 (TRBV19, TRBJ2-2)
CASTLGASGAPGELFF

SEQ ID NO: 219861 - protein, 10 aa, Homo sapiens
  CDR3 for alpha chain variable domain of TCR clone 109931 (TRAV1-2, TRAJ34)
CAVNTDKLIF

SEQ ID NO: 219862 - protein, 18 aa, Homo sapiens
  CDR3 for beta chain variable domain of TCR clone 109931 (TRBV7-9, TRBJ2-7)
CTSSLTTSGSRTWYEQYF

SEQ ID NO: 219863 - protein, 14 aa, Homo sapiens
  CDR3 for alpha chain variable domain of TCR clone 109932 (TRAV38-1, TRAJ45)
CAYYSGGGADGLTF

SEQ ID NO: 219864 - protein, 20 aa, Homo sapiens
  CDR3 for beta chain variable domain of TCR clone 109932 (TRBV28, TRBJ2-1)
CASTPIGRSPGLAGGNEQIF

SEQ ID NO: 219865 - protein, 14 aa, Homo sapiens
  CDR3 for alpha chain variable domain of TCR clone 109933 (TRAV8-4, TRAJ9)
CAVRINSGGFKTIF

SEQ ID NO: 219866 - protein, 15 aa, Homo sapiens
  CDR3 for beta chain variable domain of TCR clone 109933 (TRBV10-2, TRBJ2-6)
CASSEQGTGANVLTF

SEQ ID NO: 219867 - protein, 13 aa, Homo sapiens
  CDR3 for alpha chain variable domain of TCR clone 109934 (TRAV25, TRAJ10)
CAGRTGGGNKLTF

SEQ ID NO: 219868 - protein, 15 aa, Homo sapiens
  CDR3 for beta chain variable domain of TCR clone 109934 (TRBV19, TRBJ2-1)
CASSSPGVPLDEQFC

SEQ ID NO: 219869 - protein, 12 aa, Homo sapiens
  CDR3 for alpha chain variable domain of TCR clone 109935 (TRAV38-1, TRAJ32)
FAPLGATNKLIF

SEQ ID NO: 219870 - protein, 14 aa, Homo sapiens
  CDR3 for beta chain variable domain of TCR clone 109935 (TRBV29-1, TRBJ2-5)
CSVETSGSGETQYF

SEQ ID NO: 219871 - protein, 11 aa, Homo sapiens
  CDR3 for alpha chain variable domain of TCR clone 109936 (TRAV5, TRAJ31)
CAESKNARLMF

SEQ ID NO: 219872 - protein, 12 aa, Homo sapiens
  CDR3 for beta chain variable domain of TCR clone 109936 (TRBV11-2, TRBJ2-1)
CASSPGNNEQFF

SEQ ID NO: 219873 - protein, 15 aa, Homo sapiens
  CDR3 for alpha chain variable domain of TCR clone 109937 (TRAV4, TRAJ26)
CLVGGLDNYGQHFVF

SEQ ID NO: 219874 - protein, 13 aa, Homo sapiens
  CDR3 for beta chain variable domain of TCR clone 109937 (TRBV20-1, TRBJ2-5)
CSASLTGRETQYF

SEQ ID NO: 219875 - protein, 12 aa, Homo sapiens
  CDR3 for alpha chain variable domain of TCR clone 109938 (TRAV12-3, TRAJ20)
WAMVRGDYKLSF

SEQ ID NO: 219876 - protein, 14 aa, Homo sapiens
  CDR3 for beta chain variable domain of TCR clone 109938 (TRBV5-5, TRBJ1-5)
CASSGQGVDQPQHS

SEQ ID NO: 219877 - protein, 14 aa, Homo sapiens
  CDR3 for alpha chain variable domain of TCR clone 109939 (TRAV1-2, TRAJ16)
CAVNRFSDGKKLLF

SEQ ID NO: 219878 - protein, 15 aa, Homo sapiens
  CDR3 for beta chain variable domain of TCR clone 109939 (TRBV11-3, TRBJ2-3)
CASLKDGREGDTQYF

SEQ ID NO: 219879 - protein, 14 aa, Homo sapiens
  CDR3 for alpha chain variable domain of TCR clone 109940 (TRAV12-2, TRAJ13)
CAAKKTGGYQKVTF

SEQ ID NO: 219880 - protein, 17 aa, Homo sapiens
  CDR3 for beta chain variable domain of TCR clone 109940 (TRBV15, TRBJ2-4)
CATSRDNPQTGLDIQYF

SEQ ID NO: 219881 - protein, 15 aa, Homo sapiens
  CDR3 for alpha chain variable domain of TCR clone 109941 (TRAV25, TRAJ52)
CAGRPGGTSYGKLTF

SEQ ID NO: 219882 - protein, 14 aa, Homo sapiens
  CDR3 for beta chain variable domain of TCR clone 109941 (TRBV7-3, TRBJ2-1)
CASSLAGGTNEQFF

SEQ ID NO: 219883 - protein, 12 aa, Homo sapiens
  CDR3 for alpha chain variable domain of TCR clone 109942 (TRAV12-3, TRAJ17)
CAMTLTGNKLTF

SEQ ID NO: 219884 - protein, 12 aa, Homo sapiens
  CDR3 for beta chain variable domain of TCR clone 109942 (TRBV5-1, TRBJ2-3)
CASSLRGVTQYF

SEQ ID NO: 219885 - protein, 16 aa, Homo sapiens
  CDR3 for alpha chain variable domain of TCR clone 109943 (TRAV4, TRAJ22)
CLVGDLYSASARQLTF

SEQ ID NO: 219886 - protein, 16 aa, Homo sapiens
  CDR3 for beta chain variable domain of TCR clone 109943 (TRBV7-9, TRBJ2-1)
CASSDVAGGSYNEQFF

SEQ ID NO: 219887 - protein, 14 aa, Homo sapiens
  CDR3 for alpha chain variable domain of TCR clone 109944 (TRAV1-2, TRAJ16)
CAVNRFSDGQKLLF

SEQ ID NO: 219888 - protein, 16 aa, Homo sapiens
  CDR3 for beta chain variable domain of TCR clone 109944 (TRBV7-9, TRBJ2-3)
CASSFSVAGGTDTQYF

SEQ ID NO: 219889 - protein, 14 aa, Homo sapiens
  CDR3 for alpha chain variable domain of TCR clone 109945 (TRAV12-2, TRAJ33)
CSVKRARSNYQLIW

SEQ ID NO: 219890 - protein, 12 aa, Homo sapiens
  CDR3 for beta chain variable domain of TCR clone 109945 (TRBV24-1, TRBJ2-3)
CATSDSTDTQYF

SEQ ID NO: 219891 - protein, 14 aa, Homo sapiens
  CDR3 for alpha chain variable domain of TCR clone 109946 (TRAV17, TRAJ20)
CATPHPSNDYKLSF

SEQ ID NO: 219892 - protein, 13 aa, Homo sapiens
  CDR3 for beta chain variable domain of TCR clone 109946 (TRBV20-1, TRBJ1-1)
CSARGGGNTEAFF

SEQ ID NO: 219893 - protein, 16 aa, Homo sapiens
  CDR3 for alpha chain variable domain of TCR clone 109947 (TRAV8-3, TRAJ8)
CAVPRDGNTGFQKLVF

SEQ ID NO: 219894 - protein, 15 aa, Homo sapiens
  CDR3 for beta chain variable domain of TCR clone 109947 (TRBV19, TRBJ1-1)
CASRETGGVNTEAFF

SEQ ID NO: 219895 - protein, 13 aa, Homo sapiens
  CDR3 for alpha chain variable domain of TCR clone 109948 (TRAV3, TRAJ21)
CAVREPDFNKFYF

SEQ ID NO: 219896 - protein, 14 aa, Homo sapiens
  CDR3 for beta chain variable domain of TCR clone 109948 (TRBV7-2, TRBJ2-5)
CASSPRGSSETQYF

SEQ ID NO: 219897 - protein, 14 aa, Homo sapiens
  CDR3 for alpha chain variable domain of TCR clone 109949 (TRAV1-2, TRAJ16)
SAVNRFSDGRKLLF

SEQ ID NO: 219898 - protein, 13 aa, Homo sapiens
  CDR3 for beta chain variable domain of TCR clone 109949 (TRBV20-1, TRBJ2-1)
CSAHGSSYNEQFF

SEQ ID NO: 219899 - protein, 13 aa, Homo sapiens
  CDR3 for alpha chain variable domain of TCR clone 109950 (TRAV1-2, TRAJ12)
CAVSMDSSYKLIF

SEQ ID NO: 219900 - protein, 15 aa, Homo sapiens
  CDR3 for beta chain variable domain of TCR clone 109950 (TRBV27, TRBJ2-5)
CASSLIPSRGETQYF

SEQ ID NO: 219901 - protein, 15 aa, Homo sapiens
  CDR3 for alpha chain variable domain of TCR clone 109951 (TRAV3, TRAJ13)
CAVRVYSGGYQKVTF

SEQ ID NO: 219902 - protein, 15 aa, Homo sapiens
  CDR3 for beta chain variable domain of TCR clone 109951 (TRBV19, TRBJ1-6)
CASSTQGAVGSPLHF

SEQ ID NO: 219903 - protein, 17 aa, Homo sapiens
  CDR3 for alpha chain variable domain of TCR clone 109952 (TRAV8-6, TRAJ58)
CAVSSWVGETSGSRLTF

SEQ ID NO: 219904 - protein, 14 aa, Homo sapiens
  CDR3 for beta chain variable domain of TCR clone 109952 (TRBV4-2, TRBJ2-1)
CASGLERAYNEQFF

SEQ ID NO: 219905 - protein, 14 aa, Homo sapiens
  CDR3 for alpha chain variable domain of TCR clone 109953 (TRAV1-2, TRAJ16)
SAVNRFSDGQKLLF

SEQ ID NO: 219906 - protein, 17 aa, Homo sapiens
  CDR3 for beta chain variable domain of TCR clone 109953 (TRBV7-8, TRBJ2-6)
CASSAGTGGAGANVLTF

SEQ ID NO: 219907 - protein, 13 aa, Homo sapiens
  CDR3 for alpha chain variable domain of TCR clone 109954 (TRAV2, TRAJ40)
CAVVTSGTYKYIF

SEQ ID NO: 219908 - protein, 19 aa, Homo sapiens
  CDR3 for beta chain variable domain of TCR clone 109954 (TRBV27, TRBJ2-2)
CASRPGTGQPSRDTGELFF

SEQ ID NO: 219909 - protein, 17 aa, Homo sapiens
  CDR3 for alpha chain variable domain of TCR clone 109955 (TRAV13-1, TRAJ52)
CAASSGAGGTSYGKLTF

SEQ ID NO: 219910 - protein, 16 aa, Homo sapiens
  CDR3 for beta chain variable domain of TCR clone 109955 (TRBV19, TRBJ1-6)
CASSVAPVAGNSPLHF

SEQ ID NO: 219911 - protein, 13 aa, Homo sapiens
  CDR3 for alpha chain variable domain of TCR clone 109956 (TRAV8-6, TRAJ54)
CAVIAQGAQKLVF

SEQ ID NO: 219912 - protein, 13 aa, Homo sapiens
  CDR3 for beta chain variable domain of TCR clone 109956 (TRBV7-9, TRBJ1-2)
CASSLKQNYGYTF

SEQ ID NO: 219913 - protein, 15 aa, Homo sapiens
  CDR3 for alpha chain variable domain of TCR clone 109957 (TRAV26-1, TRAJ44)
CIVRANTGTASKLTF

SEQ ID NO: 219914 - protein, 15 aa, Homo sapiens
  CDR3 for beta chain variable domain of TCR clone 109957 (TRBV7-2, TRBJ2-1)
CASSSGLAGGNEQFF

SEQ ID NO: 219915 - protein, 12 aa, Homo sapiens
  CDR3 for alpha chain variable domain of TCR clone 109958 (TRAV12-1, TRAJ23)
CVVNNKGGKLIF

SEQ ID NO: 219916 - protein, 16 aa, Homo sapiens
  CDR3 for beta chain variable domain of TCR clone 109958 (TRBV11-1, TRBJ2-7)
CASSAQTGTLSYEQYF

SEQ ID NO: 219917 - protein, 11 aa, Homo sapiens
  CDR3 for alpha chain variable domain of TCR clone 109959 (TRAV2, TRAJ13)
CASGGYQKVTF

SEQ ID NO: 219918 - protein, 13 aa, Homo sapiens
  CDR3 for beta chain variable domain of TCR clone 109959 (TRBV9, TRBJ2-1)
CASSPSGGNEQFF

SEQ ID NO: 219919 - protein, 14 aa, Homo sapiens
  CDR3 for alpha chain variable domain of TCR clone 109960 (TRAV3, TRAJ36)
CAVRDGTGANNLFF

SEQ ID NO: 219920 - protein, 16 aa, Homo sapiens
  CDR3 for beta chain variable domain of TCR clone 109960 (TRBV7-3, TRBJ2-5)
CASIQPGGSAQETQYF

SEQ ID NO: 219921 - protein, 12 aa, Homo sapiens
  CDR3 for alpha chain variable domain of TCR clone 109961 (TRAV1-2, TRAJ33)
CAALDSNYQLIW

SEQ ID NO: 219922 - protein, 13 aa, Homo sapiens
  CDR3 for beta chain variable domain of TCR clone 109961 (TRBV12-4, TRBJ2-7)
CASSFVPTAEQYF

SEQ ID NO: 219923 - protein, 14 aa, Homo sapiens
  CDR3 for alpha chain variable domain of TCR clone 109962 (TRAV12-2, TRAJ44)
CAVNKAGTASKLTF

SEQ ID NO: 219924 - protein, 14 aa, Homo sapiens
  CDR3 for beta chain variable domain of TCR clone 109962 (TRBV18, TRBJ2-5)
CASSPGVSQETQYF

SEQ ID NO: 219925 - protein, 14 aa, Homo sapiens
  CDR3 for alpha chain variable domain of TCR clone 109963 (TRAV17, TRAJ6)
CATDASGGSYIPTF

SEQ ID NO: 219926 - protein, 16 aa, Homo sapiens
  CDR3 for beta chain variable domain of TCR clone 109963 (TRBV4-2, TRBJ2-3)
CASSQELAGDTDTQYF

SEQ ID NO: 219927 - protein, 12 aa, Homo sapiens
  CDR3 for alpha chain variable domain of TCR clone 109964 (TRAV3, TRAJ43)
CAVRDPNNDMRF

SEQ ID NO: 219928 - protein, 15 aa, Homo sapiens
  CDR3 for beta chain variable domain of TCR clone 109964 (TRBV27, TRBJ1-5)
CASSLGTGCDQPQHF

SEQ ID NO: 219929 - protein, 13 aa, Homo sapiens
  CDR3 for alpha chain variable domain of TCR clone 109965 (TRAV12-3, TRAJ5)
CAMRPTGRRALTF

SEQ ID NO: 219930 - protein, 13 aa, Homo sapiens
  CDR3 for beta chain variable domain of TCR clone 109965 (TRBV2, TRBJ2-7)
CASSVVEAYEQYL

SEQ ID NO: 219931 - protein, 12 aa, Homo sapiens
  CDR3 for alpha chain variable domain of TCR clone 109966 (TRAV12-1, TRAJ20)
CVVNPDDYKLSF

SEQ ID NO: 219932 - protein, 13 aa, Homo sapiens
  CDR3 for beta chain variable domain of TCR clone 109966 (TRBV7-9, TRBJ1-2)
CASSLKQNYGYTF

SEQ ID NO: 219933 - protein, 15 aa, Homo sapiens
  CDR3 for alpha chain variable domain of TCR clone 109967 (TRAV13-1, TRAJ44)
YAASRNTGTASKLTF

SEQ ID NO: 219934 - protein, 14 aa, Homo sapiens
  CDR3 for beta chain variable domain of TCR clone 109967 (TRBV2, TRBJ2-7)
CASSLTSGGYEQYF

SEQ ID NO: 219935 - protein, 14 aa, Homo sapiens
  CDR3 for alpha chain variable domain of TCR clone 109968 (TRAV2, TRAJ9)
CAVEDRSGGFKTIF

SEQ ID NO: 219936 - protein, 14 aa, Homo sapiens
  CDR3 for beta chain variable domain of TCR clone 109968 (TRBV18, TRBJ2-7)
CASLPRGGAYEQYF

SEQ ID NO: 219937 - protein, 16 aa, Homo sapiens
  CDR3 for alpha chain variable domain of TCR clone 109969 (TRAV21, TRAJ37)
CAVRTAGSSNTGKLIF

SEQ ID NO: 219938 - protein, 14 aa, Homo sapiens
  CDR3 for beta chain variable domain of TCR clone 109969 (TRBV25-1, TRBJ1-1)
CASTHLGGNTEAFF

SEQ ID NO: 219939 - protein, 15 aa, Homo sapiens
  CDR3 for alpha chain variable domain of TCR clone 109970 (TRAV3, TRAJ9)
CAVRARSTGGFKTIF

SEQ ID NO: 219940 - protein, 15 aa, Homo sapiens
  CDR3 for beta chain variable domain of TCR clone 109970 (TRBV27, TRBJ1-1)
CASSPYADPYTEAFF

SEQ ID NO: 219941 - protein, 14 aa, Homo sapiens
  CDR3 for alpha chain variable domain of TCR clone 109971 (TRAV38-1, TRAJ40)
CALRPTSGTYKYIF

SEQ ID NO: 219942 - protein, 12 aa, Homo sapiens
  CDR3 for beta chain variable domain of TCR clone 109971 (TRBV12-4, TRBJ2-7)
CASSLGGYEQYF

SEQ ID NO: 219943 - protein, 14 aa, Homo sapiens
  CDR3 for alpha chain variable domain of TCR clone 109972 (TRAV12-1, TRAJ12)
CVVTRMDSSYKLIF

SEQ ID NO: 219944 - protein, 15 aa, Homo sapiens
  CDR3 for beta chain variable domain of TCR clone 109972 (TRBV7-9, TRBJ1-6)
CASSSPGRGNSPLHF

SEQ ID NO: 219945 - protein, 12 aa, Homo sapiens
  CDR3 for alpha chain variable domain of TCR clone 109973 (TRAV12-3, TRAJ17)
CAMTITGNELTF

SEQ ID NO: 219946 - protein, 15 aa, Homo sapiens
  CDR3 for beta chain variable domain of TCR clone 109973 (TRBV20-1, TRBJ2-7)
CSARDRVSGMDEQYF

SEQ ID NO: 219947 - protein, 17 aa, Homo sapiens
  CDR3 for alpha chain variable domain of TCR clone 109974 (TRAV26-1, TRAJ53)
CIVRVDDSGGSNYKLTF

SEQ ID NO: 219948 - protein, 15 aa, Homo sapiens
  CDR3 for beta chain variable domain of TCR clone 109974 (TRBV20-1, TRBJ2-7)
CSARVPAAYFYEQYF

SEQ ID NO: 219949 - protein, 13 aa, Homo sapiens
  CDR3 for alpha chain variable domain of TCR clone 109975 (TRAV13-1, TRAJ6)
CAARRGGSYIPTF

SEQ ID NO: 219950 - protein, 13 aa, Homo sapiens
  CDR3 for beta chain variable domain of TCR clone 109975 (TRBV15, TRBJ1-6)
CATSGGLNSPLHF

SEQ ID NO: 219951 - protein, 15 aa, Homo sapiens
  CDR3 for alpha chain variable domain of TCR clone 109976 (TRAV8-2, TRAJ16)
CVVSDGFSDGQKLLF

SEQ ID NO: 219952 - protein, 14 aa, Homo sapiens
  CDR3 for beta chain variable domain of TCR clone 109976 (TRBV7-3, TRBJ1-1)
CASSLGAGYTEAFF

SEQ ID NO: 219953 - protein, 12 aa, Homo sapiens
  CDR3 for alpha chain variable domain of TCR clone 109977 (TRAV12-3, TRAJ17)
CAMTLTGNKLTF

SEQ ID NO: 219954 - protein, 14 aa, Homo sapiens
  CDR3 for beta chain variable domain of TCR clone 109977 (TRBV7-3, TRBJ2-1)
CANSLAGGTNEQFF

SEQ ID NO: 219955 - protein, 13 aa, Homo sapiens
  CDR3 for alpha chain variable domain of TCR clone 109978 (TRAV13-1, TRAJ5)
CAAEHTGRRALTF

SEQ ID NO: 219956 - protein, 15 aa, Homo sapiens
  CDR3 for beta chain variable domain of TCR clone 109978 (TRBV9, TRBJ1-6)
CASSVAGTGDSPLHF

SEQ ID NO: 219957 - protein, 13 aa, Homo sapiens
  CDR3 for alpha chain variable domain of TCR clone 109979 (TRAV8-3, TRAJ43)
CAVGPDNNNDMRF

SEQ ID NO: 219958 - protein, 16 aa, Homo sapiens
  CDR3 for beta chain variable domain of TCR clone 109979 (TRBV11-2, TRBJ2-7)
CASSTVTAPKTYEQYF

SEQ ID NO: 219959 - protein, 13 aa, Homo sapiens
  CDR3 for alpha chain variable domain of TCR clone 109980 (TRAV12-3, TRAJ7)
CAMTPYRNNRLAF

SEQ ID NO: 219960 - protein, 13 aa, Homo sapiens
  CDR3 for beta chain variable domain of TCR clone 109980 (TRBV20-1, TRBJ1-1)
CSARVGGNTEAFF

SEQ ID NO: 219961 - protein, 10 aa, Homo sapiens
  CDR3 for alpha chain variable domain of TCR clone 109981 (TRAV1-2, TRAJ31)
CAFFDARLMF

SEQ ID NO: 219962 - protein, 15 aa, Homo sapiens
  CDR3 for beta chain variable domain of TCR clone 109981 (TRBV4-1, TRBJ1-4)
CASSDTGGTNDKLFF

SEQ ID NO: 219963 - protein, 14 aa, Homo sapiens
  CDR3 for alpha chain variable domain of TCR clone 109982 (TRAV35, TRAJ50)
CAGHRKTSYDKVIF

SEQ ID NO: 219964 - protein, 15 aa, Homo sapiens
  CDR3 for beta chain variable domain of TCR clone 109982 (TRBV27, TRBJ2-1)
CASSNGGGSSNEQFF

SEQ ID NO: 219965 - protein, 11 aa, Homo sapiens
  CDR3 for alpha chain variable domain of TCR clone 109983 (TRAV1-2, TRAJ40)
CAVPGTYKYIF

SEQ ID NO: 219966 - protein, 17 aa, Homo sapiens
  CDR3 for beta chain variable domain of TCR clone 109983 (TRBV20-1, TRBJ2-1)
CSAPPRLAGTRYNEQFF

SEQ ID NO: 219967 - protein, 18 aa, Homo sapiens
  CDR3 for alpha chain variable domain of TCR clone 109984 (TRAV21, TRAJ52)
CAVRPSPAGGTSYGKLTF

SEQ ID NO: 219968 - protein, 13 aa, Homo sapiens
  CDR3 for beta chain variable domain of TCR clone 109984 (TRBV19, TRBJ1-3)
CASRLSLGNTIYF

SEQ ID NO: 219969 - protein, 11 aa, Homo sapiens
  CDR3 for alpha chain variable domain of TCR clone 109985 (TRAV17, TRAJ54)
CATDANQGARS

SEQ ID NO: 219970 - protein, 12 aa, Homo sapiens
  CDR3 for beta chain variable domain of TCR clone 109985 (TRBV6-3, TRBJ2-1)
CASSGSYNEQFF

SEQ ID NO: 219971 - protein, 12 aa, Homo sapiens
  CDR3 for alpha chain variable domain of TCR clone 109986 (TRAV12-2, TRAJ9)
CAVFTGGFKTIF

SEQ ID NO: 219972 - protein, 12 aa, Homo sapiens
  CDR3 for beta chain variable domain of TCR clone 109986 (TRBV11-2, TRBJ2-1)
CASSPGNNEQFF

SEQ ID NO: 219973 - protein, 16 aa, Homo sapiens
  CDR3 for alpha chain variable domain of TCR clone 109987 (TRAV12-3, TRAJ53)
CAMSVGSGGSNYKLTF

SEQ ID NO: 219974 - protein, 11 aa, Homo sapiens
  CDR3 for beta chain variable domain of TCR clone 109987 (TRBV29-1, TRBJ2-5)
CSVAIGETQYF

SEQ ID NO: 219975 - protein, 15 aa, Homo sapiens
  CDR3 for alpha chain variable domain of TCR clone 109988 (TRAV8-4, TRAJ48)
CAVSAAYFGNEKLTF

SEQ ID NO: 219976 - protein, 12 aa, Homo sapiens
  CDR3 for beta chain variable domain of TCR clone 109988 (TRBV3-1, TRBJ2-5)
CASSQRGETQYV

SEQ ID NO: 219977 - protein, 13 aa, Homo sapiens
  CDR3 for alpha chain variable domain of TCR clone 109989 (TRAV13-1, TRAJ21)
CAASIYNFSKFYF

SEQ ID NO: 219978 - protein, 17 aa, Homo sapiens
  CDR3 for beta chain variable domain of TCR clone 109989 (TRBV7-3, TRBJ2-2)
CASSLSGTSGGTGELFF

SEQ ID NO: 219979 - protein, 16 aa, Homo sapiens
  CDR3 for alpha chain variable domain of TCR clone 109990 (TRAV1-2, TRAJ10)
CAVRGVLTGRGNKLTF

SEQ ID NO: 219980 - protein, 16 aa, Homo sapiens
  CDR3 for beta chain variable domain of TCR clone 109990 (TRBV12-5, TRBJ2-5)
CASGPRTSGNQETQYF

SEQ ID NO: 219981 - protein, 13 aa, Homo sapiens
  CDR3 for alpha chain variable domain of TCR clone 109991 (TRAV23/DV6, TRAJ15)
CAALPAGRNCSEL

SEQ ID NO: 219982 - protein, 14 aa, Homo sapiens
  CDR3 for beta chain variable domain of TCR clone 109991 (TRBV7-9, TRBJ1-2)
CASSRQGANYGYTF

SEQ ID NO: 219983 - protein, 16 aa, Homo sapiens
  CDR3 for alpha chain variable domain of TCR clone 109992 (TRAV27, TRAJ53)
CAAPEGSGGSNYKLTF

SEQ ID NO: 219984 - protein, 16 aa, Homo sapiens
  CDR3 for beta chain variable domain of TCR clone 109992 (TRBV4-3, TRBJ1-5)
CASSQGGQGWPSILVM

SEQ ID NO: 219985 - protein, 13 aa, Homo sapiens
  CDR3 for alpha chain variable domain of TCR clone 109993 (TRAV8-6, TRAJ8)
CAVSNTGFQKLVL

SEQ ID NO: 219986 - protein, 15 aa, Homo sapiens
  CDR3 for beta chain variable domain of TCR clone 109993 (TRBV28, TRBJ2-5)
CASSSGRTIQETQYF

SEQ ID NO: 219987 - protein, 15 aa, Homo sapiens
  CDR3 for alpha chain variable domain of TCR clone 109994 (TRAV21, TRAJ37)
CAVRPTLSNTGKLIF

SEQ ID NO: 219988 - protein, 13 aa, Homo sapiens
  CDR3 for beta chain variable domain of TCR clone 109994 (TRBV6-5, TRBJ2-5)
CASSPQGGETQYF

SEQ ID NO: 219989 - protein, 14 aa, Homo sapiens
  CDR3 for alpha chain variable domain of TCR clone 109995 (TRAV12-2, TRAJ9)
CAVSFGTGGFKTIF

SEQ ID NO: 219990 - protein, 14 aa, Homo sapiens
  CDR3 for beta chain variable domain of TCR clone 109995 (TRBV25-1, TRBJ1-1)
CASTHLGGNTEAFF

SEQ ID NO: 219991 - protein, 13 aa, Homo sapiens
  CDR3 for alpha chain variable domain of TCR clone 109996 (TRAV22, TRAJ29)
RAVGGSGNTPLVF

SEQ ID NO: 219992 - protein, 13 aa, Homo sapiens
  CDR3 for beta chain variable domain of TCR clone 109996 (TRBV4-2, TRBJ1-1)
CASSQAGNTEAFF

SEQ ID NO: 219993 - protein, 12 aa, Homo sapiens
  CDR3 for alpha chain variable domain of TCR clone 109997 (TRAV30, TRAJ49)
CGTLGVSNQFYF

SEQ ID NO: 219994 - protein, 13 aa, Homo sapiens
  CDR3 for beta chain variable domain of TCR clone 109997 (TRBV7-9, TRBJ2-7)
CASSFAGAYEQYF

SEQ ID NO: 219995 - protein, 17 aa, Homo sapiens
  CDR3 for alpha chain variable domain of TCR clone 109998 (TRAV1-1, TRAJ28)
CAVDPAYPGAGSYQLTF

SEQ ID NO: 219996 - protein, 14 aa, Homo sapiens
  CDR3 for beta chain variable domain of TCR clone 109998 (TRBV19, TRBJ2-1)
CASPTFVLSGEQFF

SEQ ID NO: 219997 - protein, 12 aa, Homo sapiens
  CDR3 for alpha chain variable domain of TCR clone 109999 (TRAV12-3, TRAJ17)
CAMTLTGNKLTF

SEQ ID NO: 219998 - protein, 16 aa, Homo sapiens
  CDR3 for beta chain variable domain of TCR clone 109999 (TRBV11-1, TRBJ2-2)
CASSAEGLKNTGELFF

SEQ ID NO: 219999 - protein, 14 aa, Homo sapiens
  CDR3 for alpha chain variable domain of TCR clone 110000 (TRAV13-1, TRAJ35)
CAASKGGFGNVLHC

SEQ ID NO: 220000 - protein, 12 aa, Homo sapiens
  CDR3 for beta chain variable domain of TCR clone 110000 (TRBV7-9, TRBJ1-4)
CASSTDREKLFF

SEQ ID NO: 220001 - protein, 11 aa, Homo sapiens
  CDR3 for alpha chain variable domain of TCR clone 110001 (TRAV2, TRAJ13)
CASGGYQKVTF

SEQ ID NO: 220002 - protein, 14 aa, Homo sapiens
  CDR3 for beta chain variable domain of TCR clone 110001 (TRBV7-3, TRBJ2-1)
CASSLAGGTSEQFF

SEQ ID NO: 220003 - protein, 17 aa, Homo sapiens
  CDR3 for alpha chain variable domain of TCR clone 110002 (TRAV26-2, TRAJ42)
CILRDVGYGGSQGNLIF

SEQ ID NO: 220004 - protein, 16 aa, Homo sapiens
  CDR3 for beta chain variable domain of TCR clone 110002 (TRBV12-4, TRBJ2-7)
CASSLIGGTGTYVQYF

SEQ ID NO: 220005 - protein, 19 aa, Homo sapiens
  CDR3 for alpha chain variable domain of TCR clone 110003 (TRAV38-1, TRAJ53)
CAFMKYGLESGGSNYKLTF

SEQ ID NO: 220006 - protein, 15 aa, Homo sapiens
  CDR3 for beta chain variable domain of TCR clone 110003 (TRBV11-3, TRBJ2-7)
CASSPGPASSYEQYF

SEQ ID NO: 220007 - protein, 13 aa, Homo sapiens
  CDR3 for alpha chain variable domain of TCR clone 110004 (TRAV2, TRAJ40)
CAVVTSGTYKYIF

SEQ ID NO: 220008 - protein, 14 aa, Homo sapiens
  CDR3 for beta chain variable domain of TCR clone 110004 (TRBV11-3, TRBJ2-3)
CQPEGRAGRDTQYF

SEQ ID NO: 220009 - protein, 14 aa, Homo sapiens
  CDR3 for alpha chain variable domain of TCR clone 110005 (TRAV12-2, TRAJ45)
CALPERGGADGLTF

SEQ ID NO: 220010 - protein, 16 aa, Homo sapiens
  CDR3 for beta chain variable domain of TCR clone 110005 (TRBV18, TRBJ1-5)
CASSPGNSNQPSILVM

SEQ ID NO: 220011 - protein, 14 aa, Homo sapiens
  CDR3 for alpha chain variable domain of TCR clone 110006 (TRAV12-2, TRAJ9)
CAVNALEGGFKTIF

SEQ ID NO: 220012 - protein, 18 aa, Homo sapiens
  CDR3 for beta chain variable domain of TCR clone 110006 (TRBV6-6, TRBJ1-3)
CASSYSKWDSISGNTIYF

SEQ ID NO: 220013 - protein, 14 aa, Homo sapiens
  CDR3 for alpha chain variable domain of TCR clone 110007 (TRAV12-2, TRAJ5)
CAVNRSTGRRALTF

SEQ ID NO: 220014 - protein, 12 aa, Homo sapiens
  CDR3 for beta chain variable domain of TCR clone 110007 (TRBV19, TRBJ1-5)
CASSIAEQPQHF

SEQ ID NO: 220015 - protein, 15 aa, Homo sapiens
  CDR3 for alpha chain variable domain of TCR clone 110008 (TRAV12-3, TRAJ48)
CAMNAKNFGNEKLTF

SEQ ID NO: 220016 - protein, 14 aa, Homo sapiens
  CDR3 for beta chain variable domain of TCR clone 110008 (TRBV2, TRBJ1-6)
CASSESRNNSTLHF

SEQ ID NO: 220017 - protein, 13 aa, Homo sapiens
  CDR3 for alpha chain variable domain of TCR clone 110009 (TRAV29/DV5, TRAJ31)
CAASRNNNARLMF

SEQ ID NO: 220018 - protein, 14 aa, Homo sapiens
  CDR3 for beta chain variable domain of TCR clone 110009 (TRBV14, TRBJ2-1)
CASSQVQGRGEQFF

SEQ ID NO: 220019 - protein, 14 aa, Homo sapiens
  CDR3 for alpha chain variable domain of TCR clone 110010 (TRAV12-2, TRAJ36)
CAVNPPTGANNLFF

SEQ ID NO: 220020 - protein, 13 aa, Homo sapiens
  CDR3 for beta chain variable domain of TCR clone 110010 (TRBV20-1, TRBJ1-6)
CSAPTGLGSPLRF

SEQ ID NO: 220021 - protein, 13 aa, Homo sapiens
  CDR3 for alpha chain variable domain of TCR clone 110011 (TRAV3, TRAJ27)
CAVRPLGPGKSTF

SEQ ID NO: 220022 - protein, 12 aa, Homo sapiens
  CDR3 for beta chain variable domain of TCR clone 110011 (TRBV7-9, TRBJ2-7)
CATRTDAYEQYF

SEQ ID NO: 220023 - protein, 13 aa, Homo sapiens
  CDR3 for alpha chain variable domain of TCR clone 110012 (TRAV12-1, TRAJ6)
CVVFPGGSYIPTF

SEQ ID NO: 220024 - protein, 16 aa, Homo sapiens
  CDR3 for beta chain variable domain of TCR clone 110012 (TRBV12-4, TRBJ2-5)
CASSFFVRGRQETQYF

SEQ ID NO: 220025 - protein, 14 aa, Homo sapiens
  CDR3 for alpha chain variable domain of TCR clone 110013 (TRAV12-1, TRAJ38)
CVVHNAVNNRKLIW

SEQ ID NO: 220026 - protein, 13 aa, Homo sapiens
  CDR3 for beta chain variable domain of TCR clone 110013 (TRBV19, TRBJ2-1)
CATSRGVYNEQFF

SEQ ID NO: 220027 - protein, 13 aa, Homo sapiens
  CDR3 for alpha chain variable domain of TCR clone 110014 (TRAV16, TRAJ26)
CITVLCLGPNFVF

SEQ ID NO: 220028 - protein, 12 aa, Homo sapiens
  CDR3 for beta chain variable domain of TCR clone 110014 (TRBV11-2, TRBJ2-1)
CASSPGNNEQFF

SEQ ID NO: 220029 - protein, 19 aa, Homo sapiens
  CDR3 for alpha chain variable domain of TCR clone 110015 (TRAV1-1, TRAJ13)
CLLLLRCEGESGGYQKVTF

SEQ ID NO: 220030 - protein, 19 aa, Homo sapiens
  CDR3 for beta chain variable domain of TCR clone 110015 (TRBV14, TRBJ2-1)
CASSQDQRWEAPEYNEQFF

SEQ ID NO: 220031 - protein, 16 aa, Homo sapiens
  CDR3 for alpha chain variable domain of TCR clone 110016 (TRAV20, TRAJ4)
CAVAAPFSGGYNKLIF

SEQ ID NO: 220032 - protein, 14 aa, Homo sapiens
  CDR3 for beta chain variable domain of TCR clone 110016 (TRBV20-1, TRBJ2-1)
CSAQIGGSANEQFF

SEQ ID NO: 220033 - protein, 17 aa, Homo sapiens
  CDR3 for alpha chain variable domain of TCR clone 110017 (TRAV12-2, TRAJ48)
CASNEKLTFGTGTRLTI

SEQ ID NO: 220034 - protein, 15 aa, Homo sapiens
  CDR3 for beta chain variable domain of TCR clone 110017 (TRBV27, TRBJ2-1)
CASSNGGGSSNEQFF

SEQ ID NO: 220035 - protein, 14 aa, Homo sapiens
  CDR3 for alpha chain variable domain of TCR clone 110018 (TRAV12-3, TRAJ10)
SRLPLTGGGNKLTF

SEQ ID NO: 220036 - protein, 11 aa, Homo sapiens
  CDR3 for beta chain variable domain of TCR clone 110018 (TRBV29-1, TRBJ2-5)
CSEDRTGTQYF

SEQ ID NO: 220037 - protein, 14 aa, Homo sapiens
  CDR3 for alpha chain variable domain of TCR clone 110019 (TRAV3, TRAJ36)
CAVRDGTGANSLFF

SEQ ID NO: 220038 - protein, 16 aa, Homo sapiens
  CDR3 for beta chain variable domain of TCR clone 110019 (TRBV7-3, TRBJ2-5)
CASIQPGGSVQETQYF

SEQ ID NO: 220039 - protein, 14 aa, Homo sapiens
  CDR3 for alpha chain variable domain of TCR clone 110020 (TRAV12-3, TRAJ10)
SHLPLTGGGNKLTF

SEQ ID NO: 220040 - protein, 15 aa, Homo sapiens
  CDR3 for beta chain variable domain of TCR clone 110020 (TRBV7-2, TRBJ2-3)
CASSLVVRGPDTQYF

SEQ ID NO: 220041 - protein, 15 aa, Homo sapiens
  CDR3 for alpha chain variable domain of TCR clone 110021 (TRAV2, TRAJ15)
CAVEDRGQAGTALNF

SEQ ID NO: 220042 - protein, 13 aa, Homo sapiens
  CDR3 for beta chain variable domain of TCR clone 110021 (TRBV10-2, TRBJ2-7)
CASGASGGYEQYF

SEQ ID NO: 220043 - protein, 15 aa, Homo sapiens
  CDR3 for alpha chain variable domain of TCR clone 110022 (TRAV8-3, TRAJ27)
CAAGPSKTNAGKSTF

SEQ ID NO: 220044 - protein, 12 aa, Homo sapiens
  CDR3 for beta chain variable domain of TCR clone 110022 (TRBV11-2, TRBJ2-2)
CASSLGGGELFF

SEQ ID NO: 220045 - protein, 13 aa, Homo sapiens
  CDR3 for alpha chain variable domain of TCR clone 110023 (TRAV38-2/DV8, TRAJ34)
CAYRTWNTDKLIF

SEQ ID NO: 220046 - protein, 15 aa, Homo sapiens
  CDR3 for beta chain variable domain of TCR clone 110023 (TRBV19, TRBJ1-6)
CASSTQGAVGSPLHF

SEQ ID NO: 220047 - protein, 13 aa, Homo sapiens
  CDR3 for alpha chain variable domain of TCR clone 110024 (TRAV8-3, TRAJ48)
CAVVPFRNEKLTF

SEQ ID NO: 220048 - protein, 19 aa, Homo sapiens
  CDR3 for beta chain variable domain of TCR clone 110024 (TRBV25-1, TRBJ2-2)
CAILVYRVDRGRKTGELFF

SEQ ID NO: 220049 - protein, 16 aa, Homo sapiens
  CDR3 for alpha chain variable domain of TCR clone 110025 (TRAV20, TRAJ48)
CAVPVGSNFGNEKLTF

SEQ ID NO: 220050 - protein, 13 aa, Homo sapiens
  CDR3 for beta chain variable domain of TCR clone 110025 (TRBV7-3, TRBJ1-2)
CASSLKRGYGYTF

SEQ ID NO: 220051 - protein, 17 aa, Homo sapiens
  CDR3 for alpha chain variable domain of TCR clone 110026 (TRAV3, TRAJ6)
CAVRDGPRAGGSSIPTF

SEQ ID NO: 220052 - protein, 14 aa, Homo sapiens
  CDR3 for beta chain variable domain of TCR clone 110026 (TRBV12-5, TRBJ2-5)
CASGSRTHQETQYF

SEQ ID NO: 220053 - protein, 14 aa, Homo sapiens
  CDR3 for alpha chain variable domain of TCR clone 110027 (TRAV3, TRAJ9)
CAVRLNTGGFKTIF

SEQ ID NO: 220054 - protein, 16 aa, Homo sapiens
  CDR3 for beta chain variable domain of TCR clone 110027 (TRBV28, TRBJ2-7)
CASSSGTSGRGYEQYF

SEQ ID NO: 220055 - protein, 14 aa, Homo sapiens
  CDR3 for alpha chain variable domain of TCR clone 110028 (TRAV2, TRAJ9)
CAVEDRSGGFKSIF

SEQ ID NO: 220056 - protein, 13 aa, Homo sapiens
  CDR3 for beta chain variable domain of TCR clone 110028 (TRBV12-4, TRBJ1-5)
CASSPDRAQPQHF

SEQ ID NO: 220057 - protein, 15 aa, Homo sapiens
  CDR3 for alpha chain variable domain of TCR clone 110029 (TRAV13-1, TRAJ10)
CAATILTGGGNKLNF

SEQ ID NO: 220058 - protein, 15 aa, Homo sapiens
  CDR3 for beta chain variable domain of TCR clone 110029 (TRBV2, TRBJ2-7)
CASTLLGSGATEQYF

SEQ ID NO: 220059 - protein, 14 aa, Homo sapiens
  CDR3 for alpha chain variable domain of TCR clone 110030 (TRAV3, TRAJ21)
CAVDSQANFNKFYF

SEQ ID NO: 220060 - protein, 18 aa, Homo sapiens
  CDR3 for beta chain variable domain of TCR clone 110030 (TRBV7-9, TRBJ2-1)
CASSLAVSGTSGRNEQFF

SEQ ID NO: 220061 - protein, 14 aa, Homo sapiens
  CDR3 for alpha chain variable domain of TCR clone 110031 (TRAV26-1, TRAJ45)
CIVRVVGGADGLTF

SEQ ID NO: 220062 - protein, 16 aa, Homo sapiens
  CDR3 for beta chain variable domain of TCR clone 110031 (TRBV12-5, TRBJ2-5)
CASGPRTSGNQETQYF

SEQ ID NO: 220063 - protein, 15 aa, Homo sapiens
  CDR3 for alpha chain variable domain of TCR clone 110032 (TRAV38-1, TRAJ37)
CAFIHGSGNTRKLIF

SEQ ID NO: 220064 - protein, 12 aa, Homo sapiens
  CDR3 for beta chain variable domain of TCR clone 110032 (TRBV7-9, TRBJ2-7)
CASSFGSYEQYF

SEQ ID NO: 220065 - protein, 15 aa, Homo sapiens
  CDR3 for alpha chain variable domain of TCR clone 110033 (TRAV3, TRAJ29)
CAERAPLSGNTPLVF

SEQ ID NO: 220066 - protein, 15 aa, Homo sapiens
  CDR3 for beta chain variable domain of TCR clone 110033 (TRBV28, TRBJ1-1)
CASRIKGGLNTEAFF

SEQ ID NO: 220067 - protein, 14 aa, Homo sapiens
  CDR3 for alpha chain variable domain of TCR clone 110034 (TRAV39, TRAJ42)
CAVDIARSQGNLIF

SEQ ID NO: 220068 - protein, 13 aa, Homo sapiens
  CDR3 for beta chain variable domain of TCR clone 110034 (TRBV7-2, TRBJ2-5)
CASSLYRQETQYF

SEQ ID NO: 220069 - protein, 15 aa, Homo sapiens
  CDR3 for alpha chain variable domain of TCR clone 110035 (TRAV12-3, TRAJ6)
CAMSATTGGSYIHTF

SEQ ID NO: 220070 - protein, 13 aa, Homo sapiens
  CDR3 for beta chain variable domain of TCR clone 110035 (TRBV7-9, TRBJ1-2)
CASSLKQNYGYTF

SEQ ID NO: 220071 - protein, 12 aa, Homo sapiens
  CDR3 for alpha chain variable domain of TCR clone 110036 (TRAV12-2, TRAJ10)
WGVTGGGNKLTF

SEQ ID NO: 220072 - protein, 15 aa, Homo sapiens
  CDR3 for beta chain variable domain of TCR clone 110036 (TRBV7-3, TRBJ2-1)
CAGSPTGGGEVEQFF

SEQ ID NO: 220073 - protein, 17 aa, Homo sapiens
  CDR3 for alpha chain variable domain of TCR clone 110037 (TRAV36/DV7, TRAJ52)
CAVAQRAGGTSYGKLTF

SEQ ID NO: 220074 - protein, 17 aa, Homo sapiens
  CDR3 for beta chain variable domain of TCR clone 110037 (TRBV28, TRBJ2-5)
CASSTPGGDALQETQYF

SEQ ID NO: 220075 - protein, 14 aa, Homo sapiens
  CDR3 for alpha chain variable domain of TCR clone 110038 (TRAV12-3, TRAJ10)
SHLPLTGGGNKLTF

SEQ ID NO: 220076 - protein, 16 aa, Homo sapiens
  CDR3 for beta chain variable domain of TCR clone 110038 (TRBV27, TRBJ2-2)
RASSFRGLVRTGELFF

SEQ ID NO: 220077 - protein, 13 aa, Homo sapiens
  CDR3 for alpha chain variable domain of TCR clone 110039 (TRAV17, TRAJ39)
CATVSNAGNMLTF

SEQ ID NO: 220078 - protein, 15 aa, Homo sapiens
  CDR3 for beta chain variable domain of TCR clone 110039 (TRBV5-1, TRBJ2-1)
GASSPPRAPYNEQFF

SEQ ID NO: 220079 - protein, 13 aa, Homo sapiens
  CDR3 for alpha chain variable domain of TCR clone 110040 (TRAV38-1, TRAJ42)
CAWWGGSQGNLIF

SEQ ID NO: 220080 - protein, 10 aa, Homo sapiens
  CDR3 for beta chain variable domain of TCR clone 110040 (TRBV2, TRBJ2-5)
CASSAATQYF

SEQ ID NO: 220081 - protein, 10 aa, Homo sapiens
  CDR3 for alpha chain variable domain of TCR clone 110041 (TRAV23/DV6, TRAJ57)
CAASSTLSQG

SEQ ID NO: 220082 - protein, 14 aa, Homo sapiens
  CDR3 for beta chain variable domain of TCR clone 110041 (TRBV25-1, TRBJ1-1)
CASTHLGGNTVAFF

SEQ ID NO: 220083 - protein, 11 aa, Homo sapiens
  CDR3 for alpha chain variable domain of TCR clone 110042 (TRAV1-1, TRAJ23)
CAVRQGGKLIF

SEQ ID NO: 220084 - protein, 13 aa, Homo sapiens
  CDR3 for beta chain variable domain of TCR clone 110042 (TRBV7-9, TRBJ2-1)
CASSLDVGNEQFF

SEQ ID NO: 220085 - protein, 14 aa, Homo sapiens
  CDR3 for alpha chain variable domain of TCR clone 110043 (TRAV38-1, TRAJ45)
CAYYSGGGADGLTF

SEQ ID NO: 220086 - protein, 11 aa, Homo sapiens
  CDR3 for beta chain variable domain of TCR clone 110043 (TRBV12-4, TRBJ2-3)
CASTATDTQYF

SEQ ID NO: 220087 - protein, 11 aa, Homo sapiens
  CDR3 for alpha chain variable domain of TCR clone 110044 (TRAV16, TRAJ33)
CALHSNYQLIW

SEQ ID NO: 220088 - protein, 15 aa, Homo sapiens
  CDR3 for beta chain variable domain of TCR clone 110044 (TRBV4-1, TRBJ2-7)
CASSQQGQGCDEQYF

SEQ ID NO: 220089 - protein, 12 aa, Homo sapiens
  CDR3 for alpha chain variable domain of TCR clone 110045 (TRAV17, TRAJ20)
CATDGDDYKLSF

SEQ ID NO: 220090 - protein, 18 aa, Homo sapiens
  CDR3 for beta chain variable domain of TCR clone 110045 (TRBV6-5, TRBJ2-5)
RASSYSQAGGSYQETQYF

SEQ ID NO: 220091 - protein, 14 aa, Homo sapiens
  CDR3 for alpha chain variable domain of TCR clone 110046 (TRAV21, TRAJ35)
CAVMPIGFGYVLHC

SEQ ID NO: 220092 - protein, 12 aa, Homo sapiens
  CDR3 for beta chain variable domain of TCR clone 110046 (TRBV7-9, TRBJ2-7)
CASSIKREEQYF

SEQ ID NO: 220093 - protein, 16 aa, Homo sapiens
  CDR3 for alpha chain variable domain of TCR clone 110047 (TRAV3, TRAJ10)
CAVRDMRAGGGNKLTF

SEQ ID NO: 220094 - protein, 13 aa, Homo sapiens
  CDR3 for beta chain variable domain of TCR clone 110047 (TRBV7-2, TRBJ2-2)
CASSLAVTGELFF

SEQ ID NO: 220095 - protein, 12 aa, Homo sapiens
  CDR3 for alpha chain variable domain of TCR clone 110048 (TRAV3, TRAJ20)
CAVRDPDYKLSF

SEQ ID NO: 220096 - protein, 16 aa, Homo sapiens
  CDR3 for beta chain variable domain of TCR clone 110048 (TRBV9, TRBJ2-2)
CASSAMGKGNTGELFF

SEQ ID NO: 220097 - protein, 14 aa, Homo sapiens
  CDR3 for alpha chain variable domain of TCR clone 110049 (TRAV1-2, TRAJ16)
CAVNRFSDGQKLLF

SEQ ID NO: 220098 - protein, 12 aa, Homo sapiens
  CDR3 for beta chain variable domain of TCR clone 110049 (TRBV14, TRBJ1-1)
CASSQIKGLAFF

SEQ ID NO: 220099 - protein, 15 aa, Homo sapiens
  CDR3 for alpha chain variable domain of TCR clone 110050 (TRAV13-1, TRAJ44)
CAASRGGGTASKLTF

SEQ ID NO: 220100 - protein, 12 aa, Homo sapiens
  CDR3 for beta chain variable domain of TCR clone 110050 (TRBV11-2, TRBJ2-2)
SASSLGGGELFF

SEQ ID NO: 220101 - protein, 17 aa, Homo sapiens
  CDR3 for alpha chain variable domain of TCR clone 110051 (TRAV3, TRAJ42)
CAVRDRDYGGSQGNLIF

SEQ ID NO: 220102 - protein, 15 aa, Homo sapiens
  CDR3 for beta chain variable domain of TCR clone 110051 (TRBV6-6, TRBJ2-7)
CASSYSYGGSYQQYF

SEQ ID NO: 220103 - protein, 14 aa, Homo sapiens
  CDR3 for alpha chain variable domain of TCR clone 110052 (TRAV17, TRAJ57)
CATDPWGGSEKLVF

SEQ ID NO: 220104 - protein, 18 aa, Homo sapiens
  CDR3 for beta chain variable domain of TCR clone 110052 (TRBV6-6, TRBJ1-3)
CASSYSKWDSISGNTIYF

SEQ ID NO: 220105 - protein, 15 aa, Homo sapiens
  CDR3 for alpha chain variable domain of TCR clone 110053 (TRAV3, TRAJ42)
CAVRGGTGSQGNLIF

SEQ ID NO: 220106 - protein, 14 aa, Homo sapiens
  CDR3 for beta chain variable domain of TCR clone 110053 (TRBV19, TRBJ1-2)
CASSSLFARDGYTF

SEQ ID NO: 220107 - protein, 14 aa, Homo sapiens
  CDR3 for alpha chain variable domain of TCR clone 110054 (TRAV12-2, TRAJ40)
CAEKIPSGTYKYIF

SEQ ID NO: 220108 - protein, 12 aa, Homo sapiens
  CDR3 for beta chain variable domain of TCR clone 110054 (TRBV11-2, TRBJ2-2)
CASSLGGGELFF

SEQ ID NO: 220109 - protein, 13 aa, Homo sapiens
  CDR3 for alpha chain variable domain of TCR clone 110055 (TRAV8-1, TRAJ32)
CAADGGATNKLIF

SEQ ID NO: 220110 - protein, 18 aa, Homo sapiens
  CDR3 for beta chain variable domain of TCR clone 110055 (TRBV12-4, TRBJ2-2)
CASSLVAGTRGRTGELFF

SEQ ID NO: 220111 - protein, 14 aa, Homo sapiens
  CDR3 for alpha chain variable domain of TCR clone 110056 (TRAV1-2, TRAJ16)
CAVNRFSDGQKLLF

SEQ ID NO: 220112 - protein, 16 aa, Homo sapiens
  CDR3 for beta chain variable domain of TCR clone 110056 (TRBV28, TRBJ1-2)
CASSLYGQEANYGYTF

SEQ ID NO: 220113 - protein, 11 aa, Homo sapiens
  CDR3 for alpha chain variable domain of TCR clone 110057 (TRAV12-2, TRAJ31)
CAVTRWARLMF

SEQ ID NO: 220114 - protein, 13 aa, Homo sapiens
  CDR3 for beta chain variable domain of TCR clone 110057 (TRBV7-3, TRBJ1-1)
CASSQDWGAEAFF

SEQ ID NO: 220115 - protein, 15 aa, Homo sapiens
  CDR3 for alpha chain variable domain of TCR clone 110058 (TRAV8-3, TRAJ45)
CASSYSGGGADGLTF

SEQ ID NO: 220116 - protein, 16 aa, Homo sapiens
  CDR3 for beta chain variable domain of TCR clone 110058 (TRBV28, TRBJ1-6)
CASMNLIQGGNSPLHF

SEQ ID NO: 220117 - protein, 18 aa, Homo sapiens
  CDR3 for alpha chain variable domain of TCR clone 110059 (TRAV12-3, TRAJ52)
CAMSVGGAGGTSYGKLTF

SEQ ID NO: 220118 - protein, 15 aa, Homo sapiens
  CDR3 for beta chain variable domain of TCR clone 110059 (TRBV27, TRBJ1-6)
CASSFDRGLVSPLHF

SEQ ID NO: 220119 - protein, 16 aa, Homo sapiens
  CDR3 for alpha chain variable domain of TCR clone 110060 (TRAV3, TRAJ10)
CAVRDMRAGGGNKLTF

SEQ ID NO: 220120 - protein, 16 aa, Homo sapiens
  CDR3 for beta chain variable domain of TCR clone 110060 (TRBV11-2, TRBJ2-7)
CASSPLAGGPRYEQYF

SEQ ID NO: 220121 - protein, 13 aa, Homo sapiens
  CDR3 for alpha chain variable domain of TCR clone 110061 (TRAV20, TRAJ37)
CAGCSSNTGKLIF

SEQ ID NO: 220122 - protein, 16 aa, Homo sapiens
  CDR3 for beta chain variable domain of TCR clone 110061 (TRBV15, TRBJ1-4)
CATSRDSPPGREKLFF

SEQ ID NO: 220123 - protein, 14 aa, Homo sapiens
  CDR3 for alpha chain variable domain of TCR clone 110062 (TRAV35, TRAJ50)
CAGHRKTSYDKVIF

SEQ ID NO: 220124 - protein, 14 aa, Homo sapiens
  CDR3 for beta chain variable domain of TCR clone 110062 (TRBV25-1, TRBJ1-1)
CASTHLGGNTEAFF

SEQ ID NO: 220125 - protein, 16 aa, Homo sapiens
  CDR3 for alpha chain variable domain of TCR clone 110063 (TRAV22, TRAJ45)
CAVERSKRGGADGLTF

SEQ ID NO: 220126 - protein, 13 aa, Homo sapiens
  CDR3 for beta chain variable domain of TCR clone 110063 (TRBV27, TRBJ1-1)
CASSLSIGAEAFF

SEQ ID NO: 220127 - protein, 17 aa, Homo sapiens
  CDR3 for alpha chain variable domain of TCR clone 110064 (TRAV26-1, TRAJ37)
CIVRVITVSSNTGKLIF

SEQ ID NO: 220128 - protein, 18 aa, Homo sapiens
  CDR3 for beta chain variable domain of TCR clone 110064 (TRBV7-9, TRBJ2-1)
CASSLAVSGTSGRNEQFF

SEQ ID NO: 220129 - protein, 14 aa, Homo sapiens
  CDR3 for alpha chain variable domain of TCR clone 110065 (TRAV2, TRAJ9)
CAVEDRRGGFKTIF

SEQ ID NO: 220130 - protein, 11 aa, Homo sapiens
  CDR3 for beta chain variable domain of TCR clone 110065 (TRBV7-9, TRBJ2-5)
CASSLGETQYF

SEQ ID NO: 220131 - protein, 10 aa, Homo sapiens
  CDR3 for alpha chain variable domain of TCR clone 110066 (TRAV30, TRAJ48)
CGIGNEKLTF

SEQ ID NO: 220132 - protein, 14 aa, Homo sapiens
  CDR3 for beta chain variable domain of TCR clone 110066 (TRBV7-6, TRBJ2-3)
CTSSVAGGTDTQYF

SEQ ID NO: 220133 - protein, 17 aa, Homo sapiens
  CDR3 for alpha chain variable domain of TCR clone 110067 (TRAV13-1, TRAJ5)
CSNPSLSRDTGRRELTF

SEQ ID NO: 220134 - protein, 17 aa, Homo sapiens
  CDR3 for beta chain variable domain of TCR clone 110067 (TRBV24-1, TRBJ2-1)
CATSDVSTSGTYNEQFF

SEQ ID NO: 220135 - protein, 12 aa, Homo sapiens
  CDR3 for alpha chain variable domain of TCR clone 110068 (TRAV30, TRAJ43)
CGTEERGNDMRF

SEQ ID NO: 220136 - protein, 14 aa, Homo sapiens
  CDR3 for beta chain variable domain of TCR clone 110068 (TRBV12-4, TRBJ1-1)
CASSLGTGGTEAFF

SEQ ID NO: 220137 - protein, 16 aa, Homo sapiens
  CDR3 for alpha chain variable domain of TCR clone 110069 (TRAV8-3, TRAJ8)
CAVPRDGNTGFQKRVF

SEQ ID NO: 220138 - protein, 15 aa, Homo sapiens
  CDR3 for beta chain variable domain of TCR clone 110069 (TRBV6-1, TRBJ2-6)
CASSSRPSGANVLTF

SEQ ID NO: 220139 - protein, 23 aa, Homo sapiens
  CDR3 for alpha chain variable domain of TCR clone 110070 (TRAV26-1, )
CIADNAGNEHIQNPDPAVYQLRD

SEQ ID NO: 220140 - protein, 13 aa, Homo sapiens
  CDR3 for beta chain variable domain of TCR clone 110070 (TRBV20-1, TRBJ1-1)
CSARGGGNTEAFF

SEQ ID NO: 220141 - protein, 15 aa, Homo sapiens
  CDR3 for alpha chain variable domain of TCR clone 110071 (TRAV26-1, TRAJ29)
CIVRVEGSGSTPLVF

SEQ ID NO: 220142 - protein, 12 aa, Homo sapiens
  CDR3 for beta chain variable domain of TCR clone 110071 (TRBV29-1, TRBJ2-3)
CSVTGGADTQYF

SEQ ID NO: 220143 - protein, 14 aa, Homo sapiens
  CDR3 for alpha chain variable domain of TCR clone 110072 (TRAV8-4, TRAJ9)
CAVRINTGGFKTIF

SEQ ID NO: 220144 - protein, 17 aa, Homo sapiens
  CDR3 for beta chain variable domain of TCR clone 110072 (TRBV4-1, TRBJ1-4)
CASSQEGPRGVEEKLFF

SEQ ID NO: 220145 - protein, 14 aa, Homo sapiens
  CDR3 for alpha chain variable domain of TCR clone 110073 (TRAV13-1, TRAJ40)
CAASMTSGTYKYIF

SEQ ID NO: 220146 - protein, 13 aa, Homo sapiens
  CDR3 for beta chain variable domain of TCR clone 110073 (TRBV7-2, TRBJ2-4)
CASSRERANIQYF

SEQ ID NO: 220147 - protein, 12 aa, Homo sapiens
  CDR3 for alpha chain variable domain of TCR clone 110074 (TRAV17, TRAJ36)
CSTLTGANNLFF

SEQ ID NO: 220148 - protein, 15 aa, Homo sapiens
  CDR3 for beta chain variable domain of TCR clone 110074 (TRBV19, TRBJ1-2)
CASSTKTDTNYGYTF

SEQ ID NO: 220149 - protein, 17 aa, Homo sapiens
  CDR3 for alpha chain variable domain of TCR clone 110075 (TRAV17, TRAJ28)
CATDPRRGGAGSYQLTF

SEQ ID NO: 220150 - protein, 16 aa, Homo sapiens
  CDR3 for beta chain variable domain of TCR clone 110075 (TRBV25-1, TRBJ1-1)
CASSGDRDRVRIEAFF

SEQ ID NO: 220151 - protein, 14 aa, Homo sapiens
  CDR3 for alpha chain variable domain of TCR clone 110076 (TRAV1-2, TRAJ16)
CAVNRFSDGKKLLF

SEQ ID NO: 220152 - protein, 12 aa, Homo sapiens
  CDR3 for beta chain variable domain of TCR clone 110076 (TRBV12-4, TRBJ2-7)
CASSLGGYEQYF

SEQ ID NO: 220153 - protein, 13 aa, Homo sapiens
  CDR3 for alpha chain variable domain of TCR clone 110077 (TRAV2, TRAJ40)
CAVVTSGTYKYIF

SEQ ID NO: 220154 - protein, 13 aa, Homo sapiens
  CDR3 for beta chain variable domain of TCR clone 110077 (TRBV4-2, TRBJ2-1)
CASSPGTYNEQFF

SEQ ID NO: 220155 - protein, 20 aa, Homo sapiens
  CDR3 for alpha chain variable domain of TCR clone 110078 (TRAV14/DV4, TRAJ22)
CAMREGPFSISSGSARHLTF

SEQ ID NO: 220156 - protein, 13 aa, Homo sapiens
  CDR3 for beta chain variable domain of TCR clone 110078 (TRBV4-2, TRBJ2-3)
CASSQDWQHTQYF

SEQ ID NO: 220157 - protein, 15 aa, Homo sapiens
  CDR3 for alpha chain variable domain of TCR clone 110079 (TRAV26-1, TRAJ44)
CIVRANTGTASKLTF

SEQ ID NO: 220158 - protein, 17 aa, Homo sapiens
  CDR3 for beta chain variable domain of TCR clone 110079 (TRBV20-1, TRBJ2-1)
CSASSSGLAGSYNEQFF

SEQ ID NO: 220159 - protein, 16 aa, Homo sapiens
  CDR3 for alpha chain variable domain of TCR clone 110080 (TRAV30, TRAJ24)
CGTEIVDADSWGKFQF

SEQ ID NO: 220160 - protein, 15 aa, Homo sapiens
  CDR3 for beta chain variable domain of TCR clone 110080 (TRBV20-1, TRBJ1-1)
CSAFYAGTENTEAFF

SEQ ID NO: 220161 - protein, 13 aa, Homo sapiens
  CDR3 for alpha chain variable domain of TCR clone 110081 (TRAV8-6, TRAJ21)
CAVSPSSLNKFYF

SEQ ID NO: 220162 - protein, 14 aa, Homo sapiens
  CDR3 for beta chain variable domain of TCR clone 110081 (TRBV7-9, TRBJ2-5)
CASSLDTAQETKYF

SEQ ID NO: 220163 - protein, 15 aa, Homo sapiens
  CDR3 for alpha chain variable domain of TCR clone 110082 (TRAV8-2, TRAJ40)
CVVLGTTSGTYKFIF

SEQ ID NO: 220164 - protein, 16 aa, Homo sapiens
  CDR3 for beta chain variable domain of TCR clone 110082 (TRBV7-3, TRBJ2-1)
CASSLEGYRSYNEQFF

SEQ ID NO: 220165 - protein, 14 aa, Homo sapiens
  CDR3 for alpha chain variable domain of TCR clone 110083 (TRAV2, TRAJ9)
CAVEDRSGGFNTIF

SEQ ID NO: 220166 - protein, 14 aa, Homo sapiens
  CDR3 for beta chain variable domain of TCR clone 110083 (TRBV18, TRBJ1-5)
CASSRQQRNQPQHF

SEQ ID NO: 220167 - protein, 14 aa, Homo sapiens
  CDR3 for alpha chain variable domain of TCR clone 110084 (TRAV26-1, TRAJ29)
CIVRVEPGNTPLVF

SEQ ID NO: 220168 - protein, 15 aa, Homo sapiens
  CDR3 for beta chain variable domain of TCR clone 110084 (TRBV7-6, TRBJ1-4)
CASSLGAEAGEKLFF

SEQ ID NO: 220169 - protein, 16 aa, Homo sapiens
  CDR3 for alpha chain variable domain of TCR clone 110085 (TRAV1-2, TRAJ18)
CAVRVERGSTLGRLYF

SEQ ID NO: 220170 - protein, 13 aa, Homo sapiens
  CDR3 for beta chain variable domain of TCR clone 110085 (TRBV7-9, TRBJ1-2)
CASSLKQNYGYTF

SEQ ID NO: 220171 - protein, 14 aa, Homo sapiens
  CDR3 for alpha chain variable domain of TCR clone 110086 (TRAV12-2, TRAJ6)
CASKWGGGSYIPTF

SEQ ID NO: 220172 - protein, 14 aa, Homo sapiens
  CDR3 for beta chain variable domain of TCR clone 110086 (TRBV19, TRBJ2-7)
CASSMGQGAIEQYF

SEQ ID NO: 220173 - protein, 15 aa, Homo sapiens
  CDR3 for alpha chain variable domain of TCR clone 110087 (TRAV20, TRAJ53)
CAVQASGGSNYKLTF

SEQ ID NO: 220174 - protein, 12 aa, Homo sapiens
  CDR3 for beta chain variable domain of TCR clone 110087 (TRBV7-2, TRBJ2-1)
CASSPQDSEQFF

SEQ ID NO: 220175 - protein, 16 aa, Homo sapiens
  CDR3 for alpha chain variable domain of TCR clone 110088 (TRAV26-1, TRAJ45)
CIVEKYSGGGADGLTF

SEQ ID NO: 220176 - protein, 15 aa, Homo sapiens
  CDR3 for beta chain variable domain of TCR clone 110088 (TRBV20-1, TRBJ2-7)
CSARDRVSGMDEQYF

SEQ ID NO: 220177 - protein, 12 aa, Homo sapiens
  CDR3 for alpha chain variable domain of TCR clone 110089 (TRAV23/DV6, TRAJ30)
CAASTGDDKIIF

SEQ ID NO: 220178 - protein, 15 aa, Homo sapiens
  CDR3 for beta chain variable domain of TCR clone 110089 (TRBV20-1, TRBJ2-7)
CSARDRVSGMDEQYF

SEQ ID NO: 220179 - protein, 15 aa, Homo sapiens
  CDR3 for alpha chain variable domain of TCR clone 110090 (TRAV25, TRAJ53)
CPTSNSGGSNYKLTF

SEQ ID NO: 220180 - protein, 13 aa, Homo sapiens
  CDR3 for beta chain variable domain of TCR clone 110090 (TRBV12-5, TRBJ2-3)
CASGDRQSDTQYF

SEQ ID NO: 220181 - protein, 16 aa, Homo sapiens
  CDR3 for alpha chain variable domain of TCR clone 110091 (TRAV30, TRAJ24)
CGTEIVDADSWVKFQF

SEQ ID NO: 220182 - protein, 18 aa, Homo sapiens
  CDR3 for beta chain variable domain of TCR clone 110091 (TRBV11-2, TRBJ2-3)
CASSLGGASRGAPNTQYF

SEQ ID NO: 220183 - protein, 13 aa, Homo sapiens
  CDR3 for alpha chain variable domain of TCR clone 110092 (TRAV1-1, TRAJ31)
CASYLNSNARLMF

SEQ ID NO: 220184 - protein, 14 aa, Homo sapiens
  CDR3 for beta chain variable domain of TCR clone 110092 (TRBV4-1, TRBJ2-5)
CASSRSGSGETQYF

SEQ ID NO: 220185 - protein, 14 aa, Homo sapiens
  CDR3 for alpha chain variable domain of TCR clone 110093 (TRAV1-2, TRAJ16)
CAVNRFSDGQKLLF

SEQ ID NO: 220186 - protein, 15 aa, Homo sapiens
  CDR3 for beta chain variable domain of TCR clone 110093 (TRBV5-7, TRBJ2-1)
CASSRRLAGDNEQFF

SEQ ID NO: 220187 - protein, 15 aa, Homo sapiens
  CDR3 for alpha chain variable domain of TCR clone 110094 (TRAV8-4, TRAJ3)
CAVTGENLLQQCFQD

SEQ ID NO: 220188 - protein, 16 aa, Homo sapiens
  CDR3 for beta chain variable domain of TCR clone 110094 (TRBV4-2, TRBJ1-1)
CASSQAGFGMNTEAFF

SEQ ID NO: 220189 - protein, 13 aa, Homo sapiens
  CDR3 for alpha chain variable domain of TCR clone 110095 (TRAV8-3, TRAJ48)
CAVVPCGNEKLTF

SEQ ID NO: 220190 - protein, 12 aa, Homo sapiens
  CDR3 for beta chain variable domain of TCR clone 110095 (TRBV11-2, TRBJ2-2)
CASSLGGGELFF

SEQ ID NO: 220191 - protein, 12 aa, Homo sapiens
  CDR3 for alpha chain variable domain of TCR clone 110096 (TRAV17, TRAJ4)
CATDGGYNKLIF

SEQ ID NO: 220192 - protein, 15 aa, Homo sapiens
  CDR3 for beta chain variable domain of TCR clone 110096 (TRBV28, TRBJ1-3)
CASSMGWASGNTIYF

SEQ ID NO: 220193 - protein, 20 aa, Homo sapiens
  CDR3 for alpha chain variable domain of TCR clone 110097 (TRAV1-2, TRAJ10)
CLLPLCCEGVLTGGGNKLTF

SEQ ID NO: 220194 - protein, 12 aa, Homo sapiens
  CDR3 for beta chain variable domain of TCR clone 110097 (TRBV7-8, TRBJ2-7)
CASSLGDREQYF

SEQ ID NO: 220195 - protein, 13 aa, Homo sapiens
  CDR3 for alpha chain variable domain of TCR clone 110098 (TRAV8-3, TRAJ43)
CAVGPDNNNDMRV

SEQ ID NO: 220196 - protein, 14 aa, Homo sapiens
  CDR3 for beta chain variable domain of TCR clone 110098 (TRBV19, TRBJ2-1)
CASPTFVLSGEQFF

SEQ ID NO: 220197 - protein, 14 aa, Homo sapiens
  CDR3 for alpha chain variable domain of TCR clone 110099 (TRAV12-2, TRAJ13)
CAVKKTGVYQKVTF

SEQ ID NO: 220198 - protein, 17 aa, Homo sapiens
  CDR3 for beta chain variable domain of TCR clone 110099 (TRBV20-1, TRBJ2-2)
CSASGSGQGGLTGELFF

SEQ ID NO: 220199 - protein, 17 aa, Homo sapiens
  CDR3 for alpha chain variable domain of TCR clone 110100 (TRAV8-4, TRAJ11)
CAVSDRGENSGYSTLTL

SEQ ID NO: 220200 - protein, 14 aa, Homo sapiens
  CDR3 for beta chain variable domain of TCR clone 110100 (TRBV20-1, TRBJ2-1)
CSPNDEASYNEQFF

SEQ ID NO: 220201 - protein, 19 aa, Homo sapiens
  CDR3 for alpha chain variable domain of TCR clone 110101 (TRAV26-1, TRAJ52)
CIVRAHRNAGGTSYGKLTF

SEQ ID NO: 220202 - protein, 13 aa, Homo sapiens
  CDR3 for beta chain variable domain of TCR clone 110101 (TRBV19, TRBJ2-7)
CASRKAGGSEHYF

SEQ ID NO: 220203 - protein, 12 aa, Homo sapiens
  CDR3 for alpha chain variable domain of TCR clone 110102 (TRAV12-3, TRAJ17)
CAMTLTGTKLTF

SEQ ID NO: 220204 - protein, 13 aa, Homo sapiens
  CDR3 for beta chain variable domain of TCR clone 110102 (TRBV10-3, TRBJ2-7)
CASKLAVNYEQYF

SEQ ID NO: 220205 - protein, 18 aa, Homo sapiens
  CDR3 for alpha chain variable domain of TCR clone 110103 (TRAV21, TRAJ52)
CAVGPSPAGGTSYGRLTF

SEQ ID NO: 220206 - protein, 17 aa, Homo sapiens
  CDR3 for beta chain variable domain of TCR clone 110103 (TRBV13, TRBJ2-3)
CASSLSRVAGGRNTQYF

SEQ ID NO: 220207 - protein, 16 aa, Homo sapiens
  CDR3 for alpha chain variable domain of TCR clone 110104 (TRAV8-3, TRAJ10)
CAVGPGVTGGGNKLTF

SEQ ID NO: 220208 - protein, 13 aa, Homo sapiens
  CDR3 for beta chain variable domain of TCR clone 110104 (TRBV18, TRBJ1-1)
CASSPGPSGEAFL

SEQ ID NO: 220209 - protein, 14 aa, Homo sapiens
  CDR3 for alpha chain variable domain of TCR clone 110105 (TRAV20, TRAJ29)
CAVQAWAGNTPLVF

SEQ ID NO: 220210 - protein, 15 aa, Homo sapiens
  CDR3 for beta chain variable domain of TCR clone 110105 (TRBV29-1, TRBJ2-7)
CSVEFFDRGSYEQYF

SEQ ID NO: 220211 - protein, 13 aa, Homo sapiens
  CDR3 for alpha chain variable domain of TCR clone 110106 (TRAV8-4, TRAJ34)
CAVTLYNTDKLIF

SEQ ID NO: 220212 - protein, 17 aa, Homo sapiens
  CDR3 for beta chain variable domain of TCR clone 110106 (TRBV7-2, TRBJ2-2)
CASSSSWRGGGTGELFF

SEQ ID NO: 220213 - protein, 13 aa, Homo sapiens
  CDR3 for alpha chain variable domain of TCR clone 110107 (TRAV3, TRAJ41)
CAVSSNSGYALNF

SEQ ID NO: 220214 - protein, 13 aa, Homo sapiens
  CDR3 for beta chain variable domain of TCR clone 110107 (TRBV20-1, TRBJ2-2)
CSALSGGVGELFF

SEQ ID NO: 220215 - protein, 13 aa, Homo sapiens
  CDR3 for alpha chain variable domain of TCR clone 110108 (TRAV13-1, TRAJ39)
CAAPFECRQHAHL

SEQ ID NO: 220216 - protein, 16 aa, Homo sapiens
  CDR3 for beta chain variable domain of TCR clone 110108 (TRBV12-5, TRBJ2-5)
CASGPRTSGNQETQYF

SEQ ID NO: 220217 - protein, 12 aa, Homo sapiens
  CDR3 for alpha chain variable domain of TCR clone 110109 (TRAV21, TRAJ39)
CAADNAGNMLTF

SEQ ID NO: 220218 - protein, 13 aa, Homo sapiens
  CDR3 for beta chain variable domain of TCR clone 110109 (TRBV12-4, TRBJ1-1)
CASSPGTGFEAVF

SEQ ID NO: 220219 - protein, 13 aa, Homo sapiens
  CDR3 for alpha chain variable domain of TCR clone 110110 (TRAV2, TRAJ40)
CAVVTSGTYKYIF

SEQ ID NO: 220220 - protein, 13 aa, Homo sapiens
  CDR3 for beta chain variable domain of TCR clone 110110 (TRBV20-1, TRBJ1-2)
CSASDRGSRGYTF

SEQ ID NO: 220221 - protein, 13 aa, Homo sapiens
  CDR3 for alpha chain variable domain of TCR clone 110111 (TRAV27, TRAJ42)
CAGARGSQGNLVF

SEQ ID NO: 220222 - protein, 15 aa, Homo sapiens
  CDR3 for beta chain variable domain of TCR clone 110111 (TRBV10-3, TRBJ2-2)
CAIRTDREDTGELFF

SEQ ID NO: 220223 - protein, 14 aa, Homo sapiens
  CDR3 for alpha chain variable domain of TCR clone 110112 (TRAV12-2, TRAJ53)
CAVKGGGSNYKPTF

SEQ ID NO: 220224 - protein, 17 aa, Homo sapiens
  CDR3 for beta chain variable domain of TCR clone 110112 (TRBV7-2, TRBJ1-4)
CASSFKAGPTTNEKLFF

SEQ ID NO: 220225 - protein, 14 aa, Homo sapiens
  CDR3 for alpha chain variable domain of TCR clone 110113 (TRAV17, TRAJ35)
CATDRPGFGNVLHC

SEQ ID NO: 220226 - protein, 14 aa, Homo sapiens
  CDR3 for beta chain variable domain of TCR clone 110113 (TRBV6-1, TRBJ1-3)
CASVQGGGGNTIYF

SEQ ID NO: 220227 - protein, 13 aa, Homo sapiens
  CDR3 for alpha chain variable domain of TCR clone 110114 (TRAV12-3, TRAJ6)
CANPSGGSYKPTF

SEQ ID NO: 220228 - protein, 14 aa, Homo sapiens
  CDR3 for beta chain variable domain of TCR clone 110114 (TRBV19, TRBJ1-1)
CASSRDRDATEAFF

SEQ ID NO: 220229 - protein, 16 aa, Homo sapiens
  CDR3 for alpha chain variable domain of TCR clone 110115 (TRAV14/DV4, TRAJ53)
CAMREGGGGSNYKLTF

SEQ ID NO: 220230 - protein, 15 aa, Homo sapiens
  CDR3 for beta chain variable domain of TCR clone 110115 (TRBV5-5, TRBJ2-2)
CASSRQASGAGELFF

SEQ ID NO: 220231 - protein, 16 aa, Homo sapiens
  CDR3 for alpha chain variable domain of TCR clone 110116 (TRAV3, TRAJ10)
CAVRDMRAGGGNKLTF

SEQ ID NO: 220232 - protein, 14 aa, Homo sapiens
  CDR3 for beta chain variable domain of TCR clone 110116 (TRBV19, TRBJ2-2)
CASSTLYRSGELFF

SEQ ID NO: 220233 - protein, 12 aa, Homo sapiens
  CDR3 for alpha chain variable domain of TCR clone 110117 (TRAV1-1, TRAJ8)
CARGTGFQKLVF

SEQ ID NO: 220234 - protein, 15 aa, Homo sapiens
  CDR3 for beta chain variable domain of TCR clone 110117 (TRBV7-9, TRBJ1-4)
CASSRTGGFNEKLFF

SEQ ID NO: 220235 - protein, 15 aa, Homo sapiens
  CDR3 for alpha chain variable domain of TCR clone 110118 (TRAV3, TRAJ4)
CAVRDGTGGYNKLIF

SEQ ID NO: 220236 - protein, 16 aa, Homo sapiens
  CDR3 for beta chain variable domain of TCR clone 110118 (TRBV27, TRBJ2-2)
CTSSSSGVSNTGELFF

SEQ ID NO: 220237 - protein, 14 aa, Homo sapiens
  CDR3 for alpha chain variable domain of TCR clone 110119 (TRAV26-1, TRAJ26)
RIVRATFLGQNFVF

SEQ ID NO: 220238 - protein, 16 aa, Homo sapiens
  CDR3 for beta chain variable domain of TCR clone 110119 (TRBV12-4, TRBJ2-7)
CASRSTGTGPSYEQYF

SEQ ID NO: 220239 - protein, 19 aa, Homo sapiens
  CDR3 for alpha chain variable domain of TCR clone 110120 (TRAV38-1, TRAJ53)
CAFMKHGLESGGSNYKLTF

SEQ ID NO: 220240 - protein, 13 aa, Homo sapiens
  CDR3 for beta chain variable domain of TCR clone 110120 (TRBV19, TRBJ2-7)
CASSPRKSYEQYF

SEQ ID NO: 220241 - protein, 13 aa, Homo sapiens
  CDR3 for alpha chain variable domain of TCR clone 110121 (TRAV27, TRAJ41)
CAGEGNSGYALNF

SEQ ID NO: 220242 - protein, 14 aa, Homo sapiens
  CDR3 for beta chain variable domain of TCR clone 110121 (TRBV28, TRBJ2-3)
CASSWRGRADTQYL

SEQ ID NO: 220243 - protein, 15 aa, Homo sapiens
  CDR3 for alpha chain variable domain of TCR clone 110122 (TRAV8-3, TRAJ27)
CAVGPSKTNAGKSTF

SEQ ID NO: 220244 - protein, 15 aa, Homo sapiens
  CDR3 for beta chain variable domain of TCR clone 110122 (TRBV12-4, TRBJ2-5)
CASSPPTGLQETQYF

SEQ ID NO: 220245 - protein, 12 aa, Homo sapiens
  CDR3 for alpha chain variable domain of TCR clone 110123 (TRAV1-2, TRAJ33)
CAALDSNYQLIW

SEQ ID NO: 220246 - protein, 14 aa, Homo sapiens
  CDR3 for beta chain variable domain of TCR clone 110123 (TRBV7-2, TRBJ2-7)
CASSPKTSFYEQYF

SEQ ID NO: 220247 - protein, 15 aa, Homo sapiens
  CDR3 for alpha chain variable domain of TCR clone 110124 (TRAV13-1, TRAJ32)
CAASIYGGATNNLIF

SEQ ID NO: 220248 - protein, 14 aa, Homo sapiens
  CDR3 for beta chain variable domain of TCR clone 110124 (TRBV7-9, TRBJ2-1)
CASSLASGSNEQFF

SEQ ID NO: 220249 - protein, 16 aa, Homo sapiens
  CDR3 for alpha chain variable domain of TCR clone 110125 (TRAV30, TRAJ24)
CGTEIVDADSWGKFQF

SEQ ID NO: 220250 - protein, 13 aa, Homo sapiens
  CDR3 for beta chain variable domain of TCR clone 110125 (TRBV7-2, TRBJ1-4)
CASSVAGLEKLFF

SEQ ID NO: 220251 - protein, 14 aa, Homo sapiens
  CDR3 for alpha chain variable domain of TCR clone 110126 (TRAV12-2, TRAJ9)
CAVNALEGGFNTIF

SEQ ID NO: 220252 - protein, 16 aa, Homo sapiens
  CDR3 for beta chain variable domain of TCR clone 110126 (TRBV19, TRBJ1-6)
CASSVAPVAGNSPLHF

SEQ ID NO: 220253 - protein, 12 aa, Homo sapiens
  CDR3 for alpha chain variable domain of TCR clone 110127 (TRAV4, TRAJ43)
CLVGVFNNDMRF

SEQ ID NO: 220254 - protein, 10 aa, Homo sapiens
  CDR3 for beta chain variable domain of TCR clone 110127 (TRBV9, TRBJ2-1)
AGSSYNEQFF

SEQ ID NO: 220255 - protein, 15 aa, Homo sapiens
  CDR3 for alpha chain variable domain of TCR clone 110128 (TRAV2, TRAJ9)
CAVEDRGTRGFKTIF

SEQ ID NO: 220256 - protein, 16 aa, Homo sapiens
  CDR3 for beta chain variable domain of TCR clone 110128 (TRBV24-1, TRBJ2-3)
CATSDPGTGATDTQYF

SEQ ID NO: 220257 - protein, 14 aa, Homo sapiens
  CDR3 for alpha chain variable domain of TCR clone 110129 (TRAV3, TRAJ9)
RAVRLNTGGFKTIF

SEQ ID NO: 220258 - protein, 15 aa, Homo sapiens
  CDR3 for beta chain variable domain of TCR clone 110129 (TRBV7-2, TRBJ2-1)
CASSLASGRVNEQFF

SEQ ID NO: 220259 - protein, 14 aa, Homo sapiens
  CDR3 for alpha chain variable domain of TCR clone 110130 (TRAV2, TRAJ37)
CAVEGSSNTGKLIF

SEQ ID NO: 220260 - protein, 17 aa, Homo sapiens
  CDR3 for beta chain variable domain of TCR clone 110130 (TRBV4-1, TRBJ2-5)
CASSQDQTGGPQETQYF

SEQ ID NO: 220261 - protein, 12 aa, Homo sapiens
  CDR3 for alpha chain variable domain of TCR clone 110131 (TRAV17, TRAJ20)
CATYSNDYKLSF

SEQ ID NO: 220262 - protein, 11 aa, Homo sapiens
  CDR3 for beta chain variable domain of TCR clone 110131 (TRBV4-1, TRBJ2-2)
CASEHTGELFI

SEQ ID NO: 220263 - protein, 17 aa, Homo sapiens
  CDR3 for alpha chain variable domain of TCR clone 110132 (TRAV26-1, TRAJ53)
CIVRVDDSGGSNYKLTF

SEQ ID NO: 220264 - protein, 15 aa, Homo sapiens
  CDR3 for beta chain variable domain of TCR clone 110132 (TRBV19, TRBJ1-2)
CASSVGQVLNYGYTF

SEQ ID NO: 220265 - protein, 14 aa, Homo sapiens
  CDR3 for alpha chain variable domain of TCR clone 110133 (TRAV12-3, TRAJ33)
CAMSVPGSNYQLIW

SEQ ID NO: 220266 - protein, 16 aa, Homo sapiens
  CDR3 for beta chain variable domain of TCR clone 110133 (TRBV7-2, TRBJ2-5)
CASSLVLWTKQETQYF

SEQ ID NO: 220267 - protein, 17 aa, Homo sapiens
  CDR3 for alpha chain variable domain of TCR clone 110134 (TRAV3, TRAJ6)
CAVRDGPRAGGSYIPTF

SEQ ID NO: 220268 - protein, 14 aa, Homo sapiens
  CDR3 for beta chain variable domain of TCR clone 110134 (TRBV6-5, TRBJ2-7)
CAASRSGGSYEQYF

SEQ ID NO: 220269 - protein, 23 aa, Homo sapiens
  CDR3 for alpha chain variable domain of TCR clone 110135 (TRAV1-1, TRAJ11)
LLQELQMKDSASYFCAGYSTLTF

SEQ ID NO: 220270 - protein, 15 aa, Homo sapiens
  CDR3 for beta chain variable domain of TCR clone 110135 (TRBV6-5, TRBJ2-1)
CASRGDFDSYNEQLF

SEQ ID NO: 220271 - protein, 12 aa, Homo sapiens
  CDR3 for alpha chain variable domain of TCR clone 110136 (TRAV3, TRAJ20)
CAVRDGDYKLSF

SEQ ID NO: 220272 - protein, 13 aa, Homo sapiens
  CDR3 for beta chain variable domain of TCR clone 110136 (TRBV10-3, TRBJ2-7)
CASKLAVNYEQYF

SEQ ID NO: 220273 - protein, 13 aa, Homo sapiens
  CDR3 for alpha chain variable domain of TCR clone 110137 (TRAV26-2, TRAJ43)
CILRAVNNNDMRF

SEQ ID NO: 220274 - protein, 14 aa, Homo sapiens
  CDR3 for beta chain variable domain of TCR clone 110137 (TRBV19, TRBJ2-1)
CASPTFVLSGGQFF

SEQ ID NO: 220275 - protein, 16 aa, Homo sapiens
  CDR3 for alpha chain variable domain of TCR clone 110138 (TRAV26-1, TRAJ53)
CIVRVAMGGSNYKLIF

SEQ ID NO: 220276 - protein, 15 aa, Homo sapiens
  CDR3 for beta chain variable domain of TCR clone 110138 (TRBV7-9, TRBJ1-5)
CASSQGHQPNQPQHF

SEQ ID NO: 220277 - protein, 12 aa, Homo sapiens
  CDR3 for alpha chain variable domain of TCR clone 110139 (TRAV12-3, TRAJ34)
CAMGYNADKLIF

SEQ ID NO: 220278 - protein, 15 aa, Homo sapiens
  CDR3 for beta chain variable domain of TCR clone 110139 (TRBV28, TRBJ2-1)
CASSIIAGGRSEQFF

SEQ ID NO: 220279 - protein, 18 aa, Homo sapiens
  CDR3 for alpha chain variable domain of TCR clone 110140 (TRAV29/DV5, TRAJ52)
CAAGFRGAGGTSYGKLTF

SEQ ID NO: 220280 - protein, 18 aa, Homo sapiens
  CDR3 for beta chain variable domain of TCR clone 110140 (TRBV20-1, TRBJ2-6)
CSAETTPTHGSGANVLTF

SEQ ID NO: 220281 - protein, 12 aa, Homo sapiens
  CDR3 for alpha chain variable domain of TCR clone 110141 (TRAV2, TRAJ24)
CAATDSWGKFQF

SEQ ID NO: 220282 - protein, 15 aa, Homo sapiens
  CDR3 for beta chain variable domain of TCR clone 110141 (TRBV10-3, TRBJ2-2)
CAIYTGGTGAGELFF

SEQ ID NO: 220283 - protein, 11 aa, Homo sapiens
  CDR3 for alpha chain variable domain of TCR clone 110142 (TRAV3, TRAJ21)
CAVGNFNKFYF

SEQ ID NO: 220284 - protein, 14 aa, Homo sapiens
  CDR3 for beta chain variable domain of TCR clone 110142 (TRBV6-1, TRBJ2-1)
CASAGGAIKNEQFF

SEQ ID NO: 220285 - protein, 12 aa, Homo sapiens
  CDR3 for alpha chain variable domain of TCR clone 110143 (TRAV23/DV6, TRAJ32)
CSMPGAPNKLIF

SEQ ID NO: 220286 - protein, 17 aa, Homo sapiens
  CDR3 for beta chain variable domain of TCR clone 110143 (TRBV13, TRBJ2-3)
CASSSLGTSGLTDTQYF

SEQ ID NO: 220287 - protein, 12 aa, Homo sapiens
  CDR3 for alpha chain variable domain of TCR clone 110144 (TRAV13-1, TRAJ48)
CAANFGNEKLTF

SEQ ID NO: 220288 - protein, 16 aa, Homo sapiens
  CDR3 for beta chain variable domain of TCR clone 110144 (TRBV7-9, TRBJ1-2)
CASSLGFSSGEDGYTF

SEQ ID NO: 220289 - protein, 12 aa, Homo sapiens
  CDR3 for alpha chain variable domain of TCR clone 110145 (TRAV17, TRAJ20)
CATQSNDYKLGF

SEQ ID NO: 220290 - protein, 13 aa, Homo sapiens
  CDR3 for beta chain variable domain of TCR clone 110145 (TRBV10-3, TRBJ1-1)
CAIIPEGGTEAFF

SEQ ID NO: 220291 - protein, 11 aa, Homo sapiens
  CDR3 for alpha chain variable domain of TCR clone 110146 (TRAV1-1, TRAJ35)
CYKGGANNLFF

SEQ ID NO: 220292 - protein, 16 aa, Homo sapiens
  CDR3 for beta chain variable domain of TCR clone 110146 (TRBV7-2, TRBJ1-3)
CASSSGRVLSGNTIYF

SEQ ID NO: 220293 - protein, 13 aa, Homo sapiens
  CDR3 for alpha chain variable domain of TCR clone 110147 (TRAV27, TRAJ56)
CAGKPGANSKLTF

SEQ ID NO: 220294 - protein, 18 aa, Homo sapiens
  CDR3 for beta chain variable domain of TCR clone 110147 (TRBV11-2, TRBJ2-3)
CASSLGGASRGAHNTQYF

SEQ ID NO: 220295 - protein, 10 aa, Homo sapiens
  CDR3 for alpha chain variable domain of TCR clone 110148 (TRAV23/DV6, TRAJ45)
TGGGADGLTF

SEQ ID NO: 220296 - protein, 15 aa, Homo sapiens
  CDR3 for beta chain variable domain of TCR clone 110148 (TRBV11-2, TRBJ2-2)
CASSSDRVNAGELFF

SEQ ID NO: 220297 - protein, 13 aa, Homo sapiens
  CDR3 for alpha chain variable domain of TCR clone 110149 (TRAV29/DV5, TRAJ31)
CAASRNNNARLMF

SEQ ID NO: 220298 - protein, 13 aa, Homo sapiens
  CDR3 for beta chain variable domain of TCR clone 110149 (TRBV7-7, TRBJ2-5)
CASSRSGQETQYF

SEQ ID NO: 220299 - protein, 14 aa, Homo sapiens
  CDR3 for alpha chain variable domain of TCR clone 110150 (TRAV1-2, TRAJ8)
CAVRGDTGFQKLVF

SEQ ID NO: 220300 - protein, 16 aa, Homo sapiens
  CDR3 for beta chain variable domain of TCR clone 110150 (TRBV15, TRBJ2-3)
CATSRDLGIVTDTQYF

SEQ ID NO: 220301 - protein, 13 aa, Homo sapiens
  CDR3 for alpha chain variable domain of TCR clone 110151 (TRAV8-3, TRAJ43)
CAVGPDNNNDIRF

SEQ ID NO: 220302 - protein, 12 aa, Homo sapiens
  CDR3 for beta chain variable domain of TCR clone 110151 (TRBV7-2, TRBJ1-6)
CAGSLSSSPLHF

SEQ ID NO: 220303 - protein, 14 aa, Homo sapiens
  CDR3 for alpha chain variable domain of TCR clone 110152 (TRAV12-2, TRAJ13)
CAVKKTGGYQKVTF

SEQ ID NO: 220304 - protein, 14 aa, Homo sapiens
  CDR3 for beta chain variable domain of TCR clone 110152 (TRBV11-1, TRBJ1-1)
CASSLEHPNTEAFF

SEQ ID NO: 220305 - protein, 12 aa, Homo sapiens
  CDR3 for alpha chain variable domain of TCR clone 110153 (TRAV20, TRAJ39)
CAVGNEGNMLTF

SEQ ID NO: 220306 - protein, 16 aa, Homo sapiens
  CDR3 for beta chain variable domain of TCR clone 110153 (TRBV15, TRBJ1-2)
CATSRGPRTGGGGYTF

SEQ ID NO: 220307 - protein, 12 aa, Homo sapiens
  CDR3 for alpha chain variable domain of TCR clone 110154 (TRAV41, TRAJ58)
CAVETSGSRLTF

SEQ ID NO: 220308 - protein, 15 aa, Homo sapiens
  CDR3 for beta chain variable domain of TCR clone 110154 (TRBV29-1, TRBJ2-6)
CSVGDRGSGANVLPF

SEQ ID NO: 220309 - protein, 14 aa, Homo sapiens
  CDR3 for alpha chain variable domain of TCR clone 110155 (TRAV26-1, TRAJ39)
CIVRVYNAGNMLTF

SEQ ID NO: 220310 - protein, 16 aa, Homo sapiens
  CDR3 for beta chain variable domain of TCR clone 110155 (TRBV15, TRBJ2-7)
CATSRDFGAAVYEQYF

SEQ ID NO: 220311 - protein, 14 aa, Homo sapiens
  CDR3 for alpha chain variable domain of TCR clone 110156 (TRAV2, TRAJ34)
CAVPLSYNTDKLIF

SEQ ID NO: 220312 - protein, 17 aa, Homo sapiens
  CDR3 for beta chain variable domain of TCR clone 110156 (TRBV13, TRBJ2-3)
CASSLSRVAGGRNTQYF

SEQ ID NO: 220313 - protein, 15 aa, Homo sapiens
  CDR3 for alpha chain variable domain of TCR clone 110157 (TRAV36/DV7, TRAJ53)
CAVEGSGGSNYKLKF

SEQ ID NO: 220314 - protein, 16 aa, Homo sapiens
  CDR3 for beta chain variable domain of TCR clone 110157 (TRBV27, TRBJ2-2)
CASSLSGFWVTGELFF

SEQ ID NO: 220315 - protein, 15 aa, Homo sapiens
  CDR3 for alpha chain variable domain of TCR clone 110158 (TRAV27, TRAJ38)
CAARRNAGNNRKLIW

SEQ ID NO: 220316 - protein, 15 aa, Homo sapiens
  CDR3 for beta chain variable domain of TCR clone 110158 (TRBV5-1, TRBJ2-1)
GASSPPRAPYNEQFF

SEQ ID NO: 220317 - protein, 14 aa, Homo sapiens
  CDR3 for alpha chain variable domain of TCR clone 110159 (TRAV12-2, TRAJ9)
CAVHMEGGGFKTIF

SEQ ID NO: 220318 - protein, 14 aa, Homo sapiens
  CDR3 for beta chain variable domain of TCR clone 110159 (TRBV2, TRBJ2-5)
CASSEVLAQETQYF

SEQ ID NO: 220319 - protein, 14 aa, Homo sapiens
  CDR3 for alpha chain variable domain of TCR clone 110160 (TRAV1-2, TRAJ16)
CAVNRFSDVQKLLF

SEQ ID NO: 220320 - protein, 16 aa, Homo sapiens
  CDR3 for beta chain variable domain of TCR clone 110160 (TRBV19, TRBJ2-3)
CASSPEWDRGTDTQYF

SEQ ID NO: 220321 - protein, 14 aa, Homo sapiens
  CDR3 for alpha chain variable domain of TCR clone 110161 (TRAV8-4, TRAJ13)
CAVTLSGGYQKVTF

SEQ ID NO: 220322 - protein, 13 aa, Homo sapiens
  CDR3 for beta chain variable domain of TCR clone 110161 (TRBV13, TRBJ2-5)
RASSPEVGETQYF

SEQ ID NO: 220323 - protein, 14 aa, Homo sapiens
  CDR3 for alpha chain variable domain of TCR clone 110162 (TRAV9-2, TRAJ39)
CSLYIYNAGNMLTF

SEQ ID NO: 220324 - protein, 14 aa, Homo sapiens
  CDR3 for beta chain variable domain of TCR clone 110162 (TRBV12-5, TRBJ2-5)
CASGSRTHQETQYF

SEQ ID NO: 220325 - protein, 16 aa, Homo sapiens
  CDR3 for alpha chain variable domain of TCR clone 110163 (TRAV21, TRAJ37)
CAVRPRGTSNTGKLIF

SEQ ID NO: 220326 - protein, 13 aa, Homo sapiens
  CDR3 for beta chain variable domain of TCR clone 110163 (TRBV7-9, TRBJ2-5)
CASLSPGQETQYF

SEQ ID NO: 220327 - protein, 15 aa, Homo sapiens
  CDR3 for alpha chain variable domain of TCR clone 110164 (TRAV26-1, TRAJ40)
CIVRAVPSGTYKYIF

SEQ ID NO: 220328 - protein, 16 aa, Homo sapiens
  CDR3 for beta chain variable domain of TCR clone 110164 (TRBV7-2, TRBJ2-2)
CARSLRGQANTGELFF

SEQ ID NO: 220329 - protein, 15 aa, Homo sapiens
  CDR3 for alpha chain variable domain of TCR clone 110165 (TRAV4, TRAJ36)
CLVGDRQTGANNLFF

SEQ ID NO: 220330 - protein, 14 aa, Homo sapiens
  CDR3 for beta chain variable domain of TCR clone 110165 (TRBV7-9, TRBJ2-2)
CASSLVQDTGELFF

SEQ ID NO: 220331 - protein, 14 aa, Homo sapiens
  CDR3 for alpha chain variable domain of TCR clone 110166 (TRAV8-4, TRAJ48)
CAVSETFGNEKLTF

SEQ ID NO: 220332 - protein, 14 aa, Homo sapiens
  CDR3 for beta chain variable domain of TCR clone 110166 (TRBV13, TRBJ2-7)
CASSLKGASYEQYC

SEQ ID NO: 220333 - protein, 16 aa, Homo sapiens
  CDR3 for alpha chain variable domain of TCR clone 110167 (TRAV8-3, TRAJ13)
CAVGAYLSGGYQKVTF

SEQ ID NO: 220334 - protein, 13 aa, Homo sapiens
  CDR3 for beta chain variable domain of TCR clone 110167 (TRBV7-9, TRBJ1-2)
CASSLKQNYGYTF

SEQ ID NO: 220335 - protein, 13 aa, Homo sapiens
  CDR3 for alpha chain variable domain of TCR clone 110168 (TRAV21, TRAJ37)
CAVSSGNTGKLIF

SEQ ID NO: 220336 - protein, 15 aa, Homo sapiens
  CDR3 for beta chain variable domain of TCR clone 110168 (TRBV20-1, TRBJ2-7)
CSARDRVSGMDEQYF

SEQ ID NO: 220337 - protein, 13 aa, Homo sapiens
  CDR3 for alpha chain variable domain of TCR clone 110169 (TRAV29/DV5, TRAJ31)
CAASRNNNARLMV

SEQ ID NO: 220338 - protein, 12 aa, Homo sapiens
  CDR3 for beta chain variable domain of TCR clone 110169 (TRBV14, TRBJ2-7)
CASSLYKDEQYF

SEQ ID NO: 220339 - protein, 13 aa, Homo sapiens
  CDR3 for alpha chain variable domain of TCR clone 110170 (TRAV8-6, TRAJ8)
CAFMNTGFQKLLF

SEQ ID NO: 220340 - protein, 15 aa, Homo sapiens
  CDR3 for beta chain variable domain of TCR clone 110170 (TRBV28, TRBJ2-5)
CASSSGRVIQETQYF

SEQ ID NO: 220341 - protein, 12 aa, Homo sapiens
  CDR3 for alpha chain variable domain of TCR clone 110171 (TRAV21, TRAJ49)
CAVNDGGNQFYF

SEQ ID NO: 220342 - protein, 17 aa, Homo sapiens
  CDR3 for beta chain variable domain of TCR clone 110171 (TRBV6-5, TRBJ2-2)
CASSYSTSGGNTGELFF

SEQ ID NO: 220343 - protein, 23 aa, Homo sapiens
  CDR3 for alpha chain variable domain of TCR clone 110172 (TRAV26-1, )
CIVRPLNAGKNHIQNPDPAVYQL

SEQ ID NO: 220344 - protein, 13 aa, Homo sapiens
  CDR3 for beta chain variable domain of TCR clone 110172 (TRBV18, TRBJ1-1)
CASSPNGDTEAFF

SEQ ID NO: 220345 - protein, 13 aa, Homo sapiens
  CDR3 for alpha chain variable domain of TCR clone 110173 (TRAV16, TRAJ34)
CALISYNTDKLIF

SEQ ID NO: 220346 - protein, 13 aa, Homo sapiens
  CDR3 for beta chain variable domain of TCR clone 110173 (TRBV4-1, TRBJ2-2)
CASSQENTGELFF

SEQ ID NO: 220347 - protein, 14 aa, Homo sapiens
  CDR3 for alpha chain variable domain of TCR clone 110174 (TRAV21, TRAJ8)
CALQRDTGFQKLVF

SEQ ID NO: 220348 - protein, 13 aa, Homo sapiens
  CDR3 for beta chain variable domain of TCR clone 110174 (TRBV7-9, TRBJ1-2)
CASSLKQNYGYTF

SEQ ID NO: 220349 - protein, 13 aa, Homo sapiens
  CDR3 for alpha chain variable domain of TCR clone 110175 (TRAV16, TRAJ15)
CALSGPAGTALIF

SEQ ID NO: 220350 - protein, 14 aa, Homo sapiens
  CDR3 for beta chain variable domain of TCR clone 110175 (TRBV7-9, TRBJ2-3)
CASSLEQGTNTQYF

SEQ ID NO: 220351 - protein, 16 aa, Homo sapiens
  CDR3 for alpha chain variable domain of TCR clone 110176 (TRAV12-2, TRAJ32)
CAVNLGQGGATNTLIF

SEQ ID NO: 220352 - protein, 15 aa, Homo sapiens
  CDR3 for beta chain variable domain of TCR clone 110176 (TRBV20-1, TRBJ2-7)
CSARGPLAGGREQYF

SEQ ID NO: 220353 - protein, 17 aa, Homo sapiens
  CDR3 for alpha chain variable domain of TCR clone 110177 (TRAV12-2, TRAJ52)
CAVDPYAGGTSYGKLTF

SEQ ID NO: 220354 - protein, 16 aa, Homo sapiens
  CDR3 for beta chain variable domain of TCR clone 110177 (TRBV5-5, TRBJ2-2)
CASSGRREGATGELFF

SEQ ID NO: 220355 - protein, 14 aa, Homo sapiens
  CDR3 for alpha chain variable domain of TCR clone 110178 (TRAV8-6, TRAJ49)
CAVSVRYTGNQLYF

SEQ ID NO: 220356 - protein, 19 aa, Homo sapiens
  CDR3 for beta chain variable domain of TCR clone 110178 (TRBV28, TRBJ2-1)
CASSFSIRGSGRTRYEQFF

SEQ ID NO: 220357 - protein, 16 aa, Homo sapiens
  CDR3 for alpha chain variable domain of TCR clone 110179 (TRAV8-3, TRAJ13)
CAVGAYPSGGYQKVTF

SEQ ID NO: 220358 - protein, 17 aa, Homo sapiens
  CDR3 for beta chain variable domain of TCR clone 110179 (TRBV20-1, TRBJ2-2)
CSASGSGQGGLTGELFF

SEQ ID NO: 220359 - protein, 11 aa, Homo sapiens
  CDR3 for alpha chain variable domain of TCR clone 110180 (TRAV2, TRAJ33)
CAVESNYQLIW

SEQ ID NO: 220360 - protein, 12 aa, Homo sapiens
  CDR3 for beta chain variable domain of TCR clone 110180 (TRBV12-4, TRBJ2-7)
CASSLGGHEQYF

SEQ ID NO: 220361 - protein, 14 aa, Homo sapiens
  CDR3 for alpha chain variable domain of TCR clone 110181 (TRAV17, TRAJ16)
CATADLSDGQKLLF

SEQ ID NO: 220362 - protein, 15 aa, Homo sapiens
  CDR3 for beta chain variable domain of TCR clone 110181 (TRBV6-5, TRBJ2-1)
CASSYDAGAGNEQFF

SEQ ID NO: 220363 - protein, 10 aa, Homo sapiens
  CDR3 for alpha chain variable domain of TCR clone 110182 (TRAV30, TRAJ16)
CGTGGQKLLF

SEQ ID NO: 220364 - protein, 14 aa, Homo sapiens
  CDR3 for beta chain variable domain of TCR clone 110182 (TRBV6-1, TRBJ1-2)
CASSTGWPPTGDTF

SEQ ID NO: 220365 - protein, 12 aa, Homo sapiens
  CDR3 for alpha chain variable domain of TCR clone 110183 (TRAV17, TRAJ39)
CATGAAGNMLTF

SEQ ID NO: 220366 - protein, 14 aa, Homo sapiens
  CDR3 for beta chain variable domain of TCR clone 110183 (TRBV5-4, TRBJ2-2)
CASRLDGGTGELFF

SEQ ID NO: 220367 - protein, 15 aa, Homo sapiens
  CDR3 for alpha chain variable domain of TCR clone 110184 (TRAV20, TRAJ23)
RAVQAVRNQGGKLIF

SEQ ID NO: 220368 - protein, 16 aa, Homo sapiens
  CDR3 for beta chain variable domain of TCR clone 110184 (TRBV27, TRBJ2-7)
CASSKQGRGWAYEQYF

SEQ ID NO: 220369 - protein, 14 aa, Homo sapiens
  CDR3 for alpha chain variable domain of TCR clone 110185 (TRAV12-2, TRAJ17)
CAALFKASGNKLTF

SEQ ID NO: 220370 - protein, 16 aa, Homo sapiens
  CDR3 for beta chain variable domain of TCR clone 110185 (TRBV20-1, TRBJ2-2)
CSASASGIPGAGELFF

SEQ ID NO: 220371 - protein, 17 aa, Homo sapiens
  CDR3 for alpha chain variable domain of TCR clone 110186 (TRAV3, TRAJ6)
CAVRDGPRAGGSYIPTF

SEQ ID NO: 220372 - protein, 13 aa, Homo sapiens
  CDR3 for beta chain variable domain of TCR clone 110186 (TRBV5-5, TRBJ1-2)
CASSFWRGEDYTF

SEQ ID NO: 220373 - protein, 16 aa, Homo sapiens
  CDR3 for alpha chain variable domain of TCR clone 110187 (TRAV12-3, TRAJ53)
CAMSPGSGGSNYKLTF

SEQ ID NO: 220374 - protein, 14 aa, Homo sapiens
  CDR3 for beta chain variable domain of TCR clone 110187 (TRBV4-1, TRBJ2-7)
CASSPVAGGGEQYF

SEQ ID NO: 220375 - protein, 15 aa, Homo sapiens
  CDR3 for alpha chain variable domain of TCR clone 110188 (TRAV14/DV4, TRAJ12)
CAMREERDSSYKLIF

SEQ ID NO: 220376 - protein, 14 aa, Homo sapiens
  CDR3 for beta chain variable domain of TCR clone 110188 (TRBV19, TRBJ2-1)
CASPTFVLSGEQFF

SEQ ID NO: 220377 - protein, 13 aa, Homo sapiens
  CDR3 for alpha chain variable domain of TCR clone 110189 (TRAV35, TRAJ37)
CAGSSGNTGKLIF

SEQ ID NO: 220378 - protein, 16 aa, Homo sapiens
  CDR3 for beta chain variable domain of TCR clone 110189 (TRBV10-3, TRBJ2-1)
CAISLTSGNAYNEQFF

SEQ ID NO: 220379 - protein, 12 aa, Homo sapiens
  CDR3 for alpha chain variable domain of TCR clone 110190 (TRAV4, TRAJ6)
CLAPGGSYIPTF

SEQ ID NO: 220380 - protein, 13 aa, Homo sapiens
  CDR3 for beta chain variable domain of TCR clone 110190 (TRBV7-9, TRBJ1-2)
CASSLKQNYGYTF

SEQ ID NO: 220381 - protein, 11 aa, Homo sapiens
  CDR3 for alpha chain variable domain of TCR clone 110191 (TRAV2, TRAJ13)
CASGCYQKVTF

SEQ ID NO: 220382 - protein, 14 aa, Homo sapiens
  CDR3 for beta chain variable domain of TCR clone 110191 (TRBV7-3, TRBJ2-7)
CASSYDQDYYEQYF

SEQ ID NO: 220383 - protein, 12 aa, Homo sapiens
  CDR3 for alpha chain variable domain of TCR clone 110192 (TRAV12-3, TRAJ3)
CAIDSSASKIIF

SEQ ID NO: 220384 - protein, 17 aa, Homo sapiens
  CDR3 for beta chain variable domain of TCR clone 110192 (TRBV7-9, TRBJ2-3)
CASSLDEAGAYPDTQYF

SEQ ID NO: 220385 - protein, 14 aa, Homo sapiens
  CDR3 for alpha chain variable domain of TCR clone 110193 (TRAV17, TRAJ57)
CATDPQGGPEKLVF

SEQ ID NO: 220386 - protein, 13 aa, Homo sapiens
  CDR3 for beta chain variable domain of TCR clone 110193 (TRBV7-9, TRBJ1-2)
CASSLKQNYGYTF

SEQ ID NO: 220387 - protein, 15 aa, Homo sapiens
  CDR3 for alpha chain variable domain of TCR clone 110194 (TRAV26-1, TRAJ29)
CIVRVEGSGNTPLVF

SEQ ID NO: 220388 - protein, 14 aa, Homo sapiens
  CDR3 for beta chain variable domain of TCR clone 110194 (TRBV6-1, TRBJ1-3)
CASVQGGGGNTMYF

SEQ ID NO: 220389 - protein, 14 aa, Homo sapiens
  CDR3 for alpha chain variable domain of TCR clone 110195 (TRAV17, TRAJ39)
CATDPVRAGNMLTF

SEQ ID NO: 220390 - protein, 15 aa, Homo sapiens
  CDR3 for beta chain variable domain of TCR clone 110195 (TRBV13, TRBJ1-5)
CASNFGQGGVQPQHF

SEQ ID NO: 220391 - protein, 15 aa, Homo sapiens
  CDR3 for alpha chain variable domain of TCR clone 110196 (TRAV38-2/DV8, TRAJ45)
CAYWDSGGGADGLTF

SEQ ID NO: 220392 - protein, 16 aa, Homo sapiens
  CDR3 for beta chain variable domain of TCR clone 110196 (TRBV19, TRBJ1-1)
CASSPARFWPGTEAFF

SEQ ID NO: 220393 - protein, 13 aa, Homo sapiens
  CDR3 for alpha chain variable domain of TCR clone 110197 (TRAV35, TRAJ42)
CAGFPGSQGNLIF

SEQ ID NO: 220394 - protein, 14 aa, Homo sapiens
  CDR3 for beta chain variable domain of TCR clone 110197 (TRBV19, TRBJ2-1)
CARPTFVLSGEQFF

SEQ ID NO: 220395 - protein, 11 aa, Homo sapiens
  CDR3 for alpha chain variable domain of TCR clone 110198 (TRAV13-1, TRAJ39)
CASHAGNMLTF

SEQ ID NO: 220396 - protein, 13 aa, Homo sapiens
  CDR3 for beta chain variable domain of TCR clone 110198 (TRBV19, TRBJ2-3)
CATWDKITDTQYF

SEQ ID NO: 220397 - protein, 13 aa, Homo sapiens
  CDR3 for alpha chain variable domain of TCR clone 110199 (TRAV39, TRAJ48)
CAAVNFGHEKLTF

SEQ ID NO: 220398 - protein, 12 aa, Homo sapiens
  CDR3 for beta chain variable domain of TCR clone 110199 (TRBV5-5, TRBJ2-5)
CASSYFGETQYF

SEQ ID NO: 220399 - protein, 13 aa, Homo sapiens
  CDR3 for alpha chain variable domain of TCR clone 110200 (TRAV12-3, TRAJ48)
CAMSLVGNEKLTF

SEQ ID NO: 220400 - protein, 13 aa, Homo sapiens
  CDR3 for beta chain variable domain of TCR clone 110200 (TRBV15, TRBJ1-6)
CATSGGLNSPLHF

SEQ ID NO: 220401 - protein, 15 aa, Homo sapiens
  CDR3 for alpha chain variable domain of TCR clone 110201 (TRAV27, TRAJ38)
CAARRNAGNNRKLIW

SEQ ID NO: 220402 - protein, 13 aa, Homo sapiens
  CDR3 for beta chain variable domain of TCR clone 110201 (TRBV12-5, TRBJ2-3)
CASGDRQSDTQYV

SEQ ID NO: 220403 - protein, 16 aa, Homo sapiens
  CDR3 for alpha chain variable domain of TCR clone 110202 (TRAV26-1, )
CIDIQNPDPAVYQLRD

SEQ ID NO: 220404 - protein, 19 aa, Homo sapiens
  CDR3 for beta chain variable domain of TCR clone 110202 (TRBV19, TRBJ2-5)
CASSIGQVTDFCLGETQYF

SEQ ID NO: 220405 - protein, 14 aa, Homo sapiens
  CDR3 for alpha chain variable domain of TCR clone 110203 (TRAV8-2, TRAJ37)
CVVSISGNKGKLIF

SEQ ID NO: 220406 - protein, 17 aa, Homo sapiens
  CDR3 for beta chain variable domain of TCR clone 110203 (TRBV7-9, TRBJ2-3)
CASSPTVAGDLTDTQYF

SEQ ID NO: 220407 - protein, 12 aa, Homo sapiens
  CDR3 for alpha chain variable domain of TCR clone 110204 (TRAV27, TRAJ36)
ASTPAGANKLFF

SEQ ID NO: 220408 - protein, 13 aa, Homo sapiens
  CDR3 for beta chain variable domain of TCR clone 110204 (TRBV7-9, TRBJ2-3)
CASSPGSTDTQYF

SEQ ID NO: 220409 - protein, 14 aa, Homo sapiens
  CDR3 for alpha chain variable domain of TCR clone 110205 (TRAV13-2, TRAJ17)
CAENSKAAGNKLTF

SEQ ID NO: 220410 - protein, 17 aa, Homo sapiens
  CDR3 for beta chain variable domain of TCR clone 110205 (TRBV11-2, TRBJ2-1)
CASSLYPPGVEYNEQFF

SEQ ID NO: 220411 - protein, 14 aa, Homo sapiens
  CDR3 for alpha chain variable domain of TCR clone 110206 (TRAV38-1, TRAJ48)
CAFMANFGNEKLTF

SEQ ID NO: 220412 - protein, 12 aa, Homo sapiens
  CDR3 for beta chain variable domain of TCR clone 110206 (TRBV4-1, TRBJ2-7)
PAGGGADNEQYF

SEQ ID NO: 220413 - protein, 13 aa, Homo sapiens
  CDR3 for alpha chain variable domain of TCR clone 110207 (TRAV38-1, TRAJ42)
CARWRGSQGNLIF

SEQ ID NO: 220414 - protein, 17 aa, Homo sapiens
  CDR3 for beta chain variable domain of TCR clone 110207 (TRBV20-1, TRBJ2-1)
CSARDPLAGVWDNEQFF

SEQ ID NO: 220415 - protein, 16 aa, Homo sapiens
  CDR3 for alpha chain variable domain of TCR clone 110208 (TRAV21, TRAJ52)
CAVTNAGGTSYGKLTF

SEQ ID NO: 220416 - protein, 17 aa, Homo sapiens
  CDR3 for beta chain variable domain of TCR clone 110208 (TRBV28, TRBJ2-5)
CASSRQGGVAGAETQYF

SEQ ID NO: 220417 - protein, 14 aa, Homo sapiens
  CDR3 for alpha chain variable domain of TCR clone 110209 (TRAV3, TRAJ8)
CAVSLNTGFQKLVF

SEQ ID NO: 220418 - protein, 14 aa, Homo sapiens
  CDR3 for beta chain variable domain of TCR clone 110209 (TRBV6-6, TRBJ1-5)
CASVDSGFNQTQHF

SEQ ID NO: 220419 - protein, 23 aa, Homo sapiens
  CDR3 for alpha chain variable domain of TCR clone 110210 (TRAV8-6, TRAJ26)
PLEETLSPYKRHGWVLLSQNFVF

SEQ ID NO: 220420 - protein, 15 aa, Homo sapiens
  CDR3 for beta chain variable domain of TCR clone 110210 (TRBV4-1, TRBJ1-4)
CASSDTGGTNEKLFF

SEQ ID NO: 220421 - protein, 13 aa, Homo sapiens
  CDR3 for alpha chain variable domain of TCR clone 110211 (TRAV12-3, TRAJ33)
CAMSVNSNYQIIW

SEQ ID NO: 220422 - protein, 13 aa, Homo sapiens
  CDR3 for beta chain variable domain of TCR clone 110211 (TRBV7-2, TRBJ2-2)
CASSLAVTGELFF

SEQ ID NO: 220423 - protein, 16 aa, Homo sapiens
  CDR3 for alpha chain variable domain of TCR clone 110212 (TRAV12-2, TRAJ32)
CAVNLGQGGATNKLIF

SEQ ID NO: 220424 - protein, 13 aa, Homo sapiens
  CDR3 for beta chain variable domain of TCR clone 110212 (TRBV4-1, TRBJ2-2)
CASSQENTGELFF

SEQ ID NO: 220425 - protein, 16 aa, Homo sapiens
  CDR3 for alpha chain variable domain of TCR clone 110213 (TRAV22, TRAJ45)
CAVERGKRGGAYGLTF

SEQ ID NO: 220426 - protein, 13 aa, Homo sapiens
  CDR3 for beta chain variable domain of TCR clone 110213 (TRBV27, TRBJ1-1)
CASSLSIGAEAFF

SEQ ID NO: 220427 - protein, 14 aa, Homo sapiens
  CDR3 for alpha chain variable domain of TCR clone 110214 (TRAV12-2, TRAJ45)
CAVNIEGGADGLTF

SEQ ID NO: 220428 - protein, 13 aa, Homo sapiens
  CDR3 for beta chain variable domain of TCR clone 110214 (TRBV19, TRBJ2-2)
CASSIWSTGELFF

SEQ ID NO: 220429 - protein, 15 aa, Homo sapiens
  CDR3 for alpha chain variable domain of TCR clone 110215 (TRAV26-1, TRAJ29)
CIVRVEGSGNTPLGL

SEQ ID NO: 220430 - protein, 14 aa, Homo sapiens
  CDR3 for beta chain variable domain of TCR clone 110215 (TRBV18, TRBJ2-5)
CASSPGVSQETQYF

SEQ ID NO: 220431 - protein, 10 aa, Homo sapiens
  CDR3 for alpha chain variable domain of TCR clone 110216 (TRAV30, TRAJ48)
CGIGNEKLPF

SEQ ID NO: 220432 - protein, 14 aa, Homo sapiens
  CDR3 for beta chain variable domain of TCR clone 110216 (TRBV7-6, TRBJ2-3)
CASSVAGGTDTQYF

SEQ ID NO: 220433 - protein, 15 aa, Homo sapiens
  CDR3 for alpha chain variable domain of TCR clone 110217 (TRAV27, TRAJ38)
CTARRNAGNNRKLIW

SEQ ID NO: 220434 - protein, 14 aa, Homo sapiens
  CDR3 for beta chain variable domain of TCR clone 110217 (TRBV19, TRBJ2-1)
CASPTFVLSGEQFF

SEQ ID NO: 220435 - protein, 13 aa, Homo sapiens
  CDR3 for alpha chain variable domain of TCR clone 110218 (TRAV8-2, TRAJ29)
CALPGAGNTPLVF

SEQ ID NO: 220436 - protein, 13 aa, Homo sapiens
  CDR3 for beta chain variable domain of TCR clone 110218 (TRBV12-4, TRBJ1-2)
CASSSGLTVISTF

SEQ ID NO: 220437 - protein, 13 aa, Homo sapiens
  CDR3 for alpha chain variable domain of TCR clone 110219 (TRAV20, TRAJ40)
CAVPFSGTYKYIF

SEQ ID NO: 220438 - protein, 14 aa, Homo sapiens
  CDR3 for beta chain variable domain of TCR clone 110219 (TRBV7-2, TRBJ2-2)
CASRGQGAAGELFF

SEQ ID NO: 220439 - protein, 14 aa, Homo sapiens
  CDR3 for alpha chain variable domain of TCR clone 110220 (TRAV1-2, TRAJ8)
CAGREDTGFQKLVF

SEQ ID NO: 220440 - protein, 15 aa, Homo sapiens
  CDR3 for beta chain variable domain of TCR clone 110220 (TRBV12-4, TRBJ2-5)
CASSPPTGLQETQYF

SEQ ID NO: 220441 - protein, 13 aa, Homo sapiens
  CDR3 for alpha chain variable domain of TCR clone 110221 (TRAV12-1, TRAJ11)
CVVNRAGYSTLTF

SEQ ID NO: 220442 - protein, 16 aa, Homo sapiens
  CDR3 for beta chain variable domain of TCR clone 110221 (TRBV7-8, TRBJ2-4)
CASSAERTLAKNIQYF

SEQ ID NO: 220443 - protein, 12 aa, Homo sapiens
  CDR3 for alpha chain variable domain of TCR clone 110222 (TRAV1-2, TRAJ33)
CAALDSNHQLIW

SEQ ID NO: 220444 - protein, 15 aa, Homo sapiens
  CDR3 for beta chain variable domain of TCR clone 110222 (TRBV27, TRBJ2-1)
CASSNGGGSSNEQFF

SEQ ID NO: 220445 - protein, 13 aa, Homo sapiens
  CDR3 for alpha chain variable domain of TCR clone 110223 (TRAV36/DV7, TRAJ37)
CAVFSSNTGKLIF

SEQ ID NO: 220446 - protein, 11 aa, Homo sapiens
  CDR3 for beta chain variable domain of TCR clone 110223 (TRBV11-2, TRBJ2-2)
CASSLPGELFF

SEQ ID NO: 220447 - protein, 14 aa, Homo sapiens
  CDR3 for alpha chain variable domain of TCR clone 110224 (TRAV12-3, TRAJ48)
CAVSETFGNEKLTF

SEQ ID NO: 220448 - protein, 14 aa, Homo sapiens
  CDR3 for beta chain variable domain of TCR clone 110224 (TRBV13, TRBJ2-7)
CASSLKGASYEQYF

SEQ ID NO: 220449 - protein, 14 aa, Homo sapiens
  CDR3 for alpha chain variable domain of TCR clone 110225 (TRAV3, TRAJ9)
CAVRGNTGGFTTIF

SEQ ID NO: 220450 - protein, 14 aa, Homo sapiens
  CDR3 for beta chain variable domain of TCR clone 110225 (TRBV15, TRBJ2-1)
CATSGVEDYNEQFF

SEQ ID NO: 220451 - protein, 16 aa, Homo sapiens
  CDR3 for alpha chain variable domain of TCR clone 110226 (TRAV3, TRAJ10)
CAVRDMRAGGGNKRTF

SEQ ID NO: 220452 - protein, 13 aa, Homo sapiens
  CDR3 for beta chain variable domain of TCR clone 110226 (TRBV6-1, TRBJ1-1)
CASSRQGNTEAFF

SEQ ID NO: 220453 - protein, 15 aa, Homo sapiens
  CDR3 for alpha chain variable domain of TCR clone 110227 (TRAV26-1, TRAJ22)
CIVRVSFWFCKATDL

SEQ ID NO: 220454 - protein, 16 aa, Homo sapiens
  CDR3 for beta chain variable domain of TCR clone 110227 (TRBV20-1, TRBJ1-4)
CSAPGQGLLTNEKLFF

SEQ ID NO: 220455 - protein, 10 aa, Homo sapiens
  CDR3 for alpha chain variable domain of TCR clone 110228 (TRAV8-2, TRAJ29)
CTGGNTPLIF

SEQ ID NO: 220456 - protein, 17 aa, Homo sapiens
  CDR3 for beta chain variable domain of TCR clone 110228 (TRBV2, TRBJ2-7)
CASSQALTGWDSYEQYF

SEQ ID NO: 220457 - protein, 14 aa, Homo sapiens
  CDR3 for alpha chain variable domain of TCR clone 110229 (TRAV1-2, TRAJ16)
CAVNRFSDGQKLLF

SEQ ID NO: 220458 - protein, 13 aa, Homo sapiens
  CDR3 for beta chain variable domain of TCR clone 110229 (TRBV7-9, TRBJ2-7)
CASSLKAGQEQYF

SEQ ID NO: 220459 - protein, 13 aa, Homo sapiens
  CDR3 for alpha chain variable domain of TCR clone 110230 (TRAV36/DV7, TRAJ33)
CAVDMDSNYQLIW

SEQ ID NO: 220460 - protein, 16 aa, Homo sapiens
  CDR3 for beta chain variable domain of TCR clone 110230 (TRBV15, TRBJ2-3)
CATRLSGVRAPDTQYF

SEQ ID NO: 220461 - protein, 12 aa, Homo sapiens
  CDR3 for alpha chain variable domain of TCR clone 110231 (TRAV12-3, TRAJ34)
CAMGYNTDKLIF

SEQ ID NO: 220462 - protein, 17 aa, Homo sapiens
  CDR3 for beta chain variable domain of TCR clone 110231 (TRBV11-2, TRBJ2-6)
CASSQRDIFSGANVLTF

SEQ ID NO: 220463 - protein, 16 aa, Homo sapiens
  CDR3 for alpha chain variable domain of TCR clone 110232 (TRAV30, TRAJ24)
CGTEIVDADSWGKFQF

SEQ ID NO: 220464 - protein, 19 aa, Homo sapiens
  CDR3 for beta chain variable domain of TCR clone 110232 (TRBV25-1, TRBJ2-2)
CAILVFRVDRGRKTGELFF

SEQ ID NO: 220465 - protein, 11 aa, Homo sapiens
  CDR3 for alpha chain variable domain of TCR clone 110233 (TRAV2, TRAJ13)
CASGGYQKVTS

SEQ ID NO: 220466 - protein, 16 aa, Homo sapiens
  CDR3 for beta chain variable domain of TCR clone 110233 (TRBV19, TRBJ2-1)
CASSKAGPSSYNEQFF

SEQ ID NO: 220467 - protein, 17 aa, Homo sapiens
  CDR3 for alpha chain variable domain of TCR clone 110234 (TRAV13-1, TRAJ31)
CAPRDRLMFGDGTQLVV

SEQ ID NO: 220468 - protein, 12 aa, Homo sapiens
  CDR3 for beta chain variable domain of TCR clone 110234 (TRBV7-9, TRBJ2-7)
CASSLEGYEQSF

SEQ ID NO: 220469 - protein, 21 aa, Homo sapiens
  CDR3 for alpha chain variable domain of TCR clone 110235 (TRAV8-2, )
CVVNIQNPDPAVYQLRDSKSS

SEQ ID NO: 220470 - protein, 14 aa, Homo sapiens
  CDR3 for beta chain variable domain of TCR clone 110235 (TRBV7-9, TRBJ2-5)
CASSLVGGEETQYF

SEQ ID NO: 220471 - protein, 12 aa, Homo sapiens
  CDR3 for alpha chain variable domain of TCR clone 110236 (TRAV9-2, TRAJ36)
CALKKGANNLFF

SEQ ID NO: 220472 - protein, 14 aa, Homo sapiens
  CDR3 for beta chain variable domain of TCR clone 110236 (TRBV7-9, TRBJ1-6)
CASKPGTVNSPLHF

SEQ ID NO: 220473 - protein, 17 aa, Homo sapiens
  CDR3 for alpha chain variable domain of TCR clone 110237 (TRAV26-1, TRAJ53)
CNVRVDDSGGSNYKLTF

SEQ ID NO: 220474 - protein, 15 aa, Homo sapiens
  CDR3 for beta chain variable domain of TCR clone 110237 (TRBV20-1, TRBJ2-7)
CSARVPAAYFYEQYF

SEQ ID NO: 220475 - protein, 15 aa, Homo sapiens
  CDR3 for alpha chain variable domain of TCR clone 110238 (TRAV27, TRAJ38)
CAARRNAGNNRKLIW

SEQ ID NO: 220476 - protein, 15 aa, Homo sapiens
  CDR3 for beta chain variable domain of TCR clone 110238 (TRBV5-1, TRBJ2-3)
CASSVTSGSTDTQYF

SEQ ID NO: 220477 - protein, 16 aa, Homo sapiens
  CDR3 for alpha chain variable domain of TCR clone 110239 (TRAV30, TRAJ24)
CGTEIVDADSWGKFQF

SEQ ID NO: 220478 - protein, 15 aa, Homo sapiens
  CDR3 for beta chain variable domain of TCR clone 110239 (TRBV5-1, TRBJ1-1)
CASSSTTGTNTEALF

SEQ ID NO: 220479 - protein, 14 aa, Homo sapiens
  CDR3 for alpha chain variable domain of TCR clone 110240 (TRAV4, TRAJ10)
CLVGDTGGGNKLSF

SEQ ID NO: 220480 - protein, 13 aa, Homo sapiens
  CDR3 for beta chain variable domain of TCR clone 110240 (TRBV10-2, TRBJ2-5)
CASSVGPQETQYF

SEQ ID NO: 220481 - protein, 14 aa, Homo sapiens
  CDR3 for alpha chain variable domain of TCR clone 110241 (TRAV13-2, TRAJ39)
GDSVRNNAGSMLTF

SEQ ID NO: 220482 - protein, 13 aa, Homo sapiens
  CDR3 for beta chain variable domain of TCR clone 110241 (TRBV20-1, TRBJ2-7)
CSAPGLADYEQYF

SEQ ID NO: 220483 - protein, 15 aa, Homo sapiens
  CDR3 for alpha chain variable domain of TCR clone 110242 (TRAV17, TRAJ10)
CATVLLTGGGNQLTF

SEQ ID NO: 220484 - protein, 16 aa, Homo sapiens
  CDR3 for beta chain variable domain of TCR clone 110242 (TRBV7-9, TRBJ2-3)
CASSPWREVGTDTQYF

SEQ ID NO: 220485 - protein, 13 aa, Homo sapiens
  CDR3 for alpha chain variable domain of TCR clone 110243 (TRAV2, TRAJ9)
CAVECTGGFKTIF

SEQ ID NO: 220486 - protein, 15 aa, Homo sapiens
  CDR3 for beta chain variable domain of TCR clone 110243 (TRBV10-3, TRBJ2-1)
CAITFGGGTDNEQFF

SEQ ID NO: 220487 - protein, 12 aa, Homo sapiens
  CDR3 for alpha chain variable domain of TCR clone 110244 (TRAV13-2, TRAJ23)
CAERHRGGKLIF

SEQ ID NO: 220488 - protein, 19 aa, Homo sapiens
  CDR3 for beta chain variable domain of TCR clone 110244 (TRBV11-3, TRBJ2-2)
CASSTRPGAKTTNTGELFF

SEQ ID NO: 220489 - protein, 13 aa, Homo sapiens
  CDR3 for alpha chain variable domain of TCR clone 110245 (TRAV27, TRAJ41)
CAGEGNSGYALNF

SEQ ID NO: 220490 - protein, 13 aa, Homo sapiens
  CDR3 for beta chain variable domain of TCR clone 110245 (TRBV7-9, TRBJ2-3)
CASSPGSTDTQYF

SEQ ID NO: 220491 - protein, 15 aa, Homo sapiens
  CDR3 for alpha chain variable domain of TCR clone 110246 (TRAV3, TRAJ9)
CAVRDSNTVGFKTIF

SEQ ID NO: 220492 - protein, 16 aa, Homo sapiens
  CDR3 for beta chain variable domain of TCR clone 110246 (TRBV15, TRBJ2-5)
CATSPTTGQGMETQYF

SEQ ID NO: 220493 - protein, 17 aa, Homo sapiens
  CDR3 for alpha chain variable domain of TCR clone 110247 (TRAV1-1, TRAJ28)
CAVDPAYSGAGSYKLTF

SEQ ID NO: 220494 - protein, 14 aa, Homo sapiens
  CDR3 for beta chain variable domain of TCR clone 110247 (TRBV19, TRBJ2-1)
CASPTFVLSGEQFF

SEQ ID NO: 220495 - protein, 16 aa, Homo sapiens
  CDR3 for alpha chain variable domain of TCR clone 110248 (TRAV14/DV4, TRAJ53)
CAMREGGGGSNYKLTF

SEQ ID NO: 220496 - protein, 15 aa, Homo sapiens
  CDR3 for beta chain variable domain of TCR clone 110248 (TRBV18, TRBJ1-1)
CASSPRQGENTEAFF

SEQ ID NO: 220497 - protein, 14 aa, Homo sapiens
  CDR3 for alpha chain variable domain of TCR clone 110249 (TRAV12-1, TRAJ9)
CVVNRGTGGFKTIF

SEQ ID NO: 220498 - protein, 13 aa, Homo sapiens
  CDR3 for beta chain variable domain of TCR clone 110249 (TRBV11-2, TRBJ2-7)
CASSGTRPYEQYF

SEQ ID NO: 220499 - protein, 18 aa, Homo sapiens
  CDR3 for alpha chain variable domain of TCR clone 110250 (TRAV8-3, )
CAVGAGDIQNPDPAVYQL

SEQ ID NO: 220500 - protein, 14 aa, Homo sapiens
  CDR3 for beta chain variable domain of TCR clone 110250 (TRBV5-1, TRBJ1-5)
CASSLGQGAQPQHF

SEQ ID NO: 220501 - protein, 14 aa, Homo sapiens
  CDR3 for alpha chain variable domain of TCR clone 110251 (TRAV20, TRAJ56)
CAVQFGGPNSKLTF

SEQ ID NO: 220502 - protein, 14 aa, Homo sapiens
  CDR3 for beta chain variable domain of TCR clone 110251 (TRBV20-1, TRBJ2-7)
CSAKRGRSSYEQYF

SEQ ID NO: 220503 - protein, 16 aa, Homo sapiens
  CDR3 for alpha chain variable domain of TCR clone 110252 (TRAV14/DV4, TRAJ53)
CAMREGGGGSNYKLTF

SEQ ID NO: 220504 - protein, 17 aa, Homo sapiens
  CDR3 for beta chain variable domain of TCR clone 110252 (TRBV6-6, TRBJ2-7)
CASSRRYLTGGAYEQYF

SEQ ID NO: 220505 - protein, 14 aa, Homo sapiens
  CDR3 for alpha chain variable domain of TCR clone 110253 (TRAV12-1, TRAJ17)
CVVNPKAAGNKLTF

SEQ ID NO: 220506 - protein, 14 aa, Homo sapiens
  CDR3 for beta chain variable domain of TCR clone 110253 (TRBV4-2, TRBJ2-1)
CASGLDRAYNEQFF

SEQ ID NO: 220507 - protein, 13 aa, Homo sapiens
  CDR3 for alpha chain variable domain of TCR clone 110254 (TRAV29/DV5, TRAJ31)
CAASRNNNARLMF

SEQ ID NO: 220508 - protein, 12 aa, Homo sapiens
  CDR3 for beta chain variable domain of TCR clone 110254 (TRBV14, TRBJ2-7)
CASSLYKDEQCF

SEQ ID NO: 220509 - protein, 20 aa, Homo sapiens
  CDR3 for alpha chain variable domain of TCR clone 110255 (TRAV1-1, TRAJ4)
CLLLLRCEGFLSGGYNKLIF

SEQ ID NO: 220510 - protein, 16 aa, Homo sapiens
  CDR3 for beta chain variable domain of TCR clone 110255 (TRBV28, TRBJ1-4)
CASSPPYRGQSEKLFF

SEQ ID NO: 220511 - protein, 14 aa, Homo sapiens
  CDR3 for alpha chain variable domain of TCR clone 110256 (TRAV12-1, TRAJ17)
CVVNYKAAGNKLTF

SEQ ID NO: 220512 - protein, 14 aa, Homo sapiens
  CDR3 for beta chain variable domain of TCR clone 110256 (TRBV18, TRBJ2-5)
CASSPGVSQETQYF

SEQ ID NO: 220513 - protein, 15 aa, Homo sapiens
  CDR3 for alpha chain variable domain of TCR clone 110257 (TRAV2, TRAJ24)
CAVEVLTDSWGKFQF

SEQ ID NO: 220514 - protein, 14 aa, Homo sapiens
  CDR3 for beta chain variable domain of TCR clone 110257 (TRBV7-2, TRBJ2-2)
CASRGQGAAGEPFF

SEQ ID NO: 220515 - protein, 15 aa, Homo sapiens
  CDR3 for alpha chain variable domain of TCR clone 110258 (TRAV12-2, TRAJ53)
CAVNGGGGSNYKLTS

SEQ ID NO: 220516 - protein, 17 aa, Homo sapiens
  CDR3 for beta chain variable domain of TCR clone 110258 (TRBV7-3, TRBJ2-3)
CASSLMKRMRGADTQYF

SEQ ID NO: 220517 - protein, 14 aa, Homo sapiens
  CDR3 for alpha chain variable domain of TCR clone 110259 (TRAV1-2, TRAJ8)
CAVREDTGFQKLVF

SEQ ID NO: 220518 - protein, 14 aa, Homo sapiens
  CDR3 for beta chain variable domain of TCR clone 110259 (TRBV7-3, TRBJ2-7)
CASSLKADSYEQYF

SEQ ID NO: 220519 - protein, 13 aa, Homo sapiens
  CDR3 for alpha chain variable domain of TCR clone 110260 (TRAV20, TRAJ37)
CAGCSSNTGKLIF

SEQ ID NO: 220520 - protein, 12 aa, Homo sapiens
  CDR3 for beta chain variable domain of TCR clone 110260 (TRBV12-4, TRBJ2-1)
CASSLQGSEQFF

SEQ ID NO: 220521 - protein, 15 aa, Homo sapiens
  CDR3 for alpha chain variable domain of TCR clone 110261 (TRAV26-1, TRAJ29)
CIVRVEGPGNTPLVF

SEQ ID NO: 220522 - protein, 13 aa, Homo sapiens
  CDR3 for beta chain variable domain of TCR clone 110261 (TRBV28, TRBJ1-1)
CASSKQGWTEAFF

SEQ ID NO: 220523 - protein, 13 aa, Homo sapiens
  CDR3 for alpha chain variable domain of TCR clone 110262 (TRAV38-1, TRAJ42)
CARWGGSQGNLIF

SEQ ID NO: 220524 - protein, 14 aa, Homo sapiens
  CDR3 for beta chain variable domain of TCR clone 110262 (TRBV7-3, TRBJ2-1)
CASSLSGSYNEQFF

SEQ ID NO: 220525 - protein, 11 aa, Homo sapiens
  CDR3 for alpha chain variable domain of TCR clone 110263 (TRAV8-3, TRAJ49)
CAVNTGNQFYF

SEQ ID NO: 220526 - protein, 14 aa, Homo sapiens
  CDR3 for beta chain variable domain of TCR clone 110263 (TRBV7-2, TRBJ1-2)
CASSQTGSTYGYTF

SEQ ID NO: 220527 - protein, 12 aa, Homo sapiens
  CDR3 for alpha chain variable domain of TCR clone 110264 (TRAV13-1, TRAJ21)
CAGKEGFNKFYF

SEQ ID NO: 220528 - protein, 14 aa, Homo sapiens
  CDR3 for beta chain variable domain of TCR clone 110264 (TRBV5-4, TRBJ1-1)
CASSLDSRRDEAFF

SEQ ID NO: 220529 - protein, 12 aa, Homo sapiens
  CDR3 for alpha chain variable domain of TCR clone 110265 (TRAV8-3, TRAJ20)
RAVDFNDYKLSF

SEQ ID NO: 220530 - protein, 12 aa, Homo sapiens
  CDR3 for beta chain variable domain of TCR clone 110265 (TRBV12-4, TRBJ1-3)
CASSFSGNTIYF

SEQ ID NO: 220531 - protein, 10 aa, Homo sapiens
  CDR3 for alpha chain variable domain of TCR clone 110266 (TRAV8-3, TRAJ43)
CAVALAEMRF

SEQ ID NO: 220532 - protein, 14 aa, Homo sapiens
  CDR3 for beta chain variable domain of TCR clone 110266 (TRBV4-2, TRBJ2-1)
CASGLDRAYNEQFF

SEQ ID NO: 220533 - protein, 13 aa, Homo sapiens
  CDR3 for alpha chain variable domain of TCR clone 110267 (TRAV3, TRAJ20)
CCEAFCNDYKLSF

SEQ ID NO: 220534 - protein, 14 aa, Homo sapiens
  CDR3 for beta chain variable domain of TCR clone 110267 (TRBV12-5, TRBJ2-5)
CASGSRTHQETQYF

SEQ ID NO: 220535 - protein, 17 aa, Homo sapiens
  CDR3 for alpha chain variable domain of TCR clone 110268 (TRAV3, TRAJ6)
CAVRDGPRAGGSYIPTF

SEQ ID NO: 220536 - protein, 13 aa, Homo sapiens
  CDR3 for beta chain variable domain of TCR clone 110268 (TRBV27, TRBJ2-1)
CANRTLGVGEQFF

SEQ ID NO: 220537 - protein, 12 aa, Homo sapiens
  CDR3 for alpha chain variable domain of TCR clone 110269 (TRAV29/DV5, TRAJ15)
CASNQAGAALIF

SEQ ID NO: 220538 - protein, 15 aa, Homo sapiens
  CDR3 for beta chain variable domain of TCR clone 110269 (TRBV11-2, TRBJ2-2)
CASSSDRVNAGELFF

SEQ ID NO: 220539 - protein, 13 aa, Homo sapiens
  CDR3 for alpha chain variable domain of TCR clone 110270 (TRAV29/DV5, TRAJ31)
CAARRNNNARLMF

SEQ ID NO: 220540 - protein, 12 aa, Homo sapiens
  CDR3 for beta chain variable domain of TCR clone 110270 (TRBV14, TRBJ2-5)
CASSHLKETQYF

SEQ ID NO: 220541 - protein, 16 aa, Homo sapiens
  CDR3 for alpha chain variable domain of TCR clone 110271 (TRAV26-1, TRAJ23)
CIVRDERYNQGGKLIF

SEQ ID NO: 220542 - protein, 15 aa, Homo sapiens
  CDR3 for beta chain variable domain of TCR clone 110271 (TRBV18, TRBJ2-7)
CASSPRGGKGYEQYF

SEQ ID NO: 220543 - protein, 16 aa, Homo sapiens
  CDR3 for alpha chain variable domain of TCR clone 110272 (TRAV12-3, TRAJ53)
CAMSPGSGGSKYKLTF

SEQ ID NO: 220544 - protein, 13 aa, Homo sapiens
  CDR3 for beta chain variable domain of TCR clone 110272 (TRBV19, TRBJ1-2)
CASSVPGQDGYTF

SEQ ID NO: 220545 - protein, 14 aa, Homo sapiens
  CDR3 for alpha chain variable domain of TCR clone 110273 (TRAV1-1, TRAJ27)
CAVIYNTNAGKSTF

SEQ ID NO: 220546 - protein, 14 aa, Homo sapiens
  CDR3 for beta chain variable domain of TCR clone 110273 (TRBV7-2, TRBJ1-1)
CASSFLTGTTEAFF

SEQ ID NO: 220547 - protein, 15 aa, Homo sapiens
  CDR3 for alpha chain variable domain of TCR clone 110274 (TRAV3, TRAJ5)
CAVRDRKTGRRALTF

SEQ ID NO: 220548 - protein, 15 aa, Homo sapiens
  CDR3 for beta chain variable domain of TCR clone 110274 (TRBV5-1, TRBJ2-1)
CASSPPRAPYNEQFF

SEQ ID NO: 220549 - protein, 13 aa, Homo sapiens
  CDR3 for alpha chain variable domain of TCR clone 110275 (TRAV21, TRAJ27)
CAARPGNAGNSTF

SEQ ID NO: 220550 - protein, 20 aa, Homo sapiens
  CDR3 for beta chain variable domain of TCR clone 110275 (TRBV4-2, TRBJ2-7)
CASSQASGGNLRAVLRAGHQ

SEQ ID NO: 220551 - protein, 12 aa, Homo sapiens
  CDR3 for alpha chain variable domain of TCR clone 110276 (TRAV12-3, TRAJ3)
CAIDSSASNIIF

SEQ ID NO: 220552 - protein, 17 aa, Homo sapiens
  CDR3 for beta chain variable domain of TCR clone 110276 (TRBV7-9, TRBJ2-3)
CASSLEEAGAYPDTQYF

SEQ ID NO: 220553 - protein, 12 aa, Homo sapiens
  CDR3 for alpha chain variable domain of TCR clone 110277 (TRAV2, TRAJ31)
CAVEDNNARLMF

SEQ ID NO: 220554 - protein, 16 aa, Homo sapiens
  CDR3 for beta chain variable domain of TCR clone 110277 (TRBV10-3, TRBJ2-1)
CAISGVGDGGEGEQFF

SEQ ID NO: 220555 - protein, 13 aa, Homo sapiens
  CDR3 for alpha chain variable domain of TCR clone 110278 (TRAV26-1, TRAJ33)
CTVRVEGNYQLIW

SEQ ID NO: 220556 - protein, 16 aa, Homo sapiens
  CDR3 for beta chain variable domain of TCR clone 110278 (TRBV15, TRBJ2-7)
CATSRDRGRRRGEQYF

SEQ ID NO: 220557 - protein, 14 aa, Homo sapiens
  CDR3 for alpha chain variable domain of TCR clone 110279 (TRAV23/DV6, TRAJ40)
CAASLTSGTYKYTF

SEQ ID NO: 220558 - protein, 14 aa, Homo sapiens
  CDR3 for beta chain variable domain of TCR clone 110279 (TRBV5-1, TRBJ2-3)
CASSRGQGGGTQYF

SEQ ID NO: 220559 - protein, 14 aa, Homo sapiens
  CDR3 for alpha chain variable domain of TCR clone 110280 (TRAV29/DV5, TRAJ36)
CAARRKTGANNLFF

SEQ ID NO: 220560 - protein, 14 aa, Homo sapiens
  CDR3 for beta chain variable domain of TCR clone 110280 (TRBV12-5, TRBJ2-5)
CASGLRTHQETQYF

SEQ ID NO: 220561 - protein, 13 aa, Homo sapiens
  CDR3 for alpha chain variable domain of TCR clone 110281 (TRAV8-3, TRAJ43)
CAVVPYNNNDMRF

SEQ ID NO: 220562 - protein, 16 aa, Homo sapiens
  CDR3 for beta chain variable domain of TCR clone 110281 (TRBV7-2, TRBJ2-5)
CASSPCPTGGEETQYF

SEQ ID NO: 220563 - protein, 14 aa, Homo sapiens
  CDR3 for alpha chain variable domain of TCR clone 110282 (TRAV12-3, TRAJ42)
CAMNYGGSQGNLIF

SEQ ID NO: 220564 - protein, 14 aa, Homo sapiens
  CDR3 for beta chain variable domain of TCR clone 110282 (TRBV7-2, TRBJ2-3)
CASRRGLAADTQYF

SEQ ID NO: 220565 - protein, 19 aa, Homo sapiens
  CDR3 for alpha chain variable domain of TCR clone 110283 (TRAV1-2, TRAJ26)
CLLPLCCGRPDNYGQNFVF

SEQ ID NO: 220566 - protein, 15 aa, Homo sapiens
  CDR3 for beta chain variable domain of TCR clone 110283 (TRBV27, TRBJ2-1)
CASSNGGGSSNEQFF

SEQ ID NO: 220567 - protein, 15 aa, Homo sapiens
  CDR3 for alpha chain variable domain of TCR clone 110284 (TRAV2, TRAJ9)
CAVEDRGTGGFKTVF

SEQ ID NO: 220568 - protein, 12 aa, Homo sapiens
  CDR3 for beta chain variable domain of TCR clone 110284 (TRBV7-9, TRBJ2-7)
CASSIKREEQYF

SEQ ID NO: 220569 - protein, 13 aa, Homo sapiens
  CDR3 for alpha chain variable domain of TCR clone 110285 (TRAV27, TRAJ17)
CAGAATAGNKLTF

SEQ ID NO: 220570 - protein, 15 aa, Homo sapiens
  CDR3 for beta chain variable domain of TCR clone 110285 (TRBV4-1, TRBJ1-4)
CASSDTGGTNEKLFF

SEQ ID NO: 220571 - protein, 15 aa, Homo sapiens
  CDR3 for alpha chain variable domain of TCR clone 110286 (TRAV8-4, TRAJ36)
CAVRKSWTGANNRFF

SEQ ID NO: 220572 - protein, 17 aa, Homo sapiens
  CDR3 for beta chain variable domain of TCR clone 110286 (TRBV3-1, TRBJ2-2)
CASSQDSQGPNTGELFF

SEQ ID NO: 220573 - protein, 11 aa, Homo sapiens
  CDR3 for alpha chain variable domain of TCR clone 110287 (TRAV3, TRAJ21)
CAVGNFNKLYF

SEQ ID NO: 220574 - protein, 16 aa, Homo sapiens
  CDR3 for beta chain variable domain of TCR clone 110287 (TRBV19, TRBJ2-1)
RASSKAGPSSYNEQFF

SEQ ID NO: 220575 - protein, 14 aa, Homo sapiens
  CDR3 for alpha chain variable domain of TCR clone 110288 (TRAV26-1, TRAJ38)
CIADNAGNNRKLIW

SEQ ID NO: 220576 - protein, 15 aa, Homo sapiens
  CDR3 for beta chain variable domain of TCR clone 110288 (TRBV5-1, TRBJ2-1)
CASSQAGYWWNEQFF

SEQ ID NO: 220577 - protein, 15 aa, Homo sapiens
  CDR3 for alpha chain variable domain of TCR clone 110289 (TRAV3, TRAJ9)
CAVRARNTGGFKTIF

SEQ ID NO: 220578 - protein, 15 aa, Homo sapiens
  CDR3 for beta chain variable domain of TCR clone 110289 (TRBV27, TRBJ1-1)
CASSPYADPYTESFF

SEQ ID NO: 220579 - protein, 12 aa, Homo sapiens
  CDR3 for alpha chain variable domain of TCR clone 110290 (TRAV2, TRAJ33)
CAFMDSNSQLIW

SEQ ID NO: 220580 - protein, 16 aa, Homo sapiens
  CDR3 for beta chain variable domain of TCR clone 110290 (TRBV2, TRBJ2-7)
CASSEPWTGPSYEQYF

SEQ ID NO: 220581 - protein, 14 aa, Homo sapiens
  CDR3 for alpha chain variable domain of TCR clone 110291 (TRAV26-1, TRAJ38)
CIADNAGNNRKLIW

SEQ ID NO: 220582 - protein, 13 aa, Homo sapiens
  CDR3 for beta chain variable domain of TCR clone 110291 (TRBV20-1, TRBJ1-1)
CSARGGGNTKAFF

SEQ ID NO: 220583 - protein, 11 aa, Homo sapiens
  CDR3 for alpha chain variable domain of TCR clone 110292 (TRAV21, TRAJ34)
CAHYNTDKLIF

SEQ ID NO: 220584 - protein, 16 aa, Homo sapiens
  CDR3 for beta chain variable domain of TCR clone 110292 (TRBV7-8, TRBJ2-5)
CASSPAGGRNQETQYF

SEQ ID NO: 220585 - protein, 14 aa, Homo sapiens
  CDR3 for alpha chain variable domain of TCR clone 110293 (TRAV1-2, TRAJ16)
CAVNRFSDGQKLLL

SEQ ID NO: 220586 - protein, 13 aa, Homo sapiens
  CDR3 for beta chain variable domain of TCR clone 110293 (TRBV4-1, TRBJ2-1)
CASSQAGGDEQFF

SEQ ID NO: 220587 - protein, 13 aa, Homo sapiens
  CDR3 for alpha chain variable domain of TCR clone 110294 (TRAV17, TRAJ34)
CATVPYNTDKLIF

SEQ ID NO: 220588 - protein, 16 aa, Homo sapiens
  CDR3 for beta chain variable domain of TCR clone 110294 (TRBV11-2, TRBJ2-7)
CASSPTTGGVSYEQYF

SEQ ID NO: 220589 - protein, 14 aa, Homo sapiens
  CDR3 for alpha chain variable domain of TCR clone 110295 (TRAV2, TRAJ9)
CAVEDRSGGFKTIF

SEQ ID NO: 220590 - protein, 15 aa, Homo sapiens
  CDR3 for beta chain variable domain of TCR clone 110295 (TRBV6-1, TRBJ2-1)
CASSEAAYSYNEQFF

SEQ ID NO: 220591 - protein, 14 aa, Homo sapiens
  CDR3 for alpha chain variable domain of TCR clone 110296 (TRAV26-1, TRAJ44)
CISPLPGTASKLTF

SEQ ID NO: 220592 - protein, 12 aa, Homo sapiens
  CDR3 for beta chain variable domain of TCR clone 110296 (TRBV11-2, TRBJ2-2)
CASSLGGGELFF

SEQ ID NO: 220593 - protein, 12 aa, Homo sapiens
  CDR3 for alpha chain variable domain of TCR clone 110297 (TRAV12-3, TRAJ17)
CAMTLTGNKLTF

SEQ ID NO: 220594 - protein, 13 aa, Homo sapiens
  CDR3 for beta chain variable domain of TCR clone 110297 (TRBV25-1, TRBJ2-6)
CASRGPGANVLTF

SEQ ID NO: 220595 - protein, 15 aa, Homo sapiens
  CDR3 for alpha chain variable domain of TCR clone 110298 (TRAV25, TRAJ53)
CPTSNSRGSNYKLTF

SEQ ID NO: 220596 - protein, 14 aa, Homo sapiens
  CDR3 for beta chain variable domain of TCR clone 110298 (TRBV11-2, TRBJ2-3)
CASSRLARTDTQYF

SEQ ID NO: 220597 - protein, 13 aa, Homo sapiens
  CDR3 for alpha chain variable domain of TCR clone 110299 (TRAV14/DV4, TRAJ9)
CAMREGPNWRLQN

SEQ ID NO: 220598 - protein, 15 aa, Homo sapiens
  CDR3 for beta chain variable domain of TCR clone 110299 (TRBV20-1, TRBJ2-1)
CSARVGGVGVLEQFF

SEQ ID NO: 220599 - protein, 13 aa, Homo sapiens
  CDR3 for alpha chain variable domain of TCR clone 110300 (TRAV16, TRAJ27)
CALRRTNAGKSTF

SEQ ID NO: 220600 - protein, 15 aa, Homo sapiens
  CDR3 for beta chain variable domain of TCR clone 110300 (TRBV18, TRBJ2-1)
CASSPPSASYNERFF

SEQ ID NO: 220601 - protein, 14 aa, Homo sapiens
  CDR3 for alpha chain variable domain of TCR clone 110301 (TRAV26-1, TRAJ39)
CIVRGSRAGNMLTF

SEQ ID NO: 220602 - protein, 15 aa, Homo sapiens
  CDR3 for beta chain variable domain of TCR clone 110301 (TRBV7-9, TRBJ1-5)
CASSQGHQPNQPQRF

SEQ ID NO: 220603 - protein, 12 aa, Homo sapiens
  CDR3 for alpha chain variable domain of TCR clone 110302 (TRAV20, TRAJ33)
CAVRGSNYQIIW

SEQ ID NO: 220604 - protein, 13 aa, Homo sapiens
  CDR3 for beta chain variable domain of TCR clone 110302 (TRBV4-3, TRBJ1-1)
CASSPTGNTEAFF

SEQ ID NO: 220605 - protein, 14 aa, Homo sapiens
  CDR3 for alpha chain variable domain of TCR clone 110303 (TRAV23/DV6, TRAJ8)
FAASKATGFQKLVF

SEQ ID NO: 220606 - protein, 15 aa, Homo sapiens
  CDR3 for beta chain variable domain of TCR clone 110303 (TRBV28, TRBJ2-3)
CASSPDRQGANTQYF

SEQ ID NO: 220607 - protein, 15 aa, Homo sapiens
  CDR3 for alpha chain variable domain of TCR clone 110304 (TRAV14/DV4, TRAJ10)
CAMRELTGGGNKLTF

SEQ ID NO: 220608 - protein, 18 aa, Homo sapiens
  CDR3 for beta chain variable domain of TCR clone 110304 (TRBV7-9, TRBJ2-7)
CASSLTTGGSRTWYEQYF

SEQ ID NO: 220609 - protein, 14 aa, Homo sapiens
  CDR3 for alpha chain variable domain of TCR clone 110305 (TRAV12-2, TRAJ40)
CAVKIPSGTYKYIF

SEQ ID NO: 220610 - protein, 15 aa, Homo sapiens
  CDR3 for beta chain variable domain of TCR clone 110305 (TRBV11-3, TRBJ2-3)
CASLKDGRGGDTQYF

SEQ ID NO: 220611 - protein, 15 aa, Homo sapiens
  CDR3 for alpha chain variable domain of TCR clone 110306 (TRAV26-1, TRAJ23)
CIVRVAGYQGGKLIF

SEQ ID NO: 220612 - protein, 18 aa, Homo sapiens
  CDR3 for beta chain variable domain of TCR clone 110306 (TRBV28, TRBJ2-1)
CASSSTGGRANSYNEQFF

SEQ ID NO: 220613 - protein, 11 aa, Homo sapiens
  CDR3 for alpha chain variable domain of TCR clone 110307 (TRAV17, TRAJ43)
CATPRSNDMRF

SEQ ID NO: 220614 - protein, 15 aa, Homo sapiens
  CDR3 for beta chain variable domain of TCR clone 110307 (TRBV11-2, TRBJ2-1)
CASSLGTSGLNEHFF

SEQ ID NO: 220615 - protein, 13 aa, Homo sapiens
  CDR3 for alpha chain variable domain of TCR clone 110308 (TRAV12-2, TRAJ37)
CAGGSGNTGKLIF

SEQ ID NO: 220616 - protein, 15 aa, Homo sapiens
  CDR3 for beta chain variable domain of TCR clone 110308 (TRBV6-5, TRBJ2-1)
CASSYDAGAGNEQFF

SEQ ID NO: 220617 - protein, 11 aa, Homo sapiens
  CDR3 for alpha chain variable domain of TCR clone 110309 (TRAV12-1, TRAJ33)
CVVNMNYQLIW

SEQ ID NO: 220618 - protein, 12 aa, Homo sapiens
  CDR3 for beta chain variable domain of TCR clone 110309 (TRBV5-4, TRBJ1-1)
CASSFGQTEAFF

SEQ ID NO: 220619 - protein, 13 aa, Homo sapiens
  CDR3 for alpha chain variable domain of TCR clone 110310 (TRAV35, TRAJ33)
CAGLMDSNYQLIC

SEQ ID NO: 220620 - protein, 13 aa, Homo sapiens
  CDR3 for beta chain variable domain of TCR clone 110310 (TRBV10-3, TRBJ2-1)
CAISEFSGREQFF

SEQ ID NO: 220621 - protein, 13 aa, Homo sapiens
  CDR3 for alpha chain variable domain of TCR clone 110311 (TRAV12-2, TRAJ26)
CAVNEDYGQNFVF

SEQ ID NO: 220622 - protein, 13 aa, Homo sapiens
  CDR3 for beta chain variable domain of TCR clone 110311 (TRBV18, TRBJ2-2)
CASSPTRGGELFF

SEQ ID NO: 220623 - protein, 14 aa, Homo sapiens
  CDR3 for alpha chain variable domain of TCR clone 110312 (TRAV13-1, TRAJ3)
CAASKSSSASKIIF

SEQ ID NO: 220624 - protein, 13 aa, Homo sapiens
  CDR3 for beta chain variable domain of TCR clone 110312 (TRBV7-3, TRBJ1-1)
CASSQDWGAEAFF

SEQ ID NO: 220625 - protein, 12 aa, Homo sapiens
  CDR3 for alpha chain variable domain of TCR clone 110313 (TRAV12-3, TRAJ17)
CAMTLTGNKLTF

SEQ ID NO: 220626 - protein, 15 aa, Homo sapiens
  CDR3 for beta chain variable domain of TCR clone 110313 (TRBV27, TRBJ1-5)
CASSSSGTGNQPQHF

SEQ ID NO: 220627 - protein, 14 aa, Homo sapiens
  CDR3 for alpha chain variable domain of TCR clone 110314 (TRAV8-4, TRAJ13)
CAVTLSGGYQKVTF

SEQ ID NO: 220628 - protein, 14 aa, Homo sapiens
  CDR3 for beta chain variable domain of TCR clone 110314 (TRBV7-6, TRBJ2-3)
CASSLGTVTDTQYF

SEQ ID NO: 220629 - protein, 16 aa, Homo sapiens
  CDR3 for alpha chain variable domain of TCR clone 110315 (TRAV26-2, TRAJ45)
CTTSSPIGGGADGLTF

SEQ ID NO: 220630 - protein, 20 aa, Homo sapiens
  CDR3 for beta chain variable domain of TCR clone 110315 (TRBV28, TRBJ2-1)
CASTPIGRSPGLAGGNEQFF

SEQ ID NO: 220631 - protein, 14 aa, Homo sapiens
  CDR3 for alpha chain variable domain of TCR clone 110316 (TRAV13-2, TRAJ43)
CGEIPTYNNNDMRF

SEQ ID NO: 220632 - protein, 15 aa, Homo sapiens
  CDR3 for beta chain variable domain of TCR clone 110316 (TRBV7-9, TRBJ2-2)
CASGPLDTFPGELFF

SEQ ID NO: 220633 - protein, 12 aa, Homo sapiens
  CDR3 for alpha chain variable domain of TCR clone 110317 (TRAV13-1, TRAJ54)
CAASGGAQKLVF

SEQ ID NO: 220634 - protein, 12 aa, Homo sapiens
  CDR3 for beta chain variable domain of TCR clone 110317 (TRBV7-9, TRBJ2-7)
CASSLEGYEQYF

SEQ ID NO: 220635 - protein, 10 aa, Homo sapiens
  CDR3 for alpha chain variable domain of TCR clone 110318 (TRAV1-2, TRAJ23)
CAGQGGKLIF

SEQ ID NO: 220636 - protein, 12 aa, Homo sapiens
  CDR3 for beta chain variable domain of TCR clone 110318 (TRBV6-1, TRBJ2-7)
CASSDYSYEQYF

SEQ ID NO: 220637 - protein, 15 aa, Homo sapiens
  CDR3 for alpha chain variable domain of TCR clone 110319 (TRAV38-1, TRAJ37)
CAFIHGSGNTGKLIF

SEQ ID NO: 220638 - protein, 14 aa, Homo sapiens
  CDR3 for beta chain variable domain of TCR clone 110319 (TRBV19, TRBJ2-2)
CASSTLHRSGELFF

SEQ ID NO: 220639 - protein, 17 aa, Homo sapiens
  CDR3 for alpha chain variable domain of TCR clone 110320 (TRAV17, TRAJ52)
CATERPSGGTSYGKLTF

SEQ ID NO: 220640 - protein, 15 aa, Homo sapiens
  CDR3 for beta chain variable domain of TCR clone 110320 (TRBV5-1, TRBJ2-1)
CASSLAANSYNEQFF

SEQ ID NO: 220641 - protein, 13 aa, Homo sapiens
  CDR3 for alpha chain variable domain of TCR clone 110321 (TRAV12-3, TRAJ7)
CAMTPYGNNRLAF

SEQ ID NO: 220642 - protein, 13 aa, Homo sapiens
  CDR3 for beta chain variable domain of TCR clone 110321 (TRBV27, TRBJ1-1)
CASSLSIGAEAFF

SEQ ID NO: 220643 - protein, 11 aa, Homo sapiens
  CDR3 for alpha chain variable domain of TCR clone 110322 (TRAV23/DV6, TRAJ49)
CAVAPVTSSIL

SEQ ID NO: 220644 - protein, 13 aa, Homo sapiens
  CDR3 for beta chain variable domain of TCR clone 110322 (TRBV7-9, TRBJ1-2)
CASSLKQNYGYTF

SEQ ID NO: 220645 - protein, 18 aa, Homo sapiens
  CDR3 for alpha chain variable domain of TCR clone 110323 (TRAV26-2, TRAJ45)
CILRVDKYSGGGADGLTF

SEQ ID NO: 220646 - protein, 13 aa, Homo sapiens
  CDR3 for beta chain variable domain of TCR clone 110323 (TRBV10-3, TRBJ2-7)
CASKLAVNYEQYF

SEQ ID NO: 220647 - protein, 15 aa, Homo sapiens
  CDR3 for alpha chain variable domain of TCR clone 110324 (TRAV12-2, TRAJ50)
CAVNGLETSYDKVIF

SEQ ID NO: 220648 - protein, 16 aa, Homo sapiens
  CDR3 for beta chain variable domain of TCR clone 110324 (TRBV5-4, TRBJ2-3)
CASQQPGAGGADTPYF

SEQ ID NO: 220649 - protein, 14 aa, Homo sapiens
  CDR3 for alpha chain variable domain of TCR clone 110325 (TRAV1-2, TRAJ8)
CAVREDTGFQKLVF

SEQ ID NO: 220650 - protein, 13 aa, Homo sapiens
  CDR3 for beta chain variable domain of TCR clone 110325 (TRBV15, TRBJ2-7)
RATSTTGHYEQYF

SEQ ID NO: 220651 - protein, 12 aa, Homo sapiens
  CDR3 for alpha chain variable domain of TCR clone 110326 (TRAV26-1, TRAJ26)
CIVFIYGQNFVF

SEQ ID NO: 220652 - protein, 13 aa, Homo sapiens
  CDR3 for beta chain variable domain of TCR clone 110326 (TRBV27, TRBJ1-1)
CASSLSIGAEAVF

SEQ ID NO: 220653 - protein, 12 aa, Homo sapiens
  CDR3 for alpha chain variable domain of TCR clone 110327 (TRAV30, TRAJ43)
CGTEEMGNDMRF

SEQ ID NO: 220654 - protein, 11 aa, Homo sapiens
  CDR3 for beta chain variable domain of TCR clone 110327 (TRBV29-1, TRBJ2-5)
CSEDRTGTQYF

SEQ ID NO: 220655 - protein, 14 aa, Homo sapiens
  CDR3 for alpha chain variable domain of TCR clone 110328 (TRAV12-1, TRAJ12)
CVVTSGDSSYKLIF

SEQ ID NO: 220656 - protein, 14 aa, Homo sapiens
  CDR3 for beta chain variable domain of TCR clone 110328 (TRBV5-4, TRBJ1-1)
CASSLDSRRDEAFF

SEQ ID NO: 220657 - protein, 16 aa, Homo sapiens
  CDR3 for alpha chain variable domain of TCR clone 110329 (TRAV20, TRAJ16)
CAVQDKRFSDGQKLLF

SEQ ID NO: 220658 - protein, 15 aa, Homo sapiens
  CDR3 for beta chain variable domain of TCR clone 110329 (TRBV27, TRBJ1-6)
CASSFDRGLGSPLHF

SEQ ID NO: 220659 - protein, 11 aa, Homo sapiens
  CDR3 for alpha chain variable domain of TCR clone 110330 (TRAV21, TRAJ41)
CAVRSGYALKF

SEQ ID NO: 220660 - protein, 13 aa, Homo sapiens
  CDR3 for beta chain variable domain of TCR clone 110330 (TRBV7-9, TRBJ1-2)
CASSLKQNYGYTF

SEQ ID NO: 220661 - protein, 13 aa, Homo sapiens
  CDR3 for alpha chain variable domain of TCR clone 110331 (TRAV39, TRAJ58)
CAGEETSGSRLTF

SEQ ID NO: 220662 - protein, 13 aa, Homo sapiens
  CDR3 for beta chain variable domain of TCR clone 110331 (TRBV15, TRBJ2-7)
CATSTTGNYEQYF

SEQ ID NO: 220663 - protein, 16 aa, Homo sapiens
  CDR3 for alpha chain variable domain of TCR clone 110332 (TRAV16, TRAJ52)
CALSAAGGTSYGKLTF

SEQ ID NO: 220664 - protein, 13 aa, Homo sapiens
  CDR3 for beta chain variable domain of TCR clone 110332 (TRBV11-2, TRBJ2-5)
CASSRGPSETQYF

SEQ ID NO: 220665 - protein, 16 aa, Homo sapiens
  CDR3 for alpha chain variable domain of TCR clone 110333 (TRAV30, TRAJ24)
CGTEIVDAGSWGKFQF

SEQ ID NO: 220666 - protein, 16 aa, Homo sapiens
  CDR3 for beta chain variable domain of TCR clone 110333 (TRBV6-1, TRBJ2-1)
CASILRQGSSYNEQFF

SEQ ID NO: 220667 - protein, 14 aa, Homo sapiens
  CDR3 for alpha chain variable domain of TCR clone 110334 (TRAV16, TRAJ17)
CALSGRAACNKLTF

SEQ ID NO: 220668 - protein, 15 aa, Homo sapiens
  CDR3 for beta chain variable domain of TCR clone 110334 (TRBV3-1, TRBJ1-2)
CASSPTRLPEGGYTF

SEQ ID NO: 220669 - protein, 15 aa, Homo sapiens
  CDR3 for alpha chain variable domain of TCR clone 110335 (TRAV2, TRAJ22)
CAVPSRGGSARQLTF

SEQ ID NO: 220670 - protein, 17 aa, Homo sapiens
  CDR3 for beta chain variable domain of TCR clone 110335 (TRBV27, TRBJ2-1)
CASSLGGLRGSYNEQFF

SEQ ID NO: 220671 - protein, 12 aa, Homo sapiens
  CDR3 for alpha chain variable domain of TCR clone 110336 (TRAV1-1, TRAJ8)
CAGGTGFQKLVF

SEQ ID NO: 220672 - protein, 14 aa, Homo sapiens
  CDR3 for beta chain variable domain of TCR clone 110336 (TRBV5-7, TRBJ2-1)
CASSSVANYNEQFF

SEQ ID NO: 220673 - protein, 12 aa, Homo sapiens
  CDR3 for alpha chain variable domain of TCR clone 110337 (TRAV12-1, TRAJ40)
CVFYSGTYKYIF

SEQ ID NO: 220674 - protein, 16 aa, Homo sapiens
  CDR3 for beta chain variable domain of TCR clone 110337 (TRBV13, TRBJ2-2)
CASSPRTGEHTGELFF

SEQ ID NO: 220675 - protein, 12 aa, Homo sapiens
  CDR3 for alpha chain variable domain of TCR clone 110338 (TRAV13-1, TRAJ49)
CAEPNTGNQFYF

SEQ ID NO: 220676 - protein, 17 aa, Homo sapiens
  CDR3 for beta chain variable domain of TCR clone 110338 (TRBV25-1, TRBJ2-7)
CASSDARVVFSSYEQYF

SEQ ID NO: 220677 - protein, 17 aa, Homo sapiens
  CDR3 for alpha chain variable domain of TCR clone 110339 (TRAV26-1, TRAJ37)
CIVRVITVSSNTGKLIF

SEQ ID NO: 220678 - protein, 13 aa, Homo sapiens
  CDR3 for beta chain variable domain of TCR clone 110339 (TRBV2, TRBJ1-5)
CASSVGWDQPQHF

SEQ ID NO: 220679 - protein, 17 aa, Homo sapiens
  CDR3 for alpha chain variable domain of TCR clone 110340 (TRAV3, TRAJ6)
CAVRDGPRAGGSYIPTF

SEQ ID NO: 220680 - protein, 13 aa, Homo sapiens
  CDR3 for beta chain variable domain of TCR clone 110340 (TRBV10-3, TRBJ2-7)
CAIRAGGPHEQYF

SEQ ID NO: 220681 - protein, 15 aa, Homo sapiens
  CDR3 for alpha chain variable domain of TCR clone 110341 (TRAV12-3, TRAJ5)
CAMSGLGTGRRARTF

SEQ ID NO: 220682 - protein, 16 aa, Homo sapiens
  CDR3 for beta chain variable domain of TCR clone 110341 (TRBV20-1, TRBJ2-3)
CSARLHSAGAIDTQYF

SEQ ID NO: 220683 - protein, 12 aa, Homo sapiens
  CDR3 for alpha chain variable domain of TCR clone 110342 (TRAV16, TRAJ8)
CAPLGGFQKLVF

SEQ ID NO: 220684 - protein, 13 aa, Homo sapiens
  CDR3 for beta chain variable domain of TCR clone 110342 (TRBV7-9, TRBJ1-2)
CASSLKQNYGYTF

SEQ ID NO: 220685 - protein, 12 aa, Homo sapiens
  CDR3 for alpha chain variable domain of TCR clone 110343 (TRAV13-2, TRAJ23)
CAERYRGGKLIF

SEQ ID NO: 220686 - protein, 13 aa, Homo sapiens
  CDR3 for beta chain variable domain of TCR clone 110343 (TRBV19, TRBJ1-2)
CASSVPGQDGYTF

SEQ ID NO: 220687 - protein, 15 aa, Homo sapiens
  CDR3 for alpha chain variable domain of TCR clone 110344 (TRAV3, TRAJ5)
CAVRDRKTGRRALTF

SEQ ID NO: 220688 - protein, 15 aa, Homo sapiens
  CDR3 for beta chain variable domain of TCR clone 110344 (TRBV7-8, TRBJ2-1)
CASSLADSLYNQQFF

SEQ ID NO: 220689 - protein, 10 aa, Homo sapiens
  CDR3 for alpha chain variable domain of TCR clone 110345 (TRAV27, TRAJ58)
SETSGSRLTF

SEQ ID NO: 220690 - protein, 17 aa, Homo sapiens
  CDR3 for beta chain variable domain of TCR clone 110345 (TRBV11-2, TRBJ2-1)
CASSLYPPGVEYNEQFF

SEQ ID NO: 220691 - protein, 13 aa, Homo sapiens
  CDR3 for alpha chain variable domain of TCR clone 110346 (TRAV12-3, TRAJ40)
CAMSTRGTYKYIF

SEQ ID NO: 220692 - protein, 16 aa, Homo sapiens
  CDR3 for beta chain variable domain of TCR clone 110346 (TRBV20-1, TRBJ2-3)
CSGEAGLAGGQDTQYF

SEQ ID NO: 220693 - protein, 13 aa, Homo sapiens
  CDR3 for alpha chain variable domain of TCR clone 110347 (TRAV2, TRAJ15)
CAVASQAGTALIF

SEQ ID NO: 220694 - protein, 16 aa, Homo sapiens
  CDR3 for beta chain variable domain of TCR clone 110347 (TRBV27, TRBJ2-2)
CASSFRGLVRTGELFF

SEQ ID NO: 220695 - protein, 14 aa, Homo sapiens
  CDR3 for alpha chain variable domain of TCR clone 110348 (TRAV1-2, TRAJ16)
CAVNRFSDGQKLLF

SEQ ID NO: 220696 - protein, 14 aa, Homo sapiens
  CDR3 for beta chain variable domain of TCR clone 110348 (TRBV7-8, TRBJ1-1)
CASSLTTENTEAFF

SEQ ID NO: 220697 - protein, 13 aa, Homo sapiens
  CDR3 for alpha chain variable domain of TCR clone 110349 (TRAV27, TRAJ54)
CAGAGQGAQKLVF

SEQ ID NO: 220698 - protein, 15 aa, Homo sapiens
  CDR3 for beta chain variable domain of TCR clone 110349 (TRBV18, TRBJ2-6)
CASSPAYAGANVLTF

SEQ ID NO: 220699 - protein, 12 aa, Homo sapiens
  CDR3 for alpha chain variable domain of TCR clone 110350 (TRAV1-2, TRAJ33)
CAALDSNYQLIW

SEQ ID NO: 220700 - protein, 13 aa, Homo sapiens
  CDR3 for beta chain variable domain of TCR clone 110350 (TRBV15, TRBJ2-7)
CATSTTGHYEQYF

SEQ ID NO: 220701 - protein, 13 aa, Homo sapiens
  CDR3 for alpha chain variable domain of TCR clone 110351 (TRAV17, TRAJ9)
CATDGTGSLKTIF

SEQ ID NO: 220702 - protein, 17 aa, Homo sapiens
  CDR3 for beta chain variable domain of TCR clone 110351 (TRBV6-5, TRBJ2-7)
CASSYSFWGQGSYEQYF

SEQ ID NO: 220703 - protein, 16 aa, Homo sapiens
  CDR3 for alpha chain variable domain of TCR clone 110352 (TRAV12-3, TRAJ53)
CAMSPGSGGSNHKLTF

SEQ ID NO: 220704 - protein, 13 aa, Homo sapiens
  CDR3 for beta chain variable domain of TCR clone 110352 (TRBV7-2, TRBJ2-5)
CASSQTSVETQYF

SEQ ID NO: 220705 - protein, 12 aa, Homo sapiens
  CDR3 for alpha chain variable domain of TCR clone 110353 (TRAV12-3, TRAJ17)
CAMTLTGNKLTF

SEQ ID NO: 220706 - protein, 12 aa, Homo sapiens
  CDR3 for beta chain variable domain of TCR clone 110353 (TRBV7-2, TRBJ2-5)
CASSQYQETQYF

SEQ ID NO: 220707 - protein, 12 aa, Homo sapiens
  CDR3 for alpha chain variable domain of TCR clone 110354 (TRAV3, TRAJ27)
CAVRDGAGKSTF

SEQ ID NO: 220708 - protein, 13 aa, Homo sapiens
  CDR3 for beta chain variable domain of TCR clone 110354 (TRBV10-3, TRBJ1-2)
CAINADLKYGYTF

SEQ ID NO: 220709 - protein, 15 aa, Homo sapiens
  CDR3 for alpha chain variable domain of TCR clone 110355 (TRAV8-2, TRAJ44)
CVVSPNTGTASKLTF

SEQ ID NO: 220710 - protein, 12 aa, Homo sapiens
  CDR3 for beta chain variable domain of TCR clone 110355 (TRBV11-2, TRBJ2-2)
CAVPRNTGELLF

SEQ ID NO: 220711 - protein, 16 aa, Homo sapiens
  CDR3 for alpha chain variable domain of TCR clone 110356 (TRAV8-6, TRAJ58)
CAVSDHTETSGSRLTF

SEQ ID NO: 220712 - protein, 15 aa, Homo sapiens
  CDR3 for beta chain variable domain of TCR clone 110356 (TRBV27, TRBJ2-1)
CASSSGGGSSNEQFF

SEQ ID NO: 220713 - protein, 15 aa, Homo sapiens
  CDR3 for alpha chain variable domain of TCR clone 110357 (TRAV8-2, TRAJ44)
EAAEYFDGTASKLTF

SEQ ID NO: 220714 - protein, 14 aa, Homo sapiens
  CDR3 for beta chain variable domain of TCR clone 110357 (TRBV7-8, TRBJ2-3)
CASSLDRGTDTQYF

SEQ ID NO: 220715 - protein, 17 aa, Homo sapiens
  CDR3 for alpha chain variable domain of TCR clone 110358 (TRAV8-2, )
CVISRTLTLPCTSCETL

SEQ ID NO: 220716 - protein, 15 aa, Homo sapiens
  CDR3 for beta chain variable domain of TCR clone 110358 (TRBV27, TRBJ2-3)
CASSLGLAATDTQYF

SEQ ID NO: 220717 - protein, 12 aa, Homo sapiens
  CDR3 for alpha chain variable domain of TCR clone 110359 (TRAV12-3, TRAJ34)
CAMGYNTDKLIF

SEQ ID NO: 220718 - protein, 14 aa, Homo sapiens
  CDR3 for beta chain variable domain of TCR clone 110359 (TRBV4-1, TRBJ2-2)
CASSQAVNAGELFF

SEQ ID NO: 220719 - protein, 17 aa, Homo sapiens
  CDR3 for alpha chain variable domain of TCR clone 110360 (TRAV26-1, TRAJ53)
CIVKVDDSGGSNYKLTF

SEQ ID NO: 220720 - protein, 15 aa, Homo sapiens
  CDR3 for beta chain variable domain of TCR clone 110360 (TRBV20-1, TRBJ2-7)
CSARVPAAYFYEQYF

SEQ ID NO: 220721 - protein, 14 aa, Homo sapiens
  CDR3 for alpha chain variable domain of TCR clone 110361 (TRAV12-2, TRAJ13)
CAVKKTGGYQKVTF

SEQ ID NO: 220722 - protein, 16 aa, Homo sapiens
  CDR3 for beta chain variable domain of TCR clone 110361 (TRBV20-1, TRBJ2-1)
CSARDLKQGMNNEQFF

SEQ ID NO: 220723 - protein, 14 aa, Homo sapiens
  CDR3 for alpha chain variable domain of TCR clone 110362 (TRAV17, TRAJ12)
CATDEKDSSYKLIF

SEQ ID NO: 220724 - protein, 16 aa, Homo sapiens
  CDR3 for beta chain variable domain of TCR clone 110362 (TRBV11-2, TRBJ2-1)
CASSPRLAGVYNERFF

SEQ ID NO: 220725 - protein, 16 aa, Homo sapiens
  CDR3 for alpha chain variable domain of TCR clone 110363 (TRAV3, TRAJ17)
CAVRARRGGRSCRQQA

SEQ ID NO: 220726 - protein, 14 aa, Homo sapiens
  CDR3 for beta chain variable domain of TCR clone 110363 (TRBV4-1, TRBJ2-2)
CASSQAVNTGELFF

SEQ ID NO: 220727 - protein, 15 aa, Homo sapiens
  CDR3 for alpha chain variable domain of TCR clone 110364 (TRAV29/DV5, TRAJ29)
CAASERSSGNTPLVF

SEQ ID NO: 220728 - protein, 17 aa, Homo sapiens
  CDR3 for beta chain variable domain of TCR clone 110364 (TRBV4-1, TRAJ28)
CASSQEGPRGVEEKLFF

SEQ ID NO: 220729 - protein, 14 aa, Homo sapiens
  CDR3 for alpha chain variable domain of TCR clone 110365 (TRAV13-1, TRAJ40)
CAASMTSGTYKYIF

SEQ ID NO: 220730 - protein, 16 aa, Homo sapiens
  CDR3 for beta chain variable domain of TCR clone 110365 (TRBV19, TRBJ2-2)
CASRSPGTGATGELFF

SEQ ID NO: 220731 - protein, 12 aa, Homo sapiens
  CDR3 for alpha chain variable domain of TCR clone 110366 (TRAV12-3, TRAJ20)
CAMVRGDYKLSF

SEQ ID NO: 220732 - protein, 14 aa, Homo sapiens
  CDR3 for beta chain variable domain of TCR clone 110366 (TRBV20-1, TRBJ2-7)
CSAISREAPYEQYF

SEQ ID NO: 220733 - protein, 11 aa, Homo sapiens
  CDR3 for alpha chain variable domain of TCR clone 110367 (TRAV21, TRAJ11)
CAVNGYSTLTF

SEQ ID NO: 220734 - protein, 11 aa, Homo sapiens
  CDR3 for beta chain variable domain of TCR clone 110367 (TRBV19, TRBJ1-1)
CASSIGSEAFF

SEQ ID NO: 220735 - protein, 17 aa, Homo sapiens
  CDR3 for alpha chain variable domain of TCR clone 110368 (TRAV26-2, TRAJ42)
CILRDVGYGGSQGNLIF

SEQ ID NO: 220736 - protein, 13 aa, Homo sapiens
  CDR3 for beta chain variable domain of TCR clone 110368 (TRBV10-3, TRBJ2-7)
CASKLAVNYEQYF

SEQ ID NO: 220737 - protein, 15 aa, Homo sapiens
  CDR3 for alpha chain variable domain of TCR clone 110369 (TRAV8-4, TRAJ13)
CAVSDWSGGYQKVTF

SEQ ID NO: 220738 - protein, 15 aa, Homo sapiens
  CDR3 for beta chain variable domain of TCR clone 110369 (TRBV9, TRBJ1-6)
CASSVAGTGDSPLHF

SEQ ID NO: 220739 - protein, 13 aa, Homo sapiens
  CDR3 for alpha chain variable domain of TCR clone 110370 (TRAV8-3, TRAJ44)
CAVVPGTASKITF

SEQ ID NO: 220740 - protein, 14 aa, Homo sapiens
  CDR3 for beta chain variable domain of TCR clone 110370 (TRBV11-2, TRBJ2-3)
CASSRLARTDTQYF

SEQ ID NO: 220741 - protein, 15 aa, Homo sapiens
  CDR3 for alpha chain variable domain of TCR clone 110371 (TRAV35, TRAJ50)
CAGQLRKTSYDKVIF

SEQ ID NO: 220742 - protein, 12 aa, Homo sapiens
  CDR3 for beta chain variable domain of TCR clone 110371 (TRBV5-1, TRBJ2-5)
CASSLGLETLYF

SEQ ID NO: 220743 - protein, 12 aa, Homo sapiens
  CDR3 for alpha chain variable domain of TCR clone 110372 (TRAV13-1, TRAJ21)
CAAKEGFNKFYF

SEQ ID NO: 220744 - protein, 16 aa, Homo sapiens
  CDR3 for beta chain variable domain of TCR clone 110372 (TRBV18, TRBJ2-3)
CASSPRTSGGANTQYF

SEQ ID NO: 220745 - protein, 20 aa, Homo sapiens
  CDR3 for alpha chain variable domain of TCR clone 110373 (TRAV12-3, TRAJ41)
SLFIRDAQPSDSATPEALNF

SEQ ID NO: 220746 - protein, 15 aa, Homo sapiens
  CDR3 for beta chain variable domain of TCR clone 110373 (TRBV5-1, TRBJ2-7)
CASSLDLTSSYEQYF

SEQ ID NO: 220747 - protein, 15 aa, Homo sapiens
  CDR3 for alpha chain variable domain of TCR clone 110374 (TRAV26-1, TRAJ29)
CIVRVEGSGKTHLVF

SEQ ID NO: 220748 - protein, 15 aa, Homo sapiens
  CDR3 for beta chain variable domain of TCR clone 110374 (TRBV7-9, TRBJ1-5)
CASSQGHQPNQPQHF

SEQ ID NO: 220749 - protein, 13 aa, Homo sapiens
  CDR3 for alpha chain variable domain of TCR clone 110375 (TRAV1-2, TRAJ33)
CAVSEDSNYQLIW

SEQ ID NO: 220750 - protein, 16 aa, Homo sapiens
  CDR3 for beta chain variable domain of TCR clone 110375 (TRBV28, TRBJ1-5)
CASSFRGGYSNQPQHF

SEQ ID NO: 220751 - protein, 15 aa, Homo sapiens
  CDR3 for alpha chain variable domain of TCR clone 110376 (TRAV8-2, TRAJ40)
CVVLGTTLGTYKYIF

SEQ ID NO: 220752 - protein, 16 aa, Homo sapiens
  CDR3 for beta chain variable domain of TCR clone 110376 (TRBV7-3, TRBJ2-1)
CASSLEGYRSYNEQFF

SEQ ID NO: 220753 - protein, 16 aa, Homo sapiens
  CDR3 for alpha chain variable domain of TCR clone 110377 (TRAV3, TRAJ10)
CAVRDMNAGGGNKLTF

SEQ ID NO: 220754 - protein, 16 aa, Homo sapiens
  CDR3 for beta chain variable domain of TCR clone 110377 (TRBV28, TRBJ2-5)
CASSFSPAGGWETQYF

SEQ ID NO: 220755 - protein, 15 aa, Homo sapiens
  CDR3 for alpha chain variable domain of TCR clone 110378 (TRAV35, TRAJ58)
CAGRRQETSGSRLTF

SEQ ID NO: 220756 - protein, 15 aa, Homo sapiens
  CDR3 for beta chain variable domain of TCR clone 110378 (TRBV12-4, TRBJ2-5)
CASSPPTGLQETQYF

SEQ ID NO: 220757 - protein, 14 aa, Homo sapiens
  CDR3 for alpha chain variable domain of TCR clone 110379 (TRAV12-3, TRAJ10)
SNLPLTGGGNKLTF

SEQ ID NO: 220758 - protein, 13 aa, Homo sapiens
  CDR3 for beta chain variable domain of TCR clone 110379 (TRBV7-7, TRBJ2-5)
CASSRSGQETQYF

SEQ ID NO: 220759 - protein, 14 aa, Homo sapiens
  CDR3 for alpha chain variable domain of TCR clone 110380 (TRAV13-1, TRAJ44)
CAAEATGTASKLTL

SEQ ID NO: 220760 - protein, 17 aa, Homo sapiens
  CDR3 for beta chain variable domain of TCR clone 110380 (TRBV7-3, TRBJ2-3)
CASSLMKRMRGADTQYF

SEQ ID NO: 220761 - protein, 15 aa, Homo sapiens
  CDR3 for alpha chain variable domain of TCR clone 110381 (TRAV6, TRAJ21)
CAGLDPTSTNFTLDL

SEQ ID NO: 220762 - protein, 19 aa, Homo sapiens
  CDR3 for beta chain variable domain of TCR clone 110381 (TRBV23-1, TRBJ2-3)
TVSLRQQSRLAGVPDTQYF

SEQ ID NO: 220763 - protein, 16 aa, Homo sapiens
  CDR3 for alpha chain variable domain of TCR clone 110382 (TRAV3, TRAJ3)
CAVRDRAKSSASKIIF

SEQ ID NO: 220764 - protein, 16 aa, Homo sapiens
  CDR3 for beta chain variable domain of TCR clone 110382 (TRBV20-1, TRBJ2-4)
CGATSLAELAKNIQYF

SEQ ID NO: 220765 - protein, 11 aa, Homo sapiens
  CDR3 for alpha chain variable domain of TCR clone 110383 (TRAV8-4, TRAJ26)
CAGGEGQNFVF

SEQ ID NO: 220766 - protein, 17 aa, Homo sapiens
  CDR3 for beta chain variable domain of TCR clone 110383 (TRBV7-9, TRBJ2-3)
CASSPTVARDLTDTQYF

SEQ ID NO: 220767 - protein, 17 aa, Homo sapiens
  CDR3 for alpha chain variable domain of TCR clone 110384 (TRAV3, TRAJ38)
CAVSDCLNAGNNRKLIW

SEQ ID NO: 220768 - protein, 15 aa, Homo sapiens
  CDR3 for beta chain variable domain of TCR clone 110384 (TRBV27, TRBJ2-1)
CASSNGGGSSNEQFF

SEQ ID NO: 220769 - protein, 15 aa, Homo sapiens
  CDR3 for alpha chain variable domain of TCR clone 110385 (TRAV23/DV6, TRAJ30)
CAASSQESRDDKINF

SEQ ID NO: 220770 - protein, 17 aa, Homo sapiens
  CDR3 for beta chain variable domain of TCR clone 110385 (TRBV4-3, TRBJ2-1)
CASSQFSSGRASGEQFF

SEQ ID NO: 220771 - protein, 16 aa, Homo sapiens
  CDR3 for alpha chain variable domain of TCR clone 110386 (TRAV12-3, TRAJ53)
CAMSPGSGGSNYKLTF

SEQ ID NO: 220772 - protein, 15 aa, Homo sapiens
  CDR3 for beta chain variable domain of TCR clone 110386 (TRBV27, TRBJ2-5)
CASSLYPRGGETQYF

SEQ ID NO: 220773 - protein, 14 aa, Homo sapiens
  CDR3 for alpha chain variable domain of TCR clone 110387 (TRAV23/DV6, TRAJ37)
CAASTSSSTGKLIF

SEQ ID NO: 220774 - protein, 12 aa, Homo sapiens
  CDR3 for beta chain variable domain of TCR clone 110387 (TRBV27, TRBJ2-2)
CASKLFTGELFF

SEQ ID NO: 220775 - protein, 16 aa, Homo sapiens
  CDR3 for alpha chain variable domain of TCR clone 110388 (TRAV3, TRAJ37)
CAVRGKGSGNTGKLIF

SEQ ID NO: 220776 - protein, 13 aa, Homo sapiens
  CDR3 for beta chain variable domain of TCR clone 110388 (TRBV14, TRBJ2-7)
CASSQDCRYEQYF

SEQ ID NO: 220777 - protein, 14 aa, Homo sapiens
  CDR3 for alpha chain variable domain of TCR clone 110389 (TRAV16, TRAJ39)
CALSKNNAGNMLTF

SEQ ID NO: 220778 - protein, 16 aa, Homo sapiens
  CDR3 for beta chain variable domain of TCR clone 110389 (TRBV29-1, TRBJ2-7)
CSVEDAEDGTAYEQYF

SEQ ID NO: 220779 - protein, 16 aa, Homo sapiens
  CDR3 for alpha chain variable domain of TCR clone 110390 (TRAV21, TRAJ17)
CAVRPGEEAAGNKLTF

SEQ ID NO: 220780 - protein, 14 aa, Homo sapiens
  CDR3 for beta chain variable domain of TCR clone 110390 (TRBV12-4, TRBJ1-1)
CASTWTGHDTEAFF

SEQ ID NO: 220781 - protein, 14 aa, Homo sapiens
  CDR3 for alpha chain variable domain of TCR clone 110391 (TRAV12-1, TRAJ12)
CVVTWMDSSYKLIF

SEQ ID NO: 220782 - protein, 15 aa, Homo sapiens
  CDR3 for beta chain variable domain of TCR clone 110391 (TRBV20-1, TRBJ2-7)
CSARDRVSGMDEQYF

SEQ ID NO: 220783 - protein, 16 aa, Homo sapiens
  CDR3 for alpha chain variable domain of TCR clone 110392 (TRAV3, TRAJ10)
CAVRDMRAGGGNKLTF

SEQ ID NO: 220784 - protein, 18 aa, Homo sapiens
  CDR3 for beta chain variable domain of TCR clone 110392 (TRBV20-1, TRBJ2-3)
CSASGLAGGPGTTDTQYF

SEQ ID NO: 220785 - protein, 15 aa, Homo sapiens
  CDR3 for alpha chain variable domain of TCR clone 110393 (TRAV17, TRAJ23)
CATDAEDNQGGKLIF

SEQ ID NO: 220786 - protein, 12 aa, Homo sapiens
  CDR3 for beta chain variable domain of TCR clone 110393 (TRBV2, TRBJ2-1)
CAKREGYTEQFF

SEQ ID NO: 220787 - protein, 11 aa, Homo sapiens
  CDR3 for alpha chain variable domain of TCR clone 110394 (TRAV2, TRAJ37)
CAVDNTGKLIF

SEQ ID NO: 220788 - protein, 14 aa, Homo sapiens
  CDR3 for beta chain variable domain of TCR clone 110394 (TRBV20-1, TRBJ2-1)
CSATLAGGPGEQFF

SEQ ID NO: 220789 - protein, 15 aa, Homo sapiens
  CDR3 for alpha chain variable domain of TCR clone 110395 (TRAV21, TRAJ24)
CAARSSTDSWGKLQF

SEQ ID NO: 220790 - protein, 15 aa, Homo sapiens
  CDR3 for beta chain variable domain of TCR clone 110395 (TRBV11-2, TRBJ2-2)
CASSSDRVNAGELFF

SEQ ID NO: 220791 - protein, 14 aa, Homo sapiens
  CDR3 for alpha chain variable domain of TCR clone 110396 (TRAV17, TRAJ6)
CATPAMGGSYIPTF

SEQ ID NO: 220792 - protein, 13 aa, Homo sapiens
  CDR3 for beta chain variable domain of TCR clone 110396 (TRBV19, TRBJ1-2)
CASSVPGQDGYTF

SEQ ID NO: 220793 - protein, 13 aa, Homo sapiens
  CDR3 for alpha chain variable domain of TCR clone 110397 (TRAV36/DV7, TRAJ49)
CAVEANTGNQFYF

SEQ ID NO: 220794 - protein, 14 aa, Homo sapiens
  CDR3 for beta chain variable domain of TCR clone 110397 (TRBV20-1, TRBJ2-5)
CSASAGRAAETQYF

SEQ ID NO: 220795 - protein, 12 aa, Homo sapiens
  CDR3 for alpha chain variable domain of TCR clone 110398 (TRAV12-3, TRAJ17)
CAMTLTGNKLTF

SEQ ID NO: 220796 - protein, 13 aa, Homo sapiens
  CDR3 for beta chain variable domain of TCR clone 110398 (TRBV7-3, TRBJ1-1)
CAGSQDWGAEAFF

SEQ ID NO: 220797 - protein, 16 aa, Homo sapiens
  CDR3 for alpha chain variable domain of TCR clone 110399 (TRAV26-1, TRAJ53)
CIVRVAMGGSNSKLTF

SEQ ID NO: 220798 - protein, 12 aa, Homo sapiens
  CDR3 for beta chain variable domain of TCR clone 110399 (TRBV7-9, TRBJ1-5)
CASSPQGQPQHF

SEQ ID NO: 220799 - protein, 15 aa, Homo sapiens
  CDR3 for alpha chain variable domain of TCR clone 110400 (TRAV17, TRAJ22)
CATVAPSGSARQLTF

SEQ ID NO: 220800 - protein, 14 aa, Homo sapiens
  CDR3 for beta chain variable domain of TCR clone 110400 (TRBV5-4, TRBJ1-1)
CASSLDSRRDEAFF

SEQ ID NO: 220801 - protein, 10 aa, Homo sapiens
  CDR3 for alpha chain variable domain of TCR clone 110401 (TRAV13-1, TRAJ41)
CAASGPLRTQ

SEQ ID NO: 220802 - protein, 16 aa, Homo sapiens
  CDR3 for beta chain variable domain of TCR clone 110401 (TRBV18, TRBJ2-3)
CASSPPAGGPRKYAVF

SEQ ID NO: 220803 - protein, 13 aa, Homo sapiens
  CDR3 for alpha chain variable domain of TCR clone 110402 (TRAV16, TRAJ22)
SAMLAGSARQLTF

SEQ ID NO: 220804 - protein, 14 aa, Homo sapiens
  CDR3 for beta chain variable domain of TCR clone 110402 (TRBV25-1, TRBJ1-1)
CASTHLGGNTEAFF

SEQ ID NO: 220805 - protein, 14 aa, Homo sapiens
  CDR3 for alpha chain variable domain of TCR clone 110403 (TRAV26-1, TRAJ34)
CIVRVAYNTDKPIF

SEQ ID NO: 220806 - protein, 14 aa, Homo sapiens
  CDR3 for beta chain variable domain of TCR clone 110403 (TRBV12-5, TRBJ2-5)
CASGSRTHQETQYF

SEQ ID NO: 220807 - protein, 16 aa, Homo sapiens
  CDR3 for alpha chain variable domain of TCR clone 110404 (TRAV30, TRAJ24)
CGTEIVDADSWGKFQF

SEQ ID NO: 220808 - protein, 19 aa, Homo sapiens
  CDR3 for beta chain variable domain of TCR clone 110404 (TRBV7-2, TRBJ2-3)
CASSFPSRNWGGGTDTQYF

SEQ ID NO: 220809 - protein, 14 aa, Homo sapiens
  CDR3 for alpha chain variable domain of TCR clone 110405 (TRAV12-2, TRAJ6)
CASKWGGGSYIPTF

SEQ ID NO: 220810 - protein, 14 aa, Homo sapiens
  CDR3 for beta chain variable domain of TCR clone 110405 (TRBV25-1, TRBJ1-1)
CASTHLGGNTEAFF

SEQ ID NO: 220811 - protein, 13 aa, Homo sapiens
  CDR3 for alpha chain variable domain of TCR clone 110406 (TRAV41, TRAJ48)
SVPVNFGNEKLTF

SEQ ID NO: 220812 - protein, 15 aa, Homo sapiens
  CDR3 for beta chain variable domain of TCR clone 110406 (TRBV7-2, TRBJ2-1)
CASTHGTGIYNEQFF

SEQ ID NO: 220813 - protein, 14 aa, Homo sapiens
  CDR3 for alpha chain variable domain of TCR clone 110407 (TRAV26-1, TRAJ49)
CIVRLTNTGNQFYF

SEQ ID NO: 220814 - protein, 13 aa, Homo sapiens
  CDR3 for beta chain variable domain of TCR clone 110407 (TRBV4-1, TRBJ2-7)
CASSQGQAHEQYF

SEQ ID NO: 220815 - protein, 12 aa, Homo sapiens
  CDR3 for alpha chain variable domain of TCR clone 110408 (TRAV12-3, TRAJ17)
CAMTLTGNKLTF

SEQ ID NO: 220816 - protein, 13 aa, Homo sapiens
  CDR3 for beta chain variable domain of TCR clone 110408 (TRBV5-1, TRBJ1-2)
CASSSTGVYGYIF

SEQ ID NO: 220817 - protein, 13 aa, Homo sapiens
  CDR3 for alpha chain variable domain of TCR clone 110409 (TRAV8-2, TRAJ47)
CVVSEREGNRLVF

SEQ ID NO: 220818 - protein, 15 aa, Homo sapiens
  CDR3 for beta chain variable domain of TCR clone 110409 (TRBV6-3, TRBJ2-7)
CASSSPGTVFYEQYF

SEQ ID NO: 220819 - protein, 15 aa, Homo sapiens
  CDR3 for alpha chain variable domain of TCR clone 110410 (TRAV27, TRAJ38)
CAARRNAGNNRKLIW

SEQ ID NO: 220820 - protein, 13 aa, Homo sapiens
  CDR3 for beta chain variable domain of TCR clone 110410 (TRBV19, TRBJ2-1)
CASSMYRVNEQFF

SEQ ID NO: 220821 - protein, 14 aa, Homo sapiens
  CDR3 for alpha chain variable domain of TCR clone 110411 (TRAV12-2, TRAJ4)
CVVSPSGGYNKLIF

SEQ ID NO: 220822 - protein, 15 aa, Homo sapiens
  CDR3 for beta chain variable domain of TCR clone 110411 (TRBV4-1, TRBJ1-4)
CASSDTGGTNEKLFF

SEQ ID NO: 220823 - protein, 16 aa, Homo sapiens
  CDR3 for alpha chain variable domain of TCR clone 110412 (TRAV8-6, TRAJ4)
CAVSPTFSGGYNKLIF

SEQ ID NO: 220824 - protein, 14 aa, Homo sapiens
  CDR3 for beta chain variable domain of TCR clone 110412 (TRBV29-1, TRBJ2-2)
CSVVTSGAPGELFS

SEQ ID NO: 220825 - protein, 15 aa, Homo sapiens
  CDR3 for alpha chain variable domain of TCR clone 110413 (TRAV21, TRAJ52)
CAVRGGGTSYGQLTF

SEQ ID NO: 220826 - protein, 15 aa, Homo sapiens
  CDR3 for beta chain variable domain of TCR clone 110413 (TRBV18, TRBJ1-5)
CASSPSDRSNQPQHF

SEQ ID NO: 220827 - protein, 15 aa, Homo sapiens
  CDR3 for alpha chain variable domain of TCR clone 110414 (TRAV13-1, TRAJ44)
CAASRGGGTASKLTL

SEQ ID NO: 220828 - protein, 16 aa, Homo sapiens
  CDR3 for beta chain variable domain of TCR clone 110414 (TRBV29-1, TRBJ2-7)
CSVEVVGTSGSYEQYF

SEQ ID NO: 220829 - protein, 12 aa, Homo sapiens
  CDR3 for alpha chain variable domain of TCR clone 110415 (TRAV13-1, TRAJ21)
CAAKEGFNKFYF

SEQ ID NO: 220830 - protein, 16 aa, Homo sapiens
  CDR3 for beta chain variable domain of TCR clone 110415 (TRBV18, TRBJ1-1)
CASSPGVGGRGGEAFF

SEQ ID NO: 220831 - protein, 14 aa, Homo sapiens
  CDR3 for alpha chain variable domain of TCR clone 110416 (TRAV12-2, TRAJ33)
CAVKRARSNYQLIW

SEQ ID NO: 220832 - protein, 12 aa, Homo sapiens
  CDR3 for beta chain variable domain of TCR clone 110416 (TRBV24-1, TRBJ2-3)
CATSDSADTQYF

SEQ ID NO: 220833 - protein, 14 aa, Homo sapiens
  CDR3 for alpha chain variable domain of TCR clone 110417 (TRAV12-3, TRAJ15)
CAMIPPQAGTSLIF

SEQ ID NO: 220834 - protein, 12 aa, Homo sapiens
  CDR3 for beta chain variable domain of TCR clone 110417 (TRBV11-2, TRBJ2-2)
CASSLGGGELFF

SEQ ID NO: 220835 - protein, 13 aa, Homo sapiens
  CDR3 for alpha chain variable domain of TCR clone 110418 (TRAV13-1, TRAJ49)
CAAMLYTGNQLYF

SEQ ID NO: 220836 - protein, 15 aa, Homo sapiens
  CDR3 for beta chain variable domain of TCR clone 110418 (TRBV12-4, TRBJ1-5)
CASTRGSGFGQPQHF

SEQ ID NO: 220837 - protein, 14 aa, Homo sapiens
  CDR3 for alpha chain variable domain of TCR clone 110419 (TRAV9-2, TRAJ39)
CALYIYNAGNMLTF

SEQ ID NO: 220838 - protein, 13 aa, Homo sapiens
  CDR3 for beta chain variable domain of TCR clone 110419 (TRBV15, TRBJ2-5)
CATSQIGEETQYF

SEQ ID NO: 220839 - protein, 10 aa, Homo sapiens
  CDR3 for alpha chain variable domain of TCR clone 110420 (TRAV25, TRAJ17)
CQAAGNKLTF

SEQ ID NO: 220840 - protein, 16 aa, Homo sapiens
  CDR3 for beta chain variable domain of TCR clone 110420 (TRBV7-9, TRBJ1-2)
CASSLGFSSGEDGYTF

SEQ ID NO: 220841 - protein, 12 aa, Homo sapiens
  CDR3 for alpha chain variable domain of TCR clone 110421 (TRAV21, TRAJ23)
CAVMLQGGKLIF

SEQ ID NO: 220842 - protein, 13 aa, Homo sapiens
  CDR3 for beta chain variable domain of TCR clone 110421 (TRBV6-6, TRBJ2-1)
CASSLHQGDEQFF

SEQ ID NO: 220843 - protein, 15 aa, Homo sapiens
  CDR3 for alpha chain variable domain of TCR clone 110422 (TRAV3, TRAJ42)
CAVRGGTGSQGNLIF

SEQ ID NO: 220844 - protein, 15 aa, Homo sapiens
  CDR3 for beta chain variable domain of TCR clone 110422 (TRBV19, TRBJ1-1)
CASTSGQIQNTEAFF

SEQ ID NO: 220845 - protein, 14 aa, Homo sapiens
  CDR3 for alpha chain variable domain of TCR clone 110423 (TRAV8-4, TRAJ34)
CAVSDPGDTDKLIF

SEQ ID NO: 220846 - protein, 16 aa, Homo sapiens
  CDR3 for beta chain variable domain of TCR clone 110423 (TRBV19, TRBJ2-1)
CASSKAGPSSYNEQFF

SEQ ID NO: 220847 - protein, 13 aa, Homo sapiens
  CDR3 for alpha chain variable domain of TCR clone 110424 (TRAV12-2, TRAJ30)
CAVNLNRDDKIIF

SEQ ID NO: 220848 - protein, 14 aa, Homo sapiens
  CDR3 for beta chain variable domain of TCR clone 110424 (TRBV25-1, TRBJ1-1)
CASTHLGGNTEAFF

SEQ ID NO: 220849 - protein, 13 aa, Homo sapiens
  CDR3 for alpha chain variable domain of TCR clone 110425 (TRAV21, TRAJ20)
CAVGLRVDYKLSF

SEQ ID NO: 220850 - protein, 13 aa, Homo sapiens
  CDR3 for beta chain variable domain of TCR clone 110425 (TRBV28, TRBJ2-7)
CASKAGGVYEQYF

SEQ ID NO: 220851 - protein, 17 aa, Homo sapiens
  CDR3 for alpha chain variable domain of TCR clone 110426 (TRAV38-2/DV8, TRAJ38)
CAYRSARGAGSNRKLIW

SEQ ID NO: 220852 - protein, 13 aa, Homo sapiens
  CDR3 for beta chain variable domain of TCR clone 110426 (TRBV6-5, TRBJ2-1)
CASRGRVGNEQFF

SEQ ID NO: 220853 - protein, 12 aa, Homo sapiens
  CDR3 for alpha chain variable domain of TCR clone 110427 (TRAV8-3, TRAJ20)
CAVDFNGYKLSF

SEQ ID NO: 220854 - protein, 17 aa, Homo sapiens
  CDR3 for beta chain variable domain of TCR clone 110427 (TRBV7-8, TRBJ2-6)
CASSAGTGGAGANVLTF

SEQ ID NO: 220855 - protein, 14 aa, Homo sapiens
  CDR3 for alpha chain variable domain of TCR clone 110428 (TRAV26-1, TRAJ21)
CIVRVVYNFNKFYF

SEQ ID NO: 220856 - protein, 16 aa, Homo sapiens
  CDR3 for beta chain variable domain of TCR clone 110428 (TRBV13, TRBJ2-2)
CASSPRTGEHTGELFF

SEQ ID NO: 220857 - protein, 15 aa, Homo sapiens
  CDR3 for alpha chain variable domain of TCR clone 110429 (TRAV8-4, TRAJ47)
CAVSDPEEYGNKLVF

SEQ ID NO: 220858 - protein, 13 aa, Homo sapiens
  CDR3 for beta chain variable domain of TCR clone 110429 (TRBV7-9, TRBJ1-2)
CASSLKQNYGYTF

SEQ ID NO: 220859 - protein, 12 aa, Homo sapiens
  CDR3 for alpha chain variable domain of TCR clone 110430 (TRAV30, TRAJ43)
CCTEERGNDMRF

SEQ ID NO: 220860 - protein, 13 aa, Homo sapiens
  CDR3 for beta chain variable domain of TCR clone 110430 (TRBV27, TRBJ2-7)
CASSFSQGYEQYF

SEQ ID NO: 220861 - protein, 12 aa, Homo sapiens
  CDR3 for alpha chain variable domain of TCR clone 110431 (TRAV12-3, TRAJ20)
CAMVRGDYKHSF

SEQ ID NO: 220862 - protein, 14 aa, Homo sapiens
  CDR3 for beta chain variable domain of TCR clone 110431 (TRBV5-5, TRBJ1-5)
CASSGQGVDQPQHF

SEQ ID NO: 220863 - protein, 14 aa, Homo sapiens
  CDR3 for alpha chain variable domain of TCR clone 110432 (TRAV12-2, TRAJ45)
CAVYSGGGADGLTF

SEQ ID NO: 220864 - protein, 14 aa, Homo sapiens
  CDR3 for beta chain variable domain of TCR clone 110432 (TRBV6-5, TRBJ1-2)
CASTRGGGSDGDTF

SEQ ID NO: 220865 - protein, 15 aa, Homo sapiens
  CDR3 for alpha chain variable domain of TCR clone 110433 (TRAV8-3, TRAJ23)
CAVGDRYNQGGKLIF

SEQ ID NO: 220866 - protein, 22 aa, Homo sapiens
  CDR3 for beta chain variable domain of TCR clone 110433 (TRBV29-1, TRBJ2-5)
TVSNTSPEDSSIYLCSAGTQYF

SEQ ID NO: 220867 - protein, 16 aa, Homo sapiens
  CDR3 for alpha chain variable domain of TCR clone 110434 (TRAV27, TRAJ52)
CAGPSAGGTSYGKLTF

SEQ ID NO: 220868 - protein, 16 aa, Homo sapiens
  CDR3 for beta chain variable domain of TCR clone 110434 (TRBV7-9, TRBJ2-1)
CASSLGGAVGDNEQFF

SEQ ID NO: 220869 - protein, 11 aa, Homo sapiens
  CDR3 for alpha chain variable domain of TCR clone 110435 (TRAV3, TRAJ21)
CAVGNFNKFYF

SEQ ID NO: 220870 - protein, 13 aa, Homo sapiens
  CDR3 for beta chain variable domain of TCR clone 110435 (TRBV12-4, TRBJ1-5)
CASSPDRAQPQHF

SEQ ID NO: 220871 - protein, 16 aa, Homo sapiens
  CDR3 for alpha chain variable domain of TCR clone 110436 (TRAV8-6, TRAJ58)
CAVSDHTETSGSRLTL

SEQ ID NO: 220872 - protein, 15 aa, Homo sapiens
  CDR3 for beta chain variable domain of TCR clone 110436 (TRBV27, TRBJ2-1)
CASSNGGGSSNEQFF

SEQ ID NO: 220873 - protein, 14 aa, Homo sapiens
  CDR3 for alpha chain variable domain of TCR clone 110437 (TRAV1-2, TRAJ8)
CAVREDTGFQKLVF

SEQ ID NO: 220874 - protein, 19 aa, Homo sapiens
  CDR3 for beta chain variable domain of TCR clone 110437 (TRBV25-1, TRBJ2-2)
CAILVCRVDRGRKTGELFF

SEQ ID NO: 220875 - protein, 14 aa, Homo sapiens
  CDR3 for alpha chain variable domain of TCR clone 110438 (TRAV13-1, TRAJ35)
CAASKGGLGNVLHC

SEQ ID NO: 220876 - protein, 16 aa, Homo sapiens
  CDR3 for beta chain variable domain of TCR clone 110438 (TRBV2, TRBJ1-4)
CASNLLQGATNEKLFF

SEQ ID NO: 220877 - protein, 13 aa, Homo sapiens
  CDR3 for alpha chain variable domain of TCR clone 110439 (TRAV3, TRAJ3)
CAVADSSASKIIF

SEQ ID NO: 220878 - protein, 16 aa, Homo sapiens
  CDR3 for beta chain variable domain of TCR clone 110439 (TRBV5-1, TRBJ2-3)
CASSWGLAVYTDTQYF

SEQ ID NO: 220879 - protein, 15 aa, Homo sapiens
  CDR3 for alpha chain variable domain of TCR clone 110440 (TRAV3, TRAJ3)
CAVRDRDSSASKIIF

SEQ ID NO: 220880 - protein, 18 aa, Homo sapiens
  CDR3 for beta chain variable domain of TCR clone 110440 (TRBV25-1, TRBJ1-2)
CASSGRQNGQGLIFGYTF

SEQ ID NO: 220881 - protein, 15 aa, Homo sapiens
  CDR3 for alpha chain variable domain of TCR clone 110441 (TRAV23/DV6, TRAJ18)
CAARYRGSTLGRLYF

SEQ ID NO: 220882 - protein, 17 aa, Homo sapiens
  CDR3 for beta chain variable domain of TCR clone 110441 (TRBV7-7, TRBJ2-2)
CASSSVPAGGEIGELFF

SEQ ID NO: 220883 - protein, 18 aa, Homo sapiens
  CDR3 for alpha chain variable domain of TCR clone 110442 (TRAV21, TRAJ52)
CAVRPSPAGGTSYGRLTF

SEQ ID NO: 220884 - protein, 15 aa, Homo sapiens
  CDR3 for beta chain variable domain of TCR clone 110442 (TRBV20-1, TRBJ1-5)
CSACKNGQRNQPQHF

SEQ ID NO: 220885 - protein, 14 aa, Homo sapiens
  CDR3 for alpha chain variable domain of TCR clone 110443 (TRAV26-1, TRAJ38)
CIVVGAGNNRKLIW

SEQ ID NO: 220886 - protein, 12 aa, Homo sapiens
  CDR3 for beta chain variable domain of TCR clone 110443 (TRBV5-1, TRBJ2-5)
CASSWDQETQYF

SEQ ID NO: 220887 - protein, 12 aa, Homo sapiens
  CDR3 for alpha chain variable domain of TCR clone 110444 (TRAV2, TRAJ31)
CAVEDTNARLMF

SEQ ID NO: 220888 - protein, 16 aa, Homo sapiens
  CDR3 for beta chain variable domain of TCR clone 110444 (TRBV10-3, TRBJ2-1)
CAISGVGDGGGGEQFF

SEQ ID NO: 220889 - protein, 11 aa, Homo sapiens
  CDR3 for alpha chain variable domain of TCR clone 110445 (TRAV16, TRAJ33)
CALHSNYQLIW

SEQ ID NO: 220890 - protein, 15 aa, Homo sapiens
  CDR3 for beta chain variable domain of TCR clone 110445 (TRBV4-1, TRBJ2-7)
CSSSQQGQGFDEQYF

SEQ ID NO: 220891 - protein, 15 aa, Homo sapiens
  CDR3 for alpha chain variable domain of TCR clone 110446 (TRAV1-2, TRAJ26)
CAVRDLITMVRILSF

SEQ ID NO: 220892 - protein, 12 aa, Homo sapiens
  CDR3 for beta chain variable domain of TCR clone 110446 (TRBV7-9, TRBJ2-7)
CATRTDAYEQYF

SEQ ID NO: 220893 - protein, 16 aa, Homo sapiens
  CDR3 for alpha chain variable domain of TCR clone 110447 (TRAV12-1, TRAJ34)
CVVNPLETPTSSSLGL

SEQ ID NO: 220894 - protein, 20 aa, Homo sapiens
  CDR3 for beta chain variable domain of TCR clone 110447 (TRBV19, TRBJ2-1)
CASSISRTVTSTRLNNEQFF

SEQ ID NO: 220895 - protein, 14 aa, Homo sapiens
  CDR3 for alpha chain variable domain of TCR clone 110448 (TRAV12-2, TRAJ17)
CAVLFKAAGNKLTF

SEQ ID NO: 220896 - protein, 18 aa, Homo sapiens
  CDR3 for beta chain variable domain of TCR clone 110448 (TRBV12-4, TRBJ2-2)
CASSLVAGTRGRTGELFF

SEQ ID NO: 220897 - protein, 14 aa, Homo sapiens
  CDR3 for alpha chain variable domain of TCR clone 110449 (TRAV1-2, TRAJ16)
FAVNRFSDGQKLLF

SEQ ID NO: 220898 - protein, 14 aa, Homo sapiens
  CDR3 for beta chain variable domain of TCR clone 110449 (TRBV12-5, TRBJ2-5)
CASGSRTHQETQYF

SEQ ID NO: 220899 - protein, 12 aa, Homo sapiens
  CDR3 for alpha chain variable domain of TCR clone 110450 (TRAV17, TRAJ31)
CATEQGNARLMF

SEQ ID NO: 220900 - protein, 14 aa, Homo sapiens
  CDR3 for beta chain variable domain of TCR clone 110450 (TRBV28, TRBJ2-7)
CASTTDGDGFVQYF

SEQ ID NO: 220901 - protein, 14 aa, Homo sapiens
  CDR3 for alpha chain variable domain of TCR clone 110451 (TRAV17, TRAJ6)
CATNPAGGSYIPTF

SEQ ID NO: 220902 - protein, 15 aa, Homo sapiens
  CDR3 for beta chain variable domain of TCR clone 110451 (TRBV11-2, TRBJ2-2)
CASSSDRVNAGELFF

SEQ ID NO: 220903 - protein, 16 aa, Homo sapiens
  CDR3 for alpha chain variable domain of TCR clone 110452 (TRAV12-3, TRAJ53)
CAMSPGRGGSNYKLTF

SEQ ID NO: 220904 - protein, 13 aa, Homo sapiens
  CDR3 for beta chain variable domain of TCR clone 110452 (TRBV7-2, TRBJ2-5)
CASSQTSVETQYF

SEQ ID NO: 220905 - protein, 15 aa, Homo sapiens
  CDR3 for alpha chain variable domain of TCR clone 110453 (TRAV35, TRAJ40)
CAGQLGTSGTYKYFF

SEQ ID NO: 220906 - protein, 14 aa, Homo sapiens
  CDR3 for beta chain variable domain of TCR clone 110453 (TRBV7-3, TRBJ2-1)
CASSLAGGTNEQFF

SEQ ID NO: 220907 - protein, 11 aa, Homo sapiens
  CDR3 for alpha chain variable domain of TCR clone 110454 (TRAV3, TRAJ21)
CAWGNFNKFYF

SEQ ID NO: 220908 - protein, 16 aa, Homo sapiens
  CDR3 for beta chain variable domain of TCR clone 110454 (TRBV19, TRBJ2-1)
CASSKAGPSSYNEQFF

SEQ ID NO: 220909 - protein, 17 aa, Homo sapiens
  CDR3 for alpha chain variable domain of TCR clone 110455 (TRAV36/DV7, TRAJ52)
CAVAQRAGGTSHGKLTF

SEQ ID NO: 220910 - protein, 14 aa, Homo sapiens
  CDR3 for beta chain variable domain of TCR clone 110455 (TRBV19, TRBJ2-1)
CASPTFVLSGEQFF

SEQ ID NO: 220911 - protein, 14 aa, Homo sapiens
  CDR3 for alpha chain variable domain of TCR clone 110456 (TRAV1-2, TRAJ16)
CAVNRFSDGQKLLF

SEQ ID NO: 220912 - protein, 13 aa, Homo sapiens
  CDR3 for beta chain variable domain of TCR clone 110456 (TRBV15, TRBJ1-2)
CATSMTANYGYTF

SEQ ID NO: 220913 - protein, 10 aa, Homo sapiens
  CDR3 for alpha chain variable domain of TCR clone 110457 (TRAV8-3, TRAJ43)
CALALADMRF

SEQ ID NO: 220914 - protein, 14 aa, Homo sapiens
  CDR3 for beta chain variable domain of TCR clone 110457 (TRBV4-2, TRBJ2-1)
CASGLDRAYNEQFF

SEQ ID NO: 220915 - protein, 13 aa, Homo sapiens
  CDR3 for alpha chain variable domain of TCR clone 110458 (TRAV26-2, TRAJ43)
CILRAVNNNEMRF

SEQ ID NO: 220916 - protein, 14 aa, Homo sapiens
  CDR3 for beta chain variable domain of TCR clone 110458 (TRBV20-1, TRBJ1-1)
CSAQTRIGGTEAFF

SEQ ID NO: 220917 - protein, 14 aa, Homo sapiens
  CDR3 for alpha chain variable domain of TCR clone 110459 (TRAV38-1, TRAJ29)
CAFITPSGNTPLVF

SEQ ID NO: 220918 - protein, 14 aa, Homo sapiens
  CDR3 for beta chain variable domain of TCR clone 110459 (TRBV18, TRBJ2-7)
CASSPRGVAYEQYF

SEQ ID NO: 220919 - protein, 16 aa, Homo sapiens
  CDR3 for alpha chain variable domain of TCR clone 110460 (TRAV23/DV6, TRAJ9)
CAASIGGNTGGFKTIF

SEQ ID NO: 220920 - protein, 13 aa, Homo sapiens
  CDR3 for beta chain variable domain of TCR clone 110460 (TRBV27, TRBJ1-4)
CASSLMGDEKLFF

SEQ ID NO: 220921 - protein, 15 aa, Homo sapiens
  CDR3 for alpha chain variable domain of TCR clone 110461 (TRAV8-3, TRAJ45)
CASSYSGGGADGLTF

SEQ ID NO: 220922 - protein, 15 aa, Homo sapiens
  CDR3 for beta chain variable domain of TCR clone 110461 (TRBV7-9, TRBJ2-7)
CASSLALAEAYEQYF

SEQ ID NO: 220923 - protein, 14 aa, Homo sapiens
  CDR3 for alpha chain variable domain of TCR clone 110462 (TRAV2, TRAJ9)
CAVEDRSGGFKTIF

SEQ ID NO: 220924 - protein, 12 aa, Homo sapiens
  CDR3 for beta chain variable domain of TCR clone 110462 (TRBV7-9, TRBJ2-7)
CARSLEGYEQYF

SEQ ID NO: 220925 - protein, 13 aa, Homo sapiens
  CDR3 for alpha chain variable domain of TCR clone 110463 (TRAV39, TRAJ33)
CAVDRASNYQLIW

SEQ ID NO: 220926 - protein, 14 aa, Homo sapiens
  CDR3 for beta chain variable domain of TCR clone 110463 (TRBV7-2, TRBJ2-7)
CASSPKTSFYEQYF

SEQ ID NO: 220927 - protein, 17 aa, Homo sapiens
  CDR3 for alpha chain variable domain of TCR clone 110464 (TRAV3, TRAJ38)
CAVRDCLNAGNNHIQNP

SEQ ID NO: 220928 - protein, 13 aa, Homo sapiens
  CDR3 for beta chain variable domain of TCR clone 110464 (TRBV12-4, TRBJ1-2)
CASSLRQGKGYTF

SEQ ID NO: 220929 - protein, 13 aa, Homo sapiens
  CDR3 for alpha chain variable domain of TCR clone 110465 (TRAV23/DV6, TRAJ30)
CAASNSGDDKIIF

SEQ ID NO: 220930 - protein, 13 aa, Homo sapiens
  CDR3 for beta chain variable domain of TCR clone 110465 (TRBV3-1, TRBJ2-2)
CASLARGSGELFF

SEQ ID NO: 220931 - protein, 12 aa, Homo sapiens
  CDR3 for alpha chain variable domain of TCR clone 110466 (TRAV30, TRAJ39)
CGRGNAGNMLTF

SEQ ID NO: 220932 - protein, 19 aa, Homo sapiens
  CDR3 for beta chain variable domain of TCR clone 110466 (TRBV7-2, TRBJ2-3)
CASSFLSRNWGGGTDTQYF

SEQ ID NO: 220933 - protein, 16 aa, Homo sapiens
  CDR3 for alpha chain variable domain of TCR clone 110467 (TRAV4, TRAJ22)
CLVGDLYSGSARQLTF

SEQ ID NO: 220934 - protein, 15 aa, Homo sapiens
  CDR3 for beta chain variable domain of TCR clone 110467 (TRBV7-2, TRBJ2-3)
CASSLAGAFIDTQYF

SEQ ID NO: 220935 - protein, 16 aa, Homo sapiens
  CDR3 for alpha chain variable domain of TCR clone 110468 (TRAV1-1, TRAJ29)
CAVRSTRNSGNTPPVF

SEQ ID NO: 220936 - protein, 15 aa, Homo sapiens
  CDR3 for beta chain variable domain of TCR clone 110468 (TRBV29-1, TRBJ2-1)
CSVGRHALFYNEQFF

SEQ ID NO: 220937 - protein, 11 aa, Homo sapiens
  CDR3 for alpha chain variable domain of TCR clone 110469 (TRAV13-2, TRAJ23)
CAQSPRGKLIF

SEQ ID NO: 220938 - protein, 12 aa, Homo sapiens
  CDR3 for beta chain variable domain of TCR clone 110469 (TRBV11-2, TRBJ2-2)
CASSLGGGELFF

SEQ ID NO: 220939 - protein, 12 aa, Homo sapiens
  CDR3 for alpha chain variable domain of TCR clone 110470 (TRAV16, TRAJ10)
CSRTGGGNKLTF

SEQ ID NO: 220940 - protein, 14 aa, Homo sapiens
  CDR3 for beta chain variable domain of TCR clone 110470 (TRBV7-9, TRBJ2-7)
CASSLEAVGDEQYF

SEQ ID NO: 220941 - protein, 12 aa, Homo sapiens
  CDR3 for alpha chain variable domain of TCR clone 110471 (TRAV8-3, TRAJ20)
CAVGANDYKLSF

SEQ ID NO: 220942 - protein, 15 aa, Homo sapiens
  CDR3 for beta chain variable domain of TCR clone 110471 (TRBV15, TRBJ1-5)
CATSRDPVSNQPQHF

SEQ ID NO: 220943 - protein, 15 aa, Homo sapiens
  CDR3 for alpha chain variable domain of TCR clone 110472 (TRAV2, TRAJ9)
CAVEDRGTGGFKTIF

SEQ ID NO: 220944 - protein, 16 aa, Homo sapiens
  CDR3 for beta chain variable domain of TCR clone 110472 (TRBV24-1, TRBJ2-3)
CATSVPGTGATDTQYF

SEQ ID NO: 220945 - protein, 20 aa, Homo sapiens
  CDR3 for alpha chain variable domain of TCR clone 110473 (TRAV30, TRAJ54)
SAAQSRSETQVVQGAQKLGF

SEQ ID NO: 220946 - protein, 11 aa, Homo sapiens
  CDR3 for beta chain variable domain of TCR clone 110473 (TRBV25-1, TRBJ2-4)
CQSRDQNIQYF

SEQ ID NO: 220947 - protein, 17 aa, Homo sapiens
  CDR3 for alpha chain variable domain of TCR clone 110474 (TRAV16, TRAJ58)
CITVLSNGETSGSRLTF

SEQ ID NO: 220948 - protein, 17 aa, Homo sapiens
  CDR3 for beta chain variable domain of TCR clone 110474 (TRBV18, TRBJ2-1)
CASSKGLSGGADNGQFF

SEQ ID NO: 220949 - protein, 10 aa, Homo sapiens
  CDR3 for alpha chain variable domain of TCR clone 110475 (TRAV2, TRAJ15)
RCQAGTALIF

SEQ ID NO: 220950 - protein, 13 aa, Homo sapiens
  CDR3 for beta chain variable domain of TCR clone 110475 (TRBV27, TRBJ2-1)
CASRTLGVGEQFF

SEQ ID NO: 220951 - protein, 18 aa, Homo sapiens
  CDR3 for alpha chain variable domain of TCR clone 110476 (TRAV12-3, TRAJ52)
CAMSVGGAGGTSYGKLTF

SEQ ID NO: 220952 - protein, 15 aa, Homo sapiens
  CDR3 for beta chain variable domain of TCR clone 110476 (TRBV4-1, TRBJ2-5)
CASSQWDLYQETQYF

SEQ ID NO: 220953 - protein, 16 aa, Homo sapiens
  CDR3 for alpha chain variable domain of TCR clone 110477 (TRAV30, TRAJ24)
CGTEIVDADSRGKFQF

SEQ ID NO: 220954 - protein, 15 aa, Homo sapiens
  CDR3 for beta chain variable domain of TCR clone 110477 (TRBV5-1, TRBJ2-2)
CASSSQGGNTGELFF

SEQ ID NO: 220955 - protein, 13 aa, Homo sapiens
  CDR3 for alpha chain variable domain of TCR clone 110478 (TRAV8-4, TRAJ3)
CAVSDSGASKIIF

SEQ ID NO: 220956 - protein, 16 aa, Homo sapiens
  CDR3 for beta chain variable domain of TCR clone 110478 (TRBV7-9, TRBJ2-7)
RASSNHGGQEKYEQYF

SEQ ID NO: 220957 - protein, 14 aa, Homo sapiens
  CDR3 for alpha chain variable domain of TCR clone 110479 (TRAV3, TRAJ9)
CAVRLNTGGFKTIF

SEQ ID NO: 220958 - protein, 11 aa, Homo sapiens
  CDR3 for beta chain variable domain of TCR clone 110479 (TRBV19, TRBJ1-2)
CASSISSGYTF

SEQ ID NO: 220959 - protein, 16 aa, Homo sapiens
  CDR3 for alpha chain variable domain of TCR clone 110480 (TRAV26-1, TRAJ23)
CIVRVHPYNQGGKLIF

SEQ ID NO: 220960 - protein, 13 aa, Homo sapiens
  CDR3 for beta chain variable domain of TCR clone 110480 (TRBV7-9, TRBJ1-2)
CASSLKQNYGYTF

SEQ ID NO: 220961 - protein, 18 aa, Homo sapiens
  CDR3 for alpha chain variable domain of TCR clone 110481 (TRAV21, TRAJ52)
CAVRPSPAGDTSYGKLTF

SEQ ID NO: 220962 - protein, 13 aa, Homo sapiens
  CDR3 for beta chain variable domain of TCR clone 110481 (TRBV29-1, TRBJ2-1)
CSVEGGRVNEQFF

SEQ ID NO: 220963 - protein, 11 aa, Homo sapiens
  CDR3 for alpha chain variable domain of TCR clone 110482 (TRAV1-2, TRAJ31)
CASHNNARPMF

SEQ ID NO: 220964 - protein, 15 aa, Homo sapiens
  CDR3 for beta chain variable domain of TCR clone 110482 (TRBV27, TRBJ2-1)
CASSNGGGSSNEQFF

SEQ ID NO: 220965 - protein, 12 aa, Homo sapiens
  CDR3 for alpha chain variable domain of TCR clone 110483 (TRAV2, TRAJ31)
CAVEDNNARLMF

SEQ ID NO: 220966 - protein, 13 aa, Homo sapiens
  CDR3 for beta chain variable domain of TCR clone 110483 (TRBV10-3, TRBJ2-7)
CASKLAVNYEQYF

SEQ ID NO: 220967 - protein, 15 aa, Homo sapiens
  CDR3 for alpha chain variable domain of TCR clone 110484 (TRAV8-4, TRAJ40)
CAVRSITSGTYKYIF

SEQ ID NO: 220968 - protein, 13 aa, Homo sapiens
  CDR3 for beta chain variable domain of TCR clone 110484 (TRBV2, TRBJ2-1)
CATSRGTDNEQFF

SEQ ID NO: 220969 - protein, 18 aa, Homo sapiens
  CDR3 for alpha chain variable domain of TCR clone 110485 (TRAV13-1, TRAJ52)
CAAKNPNAGVTSYGKLTF

SEQ ID NO: 220970 - protein, 18 aa, Homo sapiens
  CDR3 for beta chain variable domain of TCR clone 110485 (TRBV4-1, TRBJ1-4)
CASSPRTGGAWTNEKLFF

SEQ ID NO: 220971 - protein, 13 aa, Homo sapiens
  CDR3 for alpha chain variable domain of TCR clone 110486 (TRAV3, TRAJ20)
CAVRDTPRYKLTF

SEQ ID NO: 220972 - protein, 16 aa, Homo sapiens
  CDR3 for beta chain variable domain of TCR clone 110486 (TRBV20-1, TRBJ2-7)
CSARAPGLALSYEQYF

SEQ ID NO: 220973 - protein, 14 aa, Homo sapiens
  CDR3 for alpha chain variable domain of TCR clone 110487 (TRAV13-2, TRAJ16)
CAENNWEDGQKLLF

SEQ ID NO: 220974 - protein, 14 aa, Homo sapiens
  CDR3 for beta chain variable domain of TCR clone 110487 (TRBV19, TRBJ2-1)
CASPTFVLSGEQFF

SEQ ID NO: 220975 - protein, 14 aa, Homo sapiens
  CDR3 for alpha chain variable domain of TCR clone 110488 (TRAV12-2, TRAJ45)
CAVYSGGGADGLTF

SEQ ID NO: 220976 - protein, 16 aa, Homo sapiens
  CDR3 for beta chain variable domain of TCR clone 110488 (TRBV12-5, TRBJ2-5)
CASGPRTSGNQETQYF

SEQ ID NO: 220977 - protein, 11 aa, Homo sapiens
  CDR3 for alpha chain variable domain of TCR clone 110489 (TRAV12-3, TRAJ26)
CAMSHGQNFVF

SEQ ID NO: 220978 - protein, 13 aa, Homo sapiens
  CDR3 for beta chain variable domain of TCR clone 110489 (TRBV10-3, TRBJ2-7)
CASKLAVNYEQYF

SEQ ID NO: 220979 - protein, 14 aa, Homo sapiens
  CDR3 for alpha chain variable domain of TCR clone 110490 (TRAV12-2, TRAJ40)
CAVKIPSGTYKYIF

SEQ ID NO: 220980 - protein, 15 aa, Homo sapiens
  CDR3 for beta chain variable domain of TCR clone 110490 (TRBV28, TRBJ2-7)
CASSPGGRGFYEQYF

SEQ ID NO: 220981 - protein, 13 aa, Homo sapiens
  CDR3 for alpha chain variable domain of TCR clone 110491 (TRAV1-1, TRAJ9)
CAAKNTGGFKTIF

SEQ ID NO: 220982 - protein, 13 aa, Homo sapiens
  CDR3 for beta chain variable domain of TCR clone 110491 (TRBV11-3, TRBJ2-3)
CASNHDTKDTQYF

SEQ ID NO: 220983 - protein, 16 aa, Homo sapiens
  CDR3 for alpha chain variable domain of TCR clone 110492 (TRAV12-1, TRAJ43)
CVVNPHRFGAGTRLTV

SEQ ID NO: 220984 - protein, 12 aa, Homo sapiens
  CDR3 for beta chain variable domain of TCR clone 110492 (TRBV3-1, TRBJ1-1)
CASSQDPTEAFF

SEQ ID NO: 220985 - protein, 15 aa, Homo sapiens
  CDR3 for alpha chain variable domain of TCR clone 110493 (TRAV2, TRAJ9)
CAVEDRGTGGFRTIF

SEQ ID NO: 220986 - protein, 13 aa, Homo sapiens
  CDR3 for beta chain variable domain of TCR clone 110493 (TRBV19, TRBJ1-2)
CASSVPGQDGYTF

SEQ ID NO: 220987 - protein, 14 aa, Homo sapiens
  CDR3 for alpha chain variable domain of TCR clone 110494 (TRAV8-6, TRAJ53)
CAALVLGSNYKLTF

SEQ ID NO: 220988 - protein, 16 aa, Homo sapiens
  CDR3 for beta chain variable domain of TCR clone 110494 (TRBV20-1, TRBJ1-5)
CSARDVGGGWIQPQHF

SEQ ID NO: 220989 - protein, 14 aa, Homo sapiens
  CDR3 for alpha chain variable domain of TCR clone 110495 (TRAV26-1, TRAJ32)
CIARYGGATNKLIF

SEQ ID NO: 220990 - protein, 16 aa, Homo sapiens
  CDR3 for beta chain variable domain of TCR clone 110495 (TRBV28, TRBJ2-2)
CASSLEGGSNTGELFF

SEQ ID NO: 220991 - protein, 16 aa, Homo sapiens
  CDR3 for alpha chain variable domain of TCR clone 110496 (TRAV3, TRAJ10)
CAVRDMREGGGNKLTF

SEQ ID NO: 220992 - protein, 13 aa, Homo sapiens
  CDR3 for beta chain variable domain of TCR clone 110496 (TRBV6-1, TRBJ1-1)
CASSRQGNTEAFF

SEQ ID NO: 220993 - protein, 14 aa, Homo sapiens
  CDR3 for alpha chain variable domain of TCR clone 110497 (TRAV38-1, TRAJ45)
CAYYSGGGADGLTF

SEQ ID NO: 220994 - protein, 20 aa, Homo sapiens
  CDR3 for beta chain variable domain of TCR clone 110497 (TRBV28, TRBJ2-1)
CASTPIGRSPGLGGGNEQFF

SEQ ID NO: 220995 - protein, 14 aa, Homo sapiens
  CDR3 for alpha chain variable domain of TCR clone 110498 (TRAV12-3, TRAJ10)
SHLPLTGGGNKLTF

SEQ ID NO: 220996 - protein, 11 aa, Homo sapiens
  CDR3 for beta chain variable domain of TCR clone 110498 (TRBV5-6, TRBJ2-5)
CASSLERTQYF

SEQ ID NO: 220997 - protein, 14 aa, Homo sapiens
  CDR3 for alpha chain variable domain of TCR clone 110499 (TRAV13-1, TRAJ35)
CAASKGGFGNVLHC

SEQ ID NO: 220998 - protein, 13 aa, Homo sapiens
  CDR3 for beta chain variable domain of TCR clone 110499 (TRBV2, TRBJ2-3)
CASILAGGQGQYF

SEQ ID NO: 220999 - protein, 13 aa, Homo sapiens
  CDR3 for alpha chain variable domain of TCR clone 110500 (TRAV21, TRAJ20)
CAVGLRVDYKLSF

SEQ ID NO: 221000 - protein, 18 aa, Homo sapiens
  CDR3 for beta chain variable domain of TCR clone 110500 (TRBV7-9, TRBJ2-7)
CASSLTTSGSRTWYEQYF

SEQ ID NO: 221001 - protein, 11 aa, Homo sapiens
  CDR3 for alpha chain variable domain of TCR clone 110501 (TRAV1-2, TRAJ40)
CAVPGTYKYIF

SEQ ID NO: 221002 - protein, 15 aa, Homo sapiens
  CDR3 for beta chain variable domain of TCR clone 110501 (TRBV25-1, TRBJ1-4)
CPSSPGDSTNEKLFF

SEQ ID NO: 221003 - protein, 13 aa, Homo sapiens
  CDR3 for alpha chain variable domain of TCR clone 110502 (TRAV12-3, TRAJ7)
CAMSASGNNRLAF

SEQ ID NO: 221004 - protein, 14 aa, Homo sapiens
  CDR3 for beta chain variable domain of TCR clone 110502 (TRBV13, TRBJ2-5)
CTSSLGPRGETQYF

SEQ ID NO: 221005 - protein, 16 aa, Homo sapiens
  CDR3 for alpha chain variable domain of TCR clone 110503 (TRAV16, TRAJ4)
CALSRMFSGGYNKLIF

SEQ ID NO: 221006 - protein, 14 aa, Homo sapiens
  CDR3 for beta chain variable domain of TCR clone 110503 (TRBV4-1, TRBJ2-2)
CASSQTVNTGELFF

SEQ ID NO: 221007 - protein, 16 aa, Homo sapiens
  CDR3 for alpha chain variable domain of TCR clone 110504 (TRAV23/DV6, TRAJ9)
CAASIGGNTGGFRTIF

SEQ ID NO: 221008 - protein, 13 aa, Homo sapiens
  CDR3 for beta chain variable domain of TCR clone 110504 (TRBV7-9, TRBJ1-2)
CASSLKQNYGYTF

SEQ ID NO: 221009 - protein, 14 aa, Homo sapiens
  CDR3 for alpha chain variable domain of TCR clone 110505 (TRAV12-1, TRAJ17)
CVVNYKAAGNKLTF

SEQ ID NO: 221010 - protein, 13 aa, Homo sapiens
  CDR3 for beta chain variable domain of TCR clone 110505 (TRBV7-7, TRBJ2-5)
CASSRSGQETQYF

SEQ ID NO: 221011 - protein, 13 aa, Homo sapiens
  CDR3 for alpha chain variable domain of TCR clone 110506 (TRAV8-3, TRAJ48)
CAVVPFGNEKLTF

SEQ ID NO: 221012 - protein, 14 aa, Homo sapiens
  CDR3 for beta chain variable domain of TCR clone 110506 (TRBV7-8, TRBJ1-2)
CASSPDSLSYGYTF

SEQ ID NO: 221013 - protein, 16 aa, Homo sapiens
  CDR3 for alpha chain variable domain of TCR clone 110507 (TRAV26-1, TRAJ53)
CIVRVAMGGSNYKLTF

SEQ ID NO: 221014 - protein, 14 aa, Homo sapiens
  CDR3 for beta chain variable domain of TCR clone 110507 (TRBV18, TRBJ2-7)
CASSPRGGAYEQYF

SEQ ID NO: 221015 - protein, 23 aa, Homo sapiens
  CDR3 for alpha chain variable domain of TCR clone 110508 (TRAV26-1, TRAJ38)
CIADNAGNNHIQNPDPAVYTLRD

SEQ ID NO: 221016 - protein, 13 aa, Homo sapiens
  CDR3 for beta chain variable domain of TCR clone 110508 (TRBV20-1, TRBJ1-1)
CSARGGGNTEAFF

SEQ ID NO: 221017 - protein, 12 aa, Homo sapiens
  CDR3 for alpha chain variable domain of TCR clone 110509 (TRAV12-3, TRAJ5)
CAMDTGRRALTF

SEQ ID NO: 221018 - protein, 13 aa, Homo sapiens
  CDR3 for beta chain variable domain of TCR clone 110509 (TRBV7-7, TRBJ2-2)
YASSLTSAGELFF

SEQ ID NO: 221019 - protein, 13 aa, Homo sapiens
  CDR3 for alpha chain variable domain of TCR clone 110510 (TRAV3, TRAJ27)
CAVRPLGAGKSTF

SEQ ID NO: 221020 - protein, 18 aa, Homo sapiens
  CDR3 for beta chain variable domain of TCR clone 110510 (TRBV11-2, TRBJ2-6)
CASSLNPFLGTGANVLTF

SEQ ID NO: 221021 - protein, 14 aa, Homo sapiens
  CDR3 for alpha chain variable domain of TCR clone 110511 (TRAV1-2, TRAJ8)
CAVREDTGFQKLLF

SEQ ID NO: 221022 - protein, 12 aa, Homo sapiens
  CDR3 for beta chain variable domain of TCR clone 110511 (TRBV11-2, TRBJ2-2)
CASSLPTGELFF

SEQ ID NO: 221023 - protein, 14 aa, Homo sapiens
  CDR3 for alpha chain variable domain of TCR clone 110512 (TRAV2, TRAJ23)
CAVGLRNQGEKLIF

SEQ ID NO: 221024 - protein, 15 aa, Homo sapiens
  CDR3 for beta chain variable domain of TCR clone 110512 (TRBV6-5, TRBJ2-5)
CASSPLAGGIETQYF

SEQ ID NO: 221025 - protein, 14 aa, Homo sapiens
  CDR3 for alpha chain variable domain of TCR clone 110513 (TRAV8-3, TRAJ4)
CAVGASGGYNKLIF

SEQ ID NO: 221026 - protein, 14 aa, Homo sapiens
  CDR3 for beta chain variable domain of TCR clone 110513 (TRBV4-2, TRBJ2-7)
CASSPNRAPYEQYF

SEQ ID NO: 221027 - protein, 17 aa, Homo sapiens
  CDR3 for alpha chain variable domain of TCR clone 110514 (TRAV13-1, TRAJ52)
CAASSGAGGTSYGKLTF

SEQ ID NO: 221028 - protein, 13 aa, Homo sapiens
  CDR3 for beta chain variable domain of TCR clone 110514 (TRBV20-1, TRBJ1-1)
CSAPLGGGTEAFF

SEQ ID NO: 221029 - protein, 11 aa, Homo sapiens
  CDR3 for alpha chain variable domain of TCR clone 110515 (TRAV1-1, TRAJ23)
CAVRQGGKLIF

SEQ ID NO: 221030 - protein, 15 aa, Homo sapiens
  CDR3 for beta chain variable domain of TCR clone 110515 (TRBV7-8, TRBJ2-7)
CASSLVQGPSGEQYF

SEQ ID NO: 221031 - protein, 14 aa, Homo sapiens
  CDR3 for alpha chain variable domain of TCR clone 110516 (TRAV16, TRAJ42)
CALLAGGSQGNLIF

SEQ ID NO: 221032 - protein, 18 aa, Homo sapiens
  CDR3 for beta chain variable domain of TCR clone 110516 (TRBV11-2, TRBJ2-3)
CASSLGGASRGAPNTQYF

SEQ ID NO: 221033 - protein, 16 aa, Homo sapiens
  CDR3 for alpha chain variable domain of TCR clone 110517 (TRAV12-2, TRAJ50)
CAGGTATKTSYDKVIF

SEQ ID NO: 221034 - protein, 12 aa, Homo sapiens
  CDR3 for beta chain variable domain of TCR clone 110517 (TRBV12-4, TRBJ1-5)
CASSLGRQPQHF

SEQ ID NO: 221035 - protein, 16 aa, Homo sapiens
  CDR3 for alpha chain variable domain of TCR clone 110518 (TRAV26-1, TRAJ37)
CIVRGDGSGNTGKLIF

SEQ ID NO: 221036 - protein, 14 aa, Homo sapiens
  CDR3 for beta chain variable domain of TCR clone 110518 (TRBV11-2, TRBJ2-5)
CASSRTGGIETQYF

SEQ ID NO: 221037 - protein, 12 aa, Homo sapiens
  CDR3 for alpha chain variable domain of TCR clone 110519 (TRAV1-2, TRAJ9)
CAGYTGGFKTIF

SEQ ID NO: 221038 - protein, 15 aa, Homo sapiens
  CDR3 for beta chain variable domain of TCR clone 110519 (TRBV11-2, TRBJ2-1)
CASSPEGQSLNEQFF

SEQ ID NO: 221039 - protein, 11 aa, Homo sapiens
  CDR3 for alpha chain variable domain of TCR clone 110520 (TRAV2, TRAJ13)
CASGGYQTVTF

SEQ ID NO: 221040 - protein, 13 aa, Homo sapiens
  CDR3 for beta chain variable domain of TCR clone 110520 (TRBV6-1, TRBJ2-5)
CASGYQSVETQYF

SEQ ID NO: 221041 - protein, 11 aa, Homo sapiens
  CDR3 for alpha chain variable domain of TCR clone 110521 (TRAV4, TRAJ31)
CLVGDNARLMF

SEQ ID NO: 221042 - protein, 13 aa, Homo sapiens
  CDR3 for beta chain variable domain of TCR clone 110521 (TRBV5-1, TRBJ2-1)
CASSLGSYNEQFF

SEQ ID NO: 221043 - protein, 18 aa, Homo sapiens
  CDR3 for alpha chain variable domain of TCR clone 110522 (TRAV21, TRAJ52)
CAVRPSPAGGTSTGKLTF

SEQ ID NO: 221044 - protein, 17 aa, Homo sapiens
  CDR3 for beta chain variable domain of TCR clone 110522 (TRBV13, TRBJ2-3)
CASSLSRVAGGRNTQYF

SEQ ID NO: 221045 - protein, 13 aa, Homo sapiens
  CDR3 for alpha chain variable domain of TCR clone 110523 (TRAV1-1, TRAJ9)
CAAKNTGRFKTIF

SEQ ID NO: 221046 - protein, 14 aa, Homo sapiens
  CDR3 for beta chain variable domain of TCR clone 110523 (TRBV20-1, TRBJ2-1)
CSAQIGGSANEQFF

SEQ ID NO: 221047 - protein, 14 aa, Homo sapiens
  CDR3 for alpha chain variable domain of TCR clone 110524 (TRAV8-4, TRAJ16)
CAVSPVGRWPEAVL

SEQ ID NO: 221048 - protein, 15 aa, Homo sapiens
  CDR3 for beta chain variable domain of TCR clone 110524 (TRBV7-3, TRBJ1-6)
CASSLGRGAGSPLHF

SEQ ID NO: 221049 - protein, 16 aa, Homo sapiens
  CDR3 for alpha chain variable domain of TCR clone 110525 (TRAV26-1, TRAJ33)
CIVPFWGEDSNYQLIW

SEQ ID NO: 221050 - protein, 17 aa, Homo sapiens
  CDR3 for beta chain variable domain of TCR clone 110525 (TRBV7-3, TRBJ2-3)
CASSLMKRMRGADTQYF

SEQ ID NO: 221051 - protein, 15 aa, Homo sapiens
  CDR3 for alpha chain variable domain of TCR clone 110526 (TRAV2, TRAJ11)
CAVGERNSGYSTLTF

SEQ ID NO: 221052 - protein, 14 aa, Homo sapiens
  CDR3 for beta chain variable domain of TCR clone 110526 (TRBV20-1, TRBJ2-1)
CSAQIGGSANEQFF

SEQ ID NO: 221053 - protein, 18 aa, Homo sapiens
  CDR3 for alpha chain variable domain of TCR clone 110527 (TRAV21, TRAJ52)
CAVRPSPAGGTSYGKLTF

SEQ ID NO: 221054 - protein, 13 aa, Homo sapiens
  CDR3 for beta chain variable domain of TCR clone 110527 (TRBV19, TRBJ2-1)
CASSMYRVNEQFF

SEQ ID NO: 221055 - protein, 17 aa, Homo sapiens
  CDR3 for alpha chain variable domain of TCR clone 110528 (TRAV14/DV4, TRAJ3)
CAMREGPEYSRASKIIF

SEQ ID NO: 221056 - protein, 17 aa, Homo sapiens
  CDR3 for beta chain variable domain of TCR clone 110528 (TRBV20-1, TRBJ1-5)
CSARVGGERQGNQPQHF

SEQ ID NO: 221057 - protein, 13 aa, Homo sapiens
  CDR3 for alpha chain variable domain of TCR clone 110529 (TRAV12-3, TRAJ9)
CAMRNTGGFKTIF

SEQ ID NO: 221058 - protein, 14 aa, Homo sapiens
  CDR3 for beta chain variable domain of TCR clone 110529 (TRBV11-2, TRBJ2-7)
CASSSTREGYEQYF

SEQ ID NO: 221059 - protein, 14 aa, Homo sapiens
  CDR3 for alpha chain variable domain of TCR clone 110530 (TRAV2, TRAJ9)
CAVEDRSGGFKTIF

SEQ ID NO: 221060 - protein, 16 aa, Homo sapiens
  CDR3 for beta chain variable domain of TCR clone 110530 (TRBV10-3, TRBJ2-1)
CAISGVGDGGGGEQFF

SEQ ID NO: 221061 - protein, 18 aa, Homo sapiens
  CDR3 for alpha chain variable domain of TCR clone 110531 (TRAV13-1, TRAJ52)
CAAKNTNAGGTSYGKLTF

SEQ ID NO: 221062 - protein, 18 aa, Homo sapiens
  CDR3 for beta chain variable domain of TCR clone 110531 (TRBV4-1, TRBJ1-4)
CASSPRTGGAWTNEKLFF

SEQ ID NO: 221063 - protein, 13 aa, Homo sapiens
  CDR3 for alpha chain variable domain of TCR clone 110532 (TRAV17, TRAJ54)
CATDAGGAKKLVF

SEQ ID NO: 221064 - protein, 17 aa, Homo sapiens
  CDR3 for beta chain variable domain of TCR clone 110532 (TRBV25-1, TRBJ1-6)
CASSEYIGERGNSPLHF

SEQ ID NO: 221065 - protein, 16 aa, Homo sapiens
  CDR3 for alpha chain variable domain of TCR clone 110533 (TRAV16, TRAJ52)
CALSAAGGTSYGKLTF

SEQ ID NO: 221066 - protein, 14 aa, Homo sapiens
  CDR3 for beta chain variable domain of TCR clone 110533 (TRBV18, TRBJ2-7)
CASSPRGGAYEQYF

SEQ ID NO: 221067 - protein, 15 aa, Homo sapiens
  CDR3 for alpha chain variable domain of TCR clone 110534 (TRAV12-2, TRAJ23)
CAVKPIYNQGGKLIF

SEQ ID NO: 221068 - protein, 15 aa, Homo sapiens
  CDR3 for beta chain variable domain of TCR clone 110534 (TRBV5-1, TRBJ1-2)
CASSLVGGQSQGYSF

SEQ ID NO: 221069 - protein, 15 aa, Homo sapiens
  CDR3 for alpha chain variable domain of TCR clone 110535 (TRAV12-2, TRAJ43)
CAFDMRFGAGTRLTV

SEQ ID NO: 221070 - protein, 18 aa, Homo sapiens
  CDR3 for beta chain variable domain of TCR clone 110535 (TRBV20-1, TRBJ2-3)
CSASGLAGRPGTTDTQYF

SEQ ID NO: 221071 - protein, 14 aa, Homo sapiens
  CDR3 for alpha chain variable domain of TCR clone 110536 (TRAV23/DV6, TRAJ58)
CAASKETSGSRLTF

SEQ ID NO: 221072 - protein, 14 aa, Homo sapiens
  CDR3 for beta chain variable domain of TCR clone 110536 (TRBV25-1, TRBJ1-1)
CASTHLGGNTEAFF

SEQ ID NO: 221073 - protein, 13 aa, Homo sapiens
  CDR3 for alpha chain variable domain of TCR clone 110537 (TRAV35, TRAJ57)
CAGSQGGSETLVF

SEQ ID NO: 221074 - protein, 14 aa, Homo sapiens
  CDR3 for beta chain variable domain of TCR clone 110537 (TRBV25-1, TRBJ1-1)
CASTHLGGNTEAFF

SEQ ID NO: 221075 - protein, 14 aa, Homo sapiens
  CDR3 for alpha chain variable domain of TCR clone 110538 (TRAV1-1, TRAJ27)
CAVIYNTNAGKSTF

SEQ ID NO: 221076 - protein, 13 aa, Homo sapiens
  CDR3 for beta chain variable domain of TCR clone 110538 (TRBV7-2, TRBJ2-2)
CASSSVRAGELFF

SEQ ID NO: 221077 - protein, 11 aa, Homo sapiens
  CDR3 for alpha chain variable domain of TCR clone 110539 (TRAV12-2, TRAJ43)
CASPIGNDMRF

SEQ ID NO: 221078 - protein, 12 aa, Homo sapiens
  CDR3 for beta chain variable domain of TCR clone 110539 (TRBV20-1, TRBJ2-7)
CSAGLKMGEQCF

SEQ ID NO: 221079 - protein, 12 aa, Homo sapiens
  CDR3 for alpha chain variable domain of TCR clone 110540 (TRAV12-1, TRAJ6)
CVSSGGSYIPTF

SEQ ID NO: 221080 - protein, 12 aa, Homo sapiens
  CDR3 for beta chain variable domain of TCR clone 110540 (TRBV6-3, TRBJ2-7)
CASSLTPYEQYF

SEQ ID NO: 221081 - protein, 16 aa, Homo sapiens
  CDR3 for alpha chain variable domain of TCR clone 110541 (TRAV13-1, TRAJ48)
CAASIFGSFGNEKLTF

SEQ ID NO: 221082 - protein, 12 aa, Homo sapiens
  CDR3 for beta chain variable domain of TCR clone 110541 (TRBV14, TRBJ2-4)
CASSNLKSIQYF

SEQ ID NO: 221083 - protein, 13 aa, Homo sapiens
  CDR3 for alpha chain variable domain of TCR clone 110542 (TRAV3, TRAJ27)
CAVRPLGAGKSTF

SEQ ID NO: 221084 - protein, 13 aa, Homo sapiens
  CDR3 for beta chain variable domain of TCR clone 110542 (TRBV27, TRBJ2-7)
CASSFVSSYEQYF

SEQ ID NO: 221085 - protein, 13 aa, Homo sapiens
  CDR3 for alpha chain variable domain of TCR clone 110543 (TRAV8-3, TRAJ20)
CAVGRPNDYKLSF

SEQ ID NO: 221086 - protein, 14 aa, Homo sapiens
  CDR3 for beta chain variable domain of TCR clone 110543 (TRBV12-5, TRBJ2-5)
CASGSRTQQETQYF

SEQ ID NO: 221087 - protein, 12 aa, Homo sapiens
  CDR3 for alpha chain variable domain of TCR clone 110544 (TRAV12-3, TRAJ41)
CAMSYSGYALNF

SEQ ID NO: 221088 - protein, 18 aa, Homo sapiens
  CDR3 for beta chain variable domain of TCR clone 110544 (TRBV11-2, TRBJ2-3)
CASSLGGASRGAPNTQYF

SEQ ID NO: 221089 - protein, 13 aa, Homo sapiens
  CDR3 for alpha chain variable domain of TCR clone 110545 (TRAV21, TRAJ27)
CAARPGNAGKSTF

SEQ ID NO: 221090 - protein, 14 aa, Homo sapiens
  CDR3 for beta chain variable domain of TCR clone 110545 (TRBV11-2, TRBJ2-7)
CASSLGAGAYEQYY

SEQ ID NO: 221091 - protein, 16 aa, Homo sapiens
  CDR3 for alpha chain variable domain of TCR clone 110546 (TRAV1-2, TRAJ6)
CAVRDQGTGGSYIPTF

SEQ ID NO: 221092 - protein, 13 aa, Homo sapiens
  CDR3 for beta chain variable domain of TCR clone 110546 (TRBV28, TRBJ2-7)
CASTPGLEGEQYF

SEQ ID NO: 221093 - protein, 12 aa, Homo sapiens
  CDR3 for alpha chain variable domain of TCR clone 110547 (TRAV3, TRAJ31)
CAVRDGNARLMF

SEQ ID NO: 221094 - protein, 14 aa, Homo sapiens
  CDR3 for beta chain variable domain of TCR clone 110547 (TRBV7-2, TRBJ2-7)
CASRSQGAAYEQYF

SEQ ID NO: 221095 - protein, 18 aa, Homo sapiens
  CDR3 for alpha chain variable domain of TCR clone 110548 (TRAV13-1, TRAJ52)
CAAKNPNAGGTSYGKLTF

SEQ ID NO: 221096 - protein, 15 aa, Homo sapiens
  CDR3 for beta chain variable domain of TCR clone 110548 (TRBV6-1, TRBJ2-3)
CASSERGGITDTQYS

SEQ ID NO: 221097 - protein, 14 aa, Homo sapiens
  CDR3 for alpha chain variable domain of TCR clone 110549 (TRAV17, TRAJ57)
CATDPQGGSEKLVF

SEQ ID NO: 221098 - protein, 14 aa, Homo sapiens
  CDR3 for beta chain variable domain of TCR clone 110549 (TRBV25-1, TRBJ1-1)
CASTHLGGNTEALF

SEQ ID NO: 221099 - protein, 14 aa, Homo sapiens
  CDR3 for alpha chain variable domain of TCR clone 110550 (TRAV29/DV5, TRAJ45)
CAASFRGGADGLTF

SEQ ID NO: 221100 - protein, 14 aa, Homo sapiens
  CDR3 for beta chain variable domain of TCR clone 110550 (TRBV20-1, TRBJ1-3)
CSASPTGAGNTIYF

SEQ ID NO: 221101 - protein, 12 aa, Homo sapiens
  CDR3 for alpha chain variable domain of TCR clone 110551 (TRAV20, TRAJ54)
CAVQEGAQKLVF

SEQ ID NO: 221102 - protein, 16 aa, Homo sapiens
  CDR3 for beta chain variable domain of TCR clone 110551 (TRBV13, TRBJ2-3)
CQQPLQGSGGRNAQYF

SEQ ID NO: 221103 - protein, 11 aa, Homo sapiens
  CDR3 for alpha chain variable domain of TCR clone 110552 (TRAV3, TRAJ21)
CAVGNFNKFYF

SEQ ID NO: 221104 - protein, 15 aa, Homo sapiens
  CDR3 for beta chain variable domain of TCR clone 110552 (TRBV6-1, TRBJ2-1)
CASSELRGQYNEQFF

SEQ ID NO: 221105 - protein, 16 aa, Homo sapiens
  CDR3 for alpha chain variable domain of TCR clone 110553 (TRAV38-2/DV8, TRAJ45)
CAYTTTSGGDADGLTF

SEQ ID NO: 221106 - protein, 14 aa, Homo sapiens
  CDR3 for beta chain variable domain of TCR clone 110553 (TRBV7-9, TRBJ2-2)
CASSLRHRTGELFF

SEQ ID NO: 221107 - protein, 14 aa, Homo sapiens
  CDR3 for alpha chain variable domain of TCR clone 110554 (TRAV12-2, TRAJ17)
CAVLFKAAGNKLTF

SEQ ID NO: 221108 - protein, 12 aa, Homo sapiens
  CDR3 for beta chain variable domain of TCR clone 110554 (TRBV7-3, TRBJ1-1)
CASSHGGTEAFF

SEQ ID NO: 221109 - protein, 14 aa, Homo sapiens
  CDR3 for alpha chain variable domain of TCR clone 110555 (TRAV38-1, TRAJ29)
CALITPSGNTPLVF

SEQ ID NO: 221110 - protein, 12 aa, Homo sapiens
  CDR3 for beta chain variable domain of TCR clone 110555 (TRBV4-1, TRBJ2-3)
CASSQGTDTQYF

SEQ ID NO: 221111 - protein, 13 aa, Homo sapiens
  CDR3 for alpha chain variable domain of TCR clone 110556 (TRAV3, TRAJ20)
CAVRPLSDYKLSF

SEQ ID NO: 221112 - protein, 12 aa, Homo sapiens
  CDR3 for beta chain variable domain of TCR clone 110556 (TRBV6-1, TRBJ2-1)
CATYGLNNEQFF

SEQ ID NO: 221113 - protein, 14 aa, Homo sapiens
  CDR3 for alpha chain variable domain of TCR clone 110557 (TRAV1-2, TRAJ8)
CAVREDTGFQKLVF

SEQ ID NO: 221114 - protein, 16 aa, Homo sapiens
  CDR3 for beta chain variable domain of TCR clone 110557 (TRBV19, TRBJ2-4)
CATGGLAGGTKNIQYF

SEQ ID NO: 221115 - protein, 15 aa, Homo sapiens
  CDR3 for alpha chain variable domain of TCR clone 110558 (TRAV17, TRAJ57)
CATGPSQGGSEKRVF

SEQ ID NO: 221116 - protein, 15 aa, Homo sapiens
  CDR3 for beta chain variable domain of TCR clone 110558 (TRBV6-3, TRBJ2-7)
CASSSPGTVFYEQYF

SEQ ID NO: 221117 - protein, 12 aa, Homo sapiens
  CDR3 for alpha chain variable domain of TCR clone 110559 (TRAV29/DV5, TRAJ49)
CSATDTGNQFYF

SEQ ID NO: 221118 - protein, 19 aa, Homo sapiens
  CDR3 for beta chain variable domain of TCR clone 110559 (TRBV25-1, TRBJ2-2)
CAILVYRVDRGRKTGELFF

SEQ ID NO: 221119 - protein, 15 aa, Homo sapiens
  CDR3 for alpha chain variable domain of TCR clone 110560 (TRAV8-3, TRAJ13)
CAVAPNSGGYQKVTF

SEQ ID NO: 221120 - protein, 12 aa, Homo sapiens
  CDR3 for beta chain variable domain of TCR clone 110560 (TRBV11-2, TRBJ2-2)
CASSLGGGELFF

SEQ ID NO: 221121 - protein, 12 aa, Homo sapiens
  CDR3 for alpha chain variable domain of TCR clone 110561 (TRAV17, TRAJ39)
CATGAAGNMRTF

SEQ ID NO: 221122 - protein, 14 aa, Homo sapiens
  CDR3 for beta chain variable domain of TCR clone 110561 (TRBV7-9, TRBJ1-2)
CASSRQGANYGYTF

SEQ ID NO: 221123 - protein, 13 aa, Homo sapiens
  CDR3 for alpha chain variable domain of TCR clone 110562 (TRAV8-6, TRAJ8)
CAVSNTGFQKLVF

SEQ ID NO: 221124 - protein, 15 aa, Homo sapiens
  CDR3 for beta chain variable domain of TCR clone 110562 (TRBV28, TRBJ2-5)
CAISSGRTIQETQYF

SEQ ID NO: 221125 - protein, 16 aa, Homo sapiens
  CDR3 for alpha chain variable domain of TCR clone 110563 (TRAV17, TRAJ54)
CATDSDIIQGAQKLVF

SEQ ID NO: 221126 - protein, 16 aa, Homo sapiens
  CDR3 for beta chain variable domain of TCR clone 110563 (TRBV28, TRBJ1-4)
CASSSRTGAANEKLFF

SEQ ID NO: 221127 - protein, 16 aa, Homo sapiens
  CDR3 for alpha chain variable domain of TCR clone 110564 (TRAV30, TRAJ24)
CGTEIVDADSWGNFQF

SEQ ID NO: 221128 - protein, 19 aa, Homo sapiens
  CDR3 for beta chain variable domain of TCR clone 110564 (TRBV25-1, TRBJ2-2)
CAILVYRVDRGRKTGELFF

SEQ ID NO: 221129 - protein, 11 aa, Homo sapiens
  CDR3 for alpha chain variable domain of TCR clone 110565 (TRAV16, TRAJ29)
WAPSGNTPLVF

SEQ ID NO: 221130 - protein, 15 aa, Homo sapiens
  CDR3 for beta chain variable domain of TCR clone 110565 (TRBV5-7, TRBJ2-7)
CASSPYFEGSYEQYL

SEQ ID NO: 221131 - protein, 13 aa, Homo sapiens
  CDR3 for alpha chain variable domain of TCR clone 110566 (TRAV13-1, TRAJ39)
CSKYSNAGNMLTF

SEQ ID NO: 221132 - protein, 15 aa, Homo sapiens
  CDR3 for beta chain variable domain of TCR clone 110566 (TRBV20-1, TRBJ1-4)
QCSGQGLLTNEKLFF

SEQ ID NO: 221133 - protein, 12 aa, Homo sapiens
  CDR3 for alpha chain variable domain of TCR clone 110567 (TRAV13-1, TRAJ20)
CAASRGDYKLSF

SEQ ID NO: 221134 - protein, 16 aa, Homo sapiens
  CDR3 for beta chain variable domain of TCR clone 110567 (TRBV12-5, TRBJ2-5)
CASGPRTSGNQETQYF

SEQ ID NO: 221135 - protein, 18 aa, Homo sapiens
  CDR3 for alpha chain variable domain of TCR clone 110568 (TRAV21, TRAJ52)
CAVRPSPAGGTSYGKLTF

SEQ ID NO: 221136 - protein, 12 aa, Homo sapiens
  CDR3 for beta chain variable domain of TCR clone 110568 (TRBV12-4, TRBJ1-3)
CASSFSGNTIYF

SEQ ID NO: 221137 - protein, 14 aa, Homo sapiens
  CDR3 for alpha chain variable domain of TCR clone 110569 (TRAV38-1, TRAJ43)
CAFMKHNNNNDIRF

SEQ ID NO: 221138 - protein, 15 aa, Homo sapiens
  CDR3 for beta chain variable domain of TCR clone 110569 (TRBV9, TRBJ1-6)
CASSVAGTGDSPLHF

SEQ ID NO: 221139 - protein, 13 aa, Homo sapiens
  CDR3 for alpha chain variable domain of TCR clone 110570 (TRAV21, TRAJ15)
CAVANQAGTALIF

SEQ ID NO: 221140 - protein, 15 aa, Homo sapiens
  CDR3 for beta chain variable domain of TCR clone 110570 (TRBV7-9, TRBJ1-6)
CASSSPGRGNSPLHF

SEQ ID NO: 221141 - protein, 15 aa, Homo sapiens
  CDR3 for alpha chain variable domain of TCR clone 110571 (TRAV8-4, TRAJ47)
CAVSDPEEYGNKMVF

SEQ ID NO: 221142 - protein, 15 aa, Homo sapiens
  CDR3 for beta chain variable domain of TCR clone 110571 (TRBV11-2, TRBJ2-1)
CASSLGPDSYNEQFF

SEQ ID NO: 221143 - protein, 13 aa, Homo sapiens
  CDR3 for alpha chain variable domain of TCR clone 110572 (TRAV8-3, TRAJ36)
CAVGATGANNRFF

SEQ ID NO: 221144 - protein, 13 aa, Homo sapiens
  CDR3 for beta chain variable domain of TCR clone 110572 (TRBV12-4, TRBJ1-2)
CASSLRQGKGYTF

SEQ ID NO: 221145 - protein, 14 aa, Homo sapiens
  CDR3 for alpha chain variable domain of TCR clone 110573 (TRAV12-2, TRAJ9)
CAVNALEGGFKTIF

SEQ ID NO: 221146 - protein, 17 aa, Homo sapiens
  CDR3 for beta chain variable domain of TCR clone 110573 (TRBV13, TRBJ2-3)
CASSLSRVAGGRNTQYF

SEQ ID NO: 221147 - protein, 12 aa, Homo sapiens
  CDR3 for alpha chain variable domain of TCR clone 110574 (TRAV3, TRAJ31)
CAVRPRGPRLMF

SEQ ID NO: 221148 - protein, 17 aa, Homo sapiens
  CDR3 for beta chain variable domain of TCR clone 110574 (TRBV7-9, TRBJ1-5)
CASSASQGGYSNQPHHF

SEQ ID NO: 221149 - protein, 13 aa, Homo sapiens
  CDR3 for alpha chain variable domain of TCR clone 110575 (TRAV2, TRAJ40)
CAVVTSGTYKYIF

SEQ ID NO: 221150 - protein, 17 aa, Homo sapiens
  CDR3 for beta chain variable domain of TCR clone 110575 (TRBV7-8, TRBJ2-7)
CASSFTSGRPPSYEQYF

SEQ ID NO: 221151 - protein, 17 aa, Homo sapiens
  CDR3 for alpha chain variable domain of TCR clone 110576 (TRAV17, TRAJ7)
CATLGRLACGKGNQVVV

SEQ ID NO: 221152 - protein, 13 aa, Homo sapiens
  CDR3 for beta chain variable domain of TCR clone 110576 (TRBV12-4, TRBJ2-7)
CASSLERVREQYF

SEQ ID NO: 221153 - protein, 14 aa, Homo sapiens
  CDR3 for alpha chain variable domain of TCR clone 110577 (TRAV17, TRAJ54)
CATDANQGAQKLVL

SEQ ID NO: 221154 - protein, 12 aa, Homo sapiens
  CDR3 for beta chain variable domain of TCR clone 110577 (TRBV7-9, TRBJ2-7)
CASSIKREEQYF

SEQ ID NO: 221155 - protein, 18 aa, Homo sapiens
  CDR3 for alpha chain variable domain of TCR clone 110578 (TRAV26-2, TRAJ45)
CILRVDEYSGGGADGLTF

SEQ ID NO: 221156 - protein, 17 aa, Homo sapiens
  CDR3 for beta chain variable domain of TCR clone 110578 (TRBV25-1, TRBJ2-1)
CASSAYGQGRGVYEQFF

SEQ ID NO: 221157 - protein, 14 aa, Homo sapiens
  CDR3 for alpha chain variable domain of TCR clone 110579 (TRAV12-2, TRAJ40)
CAVKIPSGTYKYIF

SEQ ID NO: 221158 - protein, 14 aa, Homo sapiens
  CDR3 for beta chain variable domain of TCR clone 110579 (TRBV13, TRBJ2-7)
CASSLKGASYEQYF

SEQ ID NO: 221159 - protein, 12 aa, Homo sapiens
  CDR3 for alpha chain variable domain of TCR clone 110580 (TRAV29/DV5, TRAJ15)
CASNQAGTALIF

SEQ ID NO: 221160 - protein, 16 aa, Homo sapiens
  CDR3 for beta chain variable domain of TCR clone 110580 (TRBV11-3, TRBJ2-5)
CASSSVVAASTETQYF

SEQ ID NO: 221161 - protein, 17 aa, Homo sapiens
  CDR3 for alpha chain variable domain of TCR clone 110581 (TRAV14/DV4, TRAJ10)
CAMREGRTTGGGNKLTF

SEQ ID NO: 221162 - protein, 16 aa, Homo sapiens
  CDR3 for beta chain variable domain of TCR clone 110581 (TRBV6-1, TRBJ2-5)
CASSETLDRGAETQYF

SEQ ID NO: 221163 - protein, 15 aa, Homo sapiens
  CDR3 for alpha chain variable domain of TCR clone 110582 (TRAV17, TRAJ4)
CATGTWSGGYNKLIF

SEQ ID NO: 221164 - protein, 15 aa, Homo sapiens
  CDR3 for beta chain variable domain of TCR clone 110582 (TRBV2, TRBJ2-1)
CASSELAGSYNEQFF

SEQ ID NO: 221165 - protein, 11 aa, Homo sapiens
  CDR3 for alpha chain variable domain of TCR clone 110583 (TRAV3, TRAJ21)
CAVGNFNKFYF

SEQ ID NO: 221166 - protein, 14 aa, Homo sapiens
  CDR3 for beta chain variable domain of TCR clone 110583 (TRBV20-1, TRBJ1-1)
CSARAVNGYTEAFF

SEQ ID NO: 221167 - protein, 12 aa, Homo sapiens
  CDR3 for alpha chain variable domain of TCR clone 110584 (TRAV16, TRAJ10)
CSRPGGGNKLTF

SEQ ID NO: 221168 - protein, 12 aa, Homo sapiens
  CDR3 for beta chain variable domain of TCR clone 110584 (TRBV11-3, TRBJ1-1)
CASSHRQGEAFF

SEQ ID NO: 221169 - protein, 22 aa, Homo sapiens
  CDR3 for alpha chain variable domain of TCR clone 110585 (TRAV12-2, TRAJ32)
RSSETPSPVIQPPKSATNKLIF

SEQ ID NO: 221170 - protein, 14 aa, Homo sapiens
  CDR3 for beta chain variable domain of TCR clone 110585 (TRBV7-3, TRBJ2-1)
CASSLSGSYNEQFF

SEQ ID NO: 221171 - protein, 13 aa, Homo sapiens
  CDR3 for alpha chain variable domain of TCR clone 110586 (TRAV21, TRAJ27)
CAARPGHAGKSTF

SEQ ID NO: 221172 - protein, 15 aa, Homo sapiens
  CDR3 for beta chain variable domain of TCR clone 110586 (TRBV12-4, TRBJ2-5)
CASSPPTGLQETQYF

SEQ ID NO: 221173 - protein, 14 aa, Homo sapiens
  CDR3 for alpha chain variable domain of TCR clone 110587 (TRAV1-2, TRAJ16)
CAVNRFSDGQKLLF

SEQ ID NO: 221174 - protein, 12 aa, Homo sapiens
  CDR3 for beta chain variable domain of TCR clone 110587 (TRBV5-1, TRBJ2-3)
CASSLAEGTQYF

SEQ ID NO: 221175 - protein, 16 aa, Homo sapiens
  CDR3 for alpha chain variable domain of TCR clone 110588 (TRAV30, TRAJ24)
CGTAIVDADSWGKFQF

SEQ ID NO: 221176 - protein, 12 aa, Homo sapiens
  CDR3 for beta chain variable domain of TCR clone 110588 (TRBV11-2, TRBJ2-1)
CASSPGNNEQFF

SEQ ID NO: 221177 - protein, 13 aa, Homo sapiens
  CDR3 for alpha chain variable domain of TCR clone 110589 (TRAV8-1, TRAJ34)
CAVNGKGTDKLTF

SEQ ID NO: 221178 - protein, 14 aa, Homo sapiens
  CDR3 for beta chain variable domain of TCR clone 110589 (TRBV27, TRBJ1-3)
CASRPRGLGDTIYF

SEQ ID NO: 221179 - protein, 14 aa, Homo sapiens
  CDR3 for alpha chain variable domain of TCR clone 110590 (TRAV3, TRAJ21)
SAVESQANFNKFYF

SEQ ID NO: 221180 - protein, 18 aa, Homo sapiens
  CDR3 for beta chain variable domain of TCR clone 110590 (TRBV7-9, TRBJ2-1)
CASSLAVSGTSGRNEQFF

SEQ ID NO: 221181 - protein, 14 aa, Homo sapiens
  CDR3 for alpha chain variable domain of TCR clone 110591 (TRAV23/DV6, TRAJ22)
CAASVSGSSRQLTF

SEQ ID NO: 221182 - protein, 16 aa, Homo sapiens
  CDR3 for beta chain variable domain of TCR clone 110591 (TRBV19, TRBJ2-2)
CASSFPGQGLAGELFF

SEQ ID NO: 221183 - protein, 17 aa, Homo sapiens
  CDR3 for alpha chain variable domain of TCR clone 110592 (TRAV3, TRAJ42)
CAVRDRDYGGSQGNLIF

SEQ ID NO: 221184 - protein, 16 aa, Homo sapiens
  CDR3 for beta chain variable domain of TCR clone 110592 (TRBV4-2, TRBJ2-3)
CASSLSSGGYTDTQYF

SEQ ID NO: 221185 - protein, 16 aa, Homo sapiens
  CDR3 for alpha chain variable domain of TCR clone 110593 (TRAV30, TRAJ24)
CGTEIVDADSWGKCQV

SEQ ID NO: 221186 - protein, 14 aa, Homo sapiens
  CDR3 for beta chain variable domain of TCR clone 110593 (TRBV12-5, TRBJ2-5)
CASGSRTHQETQYF

SEQ ID NO: 221187 - protein, 16 aa, Homo sapiens
  CDR3 for alpha chain variable domain of TCR clone 110594 (TRAV13-1, TRAJ48)
CAASIFGNFGNEKLTF

SEQ ID NO: 221188 - protein, 12 aa, Homo sapiens
  CDR3 for beta chain variable domain of TCR clone 110594 (TRBV14, TRBJ2-4)
CASSNLKSIQYI

SEQ ID NO: 221189 - protein, 12 aa, Homo sapiens
  CDR3 for alpha chain variable domain of TCR clone 110595 (TRAV13-2, TRAJ23)
CAERHRGGKLIS

SEQ ID NO: 221190 - protein, 17 aa, Homo sapiens
  CDR3 for beta chain variable domain of TCR clone 110595 (TRBV13, TRBJ2-3)
CASSLSRVAGGRNTQYF

SEQ ID NO: 221191 - protein, 15 aa, Homo sapiens
  CDR3 for alpha chain variable domain of TCR clone 110596 (TRAV8-3, TRAJ27)
CAVGPSKTNAGKSTF

SEQ ID NO: 221192 - protein, 13 aa, Homo sapiens
  CDR3 for beta chain variable domain of TCR clone 110596 (TRBV4-2, TRBJ1-1)
CASSQAGNTEAFF

SEQ ID NO: 221193 - protein, 15 aa, Homo sapiens
  CDR3 for alpha chain variable domain of TCR clone 110597 (TRAV4, TRAJ39)
CLVGPNNSSGNMLTF

SEQ ID NO: 221194 - protein, 16 aa, Homo sapiens
  CDR3 for beta chain variable domain of TCR clone 110597 (TRBV13, TRBJ2-2)
CASSPRTGEHTGELFF

SEQ ID NO: 221195 - protein, 11 aa, Homo sapiens
  CDR3 for alpha chain variable domain of TCR clone 110598 (TRAV1-2, TRAJ40)
CAVPGTYKYIF

SEQ ID NO: 221196 - protein, 15 aa, Homo sapiens
  CDR3 for beta chain variable domain of TCR clone 110598 (TRBV12-4, TRBJ2-5)
CASSPPTGLQETQYF

SEQ ID NO: 221197 - protein, 12 aa, Homo sapiens
  CDR3 for alpha chain variable domain of TCR clone 110599 (TRAV21, TRAJ39)
LPYNNAGNMLTF

SEQ ID NO: 221198 - protein, 14 aa, Homo sapiens
  CDR3 for beta chain variable domain of TCR clone 110599 (TRBV11-2, TRBJ1-2)
CASSLGTANYGYTF

SEQ ID NO: 221199 - protein, 15 aa, Homo sapiens
  CDR3 for alpha chain variable domain of TCR clone 110600 (TRAV8-3, TRAJ11)
CAVGLLNSGYSTLTF

SEQ ID NO: 221200 - protein, 12 aa, Homo sapiens
  CDR3 for beta chain variable domain of TCR clone 110600 (TRBV2, TRBJ2-1)
CAYGPPGNEQFF

SEQ ID NO: 221201 - protein, 11 aa, Homo sapiens
  CDR3 for alpha chain variable domain of TCR clone 110601 (TRAV1-1, TRAJ23)
CAVRQGGKLIF

SEQ ID NO: 221202 - protein, 17 aa, Homo sapiens
  CDR3 for beta chain variable domain of TCR clone 110601 (TRBV15, TRBJ1-2)
CATSGREIDVVNYGYTF

SEQ ID NO: 221203 - protein, 18 aa, Homo sapiens
  CDR3 for alpha chain variable domain of TCR clone 110602 (TRAV13-1, TRAJ52)
CAASKRSAGGTSYGKLTF

SEQ ID NO: 221204 - protein, 14 aa, Homo sapiens
  CDR3 for beta chain variable domain of TCR clone 110602 (TRBV12-4, TRBJ2-5)
CASGSRTHQETQYF

SEQ ID NO: 221205 - protein, 14 aa, Homo sapiens
  CDR3 for alpha chain variable domain of TCR clone 110603 (TRAV8-6, TRAJ54)
CAVSPALGAQKQVF

SEQ ID NO: 221206 - protein, 15 aa, Homo sapiens
  CDR3 for beta chain variable domain of TCR clone 110603 (TRBV4-1, TRBJ1-6)
CASSAGQGYNSPLHF

SEQ ID NO: 221207 - protein, 10 aa, Homo sapiens
  CDR3 for alpha chain variable domain of TCR clone 110604 (TRAV35, TRAJ45)
SGGGADGLTF

SEQ ID NO: 221208 - protein, 14 aa, Homo sapiens
  CDR3 for beta chain variable domain of TCR clone 110604 (TRBV20-1, TRBJ1-1)
CSAQTRIGGTEAFF

SEQ ID NO: 221209 - protein, 15 aa, Homo sapiens
  CDR3 for alpha chain variable domain of TCR clone 110605 (TRAV12-1, TRAJ44)
CVVFVNTGTASKLTF

SEQ ID NO: 221210 - protein, 17 aa, Homo sapiens
  CDR3 for beta chain variable domain of TCR clone 110605 (TRBV7-8, TRBJ2-6)
WASSAGTGGAGANVLTF

SEQ ID NO: 221211 - protein, 14 aa, Homo sapiens
  CDR3 for alpha chain variable domain of TCR clone 110606 (TRAV40, TRAJ33)
CLLVGMDSNYQLIW

SEQ ID NO: 221212 - protein, 15 aa, Homo sapiens
  CDR3 for beta chain variable domain of TCR clone 110606 (TRBV5-1, TRBJ2-2)
CASSLFGQNTGELFF

SEQ ID NO: 221213 - protein, 15 aa, Homo sapiens
  CDR3 for alpha chain variable domain of TCR clone 110607 (TRAV8-3, TRAJ15)
CAVGAPNQAGPALIF

SEQ ID NO: 221214 - protein, 14 aa, Homo sapiens
  CDR3 for beta chain variable domain of TCR clone 110607 (TRBV20-1, TRBJ2-1)
CSPNDEASYNEQFF

SEQ ID NO: 221215 - protein, 12 aa, Homo sapiens
  CDR3 for alpha chain variable domain of TCR clone 110608 (TRAV1-1, TRAJ8)
CAGGTGFQKLVF

SEQ ID NO: 221216 - protein, 16 aa, Homo sapiens
  CDR3 for beta chain variable domain of TCR clone 110608 (TRBV2, TRBJ2-1)
CASRPRSGGPYGEQFF

SEQ ID NO: 221217 - protein, 15 aa, Homo sapiens
  CDR3 for alpha chain variable domain of TCR clone 110609 (TRAV21, TRAJ53)
CATLNSGGSNYKLPF

SEQ ID NO: 221218 - protein, 15 aa, Homo sapiens
  CDR3 for beta chain variable domain of TCR clone 110609 (TRBV7-6, TRBJ1-5)
CASSQSSGINQPQHF

SEQ ID NO: 221219 - protein, 14 aa, Homo sapiens
  CDR3 for alpha chain variable domain of TCR clone 110610 (TRAV1-2, TRAJ16)
CAVNRFSDGQKLLF

SEQ ID NO: 221220 - protein, 15 aa, Homo sapiens
  CDR3 for beta chain variable domain of TCR clone 110610 (TRBV4-1, TRBJ1-2)
CASSQVDDRYYGYTF

SEQ ID NO: 221221 - protein, 13 aa, Homo sapiens
  CDR3 for alpha chain variable domain of TCR clone 110611 (TRAV12-1, TRAJ34)
CVVTGYNTDKLIF

SEQ ID NO: 221222 - protein, 16 aa, Homo sapiens
  CDR3 for beta chain variable domain of TCR clone 110611 (TRBV7-3, TRBJ2-2)
CASSLKRGTLSGELFF

SEQ ID NO: 221223 - protein, 17 aa, Homo sapiens
  CDR3 for alpha chain variable domain of TCR clone 110612 (TRAV26-1, TRAJ11)
CIVRVGQSNSGYSTPTF

SEQ ID NO: 221224 - protein, 15 aa, Homo sapiens
  CDR3 for beta chain variable domain of TCR clone 110612 (TRBV27, TRBJ2-5)
CASSLIPSGGETQYF

SEQ ID NO: 221225 - protein, 12 aa, Homo sapiens
  CDR3 for alpha chain variable domain of TCR clone 110613 (TRAV17, TRAJ57)
CATDGGSEKLVF

SEQ ID NO: 221226 - protein, 14 aa, Homo sapiens
  CDR3 for beta chain variable domain of TCR clone 110613 (TRBV7-2, TRBJ1-1)
CASSFLTGTTEAFF

SEQ ID NO: 221227 - protein, 15 aa, Homo sapiens
  CDR3 for alpha chain variable domain of TCR clone 110614 (TRAV3, TRAJ22)
CAVRNRGGSARQLTF

SEQ ID NO: 221228 - protein, 14 aa, Homo sapiens
  CDR3 for beta chain variable domain of TCR clone 110614 (TRBV19, TRBJ1-5)
CASSLGLIGQPQHF

SEQ ID NO: 221229 - protein, 13 aa, Homo sapiens
  CDR3 for alpha chain variable domain of TCR clone 110615 (TRAV1-2, TRAJ36)
CAVDQTVANNLFF

SEQ ID NO: 221230 - protein, 14 aa, Homo sapiens
  CDR3 for beta chain variable domain of TCR clone 110615 (TRBV20-1, TRBJ2-5)
CSAREMTKQETQYF

SEQ ID NO: 221231 - protein, 10 aa, Homo sapiens
  CDR3 for alpha chain variable domain of TCR clone 110616 (TRAV29/DV5, TRAJ48)
CATGGEKLTF

SEQ ID NO: 221232 - protein, 14 aa, Homo sapiens
  CDR3 for beta chain variable domain of TCR clone 110616 (TRBV7-9, TRBJ2-5)
CASSLAPDQETQYF

SEQ ID NO: 221233 - protein, 12 aa, Homo sapiens
  CDR3 for alpha chain variable domain of TCR clone 110617 (TRAV13-1, TRAJ15)
CAASQSGTALIF

SEQ ID NO: 221234 - protein, 14 aa, Homo sapiens
  CDR3 for beta chain variable domain of TCR clone 110617 (TRBV19, TRBJ2-1)
CASPTFVLSGEQFF

SEQ ID NO: 221235 - protein, 12 aa, Homo sapiens
  CDR3 for alpha chain variable domain of TCR clone 110618 (TRAV13-2, TRAJ37)
CAEKGNTGKLIF

SEQ ID NO: 221236 - protein, 13 aa, Homo sapiens
  CDR3 for beta chain variable domain of TCR clone 110618 (TRBV7-3, TRBJ1-1)
CASSQDWGAEAFF

SEQ ID NO: 221237 - protein, 15 aa, Homo sapiens
  CDR3 for alpha chain variable domain of TCR clone 110619 (TRAV26-1, TRAJ29)
CIVRVEGSGNTPLVF

SEQ ID NO: 221238 - protein, 14 aa, Homo sapiens
  CDR3 for beta chain variable domain of TCR clone 110619 (TRBV18, TRBJ1-1)
CASSPPTGRTEAFF

SEQ ID NO: 221239 - protein, 16 aa, Homo sapiens
  CDR3 for alpha chain variable domain of TCR clone 110620 (TRAV1-2, TRAJ18)
CAVRVERGSTLGRLYF

SEQ ID NO: 221240 - protein, 15 aa, Homo sapiens
  CDR3 for beta chain variable domain of TCR clone 110620 (TRBV11-3, TRBJ2-3)
CASLKDGREGDTQYF

SEQ ID NO: 221241 - protein, 15 aa, Homo sapiens
  CDR3 for alpha chain variable domain of TCR clone 110621 (TRAV27, TRAJ38)
CAGRFNSGNNRKLIW

SEQ ID NO: 221242 - protein, 13 aa, Homo sapiens
  CDR3 for beta chain variable domain of TCR clone 110621 (TRBV12-5, TRBJ2-3)
CASQNRGTDTQYF

SEQ ID NO: 221243 - protein, 13 aa, Homo sapiens
  CDR3 for alpha chain variable domain of TCR clone 110622 (TRAV25, TRAJ10)
CAGRTGGGDKLTF

SEQ ID NO: 221244 - protein, 15 aa, Homo sapiens
  CDR3 for beta chain variable domain of TCR clone 110622 (TRBV19, TRBJ1-5)
CASSILTGENQPQHF

SEQ ID NO: 221245 - protein, 14 aa, Homo sapiens
  CDR3 for alpha chain variable domain of TCR clone 110623 (TRAV12-3, TRAJ10)
SHLPLTGGGNKLTF

SEQ ID NO: 221246 - protein, 13 aa, Homo sapiens
  CDR3 for beta chain variable domain of TCR clone 110623 (TRBV28, TRBJ2-7)
CASKAGGVYEQYF

SEQ ID NO: 221247 - protein, 14 aa, Homo sapiens
  CDR3 for alpha chain variable domain of TCR clone 110624 (TRAV17, TRAJ31)
CATVLRNNNARLMF

SEQ ID NO: 221248 - protein, 14 aa, Homo sapiens
  CDR3 for beta chain variable domain of TCR clone 110624 (TRBV12-4, TRBJ2-5)
CACSLWQKQETQYF

SEQ ID NO: 221249 - protein, 14 aa, Homo sapiens
  CDR3 for alpha chain variable domain of TCR clone 110625 (TRAV2, TRAJ9)
CAVEDRRGGFKTIF

SEQ ID NO: 221250 - protein, 14 aa, Homo sapiens
  CDR3 for beta chain variable domain of TCR clone 110625 (TRBV6-1, TRBJ1-3)
CASVQGGGGNTIYF

SEQ ID NO: 221251 - protein, 12 aa, Homo sapiens
  CDR3 for alpha chain variable domain of TCR clone 110626 (TRAV2, TRAJ37)
CAVAGNTGKLIF

SEQ ID NO: 221252 - protein, 17 aa, Homo sapiens
  CDR3 for beta chain variable domain of TCR clone 110626 (TRBV28, TRBJ2-5)
CASSTPEGDALQETQYL

SEQ ID NO: 221253 - protein, 16 aa, Homo sapiens
  CDR3 for alpha chain variable domain of TCR clone 110627 (TRAV16, TRAJ4)
CALSRMFSGGYNKLIF

SEQ ID NO: 221254 - protein, 14 aa, Homo sapiens
  CDR3 for beta chain variable domain of TCR clone 110627 (TRBV7-9, TRBJ2-3)
CASSLEDGADTQYF

SEQ ID NO: 221255 - protein, 16 aa, Homo sapiens
  CDR3 for alpha chain variable domain of TCR clone 110628 (TRAV30, TRAJ24)
CGTEIVDADSWGKFQF

SEQ ID NO: 221256 - protein, 15 aa, Homo sapiens
  CDR3 for beta chain variable domain of TCR clone 110628 (TRBV7-2, TRBJ2-1)
CASSFRESSYNEQFF

SEQ ID NO: 221257 - protein, 13 aa, Homo sapiens
  CDR3 for alpha chain variable domain of TCR clone 110629 (TRAV36/DV7, TRAJ34)
CAVGEVNTDKLIF

SEQ ID NO: 221258 - protein, 17 aa, Homo sapiens
  CDR3 for beta chain variable domain of TCR clone 110629 (TRBV27, TRBJ2-3)
CASSFFPPNTSTDTQYF

SEQ ID NO: 221259 - protein, 15 aa, Homo sapiens
  CDR3 for alpha chain variable domain of TCR clone 110630 (TRAV8-3, TRAJ45)
CASSYSGGGADGLTF

SEQ ID NO: 221260 - protein, 15 aa, Homo sapiens
  CDR3 for beta chain variable domain of TCR clone 110630 (TRBV27, TRBJ1-4)
CASSPLHATNEKLFF

SEQ ID NO: 221261 - protein, 14 aa, Homo sapiens
  CDR3 for alpha chain variable domain of TCR clone 110631 (TRAV13-2, TRAJ43)
CSEIPTYNNNDMRF

SEQ ID NO: 221262 - protein, 15 aa, Homo sapiens
  CDR3 for beta chain variable domain of TCR clone 110631 (TRBV7-9, TRBJ2-2)
CASGPLDTFPGELFF

SEQ ID NO: 221263 - protein, 13 aa, Homo sapiens
  CDR3 for alpha chain variable domain of TCR clone 110632 (TRAV2, TRAJ40)
CAVVTAGTYKYIF

SEQ ID NO: 221264 - protein, 15 aa, Homo sapiens
  CDR3 for beta chain variable domain of TCR clone 110632 (TRBV9, TRBJ1-6)
CASSVAGTGDSPLHF

SEQ ID NO: 221265 - protein, 16 aa, Homo sapiens
  CDR3 for alpha chain variable domain of TCR clone 110633 (TRAV21, TRAJ37)
CAVRTAGSSNTGKLIF

SEQ ID NO: 221266 - protein, 16 aa, Homo sapiens
  CDR3 for beta chain variable domain of TCR clone 110633 (TRBV10-3, TRBJ2-1)
CAISGVGDGGGGEQFF

SEQ ID NO: 221267 - protein, 11 aa, Homo sapiens
  CDR3 for alpha chain variable domain of TCR clone 110634 (TRAV3, TRAJ21)
CAVGNFNKFYF

SEQ ID NO: 221268 - protein, 15 aa, Homo sapiens
  CDR3 for beta chain variable domain of TCR clone 110634 (TRBV19, TRBJ1-2)
CAWSVGQVLNYGYTF

SEQ ID NO: 221269 - protein, 12 aa, Homo sapiens
  CDR3 for alpha chain variable domain of TCR clone 110635 (TRAV12-2, TRAJ10)
WGVTGGGNKLTF

SEQ ID NO: 221270 - protein, 14 aa, Homo sapiens
  CDR3 for beta chain variable domain of TCR clone 110635 (TRBV12-4, TRBJ1-4)
CASSRQGANEELFF

SEQ ID NO: 221271 - protein, 13 aa, Homo sapiens
  CDR3 for alpha chain variable domain of TCR clone 110636 (TRAV8-4, TRAJ10)
CAAFTGGGNKLTF

SEQ ID NO: 221272 - protein, 11 aa, Homo sapiens
  CDR3 for beta chain variable domain of TCR clone 110636 (TRBV3-1, TRBJ2-1)
CQQPRVQWQFF

SEQ ID NO: 221273 - protein, 16 aa, Homo sapiens
  CDR3 for alpha chain variable domain of TCR clone 110637 (TRAV3, TRAJ37)
CALRPHGSGNTGKLIF

SEQ ID NO: 221274 - protein, 16 aa, Homo sapiens
  CDR3 for beta chain variable domain of TCR clone 110637 (TRBV20-1, TRBJ1-4)
CSAPGQGLLTNEKLFF

SEQ ID NO: 221275 - protein, 11 aa, Homo sapiens
  CDR3 for alpha chain variable domain of TCR clone 110638 (TRAV2, TRAJ33)
CAVDSNYQLIW

SEQ ID NO: 221276 - protein, 13 aa, Homo sapiens
  CDR3 for beta chain variable domain of TCR clone 110638 (TRBV9, TRBJ2-1)
CASSPSGGNEQFF

SEQ ID NO: 221277 - protein, 15 aa, Homo sapiens
  CDR3 for alpha chain variable domain of TCR clone 110639 (TRAV26-1, TRAJ42)
FIVRVKGGSQGNLIF

SEQ ID NO: 221278 - protein, 14 aa, Homo sapiens
  CDR3 for beta chain variable domain of TCR clone 110639 (TRBV19, TRBJ2-2)
CATTVHANTGELFF

SEQ ID NO: 221279 - protein, 12 aa, Homo sapiens
  CDR3 for alpha chain variable domain of TCR clone 110640 (TRAV12-1, TRAJ40)
CVVYSGTYKYIF

SEQ ID NO: 221280 - protein, 15 aa, Homo sapiens
  CDR3 for beta chain variable domain of TCR clone 110640 (TRBV27, TRBJ1-6)
CASGFDRGLGSPLHF

SEQ ID NO: 221281 - protein, 14 aa, Homo sapiens
  CDR3 for alpha chain variable domain of TCR clone 110641 (TRAV2, TRAJ37)
CAVDFTSNTGKLIF

SEQ ID NO: 221282 - protein, 17 aa, Homo sapiens
  CDR3 for beta chain variable domain of TCR clone 110641 (TRBV7-3, TRBJ2-2)
CASSLSGTSGGTGELFF

SEQ ID NO: 221283 - protein, 15 aa, Homo sapiens
  CDR3 for alpha chain variable domain of TCR clone 110642 (TRAV36/DV7, TRAJ54)
CAVEKPVQGAQKRVF

SEQ ID NO: 221284 - protein, 14 aa, Homo sapiens
  CDR3 for beta chain variable domain of TCR clone 110642 (TRBV4-3, TRBJ2-2)
CASSQGHVTGELFF

SEQ ID NO: 221285 - protein, 17 aa, Homo sapiens
  CDR3 for alpha chain variable domain of TCR clone 110643 (TRAV3, TRAJ6)
CAVRDGPRAGGSYIPPF

SEQ ID NO: 221286 - protein, 14 aa, Homo sapiens
  CDR3 for beta chain variable domain of TCR clone 110643 (TRBV11-2, TRBJ2-3)
CASSRLARTDTQYF

SEQ ID NO: 221287 - protein, 11 aa, Homo sapiens
  CDR3 for alpha chain variable domain of TCR clone 110644 (TRAV17, TRAJ9)
CGFTGGFKTIF

SEQ ID NO: 221288 - protein, 15 aa, Homo sapiens
  CDR3 for beta chain variable domain of TCR clone 110644 (TRBV4-1, TRBJ1-4)
CASSPGRQGNEKLFF

SEQ ID NO: 221289 - protein, 18 aa, Homo sapiens
  CDR3 for alpha chain variable domain of TCR clone 110645 (TRAV21, TRAJ52)
CAGRPSPAGGTSYGKLTF

SEQ ID NO: 221290 - protein, 14 aa, Homo sapiens
  CDR3 for beta chain variable domain of TCR clone 110645 (TRBV4-1, TRBJ2-2)
CASSQAVNTGELFF

SEQ ID NO: 221291 - protein, 18 aa, Homo sapiens
  CDR3 for alpha chain variable domain of TCR clone 110646 (TRAV21, TRAJ52)
CAVRPSPAGGTSYGKLTF

SEQ ID NO: 221292 - protein, 14 aa, Homo sapiens
  CDR3 for beta chain variable domain of TCR clone 110646 (TRBV19, TRBJ1-5)
CASSIIRPGGRQHF

SEQ ID NO: 221293 - protein, 14 aa, Homo sapiens
  CDR3 for alpha chain variable domain of TCR clone 110647 (TRAV1-2, TRAJ6)
CAVSLSGGSYIPTF

SEQ ID NO: 221294 - protein, 14 aa, Homo sapiens
  CDR3 for beta chain variable domain of TCR clone 110647 (TRBV12-4, TRBJ1-6)
CASNLQGKGSPLHF

SEQ ID NO: 221295 - protein, 13 aa, Homo sapiens
  CDR3 for alpha chain variable domain of TCR clone 110648 (TRAV27, TRAJ45)
CRSSGGGADGLTF

SEQ ID NO: 221296 - protein, 15 aa, Homo sapiens
  CDR3 for beta chain variable domain of TCR clone 110648 (TRBV27, TRBJ2-1)
CASSNGGGSSNEQFF

SEQ ID NO: 221297 - protein, 15 aa, Homo sapiens
  CDR3 for alpha chain variable domain of TCR clone 110649 (TRAV4, TRAJ28)
CLVEGAGAGSYQLTF

SEQ ID NO: 221298 - protein, 15 aa, Homo sapiens
  CDR3 for beta chain variable domain of TCR clone 110649 (TRBV9, TRBJ2-3)
CASSVRGLAVDTQYF

SEQ ID NO: 221299 - protein, 17 aa, Homo sapiens
  CDR3 for alpha chain variable domain of TCR clone 110650 (TRAV26-1, TRAJ37)
CIVRVITVSSNTGKLIF

SEQ ID NO: 221300 - protein, 14 aa, Homo sapiens
  CDR3 for beta chain variable domain of TCR clone 110650 (TRBV4-2, TRBJ2-1)
CASGLDRAYNEQFF

SEQ ID NO: 221301 - protein, 15 aa, Homo sapiens
  CDR3 for alpha chain variable domain of TCR clone 110651 (TRAV12-2, TRAJ43)
CAFDRRFGAGTRLTV

SEQ ID NO: 221302 - protein, 18 aa, Homo sapiens
  CDR3 for beta chain variable domain of TCR clone 110651 (TRBV20-1, TRBJ2-3)
CSASGLAGGPGTTDTQYF

SEQ ID NO: 221303 - protein, 13 aa, Homo sapiens
  CDR3 for alpha chain variable domain of TCR clone 110652 (TRAV8-3, TRAJ36)
CAVGATGANNLFF

SEQ ID NO: 221304 - protein, 14 aa, Homo sapiens
  CDR3 for beta chain variable domain of TCR clone 110652 (TRBV2, TRBJ1-5)
CASSGTVSNQPQHF

SEQ ID NO: 221305 - protein, 15 aa, Homo sapiens
  CDR3 for alpha chain variable domain of TCR clone 110653 (TRAV3, TRAJ37)
CAVIRSSSNTGKLIF

SEQ ID NO: 221306 - protein, 14 aa, Homo sapiens
  CDR3 for beta chain variable domain of TCR clone 110653 (TRBV20-1, TRBJ2-7)
CSAKRGRSSYEQYF

SEQ ID NO: 221307 - protein, 16 aa, Homo sapiens
  CDR3 for alpha chain variable domain of TCR clone 110654 (TRAV2, TRAJ5)
CAVETGMDTGRRALTF

SEQ ID NO: 221308 - protein, 14 aa, Homo sapiens
  CDR3 for beta chain variable domain of TCR clone 110654 (TRBV7-3, TRBJ2-3)
CASSQGTSTDTQYF

SEQ ID NO: 221309 - protein, 15 aa, Homo sapiens
  CDR3 for alpha chain variable domain of TCR clone 110655 (TRAV16, TRAJ4)
CSKSYVFWWLNKLIF

SEQ ID NO: 221310 - protein, 16 aa, Homo sapiens
  CDR3 for beta chain variable domain of TCR clone 110655 (TRBV24-1, TRBJ2-3)
CATSDPGTGATDTQYF

SEQ ID NO: 221311 - protein, 14 aa, Homo sapiens
  CDR3 for alpha chain variable domain of TCR clone 110656 (TRAV12-2, TRAJ17)
CAALFKAAGNQLTF

SEQ ID NO: 221312 - protein, 16 aa, Homo sapiens
  CDR3 for beta chain variable domain of TCR clone 110656 (TRBV20-1, TRBJ2-2)
CSASASGIPGAGELFF

SEQ ID NO: 221313 - protein, 18 aa, Homo sapiens
  CDR3 for alpha chain variable domain of TCR clone 110657 (TRAV21, TRAJ52)
CAVRPSPAGGTSYGKLTF

SEQ ID NO: 221314 - protein, 13 aa, Homo sapiens
  CDR3 for beta chain variable domain of TCR clone 110657 (TRBV7-3, TRBJ1-1)
CASSQDWGAEAFV

SEQ ID NO: 221315 - protein, 13 aa, Homo sapiens
  CDR3 for alpha chain variable domain of TCR clone 110658 (TRAV27, TRAJ54)
CAGAGQGAQKLVF

SEQ ID NO: 221316 - protein, 15 aa, Homo sapiens
  CDR3 for beta chain variable domain of TCR clone 110658 (TRBV18, TRBJ2-6)
CASSASYAGANVLTF

SEQ ID NO: 221317 - protein, 15 aa, Homo sapiens
  CDR3 for alpha chain variable domain of TCR clone 110659 (TRAV3, TRAJ22)
CAVRDRGGSARQPTF

SEQ ID NO: 221318 - protein, 17 aa, Homo sapiens
  CDR3 for beta chain variable domain of TCR clone 110659 (TRBV13, TRBJ2-3)
CASSLSRVAGGRNTQYF

SEQ ID NO: 221319 - protein, 14 aa, Homo sapiens
  CDR3 for alpha chain variable domain of TCR clone 110660 (TRAV1-2, TRAJ8)
CAVREDTGFQKLVF

SEQ ID NO: 221320 - protein, 13 aa, Homo sapiens
  CDR3 for beta chain variable domain of TCR clone 110660 (TRBV7-6, TRBJ2-7)
CASSLDHTHEQYF

SEQ ID NO: 221321 - protein, 12 aa, Homo sapiens
  CDR3 for alpha chain variable domain of TCR clone 110661 (TRAV2, TRAJ31)
CAVEDSNARLMF

SEQ ID NO: 221322 - protein, 15 aa, Homo sapiens
  CDR3 for beta chain variable domain of TCR clone 110661 (TRBV5-1, TRBJ2-3)
CASSVTSGSTDTQYF

SEQ ID NO: 221323 - protein, 13 aa, Homo sapiens
  CDR3 for alpha chain variable domain of TCR clone 110662 (TRAV13-1, TRAJ6)
CAARRGGSYIPTF

SEQ ID NO: 221324 - protein, 13 aa, Homo sapiens
  CDR3 for beta chain variable domain of TCR clone 110662 (TRBV7-9, TRBJ1-2)
CASSLKQNYGYTF

SEQ ID NO: 221325 - protein, 13 aa, Homo sapiens
  CDR3 for alpha chain variable domain of TCR clone 110663 (TRAV20, TRAJ20)
CAVQAGSGYKLSF

SEQ ID NO: 221326 - protein, 15 aa, Homo sapiens
  CDR3 for beta chain variable domain of TCR clone 110663 (TRBV7-3, TRBJ2-2)
CASSETGQGTGELFF

SEQ ID NO: 221327 - protein, 17 aa, Homo sapiens
  CDR3 for alpha chain variable domain of TCR clone 110664 (TRAV26-2, TRAJ42)
CILRDVGYGGSQGNSIF

SEQ ID NO: 221328 - protein, 16 aa, Homo sapiens
  CDR3 for beta chain variable domain of TCR clone 110664 (TRBV12-4, TRBJ2-7)
CASSLIGGTGTYEQYF

SEQ ID NO: 221329 - protein, 15 aa, Homo sapiens
  CDR3 for alpha chain variable domain of TCR clone 110665 (TRAV3, TRAJ15)
CAVRTANQAGTALIF

SEQ ID NO: 221330 - protein, 14 aa, Homo sapiens
  CDR3 for beta chain variable domain of TCR clone 110665 (TRBV4-1, TRBJ2-2)
CASSQAVNTGELFF

SEQ ID NO: 221331 - protein, 15 aa, Homo sapiens
  CDR3 for alpha chain variable domain of TCR clone 110666 (TRAV26-1, TRAJ38)
CIADNAGNNHIQNPD

SEQ ID NO: 221332 - protein, 13 aa, Homo sapiens
  CDR3 for beta chain variable domain of TCR clone 110666 (TRBV10-3, TRBJ2-7)
CASKLAVNYEQYF

SEQ ID NO: 221333 - protein, 16 aa, Homo sapiens
  CDR3 for alpha chain variable domain of TCR clone 110667 (TRAV12-3, TRAJ53)
CAMSPGSGGSNYKLTF

SEQ ID NO: 221334 - protein, 17 aa, Homo sapiens
  CDR3 for beta chain variable domain of TCR clone 110667 (TRBV4-1, TRBJ2-1)
CASSHRDSGSSYNEQFF

SEQ ID NO: 221335 - protein, 12 aa, Homo sapiens
  CDR3 for alpha chain variable domain of TCR clone 110668 (TRAV36/DV7, TRAJ54)
CAVVRGAQKLVF

SEQ ID NO: 221336 - protein, 14 aa, Homo sapiens
  CDR3 for beta chain variable domain of TCR clone 110668 (TRBV7-3, TRBJ1-1)
CASSVEGGNTEAFF

SEQ ID NO: 221337 - protein, 18 aa, Homo sapiens
  CDR3 for alpha chain variable domain of TCR clone 110669 (TRAV26-2, TRAJ54)
CILRDEEVGIQGAQKLVF

SEQ ID NO: 221338 - protein, 16 aa, Homo sapiens
  CDR3 for beta chain variable domain of TCR clone 110669 (TRBV6-1, TRBJ2-5)
CASSETLDRGAETQYF

SEQ ID NO: 221339 - protein, 20 aa, Homo sapiens
  CDR3 for alpha chain variable domain of TCR clone 110670 (TRAV1-1, TRAJ4)
CLLLLRCEGFLSGGYNKLIF

SEQ ID NO: 221340 - protein, 15 aa, Homo sapiens
  CDR3 for beta chain variable domain of TCR clone 110670 (TRBV28, TRBJ1-3)
CASSLAGSSGNTIYF

SEQ ID NO: 221341 - protein, 15 aa, Homo sapiens
  CDR3 for alpha chain variable domain of TCR clone 110671 (TRAV6, TRAJ4)
CALGGFSGGYNKLIF

SEQ ID NO: 221342 - protein, 13 aa, Homo sapiens
  CDR3 for beta chain variable domain of TCR clone 110671 (TRBV19, TRBJ1-2)
CASSVPGQDGDTF

SEQ ID NO: 221343 - protein, 16 aa, Homo sapiens
  CDR3 for alpha chain variable domain of TCR clone 110672 (TRAV3, TRAJ21)
CAVRDIERGNFNKFYF

SEQ ID NO: 221344 - protein, 14 aa, Homo sapiens
  CDR3 for beta chain variable domain of TCR clone 110672 (TRBV7-2, TRBJ2-7)
CASSLYPGRYEQYF

SEQ ID NO: 221345 - protein, 11 aa, Homo sapiens
  CDR3 for alpha chain variable domain of TCR clone 110673 (TRAV13-1, TRAJ15)
CAATPGTALIF

SEQ ID NO: 221346 - protein, 17 aa, Homo sapiens
  CDR3 for beta chain variable domain of TCR clone 110673 (TRBV13, TRBJ2-3)
CASSLSRVAGGEEYAVF

SEQ ID NO: 221347 - protein, 16 aa, Homo sapiens
  CDR3 for alpha chain variable domain of TCR clone 110674 (TRAV30, TRAJ24)
CGTAIVDADSWGKFQF

SEQ ID NO: 221348 - protein, 14 aa, Homo sapiens
  CDR3 for beta chain variable domain of TCR clone 110674 (TRBV7-9, TRBJ2-4)
CASSLAMGGNIQYF

SEQ ID NO: 221349 - protein, 15 aa, Homo sapiens
  CDR3 for alpha chain variable domain of TCR clone 110675 (TRAV10, TRAJ41)
CVVSFVSNSGYALNF

SEQ ID NO: 221350 - protein, 15 aa, Homo sapiens
  CDR3 for beta chain variable domain of TCR clone 110675 (TRBV6-3, TRBJ2-7)
CASSSPGTVFYEQYF

SEQ ID NO: 221351 - protein, 12 aa, Homo sapiens
  CDR3 for alpha chain variable domain of TCR clone 110676 (TRAV12-3, TRAJ40)
CAMSSGTYKYIF

SEQ ID NO: 221352 - protein, 20 aa, Homo sapiens
  CDR3 for beta chain variable domain of TCR clone 110676 (TRBV7-8, TRBJ2-2)
CDSSHLFPGPTIHITGELFF

SEQ ID NO: 221353 - protein, 13 aa, Homo sapiens
  CDR3 for alpha chain variable domain of TCR clone 110677 (TRAV12-3, TRAJ21)
CAPGPPNFNKFYF

SEQ ID NO: 221354 - protein, 16 aa, Homo sapiens
  CDR3 for beta chain variable domain of TCR clone 110677 (TRBV5-1, TRBJ2-2)
CASSSYREGDTGELFF

SEQ ID NO: 221355 - protein, 14 aa, Homo sapiens
  CDR3 for alpha chain variable domain of TCR clone 110678 (TRAV14/DV4, TRAJ54)
CAMREAPGAQKLAF

SEQ ID NO: 221356 - protein, 15 aa, Homo sapiens
  CDR3 for beta chain variable domain of TCR clone 110678 (TRBV5-1, TRBJ2-7)
CASSLNGGPAREQYF

SEQ ID NO: 221357 - protein, 11 aa, Homo sapiens
  CDR3 for alpha chain variable domain of TCR clone 110679 (TRAV39, TRAJ49)
CAVDISTQFYF

SEQ ID NO: 221358 - protein, 11 aa, Homo sapiens
  CDR3 for beta chain variable domain of TCR clone 110679 (TRBV7-8, TRBJ2-7)
CASSISLEQYF

SEQ ID NO: 221359 - protein, 14 aa, Homo sapiens
  CDR3 for alpha chain variable domain of TCR clone 110680 (TRAV13-2, TRAJ17)
CAENSKAAGNKLTF

SEQ ID NO: 221360 - protein, 16 aa, Homo sapiens
  CDR3 for beta chain variable domain of TCR clone 110680 (TRBV7-2, TRBJ2-2)
CASSLRGQANTGELFF

SEQ ID NO: 221361 - protein, 19 aa, Homo sapiens
  CDR3 for alpha chain variable domain of TCR clone 110681 (TRAV25, TRAJ20)
TATQTTDVGILPHDYKLSF

SEQ ID NO: 221362 - protein, 17 aa, Homo sapiens
  CDR3 for beta chain variable domain of TCR clone 110681 (TRBV18, TRBJ2-1)
CASSKGLSGGADNEQFF

SEQ ID NO: 221363 - protein, 14 aa, Homo sapiens
  CDR3 for alpha chain variable domain of TCR clone 110682 (TRAV1-2, TRAJ16)
CAVNRFSDGQKLLF

SEQ ID NO: 221364 - protein, 16 aa, Homo sapiens
  CDR3 for beta chain variable domain of TCR clone 110682 (TRBV20-1, TRBJ2-1)
CSALTWTSGSYNEQFF

SEQ ID NO: 221365 - protein, 12 aa, Homo sapiens
  CDR3 for alpha chain variable domain of TCR clone 110683 (TRAV12-3, TRAJ20)
CAMVRGDYKLSF

SEQ ID NO: 221366 - protein, 16 aa, Homo sapiens
  CDR3 for beta chain variable domain of TCR clone 110683 (TRBV5-1, TRBJ2-3)
CASSWGLAVYTDTQYF

SEQ ID NO: 221367 - protein, 15 aa, Homo sapiens
  CDR3 for alpha chain variable domain of TCR clone 110684 (TRAV3, TRAJ17)
CAVRDGLAAGNKLTF

SEQ ID NO: 221368 - protein, 12 aa, Homo sapiens
  CDR3 for beta chain variable domain of TCR clone 110684 (TRBV12-4, TRBJ2-1)
CASSPGRNEQFF

SEQ ID NO: 221369 - protein, 13 aa, Homo sapiens
  CDR3 for alpha chain variable domain of TCR clone 110685 (TRAV1-2, TRAJ20)
CAVRDGNDYKLSF

SEQ ID NO: 221370 - protein, 13 aa, Homo sapiens
  CDR3 for beta chain variable domain of TCR clone 110685 (TRBV28, TRBJ2-4)
CASSQSSKNIQYF

SEQ ID NO: 221371 - protein, 11 aa, Homo sapiens
  CDR3 for alpha chain variable domain of TCR clone 110686 (TRAV17, TRAJ31)
CATSNNARLMF

SEQ ID NO: 221372 - protein, 13 aa, Homo sapiens
  CDR3 for beta chain variable domain of TCR clone 110686 (TRBV27, TRBJ2-7)
CASGRGGAYEQYF

SEQ ID NO: 221373 - protein, 13 aa, Homo sapiens
  CDR3 for alpha chain variable domain of TCR clone 110687 (TRAV2, TRAJ29)
CAAQNSGNTPLVF

SEQ ID NO: 221374 - protein, 14 aa, Homo sapiens
  CDR3 for beta chain variable domain of TCR clone 110687 (TRBV7-9, TRBJ2-4)
CARSLAMGGNIQYF

SEQ ID NO: 221375 - protein, 14 aa, Homo sapiens
  CDR3 for alpha chain variable domain of TCR clone 110688 (TRAV23/DV6, TRAJ11)
CAALIGGGYSTLTF

SEQ ID NO: 221376 - protein, 14 aa, Homo sapiens
  CDR3 for beta chain variable domain of TCR clone 110688 (TRBV5-1, TRBJ2-7)
CASSRGESLYEQYF

SEQ ID NO: 221377 - protein, 13 aa, Homo sapiens
  CDR3 for alpha chain variable domain of TCR clone 110689 (TRAV12-2, TRAJ52)
CAVGGTSYGKLTF

SEQ ID NO: 221378 - protein, 14 aa, Homo sapiens
  CDR3 for beta chain variable domain of TCR clone 110689 (TRBV19, TRBJ2-1)
CASPTLVLSGEQSF

SEQ ID NO: 221379 - protein, 15 aa, Homo sapiens
  CDR3 for alpha chain variable domain of TCR clone 110690 (TRAV3, TRAJ3)
CAVRDRDSSASKIIF

SEQ ID NO: 221380 - protein, 15 aa, Homo sapiens
  CDR3 for beta chain variable domain of TCR clone 110690 (TRBV10-3, TRBJ2-3)
CAISLTSGGTDTQYF

SEQ ID NO: 221381 - protein, 14 aa, Homo sapiens
  CDR3 for alpha chain variable domain of TCR clone 110691 (TRAV5, TRAJ4)
CAASFSGGYNKLLF

SEQ ID NO: 221382 - protein, 19 aa, Homo sapiens
  CDR3 for beta chain variable domain of TCR clone 110691 (TRBV2, TRBJ2-7)
CASSDDETSGRANDYEQYF

SEQ ID NO: 221383 - protein, 14 aa, Homo sapiens
  CDR3 for alpha chain variable domain of TCR clone 110692 (TRAV38-1, TRAJ29)
WAFITPSGNTPLVF

SEQ ID NO: 221384 - protein, 14 aa, Homo sapiens
  CDR3 for beta chain variable domain of TCR clone 110692 (TRBV18, TRBJ2-7)
CASSPRGGAYEQYF

SEQ ID NO: 221385 - protein, 12 aa, Homo sapiens
  CDR3 for alpha chain variable domain of TCR clone 110693 (TRAV16, TRAJ26)
CALRSYDQNFVF

SEQ ID NO: 221386 - protein, 14 aa, Homo sapiens
  CDR3 for beta chain variable domain of TCR clone 110693 (TRBV10-3, TRBJ2-1)
CAISSDLAYNEQFF

SEQ ID NO: 221387 - protein, 14 aa, Homo sapiens
  CDR3 for alpha chain variable domain of TCR clone 110694 (TRAV12-2, TRAJ17)
CAVLFKAAGNKLTF

SEQ ID NO: 221388 - protein, 13 aa, Homo sapiens
  CDR3 for beta chain variable domain of TCR clone 110694 (TRBV25-1, TRBJ2-5)
CASSESGRETQYF

SEQ ID NO: 221389 - protein, 13 aa, Homo sapiens
  CDR3 for alpha chain variable domain of TCR clone 110695 (TRAV3, TRAJ27)
CAVRPLGAGKSTF

SEQ ID NO: 221390 - protein, 14 aa, Homo sapiens
  CDR3 for beta chain variable domain of TCR clone 110695 (TRBV19, TRBJ2-2)
CASSGQGIAGELFF

SEQ ID NO: 221391 - protein, 12 aa, Homo sapiens
  CDR3 for alpha chain variable domain of TCR clone 110696 (TRAV1-1, TRAJ9)
CAVDTGGFKTIF

SEQ ID NO: 221392 - protein, 14 aa, Homo sapiens
  CDR3 for beta chain variable domain of TCR clone 110696 (TRBV7-9, TRBJ2-5)
CASSLDTAQETQYF

SEQ ID NO: 221393 - protein, 14 aa, Homo sapiens
  CDR3 for alpha chain variable domain of TCR clone 110697 (TRAV35, TRAJ33)
CAGSSPDSNYQLIW

SEQ ID NO: 221394 - protein, 15 aa, Homo sapiens
  CDR3 for beta chain variable domain of TCR clone 110697 (TRBV28, TRBJ2-5)
CASSPGQGSIETQYF

SEQ ID NO: 221395 - protein, 13 aa, Homo sapiens
  CDR3 for alpha chain variable domain of TCR clone 110698 (TRAV27, TRAJ6)
CAGGTRGSYIPTF

SEQ ID NO: 221396 - protein, 15 aa, Homo sapiens
  CDR3 for beta chain variable domain of TCR clone 110698 (TRBV5-7, TRBJ2-7)
CASSLGPGRGHEQYV

SEQ ID NO: 221397 - protein, 15 aa, Homo sapiens
  CDR3 for alpha chain variable domain of TCR clone 110699 (TRAV35, TRAJ20)
CAGQLVGSNDYKLSF

SEQ ID NO: 221398 - protein, 13 aa, Homo sapiens
  CDR3 for beta chain variable domain of TCR clone 110699 (TRBV19, TRBJ2-7)
CVSSKTGTHEQYF

SEQ ID NO: 221399 - protein, 17 aa, Homo sapiens
  CDR3 for alpha chain variable domain of TCR clone 110700 (TRAV3, TRAJ6)
CAVRDGPRAGGGYIPTF

SEQ ID NO: 221400 - protein, 13 aa, Homo sapiens
  CDR3 for beta chain variable domain of TCR clone 110700 (TRBV20-1, TRBJ1-1)
CSARGGGNTEAFF

SEQ ID NO: 221401 - protein, 14 aa, Homo sapiens
  CDR3 for alpha chain variable domain of TCR clone 110701 (TRAV13-1, TRAJ35)
CAASRGGFGNVLHF

SEQ ID NO: 221402 - protein, 13 aa, Homo sapiens
  CDR3 for beta chain variable domain of TCR clone 110701 (TRBV7-3, TRBJ1-1)
CASSQDWGAEAFF

SEQ ID NO: 221403 - protein, 17 aa, Homo sapiens
  CDR3 for alpha chain variable domain of TCR clone 110702 (TRAV3, TRAJ28)
CAVREAYSGAGSYQLTF

SEQ ID NO: 221404 - protein, 15 aa, Homo sapiens
  CDR3 for beta chain variable domain of TCR clone 110702 (TRBV19, TRBJ1-6)
CASGTQGAVGSPLHF

SEQ ID NO: 221405 - protein, 15 aa, Homo sapiens
  CDR3 for alpha chain variable domain of TCR clone 110703 (TRAV3, TRAJ22)
CAVRDRGGSARQLTF

SEQ ID NO: 221406 - protein, 15 aa, Homo sapiens
  CDR3 for beta chain variable domain of TCR clone 110703 (TRBV10-3, TRBJ2-3)
CAISLTSGGTDTQYL

SEQ ID NO: 221407 - protein, 13 aa, Homo sapiens
  CDR3 for alpha chain variable domain of TCR clone 110704 (TRAV29/DV5, TRAJ31)
CAASRNNNARLMF

SEQ ID NO: 221408 - protein, 13 aa, Homo sapiens
  CDR3 for beta chain variable domain of TCR clone 110704 (TRBV5-5, TRBJ1-2)
CASSFWRGEDYTF

SEQ ID NO: 221409 - protein, 12 aa, Homo sapiens
  CDR3 for alpha chain variable domain of TCR clone 110705 (TRAV12-3, TRAJ4)
CAMTRAGTRLAV

SEQ ID NO: 221410 - protein, 14 aa, Homo sapiens
  CDR3 for beta chain variable domain of TCR clone 110705 (TRBV10-3, TRBJ1-1)
CAISDTDRGVEAFF

SEQ ID NO: 221411 - protein, 14 aa, Homo sapiens
  CDR3 for alpha chain variable domain of TCR clone 110706 (TRAV17, TRAJ45)
CDTDARGGADGLTF

SEQ ID NO: 221412 - protein, 11 aa, Homo sapiens
  CDR3 for beta chain variable domain of TCR clone 110706 (TRBV28, TRBJ2-5)
CATGNQETQYF

SEQ ID NO: 221413 - protein, 14 aa, Homo sapiens
  CDR3 for alpha chain variable domain of TCR clone 110707 (TRAV16, TRAJ33)
CALSAMDSNYQLIW

SEQ ID NO: 221414 - protein, 12 aa, Homo sapiens
  CDR3 for beta chain variable domain of TCR clone 110707 (TRBV28, TRBJ2-7)
CASSRSGYEQYF

SEQ ID NO: 221415 - protein, 14 aa, Homo sapiens
  CDR3 for alpha chain variable domain of TCR clone 110708 (TRAV1-2, TRAJ16)
CAVNRFLDGQKLLF

SEQ ID NO: 221416 - protein, 15 aa, Homo sapiens
  CDR3 for beta chain variable domain of TCR clone 110708 (TRBV29-1, TRBJ2-7)
CSVEFFDRGSYEQYF

SEQ ID NO: 221417 - protein, 13 aa, Homo sapiens
  CDR3 for alpha chain variable domain of TCR clone 110709 (TRAV2, TRAJ15)
CAVASQAGTALIF

SEQ ID NO: 221418 - protein, 14 aa, Homo sapiens
  CDR3 for beta chain variable domain of TCR clone 110709 (TRBV25-1, TRBJ1-1)
CASTHLGGNTEAVF

SEQ ID NO: 221419 - protein, 15 aa, Homo sapiens
  CDR3 for alpha chain variable domain of TCR clone 110710 (TRAV21, TRAJ53)
CATLNSGGSNYRLTF

SEQ ID NO: 221420 - protein, 12 aa, Homo sapiens
  CDR3 for beta chain variable domain of TCR clone 110710 (TRBV7-8, TRBJ2-7)
CASSLGDREQYF

SEQ ID NO: 221421 - protein, 16 aa, Homo sapiens
  CDR3 for alpha chain variable domain of TCR clone 110711 (TRAV30, TRAJ24)
CGTEIVDTDSWGKFQF

SEQ ID NO: 221422 - protein, 14 aa, Homo sapiens
  CDR3 for beta chain variable domain of TCR clone 110711 (TRBV7-2, TRBJ2-7)
CASSPKTSFYEQYF

SEQ ID NO: 221423 - protein, 14 aa, Homo sapiens
  CDR3 for alpha chain variable domain of TCR clone 110712 (TRAV1-2, TRAJ16)
CAVNRFSDVQKLLF

SEQ ID NO: 221424 - protein, 13 aa, Homo sapiens
  CDR3 for beta chain variable domain of TCR clone 110712 (TRBV20-1, TRBJ1-1)
CSARVGGNTEAFF

SEQ ID NO: 221425 - protein, 12 aa, Homo sapiens
  CDR3 for alpha chain variable domain of TCR clone 110713 (TRAV13-1, TRAJ27)
CAAHTNAGKSTF

SEQ ID NO: 221426 - protein, 14 aa, Homo sapiens
  CDR3 for beta chain variable domain of TCR clone 110713 (TRBV19, TRBJ2-2)
CASSGQGIVGELFF

SEQ ID NO: 221427 - protein, 16 aa, Homo sapiens
  CDR3 for alpha chain variable domain of TCR clone 110714 (TRAV30, TRAJ24)
CGTEIVDADSWGKFQF

SEQ ID NO: 221428 - protein, 13 aa, Homo sapiens
  CDR3 for beta chain variable domain of TCR clone 110714 (TRBV11-2, TRBJ1-1)
CASSLGRNTEAFF

SEQ ID NO: 221429 - protein, 13 aa, Homo sapiens
  CDR3 for alpha chain variable domain of TCR clone 110715 (TRAV13-1, TRAJ48)
CAAASFGNDKLTF

SEQ ID NO: 221430 - protein, 14 aa, Homo sapiens
  CDR3 for beta chain variable domain of TCR clone 110715 (TRBV18, TRBJ2-1)
CASSPGTSETEQFF

SEQ ID NO: 221431 - protein, 12 aa, Homo sapiens
  CDR3 for alpha chain variable domain of TCR clone 110716 (TRAV8-4, TRAJ43)
CAVSVNNNDMRF

SEQ ID NO: 221432 - protein, 14 aa, Homo sapiens
  CDR3 for beta chain variable domain of TCR clone 110716 (TRBV7-9, TRBJ2-5)
CASSLVGGEETQYF

SEQ ID NO: 221433 - protein, 15 aa, Homo sapiens
  CDR3 for alpha chain variable domain of TCR clone 110717 (TRAV25, TRAJ52)
CAGTSGGTSYGKLTF

SEQ ID NO: 221434 - protein, 15 aa, Homo sapiens
  CDR3 for beta chain variable domain of TCR clone 110717 (TRBV9, TRBJ2-1)
CASSVGSGFYNEQFF

SEQ ID NO: 221435 - protein, 15 aa, Homo sapiens
  CDR3 for alpha chain variable domain of TCR clone 110718 (TRAV2, TRAJ36)
CAVRIGETGANNLFF

SEQ ID NO: 221436 - protein, 14 aa, Homo sapiens
  CDR3 for beta chain variable domain of TCR clone 110718 (TRBV7-9, TRBJ2-5)
CASSLDTAQETQYF

SEQ ID NO: 221437 - protein, 19 aa, Homo sapiens
  CDR3 for alpha chain variable domain of TCR clone 110719 (TRAV2, TRAJ20)
ILQVREADAAVYRDCKLSC

SEQ ID NO: 221438 - protein, 13 aa, Homo sapiens
  CDR3 for beta chain variable domain of TCR clone 110719 (TRBV15, TRBJ1-6)
CATSGGLNSPLHF

SEQ ID NO: 221439 - protein, 14 aa, Homo sapiens
  CDR3 for alpha chain variable domain of TCR clone 110720 (TRAV1-2, TRAJ16)
CAVNRFSDGQKLLF

SEQ ID NO: 221440 - protein, 17 aa, Homo sapiens
  CDR3 for beta chain variable domain of TCR clone 110720 (TRBV10-3, TRBJ1-2)
CAISETRDRGLEYGYTF

SEQ ID NO: 221441 - protein, 15 aa, Homo sapiens
  CDR3 for alpha chain variable domain of TCR clone 110721 (TRAV8-2, TRAJ24)
CVVSDRTDSWGKLQF

SEQ ID NO: 221442 - protein, 13 aa, Homo sapiens
  CDR3 for beta chain variable domain of TCR clone 110721 (TRBV7-9, TRBJ1-2)
CASSLKQNYGDTF

SEQ ID NO: 221443 - protein, 12 aa, Homo sapiens
  CDR3 for alpha chain variable domain of TCR clone 110722 (TRAV8-4, TRAJ43)
CAVSVNNNDMRF

SEQ ID NO: 221444 - protein, 15 aa, Homo sapiens
  CDR3 for beta chain variable domain of TCR clone 110722 (TRBV7-2, TRBJ2-7)
CASSWGQGAIYEQYF

SEQ ID NO: 221445 - protein, 12 aa, Homo sapiens
  CDR3 for alpha chain variable domain of TCR clone 110723 (TRAV21, TRAJ11)
CAATSGYSTLTF

SEQ ID NO: 221446 - protein, 16 aa, Homo sapiens
  CDR3 for beta chain variable domain of TCR clone 110723 (TRBV7-9, TRBJ1-2)
CASSLGFSSGEDGYTF

SEQ ID NO: 221447 - protein, 18 aa, Homo sapiens
  CDR3 for alpha chain variable domain of TCR clone 110724 (TRAV13-1, TRAJ52)
CAASKRSAGGTSYGKLTF

SEQ ID NO: 221448 - protein, 14 aa, Homo sapiens
  CDR3 for beta chain variable domain of TCR clone 110724 (TRBV7-9, TRBJ2-1)
CASSPRDSLYEQFF

SEQ ID NO: 221449 - protein, 10 aa, Homo sapiens
  CDR3 for alpha chain variable domain of TCR clone 110725 (TRAV5, TRAJ34)
CAEDTDKLIF

SEQ ID NO: 221450 - protein, 12 aa, Homo sapiens
  CDR3 for beta chain variable domain of TCR clone 110725 (TRBV11-2, TRBJ2-2)
CASSLGGGGLFF

SEQ ID NO: 221451 - protein, 15 aa, Homo sapiens
  CDR3 for alpha chain variable domain of TCR clone 110726 (TRAV8-3, TRAJ27)
CAVGPSKTNAGKSTF

SEQ ID NO: 221452 - protein, 15 aa, Homo sapiens
  CDR3 for beta chain variable domain of TCR clone 110726 (TRBV7-2, TRBJ2-1)
CASSSGLSGGNEQFF

SEQ ID NO: 221453 - protein, 16 aa, Homo sapiens
  CDR3 for alpha chain variable domain of TCR clone 110727 (TRAV20, TRAJ22)
CAVPASSSGSARQLTF

SEQ ID NO: 221454 - protein, 13 aa, Homo sapiens
  CDR3 for beta chain variable domain of TCR clone 110727 (TRBV7-2, TRBJ2-5)
CASSQTSVETQYF

SEQ ID NO: 221455 - protein, 12 aa, Homo sapiens
  CDR3 for alpha chain variable domain of TCR clone 110728 (TRAV12-3, TRAJ17)
CAMTLTGKKLTF

SEQ ID NO: 221456 - protein, 17 aa, Homo sapiens
  CDR3 for beta chain variable domain of TCR clone 110728 (TRBV7-8, TRBJ2-6)
CASSAGTGGAGANVLTF

SEQ ID NO: 221457 - protein, 14 aa, Homo sapiens
  CDR3 for alpha chain variable domain of TCR clone 110729 (TRAV12-1, TRAJ17)
CVVNYKAAGNKLTF

SEQ ID NO: 221458 - protein, 15 aa, Homo sapiens
  CDR3 for beta chain variable domain of TCR clone 110729 (TRBV20-1, TRBJ2-7)
GSARDRVSGMDEQYF

SEQ ID NO: 221459 - protein, 13 aa, Homo sapiens
  CDR3 for alpha chain variable domain of TCR clone 110730 (TRAV8-6, TRAJ21)
CAVSPSSLNKFYF

SEQ ID NO: 221460 - protein, 14 aa, Homo sapiens
  CDR3 for beta chain variable domain of TCR clone 110730 (TRBV7-9, TRBJ2-5)
CSSSLDTAQETQYF

SEQ ID NO: 221461 - protein, 16 aa, Homo sapiens
  CDR3 for alpha chain variable domain of TCR clone 110731 (TRAV12-3, TRAJ53)
CAMSPGSGGSNYKLTF

SEQ ID NO: 221462 - protein, 15 aa, Homo sapiens
  CDR3 for beta chain variable domain of TCR clone 110731 (TRBV12-4, TRBJ1-1)
CASSLAVSRGAEAFF

SEQ ID NO: 221463 - protein, 16 aa, Homo sapiens
  CDR3 for alpha chain variable domain of TCR clone 110732 (TRAV30, TRAJ24)
CGTEIVDADSWGKFQF

SEQ ID NO: 221464 - protein, 15 aa, Homo sapiens
  CDR3 for beta chain variable domain of TCR clone 110732 (TRBV10-2, TRBJ2-6)
CASSEQGTEANVLTF

SEQ ID NO: 221465 - protein, 14 aa, Homo sapiens
  CDR3 for alpha chain variable domain of TCR clone 110733 (TRAV17, TRAJ37)
CATDGSSNTGKLIF

SEQ ID NO: 221466 - protein, 15 aa, Homo sapiens
  CDR3 for beta chain variable domain of TCR clone 110733 (TRBV7-9, TRBJ2-7)
CASSLALAEAYEQYF

SEQ ID NO: 221467 - protein, 12 aa, Homo sapiens
  CDR3 for alpha chain variable domain of TCR clone 110734 (TRAV16, TRAJ10)
CSRTGGGNKLTF

SEQ ID NO: 221468 - protein, 18 aa, Homo sapiens
  CDR3 for beta chain variable domain of TCR clone 110734 (TRBV18, TRBJ1-3)
CASSPRGGAGPSGNTIYF

SEQ ID NO: 221469 - protein, 11 aa, Homo sapiens
  CDR3 for alpha chain variable domain of TCR clone 110735 (TRAV1-2, TRAJ40)
CAVPGTYKYIF

SEQ ID NO: 221470 - protein, 16 aa, Homo sapiens
  CDR3 for beta chain variable domain of TCR clone 110735 (TRBV29-1, TRBJ2-7)
CSVEVVGTSGSDEQYF

SEQ ID NO: 221471 - protein, 13 aa, Homo sapiens
  CDR3 for alpha chain variable domain of TCR clone 110736 (TRAV12-3, TRAJ9)
CAMSGGGGFKTIF

SEQ ID NO: 221472 - protein, 15 aa, Homo sapiens
  CDR3 for beta chain variable domain of TCR clone 110736 (TRBV10-2, TRBJ2-6)
CASSEQGTGANVLTF

SEQ ID NO: 221473 - protein, 14 aa, Homo sapiens
  CDR3 for alpha chain variable domain of TCR clone 110737 (TRAV1-2, TRAJ16)
CAVNRFSDGQKLLF

SEQ ID NO: 221474 - protein, 18 aa, Homo sapiens
  CDR3 for beta chain variable domain of TCR clone 110737 (TRBV10-3, TRBJ2-3)
CAISESRVGPMRGDTQYF

SEQ ID NO: 221475 - protein, 12 aa, Homo sapiens
  CDR3 for alpha chain variable domain of TCR clone 110738 (TRAV12-1, TRAJ40)
CVFYSGTYKYIF

SEQ ID NO: 221476 - protein, 13 aa, Homo sapiens
  CDR3 for beta chain variable domain of TCR clone 110738 (TRBV12-4, TRBJ2-7)
CASSPTETYEQYF

SEQ ID NO: 221477 - protein, 11 aa, Homo sapiens
  CDR3 for alpha chain variable domain of TCR clone 110739 (TRAV1-2, TRAJ20)
CAVANDYKLSF

SEQ ID NO: 221478 - protein, 14 aa, Homo sapiens
  CDR3 for beta chain variable domain of TCR clone 110739 (TRBV7-9, TRBJ1-1)
CASTPLQSYTEALF

SEQ ID NO: 221479 - protein, 11 aa, Homo sapiens
  CDR3 for alpha chain variable domain of TCR clone 110740 (TRAV12-3, TRAJ43)
CAMSVSNDMRF

SEQ ID NO: 221480 - protein, 13 aa, Homo sapiens
  CDR3 for beta chain variable domain of TCR clone 110740 (TRBV20-1, TRBJ1-1)
CSAPLGGATEAFF

SEQ ID NO: 221481 - protein, 12 aa, Homo sapiens
  CDR3 for alpha chain variable domain of TCR clone 110741 (TRAV21, TRAJ58)
CALSASGSRLTF

SEQ ID NO: 221482 - protein, 13 aa, Homo sapiens
  CDR3 for beta chain variable domain of TCR clone 110741 (TRBV5-7, TRBJ1-2)
CASSLGGFNGYTF

SEQ ID NO: 221483 - protein, 16 aa, Homo sapiens
  CDR3 for alpha chain variable domain of TCR clone 110742 (TRAV12-2, TRAJ6)
CAAPLAGSGGSYIPTF

SEQ ID NO: 221484 - protein, 10 aa, Homo sapiens
  CDR3 for beta chain variable domain of TCR clone 110742 (TRBV28, TRBJ1-2)
CASSADRAVF

SEQ ID NO: 221485 - protein, 12 aa, Homo sapiens
  CDR3 for alpha chain variable domain of TCR clone 110743 (TRAV8-3, TRAJ20)
CAVGANDYELSF

SEQ ID NO: 221486 - protein, 16 aa, Homo sapiens
  CDR3 for beta chain variable domain of TCR clone 110743 (TRBV19, TRBJ2-2)
CACRSPGTGATGELFS

SEQ ID NO: 221487 - protein, 13 aa, Homo sapiens
  CDR3 for alpha chain variable domain of TCR clone 110744 (TRAV12-1, TRAJ7)
CVVNMRGNNRLAF

SEQ ID NO: 221488 - protein, 15 aa, Homo sapiens
  CDR3 for beta chain variable domain of TCR clone 110744 (TRBV27, TRBJ2-3)
CASSLVLAATDTQYF

SEQ ID NO: 221489 - protein, 12 aa, Homo sapiens
  CDR3 for alpha chain variable domain of TCR clone 110745 (TRAV2, TRAJ9)
CAVGAGGFKTIF

SEQ ID NO: 221490 - protein, 16 aa, Homo sapiens
  CDR3 for beta chain variable domain of TCR clone 110745 (TRBV13, TRBJ2-2)
CASSPRTGEHTGELYF

SEQ ID NO: 221491 - protein, 16 aa, Homo sapiens
  CDR3 for alpha chain variable domain of TCR clone 110746 (TRAV30, TRAJ24)
CGTEIVDADSWGKFQF

SEQ ID NO: 221492 - protein, 11 aa, Homo sapiens
  CDR3 for beta chain variable domain of TCR clone 110746 (TRBV2, TRBJ1-1)
CASREGTEAFF

SEQ ID NO: 221493 - protein, 14 aa, Homo sapiens
  CDR3 for alpha chain variable domain of TCR clone 110747 (TRAV1-2, TRAJ6)
CAVSLSGGSYIPTF

SEQ ID NO: 221494 - protein, 15 aa, Homo sapiens
  CDR3 for beta chain variable domain of TCR clone 110747 (TRBV28, TRBJ2-7)
CASSPGGRGFYEKYF

SEQ ID NO: 221495 - protein, 15 aa, Homo sapiens
  CDR3 for alpha chain variable domain of TCR clone 110748 (TRAV3, TRAJ22)
CAVRDRGGSARQLTF

SEQ ID NO: 221496 - protein, 13 aa, Homo sapiens
  CDR3 for beta chain variable domain of TCR clone 110748 (TRBV9, TRBJ2-1)
CASSVGQGGEQFF

SEQ ID NO: 221497 - protein, 13 aa, Homo sapiens
  CDR3 for alpha chain variable domain of TCR clone 110749 (TRAV1-1, TRAJ33)
CAVRRDSNYQLIW

SEQ ID NO: 221498 - protein, 15 aa, Homo sapiens
  CDR3 for beta chain variable domain of TCR clone 110749 (TRBV7-2, TRBJ2-3)
CASSSTGLETDTQYF

SEQ ID NO: 221499 - protein, 10 aa, Homo sapiens
  CDR3 for alpha chain variable domain of TCR clone 110750 (TRAV12-3, TRAJ49)
CAMNDDQFYF

SEQ ID NO: 221500 - protein, 13 aa, Homo sapiens
  CDR3 for beta chain variable domain of TCR clone 110750 (TRBV12-4, TRBJ1-1)
CASSPGTGFEAFV

SEQ ID NO: 221501 - protein, 21 aa, Homo sapiens
  CDR3 for alpha chain variable domain of TCR clone 110751 (TRAV25, TRAJ53)
TATQTTDVGTGSGGSNYKLTF

SEQ ID NO: 221502 - protein, 16 aa, Homo sapiens
  CDR3 for beta chain variable domain of TCR clone 110751 (TRBV4-2, TRBJ2-3)
CASSLSSGGHTGTQYF

SEQ ID NO: 221503 - protein, 13 aa, Homo sapiens
  CDR3 for alpha chain variable domain of TCR clone 110752 (TRAV27, TRAJ49)
CAPRPYTGNQFYF

SEQ ID NO: 221504 - protein, 15 aa, Homo sapiens
  CDR3 for beta chain variable domain of TCR clone 110752 (TRBV20-1, TRBJ2-7)
CSARDRVSGMDEQYF

SEQ ID NO: 221505 - protein, 13 aa, Homo sapiens
  CDR3 for alpha chain variable domain of TCR clone 110753 (TRAV8-3, TRAJ28)
CAVGAVGSYQLTF

SEQ ID NO: 221506 - protein, 21 aa, Homo sapiens
  CDR3 for beta chain variable domain of TCR clone 110753 (TRBV7-2, TRBJ2-7)
RRTRPCISVPAGHRGAYEQYF

SEQ ID NO: 221507 - protein, 14 aa, Homo sapiens
  CDR3 for alpha chain variable domain of TCR clone 110754 (TRAV12-3, TRAJ42)
CAMNYGGSKGNLIF

SEQ ID NO: 221508 - protein, 13 aa, Homo sapiens
  CDR3 for beta chain variable domain of TCR clone 110754 (TRBV20-1, TRBJ1-6)
CSAPLGVGSPLHF

SEQ ID NO: 221509 - protein, 16 aa, Homo sapiens
  CDR3 for alpha chain variable domain of TCR clone 110755 (TRAV30, TRAJ24)
CGTEIVDADSWGKFQF

SEQ ID NO: 221510 - protein, 15 aa, Homo sapiens
  CDR3 for beta chain variable domain of TCR clone 110755 (TRBV19, TRBJ2-2)
CASSRSGSSTGELFF

SEQ ID NO: 221511 - protein, 12 aa, Homo sapiens
  CDR3 for alpha chain variable domain of TCR clone 110756 (TRAV3, TRAJ31)
CAVRDGNARLMF

SEQ ID NO: 221512 - protein, 18 aa, Homo sapiens
  CDR3 for beta chain variable domain of TCR clone 110756 (TRBV7-2, TRBJ2-3)
CASSLKREGSRITDTQYF

SEQ ID NO: 221513 - protein, 18 aa, Homo sapiens
  CDR3 for alpha chain variable domain of TCR clone 110757 (TRAV21, TRAJ52)
CAVRPSPAGGTSYGKLTF

SEQ ID NO: 221514 - protein, 14 aa, Homo sapiens
  CDR3 for beta chain variable domain of TCR clone 110757 (TRBV7-2, TRBJ2-5)
CASSPRGSSETQYF

SEQ ID NO: 221515 - protein, 13 aa, Homo sapiens
  CDR3 for alpha chain variable domain of TCR clone 110758 (TRAV12-3, TRAJ7)
CAMTPYGNNRLAF

SEQ ID NO: 221516 - protein, 14 aa, Homo sapiens
  CDR3 for beta chain variable domain of TCR clone 110758 (TRBV6-1, TRBJ1-3)
CASVQGGGGNTIYF

SEQ ID NO: 221517 - protein, 14 aa, Homo sapiens
  CDR3 for alpha chain variable domain of TCR clone 110759 (TRAV13-1, TRAJ9)
CAASALTGGFKTIC

SEQ ID NO: 221518 - protein, 13 aa, Homo sapiens
  CDR3 for beta chain variable domain of TCR clone 110759 (TRBV20-1, TRBJ1-1)
CSAGTVGNTEAFF

SEQ ID NO: 221519 - protein, 15 aa, Homo sapiens
  CDR3 for alpha chain variable domain of TCR clone 110760 (TRAV13-1, TRAJ4)
CSASLISGGYNKLIF

SEQ ID NO: 221520 - protein, 15 aa, Homo sapiens
  CDR3 for beta chain variable domain of TCR clone 110760 (TRBV28, TRBJ2-3)
CASTPRGENTDTQYF

SEQ ID NO: 221521 - protein, 12 aa, Homo sapiens
  CDR3 for alpha chain variable domain of TCR clone 110761 (TRAV13-2, TRAJ8)
CAPWLGFQKLVF

SEQ ID NO: 221522 - protein, 12 aa, Homo sapiens
  CDR3 for beta chain variable domain of TCR clone 110761 (TRBV11-2, TRBJ2-1)
CASSPGNNEQFF

SEQ ID NO: 221523 - protein, 14 aa, Homo sapiens
  CDR3 for alpha chain variable domain of TCR clone 110762 (TRAV4, TRAJ29)
CLVGDNPGNTPLVF

SEQ ID NO: 221524 - protein, 13 aa, Homo sapiens
  CDR3 for beta chain variable domain of TCR clone 110762 (TRBV7-3, TRBJ1-1)
CASSQDWGAEAFF

SEQ ID NO: 221525 - protein, 15 aa, Homo sapiens
  CDR3 for alpha chain variable domain of TCR clone 110763 (TRAV3, TRAJ22)
CAVRDRGGSARQLTF

SEQ ID NO: 221526 - protein, 16 aa, Homo sapiens
  CDR3 for beta chain variable domain of TCR clone 110763 (TRBV7-3, TRBJ2-5)
CASSLMGGASQETQYF

SEQ ID NO: 221527 - protein, 10 aa, Homo sapiens
  CDR3 for alpha chain variable domain of TCR clone 110764 (TRAV13-2, TRAJ20)
CAENICRLQA

SEQ ID NO: 221528 - protein, 18 aa, Homo sapiens
  CDR3 for beta chain variable domain of TCR clone 110764 (TRBV11-2, TRBJ2-3)
CASSLGGASRGAPNTQYF

SEQ ID NO: 221529 - protein, 14 aa, Homo sapiens
  CDR3 for alpha chain variable domain of TCR clone 110765 (TRAV12-2, TRAJ40)
CAVKIPSGTYKYIF

SEQ ID NO: 221530 - protein, 14 aa, Homo sapiens
  CDR3 for beta chain variable domain of TCR clone 110765 (TRBV20-1, TRBJ1-1)
CSPQTRIGGTEAFF

SEQ ID NO: 221531 - protein, 18 aa, Homo sapiens
  CDR3 for alpha chain variable domain of TCR clone 110766 (TRAV21, TRAJ52)
CAVRPSPAGGTSYAKLTF

SEQ ID NO: 221532 - protein, 17 aa, Homo sapiens
  CDR3 for beta chain variable domain of TCR clone 110766 (TRBV13, TRBJ2-3)
CASSLSRVAGGRNTQYF

SEQ ID NO: 221533 - protein, 11 aa, Homo sapiens
  CDR3 for alpha chain variable domain of TCR clone 110767 (TRAV23/DV6, TRAJ43)
CAASSGNDMRF

SEQ ID NO: 221534 - protein, 14 aa, Homo sapiens
  CDR3 for beta chain variable domain of TCR clone 110767 (TRBV4-1, TRBJ1-2)
YASSQDPLPYGYTF

SEQ ID NO: 221535 - protein, 14 aa, Homo sapiens
  CDR3 for alpha chain variable domain of TCR clone 110768 (TRAV1-2, TRAJ8)
CAVREDTGFQKLVF

SEQ ID NO: 221536 - protein, 14 aa, Homo sapiens
  CDR3 for beta chain variable domain of TCR clone 110768 (TRBV4-1, TRBJ1-1)
CASSHGQGRTEAFF

SEQ ID NO: 221537 - protein, 12 aa, Homo sapiens
  CDR3 for alpha chain variable domain of TCR clone 110769 (TRAV30, TRAJ43)
CGTEERGNDMRF

SEQ ID NO: 221538 - protein, 13 aa, Homo sapiens
  CDR3 for beta chain variable domain of TCR clone 110769 (TRBV12-4, TRBJ1-2)
CASSSGRKDGYTF

SEQ ID NO: 221539 - protein, 13 aa, Homo sapiens
  CDR3 for alpha chain variable domain of TCR clone 110770 (TRAV14/DV4, TRAJ4)
CAMKAGGYNKLIF

SEQ ID NO: 221540 - protein, 14 aa, Homo sapiens
  CDR3 for beta chain variable domain of TCR clone 110770 (TRBV2, TRBJ2-1)
CASSDGPNYNEQFF

SEQ ID NO: 221541 - protein, 16 aa, Homo sapiens
  CDR3 for alpha chain variable domain of TCR clone 110771 (TRAV3, TRAJ37)
CAVRPHGSGHTGKLIF

SEQ ID NO: 221542 - protein, 17 aa, Homo sapiens
  CDR3 for beta chain variable domain of TCR clone 110771 (TRBV5-1, TRBJ2-5)
CASSPVALGQNQETQYF

SEQ ID NO: 221543 - protein, 14 aa, Homo sapiens
  CDR3 for alpha chain variable domain of TCR clone 110772 (TRAV1-2, TRAJ8)
CAVREDTGFQKLVF

SEQ ID NO: 221544 - protein, 11 aa, Homo sapiens
  CDR3 for beta chain variable domain of TCR clone 110772 (TRBV11-3, TRBJ2-7)
CASSRTYEQCF

SEQ ID NO: 221545 - protein, 13 aa, Homo sapiens
  CDR3 for alpha chain variable domain of TCR clone 110773 (TRAV1-1, TRAJ9)
CAAKNTGGIKTIF

SEQ ID NO: 221546 - protein, 14 aa, Homo sapiens
  CDR3 for beta chain variable domain of TCR clone 110773 (TRBV20-1, TRBJ2-1)
CSAQIGGSANEQFF

SEQ ID NO: 221547 - protein, 12 aa, Homo sapiens
  CDR3 for alpha chain variable domain of TCR clone 110774 (TRAV23/DV6, TRAJ17)
CARGSGRQQANF

SEQ ID NO: 221548 - protein, 14 aa, Homo sapiens
  CDR3 for beta chain variable domain of TCR clone 110774 (TRBV7-2, TRBJ1-2)
CASSQTGSTYGYTF

SEQ ID NO: 221549 - protein, 11 aa, Homo sapiens
  CDR3 for alpha chain variable domain of TCR clone 110775 (TRAV29/DV5, TRAJ31)
CAAMNNARLMF

SEQ ID NO: 221550 - protein, 15 aa, Homo sapiens
  CDR3 for beta chain variable domain of TCR clone 110775 (TRBV5-1, TRBJ2-3)
CASSVTSGSTDTQYF

SEQ ID NO: 221551 - protein, 13 aa, Homo sapiens
  CDR3 for alpha chain variable domain of TCR clone 110776 (TRAV35, TRAJ48)
GRSRVFGDEKLTF

SEQ ID NO: 221552 - protein, 14 aa, Homo sapiens
  CDR3 for beta chain variable domain of TCR clone 110776 (TRBV20-1, TRBJ2-5)
CSALVPGYQETQYF

SEQ ID NO: 221553 - protein, 12 aa, Homo sapiens
  CDR3 for alpha chain variable domain of TCR clone 110777 (TRAV27, TRAJ33)
CAGDGSNYQLIW

SEQ ID NO: 221554 - protein, 13 aa, Homo sapiens
  CDR3 for beta chain variable domain of TCR clone 110777 (TRBV7-3, TRBJ1-1)
CASSQDWGAEAFF

SEQ ID NO: 221555 - protein, 13 aa, Homo sapiens
  CDR3 for alpha chain variable domain of TCR clone 110778 (TRAV17, TRAJ54)
CAAGIQGAQKLVF

SEQ ID NO: 221556 - protein, 15 aa, Homo sapiens
  CDR3 for beta chain variable domain of TCR clone 110778 (TRBV6-6, TRBJ2-5)
CASSYGKIIQETQYF

SEQ ID NO: 221557 - protein, 12 aa, Homo sapiens
  CDR3 for alpha chain variable domain of TCR clone 110779 (TRAV21, TRAJ33)
CTKMDSNYQLIW

SEQ ID NO: 221558 - protein, 14 aa, Homo sapiens
  CDR3 for beta chain variable domain of TCR clone 110779 (TRBV12-4, TRBJ2-3)
CASTIAGWGDTQYF

SEQ ID NO: 221559 - protein, 16 aa, Homo sapiens
  CDR3 for alpha chain variable domain of TCR clone 110780 (TRAV1-2, TRAJ10)
CAVRGVLTGGGNKLTF

SEQ ID NO: 221560 - protein, 13 aa, Homo sapiens
  CDR3 for beta chain variable domain of TCR clone 110780 (TRBV27, TRBJ2-1)
CASSSGSYNEQFF

SEQ ID NO: 221561 - protein, 13 aa, Homo sapiens
  CDR3 for alpha chain variable domain of TCR clone 110781 (TRAV12-3, TRAJ9)
CAMRNTGGFKTIF

SEQ ID NO: 221562 - protein, 14 aa, Homo sapiens
  CDR3 for beta chain variable domain of TCR clone 110781 (TRBV11-2, TRBJ2-7)
CASSSTGEGYEQYF

SEQ ID NO: 221563 - protein, 12 aa, Homo sapiens
  CDR3 for alpha chain variable domain of TCR clone 110782 (TRAV21, TRAJ33)
CAKMDSNYQLIW

SEQ ID NO: 221564 - protein, 13 aa, Homo sapiens
  CDR3 for beta chain variable domain of TCR clone 110782 (TRBV6-1, TRBJ1-1)
CASSRQGNTEAFF

SEQ ID NO: 221565 - protein, 16 aa, Homo sapiens
  CDR3 for alpha chain variable domain of TCR clone 110783 (TRAV30, TRAJ24)
CGTEIVDADSWGKFQF

SEQ ID NO: 221566 - protein, 12 aa, Homo sapiens
  CDR3 for beta chain variable domain of TCR clone 110783 (TRBV11-2, TRBJ2-2)
CASSLPTGELFC

SEQ ID NO: 221567 - protein, 15 aa, Homo sapiens
  CDR3 for alpha chain variable domain of TCR clone 110784 (TRAV35, TRAJ50)
CAGQRRKTSYDKVIF

SEQ ID NO: 221568 - protein, 12 aa, Homo sapiens
  CDR3 for beta chain variable domain of TCR clone 110784 (TRBV5-1, TRBJ2-5)
CASSLGLETQYF

SEQ ID NO: 221569 - protein, 13 aa, Homo sapiens
  CDR3 for alpha chain variable domain of TCR clone 110785 (TRAV12-2, TRAJ10)
CAVPTGGGNKLTF

SEQ ID NO: 221570 - protein, 13 aa, Homo sapiens
  CDR3 for beta chain variable domain of TCR clone 110785 (TRBV11-3, TRBJ2-7)
CASSLDKLYEQYF

SEQ ID NO: 221571 - protein, 18 aa, Homo sapiens
  CDR3 for alpha chain variable domain of TCR clone 110786 (TRAV26-2, TRAJ45)
CILRVDKYSGGGADGLTF

SEQ ID NO: 221572 - protein, 13 aa, Homo sapiens
  CDR3 for beta chain variable domain of TCR clone 110786 (TRBV4-2, TRBJ1-1)
CASSQAGNTEAFF

SEQ ID NO: 221573 - protein, 18 aa, Homo sapiens
  CDR3 for alpha chain variable domain of TCR clone 110787 (TRAV21, TRAJ53)
CAVKGGENSGGSNYKLTF

SEQ ID NO: 221574 - protein, 13 aa, Homo sapiens
  CDR3 for beta chain variable domain of TCR clone 110787 (TRBV12-4, TRBJ1-1)
CASSLGTGFEAFF

SEQ ID NO: 221575 - protein, 19 aa, Homo sapiens
  CDR3 for alpha chain variable domain of TCR clone 110788 (TRAV3, TRAJ6)
CAVRDRNLSRSGGSYIPTF

SEQ ID NO: 221576 - protein, 15 aa, Homo sapiens
  CDR3 for beta chain variable domain of TCR clone 110788 (TRBV18, TRBJ2-7)
CASSPTFMDSYEQYF

SEQ ID NO: 221577 - protein, 14 aa, Homo sapiens
  CDR3 for alpha chain variable domain of TCR clone 110789 (TRAV8-2, TRAJ4)
CVVSPSGGYNKLIF

SEQ ID NO: 221578 - protein, 15 aa, Homo sapiens
  CDR3 for beta chain variable domain of TCR clone 110789 (TRBV4-1, TRBJ1-4)
CASSDTGGTNEKLFC

SEQ ID NO: 221579 - protein, 15 aa, Homo sapiens
  CDR3 for alpha chain variable domain of TCR clone 110790 (TRAV4, TRAJ42)
CLVGGYGGRQGNLIF

SEQ ID NO: 221580 - protein, 16 aa, Homo sapiens
  CDR3 for beta chain variable domain of TCR clone 110790 (TRBV27, TRBJ1-1)
CASSTRTGGVGTEAFF

SEQ ID NO: 221581 - protein, 14 aa, Homo sapiens
  CDR3 for alpha chain variable domain of TCR clone 110791 (TRAV26-1, TRAJ49)
CIVRLTNTGNQFSF

SEQ ID NO: 221582 - protein, 13 aa, Homo sapiens
  CDR3 for beta chain variable domain of TCR clone 110791 (TRBV10-1, TRBJ1-1)
CASQGQTNTEAFF

SEQ ID NO: 221583 - protein, 14 aa, Homo sapiens
  CDR3 for alpha chain variable domain of TCR clone 110792 (TRAV26-1, TRAJ15)
CIVRANQAGTALIF

SEQ ID NO: 221584 - protein, 16 aa, Homo sapiens
  CDR3 for beta chain variable domain of TCR clone 110792 (TRBV20-1, TRBJ1-4)
CSAIGGPRGASEKLFF

SEQ ID NO: 221585 - protein, 14 aa, Homo sapiens
  CDR3 for alpha chain variable domain of TCR clone 110793 (TRAV17, TRAJ16)
CATADFSDGQKLLF

SEQ ID NO: 221586 - protein, 12 aa, Homo sapiens
  CDR3 for beta chain variable domain of TCR clone 110793 (TRBV2, TRBJ2-5)
CASKEYGETQYF

SEQ ID NO: 221587 - protein, 14 aa, Homo sapiens
  CDR3 for alpha chain variable domain of TCR clone 110794 (TRAV1-2, TRAJ16)
CAVNRFSDGQKLLF

SEQ ID NO: 221588 - protein, 11 aa, Homo sapiens
  CDR3 for beta chain variable domain of TCR clone 110794 (TRBV29-1, TRBJ2-5)
CSEDRTGTQDF

SEQ ID NO: 221589 - protein, 13 aa, Homo sapiens
  CDR3 for alpha chain variable domain of TCR clone 110795 (TRAV17, TRAJ9)
CATDYTGGFKTIF

SEQ ID NO: 221590 - protein, 16 aa, Homo sapiens
  CDR3 for beta chain variable domain of TCR clone 110795 (TRBV7-7, TRBJ2-1)
CASSLASGSSYNEQFF

SEQ ID NO: 221591 - protein, 14 aa, Homo sapiens
  CDR3 for alpha chain variable domain of TCR clone 110796 (TRAV38-1, TRAJ40)
CALRPTSGTYKYIF

SEQ ID NO: 221592 - protein, 14 aa, Homo sapiens
  CDR3 for beta chain variable domain of TCR clone 110796 (TRBV7-6, TRBJ1-4)
CASSLGARHEKLFF

SEQ ID NO: 221593 - protein, 13 aa, Homo sapiens
  CDR3 for alpha chain variable domain of TCR clone 110797 (TRAV27, TRAJ54)
CAGAGQGAQKLVF

SEQ ID NO: 221594 - protein, 15 aa, Homo sapiens
  CDR3 for beta chain variable domain of TCR clone 110797 (TRBV18, TRBJ2-6)
CASSPSYTGANVLTF

SEQ ID NO: 221595 - protein, 11 aa, Homo sapiens
  CDR3 for alpha chain variable domain of TCR clone 110798 (TRAV3, TRAJ21)
CAVGNFNKFYF

SEQ ID NO: 221596 - protein, 16 aa, Homo sapiens
  CDR3 for beta chain variable domain of TCR clone 110798 (TRBV19, TRBJ2-1)
CASSKAGPSLYNEQFF

SEQ ID NO: 221597 - protein, 13 aa, Homo sapiens
  CDR3 for alpha chain variable domain of TCR clone 110799 (TRAV2, TRAJ40)
CAVVTSGTYKYIF

SEQ ID NO: 221598 - protein, 16 aa, Homo sapiens
  CDR3 for beta chain variable domain of TCR clone 110799 (TRBV7-2, TRBJ1-2)
CASSSNQNRRGHGYTF

SEQ ID NO: 221599 - protein, 14 aa, Homo sapiens
  CDR3 for alpha chain variable domain of TCR clone 110800 (TRAV34, TRAJ56)
CGADMAGANSKLTF

SEQ ID NO: 221600 - protein, 15 aa, Homo sapiens
  CDR3 for beta chain variable domain of TCR clone 110800 (TRBV11-2, TRBJ1-6)
CASSLDPWAVSPLHF

SEQ ID NO: 221601 - protein, 15 aa, Homo sapiens
  CDR3 for alpha chain variable domain of TCR clone 110801 (TRAV38-2/DV8, TRAJ48)
CAYRSPESGNEQLTF

SEQ ID NO: 221602 - protein, 13 aa, Homo sapiens
  CDR3 for beta chain variable domain of TCR clone 110801 (TRBV4-2, TRBJ1-2)
CASSLSASGGYTF

SEQ ID NO: 221603 - protein, 16 aa, Homo sapiens
  CDR3 for alpha chain variable domain of TCR clone 110802 (TRAV12-3, TRAJ53)
CAMSVGSGGSSYKLTF

SEQ ID NO: 221604 - protein, 11 aa, Homo sapiens
  CDR3 for beta chain variable domain of TCR clone 110802 (TRBV29-1, TRBJ2-5)
CSVASGETQYF

SEQ ID NO: 221605 - protein, 12 aa, Homo sapiens
  CDR3 for alpha chain variable domain of TCR clone 110803 (TRAV12-3, TRAJ21)
CAMFNNFNKFYF

SEQ ID NO: 221606 - protein, 14 aa, Homo sapiens
  CDR3 for beta chain variable domain of TCR clone 110803 (TRBV7-9, TRBJ2-1)
CASSIQGTVGEQFF

SEQ ID NO: 221607 - protein, 12 aa, Homo sapiens
  CDR3 for alpha chain variable domain of TCR clone 110804 (TRAV12-1, TRAJ40)
CVVYSGTYKYIF

SEQ ID NO: 221608 - protein, 15 aa, Homo sapiens
  CDR3 for beta chain variable domain of TCR clone 110804 (TRBV6-1, TRBJ2-3)
CASSERGGITDTQYF

SEQ ID NO: 221609 - protein, 14 aa, Homo sapiens
  CDR3 for alpha chain variable domain of TCR clone 110805 (TRAV8-2, TRAJ4)
CVVSPSGGDNKLIF

SEQ ID NO: 221610 - protein, 15 aa, Homo sapiens
  CDR3 for beta chain variable domain of TCR clone 110805 (TRBV2, TRBJ2-1)
CASSELAGSYNEQFF

SEQ ID NO: 221611 - protein, 15 aa, Homo sapiens
  CDR3 for alpha chain variable domain of TCR clone 110806 (TRAV26-1, TRAJ29)
CIVRVEGSGNTPLVF

SEQ ID NO: 221612 - protein, 13 aa, Homo sapiens
  CDR3 for beta chain variable domain of TCR clone 110806 (TRBV18, TRBJ2-5)
CASPGVSQETQYF

SEQ ID NO: 221613 - protein, 15 aa, Homo sapiens
  CDR3 for alpha chain variable domain of TCR clone 110807 (TRAV23/DV6, TRAJ18)
CAARFRGSTLGRLYF

SEQ ID NO: 221614 - protein, 13 aa, Homo sapiens
  CDR3 for beta chain variable domain of TCR clone 110807 (TRBV7-2, TRBJ2-7)
CASSSPSGSEQYF

SEQ ID NO: 221615 - protein, 14 aa, Homo sapiens
  CDR3 for alpha chain variable domain of TCR clone 110808 (TRAV2, TRAJ9)
CAVEDRSGGFKTIF

SEQ ID NO: 221616 - protein, 12 aa, Homo sapiens
  CDR3 for beta chain variable domain of TCR clone 110808 (TRBV12-4, TRBJ2-4)
CAGSSSGNTQYF

SEQ ID NO: 221617 - protein, 15 aa, Homo sapiens
  CDR3 for alpha chain variable domain of TCR clone 110809 (TRAV41, TRAJ45)
CAASYSGGGADGLTF

SEQ ID NO: 221618 - protein, 14 aa, Homo sapiens
  CDR3 for beta chain variable domain of TCR clone 110809 (TRBV12-5, TRBJ2-5)
CASCSRTHQETQYF

SEQ ID NO: 221619 - protein, 15 aa, Homo sapiens
  CDR3 for alpha chain variable domain of TCR clone 110810 (TRAV13-1, TRAJ36)
CAASIGQTGANNLFF

SEQ ID NO: 221620 - protein, 14 aa, Homo sapiens
  CDR3 for beta chain variable domain of TCR clone 110810 (TRBV6-1, TRBJ1-3)
CASVQGGGGNTIYF

SEQ ID NO: 221621 - protein, 14 aa, Homo sapiens
  CDR3 for alpha chain variable domain of TCR clone 110811 (TRAV17, TRAJ39)
CATDPVRAGNMLTF

SEQ ID NO: 221622 - protein, 13 aa, Homo sapiens
  CDR3 for beta chain variable domain of TCR clone 110811 (TRBV12-4, TRBJ2-5)
CASSLGGSRTQYF

SEQ ID NO: 221623 - protein, 13 aa, Homo sapiens
  CDR3 for alpha chain variable domain of TCR clone 110812 (TRAV27, TRAJ6)
CAGGTRGSYIPTF

SEQ ID NO: 221624 - protein, 15 aa, Homo sapiens
  CDR3 for beta chain variable domain of TCR clone 110812 (TRBV6-3, TRBJ2-7)
CASSSPGTVFYEQYF

SEQ ID NO: 221625 - protein, 15 aa, Homo sapiens
  CDR3 for alpha chain variable domain of TCR clone 110813 (TRAV26-1, TRAJ48)
CIVRVGDFGNEKLTF

SEQ ID NO: 221626 - protein, 16 aa, Homo sapiens
  CDR3 for beta chain variable domain of TCR clone 110813 (TRBV4-1, TRBJ2-3)
CASSPRAGGLTDTQYF

SEQ ID NO: 221627 - protein, 13 aa, Homo sapiens
  CDR3 for alpha chain variable domain of TCR clone 110814 (TRAV12-3, TRAJ9)
CAMSADGGFKTIF

SEQ ID NO: 221628 - protein, 15 aa, Homo sapiens
  CDR3 for beta chain variable domain of TCR clone 110814 (TRBV10-2, TRBJ2-6)
CASSEQGTGANVLTF

SEQ ID NO: 221629 - protein, 13 aa, Homo sapiens
  CDR3 for alpha chain variable domain of TCR clone 110815 (TRAV12-2, TRAJ20)
CAVYPANDYKLSF

SEQ ID NO: 221630 - protein, 15 aa, Homo sapiens
  CDR3 for beta chain variable domain of TCR clone 110815 (TRBV18, TRBJ1-2)
CASSPGNGLGYGYTF

SEQ ID NO: 221631 - protein, 19 aa, Homo sapiens
  CDR3 for alpha chain variable domain of TCR clone 110816 (TRAV26-1, TRAJ52)
CIVRAHRNAGGTSYGKLTF

SEQ ID NO: 221632 - protein, 15 aa, Homo sapiens
  CDR3 for beta chain variable domain of TCR clone 110816 (TRBV12-4, TRBJ2-5)
CTSSPPTGLQETQYF

SEQ ID NO: 221633 - protein, 20 aa, Homo sapiens
  CDR3 for alpha chain variable domain of TCR clone 110817 (TRAV12-2, TRAJ9)
CAVYNGGFKTILEQEQDYLL

SEQ ID NO: 221634 - protein, 14 aa, Homo sapiens
  CDR3 for beta chain variable domain of TCR clone 110817 (TRBV6-1, TRBJ1-5)
CASSETGMEQPQHF

SEQ ID NO: 221635 - protein, 13 aa, Homo sapiens
  CDR3 for alpha chain variable domain of TCR clone 110818 (TRAV25, TRAJ10)
CAGRTGGGTKLTF

SEQ ID NO: 221636 - protein, 15 aa, Homo sapiens
  CDR3 for beta chain variable domain of TCR clone 110818 (TRBV19, TRBJ2-1)
CASSSPGVPLDEQFF

SEQ ID NO: 221637 - protein, 14 aa, Homo sapiens
  CDR3 for alpha chain variable domain of TCR clone 110819 (TRAV12-2, TRAJ13)
CAVKKTGGYQKVTF

SEQ ID NO: 221638 - protein, 13 aa, Homo sapiens
  CDR3 for beta chain variable domain of TCR clone 110819 (TRBV19, TRBJ2-5)
CASSMGGAGTQYF

SEQ ID NO: 221639 - protein, 17 aa, Homo sapiens
  CDR3 for alpha chain variable domain of TCR clone 110820 (TRAV3, TRAJ42)
CAVRDRDYGGSHGNLIF

SEQ ID NO: 221640 - protein, 14 aa, Homo sapiens
  CDR3 for beta chain variable domain of TCR clone 110820 (TRBV7-2, TRBJ2-5)
CASSPRGSSETQYF

SEQ ID NO: 221641 - protein, 15 aa, Homo sapiens
  CDR3 for alpha chain variable domain of TCR clone 110821 (TRAV8-1, TRAJ6)
CAVNANPGGSYIPTF

SEQ ID NO: 221642 - protein, 16 aa, Homo sapiens
  CDR3 for beta chain variable domain of TCR clone 110821 (TRBV19, TRBJ2-1)
CASSKAGPSSYNEQFF

SEQ ID NO: 221643 - protein, 14 aa, Homo sapiens
  CDR3 for alpha chain variable domain of TCR clone 110822 (TRAV1-2, TRAJ16)
CAVNRFSDGQKLLF

SEQ ID NO: 221644 - protein, 13 aa, Homo sapiens
  CDR3 for beta chain variable domain of TCR clone 110822 (TRBV19, TRBJ2-2)
RASSIWSTGELFF

SEQ ID NO: 221645 - protein, 12 aa, Homo sapiens
  CDR3 for alpha chain variable domain of TCR clone 110823 (TRAV3, TRAJ20)
CAVRDPDYKPSF

SEQ ID NO: 221646 - protein, 13 aa, Homo sapiens
  CDR3 for beta chain variable domain of TCR clone 110823 (TRBV18, TRBJ1-1)
CASSPETKPEAFF

SEQ ID NO: 221647 - protein, 12 aa, Homo sapiens
  CDR3 for alpha chain variable domain of TCR clone 110824 (TRAV27, TRAJ41)
CAGRNSGYALNF

SEQ ID NO: 221648 - protein, 13 aa, Homo sapiens
  CDR3 for beta chain variable domain of TCR clone 110824 (TRBV12-4, TRBJ1-1)
CASSPGTGCEAFF

SEQ ID NO: 221649 - protein, 13 aa, Homo sapiens
  CDR3 for alpha chain variable domain of TCR clone 110825 (TRAV2, TRAJ40)
CAVVTSGTYKYIF

SEQ ID NO: 221650 - protein, 16 aa, Homo sapiens
  CDR3 for beta chain variable domain of TCR clone 110825 (TRBV29-1, TRBJ2-6)
CSVEAITYSGANVLTF

SEQ ID NO: 221651 - protein, 12 aa, Homo sapiens
  CDR3 for alpha chain variable domain of TCR clone 110826 (TRAV2, TRAJ34)
CAVERNTDKLIF

SEQ ID NO: 221652 - protein, 20 aa, Homo sapiens
  CDR3 for beta chain variable domain of TCR clone 110826 (TRBV7-2, TRBJ2-5)
CASRFLRGGGRDPVLRARHA

SEQ ID NO: 221653 - protein, 16 aa, Homo sapiens
  CDR3 for alpha chain variable domain of TCR clone 110827 (TRAV30, TRAJ24)
CGTEIVDADSWGKFQF

SEQ ID NO: 221654 - protein, 16 aa, Homo sapiens
  CDR3 for beta chain variable domain of TCR clone 110827 (TRBV28, TRBJ1-5)
CASSLTGQGWNQPQHF

SEQ ID NO: 221655 - protein, 12 aa, Homo sapiens
  CDR3 for alpha chain variable domain of TCR clone 110828 (TRAV9-2, TRAJ40)
CALTSGTHKYIF

SEQ ID NO: 221656 - protein, 16 aa, Homo sapiens
  CDR3 for beta chain variable domain of TCR clone 110828 (TRBV7-7, TRBJ2-2)
CASSPRTGLNTGELFF

SEQ ID NO: 221657 - protein, 14 aa, Homo sapiens
  CDR3 for alpha chain variable domain of TCR clone 110829 (TRAV12-3, TRAJ56)
CAMSVAGANSKLTF

SEQ ID NO: 221658 - protein, 17 aa, Homo sapiens
  CDR3 for beta chain variable domain of TCR clone 110829 (TRBV20-1, TRBJ2-3)
CSASLLGRGGSADTQYF

SEQ ID NO: 221659 - protein, 14 aa, Homo sapiens
  CDR3 for alpha chain variable domain of TCR clone 110830 (TRAV35, TRAJ22)
CAGLRPGSARQLTF

SEQ ID NO: 221660 - protein, 12 aa, Homo sapiens
  CDR3 for beta chain variable domain of TCR clone 110830 (TRBV12-4, TRBJ2-7)
CASSLGGYEQYF

SEQ ID NO: 221661 - protein, 14 aa, Homo sapiens
  CDR3 for alpha chain variable domain of TCR clone 110831 (TRAV38-1, TRAJ40)
CALRPTSGTYKYIF

SEQ ID NO: 221662 - protein, 16 aa, Homo sapiens
  CDR3 for beta chain variable domain of TCR clone 110831 (TRBV4-3, TRBJ2-2)
CASSHLQGSGTGELFF

SEQ ID NO: 221663 - protein, 13 aa, Homo sapiens
  CDR3 for alpha chain variable domain of TCR clone 110832 (TRAV3, TRAJ21)
CAVREPDFNKFYF

SEQ ID NO: 221664 - protein, 13 aa, Homo sapiens
  CDR3 for beta chain variable domain of TCR clone 110832 (TRBV9, TRBJ2-1)
CSSSPSGGNEQFF

SEQ ID NO: 221665 - protein, 12 aa, Homo sapiens
  CDR3 for alpha chain variable domain of TCR clone 110833 (TRAV16, TRAJ27)
CALNTNAGKSTF

SEQ ID NO: 221666 - protein, 18 aa, Homo sapiens
  CDR3 for beta chain variable domain of TCR clone 110833 (TRBV7-9, TRBJ2-7)
CASSLTTSGSRTWYEQYF

SEQ ID NO: 221667 - protein, 13 aa, Homo sapiens
  CDR3 for alpha chain variable domain of TCR clone 110834 (TRAV12-3, TRAJ29)
CALGPPGNTPLVF

SEQ ID NO: 221668 - protein, 19 aa, Homo sapiens
  CDR3 for beta chain variable domain of TCR clone 110834 (TRBV25-1, TRBJ2-2)
CAILVYRVDRGRKTGELFF

SEQ ID NO: 221669 - protein, 16 aa, Homo sapiens
  CDR3 for alpha chain variable domain of TCR clone 110835 (TRAV13-1, TRAJ18)
CAASRMRGSTLWRLYF

SEQ ID NO: 221670 - protein, 16 aa, Homo sapiens
  CDR3 for beta chain variable domain of TCR clone 110835 (TRBV27, TRBJ1-1)
CASSSRGRTGYTEAFF

SEQ ID NO: 221671 - protein, 17 aa, Homo sapiens
  CDR3 for alpha chain variable domain of TCR clone 110836 (TRAV3, TRAJ6)
FSVRDGPRAGGSYIPTF

SEQ ID NO: 221672 - protein, 14 aa, Homo sapiens
  CDR3 for beta chain variable domain of TCR clone 110836 (TRBV7-2, TRBJ2-7)
CASSPKTSFYEQYF

SEQ ID NO: 221673 - protein, 13 aa, Homo sapiens
  CDR3 for alpha chain variable domain of TCR clone 110837 (TRAV12-2, TRAJ37)
CAGGSGNTGKLIF

SEQ ID NO: 221674 - protein, 14 aa, Homo sapiens
  CDR3 for beta chain variable domain of TCR clone 110837 (TRBV12-4, TRBJ1-1)
CASSLGTGGTEAFF

SEQ ID NO: 221675 - protein, 14 aa, Homo sapiens
  CDR3 for alpha chain variable domain of TCR clone 110838 (TRAV13-1, TRAJ44)
CAAKATGTASKLTF

SEQ ID NO: 221676 - protein, 13 aa, Homo sapiens
  CDR3 for beta chain variable domain of TCR clone 110838 (TRBV4-2, TRBJ2-2)
CASEDRGTGELFF

SEQ ID NO: 221677 - protein, 15 aa, Homo sapiens
  CDR3 for alpha chain variable domain of TCR clone 110839 (TRAV1-2, TRAJ38)
CAVSENAGNNRKLVW

SEQ ID NO: 221678 - protein, 16 aa, Homo sapiens
  CDR3 for beta chain variable domain of TCR clone 110839 (TRBV4-1, TRBJ2-7)
CASSLTAGQATYEQYF

SEQ ID NO: 221679 - protein, 13 aa, Homo sapiens
  CDR3 for alpha chain variable domain of TCR clone 110840 (TRAV20, TRAJ37)
CAGCSSNTGKLIF

SEQ ID NO: 221680 - protein, 13 aa, Homo sapiens
  CDR3 for beta chain variable domain of TCR clone 110840 (TRBV10-2, TRBJ2-7)
CASGASGGYEQYF

SEQ ID NO: 221681 - protein, 12 aa, Homo sapiens
  CDR3 for alpha chain variable domain of TCR clone 110841 (TRAV12-2, TRAJ9)
CAVYNGGFKTIF

SEQ ID NO: 221682 - protein, 14 aa, Homo sapiens
  CDR3 for beta chain variable domain of TCR clone 110841 (TRBV25-1, TRBJ1-1)
CASTHLGGNTEAFF

SEQ ID NO: 221683 - protein, 20 aa, Homo sapiens
  CDR3 for alpha chain variable domain of TCR clone 110842 (TRAV1-1, TRAJ4)
CHLLLRCEGFLSGGYNKLIF

SEQ ID NO: 221684 - protein, 16 aa, Homo sapiens
  CDR3 for beta chain variable domain of TCR clone 110842 (TRBV28, TRBJ1-4)
CASSPPYRGRSEKLFF

SEQ ID NO: 221685 - protein, 14 aa, Homo sapiens
  CDR3 for alpha chain variable domain of TCR clone 110843 (TRAV4, TRAJ43)
CLVGPMDNNNDMRF

SEQ ID NO: 221686 - protein, 21 aa, Homo sapiens
  CDR3 for beta chain variable domain of TCR clone 110843 (TRBV11-1, TRBJ2-1)
CASSARERLRPEGPSYNEQFF

SEQ ID NO: 221687 - protein, 15 aa, Homo sapiens
  CDR3 for alpha chain variable domain of TCR clone 110844 (TRAV3, TRAJ32)
CAMSSYGGATNKLIF

SEQ ID NO: 221688 - protein, 13 aa, Homo sapiens
  CDR3 for beta chain variable domain of TCR clone 110844 (TRBV20-1, TRBJ2-7)
CSARPSTNYEQYF

SEQ ID NO: 221689 - protein, 14 aa, Homo sapiens
  CDR3 for alpha chain variable domain of TCR clone 110845 (TRAV17, TRAJ15)
CATAPNQAGTALIF

SEQ ID NO: 221690 - protein, 17 aa, Homo sapiens
  CDR3 for beta chain variable domain of TCR clone 110845 (TRBV28, TRBJ2-5)
CASSRQGGLAGAETQYF

SEQ ID NO: 221691 - protein, 10 aa, Homo sapiens
  CDR3 for alpha chain variable domain of TCR clone 110846 (TRAV21, TRAJ31)
CAVDNARLMF

SEQ ID NO: 221692 - protein, 15 aa, Homo sapiens
  CDR3 for beta chain variable domain of TCR clone 110846 (TRBV18, TRBJ2-7)
CASSPTFMDSYEQYF

SEQ ID NO: 221693 - protein, 14 aa, Homo sapiens
  CDR3 for alpha chain variable domain of TCR clone 110847 (TRAV12-1, TRAJ12)
CVVTRMDSSYKLIF

SEQ ID NO: 221694 - protein, 14 aa, Homo sapiens
  CDR3 for beta chain variable domain of TCR clone 110847 (TRBV7-2, TRBJ2-5)
CASSLSGGGETQYF

SEQ ID NO: 221695 - protein, 17 aa, Homo sapiens
  CDR3 for alpha chain variable domain of TCR clone 110848 (TRAV3, TRAJ4)
CAVRDGTGGYNKRILEQ

SEQ ID NO: 221696 - protein, 13 aa, Homo sapiens
  CDR3 for beta chain variable domain of TCR clone 110848 (TRBV12-5, TRBJ1-2)
CASGVRTGNGYTF

SEQ ID NO: 221697 - protein, 15 aa, Homo sapiens
  CDR3 for alpha chain variable domain of TCR clone 110849 (TRAV8-3, TRAJ11)
CAVGLLNSGYSTLTF

SEQ ID NO: 221698 - protein, 18 aa, Homo sapiens
  CDR3 for beta chain variable domain of TCR clone 110849 (TRBV7-3, TRBJ2-1)
CASSLTLASGRAMVSSSS

SEQ ID NO: 221699 - protein, 12 aa, Homo sapiens
  CDR3 for alpha chain variable domain of TCR clone 110850 (TRAV12-1, TRAJ34)
CVVAVATDKLIF

SEQ ID NO: 221700 - protein, 12 aa, Homo sapiens
  CDR3 for beta chain variable domain of TCR clone 110850 (TRBV7-9, TRBJ1-1)
CASSLVRGEAFF

SEQ ID NO: 221701 - protein, 15 aa, Homo sapiens
  CDR3 for alpha chain variable domain of TCR clone 110851 (TRAV25, TRAJ52)
CAARPGGTSYGKLTF

SEQ ID NO: 221702 - protein, 17 aa, Homo sapiens
  CDR3 for beta chain variable domain of TCR clone 110851 (TRBV7-8, TRBJ2-6)
CASSAGTGGAGANVLTF

SEQ ID NO: 221703 - protein, 12 aa, Homo sapiens
  CDR3 for alpha chain variable domain of TCR clone 110852 (TRAV25, TRAJ5)
CAGGGGRRALTF

SEQ ID NO: 221704 - protein, 14 aa, Homo sapiens
  CDR3 for beta chain variable domain of TCR clone 110852 (TRBV19, TRBJ2-1)
CASPTFVLSGEQFF

SEQ ID NO: 221705 - protein, 14 aa, Homo sapiens
  CDR3 for alpha chain variable domain of TCR clone 110853 (TRAV8-4, TRAJ8)
CAVSVGTGFQTLVF

SEQ ID NO: 221706 - protein, 15 aa, Homo sapiens
  CDR3 for beta chain variable domain of TCR clone 110853 (TRBV2, TRBJ2-3)
CASSGEGTGTDTQYF

SEQ ID NO: 221707 - protein, 15 aa, Homo sapiens
  CDR3 for alpha chain variable domain of TCR clone 110854 (TRAV8-3, TRAJ11)
CAVGLLNSGYSTLPF

SEQ ID NO: 221708 - protein, 16 aa, Homo sapiens
  CDR3 for beta chain variable domain of TCR clone 110854 (TRBV28, TRBJ2-1)
CASSLWGRTSGTLQFF

SEQ ID NO: 221709 - protein, 14 aa, Homo sapiens
  CDR3 for alpha chain variable domain of TCR clone 110855 (TRAV12-2, TRAJ13)
CAMKKTGGYQKVTF

SEQ ID NO: 221710 - protein, 13 aa, Homo sapiens
  CDR3 for beta chain variable domain of TCR clone 110855 (TRBV7-9, TRBJ1-2)
CASSLKQNYGYTF

SEQ ID NO: 221711 - protein, 14 aa, Homo sapiens
  CDR3 for alpha chain variable domain of TCR clone 110856 (TRAV35, TRAJ22)
CAWLRPGSARQLTF

SEQ ID NO: 221712 - protein, 14 aa, Homo sapiens
  CDR3 for beta chain variable domain of TCR clone 110856 (TRBV4-1, TRBJ2-7)
CASSPVAGGDEQYF

SEQ ID NO: 221713 - protein, 16 aa, Homo sapiens
  CDR3 for alpha chain variable domain of TCR clone 110857 (TRAV23/DV6, TRAJ48)
CAASGVVNFVNEKLTF

SEQ ID NO: 221714 - protein, 15 aa, Homo sapiens
  CDR3 for beta chain variable domain of TCR clone 110857 (TRBV7-9, TRBJ2-1)
CASSLGWGRANEQFF

SEQ ID NO: 221715 - protein, 12 aa, Homo sapiens
  CDR3 for alpha chain variable domain of TCR clone 110858 (TRAV12-2, TRAJ16)
CAVAPDGQKLLF

SEQ ID NO: 221716 - protein, 12 aa, Homo sapiens
  CDR3 for beta chain variable domain of TCR clone 110858 (TRBV5-1, TRBJ1-2)
CASSQDTYGYTF

SEQ ID NO: 221717 - protein, 13 aa, Homo sapiens
  CDR3 for alpha chain variable domain of TCR clone 110859 (TRAV12-3, TRAJ7)
CAMTPYGNNRLAF

SEQ ID NO: 221718 - protein, 10 aa, Homo sapiens
  CDR3 for beta chain variable domain of TCR clone 110859 (TRBV6-4, TRBJ2-1)
CASVYNEQFF

SEQ ID NO: 221719 - protein, 11 aa, Homo sapiens
  CDR3 for alpha chain variable domain of TCR clone 110860 (TRAV5, TRAJ3)
CGGSRASKIIF

SEQ ID NO: 221720 - protein, 13 aa, Homo sapiens
  CDR3 for beta chain variable domain of TCR clone 110860 (TRBV27, TRBJ2-1)
CASRTLGVGEQFF

SEQ ID NO: 221721 - protein, 14 aa, Homo sapiens
  CDR3 for alpha chain variable domain of TCR clone 110861 (TRAV26-1, TRAJ48)
CIVRVGFGNEKLTL

SEQ ID NO: 221722 - protein, 13 aa, Homo sapiens
  CDR3 for beta chain variable domain of TCR clone 110861 (TRBV11-3, TRBJ2-3)
CASSHDTKDTQYF

SEQ ID NO: 221723 - protein, 12 aa, Homo sapiens
  CDR3 for alpha chain variable domain of TCR clone 110862 (TRAV2, TRAJ33)
CAFMDINYQLIW

SEQ ID NO: 221724 - protein, 16 aa, Homo sapiens
  CDR3 for beta chain variable domain of TCR clone 110862 (TRBV2, TRBJ2-7)
CASSEPWTGPSYEQYF

SEQ ID NO: 221725 - protein, 14 aa, Homo sapiens
  CDR3 for alpha chain variable domain of TCR clone 110863 (TRAV38-1, TRAJ45)
CAYYSGGGADGLTF

SEQ ID NO: 221726 - protein, 20 aa, Homo sapiens
  CDR3 for beta chain variable domain of TCR clone 110863 (TRBV28, TRBJ2-1)
CASTPIGRSAGLAGGNEQFF

SEQ ID NO: 221727 - protein, 16 aa, Homo sapiens
  CDR3 for alpha chain variable domain of TCR clone 110864 (TRAV30, TRAJ24)
CGTEIVDADSWGKFQF

SEQ ID NO: 221728 - protein, 13 aa, Homo sapiens
  CDR3 for beta chain variable domain of TCR clone 110864 (TRBV7-9, TRBJ2-3)
CASSPRGPDTQYF

SEQ ID NO: 221729 - protein, 13 aa, Homo sapiens
  CDR3 for alpha chain variable domain of TCR clone 110865 (TRAV21, TRAJ27)
CAARPGNAGHSTF

SEQ ID NO: 221730 - protein, 14 aa, Homo sapiens
  CDR3 for beta chain variable domain of TCR clone 110865 (TRBV7-6, TRBJ2-3)
CASSLGTVTDTQYF

SEQ ID NO: 221731 - protein, 18 aa, Homo sapiens
  CDR3 for alpha chain variable domain of TCR clone 110866 (TRAV26-1, TRAJ23)
CIVRVGLEVWNQGGKLSF

SEQ ID NO: 221732 - protein, 14 aa, Homo sapiens
  CDR3 for beta chain variable domain of TCR clone 110866 (TRBV7-6, TRBJ2-3)
CASSLGTVTDTQYF

SEQ ID NO: 221733 - protein, 12 aa, Homo sapiens
  CDR3 for alpha chain variable domain of TCR clone 110867 (TRAV12-3, TRAJ17)
CAMTLTGNKLAF

SEQ ID NO: 221734 - protein, 15 aa, Homo sapiens
  CDR3 for beta chain variable domain of TCR clone 110867 (TRBV20-1, TRBJ2-7)
CSARDRASGMDEQYF

SEQ ID NO: 221735 - protein, 14 aa, Homo sapiens
  CDR3 for alpha chain variable domain of TCR clone 110868 (TRAV12-2, TRAJ5)
CAVNRSTGRRALNF

SEQ ID NO: 221736 - protein, 12 aa, Homo sapiens
  CDR3 for beta chain variable domain of TCR clone 110868 (TRBV19, TRBJ1-5)
CASSIAQQPQHF

SEQ ID NO: 221737 - protein, 12 aa, Homo sapiens
  CDR3 for alpha chain variable domain of TCR clone 110869 (TRAV5, TRAJ29)
CAESKKETHLLS

SEQ ID NO: 221738 - protein, 14 aa, Homo sapiens
  CDR3 for beta chain variable domain of TCR clone 110869 (TRBV19, TRBJ1-1)
CASSKVTGVTEAFF

SEQ ID NO: 221739 - protein, 13 aa, Homo sapiens
  CDR3 for alpha chain variable domain of TCR clone 110870 (TRAV27, TRAJ49)
CAPRPYTGNQFYF

SEQ ID NO: 221740 - protein, 16 aa, Homo sapiens
  CDR3 for beta chain variable domain of TCR clone 110870 (TRBV19, TRBJ2-3)
CASSIVASLGTDTQYF

SEQ ID NO: 221741 - protein, 15 aa, Homo sapiens
  CDR3 for alpha chain variable domain of TCR clone 110871 (TRAV21, TRAJ40)
CAVRPQSSGTYKYIF

SEQ ID NO: 221742 - protein, 13 aa, Homo sapiens
  CDR3 for beta chain variable domain of TCR clone 110871 (TRBV7-2, TRBJ2-2)
CASSSVRAGELFF

SEQ ID NO: 221743 - protein, 11 aa, Homo sapiens
  CDR3 for alpha chain variable domain of TCR clone 110872 (TRAV21, TRAJ31)
CAVRNNARLMF

SEQ ID NO: 221744 - protein, 14 aa, Homo sapiens
  CDR3 for beta chain variable domain of TCR clone 110872 (TRBV7-9, TRBJ2-1)
CASSPRDSLYEQFF

SEQ ID NO: 221745 - protein, 15 aa, Homo sapiens
  CDR3 for alpha chain variable domain of TCR clone 110873 (TRAV21, TRAJ52)
CAVRGGGTSYGKLTF

SEQ ID NO: 221746 - protein, 12 aa, Homo sapiens
  CDR3 for beta chain variable domain of TCR clone 110873 (TRBV11-2, TRBJ2-2)
CASSLGGGELFL

SEQ ID NO: 221747 - protein, 17 aa, Homo sapiens
  CDR3 for alpha chain variable domain of TCR clone 110874 (TRAV1-1, TRAJ9)
CLLLLRCQKYWRLKTIF

SEQ ID NO: 221748 - protein, 14 aa, Homo sapiens
  CDR3 for beta chain variable domain of TCR clone 110874 (TRBV20-1, TRBJ2-1)
CSAQIGGSANEQFF

SEQ ID NO: 221749 - protein, 15 aa, Homo sapiens
  CDR3 for alpha chain variable domain of TCR clone 110875 (TRAV17, TRAJ56)
CATEPFTVANSKLTF

SEQ ID NO: 221750 - protein, 15 aa, Homo sapiens
  CDR3 for beta chain variable domain of TCR clone 110875 (TRBV28, TRBJ1-5)
CASSRTGGYVQPQHF

SEQ ID NO: 221751 - protein, 14 aa, Homo sapiens
  CDR3 for alpha chain variable domain of TCR clone 110876 (TRAV12-3, TRAJ13)
CAMRNSGGYQKVTF

SEQ ID NO: 221752 - protein, 14 aa, Homo sapiens
  CDR3 for beta chain variable domain of TCR clone 110876 (TRBV7-2, TRBJ2-1)
CASSLGVGYNEQFF

SEQ ID NO: 221753 - protein, 12 aa, Homo sapiens
  CDR3 for alpha chain variable domain of TCR clone 110877 (TRAV36/DV7, TRAJ54)
CAVVRGAQKLVF

SEQ ID NO: 221754 - protein, 14 aa, Homo sapiens
  CDR3 for beta chain variable domain of TCR clone 110877 (TRBV19, TRBJ2-1)
CASPTFVLSGEQFF

SEQ ID NO: 221755 - protein, 14 aa, Homo sapiens
  CDR3 for alpha chain variable domain of TCR clone 110878 (TRAV13-1, TRAJ20)
CAARPGSNDYKLSF

SEQ ID NO: 221756 - protein, 15 aa, Homo sapiens
  CDR3 for beta chain variable domain of TCR clone 110878 (TRBV4-1, TRBJ2-7)
CASSQQGQDFDEQYF

SEQ ID NO: 221757 - protein, 14 aa, Homo sapiens
  CDR3 for alpha chain variable domain of TCR clone 110879 (TRAV1-2, TRAJ16)
CAVNRFSDGQKLLF

SEQ ID NO: 221758 - protein, 17 aa, Homo sapiens
  CDR3 for beta chain variable domain of TCR clone 110879 (TRBV13, TRBJ2-3)
CASSLARVAGGRNTQYF

SEQ ID NO: 221759 - protein, 14 aa, Homo sapiens
  CDR3 for alpha chain variable domain of TCR clone 110880 (TRAV12-2, TRAJ13)
CAVKKTGGYQKVTF

SEQ ID NO: 221760 - protein, 17 aa, Homo sapiens
  CDR3 for beta chain variable domain of TCR clone 110880 (TRBV20-1, TRBJ2-2)
CSASGSGQCGLTGELFF

SEQ ID NO: 221761 - protein, 13 aa, Homo sapiens
  CDR3 for alpha chain variable domain of TCR clone 110881 (TRAV13-1, TRAJ6)
CARGSGGSYIPTF

SEQ ID NO: 221762 - protein, 16 aa, Homo sapiens
  CDR3 for beta chain variable domain of TCR clone 110881 (TRBV20-1, TRBJ2-1)
CSARDFSGRIGDEQFF

SEQ ID NO: 221763 - protein, 17 aa, Homo sapiens
  CDR3 for alpha chain variable domain of TCR clone 110882 (TRAV12-2, TRAJ48)
CASNEKLTFGTGKRLTI

SEQ ID NO: 221764 - protein, 15 aa, Homo sapiens
  CDR3 for beta chain variable domain of TCR clone 110882 (TRBV5-1, TRBJ2-1)
CASSQAGYWWNEQFF

SEQ ID NO: 221765 - protein, 15 aa, Homo sapiens
  CDR3 for alpha chain variable domain of TCR clone 110883 (TRAV3, TRAJ47)
CAVRDIGEYGNKLVV

SEQ ID NO: 221766 - protein, 14 aa, Homo sapiens
  CDR3 for beta chain variable domain of TCR clone 110883 (TRBV13, TRBJ2-5)
CASSLERVGETQYS

SEQ ID NO: 221767 - protein, 14 aa, Homo sapiens
  CDR3 for alpha chain variable domain of TCR clone 110884 (TRAV9-2, TRAJ39)
CALYIYNAGNMLTF

SEQ ID NO: 221768 - protein, 22 aa, Homo sapiens
  CDR3 for beta chain variable domain of TCR clone 110884 (TRBV6-1, TRBJ1-3)
CASVQGGGWKHHIFRRGKLAHC

SEQ ID NO: 221769 - protein, 16 aa, Homo sapiens
  CDR3 for alpha chain variable domain of TCR clone 110885 (TRAV1-1, TRAJ29)
CAVRSTRNSGNTPLVF

SEQ ID NO: 221770 - protein, 17 aa, Homo sapiens
  CDR3 for beta chain variable domain of TCR clone 110885 (TRBV24-1, TRBJ2-4)
CATSDAEARGVRNIQYF

SEQ ID NO: 221771 - protein, 14 aa, Homo sapiens
  CDR3 for alpha chain variable domain of TCR clone 110886 (TRAV13-2, TRAJ17)
CAENSKAAGNKLTF

SEQ ID NO: 221772 - protein, 13 aa, Homo sapiens
  CDR3 for beta chain variable domain of TCR clone 110886 (TRBV12-5, TRBJ2-3)
CASGDRQSDTQYF

SEQ ID NO: 221773 - protein, 13 aa, Homo sapiens
  CDR3 for alpha chain variable domain of TCR clone 110887 (TRAV1-2, TRAJ9)
CAALNTGGFKTIF

SEQ ID NO: 221774 - protein, 14 aa, Homo sapiens
  CDR3 for beta chain variable domain of TCR clone 110887 (TRBV24-1, TRBJ2-5)
CATSDALKGETQYF

SEQ ID NO: 221775 - protein, 15 aa, Homo sapiens
  CDR3 for alpha chain variable domain of TCR clone 110888 (TRAV3, TRAJ22)
CAVRDRGGSAGQRTF

SEQ ID NO: 221776 - protein, 15 aa, Homo sapiens
  CDR3 for beta chain variable domain of TCR clone 110888 (TRBV27, TRBJ2-1)
CASSNGGGSSNEQFF

SEQ ID NO: 221777 - protein, 14 aa, Homo sapiens
  CDR3 for alpha chain variable domain of TCR clone 110889 (TRAV8-3, TRAJ6)
CAVGASGGSYIPTF

SEQ ID NO: 221778 - protein, 17 aa, Homo sapiens
  CDR3 for beta chain variable domain of TCR clone 110889 (TRBV18, TRBJ2-2)
CASSPLDPWQNTGELFF

SEQ ID NO: 221779 - protein, 12 aa, Homo sapiens
  CDR3 for alpha chain variable domain of TCR clone 110890 (TRAV12-2, TRAJ7)
CAVMRGNNRLAF

SEQ ID NO: 221780 - protein, 17 aa, Homo sapiens
  CDR3 for beta chain variable domain of TCR clone 110890 (TRBV7-9, TRBJ2-3)
CASSTTVAGDLTDTQYF

SEQ ID NO: 221781 - protein, 13 aa, Homo sapiens
  CDR3 for alpha chain variable domain of TCR clone 110891 (TRAV8-1, TRAJ15)
CAVKNQAGTALIF

SEQ ID NO: 221782 - protein, 12 aa, Homo sapiens
  CDR3 for beta chain variable domain of TCR clone 110891 (TRBV2, TRBJ2-4)
CASQGDSGIQYF

SEQ ID NO: 221783 - protein, 14 aa, Homo sapiens
  CDR3 for alpha chain variable domain of TCR clone 110892 (TRAV12-2, TRAJ17)
CAVLFKAAGNKLPF

SEQ ID NO: 221784 - protein, 15 aa, Homo sapiens
  CDR3 for beta chain variable domain of TCR clone 110892 (TRBV20-1, TRBJ2-7)
CSARDRVSGMDEQYF

SEQ ID NO: 221785 - protein, 16 aa, Homo sapiens
  CDR3 for alpha chain variable domain of TCR clone 110893 (TRAV38-1, TRAJ37)
CAFKGDGSSNTGKLIF

SEQ ID NO: 221786 - protein, 13 aa, Homo sapiens
  CDR3 for beta chain variable domain of TCR clone 110893 (TRBV12-4, TRBJ2-5)
CASILFRRETQYF

SEQ ID NO: 221787 - protein, 17 aa, Homo sapiens
  CDR3 for alpha chain variable domain of TCR clone 110894 (TRAV3, TRAJ38)
CAVRDCLNAGNNRRLIW

SEQ ID NO: 221788 - protein, 15 aa, Homo sapiens
  CDR3 for beta chain variable domain of TCR clone 110894 (TRBV27, TRBJ2-1)
CASSNGGGSSNEQFF

SEQ ID NO: 221789 - protein, 20 aa, Homo sapiens
  CDR3 for alpha chain variable domain of TCR clone 110895 (TRAV26-1, TRAJ47)
CCVLLHRQSSFMEYGNKLVL

SEQ ID NO: 221790 - protein, 14 aa, Homo sapiens
  CDR3 for beta chain variable domain of TCR clone 110895 (TRBV7-2, TRBJ1-2)
CASSRGGTNYGYTF

SEQ ID NO: 221791 - protein, 20 aa, Homo sapiens
  CDR3 for alpha chain variable domain of TCR clone 110896 (TRAV21, TRAJ30)
CAVRRRMTRSSLEKGHDFIF

SEQ ID NO: 221792 - protein, 14 aa, Homo sapiens
  CDR3 for beta chain variable domain of TCR clone 110896 (TRBV25-1, TRBJ1-1)
CASTHLGGNTEAFF

SEQ ID NO: 221793 - protein, 15 aa, Homo sapiens
  CDR3 for alpha chain variable domain of TCR clone 110897 (TRAV2, TRAJ9)
CAVEDRGTGGFKTIF

SEQ ID NO: 221794 - protein, 14 aa, Homo sapiens
  CDR3 for beta chain variable domain of TCR clone 110897 (TRBV7-2, TRBJ1-2)
CASSQTGSTYGYTF

SEQ ID NO: 221795 - protein, 16 aa, Homo sapiens
  CDR3 for alpha chain variable domain of TCR clone 110898 (TRAV38-1, TRAJ56)
CAFMKRQTGANSKLTF

SEQ ID NO: 221796 - protein, 14 aa, Homo sapiens
  CDR3 for beta chain variable domain of TCR clone 110898 (TRBV19, TRBJ2-7)
CASNFRDTFTGMYF

SEQ ID NO: 221797 - protein, 14 aa, Homo sapiens
  CDR3 for alpha chain variable domain of TCR clone 110899 (TRAV8-2, TRAJ11)
CVVSEKSGYSTLTF

SEQ ID NO: 221798 - protein, 13 aa, Homo sapiens
  CDR3 for beta chain variable domain of TCR clone 110899 (TRBV7-2, TRBJ2-5)
CASSYWTGETQYF

SEQ ID NO: 221799 - protein, 14 aa, Homo sapiens
  CDR3 for alpha chain variable domain of TCR clone 110900 (TRAV1-2, TRAJ15)
CAVRDRQAGTALIF

SEQ ID NO: 221800 - protein, 17 aa, Homo sapiens
  CDR3 for beta chain variable domain of TCR clone 110900 (TRBV20-1, TRBJ2-4)
CSARDWASGGRENIQYF

SEQ ID NO: 221801 - protein, 14 aa, Homo sapiens
  CDR3 for alpha chain variable domain of TCR clone 110901 (TRAV23/DV6, TRAJ37)
CAASTSSNTGKLLF

SEQ ID NO: 221802 - protein, 15 aa, Homo sapiens
  CDR3 for beta chain variable domain of TCR clone 110901 (TRBV7-9, TRBJ2-7)
CASSPGGGLTYEQYF

SEQ ID NO: 221803 - protein, 14 aa, Homo sapiens
  CDR3 for alpha chain variable domain of TCR clone 110902 (TRAV8-4, TRAJ13)
CAVTLSGGYQKVTC

SEQ ID NO: 221804 - protein, 14 aa, Homo sapiens
  CDR3 for beta chain variable domain of TCR clone 110902 (TRBV7-2, TRBJ1-2)
CASSQTGSTYGYTF

SEQ ID NO: 221805 - protein, 14 aa, Homo sapiens
  CDR3 for alpha chain variable domain of TCR clone 110903 (TRAV1-2, TRAJ16)
CAVNRFSGGQKLLF

SEQ ID NO: 221806 - protein, 12 aa, Homo sapiens
  CDR3 for beta chain variable domain of TCR clone 110903 (TRBV14, TRBJ1-1)
CASSQLKGLAFF

SEQ ID NO: 221807 - protein, 16 aa, Homo sapiens
  CDR3 for alpha chain variable domain of TCR clone 110904 (TRAV26-1, TRAJ41)
CIVRVAVANSGYALNF

SEQ ID NO: 221808 - protein, 13 aa, Homo sapiens
  CDR3 for beta chain variable domain of TCR clone 110904 (TRBV11-2, TRBJ1-1)
CASSLGNGAEAFF

SEQ ID NO: 221809 - protein, 19 aa, Homo sapiens
  CDR3 for alpha chain variable domain of TCR clone 110905 (TRAV10, TRAJ45)
PTSVWCGGYSGGGADGLIF

SEQ ID NO: 221810 - protein, 14 aa, Homo sapiens
  CDR3 for beta chain variable domain of TCR clone 110905 (TRBV7-8, TRBJ2-3)
CASSLEAGTDTQYF

SEQ ID NO: 221811 - protein, 14 aa, Homo sapiens
  CDR3 for alpha chain variable domain of TCR clone 110906 (TRAV1-2, TRAJ8)
CAVREDTGFQKLVF

SEQ ID NO: 221812 - protein, 16 aa, Homo sapiens
  CDR3 for beta chain variable domain of TCR clone 110906 (TRBV4-1, TRBJ1-2)
CASSQDAGQVLYGYTF

SEQ ID NO: 221813 - protein, 16 aa, Homo sapiens
  CDR3 for alpha chain variable domain of TCR clone 110907 (TRAV30, TRAJ24)
CGTEIVDADSWGKFQF

SEQ ID NO: 221814 - protein, 15 aa, Homo sapiens
  CDR3 for beta chain variable domain of TCR clone 110907 (TRBV7-9, TRBJ1-4)
CASSARTGGNEKLFF

SEQ ID NO: 221815 - protein, 23 aa, Homo sapiens
  CDR3 for alpha chain variable domain of TCR clone 110908 (TRAV21, TRAJ32)
CAVEIMVVLQTSSSLELAICLLS

SEQ ID NO: 221816 - protein, 13 aa, Homo sapiens
  CDR3 for beta chain variable domain of TCR clone 110908 (TRBV2, TRBJ1-6)
CASGRGGISPLHF

SEQ ID NO: 221817 - protein, 14 aa, Homo sapiens
  CDR3 for alpha chain variable domain of TCR clone 110909 (TRAV12-2, TRAJ13)
CALKKTGGYQKVTF

SEQ ID NO: 221818 - protein, 15 aa, Homo sapiens
  CDR3 for beta chain variable domain of TCR clone 110909 (TRBV5-1, TRBJ2-5)
CASSLGLAEQETQYF

SEQ ID NO: 221819 - protein, 12 aa, Homo sapiens
  CDR3 for alpha chain variable domain of TCR clone 110910 (TRAV1-1, TRAJ24)
CAVRGSWGKFQF

SEQ ID NO: 221820 - protein, 14 aa, Homo sapiens
  CDR3 for beta chain variable domain of TCR clone 110910 (TRBV20-1, TRBJ2-3)
RSARGGTSTDTQYF

SEQ ID NO: 221821 - protein, 14 aa, Homo sapiens
  CDR3 for alpha chain variable domain of TCR clone 110911 (TRAV35, TRAJ10)
CAGILTGGGNKLTF

SEQ ID NO: 221822 - protein, 15 aa, Homo sapiens
  CDR3 for beta chain variable domain of TCR clone 110911 (TRBV5-1, TRBJ2-7)
CASSLNGGPAREQYF

SEQ ID NO: 221823 - protein, 16 aa, Homo sapiens
  CDR3 for alpha chain variable domain of TCR clone 110912 (TRAV8-1, TRAJ42)
CAVTSRYGGSQGNLIF

SEQ ID NO: 221824 - protein, 12 aa, Homo sapiens
  CDR3 for beta chain variable domain of TCR clone 110912 (TRBV6-3, TRBJ2-7)
CVSSLGRRGLYF

SEQ ID NO: 221825 - protein, 13 aa, Homo sapiens
  CDR3 for alpha chain variable domain of TCR clone 110913 (TRAV21, TRAJ27)
CAARPGNAGKSTF

SEQ ID NO: 221826 - protein, 13 aa, Homo sapiens
  CDR3 for beta chain variable domain of TCR clone 110913 (TRBV4-1, TRBJ2-1)
CASSQAGGDEQFF

SEQ ID NO: 221827 - protein, 14 aa, Homo sapiens
  CDR3 for alpha chain variable domain of TCR clone 110914 (TRAV13-1, TRAJ48)
CAASRSFGNEKLTF

SEQ ID NO: 221828 - protein, 12 aa, Homo sapiens
  CDR3 for beta chain variable domain of TCR clone 110914 (TRBV7-8, TRBJ2-7)
CASSLGDREQYF

SEQ ID NO: 221829 - protein, 16 aa, Homo sapiens
  CDR3 for alpha chain variable domain of TCR clone 110915 (TRAV14/DV4, TRAJ54)
CAMREGRIQGAHKLVF

SEQ ID NO: 221830 - protein, 18 aa, Homo sapiens
  CDR3 for beta chain variable domain of TCR clone 110915 (TRBV18, TRBJ1-3)
CASSPRGGAGPSGNTIYF

SEQ ID NO: 221831 - protein, 14 aa, Homo sapiens
  CDR3 for alpha chain variable domain of TCR clone 110916 (TRAV12-1, TRAJ30)
CVVNIGGRDDKIIF

SEQ ID NO: 221832 - protein, 11 aa, Homo sapiens
  CDR3 for beta chain variable domain of TCR clone 110916 (TRBV7-8, TRBJ2-7)
CASSLSLEQYF

SEQ ID NO: 221833 - protein, 11 aa, Homo sapiens
  CDR3 for alpha chain variable domain of TCR clone 110917 (TRAV17, TRAJ9)
CGFTGGFKTIF

SEQ ID NO: 221834 - protein, 12 aa, Homo sapiens
  CDR3 for beta chain variable domain of TCR clone 110917 (TRBV29-1, TRBJ2-3)
CSATGGADTQYF

SEQ ID NO: 221835 - protein, 14 aa, Homo sapiens
  CDR3 for alpha chain variable domain of TCR clone 110918 (TRAV12-1, TRAJ17)
CVVNYKAAGNKLTF

SEQ ID NO: 221836 - protein, 12 aa, Homo sapiens
  CDR3 for beta chain variable domain of TCR clone 110918 (TRBV7-8, TRBJ2-7)
CASSLGDREQYF

SEQ ID NO: 221837 - protein, 13 aa, Homo sapiens
  CDR3 for alpha chain variable domain of TCR clone 110919 (TRAV35, TRAJ42)
CAGFPGSQGNLIF

SEQ ID NO: 221838 - protein, 14 aa, Homo sapiens
  CDR3 for beta chain variable domain of TCR clone 110919 (TRBV7-9, TRBJ2-2)
CASSGLADTGELFF

SEQ ID NO: 221839 - protein, 13 aa, Homo sapiens
  CDR3 for alpha chain variable domain of TCR clone 110920 (TRAV36/DV7, TRAJ49)
CAVEANTGNQFYL

SEQ ID NO: 221840 - protein, 13 aa, Homo sapiens
  CDR3 for beta chain variable domain of TCR clone 110920 (TRBV10-3, TRBJ2-7)
CASKLAVNYEQYF

SEQ ID NO: 221841 - protein, 15 aa, Homo sapiens
  CDR3 for alpha chain variable domain of TCR clone 110921 (TRAV3, TRAJ5)
CAVRDLYTGRRALTS

SEQ ID NO: 221842 - protein, 16 aa, Homo sapiens
  CDR3 for beta chain variable domain of TCR clone 110921 (TRBV20-1, TRBJ1-4)
CSAPGQGLLTNEKLFF

SEQ ID NO: 221843 - protein, 14 aa, Homo sapiens
  CDR3 for alpha chain variable domain of TCR clone 110922 (TRAV8-4, TRAJ48)
CVVSETFGNEKLTF

SEQ ID NO: 221844 - protein, 14 aa, Homo sapiens
  CDR3 for beta chain variable domain of TCR clone 110922 (TRBV13, TRBJ2-7)
CASSLKGASYEQYF

SEQ ID NO: 221845 - protein, 15 aa, Homo sapiens
  CDR3 for alpha chain variable domain of TCR clone 110923 (TRAV26-2, TRAJ13)
CILRDLSGGYQKVTF

SEQ ID NO: 221846 - protein, 11 aa, Homo sapiens
  CDR3 for beta chain variable domain of TCR clone 110923 (TRBV7-9, TRBJ2-3)
CASSYTDTQYV

SEQ ID NO: 221847 - protein, 10 aa, Homo sapiens
  CDR3 for alpha chain variable domain of TCR clone 110924 (TRAV5, TRAJ34)
CAEDTDKLIF

SEQ ID NO: 221848 - protein, 14 aa, Homo sapiens
  CDR3 for beta chain variable domain of TCR clone 110924 (TRBV20-1, TRBJ2-7)
CSAWTALSSYEQYF

SEQ ID NO: 221849 - protein, 14 aa, Homo sapiens
  CDR3 for alpha chain variable domain of TCR clone 110925 (TRAV1-2, TRAJ16)
CAVNRFSDGQKLLF

SEQ ID NO: 221850 - protein, 15 aa, Homo sapiens
  CDR3 for beta chain variable domain of TCR clone 110925 (TRBV5-1, TRBJ2-7)
CASSLMTSGSNEQYF

SEQ ID NO: 221851 - protein, 13 aa, Homo sapiens
  CDR3 for alpha chain variable domain of TCR clone 110926 (TRAV21, TRAJ45)
CAVMGGGADGLTL

SEQ ID NO: 221852 - protein, 16 aa, Homo sapiens
  CDR3 for beta chain variable domain of TCR clone 110926 (TRBV20-1, TRBJ2-1)
CSARDHLAGGRGEQFF

SEQ ID NO: 221853 - protein, 12 aa, Homo sapiens
  CDR3 for alpha chain variable domain of TCR clone 110927 (TRAV12-3, TRAJ20)
CAMVRGDYKLSF

SEQ ID NO: 221854 - protein, 14 aa, Homo sapiens
  CDR3 for beta chain variable domain of TCR clone 110927 (TRBV5-5, TRBJ1-5)
CASSGQRVDQPQHF

SEQ ID NO: 221855 - protein, 15 aa, Homo sapiens
  CDR3 for alpha chain variable domain of TCR clone 110928 (TRAV16, TRAJ48)
CALFISNFGNEKLTF

SEQ ID NO: 221856 - protein, 13 aa, Homo sapiens
  CDR3 for beta chain variable domain of TCR clone 110928 (TRBV19, TRBJ1-3)
CASRLSLGNTIYF

SEQ ID NO: 221857 - protein, 11 aa, Homo sapiens
  CDR3 for alpha chain variable domain of TCR clone 110929 (TRAV12-1, TRAJ34)
CVVNKGRELIF

SEQ ID NO: 221858 - protein, 14 aa, Homo sapiens
  CDR3 for beta chain variable domain of TCR clone 110929 (TRBV7-6, TRBJ2-3)
CASSLGTVTDTQYF

SEQ ID NO: 221859 - protein, 14 aa, Homo sapiens
  CDR3 for alpha chain variable domain of TCR clone 110930 (TRAV8-4, TRAJ3)
CAVIEYSSASKIIF

SEQ ID NO: 221860 - protein, 14 aa, Homo sapiens
  CDR3 for beta chain variable domain of TCR clone 110930 (TRBV12-4, TRBJ2-7)
CASSFSGADYEQYF

SEQ ID NO: 221861 - protein, 16 aa, Homo sapiens
  CDR3 for alpha chain variable domain of TCR clone 110931 (TRAV30, TRAJ24)
CGTEIVDADSWGKFQF

SEQ ID NO: 221862 - protein, 13 aa, Homo sapiens
  CDR3 for beta chain variable domain of TCR clone 110931 (TRBV19, TRBJ2-2)
CASQEGIHGELFF

SEQ ID NO: 221863 - protein, 13 aa, Homo sapiens
  CDR3 for alpha chain variable domain of TCR clone 110932 (TRAV12-1, TRAJ11)
CVVIRGGYSTLTF

SEQ ID NO: 221864 - protein, 13 aa, Homo sapiens
  CDR3 for beta chain variable domain of TCR clone 110932 (TRBV20-1, TRBJ1-2)
CSARDQGAYGYTF

SEQ ID NO: 221865 - protein, 13 aa, Homo sapiens
  CDR3 for alpha chain variable domain of TCR clone 110933 (TRAV8-6, TRAJ9)
CAVWDTGGFKTSF

SEQ ID NO: 221866 - protein, 14 aa, Homo sapiens
  CDR3 for beta chain variable domain of TCR clone 110933 (TRBV2, TRBJ2-1)
CASSEALIYNEQFF

SEQ ID NO: 221867 - protein, 17 aa, Homo sapiens
  CDR3 for alpha chain variable domain of TCR clone 110934 (TRAV8-2, TRAJ17)
CGVSDRRFKAAGNKLTF

SEQ ID NO: 221868 - protein, 18 aa, Homo sapiens
  CDR3 for beta chain variable domain of TCR clone 110934 (TRBV7-9, TRBJ2-7)
CASSLTTSGSRTWYEQYF

SEQ ID NO: 221869 - protein, 13 aa, Homo sapiens
  CDR3 for alpha chain variable domain of TCR clone 110935 (TRAV8-1, TRAJ23)
YAVTGGQGGKLIF

SEQ ID NO: 221870 - protein, 15 aa, Homo sapiens
  CDR3 for beta chain variable domain of TCR clone 110935 (TRBV20-1, TRBJ2-2)
CSASPGHSNTGELFF

SEQ ID NO: 221871 - protein, 13 aa, Homo sapiens
  CDR3 for alpha chain variable domain of TCR clone 110936 (TRAV1-1, TRAJ9)
CAAKNTGGFKTIF

SEQ ID NO: 221872 - protein, 16 aa, Homo sapiens
  CDR3 for beta chain variable domain of TCR clone 110936 (TRBV13, TRBJ2-3)
CQQPLQGSGGRNTQYF

SEQ ID NO: 221873 - protein, 14 aa, Homo sapiens
  CDR3 for alpha chain variable domain of TCR clone 110937 (TRAV12-2, TRAJ17)
CAALFKASGNKLTF

SEQ ID NO: 221874 - protein, 15 aa, Homo sapiens
  CDR3 for beta chain variable domain of TCR clone 110937 (TRBV20-1, TRBJ2-7)
CSARDRVSGMDEQYF

SEQ ID NO: 221875 - protein, 14 aa, Homo sapiens
  CDR3 for alpha chain variable domain of TCR clone 110938 (TRAV8-4, TRAJ54)
CAASEVLGAQKLVF

SEQ ID NO: 221876 - protein, 13 aa, Homo sapiens
  CDR3 for beta chain variable domain of TCR clone 110938 (TRBV27, TRBJ2-7)
CASSFVSSYEQYF

SEQ ID NO: 221877 - protein, 13 aa, Homo sapiens
  CDR3 for alpha chain variable domain of TCR clone 110939 (TRAV27, TRAJ29)
WAGAHSGNTPLVF

SEQ ID NO: 221878 - protein, 14 aa, Homo sapiens
  CDR3 for beta chain variable domain of TCR clone 110939 (TRBV7-9, TRBJ2-7)
CASSIGQGAGEQYF

SEQ ID NO: 221879 - protein, 14 aa, Homo sapiens
  CDR3 for alpha chain variable domain of TCR clone 110940 (TRAV20, TRAJ44)
CAVDYTGTASKLTF

SEQ ID NO: 221880 - protein, 14 aa, Homo sapiens
  CDR3 for beta chain variable domain of TCR clone 110940 (TRBV7-9, TRBJ2-3)
CASSLEDGTDTQYF

SEQ ID NO: 221881 - protein, 15 aa, Homo sapiens
  CDR3 for alpha chain variable domain of TCR clone 110941 (TRAV12-3, TRAJ6)
CAMSAASGGSYIPTF

SEQ ID NO: 221882 - protein, 13 aa, Homo sapiens
  CDR3 for beta chain variable domain of TCR clone 110941 (TRBV20-1, TRBJ1-2)
CSASPEFNFGYTF

SEQ ID NO: 221883 - protein, 16 aa, Homo sapiens
  CDR3 for alpha chain variable domain of TCR clone 110942 (TRAV23/DV6, TRAJ48)
CAASGVGNFGNEKLTF

SEQ ID NO: 221884 - protein, 15 aa, Homo sapiens
  CDR3 for beta chain variable domain of TCR clone 110942 (TRBV20-1, TRBJ2-5)
CSAGLAGVSQETQYF

SEQ ID NO: 221885 - protein, 13 aa, Homo sapiens
  CDR3 for alpha chain variable domain of TCR clone 110943 (TRAV12-2, TRAJ26)
CAVNEKYGQNFVF

SEQ ID NO: 221886 - protein, 13 aa, Homo sapiens
  CDR3 for beta chain variable domain of TCR clone 110943 (TRBV18, TRBJ2-2)
CASSPTRGGELFF

SEQ ID NO: 221887 - protein, 20 aa, Homo sapiens
  CDR3 for alpha chain variable domain of TCR clone 110944 (TRAV12-1, TRAJ42)
SSVIQPPTSVKGGSQGNLIF

SEQ ID NO: 221888 - protein, 12 aa, Homo sapiens
  CDR3 for beta chain variable domain of TCR clone 110944 (TRBV11-2, TRBJ2-2)
CASSLPTGELFF

SEQ ID NO: 221889 - protein, 18 aa, Homo sapiens
  CDR3 for alpha chain variable domain of TCR clone 110945 (TRAV9-2, TRAJ52)
CALSRHNAGGTSYGKLTF

SEQ ID NO: 221890 - protein, 13 aa, Homo sapiens
  CDR3 for beta chain variable domain of TCR clone 110945 (TRBV7-9, TRBJ1-2)
CASSLKQNYGFTF

SEQ ID NO: 221891 - protein, 14 aa, Homo sapiens
  CDR3 for alpha chain variable domain of TCR clone 110946 (TRAV27, TRAJ23)
CAGAFDNQGGKLIF

SEQ ID NO: 221892 - protein, 15 aa, Homo sapiens
  CDR3 for beta chain variable domain of TCR clone 110946 (TRBV4-1, TRBJ2-5)
CASSQWDLYQETQYF

SEQ ID NO: 221893 - protein, 15 aa, Homo sapiens
  CDR3 for alpha chain variable domain of TCR clone 110947 (TRAV21, TRAJ37)
CAVRPTLSNTGKLIF

SEQ ID NO: 221894 - protein, 15 aa, Homo sapiens
  CDR3 for beta chain variable domain of TCR clone 110947 (TRBV7-9, TRBJ1-6)
CASSSPGRGNSPLHF

SEQ ID NO: 221895 - protein, 14 aa, Homo sapiens
  CDR3 for alpha chain variable domain of TCR clone 110948 (TRAV3, TRAJ20)
CAVRDSFNDYKLSF

SEQ ID NO: 221896 - protein, 15 aa, Homo sapiens
  CDR3 for beta chain variable domain of TCR clone 110948 (TRBV20-1, TRBJ2-7)
CSARDRVSGMDEQYF

SEQ ID NO: 221897 - protein, 13 aa, Homo sapiens
  CDR3 for alpha chain variable domain of TCR clone 110949 (TRAV36/DV7, TRAJ49)
CAVEANTGNQFYF

SEQ ID NO: 221898 - protein, 16 aa, Homo sapiens
  CDR3 for beta chain variable domain of TCR clone 110949 (TRBV12-5, TRBJ2-5)
CASGPRTSGNQETQYF

SEQ ID NO: 221899 - protein, 13 aa, Homo sapiens
  CDR3 for alpha chain variable domain of TCR clone 110950 (TRAV27, TRAJ42)
CAGARGSQGNLIF

SEQ ID NO: 221900 - protein, 15 aa, Homo sapiens
  CDR3 for beta chain variable domain of TCR clone 110950 (TRBV10-3, TRBJ2-2)
CAIRTEREDTGELFF

SEQ ID NO: 221901 - protein, 15 aa, Homo sapiens
  CDR3 for alpha chain variable domain of TCR clone 110951 (TRAV3, TRAJ4)
CAVRDGTGGYNKLIF

SEQ ID NO: 221902 - protein, 17 aa, Homo sapiens
  CDR3 for beta chain variable domain of TCR clone 110951 (TRBV20-1, TRBJ2-2)
CGASGSGQGGLTGELFF

SEQ ID NO: 221903 - protein, 14 aa, Homo sapiens
  CDR3 for alpha chain variable domain of TCR clone 110952 (TRAV1-2, TRAJ8)
CAVREDTGFQKLVF

SEQ ID NO: 221904 - protein, 13 aa, Homo sapiens
  CDR3 for beta chain variable domain of TCR clone 110952 (TRBV5-1, TRBJ2-1)
CASSLGSYNEQFF

SEQ ID NO: 221905 - protein, 16 aa, Homo sapiens
  CDR3 for alpha chain variable domain of TCR clone 110953 (TRAV4, TRAJ9)
CLVGDPNRPGGFKTIF

SEQ ID NO: 221906 - protein, 16 aa, Homo sapiens
  CDR3 for beta chain variable domain of TCR clone 110953 (TRBV28, TRBJ1-4)
CASSPPYRGRSEKLFF

SEQ ID NO: 221907 - protein, 13 aa, Homo sapiens
  CDR3 for alpha chain variable domain of TCR clone 110954 (TRAV12-2, TRAJ10)
CAVPTGGGNKLTF

SEQ ID NO: 221908 - protein, 16 aa, Homo sapiens
  CDR3 for beta chain variable domain of TCR clone 110954 (TRBV7-3, TRBJ2-1)
CASSLEGYRSYNEQFF

SEQ ID NO: 221909 - protein, 18 aa, Homo sapiens
  CDR3 for alpha chain variable domain of TCR clone 110955 (TRAV26-2, TRAJ32)
CILRAPLNYGGATNKLIF

SEQ ID NO: 221910 - protein, 13 aa, Homo sapiens
  CDR3 for beta chain variable domain of TCR clone 110955 (TRBV7-3, TRBJ2-1)
CASSLWPYIEQFF

SEQ ID NO: 221911 - protein, 18 aa, Homo sapiens
  CDR3 for alpha chain variable domain of TCR clone 110956 (TRAV1-2, TRAJ16)
SYDVLDGLEEKDGQKLLF

SEQ ID NO: 221912 - protein, 16 aa, Homo sapiens
  CDR3 for beta chain variable domain of TCR clone 110956 (TRBV2, TRBJ2-1)
CASRSPAGGKYNEQFF

SEQ ID NO: 221913 - protein, 13 aa, Homo sapiens
  CDR3 for alpha chain variable domain of TCR clone 110957 (TRAV12-1, TRAJ29)
CVVNGPGNTPLVF

SEQ ID NO: 221914 - protein, 13 aa, Homo sapiens
  CDR3 for beta chain variable domain of TCR clone 110957 (TRBV24-1, TRBJ2-1)
CATSAGPYNEQFF

SEQ ID NO: 221915 - protein, 14 aa, Homo sapiens
  CDR3 for alpha chain variable domain of TCR clone 110958 (TRAV12-1, TRAJ17)
CVVNFKAAGNKLTF

SEQ ID NO: 221916 - protein, 17 aa, Homo sapiens
  CDR3 for beta chain variable domain of TCR clone 110958 (TRBV20-1, TRBJ2-1)
CSASASGLEGSYNEQFF

SEQ ID NO: 221917 - protein, 11 aa, Homo sapiens
  CDR3 for alpha chain variable domain of TCR clone 110959 (TRAV12-2, TRAJ31)
CAVPRWARLMF

SEQ ID NO: 221918 - protein, 15 aa, Homo sapiens
  CDR3 for beta chain variable domain of TCR clone 110959 (TRBV19, TRBJ2-7)
CASSIGGGLVNEQYF

SEQ ID NO: 221919 - protein, 16 aa, Homo sapiens
  CDR3 for alpha chain variable domain of TCR clone 110960 (TRAV30, TRAJ24)
CGTEIVDADSWGKFQL

SEQ ID NO: 221920 - protein, 16 aa, Homo sapiens
  CDR3 for beta chain variable domain of TCR clone 110960 (TRBV7-3, TRBJ2-2)
CASSLKRGTLSGELFF

SEQ ID NO: 221921 - protein, 16 aa, Homo sapiens
  CDR3 for alpha chain variable domain of TCR clone 110961 (TRAV12-3, TRAJ53)
CAMSPGSGGSNSKLTF

SEQ ID NO: 221922 - protein, 12 aa, Homo sapiens
  CDR3 for beta chain variable domain of TCR clone 110961 (TRBV7-8, TRBJ2-7)
CASSLGDREQYF

SEQ ID NO: 221923 - protein, 14 aa, Homo sapiens
  CDR3 for alpha chain variable domain of TCR clone 110962 (TRAV12-3, TRAJ10)
SHLPLTGRGNKLTF

SEQ ID NO: 221924 - protein, 13 aa, Homo sapiens
  CDR3 for beta chain variable domain of TCR clone 110962 (TRBV20-1, TRBJ1-6)
CSAPLGVGSPLHF

SEQ ID NO: 221925 - protein, 17 aa, Homo sapiens
  CDR3 for alpha chain variable domain of TCR clone 110963 (TRAV36/DV7, TRAJ52)
CAVAQRAGGTSYGKLTS

SEQ ID NO: 221926 - protein, 15 aa, Homo sapiens
  CDR3 for beta chain variable domain of TCR clone 110963 (TRBV6-5, TRBJ1-2)
CASSYSQAFNYGYTF

SEQ ID NO: 221927 - protein, 18 aa, Homo sapiens
  CDR3 for alpha chain variable domain of TCR clone 110964 (TRAV12-3, TRAJ52)
CAMSVGGASGTSYGKLTF

SEQ ID NO: 221928 - protein, 17 aa, Homo sapiens
  CDR3 for beta chain variable domain of TCR clone 110964 (TRBV13, TRBJ2-3)
CASSLSRVAGGRNTQYF

SEQ ID NO: 221929 - protein, 16 aa, Homo sapiens
  CDR3 for alpha chain variable domain of TCR clone 110965 (TRAV8-3, TRAJ13)
CAVGAYPSGGYQKVTF

SEQ ID NO: 221930 - protein, 15 aa, Homo sapiens
  CDR3 for beta chain variable domain of TCR clone 110965 (TRBV19, TRBJ1-5)
CASSIVWADNQPQHV

SEQ ID NO: 221931 - protein, 11 aa, Homo sapiens
  CDR3 for alpha chain variable domain of TCR clone 110966 (TRAV3, TRAJ21)
CAVGNFNKFYF

SEQ ID NO: 221932 - protein, 14 aa, Homo sapiens
  CDR3 for beta chain variable domain of TCR clone 110966 (TRBV15, TRBJ2-7)
CATSRVARGYEQYF

SEQ ID NO: 221933 - protein, 13 aa, Homo sapiens
  CDR3 for alpha chain variable domain of TCR clone 110967 (TRAV8-6, TRAJ49)
CAVITNTGNQFYF

SEQ ID NO: 221934 - protein, 14 aa, Homo sapiens
  CDR3 for beta chain variable domain of TCR clone 110967 (TRBV4-1, TRBJ2-2)
CASSQAVNTGELFF

SEQ ID NO: 221935 - protein, 15 aa, Homo sapiens
  CDR3 for alpha chain variable domain of TCR clone 110968 (TRAV25, TRAJ52)
CAGTSGGTSYGKLTF

SEQ ID NO: 221936 - protein, 16 aa, Homo sapiens
  CDR3 for beta chain variable domain of TCR clone 110968 (TRBV25-1, TRBJ1-1)
CASSGDRDRGRIEAFF

SEQ ID NO: 221937 - protein, 15 aa, Homo sapiens
  CDR3 for alpha chain variable domain of TCR clone 110969 (TRAV3, TRAJ36)
CAVRASQTGANNLFF

SEQ ID NO: 221938 - protein, 16 aa, Homo sapiens
  CDR3 for beta chain variable domain of TCR clone 110969 (TRBV28, TRBJ2-7)
CASSSGTSGRGYEQYF

SEQ ID NO: 221939 - protein, 14 aa, Homo sapiens
  CDR3 for alpha chain variable domain of TCR clone 110970 (TRAV1-2, TRAJ8)
CAVREDTGFQKLVF

SEQ ID NO: 221940 - protein, 14 aa, Homo sapiens
  CDR3 for beta chain variable domain of TCR clone 110970 (TRBV6-3, TRBJ2-7)
CASSSPTVFYEQYF

SEQ ID NO: 221941 - protein, 12 aa, Homo sapiens
  CDR3 for alpha chain variable domain of TCR clone 110971 (TRAV13-1, TRAJ21)
CAAKEGFNKFYF

SEQ ID NO: 221942 - protein, 14 aa, Homo sapiens
  CDR3 for beta chain variable domain of TCR clone 110971 (TRBV7-2, TRBJ2-5)
RASSLSGGGETQYF

SEQ ID NO: 221943 - protein, 12 aa, Homo sapiens
  CDR3 for alpha chain variable domain of TCR clone 110972 (TRAV4, TRAJ26)
CLVGDYGQNFVF

SEQ ID NO: 221944 - protein, 16 aa, Homo sapiens
  CDR3 for beta chain variable domain of TCR clone 110972 (TRBV7-2, TRBJ1-2)
CASSSTQDRRGHGYTF

SEQ ID NO: 221945 - protein, 16 aa, Homo sapiens
  CDR3 for alpha chain variable domain of TCR clone 110973 (TRAV27, TRAJ53)
CAAPEGSGGRNYKLTF

SEQ ID NO: 221946 - protein, 14 aa, Homo sapiens
  CDR3 for beta chain variable domain of TCR clone 110973 (TRBV4-3, TRBJ1-5)
CASSQGGQGWPQHF

SEQ ID NO: 221947 - protein, 13 aa, Homo sapiens
  CDR3 for alpha chain variable domain of TCR clone 110974 (TRAV13-1, TRAJ39)
CAASIWAGNMLTF

SEQ ID NO: 221948 - protein, 16 aa, Homo sapiens
  CDR3 for beta chain variable domain of TCR clone 110974 (TRBV12-5, TRBJ2-5)
CASGPRTSGNQETQYF

SEQ ID NO: 221949 - protein, 22 aa, Homo sapiens
  CDR3 for alpha chain variable domain of TCR clone 110975 (TRAV8-2, TRAJ45)
HLTKPSAHMSDAAEYSADVLTF

SEQ ID NO: 221950 - protein, 13 aa, Homo sapiens
  CDR3 for beta chain variable domain of TCR clone 110975 (TRBV7-3, TRBJ2-1)
CASSPVAYNEQFF

SEQ ID NO: 221951 - protein, 11 aa, Homo sapiens
  CDR3 for alpha chain variable domain of TCR clone 110976 (TRAV12-1, TRAJ30)
CVVNGQDKIIF

SEQ ID NO: 221952 - protein, 15 aa, Homo sapiens
  CDR3 for beta chain variable domain of TCR clone 110976 (TRBV7-9, TRBJ1-6)
CASSSPGRGNSPLHF

SEQ ID NO: 221953 - protein, 15 aa, Homo sapiens
  CDR3 for alpha chain variable domain of TCR clone 110977 (TRAV26-2, TRAJ26)
CILRDFDNYGQNFVF

SEQ ID NO: 221954 - protein, 14 aa, Homo sapiens
  CDR3 for beta chain variable domain of TCR clone 110977 (TRBV29-1, TRBJ2-5)
CSFWTPYAGEAQYF

SEQ ID NO: 221955 - protein, 17 aa, Homo sapiens
  CDR3 for alpha chain variable domain of TCR clone 110978 (TRAV1-1, TRAJ9)
CLLLLRCKNTGGFKTIF

SEQ ID NO: 221956 - protein, 14 aa, Homo sapiens
  CDR3 for beta chain variable domain of TCR clone 110978 (TRBV20-1, TRBJ2-1)
CSAQIGGSANEQFF

SEQ ID NO: 221957 - protein, 14 aa, Homo sapiens
  CDR3 for alpha chain variable domain of TCR clone 110979 (TRAV2, TRAJ9)
CAVEDRGGGFKTIF

SEQ ID NO: 221958 - protein, 13 aa, Homo sapiens
  CDR3 for beta chain variable domain of TCR clone 110979 (TRBV27, TRBJ1-1)
CASSLSIGAEAFF

SEQ ID NO: 221959 - protein, 16 aa, Homo sapiens
  CDR3 for alpha chain variable domain of TCR clone 110980 (TRAV3, TRAJ10)
CAVRDMRAGGGNKLTF

SEQ ID NO: 221960 - protein, 12 aa, Homo sapiens
  CDR3 for beta chain variable domain of TCR clone 110980 (TRBV19, TRBJ1-1)
CASSIGTEEAFF

SEQ ID NO: 221961 - protein, 14 aa, Homo sapiens
  CDR3 for alpha chain variable domain of TCR clone 110981 (TRAV13-1, TRAJ26)
CAASSAHYGQNFVF

SEQ ID NO: 221962 - protein, 17 aa, Homo sapiens
  CDR3 for beta chain variable domain of TCR clone 110981 (TRBV25-1, TRBJ2-5)
CASSRRGGRGGKETQYF

SEQ ID NO: 221963 - protein, 16 aa, Homo sapiens
  CDR3 for alpha chain variable domain of TCR clone 110982 (TRAV3, TRAJ3)
CAVRDRSKSSASKIIF

SEQ ID NO: 221964 - protein, 13 aa, Homo sapiens
  CDR3 for beta chain variable domain of TCR clone 110982 (TRBV10-3, TRBJ2-7)
CASKLAVNYEQYF

SEQ ID NO: 221965 - protein, 14 aa, Homo sapiens
  CDR3 for alpha chain variable domain of TCR clone 110983 (TRAV13-1, TRAJ13)
CAASRVGGYQKVIF

SEQ ID NO: 221966 - protein, 17 aa, Homo sapiens
  CDR3 for beta chain variable domain of TCR clone 110983 (TRBV15, TRBJ1-5)
CATSRAPPGTRNQPQHF

SEQ ID NO: 221967 - protein, 14 aa, Homo sapiens
  CDR3 for alpha chain variable domain of TCR clone 110984 (TRAV26-1, TRAJ45)
CIVREGGGADGLTF

SEQ ID NO: 221968 - protein, 14 aa, Homo sapiens
  CDR3 for beta chain variable domain of TCR clone 110984 (TRBV2, TRBJ1-2)
CASNEGTGPYGDTF

SEQ ID NO: 221969 - protein, 13 aa, Homo sapiens
  CDR3 for alpha chain variable domain of TCR clone 110985 (TRAV39, TRAJ33)
CAANPDSNYQLIW

SEQ ID NO: 221970 - protein, 16 aa, Homo sapiens
  CDR3 for beta chain variable domain of TCR clone 110985 (TRBV19, TRBJ2-1)
CASSKAGPSSYNEQFF

SEQ ID NO: 221971 - protein, 16 aa, Homo sapiens
  CDR3 for alpha chain variable domain of TCR clone 110986 (TRAV3, TRAJ6)
CAVRDGMGRGKLHTYI

SEQ ID NO: 221972 - protein, 15 aa, Homo sapiens
  CDR3 for beta chain variable domain of TCR clone 110986 (TRBV9, TRBJ2-1)
CASSLAGSSYNEQFF

SEQ ID NO: 221973 - protein, 15 aa, Homo sapiens
  CDR3 for alpha chain variable domain of TCR clone 110987 (TRAV25, TRAJ52)
CAGRPGGPSYGKLTF

SEQ ID NO: 221974 - protein, 17 aa, Homo sapiens
  CDR3 for beta chain variable domain of TCR clone 110987 (TRBV7-8, TRBJ2-6)
CASSAGTGGAGANVLTF

SEQ ID NO: 221975 - protein, 14 aa, Homo sapiens
  CDR3 for alpha chain variable domain of TCR clone 110988 (TRAV1-2, TRAJ16)
CAVNRFSDGQTLLF

SEQ ID NO: 221976 - protein, 16 aa, Homo sapiens
  CDR3 for beta chain variable domain of TCR clone 110988 (TRBV27, TRBJ2-2)
CASSFRGLVRTGELFF

SEQ ID NO: 221977 - protein, 11 aa, Homo sapiens
  CDR3 for alpha chain variable domain of TCR clone 110989 (TRAV1-1, TRAJ23)
CAVRQGGKLIF

SEQ ID NO: 221978 - protein, 15 aa, Homo sapiens
  CDR3 for beta chain variable domain of TCR clone 110989 (TRBV7-9, TRBJ2-2)
CASGPLDTFPGELFF

SEQ ID NO: 221979 - protein, 11 aa, Homo sapiens
  CDR3 for alpha chain variable domain of TCR clone 110990 (TRAV3, TRAJ21)
CAVGNFNKFYF

SEQ ID NO: 221980 - protein, 15 aa, Homo sapiens
  CDR3 for beta chain variable domain of TCR clone 110990 (TRBV3-1, TRBJ2-1)
CASSQQPSGGNEQFF

SEQ ID NO: 221981 - protein, 10 aa, Homo sapiens
  CDR3 for alpha chain variable domain of TCR clone 110991 (TRAV21, TRAJ43)
CAVRIGDMRF

SEQ ID NO: 221982 - protein, 15 aa, Homo sapiens
  CDR3 for beta chain variable domain of TCR clone 110991 (TRBV10-2, TRBJ2-6)
CASSEQGTGANVLTF

SEQ ID NO: 221983 - protein, 12 aa, Homo sapiens
  CDR3 for alpha chain variable domain of TCR clone 110992 (TRAV12-3, TRAJ20)
CAMVRGDYKLSF

SEQ ID NO: 221984 - protein, 14 aa, Homo sapiens
  CDR3 for beta chain variable domain of TCR clone 110992 (TRBV7-2, TRBJ2-1)
CASSPGTFYNEQFF

SEQ ID NO: 221985 - protein, 18 aa, Homo sapiens
  CDR3 for alpha chain variable domain of TCR clone 110993 (TRAV21, TRAJ52)
CAVRPSPAGGTSYGKLTF

SEQ ID NO: 221986 - protein, 13 aa, Homo sapiens
  CDR3 for beta chain variable domain of TCR clone 110993 (TRBV28, TRBJ2-7)
CASKAGGVYEQYF

SEQ ID NO: 221987 - protein, 11 aa, Homo sapiens
  CDR3 for alpha chain variable domain of TCR clone 110994 (TRAV21, TRAJ34)
CAHYNTDKLIF

SEQ ID NO: 221988 - protein, 13 aa, Homo sapiens
  CDR3 for beta chain variable domain of TCR clone 110994 (TRBV7-6, TRBJ1-2)
CASSLEADYGYTF

SEQ ID NO: 221989 - protein, 12 aa, Homo sapiens
  CDR3 for alpha chain variable domain of TCR clone 110995 (TRAV13-2, TRAJ8)
CAPWLGFQKLVF

SEQ ID NO: 221990 - protein, 18 aa, Homo sapiens
  CDR3 for beta chain variable domain of TCR clone 110995 (TRBV11-2, TRBJ2-3)
CASSLEGASRGAPNTQYF

SEQ ID NO: 221991 - protein, 20 aa, Homo sapiens
  CDR3 for alpha chain variable domain of TCR clone 110996 (TRAV12-3, TRAJ41)
SLFIRDSQPSDSATPEALNF

SEQ ID NO: 221992 - protein, 14 aa, Homo sapiens
  CDR3 for beta chain variable domain of TCR clone 110996 (TRBV19, TRBJ2-1)
CASPTFVLSGEQFF

SEQ ID NO: 221993 - protein, 15 aa, Homo sapiens
  CDR3 for alpha chain variable domain of TCR clone 110997 (TRAV34, TRAJ38)
CGADFTPGNNRKLIW

SEQ ID NO: 221994 - protein, 11 aa, Homo sapiens
  CDR3 for beta chain variable domain of TCR clone 110997 (TRBV11-2, TRBJ2-2)
CASSLPGELFF

SEQ ID NO: 221995 - protein, 14 aa, Homo sapiens
  CDR3 for alpha chain variable domain of TCR clone 110998 (TRAV8-3, TRAJ21)
CAVGLNPRSDKFYF

SEQ ID NO: 221996 - protein, 11 aa, Homo sapiens
  CDR3 for beta chain variable domain of TCR clone 110998 (TRBV6-3, TRBJ2-3)
CTTGQADTQYF

SEQ ID NO: 221997 - protein, 15 aa, Homo sapiens
  CDR3 for alpha chain variable domain of TCR clone 110999 (TRAV35, TRAJ41)
CAGQLFSNSGYELNF

SEQ ID NO: 221998 - protein, 14 aa, Homo sapiens
  CDR3 for beta chain variable domain of TCR clone 110999 (TRBV7-2, TRBJ1-2)
CASSRGGTNYGYTF

SEQ ID NO: 221999 - protein, 15 aa, Homo sapiens
  CDR3 for alpha chain variable domain of TCR clone 111000 (TRAV35, TRAJ34)
CAGTSIVRNTDKLIF

SEQ ID NO: 222000 - protein, 11 aa, Homo sapiens
  CDR3 for beta chain variable domain of TCR clone 111000 (TRBV11-2, TRBJ2-2)
CASSLPGELFF

SEQ ID NO: 222001 - protein, 13 aa, Homo sapiens
  CDR3 for alpha chain variable domain of TCR clone 111001 (TRAV13-2, TRAJ13)
CAERPGGNQKVTF

SEQ ID NO: 222002 - protein, 19 aa, Homo sapiens
  CDR3 for beta chain variable domain of TCR clone 111001 (TRBV4-1, TRBJ2-1)
CASSQGPLPGLGSRNEQFF

SEQ ID NO: 222003 - protein, 16 aa, Homo sapiens
  CDR3 for alpha chain variable domain of TCR clone 111002 (TRAV12-2, TRAJ53)
CAMSPGSGGSNYKLTF

SEQ ID NO: 222004 - protein, 13 aa, Homo sapiens
  CDR3 for beta chain variable domain of TCR clone 111002 (TRBV19, TRBJ1-2)
CASSVPGQDGYTF

SEQ ID NO: 222005 - protein, 16 aa, Homo sapiens
  CDR3 for alpha chain variable domain of TCR clone 111003 (TRAV27, TRAJ52)
CAGAGDGGTSYGKLTF

SEQ ID NO: 222006 - protein, 17 aa, Homo sapiens
  CDR3 for beta chain variable domain of TCR clone 111003 (TRBV24-1, TRBJ2-3)
CATSDLPSGEDTDTQYF

SEQ ID NO: 222007 - protein, 12 aa, Homo sapiens
  CDR3 for alpha chain variable domain of TCR clone 111004 (TRAV12-3, TRAJ39)
CAMTQADNMFTF

SEQ ID NO: 222008 - protein, 13 aa, Homo sapiens
  CDR3 for beta chain variable domain of TCR clone 111004 (TRBV20-1, TRBJ1-1)
CSAPEGGNTEAFF

SEQ ID NO: 222009 - protein, 12 aa, Homo sapiens
  CDR3 for alpha chain variable domain of TCR clone 111005 (TRAV4, TRAJ26)
CLVGDYGQNFVF

SEQ ID NO: 222010 - protein, 16 aa, Homo sapiens
  CDR3 for beta chain variable domain of TCR clone 111005 (TRBV7-2, TRBJ1-2)
CASSSNQDGRGYGYTF

SEQ ID NO: 222011 - protein, 15 aa, Homo sapiens
  CDR3 for alpha chain variable domain of TCR clone 111006 (TRAV27, TRAJ38)
CAGRFNAGNNRKLIW

SEQ ID NO: 222012 - protein, 13 aa, Homo sapiens
  CDR3 for beta chain variable domain of TCR clone 111006 (TRBV12-5, TRBJ2-3)
CASQNRGTDTKYF

SEQ ID NO: 222013 - protein, 11 aa, Homo sapiens
  CDR3 for alpha chain variable domain of TCR clone 111007 (TRAV12-2, TRAJ49)
CAVHTGNQFYF

SEQ ID NO: 222014 - protein, 17 aa, Homo sapiens
  CDR3 for beta chain variable domain of TCR clone 111007 (TRBV20-1, TRBJ2-2)
CSASGSGQGGLTGELFF

SEQ ID NO: 222015 - protein, 14 aa, Homo sapiens
  CDR3 for alpha chain variable domain of TCR clone 111008 (TRAV30, TRAJ44)
CGTESAGTASKLTF

SEQ ID NO: 222016 - protein, 16 aa, Homo sapiens
  CDR3 for beta chain variable domain of TCR clone 111008 (TRBV12-4, TRBJ2-5)
CASSWRPSGDLETQYF

SEQ ID NO: 222017 - protein, 12 aa, Homo sapiens
  CDR3 for alpha chain variable domain of TCR clone 111009 (TRAV12-3, TRAJ17)
CAMTLTGNKLTF

SEQ ID NO: 222018 - protein, 13 aa, Homo sapiens
  CDR3 for beta chain variable domain of TCR clone 111009 (TRBV10-3, TRBJ2-7)
CASKLAVNYEQCF

SEQ ID NO: 222019 - protein, 16 aa, Homo sapiens
  CDR3 for alpha chain variable domain of TCR clone 111010 (TRAV30, TRAJ24)
CGTEIVDADSWGKFQF

SEQ ID NO: 222020 - protein, 13 aa, Homo sapiens
  CDR3 for beta chain variable domain of TCR clone 111010 (TRBV7-3, TRBJ1-1)
CASIQDWGAEAFF

SEQ ID NO: 222021 - protein, 14 aa, Homo sapiens
  CDR3 for alpha chain variable domain of TCR clone 111011 (TRAV12-1, TRAJ17)
CVVNYKAAGSKLTF

SEQ ID NO: 222022 - protein, 17 aa, Homo sapiens
  CDR3 for beta chain variable domain of TCR clone 111011 (TRBV20-1, TRBJ2-1)
CNASSSGLAGSYNEQFF

SEQ ID NO: 222023 - protein, 13 aa, Homo sapiens
  CDR3 for alpha chain variable domain of TCR clone 111012 (TRAV12-1, TRAJ33)
CGDAPDSNYQLIW

SEQ ID NO: 222024 - protein, 12 aa, Homo sapiens
  CDR3 for beta chain variable domain of TCR clone 111012 (TRBV11-2, TRBJ2-2)
CASSLGGGELFL

SEQ ID NO: 222025 - protein, 13 aa, Homo sapiens
  CDR3 for alpha chain variable domain of TCR clone 111013 (TRAV12-3, TRAJ21)
CAPGPHNFNKFYF

SEQ ID NO: 222026 - protein, 11 aa, Homo sapiens
  CDR3 for beta chain variable domain of TCR clone 111013 (TRBV19, TRBJ1-1)
CASSIGSEAFF

SEQ ID NO: 222027 - protein, 13 aa, Homo sapiens
  CDR3 for alpha chain variable domain of TCR clone 111014 (TRAV3, TRAJ8)
CAVRFTVFQKLVF

SEQ ID NO: 222028 - protein, 12 aa, Homo sapiens
  CDR3 for beta chain variable domain of TCR clone 111014 (TRBV2, TRBJ1-2)
CASSGQTYGYTF

SEQ ID NO: 222029 - protein, 12 aa, Homo sapiens
  CDR3 for alpha chain variable domain of TCR clone 111015 (TRAV21, TRAJ11)
CAATSGYSTLTF

SEQ ID NO: 222030 - protein, 13 aa, Homo sapiens
  CDR3 for beta chain variable domain of TCR clone 111015 (TRBV4-2, TRBJ1-1)
CASSQAGNTEAFF

SEQ ID NO: 222031 - protein, 16 aa, Homo sapiens
  CDR3 for alpha chain variable domain of TCR clone 111016 (TRAV39, TRAJ32)
CAVDMEYGGATNKLIF

SEQ ID NO: 222032 - protein, 14 aa, Homo sapiens
  CDR3 for beta chain variable domain of TCR clone 111016 (TRBV9, TRBJ2-4)
CASSPSGTSGSQYF

SEQ ID NO: 222033 - protein, 13 aa, Homo sapiens
  CDR3 for alpha chain variable domain of TCR clone 111017 (TRAV26-1, TRAJ34)
CIVRPWLTDKLIF

SEQ ID NO: 222034 - protein, 13 aa, Homo sapiens
  CDR3 for beta chain variable domain of TCR clone 111017 (TRBV5-1, TRBJ2-1)
CASSLGSYNEQFF

SEQ ID NO: 222035 - protein, 15 aa, Homo sapiens
  CDR3 for alpha chain variable domain of TCR clone 111018 (TRAV12-1, TRAJ42)
CVVTRDGGGQGNLIF

SEQ ID NO: 222036 - protein, 13 aa, Homo sapiens
  CDR3 for beta chain variable domain of TCR clone 111018 (TRBV27, TRBJ2-7)
CASSLTTGYEQYS

SEQ ID NO: 222037 - protein, 15 aa, Homo sapiens
  CDR3 for alpha chain variable domain of TCR clone 111019 (TRAV12-1, TRAJ44)
CVVDEYTGTASKLTF

SEQ ID NO: 222038 - protein, 12 aa, Homo sapiens
  CDR3 for beta chain variable domain of TCR clone 111019 (TRBV10-3, TRBJ2-1)
CAISRGGHEQFF

SEQ ID NO: 222039 - protein, 12 aa, Homo sapiens
  CDR3 for alpha chain variable domain of TCR clone 111020 (TRAV12-1, TRAJ40)
CVVNGETYKYIF

SEQ ID NO: 222040 - protein, 15 aa, Homo sapiens
  CDR3 for beta chain variable domain of TCR clone 111020 (TRBV9, TRBJ1-6)
CASSVAGTGDSPLHF

SEQ ID NO: 222041 - protein, 14 aa, Homo sapiens
  CDR3 for alpha chain variable domain of TCR clone 111021 (TRAV1-2, TRAJ16)
CAVNRFSDGQKLLF

SEQ ID NO: 222042 - protein, 16 aa, Homo sapiens
  CDR3 for beta chain variable domain of TCR clone 111021 (TRBV29-1, TRBJ2-6)
CSVEDITYSGANVLTF

SEQ ID NO: 222043 - protein, 15 aa, Homo sapiens
  CDR3 for alpha chain variable domain of TCR clone 111022 (TRAV13-1, TRAJ45)
CAASGSGGGADGLTL

SEQ ID NO: 222044 - protein, 14 aa, Homo sapiens
  CDR3 for beta chain variable domain of TCR clone 111022 (TRBV12-4, TRBJ1-2)
CASSFVGTAYGYTF

SEQ ID NO: 222045 - protein, 16 aa, Homo sapiens
  CDR3 for alpha chain variable domain of TCR clone 111023 (TRAV30, TRAJ24)
CGTEIVDADSWGKFQF

SEQ ID NO: 222046 - protein, 13 aa, Homo sapiens
  CDR3 for beta chain variable domain of TCR clone 111023 (TRBV11-2, TRBJ2-5)
CASSSPGEETQYF

SEQ ID NO: 222047 - protein, 14 aa, Homo sapiens
  CDR3 for alpha chain variable domain of TCR clone 111024 (TRAV1-2, TRAJ8)
CAVREDTGFQKLVF

SEQ ID NO: 222048 - protein, 13 aa, Homo sapiens
  CDR3 for beta chain variable domain of TCR clone 111024 (TRBV12-4, TRBJ1-5)
CASSPDRAQAQHF

SEQ ID NO: 222049 - protein, 14 aa, Homo sapiens
  CDR3 for alpha chain variable domain of TCR clone 111025 (TRAV12-1, TRAJ3)
CVANPGSSASKIIF

SEQ ID NO: 222050 - protein, 15 aa, Homo sapiens
  CDR3 for beta chain variable domain of TCR clone 111025 (TRBV5-7, TRBJ1-2)
CAGSSPGQGNYGYTF

SEQ ID NO: 222051 - protein, 12 aa, Homo sapiens
  CDR3 for alpha chain variable domain of TCR clone 111026 (TRAV23/DV6, TRAJ17)
CARGSCRQQANF

SEQ ID NO: 222052 - protein, 14 aa, Homo sapiens
  CDR3 for beta chain variable domain of TCR clone 111026 (TRBV7-2, TRBJ1-2)
CASSQTGSTYGYAF

SEQ ID NO: 222053 - protein, 17 aa, Homo sapiens
  CDR3 for alpha chain variable domain of TCR clone 111027 (TRAV12-2, TRAJ22)
CAVNRIPFSGSARQLTF

SEQ ID NO: 222054 - protein, 13 aa, Homo sapiens
  CDR3 for beta chain variable domain of TCR clone 111027 (TRBV11-3, TRBJ1-1)
CASSSNRDTEAVF

SEQ ID NO: 222055 - protein, 20 aa, Homo sapiens
  CDR3 for alpha chain variable domain of TCR clone 111028 (TRAV12-3, TRAJ41)
SLFIRDSQSSDSATPEALNF

SEQ ID NO: 222056 - protein, 13 aa, Homo sapiens
  CDR3 for beta chain variable domain of TCR clone 111028 (TRBV10-3, TRBJ2-3)
CAIRDTGADTQYF

SEQ ID NO: 222057 - protein, 12 aa, Homo sapiens
  CDR3 for alpha chain variable domain of TCR clone 111029 (TRAV13-1, TRAJ53)
AASGGSNYKLTF

SEQ ID NO: 222058 - protein, 11 aa, Homo sapiens
  CDR3 for beta chain variable domain of TCR clone 111029 (TRBV5-1, TRBJ2-1)
CASSIGQEQFF

SEQ ID NO: 222059 - protein, 10 aa, Homo sapiens
  CDR3 for alpha chain variable domain of TCR clone 111030 (TRAV21, TRAJ31)
CAVDNARVMF

SEQ ID NO: 222060 - protein, 13 aa, Homo sapiens
  CDR3 for beta chain variable domain of TCR clone 111030 (TRBV4-1, TRBJ1-1)
CASSRKMNTEAFF

SEQ ID NO: 222061 - protein, 13 aa, Homo sapiens
  CDR3 for alpha chain variable domain of TCR clone 111031 (TRAV2, TRAJ29)
CTAQNSGNTPLVF

SEQ ID NO: 222062 - protein, 14 aa, Homo sapiens
  CDR3 for beta chain variable domain of TCR clone 111031 (TRBV7-9, TRBJ2-4)
CASSLAMGGNIQYF

SEQ ID NO: 222063 - protein, 16 aa, Homo sapiens
  CDR3 for alpha chain variable domain of TCR clone 111032 (TRAV3, TRAJ22)
CAVRDMGSGSARQLTF

SEQ ID NO: 222064 - protein, 13 aa, Homo sapiens
  CDR3 for beta chain variable domain of TCR clone 111032 (TRBV7-9, TRBJ2-3)
CASSPGSTDTQYF

SEQ ID NO: 222065 - protein, 16 aa, Homo sapiens
  CDR3 for alpha chain variable domain of TCR clone 111033 (TRAV13-1, TRAJ13)
CTAFFLGVARRLPLEL

SEQ ID NO: 222066 - protein, 14 aa, Homo sapiens
  CDR3 for beta chain variable domain of TCR clone 111033 (TRBV12-4, TRBJ2-3)
CASTIAGWGDTQYF

SEQ ID NO: 222067 - protein, 12 aa, Homo sapiens
  CDR3 for alpha chain variable domain of TCR clone 111034 (TRAV17, TRAJ49)
CATVTAGNQFYF

SEQ ID NO: 222068 - protein, 18 aa, Homo sapiens
  CDR3 for beta chain variable domain of TCR clone 111034 (TRBV11-2, TRBJ2-6)
CASSLNPFLGTGANVLTF

SEQ ID NO: 222069 - protein, 12 aa, Homo sapiens
  CDR3 for alpha chain variable domain of TCR clone 111035 (TRAV1-1, TRAJ20)
CAVREDDYKLSF

SEQ ID NO: 222070 - protein, 12 aa, Homo sapiens
  CDR3 for beta chain variable domain of TCR clone 111035 (TRBV11-2, TRBJ2-2)
CASSLPTGELFF

SEQ ID NO: 222071 - protein, 14 aa, Homo sapiens
  CDR3 for alpha chain variable domain of TCR clone 111036 (TRAV8-4, TRAJ17)
CAVSEGAAGTKLTF

SEQ ID NO: 222072 - protein, 13 aa, Homo sapiens
  CDR3 for beta chain variable domain of TCR clone 111036 (TRBV19, TRBJ2-1)
CASSMYRVNEQFF

SEQ ID NO: 222073 - protein, 13 aa, Homo sapiens
  CDR3 for alpha chain variable domain of TCR clone 111037 (TRAV2, TRAJ15)
CAVACQAGTALIF

SEQ ID NO: 222074 - protein, 16 aa, Homo sapiens
  CDR3 for beta chain variable domain of TCR clone 111037 (TRBV5-1, TRBJ1-1)
CASSSGGNSLNTEAFF

SEQ ID NO: 222075 - protein, 18 aa, Homo sapiens
  CDR3 for alpha chain variable domain of TCR clone 111038 (TRAV26-1, TRAJ23)
CIVRVGLEVGNQGGKLIF

SEQ ID NO: 222076 - protein, 15 aa, Homo sapiens
  CDR3 for beta chain variable domain of TCR clone 111038 (TRBV10-3, TRBJ2-3)
CAISDWDRDTDTQYF

SEQ ID NO: 222077 - protein, 13 aa, Homo sapiens
  CDR3 for alpha chain variable domain of TCR clone 111039 (TRAV8-3, TRAJ28)
CAVGAVGSYQLTF

SEQ ID NO: 222078 - protein, 14 aa, Homo sapiens
  CDR3 for beta chain variable domain of TCR clone 111039 (TRBV7-9, TRBJ1-5)
CQQQGHQPNQPQHF

SEQ ID NO: 222079 - protein, 15 aa, Homo sapiens
  CDR3 for alpha chain variable domain of TCR clone 111040 (TRAV3, TRAJ11)
CAVRDRGSGYSTLTF

SEQ ID NO: 222080 - protein, 13 aa, Homo sapiens
  CDR3 for beta chain variable domain of TCR clone 111040 (TRBV7-3, TRBJ1-1)
CASSQDWGAEAFF

SEQ ID NO: 222081 - protein, 20 aa, Homo sapiens
  CDR3 for alpha chain variable domain of TCR clone 111041 (TRAV12-1, TRAJ42)
SSVIQPPTSVKGGSQGNLIF

SEQ ID NO: 222082 - protein, 16 aa, Homo sapiens
  CDR3 for beta chain variable domain of TCR clone 111041 (TRBV7-3, TRBJ2-3)
CASSLSGYRPEDTQYF

SEQ ID NO: 222083 - protein, 12 aa, Homo sapiens
  CDR3 for alpha chain variable domain of TCR clone 111042 (TRAV12-3, TRAJ17)
CAMTLTGNKLAF

SEQ ID NO: 222084 - protein, 14 aa, Homo sapiens
  CDR3 for beta chain variable domain of TCR clone 111042 (TRBV6-1, TRBJ1-3)
CASVQGGGGNTIYF

SEQ ID NO: 222085 - protein, 19 aa, Homo sapiens
  CDR3 for alpha chain variable domain of TCR clone 111043 (TRAV29/DV5, TRAJ49)
CSVLLCSKLTVDTGNQSYF

SEQ ID NO: 222086 - protein, 15 aa, Homo sapiens
  CDR3 for beta chain variable domain of TCR clone 111043 (TRBV4-3, TRBJ2-2)
CASSQGGTPTGELFF

SEQ ID NO: 222087 - protein, 12 aa, Homo sapiens
  CDR3 for alpha chain variable domain of TCR clone 111044 (TRAV29/DV5, TRAJ49)
CAATDTGNQFYF

SEQ ID NO: 222088 - protein, 19 aa, Homo sapiens
  CDR3 for beta chain variable domain of TCR clone 111044 (TRBV25-1, TRBJ2-2)
CAILVCRVDRGRKTGELFF

SEQ ID NO: 222089 - protein, 13 aa, Homo sapiens
  CDR3 for alpha chain variable domain of TCR clone 111045 (TRAV12-1, TRAJ34)
CVVTGYNTDKLIF

SEQ ID NO: 222090 - protein, 13 aa, Homo sapiens
  CDR3 for beta chain variable domain of TCR clone 111045 (TRBV28, TRBJ2-7)
CARKAGGVYEQYF

SEQ ID NO: 222091 - protein, 17 aa, Homo sapiens
  CDR3 for alpha chain variable domain of TCR clone 111046 (TRAV26-2, TRAJ32)
ERCCCAGYGGATNKLIF

SEQ ID NO: 222092 - protein, 14 aa, Homo sapiens
  CDR3 for beta chain variable domain of TCR clone 111046 (TRBV4-2, TRBJ2-1)
CASGLDRAYNEQFF

SEQ ID NO: 222093 - protein, 15 aa, Homo sapiens
  CDR3 for alpha chain variable domain of TCR clone 111047 (TRAV26-1, TRAJ29)
CIVRVEASGNTPLVF

SEQ ID NO: 222094 - protein, 14 aa, Homo sapiens
  CDR3 for beta chain variable domain of TCR clone 111047 (TRBV18, TRBJ2-5)
CASSPGVSQETQYF

SEQ ID NO: 222095 - protein, 17 aa, Homo sapiens
  CDR3 for alpha chain variable domain of TCR clone 111048 (TRAV3, TRAJ6)
CAVRDGPRAGGSYIPTF

SEQ ID NO: 222096 - protein, 20 aa, Homo sapiens
  CDR3 for beta chain variable domain of TCR clone 111048 (TRBV28, TRBJ2-1)
CASTPIRRSPGLAGGNEQFF

SEQ ID NO: 222097 - protein, 13 aa, Homo sapiens
  CDR3 for alpha chain variable domain of TCR clone 111049 (TRAV16, TRAJ31)
CALSAHNNARLLF

SEQ ID NO: 222098 - protein, 17 aa, Homo sapiens
  CDR3 for beta chain variable domain of TCR clone 111049 (TRBV12-4, TRBJ2-1)
CASSPGLAGGRINEQFF

SEQ ID NO: 222099 - protein, 14 aa, Homo sapiens
  CDR3 for alpha chain variable domain of TCR clone 111050 (TRAV1-2, TRAJ8)
CAVREDTGFQKHVF

SEQ ID NO: 222100 - protein, 15 aa, Homo sapiens
  CDR3 for beta chain variable domain of TCR clone 111050 (TRBV6-3, TRBJ2-7)
CASSSPGTVFYEQYF

SEQ ID NO: 222101 - protein, 11 aa, Homo sapiens
  CDR3 for alpha chain variable domain of TCR clone 111051 (TRAV8-6, TRAJ34)
CAVWNTDKLIF

SEQ ID NO: 222102 - protein, 15 aa, Homo sapiens
  CDR3 for beta chain variable domain of TCR clone 111051 (TRBV20-1, TRBJ2-7)
CSARDRVSGMDEQYF

SEQ ID NO: 222103 - protein, 18 aa, Homo sapiens
  CDR3 for alpha chain variable domain of TCR clone 111052 (TRAV26-1, TRAJ23)
CIVRVGLEVWNQGGKLIF

SEQ ID NO: 222104 - protein, 15 aa, Homo sapiens
  CDR3 for beta chain variable domain of TCR clone 111052 (TRBV2, TRBJ2-1)
CASSELAGSYNEQFF

SEQ ID NO: 222105 - protein, 15 aa, Homo sapiens
  CDR3 for alpha chain variable domain of TCR clone 111053 (TRAV36/DV7, TRAJ53)
CAVEGSGGSNYKLTF

SEQ ID NO: 222106 - protein, 16 aa, Homo sapiens
  CDR3 for beta chain variable domain of TCR clone 111053 (TRBV27, TRBJ2-2)
YASSLSGFWVTGELFF

SEQ ID NO: 222107 - protein, 16 aa, Homo sapiens
  CDR3 for alpha chain variable domain of TCR clone 111054 (TRAV12-2, TRAJ6)
CAAPLAGSGGSYIPTF

SEQ ID NO: 222108 - protein, 10 aa, Homo sapiens
  CDR3 for beta chain variable domain of TCR clone 111054 (TRBV28, TRBJ1-2)
GASSSDRAVF

SEQ ID NO: 222109 - protein, 10 aa, Homo sapiens
  CDR3 for alpha chain variable domain of TCR clone 111055 (TRAV1-2, TRAJ31)
CVSEDARLMF

SEQ ID NO: 222110 - protein, 15 aa, Homo sapiens
  CDR3 for beta chain variable domain of TCR clone 111055 (TRBV11-3, TRBJ2-3)
CASLKDGREGDTQYF

SEQ ID NO: 222111 - protein, 14 aa, Homo sapiens
  CDR3 for alpha chain variable domain of TCR clone 111056 (TRAV8-4, TRAJ13)
CAVTLSGGYQKVTF

SEQ ID NO: 222112 - protein, 15 aa, Homo sapiens
  CDR3 for beta chain variable domain of TCR clone 111056 (TRBV27, TRBJ2-1)
CASSNGGGSSNEQFF

SEQ ID NO: 222113 - protein, 12 aa, Homo sapiens
  CDR3 for alpha chain variable domain of TCR clone 111057 (TRAV13-1, TRAJ21)
CAAKEGFNKFYF

SEQ ID NO: 222114 - protein, 15 aa, Homo sapiens
  CDR3 for beta chain variable domain of TCR clone 111057 (TRBV29-1, TRBJ2-1)
CSGRDRKSSYNEQFF

SEQ ID NO: 222115 - protein, 18 aa, Homo sapiens
  CDR3 for alpha chain variable domain of TCR clone 111058 (TRAV1-2, TRAJ8)
CLLPLCCERGHRLSELVF

SEQ ID NO: 222116 - protein, 14 aa, Homo sapiens
  CDR3 for beta chain variable domain of TCR clone 111058 (TRBV7-6, TRBJ2-3)
CASSLGTVTDTQYF

SEQ ID NO: 222117 - protein, 13 aa, Homo sapiens
  CDR3 for alpha chain variable domain of TCR clone 111059 (TRAV27, TRAJ11)
CAGARSGYSTLTF

SEQ ID NO: 222118 - protein, 16 aa, Homo sapiens
  CDR3 for beta chain variable domain of TCR clone 111059 (TRBV10-2, TRBJ2-2)
CASSEFRDRGSGELFF

SEQ ID NO: 222119 - protein, 14 aa, Homo sapiens
  CDR3 for alpha chain variable domain of TCR clone 111060 (TRAV38-1, TRAJ29)
CAFITPSGNTPLGF

SEQ ID NO: 222120 - protein, 14 aa, Homo sapiens
  CDR3 for beta chain variable domain of TCR clone 111060 (TRBV18, TRBJ2-7)
CASSPRGGAYEQYF

SEQ ID NO: 222121 - protein, 14 aa, Homo sapiens
  CDR3 for alpha chain variable domain of TCR clone 111061 (TRAV4, TRAJ9)
CLVGSGTGGFKTIF

SEQ ID NO: 222122 - protein, 15 aa, Homo sapiens
  CDR3 for beta chain variable domain of TCR clone 111061 (TRBV11-3, TRBJ2-7)
CASSPGPASSYEQYF

SEQ ID NO: 222123 - protein, 15 aa, Homo sapiens
  CDR3 for alpha chain variable domain of TCR clone 111062 (TRAV2, TRAJ45)
CAVDGTGGGADGRTF

SEQ ID NO: 222124 - protein, 16 aa, Homo sapiens
  CDR3 for beta chain variable domain of TCR clone 111062 (TRBV6-5, TRBJ2-1)
CASSYSLSGGYNEQFF

SEQ ID NO: 222125 - protein, 13 aa, Homo sapiens
  CDR3 for alpha chain variable domain of TCR clone 111063 (TRAV29/DV5, TRAJ34)
CAARVDNTDKLIF

SEQ ID NO: 222126 - protein, 14 aa, Homo sapiens
  CDR3 for beta chain variable domain of TCR clone 111063 (TRBV20-1, TRBJ1-1)
CSAQTRIGGTEAFF

SEQ ID NO: 222127 - protein, 17 aa, Homo sapiens
  CDR3 for alpha chain variable domain of TCR clone 111064 (TRAV8-1, TRAJ43)
CAVTNDMRFGAGTRLTV

SEQ ID NO: 222128 - protein, 13 aa, Homo sapiens
  CDR3 for beta chain variable domain of TCR clone 111064 (TRBV7-9, TRBJ1-2)
CASSLKQNYGYTF

SEQ ID NO: 222129 - protein, 14 aa, Homo sapiens
  CDR3 for alpha chain variable domain of TCR clone 111065 (TRAV26-1, TRAJ45)
CIEVTGGGADGLTF

SEQ ID NO: 222130 - protein, 13 aa, Homo sapiens
  CDR3 for beta chain variable domain of TCR clone 111065 (TRBV7-2, TRBJ2-2)
CASSLAVTGELFF

SEQ ID NO: 222131 - protein, 14 aa, Homo sapiens
  CDR3 for alpha chain variable domain of TCR clone 111066 (TRAV3, TRAJ21)
CAVESQANFNKFYF

SEQ ID NO: 222132 - protein, 18 aa, Homo sapiens
  CDR3 for beta chain variable domain of TCR clone 111066 (TRBV7-9, TRBJ2-1)
CASSLAVSGTSGRNERFF

SEQ ID NO: 222133 - protein, 13 aa, Homo sapiens
  CDR3 for alpha chain variable domain of TCR clone 111067 (TRAV12-1, TRAJ31)
CVVIPNNNARLMF

SEQ ID NO: 222134 - protein, 14 aa, Homo sapiens
  CDR3 for beta chain variable domain of TCR clone 111067 (TRBV15, TRBJ2-3)
CATRSGTSTDTQYF

SEQ ID NO: 222135 - protein, 12 aa, Homo sapiens
  CDR3 for alpha chain variable domain of TCR clone 111068 (TRAV1-2, TRAJ29)
CAVPSGNTPLFF

SEQ ID NO: 222136 - protein, 12 aa, Homo sapiens
  CDR3 for beta chain variable domain of TCR clone 111068 (TRBV7-9, TRBJ2-7)
CASSFGSYEQYF

SEQ ID NO: 222137 - protein, 10 aa, Homo sapiens
  CDR3 for alpha chain variable domain of TCR clone 111069 (TRAV19, TRAJ45)
PGGGADGLTF

SEQ ID NO: 222138 - protein, 18 aa, Homo sapiens
  CDR3 for beta chain variable domain of TCR clone 111069 (TRBV11-3, TRBJ2-1)
CASSSYPGGRDSYNEQFF

SEQ ID NO: 222139 - protein, 12 aa, Homo sapiens
  CDR3 for alpha chain variable domain of TCR clone 111070 (TRAV13-2, TRAJ8)
CAPWLGFQKLVF

SEQ ID NO: 222140 - protein, 17 aa, Homo sapiens
  CDR3 for beta chain variable domain of TCR clone 111070 (TRBV4-1, TRBJ2-5)
CASSQDLTGGPIETQYF

SEQ ID NO: 222141 - protein, 16 aa, Homo sapiens
  CDR3 for alpha chain variable domain of TCR clone 111071 (TRAV13-1, TRAJ18)
CAASRMRGSTLGRLYF

SEQ ID NO: 222142 - protein, 14 aa, Homo sapiens
  CDR3 for beta chain variable domain of TCR clone 111071 (TRBV25-1, TRBJ1-1)
CASTHLGGSTEAFF

SEQ ID NO: 222143 - protein, 12 aa, Homo sapiens
  CDR3 for alpha chain variable domain of TCR clone 111072 (TRAV16, TRAJ10)
CSRTGGGNKLTF

SEQ ID NO: 222144 - protein, 15 aa, Homo sapiens
  CDR3 for beta chain variable domain of TCR clone 111072 (TRBV6-3, TRBJ2-7)
CASSSPGTVYYEQYF

SEQ ID NO: 222145 - protein, 14 aa, Homo sapiens
  CDR3 for alpha chain variable domain of TCR clone 111073 (TRAV13-1, TRAJ9)
CAASALTGGFKTIL

SEQ ID NO: 222146 - protein, 16 aa, Homo sapiens
  CDR3 for beta chain variable domain of TCR clone 111073 (TRBV20-1, TRBJ1-4)
CSAPGQGLLTNEKLFF

SEQ ID NO: 222147 - protein, 13 aa, Homo sapiens
  CDR3 for alpha chain variable domain of TCR clone 111074 (TRAV8-6, TRAJ16)
CAVSRWVGQKLLS

SEQ ID NO: 222148 - protein, 15 aa, Homo sapiens
  CDR3 for beta chain variable domain of TCR clone 111074 (TRBV12-4, TRBJ2-1)
CASSLSTGVSNEQFF

SEQ ID NO: 222149 - protein, 14 aa, Homo sapiens
  CDR3 for alpha chain variable domain of TCR clone 111075 (TRAV29/DV5, TRAJ32)
CSAAYGGATNKLIF

SEQ ID NO: 222150 - protein, 15 aa, Homo sapiens
  CDR3 for beta chain variable domain of TCR clone 111075 (TRBV27, TRBJ2-7)
CASSTAGTGSYEQYF

SEQ ID NO: 222151 - protein, 14 aa, Homo sapiens
  CDR3 for alpha chain variable domain of TCR clone 111076 (TRAV13-1, TRAJ44)
CATKATGTASKLTF

SEQ ID NO: 222152 - protein, 22 aa, Homo sapiens
  CDR3 for beta chain variable domain of TCR clone 111076 (TRBV19, TRBJ2-1)
CASSVRDRVTGTSGRIYNEQFF

SEQ ID NO: 222153 - protein, 14 aa, Homo sapiens
  CDR3 for alpha chain variable domain of TCR clone 111077 (TRAV17, TRAJ15)
CATTTNQAGTALIF

SEQ ID NO: 222154 - protein, 16 aa, Homo sapiens
  CDR3 for beta chain variable domain of TCR clone 111077 (TRBV4-1, TRBJ2-7)
CTSSRGDILNSYEQYF

SEQ ID NO: 222155 - protein, 11 aa, Homo sapiens
  CDR3 for alpha chain variable domain of TCR clone 111078 (TRAV12-1, TRAJ40)
CVVPGTYKYIF

SEQ ID NO: 222156 - protein, 16 aa, Homo sapiens
  CDR3 for beta chain variable domain of TCR clone 111078 (TRBV7-9, TRBJ1-2)
CASSLGFSSGEDGYTF

SEQ ID NO: 222157 - protein, 15 aa, Homo sapiens
  CDR3 for alpha chain variable domain of TCR clone 111079 (TRAV17, TRAJ23)
CATDAEDNQGGKLIF

SEQ ID NO: 222158 - protein, 16 aa, Homo sapiens
  CDR3 for beta chain variable domain of TCR clone 111079 (TRBV13, TRBJ2-2)
CASSPRTGEHTGELFF

SEQ ID NO: 222159 - protein, 16 aa, Homo sapiens
  CDR3 for alpha chain variable domain of TCR clone 111080 (TRAV16, TRAJ4)
CALSRMFSGGYNKLIF

SEQ ID NO: 222160 - protein, 17 aa, Homo sapiens
  CDR3 for beta chain variable domain of TCR clone 111080 (TRBV7-8, TRBJ2-6)
CASSAGTGGAGANVLTF

SEQ ID NO: 222161 - protein, 13 aa, Homo sapiens
  CDR3 for alpha chain variable domain of TCR clone 111081 (TRAV13-1, TRAJ42)
CAASELWRKPRTS

SEQ ID NO: 222162 - protein, 15 aa, Homo sapiens
  CDR3 for beta chain variable domain of TCR clone 111081 (TRBV20-1, TRBJ2-1)
CSASSAGSSYNEQFF

SEQ ID NO: 222163 - protein, 14 aa, Homo sapiens
  CDR3 for alpha chain variable domain of TCR clone 111082 (TRAV1-2, TRAJ8)
CTVREDTGFQKLVF

SEQ ID NO: 222164 - protein, 15 aa, Homo sapiens
  CDR3 for beta chain variable domain of TCR clone 111082 (TRBV7-9, TRBJ1-4)
CASSARTGGNEKLFF

SEQ ID NO: 222165 - protein, 15 aa, Homo sapiens
  CDR3 for alpha chain variable domain of TCR clone 111083 (TRAV21, TRAJ53)
CATLTSGGSNYKLTF

SEQ ID NO: 222166 - protein, 13 aa, Homo sapiens
  CDR3 for beta chain variable domain of TCR clone 111083 (TRBV7-3, TRBJ1-1)
CASSQDWGAEAFF

SEQ ID NO: 222167 - protein, 13 aa, Homo sapiens
  CDR3 for alpha chain variable domain of TCR clone 111084 (TRAV27, TRAJ41)
CAGEGNSGYALNF

SEQ ID NO: 222168 - protein, 15 aa, Homo sapiens
  CDR3 for beta chain variable domain of TCR clone 111084 (TRBV11-3, TRBJ2-7)
CASSSGTVPTYEQYF

SEQ ID NO: 222169 - protein, 13 aa, Homo sapiens
  CDR3 for alpha chain variable domain of TCR clone 111085 (TRAV3, TRAJ20)
CAVRDVGDYKLSF

SEQ ID NO: 222170 - protein, 16 aa, Homo sapiens
  CDR3 for beta chain variable domain of TCR clone 111085 (TRBV4-1, TRBJ2-5)
CASSQTSGGPLETQYF

SEQ ID NO: 222171 - protein, 14 aa, Homo sapiens
  CDR3 for alpha chain variable domain of TCR clone 111086 (TRAV12-2, TRAJ17)
CAVLFKAAGNKLTV

SEQ ID NO: 222172 - protein, 17 aa, Homo sapiens
  CDR3 for beta chain variable domain of TCR clone 111086 (TRBV20-1, TRBJ2-2)
CSASGSGQGGLTGELFF

SEQ ID NO: 222173 - protein, 14 aa, Homo sapiens
  CDR3 for alpha chain variable domain of TCR clone 111087 (TRAV1-2, TRAJ16)
CAVNRFSDGQKLLF

SEQ ID NO: 222174 - protein, 13 aa, Homo sapiens
  CDR3 for beta chain variable domain of TCR clone 111087 (TRBV4-1, TRBJ1-1)
CASSQLGTGEAFF

SEQ ID NO: 222175 - protein, 15 aa, Homo sapiens
  CDR3 for alpha chain variable domain of TCR clone 111088 (TRAV27, TRAJ24)
CAGSMTTDSWGKLQF

SEQ ID NO: 222176 - protein, 15 aa, Homo sapiens
  CDR3 for beta chain variable domain of TCR clone 111088 (TRBV6-3, TRBJ2-7)
CASSSPGTVFYEQYF

SEQ ID NO: 222177 - protein, 17 aa, Homo sapiens
  CDR3 for alpha chain variable domain of TCR clone 111089 (TRAV27, TRAJ26)
CAGARAPLDNYGQNFVF

SEQ ID NO: 222178 - protein, 15 aa, Homo sapiens
  CDR3 for beta chain variable domain of TCR clone 111089 (TRBV11-2, TRBJ2-5)
CASSPRSVGLETQYF

SEQ ID NO: 222179 - protein, 17 aa, Homo sapiens
  CDR3 for alpha chain variable domain of TCR clone 111090 (TRAV3, TRAJ28)
CAVREAYSGAGSYQLTF

SEQ ID NO: 222180 - protein, 14 aa, Homo sapiens
  CDR3 for beta chain variable domain of TCR clone 111090 (TRBV20-1, TRBJ2-2)
CSAPDTANTGELFF

SEQ ID NO: 222181 - protein, 12 aa, Homo sapiens
  CDR3 for alpha chain variable domain of TCR clone 111091 (TRAV12-1, TRAJ40)
CVVYSGTYKYIF

SEQ ID NO: 222182 - protein, 11 aa, Homo sapiens
  CDR3 for beta chain variable domain of TCR clone 111091 (TRBV12-4, TRBJ2-3)
CASTATDTQYF

SEQ ID NO: 222183 - protein, 10 aa, Homo sapiens
  CDR3 for alpha chain variable domain of TCR clone 111092 (TRAV16, TRAJ26)
CALSGSEFCF

SEQ ID NO: 222184 - protein, 12 aa, Homo sapiens
  CDR3 for beta chain variable domain of TCR clone 111092 (TRBV11-2, TRBJ2-1)
CASSPGNNEQFF

SEQ ID NO: 222185 - protein, 15 aa, Homo sapiens
  CDR3 for alpha chain variable domain of TCR clone 111093 (TRAV12-1, TRAJ44)
CVADLPTGTASKLTF

SEQ ID NO: 222186 - protein, 12 aa, Homo sapiens
  CDR3 for beta chain variable domain of TCR clone 111093 (TRBV11-2, TRBJ2-1)
CASSPGNNEQFF

SEQ ID NO: 222187 - protein, 14 aa, Homo sapiens
  CDR3 for alpha chain variable domain of TCR clone 111094 (TRAV13-2, TRAJ57)
CAESTQGRSEKLVF

SEQ ID NO: 222188 - protein, 14 aa, Homo sapiens
  CDR3 for beta chain variable domain of TCR clone 111094 (TRBV10-3, TRBJ2-2)
CAISEVSHSGELFF

SEQ ID NO: 222189 - protein, 15 aa, Homo sapiens
  CDR3 for alpha chain variable domain of TCR clone 111095 (TRAV26-1, TRAJ44)
FIARVPFGTASKLTF

SEQ ID NO: 222190 - protein, 17 aa, Homo sapiens
  CDR3 for beta chain variable domain of TCR clone 111095 (TRBV24-1, TRBJ2-4)
CATSDAEARGVRNIQYF

SEQ ID NO: 222191 - protein, 17 aa, Homo sapiens
  CDR3 for alpha chain variable domain of TCR clone 111096 (TRAV3, TRAJ42)
RAVRDRDYGGSQGNLIF

SEQ ID NO: 222192 - protein, 14 aa, Homo sapiens
  CDR3 for beta chain variable domain of TCR clone 111096 (TRBV19, TRBJ2-5)
CASSMTGQQETQYF

SEQ ID NO: 222193 - protein, 11 aa, Homo sapiens
  CDR3 for alpha chain variable domain of TCR clone 111097 (TRAV3, TRAJ21)
CAVGIFNKFYF

SEQ ID NO: 222194 - protein, 14 aa, Homo sapiens
  CDR3 for beta chain variable domain of TCR clone 111097 (TRBV20-1, TRBJ2-2)
CSAPDTANTGELFF

SEQ ID NO: 222195 - protein, 12 aa, Homo sapiens
  CDR3 for alpha chain variable domain of TCR clone 111098 (TRAV12-3, TRAJ17)
CSMTLTGNKLTF

SEQ ID NO: 222196 - protein, 16 aa, Homo sapiens
  CDR3 for beta chain variable domain of TCR clone 111098 (TRBV19, TRBJ2-1)
CASSKAGPSSYNEQFF

SEQ ID NO: 222197 - protein, 17 aa, Homo sapiens
  CDR3 for alpha chain variable domain of TCR clone 111099 (TRAV4, TRAJ16)
CLVGPLFQMARSCSLQG

SEQ ID NO: 222198 - protein, 12 aa, Homo sapiens
  CDR3 for beta chain variable domain of TCR clone 111099 (TRBV11-2, TRBJ2-2)
CASSLPTGELFL

SEQ ID NO: 222199 - protein, 15 aa, Homo sapiens
  CDR3 for alpha chain variable domain of TCR clone 111100 (TRAV27, TRAJ50)
CAGRERGTSYDKVIF

SEQ ID NO: 222200 - protein, 16 aa, Homo sapiens
  CDR3 for beta chain variable domain of TCR clone 111100 (TRBV10-3, TRBJ1-5)
RAISDQVGAPNQPQHF

SEQ ID NO: 222201 - protein, 10 aa, Homo sapiens
  CDR3 for alpha chain variable domain of TCR clone 111101 (TRAV23/DV6, TRAJ43)
CAAAVAALEQ

SEQ ID NO: 222202 - protein, 13 aa, Homo sapiens
  CDR3 for beta chain variable domain of TCR clone 111101 (TRBV12-4, TRBJ1-2)
RASSLRQGKGYTF

SEQ ID NO: 222203 - protein, 14 aa, Homo sapiens
  CDR3 for alpha chain variable domain of TCR clone 111102 (TRAV12-1, TRAJ17)
CVVNYKAAGNKLTF

SEQ ID NO: 222204 - protein, 18 aa, Homo sapiens
  CDR3 for beta chain variable domain of TCR clone 111102 (TRBV11-2, TRBJ2-3)
CASSLGGASRGAPNTQYF

SEQ ID NO: 222205 - protein, 15 aa, Homo sapiens
  CDR3 for alpha chain variable domain of TCR clone 111103 (TRAV12-3, TRAJ6)
CAMSAKTGGSYIPTF

SEQ ID NO: 222206 - protein, 15 aa, Homo sapiens
  CDR3 for beta chain variable domain of TCR clone 111103 (TRBV5-1, TRBJ2-7)
CASSLNGGPAREQYF

SEQ ID NO: 222207 - protein, 12 aa, Homo sapiens
  CDR3 for alpha chain variable domain of TCR clone 111104 (TRAV8-3, TRAJ26)
CAGYNYGQNFVF

SEQ ID NO: 222208 - protein, 15 aa, Homo sapiens
  CDR3 for beta chain variable domain of TCR clone 111104 (TRBV9, TRBJ2-1)
CASSLAGSSYNEQFF

SEQ ID NO: 222209 - protein, 13 aa, Homo sapiens
  CDR3 for alpha chain variable domain of TCR clone 111105 (TRAV8-2, TRAJ49)
CVVTPNTGNKFYF

SEQ ID NO: 222210 - protein, 15 aa, Homo sapiens
  CDR3 for beta chain variable domain of TCR clone 111105 (TRBV11-2, TRBJ2-1)
CASSLTSGGYNEQFF

SEQ ID NO: 222211 - protein, 15 aa, Homo sapiens
  CDR3 for alpha chain variable domain of TCR clone 111106 (TRAV3, TRAJ5)
CAVRDLDTGRRALTF

SEQ ID NO: 222212 - protein, 15 aa, Homo sapiens
  CDR3 for beta chain variable domain of TCR clone 111106 (TRBV12-4, TRBJ2-7)
CTSVPAVRQTYEQYF

SEQ ID NO: 222213 - protein, 14 aa, Homo sapiens
  CDR3 for alpha chain variable domain of TCR clone 111107 (TRAV3, TRAJ21)
CAVGSQANFNKFYF

SEQ ID NO: 222214 - protein, 18 aa, Homo sapiens
  CDR3 for beta chain variable domain of TCR clone 111107 (TRBV7-9, TRBJ2-1)
CASSLAVSGTSGRNEQFF

SEQ ID NO: 222215 - protein, 14 aa, Homo sapiens
  CDR3 for alpha chain variable domain of TCR clone 111108 (TRAV1-2, TRAJ8)
CAVREDTGFQKLVF

SEQ ID NO: 222216 - protein, 15 aa, Homo sapiens
  CDR3 for beta chain variable domain of TCR clone 111108 (TRBV20-1, TRBJ2-7)
CSARDRVAGMDEQYF

SEQ ID NO: 222217 - protein, 17 aa, Homo sapiens
  CDR3 for alpha chain variable domain of TCR clone 111109 (TRAV3, TRAJ28)
CAVREAYSGAGSYQLTF

SEQ ID NO: 222218 - protein, 11 aa, Homo sapiens
  CDR3 for beta chain variable domain of TCR clone 111109 (TRBV19, TRBJ2-2)
CASGYSGELFF

SEQ ID NO: 222219 - protein, 13 aa, Homo sapiens
  CDR3 for alpha chain variable domain of TCR clone 111110 (TRAV1-2, TRAJ20)
CAVPRSNDSKLSF

SEQ ID NO: 222220 - protein, 14 aa, Homo sapiens
  CDR3 for beta chain variable domain of TCR clone 111110 (TRBV20-1, TRBJ2-7)
CSARYGTTYYEQYF

SEQ ID NO: 222221 - protein, 13 aa, Homo sapiens
  CDR3 for alpha chain variable domain of TCR clone 111111 (TRAV1-2, TRAJ9)
CAALNTGGFKTIF

SEQ ID NO: 222222 - protein, 15 aa, Homo sapiens
  CDR3 for beta chain variable domain of TCR clone 111111 (TRBV4-1, TRBJ2-7)
CASSQQGQGFDEQYF

SEQ ID NO: 222223 - protein, 17 aa, Homo sapiens
  CDR3 for alpha chain variable domain of TCR clone 111112 (TRAV4, TRAJ13)
CLVGVQGSSGGYQKVIF

SEQ ID NO: 222224 - protein, 18 aa, Homo sapiens
  CDR3 for beta chain variable domain of TCR clone 111112 (TRBV15, TRBJ2-3)
CATSRDGARSWDTDTQYF

SEQ ID NO: 222225 - protein, 13 aa, Homo sapiens
  CDR3 for alpha chain variable domain of TCR clone 111113 (TRAV4, TRAJ42)
CLVGGGSQGNLIC

SEQ ID NO: 222226 - protein, 16 aa, Homo sapiens
  CDR3 for beta chain variable domain of TCR clone 111113 (TRBV5-1, TRBJ2-3)
CASSLQGRVGADTQYF

SEQ ID NO: 222227 - protein, 13 aa, Homo sapiens
  CDR3 for alpha chain variable domain of TCR clone 111114 (TRAV8-1, TRAJ30)
CAVIMNRDDKIIF

SEQ ID NO: 222228 - protein, 14 aa, Homo sapiens
  CDR3 for beta chain variable domain of TCR clone 111114 (TRBV7-2, TRBJ1-6)
CASSLQEANSPLHF

SEQ ID NO: 222229 - protein, 12 aa, Homo sapiens
  CDR3 for alpha chain variable domain of TCR clone 111115 (TRAV12-3, TRAJ17)
CAMTLTGNKLTF

SEQ ID NO: 222230 - protein, 11 aa, Homo sapiens
  CDR3 for beta chain variable domain of TCR clone 111115 (TRBV11-2, TRBJ2-5)
CASGQTETQYF

SEQ ID NO: 222231 - protein, 12 aa, Homo sapiens
  CDR3 for alpha chain variable domain of TCR clone 111116 (TRAV2, TRAJ31)
CAVEEGNARLMF

SEQ ID NO: 222232 - protein, 18 aa, Homo sapiens
  CDR3 for beta chain variable domain of TCR clone 111116 (TRBV7-9, TRBJ2-3)
CASSLDLAGLATTDTQYF

SEQ ID NO: 222233 - protein, 15 aa, Homo sapiens
  CDR3 for alpha chain variable domain of TCR clone 111117 (TRAV12-1, TRAJ45)
CVVLSGGGGADGLTF

SEQ ID NO: 222234 - protein, 18 aa, Homo sapiens
  CDR3 for beta chain variable domain of TCR clone 111117 (TRBV11-2, TRBJ2-3)
CASSLGGASRGAPNTQYF

SEQ ID NO: 222235 - protein, 10 aa, Homo sapiens
  CDR3 for alpha chain variable domain of TCR clone 111118 (TRAV30, TRAJ48)
CGIGNEKLTF

SEQ ID NO: 222236 - protein, 15 aa, Homo sapiens
  CDR3 for beta chain variable domain of TCR clone 111118 (TRBV20-1, TRBJ2-3)
CSASPPQVSTDTQYF

SEQ ID NO: 222237 - protein, 14 aa, Homo sapiens
  CDR3 for alpha chain variable domain of TCR clone 111119 (TRAV3, TRAJ37)
CAVKESGNTGKLIF

SEQ ID NO: 222238 - protein, 14 aa, Homo sapiens
  CDR3 for beta chain variable domain of TCR clone 111119 (TRBV16, TRBJ1-1)
CASSQAGPNTEAFF

SEQ ID NO: 222239 - protein, 15 aa, Homo sapiens
  CDR3 for alpha chain variable domain of TCR clone 111120 (TRAV40, TRAJ39)
CLLPPRGNAGNMLTF

SEQ ID NO: 222240 - protein, 15 aa, Homo sapiens
  CDR3 for beta chain variable domain of TCR clone 111120 (TRBV12-4, TRBJ2-2)
CASSFGRLNTGELFF

SEQ ID NO: 222241 - protein, 13 aa, Homo sapiens
  CDR3 for alpha chain variable domain of TCR clone 111121 (TRAV17, TRAJ22)
CAHHSGSARQLTF

SEQ ID NO: 222242 - protein, 16 aa, Homo sapiens
  CDR3 for beta chain variable domain of TCR clone 111121 (TRBV4-1, TRBJ1-2)
CAISQDAGQVLYGYTF

SEQ ID NO: 222243 - protein, 14 aa, Homo sapiens
  CDR3 for alpha chain variable domain of TCR clone 111122 (TRAV3, TRAJ32)
CCERRAGATNKLIF

SEQ ID NO: 222244 - protein, 16 aa, Homo sapiens
  CDR3 for beta chain variable domain of TCR clone 111122 (TRBV20-1, TRBJ2-3)
CSARLHSAGAIDTQYF

SEQ ID NO: 222245 - protein, 13 aa, Homo sapiens
  CDR3 for alpha chain variable domain of TCR clone 111123 (TRAV3, TRAJ21)
CAVREPDFNKFYF

SEQ ID NO: 222246 - protein, 13 aa, Homo sapiens
  CDR3 for beta chain variable domain of TCR clone 111123 (TRBV6-1, TRBJ1-1)
CASSRQGNTEAFF

SEQ ID NO: 222247 - protein, 11 aa, Homo sapiens
  CDR3 for alpha chain variable domain of TCR clone 111124 (TRAV26-1, TRAJ37)
CVVRVGRKLIF

SEQ ID NO: 222248 - protein, 13 aa, Homo sapiens
  CDR3 for beta chain variable domain of TCR clone 111124 (TRBV14, TRBJ1-2)
CASSEDRRYGYTF

SEQ ID NO: 222249 - protein, 15 aa, Homo sapiens
  CDR3 for alpha chain variable domain of TCR clone 111125 (TRAV3, TRAJ3)
CAVRDRDSSASKIIF

SEQ ID NO: 222250 - protein, 18 aa, Homo sapiens
  CDR3 for beta chain variable domain of TCR clone 111125 (TRBV25-1, TRBJ1-2)
CASSGLQNGQGLKFGYTF

SEQ ID NO: 222251 - protein, 14 aa, Homo sapiens
  CDR3 for alpha chain variable domain of TCR clone 111126 (TRAV2, TRAJ26)
CAGSPGRLWSEFCL

SEQ ID NO: 222252 - protein, 17 aa, Homo sapiens
  CDR3 for beta chain variable domain of TCR clone 111126 (TRBV11-2, TRBJ2-1)
CASSLYPPGVEYNEQFF

SEQ ID NO: 222253 - protein, 14 aa, Homo sapiens
  CDR3 for alpha chain variable domain of TCR clone 111127 (TRAV23/DV6, TRAJ58)
CAGMRETSGSRLTV

SEQ ID NO: 222254 - protein, 13 aa, Homo sapiens
  CDR3 for beta chain variable domain of TCR clone 111127 (TRBV28, TRBJ2-7)
CASRSSGVYEQYF

SEQ ID NO: 222255 - protein, 11 aa, Homo sapiens
  CDR3 for alpha chain variable domain of TCR clone 111128 (TRAV12-3, TRAJ27)
CAMANAGKSTF

SEQ ID NO: 222256 - protein, 14 aa, Homo sapiens
  CDR3 for beta chain variable domain of TCR clone 111128 (TRBV5-1, TRBJ2-7)
CASSRGESLYEQYF

SEQ ID NO: 222257 - protein, 18 aa, Homo sapiens
  CDR3 for alpha chain variable domain of TCR clone 111129 (TRAV21, TRAJ52)
CAVRPSPAGGTSYGKLTF

SEQ ID NO: 222258 - protein, 13 aa, Homo sapiens
  CDR3 for beta chain variable domain of TCR clone 111129 (TRBV20-1, TRBJ2-5)
CSAREAFQETQFF

SEQ ID NO: 222259 - protein, 13 aa, Homo sapiens
  CDR3 for alpha chain variable domain of TCR clone 111130 (TRAV21, TRAJ56)
CAVRTGANSKLTF

SEQ ID NO: 222260 - protein, 15 aa, Homo sapiens
  CDR3 for beta chain variable domain of TCR clone 111130 (TRBV7-9, TRBJ1-1)
CARSHRGTVNTEAFF

SEQ ID NO: 222261 - protein, 13 aa, Homo sapiens
  CDR3 for alpha chain variable domain of TCR clone 111131 (TRAV14/DV4, TRAJ4)
CAMKAGGYNKLIF

SEQ ID NO: 222262 - protein, 15 aa, Homo sapiens
  CDR3 for beta chain variable domain of TCR clone 111131 (TRBV11-3, TRBJ1-1)
CASSLGGPGGAEAFF

SEQ ID NO: 222263 - protein, 16 aa, Homo sapiens
  CDR3 for alpha chain variable domain of TCR clone 111132 (TRAV3, TRAJ10)
CAVRDMNAGGGNKLTF

SEQ ID NO: 222264 - protein, 15 aa, Homo sapiens
  CDR3 for beta chain variable domain of TCR clone 111132 (TRBV5-1, TRBJ1-2)
CASSLGSVTNYGYAF

SEQ ID NO: 222265 - protein, 13 aa, Homo sapiens
  CDR3 for alpha chain variable domain of TCR clone 111133 (TRAV9-2, TRAJ49)
CALTLLSGNQFYF

SEQ ID NO: 222266 - protein, 12 aa, Homo sapiens
  CDR3 for beta chain variable domain of TCR clone 111133 (TRBV28, TRBJ1-6)
CASLSVPGPLHF

SEQ ID NO: 222267 - protein, 13 aa, Homo sapiens
  CDR3 for alpha chain variable domain of TCR clone 111134 (TRAV12-3, TRAJ54)
CAMTLQGAQKLVF

SEQ ID NO: 222268 - protein, 17 aa, Homo sapiens
  CDR3 for beta chain variable domain of TCR clone 111134 (TRBV11-2, TRBJ2-1)
CASSLYPPGVEYNEQFF

SEQ ID NO: 222269 - protein, 18 aa, Homo sapiens
  CDR3 for alpha chain variable domain of TCR clone 111135 (TRAV13-1, TRAJ52)
CAAKNTNAGGTSYGKLTF

SEQ ID NO: 222270 - protein, 17 aa, Homo sapiens
  CDR3 for beta chain variable domain of TCR clone 111135 (TRBV11-2, TRBJ2-1)
CASSLYPPGVEYNEQFF

SEQ ID NO: 222271 - protein, 17 aa, Homo sapiens
  CDR3 for alpha chain variable domain of TCR clone 111136 (TRAV26-1, TRAJ53)
CIVRVDDSGGSNYKLTF

SEQ ID NO: 222272 - protein, 15 aa, Homo sapiens
  CDR3 for beta chain variable domain of TCR clone 111136 (TRBV7-9, TRBJ1-4)
CASSRTGGFNDKLFF

SEQ ID NO: 222273 - protein, 13 aa, Homo sapiens
  CDR3 for alpha chain variable domain of TCR clone 111137 (TRAV2, TRAJ15)
CAVASQAGTALIF

SEQ ID NO: 222274 - protein, 15 aa, Homo sapiens
  CDR3 for beta chain variable domain of TCR clone 111137 (TRBV20-1, TRBJ2-7)
CSARVPAAYFYEQYF

SEQ ID NO: 222275 - protein, 15 aa, Homo sapiens
  CDR3 for alpha chain variable domain of TCR clone 111138 (TRAV26-1, TRAJ29)
CIVRVEGSGNTPLVF

SEQ ID NO: 222276 - protein, 15 aa, Homo sapiens
  CDR3 for beta chain variable domain of TCR clone 111138 (TRBV18, TRBJ2-1)
CASSPPSASYNEQFF

SEQ ID NO: 222277 - protein, 16 aa, Homo sapiens
  CDR3 for alpha chain variable domain of TCR clone 111139 (TRAV30, TRAJ24)
CGTEIVDADSWGKFQF

SEQ ID NO: 222278 - protein, 11 aa, Homo sapiens
  CDR3 for beta chain variable domain of TCR clone 111139 (TRBV18, TRBJ2-5)
CASSPRETQYF

SEQ ID NO: 222279 - protein, 17 aa, Homo sapiens
  CDR3 for alpha chain variable domain of TCR clone 111140 (TRAV3, TRAJ42)
SAVRDRDYGGSQGNLIF

SEQ ID NO: 222280 - protein, 15 aa, Homo sapiens
  CDR3 for beta chain variable domain of TCR clone 111140 (TRBV6-6, TRBJ2-7)
CASSYSYGGSYEQYF

SEQ ID NO: 222281 - protein, 16 aa, Homo sapiens
  CDR3 for alpha chain variable domain of TCR clone 111141 (TRAV12-3, TRAJ53)
CAMSPGSGGSNYKLTF

SEQ ID NO: 222282 - protein, 13 aa, Homo sapiens
  CDR3 for beta chain variable domain of TCR clone 111141 (TRBV7-3, TRBJ1-1)
CAISQDWGAEAFF

SEQ ID NO: 222283 - protein, 16 aa, Homo sapiens
  CDR3 for alpha chain variable domain of TCR clone 111142 (TRAV12-1, TRAJ12)
CVVNTLLMDSSYKLIF

SEQ ID NO: 222284 - protein, 15 aa, Homo sapiens
  CDR3 for beta chain variable domain of TCR clone 111142 (TRBV7-3, TRBJ2-2)
CASSETGQGTGELFF

SEQ ID NO: 222285 - protein, 19 aa, Homo sapiens
  CDR3 for alpha chain variable domain of TCR clone 111143 (TRAV1-2, TRAJ26)
CLLPLCCERPDNYGQNFVF

SEQ ID NO: 222286 - protein, 17 aa, Homo sapiens
  CDR3 for beta chain variable domain of TCR clone 111143 (TRBV28, TRBJ2-5)
CASSRQGGLVGAETQYF

SEQ ID NO: 222287 - protein, 17 aa, Homo sapiens
  CDR3 for alpha chain variable domain of TCR clone 111144 (TRAV3, TRAJ6)
CAVRDGPRAGGSYGPTF

SEQ ID NO: 222288 - protein, 14 aa, Homo sapiens
  CDR3 for beta chain variable domain of TCR clone 111144 (TRBV7-2, TRBJ2-7)
CASSPKTSFYEQYF

SEQ ID NO: 222289 - protein, 17 aa, Homo sapiens
  CDR3 for alpha chain variable domain of TCR clone 111145 (TRAV3, TRAJ6)
CAVRDGPRAGGSYIPTF

SEQ ID NO: 222290 - protein, 15 aa, Homo sapiens
  CDR3 for beta chain variable domain of TCR clone 111145 (TRBV6-1, TRBJ2-3)
CASSERGGITDTQYF

SEQ ID NO: 222291 - protein, 13 aa, Homo sapiens
  CDR3 for alpha chain variable domain of TCR clone 111146 (TRAV21, TRAJ57)
CAVTQGGSEKLVF

SEQ ID NO: 222292 - protein, 15 aa, Homo sapiens
  CDR3 for beta chain variable domain of TCR clone 111146 (TRBV5-1, TRBJ2-5)
CASSFKGGDQETQYF

SEQ ID NO: 222293 - protein, 14 aa, Homo sapiens
  CDR3 for alpha chain variable domain of TCR clone 111147 (TRAV35, TRAJ13)
CAGSPSGGYQKVAF

SEQ ID NO: 222294 - protein, 17 aa, Homo sapiens
  CDR3 for beta chain variable domain of TCR clone 111147 (TRBV7-6, TRBJ2-5)
CASSPGLADPWGETQYF

SEQ ID NO: 222295 - protein, 14 aa, Homo sapiens
  CDR3 for alpha chain variable domain of TCR clone 111148 (TRAV2, TRAJ30)
CAVEGSNRDDKIIF

SEQ ID NO: 222296 - protein, 16 aa, Homo sapiens
  CDR3 for beta chain variable domain of TCR clone 111148 (TRBV7-3, TRBJ2-2)
CASSLKRGTLSGELFF

SEQ ID NO: 222297 - protein, 13 aa, Homo sapiens
  CDR3 for alpha chain variable domain of TCR clone 111149 (TRAV27, TRAJ45)
CRSSGGGADGLTF

SEQ ID NO: 222298 - protein, 13 aa, Homo sapiens
  CDR3 for beta chain variable domain of TCR clone 111149 (TRBV19, TRBJ2-7)
CASSAGHGYEQYF

SEQ ID NO: 222299 - protein, 10 aa, Homo sapiens
  CDR3 for alpha chain variable domain of TCR clone 111150 (TRAV21, TRAJ43)
CAVRIGAMRF

SEQ ID NO: 222300 - protein, 13 aa, Homo sapiens
  CDR3 for beta chain variable domain of TCR clone 111150 (TRBV20-1, TRBJ2-7)
CSAPGLADYEQYF

SEQ ID NO: 222301 - protein, 14 aa, Homo sapiens
  CDR3 for alpha chain variable domain of TCR clone 111151 (TRAV16, TRAJ17)
CALSSRAAGNKLTF

SEQ ID NO: 222302 - protein, 15 aa, Homo sapiens
  CDR3 for beta chain variable domain of TCR clone 111151 (TRBV3-1, TRBJ1-2)
CASSPTRLPEGGYTF

SEQ ID NO: 222303 - protein, 14 aa, Homo sapiens
  CDR3 for alpha chain variable domain of TCR clone 111152 (TRAV12-2, TRAJ13)
CAVKKTGGDQKVTF

SEQ ID NO: 222304 - protein, 15 aa, Homo sapiens
  CDR3 for beta chain variable domain of TCR clone 111152 (TRBV20-1, TRBJ2-7)
CSARDRVSGMDEQYF

SEQ ID NO: 222305 - protein, 15 aa, Homo sapiens
  CDR3 for alpha chain variable domain of TCR clone 111153 (TRAV25, TRAJ53)
CLTSNSGGSNYKLTF

SEQ ID NO: 222306 - protein, 14 aa, Homo sapiens
  CDR3 for beta chain variable domain of TCR clone 111153 (TRBV11-2, TRBJ2-3)
CASSRLARTDTQYF

SEQ ID NO: 222307 - protein, 12 aa, Homo sapiens
  CDR3 for alpha chain variable domain of TCR clone 111154 (TRAV27, TRAJ35)
CAGADFGNVLHC

SEQ ID NO: 222308 - protein, 16 aa, Homo sapiens
  CDR3 for beta chain variable domain of TCR clone 111154 (TRBV6-1, TRBJ2-1)
CSSILRQGSSYNEQFF

SEQ ID NO: 222309 - protein, 17 aa, Homo sapiens
  CDR3 for alpha chain variable domain of TCR clone 111155 (TRAV3, TRAJ42)
CAVRDRDYGGSQGNLIF

SEQ ID NO: 222310 - protein, 14 aa, Homo sapiens
  CDR3 for beta chain variable domain of TCR clone 111155 (TRBV2, TRBJ2-7)
CASSLTSGGYEQYF

SEQ ID NO: 222311 - protein, 12 aa, Homo sapiens
  CDR3 for alpha chain variable domain of TCR clone 111156 (TRAV2, TRAJ24)
CAATDSWGKFQF

SEQ ID NO: 222312 - protein, 14 aa, Homo sapiens
  CDR3 for beta chain variable domain of TCR clone 111156 (TRBV6-1, TRBJ2-6)
CASQQGAGANVLTF

SEQ ID NO: 222313 - protein, 15 aa, Homo sapiens
  CDR3 for alpha chain variable domain of TCR clone 111157 (TRAV3, TRAJ5)
CAVRDLDTGRRALTF

SEQ ID NO: 222314 - protein, 14 aa, Homo sapiens
  CDR3 for beta chain variable domain of TCR clone 111157 (TRBV25-1, TRBJ1-4)
CASSGGGQPEKLFF

SEQ ID NO: 222315 - protein, 19 aa, Homo sapiens
  CDR3 for alpha chain variable domain of TCR clone 111158 (TRAV26-1, TRAJ28)
CIVRVAHAYSGAGSYQLTF

SEQ ID NO: 222316 - protein, 17 aa, Homo sapiens
  CDR3 for beta chain variable domain of TCR clone 111158 (TRBV4-1, TRBJ1-4)
CASSQEGPRGVEEKLVF

SEQ ID NO: 222317 - protein, 12 aa, Homo sapiens
  CDR3 for alpha chain variable domain of TCR clone 111159 (TRAV3, TRAJ7)
CAVLEENNRLAF

SEQ ID NO: 222318 - protein, 16 aa, Homo sapiens
  CDR3 for beta chain variable domain of TCR clone 111159 (TRBV12-5, TRBJ2-5)
CASGPRTSGNQETQYF

SEQ ID NO: 222319 - protein, 13 aa, Homo sapiens
  CDR3 for alpha chain variable domain of TCR clone 111160 (TRAV8-6, TRAJ8)
CAVSNTGFQKLVF

SEQ ID NO: 222320 - protein, 15 aa, Homo sapiens
  CDR3 for beta chain variable domain of TCR clone 111160 (TRBV28, TRBJ2-5)
CASSSGRTIQETQYV

SEQ ID NO: 222321 - protein, 11 aa, Homo sapiens
  CDR3 for alpha chain variable domain of TCR clone 111161 (TRAV3, TRAJ21)
CAVGNFNKSYF

SEQ ID NO: 222322 - protein, 14 aa, Homo sapiens
  CDR3 for beta chain variable domain of TCR clone 111161 (TRBV6-3, TRBJ1-1)
CASSYHSKNTEAFF

SEQ ID NO: 222323 - protein, 13 aa, Homo sapiens
  CDR3 for alpha chain variable domain of TCR clone 111162 (TRAV29/DV5, TRAJ31)
CAASRNNNARLMF

SEQ ID NO: 222324 - protein, 14 aa, Homo sapiens
  CDR3 for beta chain variable domain of TCR clone 111162 (TRBV7-6, TRBJ2-7)
CASSFRQGADEQYF

SEQ ID NO: 222325 - protein, 12 aa, Homo sapiens
  CDR3 for alpha chain variable domain of TCR clone 111163 (TRAV12-2, TRAJ10)
WGVTGGGNKLTF

SEQ ID NO: 222326 - protein, 16 aa, Homo sapiens
  CDR3 for beta chain variable domain of TCR clone 111163 (TRBV6-4, TRBJ1-2)
CASSEAVWDPNYGYTF

SEQ ID NO: 222327 - protein, 23 aa, Homo sapiens
  CDR3 for alpha chain variable domain of TCR clone 111164 (TRAV30, TRAJ43)
CTLRPPSSVTQEPTSAALSDMRF

SEQ ID NO: 222328 - protein, 13 aa, Homo sapiens
  CDR3 for beta chain variable domain of TCR clone 111164 (TRBV12-4, TRBJ2-2)
CASSITGSGGLFF

SEQ ID NO: 222329 - protein, 11 aa, Homo sapiens
  CDR3 for alpha chain variable domain of TCR clone 111165 (TRAV21, TRAJ34)
CAHYNTDKLIF

SEQ ID NO: 222330 - protein, 16 aa, Homo sapiens
  CDR3 for beta chain variable domain of TCR clone 111165 (TRBV11-3, TRBJ2-5)
CASSSVVAGSTETQYF

SEQ ID NO: 222331 - protein, 17 aa, Homo sapiens
  CDR3 for alpha chain variable domain of TCR clone 111166 (TRAV3, TRAJ6)
CAVRDCPRAGGSYLPTF

SEQ ID NO: 222332 - protein, 14 aa, Homo sapiens
  CDR3 for beta chain variable domain of TCR clone 111166 (TRBV7-2, TRBJ2-7)
CASSPKTSFYEQYF

SEQ ID NO: 222333 - protein, 13 aa, Homo sapiens
  CDR3 for alpha chain variable domain of TCR clone 111167 (TRAV13-2, TRAJ8)
CAFMNTGFQKLVF

SEQ ID NO: 222334 - protein, 15 aa, Homo sapiens
  CDR3 for beta chain variable domain of TCR clone 111167 (TRBV19, TRBJ2-3)
CAAGDTDAPNDTQYF

SEQ ID NO: 222335 - protein, 16 aa, Homo sapiens
  CDR3 for alpha chain variable domain of TCR clone 111168 (TRAV23/DV6, TRAJ52)
CAARPSGGTRYGKLTF

SEQ ID NO: 222336 - protein, 13 aa, Homo sapiens
  CDR3 for beta chain variable domain of TCR clone 111168 (TRBV7-9, TRBJ1-1)
CASSLSGETEAFF

SEQ ID NO: 222337 - protein, 14 aa, Homo sapiens
  CDR3 for alpha chain variable domain of TCR clone 111169 (TRAV21, TRAJ35)
CAVMPIGFGNVLHC

SEQ ID NO: 222338 - protein, 15 aa, Homo sapiens
  CDR3 for beta chain variable domain of TCR clone 111169 (TRBV11-3, TRBJ2-3)
CASLKDGREGDTQYF

SEQ ID NO: 222339 - protein, 12 aa, Homo sapiens
  CDR3 for alpha chain variable domain of TCR clone 111170 (TRAV21, TRAJ30)
CAALNRDDKIIF

SEQ ID NO: 222340 - protein, 16 aa, Homo sapiens
  CDR3 for beta chain variable domain of TCR clone 111170 (TRBV2, TRBJ2-3)
CASSTSVEGVTDTQYF

SEQ ID NO: 222341 - protein, 12 aa, Homo sapiens
  CDR3 for alpha chain variable domain of TCR clone 111171 (TRAV5, TRAJ37)
CAETPHTGKLIF

SEQ ID NO: 222342 - protein, 17 aa, Homo sapiens
  CDR3 for beta chain variable domain of TCR clone 111171 (TRBV29-1, TRBJ2-3)
CSVNACRASGGVDTQYF

SEQ ID NO: 222343 - protein, 10 aa, Homo sapiens
  CDR3 for alpha chain variable domain of TCR clone 111172 (TRAV16, TRAJ22)
SAMYLRQLTF

SEQ ID NO: 222344 - protein, 15 aa, Homo sapiens
  CDR3 for beta chain variable domain of TCR clone 111172 (TRBV7-9, TRBJ1-6)
CASSSPGLGNSPLHF

SEQ ID NO: 222345 - protein, 11 aa, Homo sapiens
  CDR3 for alpha chain variable domain of TCR clone 111173 (TRAV3, TRAJ4)
ETPGGYNKLIF

SEQ ID NO: 222346 - protein, 18 aa, Homo sapiens
  CDR3 for beta chain variable domain of TCR clone 111173 (TRBV12-4, TRBJ2-2)
CASSRSGGAIPNTGELFF

SEQ ID NO: 222347 - protein, 17 aa, Homo sapiens
  CDR3 for alpha chain variable domain of TCR clone 111174 (TRAV13-1, TRAJ28)
CAASPPYSGAGSHQLTF

SEQ ID NO: 222348 - protein, 15 aa, Homo sapiens
  CDR3 for beta chain variable domain of TCR clone 111174 (TRBV6-3, TRBJ2-2)
CASSFLATLTGELFF

SEQ ID NO: 222349 - protein, 16 aa, Homo sapiens
  CDR3 for alpha chain variable domain of TCR clone 111175 (TRAV27, TRAJ53)
CSAPEGSGGSNYKLTF

SEQ ID NO: 222350 - protein, 14 aa, Homo sapiens
  CDR3 for beta chain variable domain of TCR clone 111175 (TRBV4-3, TRBJ1-5)
CASSQGGQGWPQHF

SEQ ID NO: 222351 - protein, 16 aa, Homo sapiens
  CDR3 for alpha chain variable domain of TCR clone 111176 (TRAV26-1, TRAJ53)
CIVRVAMGGSNYKLTF

SEQ ID NO: 222352 - protein, 14 aa, Homo sapiens
  CDR3 for beta chain variable domain of TCR clone 111176 (TRBV12-5, TRBJ2-5)
CASGSRTHQETQYF

SEQ ID NO: 222353 - protein, 11 aa, Homo sapiens
  CDR3 for alpha chain variable domain of TCR clone 111177 (TRAV2, TRAJ13)
CASGGYRKVTF

SEQ ID NO: 222354 - protein, 13 aa, Homo sapiens
  CDR3 for beta chain variable domain of TCR clone 111177 (TRBV27, TRBJ1-4)
CASSLMGDEKLFF

SEQ ID NO: 222355 - protein, 12 aa, Homo sapiens
  CDR3 for alpha chain variable domain of TCR clone 111178 (TRAV1-2, TRAJ29)
CAVPSGNTPLVF

SEQ ID NO: 222356 - protein, 14 aa, Homo sapiens
  CDR3 for beta chain variable domain of TCR clone 111178 (TRBV18, TRBJ2-5)
CASSPGVFQETQYF

SEQ ID NO: 222357 - protein, 23 aa, Homo sapiens
  CDR3 for alpha chain variable domain of TCR clone 111179 (TRAV26-1, TRAJ38)
CIADNAGNNHIQNPDPAVYQLRD

SEQ ID NO: 222358 - protein, 16 aa, Homo sapiens
  CDR3 for beta chain variable domain of TCR clone 111179 (TRBV20-1, TRBJ1-4)
CSAPGQGLLTNEKLFF

SEQ ID NO: 222359 - protein, 14 aa, Homo sapiens
  CDR3 for alpha chain variable domain of TCR clone 111180 (TRAV12-2, TRAJ5)
CAVKGDTGRRALTF

SEQ ID NO: 222360 - protein, 16 aa, Homo sapiens
  CDR3 for beta chain variable domain of TCR clone 111180 (TRBV12-5, TRBJ2-5)
CASGPRTSGNQETQYF

SEQ ID NO: 222361 - protein, 16 aa, Homo sapiens
  CDR3 for alpha chain variable domain of TCR clone 111181 (TRAV30, TRAJ24)
CGTEIVDADSWGKFQF

SEQ ID NO: 222362 - protein, 14 aa, Homo sapiens
  CDR3 for beta chain variable domain of TCR clone 111181 (TRBV28, TRBJ2-3)
CASNGPRSTDTQYF

SEQ ID NO: 222363 - protein, 14 aa, Homo sapiens
  CDR3 for alpha chain variable domain of TCR clone 111182 (TRAV17, TRAJ24)
CATLTTDSWGKFQF

SEQ ID NO: 222364 - protein, 13 aa, Homo sapiens
  CDR3 for beta chain variable domain of TCR clone 111182 (TRBV11-2, TRBJ2-5)
CASSFSSQETQYF

SEQ ID NO: 222365 - protein, 15 aa, Homo sapiens
  CDR3 for alpha chain variable domain of TCR clone 111183 (TRAV23/DV6, TRAJ37)
CAAGEGSSNTGKLIF

SEQ ID NO: 222366 - protein, 14 aa, Homo sapiens
  CDR3 for beta chain variable domain of TCR clone 111183 (TRBV19, TRBJ2-1)
CASPTFVLSGEQFF

SEQ ID NO: 222367 - protein, 14 aa, Homo sapiens
  CDR3 for alpha chain variable domain of TCR clone 111184 (TRAV23/DV6, TRAJ4)
CAAPSSGGYNKLIF

SEQ ID NO: 222368 - protein, 16 aa, Homo sapiens
  CDR3 for beta chain variable domain of TCR clone 111184 (TRBV19, TRBJ1-1)
CASRFGGPVTGNEAFF

SEQ ID NO: 222369 - protein, 14 aa, Homo sapiens
  CDR3 for alpha chain variable domain of TCR clone 111185 (TRAV1-2, TRAJ8)
CAVREDTGFQKLVF

SEQ ID NO: 222370 - protein, 16 aa, Homo sapiens
  CDR3 for beta chain variable domain of TCR clone 111185 (TRBV20-1, TRBJ2-2)
CSARDDRVGLTGELFF

SEQ ID NO: 222371 - protein, 16 aa, Homo sapiens
  CDR3 for alpha chain variable domain of TCR clone 111186 (TRAV12-1, TRAJ12)
CVVDTLRMDSSYKLIF

SEQ ID NO: 222372 - protein, 13 aa, Homo sapiens
  CDR3 for beta chain variable domain of TCR clone 111186 (TRBV11-2, TRBJ2-1)
CASSSEAYNEQFF

SEQ ID NO: 222373 - protein, 15 aa, Homo sapiens
  CDR3 for alpha chain variable domain of TCR clone 111187 (TRAV27, TRAJ38)
CAGRFNAGNNRKLIW

SEQ ID NO: 222374 - protein, 16 aa, Homo sapiens
  CDR3 for beta chain variable domain of TCR clone 111187 (TRBV20-1, TRBJ2-1)
CSARDFSGRIGDEQFF

SEQ ID NO: 222375 - protein, 14 aa, Homo sapiens
  CDR3 for alpha chain variable domain of TCR clone 111188 (TRAV12-1, TRAJ38)
CVVNNAGNNRKLIW

SEQ ID NO: 222376 - protein, 18 aa, Homo sapiens
  CDR3 for beta chain variable domain of TCR clone 111188 (TRBV7-2, TRBJ2-3)
CASSLETSRGRKADTQYF

SEQ ID NO: 222377 - protein, 11 aa, Homo sapiens
  CDR3 for alpha chain variable domain of TCR clone 111189 (TRAV21, TRAJ11)
CAVNGYSTLTF

SEQ ID NO: 222378 - protein, 11 aa, Homo sapiens
  CDR3 for beta chain variable domain of TCR clone 111189 (TRBV19, TRBJ1-1)
CASSFGSEAFF

SEQ ID NO: 222379 - protein, 15 aa, Homo sapiens
  CDR3 for alpha chain variable domain of TCR clone 111190 (TRAV27, TRAJ38)
CAARRNAGNNRKLIW

SEQ ID NO: 222380 - protein, 14 aa, Homo sapiens
  CDR3 for beta chain variable domain of TCR clone 111190 (TRBV7-2, TRBJ2-7)
CASSPRDGAYEQYF

SEQ ID NO: 222381 - protein, 14 aa, Homo sapiens
  CDR3 for alpha chain variable domain of TCR clone 111191 (TRAV6, TRAJ39)
CALPNNNAGNILTF

SEQ ID NO: 222382 - protein, 17 aa, Homo sapiens
  CDR3 for beta chain variable domain of TCR clone 111191 (TRBV18, TRBJ2-3)
CASSSRGPASSTDTQYF

SEQ ID NO: 222383 - protein, 14 aa, Homo sapiens
  CDR3 for alpha chain variable domain of TCR clone 111192 (TRAV38-2/DV8, TRAJ54)
AAMYQIQGAQKLVF

SEQ ID NO: 222384 - protein, 17 aa, Homo sapiens
  CDR3 for beta chain variable domain of TCR clone 111192 (TRBV6-1, TRBJ2-3)
CASSEALRLISADTQYF

SEQ ID NO: 222385 - protein, 14 aa, Homo sapiens
  CDR3 for alpha chain variable domain of TCR clone 111193 (TRAV12-3, TRAJ10)
SHLPLTGGGNKLTF

SEQ ID NO: 222386 - protein, 15 aa, Homo sapiens
  CDR3 for beta chain variable domain of TCR clone 111193 (TRBV7-9, TRBJ1-4)
CASSRTGGFNEKQFF

SEQ ID NO: 222387 - protein, 12 aa, Homo sapiens
  CDR3 for alpha chain variable domain of TCR clone 111194 (TRAV12-2, TRAJ43)
CAVNVNNNDMRF

SEQ ID NO: 222388 - protein, 13 aa, Homo sapiens
  CDR3 for beta chain variable domain of TCR clone 111194 (TRBV25-1, TRBJ2-2)
CASSELGLPGELF

SEQ ID NO: 222389 - protein, 12 aa, Homo sapiens
  CDR3 for alpha chain variable domain of TCR clone 111195 (TRAV1-1, TRAJ8)
RAGGTGFQKLVF

SEQ ID NO: 222390 - protein, 14 aa, Homo sapiens
  CDR3 for beta chain variable domain of TCR clone 111195 (TRBV5-1, TRBJ2-7)
CASSRGESLYEQYF

SEQ ID NO: 222391 - protein, 15 aa, Homo sapiens
  CDR3 for alpha chain variable domain of TCR clone 111196 (TRAV12-1, TRAJ44)
CVADLPTGTASKLTF

SEQ ID NO: 222392 - protein, 15 aa, Homo sapiens
  CDR3 for beta chain variable domain of TCR clone 111196 (TRBV20-1, TRBJ2-7)
CSARDRVSGMDEQYF

SEQ ID NO: 222393 - protein, 16 aa, Homo sapiens
  CDR3 for alpha chain variable domain of TCR clone 111197 (TRAV12-2, TRAJ32)
CAANLGQGGATNKLIF

SEQ ID NO: 222394 - protein, 14 aa, Homo sapiens
  CDR3 for beta chain variable domain of TCR clone 111197 (TRBV11-2, TRBJ2-3)
CASSRLARTDTQHF

SEQ ID NO: 222395 - protein, 13 aa, Homo sapiens
  CDR3 for alpha chain variable domain of TCR clone 111198 (TRAV8-3, TRAJ28)
CAVGAVGSYQLTF

SEQ ID NO: 222396 - protein, 15 aa, Homo sapiens
  CDR3 for beta chain variable domain of TCR clone 111198 (TRBV10-1, TRBJ2-1)
CASSTGTELYNEQFF

SEQ ID NO: 222397 - protein, 15 aa, Homo sapiens
  CDR3 for alpha chain variable domain of TCR clone 111199 (TRAV12-1, TRAJ45)
CVVLSGGGGADGLTF

SEQ ID NO: 222398 - protein, 16 aa, Homo sapiens
  CDR3 for beta chain variable domain of TCR clone 111199 (TRBV6-5, TRBJ2-1)
CASSETLAGHHNEQFF

SEQ ID NO: 222399 - protein, 16 aa, Homo sapiens
  CDR3 for alpha chain variable domain of TCR clone 111200 (TRAV30, TRAJ24)
CGTEIVDADSWGKFQF

SEQ ID NO: 222400 - protein, 17 aa, Homo sapiens
  CDR3 for beta chain variable domain of TCR clone 111200 (TRBV7-2, TRBJ2-3)
CASSLAGGLAGTAGQYF

SEQ ID NO: 222401 - protein, 13 aa, Homo sapiens
  CDR3 for alpha chain variable domain of TCR clone 111201 (TRAV1-2, TRAJ9)
CAALNTGGFKNIF

SEQ ID NO: 222402 - protein, 15 aa, Homo sapiens
  CDR3 for beta chain variable domain of TCR clone 111201 (TRBV19, TRBJ1-1)
CASTSGQIQNTEAFF

SEQ ID NO: 222403 - protein, 17 aa, Homo sapiens
  CDR3 for alpha chain variable domain of TCR clone 111202 (TRAV38-1, TRAJ28)
CAFMKPTSGAGSYQLTF

SEQ ID NO: 222404 - protein, 15 aa, Homo sapiens
  CDR3 for beta chain variable domain of TCR clone 111202 (TRBV5-1, TRBJ2-4)
CASSVGGGGSYIQYF

SEQ ID NO: 222405 - protein, 14 aa, Homo sapiens
  CDR3 for alpha chain variable domain of TCR clone 111203 (TRAV38-1, TRAJ40)
CALRPTSGTYKYIF

SEQ ID NO: 222406 - protein, 16 aa, Homo sapiens
  CDR3 for beta chain variable domain of TCR clone 111203 (TRBV25-1, TRBJ1-1)
CASTHLGGNTEAFLDK

SEQ ID NO: 222407 - protein, 14 aa, Homo sapiens
  CDR3 for alpha chain variable domain of TCR clone 111204 (TRAV3, TRAJ34)
FAVRDINNTDKLIF

SEQ ID NO: 222408 - protein, 15 aa, Homo sapiens
  CDR3 for beta chain variable domain of TCR clone 111204 (TRBV20-1, TRBJ2-7)
CSARDRVSGMDEQYF

SEQ ID NO: 222409 - protein, 15 aa, Homo sapiens
  CDR3 for alpha chain variable domain of TCR clone 111205 (TRAV14/DV4, TRAJ10)
CAMRELTGGGNKLTF

SEQ ID NO: 222410 - protein, 18 aa, Homo sapiens
  CDR3 for beta chain variable domain of TCR clone 111205 (TRBV7-9, TRBJ2-7)
CASSLTTRGSRTWYEQYF

SEQ ID NO: 222411 - protein, 11 aa, Homo sapiens
  CDR3 for alpha chain variable domain of TCR clone 111206 (TRAV12-2, TRAJ54)
CAVEGAQKVVF

SEQ ID NO: 222412 - protein, 17 aa, Homo sapiens
  CDR3 for beta chain variable domain of TCR clone 111206 (TRBV18, TRBJ1-3)
CASSPYPTGPSGNTIYF

SEQ ID NO: 222413 - protein, 12 aa, Homo sapiens
  CDR3 for alpha chain variable domain of TCR clone 111207 (TRAV8-4, TRAJ43)
CAVSVNNNDMRF

SEQ ID NO: 222414 - protein, 14 aa, Homo sapiens
  CDR3 for beta chain variable domain of TCR clone 111207 (TRBV25-1, TRBJ1-1)
CASTHLGGNTEAFF

SEQ ID NO: 222415 - protein, 11 aa, Homo sapiens
  CDR3 for alpha chain variable domain of TCR clone 111208 (TRAV17, TRAJ31)
CATDRTARLLF

SEQ ID NO: 222416 - protein, 14 aa, Homo sapiens
  CDR3 for beta chain variable domain of TCR clone 111208 (TRBV4-2, TRBJ2-3)
CASSQERGTDTQYF

SEQ ID NO: 222417 - protein, 14 aa, Homo sapiens
  CDR3 for alpha chain variable domain of TCR clone 111209 (TRAV13-1, TRAJ35)
CAASKGGFGNVLHC

SEQ ID NO: 222418 - protein, 12 aa, Homo sapiens
  CDR3 for beta chain variable domain of TCR clone 111209 (TRBV7-3, TRBJ1-1)
CASSHRQGEAFF

SEQ ID NO: 222419 - protein, 15 aa, Homo sapiens
  CDR3 for alpha chain variable domain of TCR clone 111210 (TRAV8-6, TRAJ38)
CAVSSNAGNNRKLIW

SEQ ID NO: 222420 - protein, 14 aa, Homo sapiens
  CDR3 for beta chain variable domain of TCR clone 111210 (TRBV14, TRBJ2-1)
CASSQVQGRGEQFF

SEQ ID NO: 222421 - protein, 14 aa, Homo sapiens
  CDR3 for alpha chain variable domain of TCR clone 111211 (TRAV1-2, TRAJ8)
CAVREDTGFQKLLF

SEQ ID NO: 222422 - protein, 15 aa, Homo sapiens
  CDR3 for beta chain variable domain of TCR clone 111211 (TRBV11-3, TRBJ2-3)
CASLKDGREGDTQYF

SEQ ID NO: 222423 - protein, 17 aa, Homo sapiens
  CDR3 for alpha chain variable domain of TCR clone 111212 (TRAV23/DV6, TRAJ58)
CAARLLRGETSGSRLTL

SEQ ID NO: 222424 - protein, 13 aa, Homo sapiens
  CDR3 for beta chain variable domain of TCR clone 111212 (TRBV6-4, TRBJ1-5)
CASSADLNQPQHF

SEQ ID NO: 222425 - protein, 14 aa, Homo sapiens
  CDR3 for alpha chain variable domain of TCR clone 111213 (TRAV8-2, TRAJ11)
CVVSEKSGYSTLTF

SEQ ID NO: 222426 - protein, 16 aa, Homo sapiens
  CDR3 for beta chain variable domain of TCR clone 111213 (TRBV28, TRBJ2-1)
GASSSPEYPRDNEQFF

SEQ ID NO: 222427 - protein, 14 aa, Homo sapiens
  CDR3 for alpha chain variable domain of TCR clone 111214 (TRAV4, TRAJ32)
CLVNYGGATNKLIF

SEQ ID NO: 222428 - protein, 14 aa, Homo sapiens
  CDR3 for beta chain variable domain of TCR clone 111214 (TRBV15, TRBJ2-5)
CATSGGTSAETQYF

SEQ ID NO: 222429 - protein, 14 aa, Homo sapiens
  CDR3 for alpha chain variable domain of TCR clone 111215 (TRAV2, TRAJ37)
CAVDFTSNTGKLIF

SEQ ID NO: 222430 - protein, 13 aa, Homo sapiens
  CDR3 for beta chain variable domain of TCR clone 111215 (TRBV19, TRBJ2-1)
CATSRGVYNEQFF

SEQ ID NO: 222431 - protein, 17 aa, Homo sapiens
  CDR3 for alpha chain variable domain of TCR clone 111216 (TRAV4, TRAJ18)
CLVVAAGRGSTLGRLNF

SEQ ID NO: 222432 - protein, 17 aa, Homo sapiens
  CDR3 for beta chain variable domain of TCR clone 111216 (TRBV28, TRBJ2-2)
CASSLATGMGDAGELFF

SEQ ID NO: 222433 - protein, 14 aa, Homo sapiens
  CDR3 for alpha chain variable domain of TCR clone 111217 (TRAV3, TRAJ9)
CAVRLNTGGFKTSF

SEQ ID NO: 222434 - protein, 15 aa, Homo sapiens
  CDR3 for beta chain variable domain of TCR clone 111217 (TRBV7-2, TRBJ2-1)
CASSLASGRVNEQFF

SEQ ID NO: 222435 - protein, 17 aa, Homo sapiens
  CDR3 for alpha chain variable domain of TCR clone 111218 (TRAV3, TRAJ6)
CAVRDGPRAGGSYIPPF

SEQ ID NO: 222436 - protein, 13 aa, Homo sapiens
  CDR3 for beta chain variable domain of TCR clone 111218 (TRBV27, TRBJ1-1)
CASSLSIGAEAFF

SEQ ID NO: 222437 - protein, 14 aa, Homo sapiens
  CDR3 for alpha chain variable domain of TCR clone 111219 (TRAV23/DV6, TRAJ15)
CAASKYQAGTALIF

SEQ ID NO: 222438 - protein, 15 aa, Homo sapiens
  CDR3 for beta chain variable domain of TCR clone 111219 (TRBV20-1, TRBJ2-7)
CSARDRVSGMDEQYF

SEQ ID NO: 222439 - protein, 18 aa, Homo sapiens
  CDR3 for alpha chain variable domain of TCR clone 111220 (TRAV1-2, TRAJ10)
CAVRALTPVTGGGNKLTF

SEQ ID NO: 222440 - protein, 14 aa, Homo sapiens
  CDR3 for beta chain variable domain of TCR clone 111220 (TRBV5-4, TRBJ1-1)
CASSLDSRRDEAFF

SEQ ID NO: 222441 - protein, 14 aa, Homo sapiens
  CDR3 for alpha chain variable domain of TCR clone 111221 (TRAV13-1, TRAJ40)
CAARSTSGTYKYIF

SEQ ID NO: 222442 - protein, 15 aa, Homo sapiens
  CDR3 for beta chain variable domain of TCR clone 111221 (TRBV18, TRBJ1-5)
CASSETGGNNQPQHS

SEQ ID NO: 222443 - protein, 14 aa, Homo sapiens
  CDR3 for alpha chain variable domain of TCR clone 111222 (TRAV35, TRAJ33)
CAGSSQDGNYQLIW

SEQ ID NO: 222444 - protein, 15 aa, Homo sapiens
  CDR3 for beta chain variable domain of TCR clone 111222 (TRBV29-1, TRBJ2-7)
CSVEFFDRGSYEQYF

SEQ ID NO: 222445 - protein, 15 aa, Homo sapiens
  CDR3 for alpha chain variable domain of TCR clone 111223 (TRAV34, TRAJ38)
CGADFTPGNNHKLIW

SEQ ID NO: 222446 - protein, 16 aa, Homo sapiens
  CDR3 for beta chain variable domain of TCR clone 111223 (TRBV12-5, TRBJ2-5)
CASGPRTSGNQETQYF

SEQ ID NO: 222447 - protein, 15 aa, Homo sapiens
  CDR3 for alpha chain variable domain of TCR clone 111224 (TRAV3, TRAJ3)
CAVRDRDSSASKIIF

SEQ ID NO: 222448 - protein, 17 aa, Homo sapiens
  CDR3 for beta chain variable domain of TCR clone 111224 (TRBV7-8, TRBJ2-6)
CASSAGTGGAGANVLTF

SEQ ID NO: 222449 - protein, 13 aa, Homo sapiens
  CDR3 for alpha chain variable domain of TCR clone 111225 (TRAV35, TRAJ42)
CAGSPGSQGNLIF

SEQ ID NO: 222450 - protein, 16 aa, Homo sapiens
  CDR3 for beta chain variable domain of TCR clone 111225 (TRBV19, TRBJ2-2)
CASSFPGQGLAGELFF

SEQ ID NO: 222451 - protein, 12 aa, Homo sapiens
  CDR3 for alpha chain variable domain of TCR clone 111226 (TRAV3, TRAJ43)
CAVRDPNNDMRF

SEQ ID NO: 222452 - protein, 13 aa, Homo sapiens
  CDR3 for beta chain variable domain of TCR clone 111226 (TRBV19, TRBJ1-2)
CASSRGQVYGYTF

SEQ ID NO: 222453 - protein, 13 aa, Homo sapiens
  CDR3 for alpha chain variable domain of TCR clone 111227 (TRAV27, TRAJ39)
CAGVNNAGNMLTF

SEQ ID NO: 222454 - protein, 19 aa, Homo sapiens
  CDR3 for beta chain variable domain of TCR clone 111227 (TRBV5-1, TRBJ2-3)
CASSLWLAGVITTTDTQYF

SEQ ID NO: 222455 - protein, 16 aa, Homo sapiens
  CDR3 for alpha chain variable domain of TCR clone 111228 (TRAV17, TRAJ28)
CASASVSGAGSYQLTF

SEQ ID NO: 222456 - protein, 11 aa, Homo sapiens
  CDR3 for beta chain variable domain of TCR clone 111228 (TRBV7-9, TRBJ2-5)
CASSLGETQYF

SEQ ID NO: 222457 - protein, 16 aa, Homo sapiens
  CDR3 for alpha chain variable domain of TCR clone 111229 (TRAV30, TRAJ24)
CGTEIVDADSWGKFQF

SEQ ID NO: 222458 - protein, 15 aa, Homo sapiens
  CDR3 for beta chain variable domain of TCR clone 111229 (TRBV18, TRBJ2-1)
CASLTDRGRDNEQFF

SEQ ID NO: 222459 - protein, 15 aa, Homo sapiens
  CDR3 for alpha chain variable domain of TCR clone 111230 (TRAV13-1, TRAJ15)
CAARIERQAGTALIF

SEQ ID NO: 222460 - protein, 13 aa, Homo sapiens
  CDR3 for beta chain variable domain of TCR clone 111230 (TRBV5-1, TRBJ2-7)
CASSATGGNEQYF

SEQ ID NO: 222461 - protein, 12 aa, Homo sapiens
  CDR3 for alpha chain variable domain of TCR clone 111231 (TRAV8-3, TRAJ26)
CAGDNYGQNFVF

SEQ ID NO: 222462 - protein, 14 aa, Homo sapiens
  CDR3 for beta chain variable domain of TCR clone 111231 (TRBV7-2, TRBJ2-2)
CASRGQGAAGELFF

SEQ ID NO: 222463 - protein, 14 aa, Homo sapiens
  CDR3 for alpha chain variable domain of TCR clone 111232 (TRAV12-2, TRAJ13)
CAVKKTGGYQKVTF

SEQ ID NO: 222464 - protein, 17 aa, Homo sapiens
  CDR3 for beta chain variable domain of TCR clone 111232 (TRBV4-3, TRBJ2-5)
CASSPYGPGGPEETQYF

SEQ ID NO: 222465 - protein, 11 aa, Homo sapiens
  CDR3 for alpha chain variable domain of TCR clone 111233 (TRAV21, TRAJ34)
CAVTNTDKLIF

SEQ ID NO: 222466 - protein, 19 aa, Homo sapiens
  CDR3 for beta chain variable domain of TCR clone 111233 (TRBV7-2, TRBJ2-3)
CANSFLSRNWGGGTDTQYF

SEQ ID NO: 222467 - protein, 11 aa, Homo sapiens
  CDR3 for alpha chain variable domain of TCR clone 111234 (TRAV2, TRAJ13)
CASGGYQKVTF

SEQ ID NO: 222468 - protein, 16 aa, Homo sapiens
  CDR3 for beta chain variable domain of TCR clone 111234 (TRBV2, TRBJ2-5)
CASSETQGVGEETQYF

SEQ ID NO: 222469 - protein, 15 aa, Homo sapiens
  CDR3 for alpha chain variable domain of TCR clone 111235 (TRAV23/DV6, TRAJ18)
CAARYRGSTLGRLYF

SEQ ID NO: 222470 - protein, 17 aa, Homo sapiens
  CDR3 for beta chain variable domain of TCR clone 111235 (TRBV7-3, TRBJ2-3)
CASSLMKRMRGADTQYF

SEQ ID NO: 222471 - protein, 13 aa, Homo sapiens
  CDR3 for alpha chain variable domain of TCR clone 111236 (TRAV20, TRAJ49)
CAVQARTGNQFYF

SEQ ID NO: 222472 - protein, 15 aa, Homo sapiens
  CDR3 for beta chain variable domain of TCR clone 111236 (TRBV7-9, TRBJ1-6)
CASSSPGRGNSPLHF

SEQ ID NO: 222473 - protein, 12 aa, Homo sapiens
  CDR3 for alpha chain variable domain of TCR clone 111237 (TRAV12-3, TRAJ40)
CAMSSGTYKYIF

SEQ ID NO: 222474 - protein, 15 aa, Homo sapiens
  CDR3 for beta chain variable domain of TCR clone 111237 (TRBV11-3, TRBJ2-7)
CASSPGPASSYEQYF

SEQ ID NO: 222475 - protein, 12 aa, Homo sapiens
  CDR3 for alpha chain variable domain of TCR clone 111238 (TRAV16, TRAJ22)
CALEVSARQLTF

SEQ ID NO: 222476 - protein, 14 aa, Homo sapiens
  CDR3 for beta chain variable domain of TCR clone 111238 (TRBV11-2, TRBJ2-3)
CASRSIASTDTQYF

SEQ ID NO: 222477 - protein, 14 aa, Homo sapiens
  CDR3 for alpha chain variable domain of TCR clone 111239 (TRAV21, TRAJ15)
CAVSLDQAGTALIF

SEQ ID NO: 222478 - protein, 11 aa, Homo sapiens
  CDR3 for beta chain variable domain of TCR clone 111239 (TRBV20-1, TRBJ2-7)
CSARTSYEQYF

SEQ ID NO: 222479 - protein, 16 aa, Homo sapiens
  CDR3 for alpha chain variable domain of TCR clone 111240 (TRAV1-2, TRAJ10)
CAVRGVLTGGGNTLTF

SEQ ID NO: 222480 - protein, 15 aa, Homo sapiens
  CDR3 for beta chain variable domain of TCR clone 111240 (TRBV7-9, TRBJ1-6)
CASSSPGRGNSPLHF

SEQ ID NO: 222481 - protein, 14 aa, Homo sapiens
  CDR3 for alpha chain variable domain of TCR clone 111241 (TRAV21, TRAJ23)
CAPRLYNQGGKLIF

SEQ ID NO: 222482 - protein, 15 aa, Homo sapiens
  CDR3 for beta chain variable domain of TCR clone 111241 (TRBV7-9, TRBJ1-4)
CASSRTGGFNEKLFF

SEQ ID NO: 222483 - protein, 14 aa, Homo sapiens
  CDR3 for alpha chain variable domain of TCR clone 111242 (TRAV26-1, TRAJ38)
CIADNAGNNRKLIW

SEQ ID NO: 222484 - protein, 13 aa, Homo sapiens
  CDR3 for beta chain variable domain of TCR clone 111242 (TRBV4-1, TRBJ2-7)
CASSQGQAYDQYF

SEQ ID NO: 222485 - protein, 16 aa, Homo sapiens
  CDR3 for alpha chain variable domain of TCR clone 111243 (TRAV12-2, TRAJ52)
CRLANAGGTSYGKLTF

SEQ ID NO: 222486 - protein, 14 aa, Homo sapiens
  CDR3 for beta chain variable domain of TCR clone 111243 (TRBV2, TRBJ2-1)
CASSEALDGNEQFF

SEQ ID NO: 222487 - protein, 11 aa, Homo sapiens
  CDR3 for alpha chain variable domain of TCR clone 111244 (TRAV8-3, TRAJ49)
CAVNTGNQFYF

SEQ ID NO: 222488 - protein, 13 aa, Homo sapiens
  CDR3 for beta chain variable domain of TCR clone 111244 (TRBV20-1, TRBJ1-1)
CSARGGGNTEAFF

SEQ ID NO: 222489 - protein, 14 aa, Homo sapiens
  CDR3 for alpha chain variable domain of TCR clone 111245 (TRAV17, TRAJ12)
CAILPMDSSYKLIF

SEQ ID NO: 222490 - protein, 15 aa, Homo sapiens
  CDR3 for beta chain variable domain of TCR clone 111245 (TRBV7-9, TRBJ1-6)
CASSSPGRGNSPLHF

SEQ ID NO: 222491 - protein, 13 aa, Homo sapiens
  CDR3 for alpha chain variable domain of TCR clone 111246 (TRAV8-3, TRAJ28)
CGVGAVGSYQLTF

SEQ ID NO: 222492 - protein, 15 aa, Homo sapiens
  CDR3 for beta chain variable domain of TCR clone 111246 (TRBV7-9, TRBJ1-5)
CASSQGHQPNQPQHF

SEQ ID NO: 222493 - protein, 14 aa, Homo sapiens
  CDR3 for alpha chain variable domain of TCR clone 111247 (TRAV12-3, TRAJ10)
SHPPLTGGGNKLTF

SEQ ID NO: 222494 - protein, 15 aa, Homo sapiens
  CDR3 for beta chain variable domain of TCR clone 111247 (TRBV10-3, TRBJ1-1)
CAISDRGGMNTEAFF

SEQ ID NO: 222495 - protein, 18 aa, Homo sapiens
  CDR3 for alpha chain variable domain of TCR clone 111248 (TRAV26-2, TRAJ54)
CILRDVEVGIQGAQKLVF

SEQ ID NO: 222496 - protein, 16 aa, Homo sapiens
  CDR3 for beta chain variable domain of TCR clone 111248 (TRBV12-5, TRBJ2-5)
CASGPRTSGNQETQYF

SEQ ID NO: 222497 - protein, 18 aa, Homo sapiens
  CDR3 for alpha chain variable domain of TCR clone 111249 (TRAV16, TRAJ52)
CALSGVDAGGTSYGKLTF

SEQ ID NO: 222498 - protein, 13 aa, Homo sapiens
  CDR3 for beta chain variable domain of TCR clone 111249 (TRBV12-4, TRBJ1-2)
CASSLRQGKGYTF

SEQ ID NO: 222499 - protein, 17 aa, Homo sapiens
  CDR3 for alpha chain variable domain of TCR clone 111250 (TRAV17, TRAJ28)
CATDPRRGGAGSYQLTF

SEQ ID NO: 222500 - protein, 16 aa, Homo sapiens
  CDR3 for beta chain variable domain of TCR clone 111250 (TRBV25-1, TRBJ1-1)
CASSGDRDRGRIEALF

SEQ ID NO: 222501 - protein, 15 aa, Homo sapiens
  CDR3 for alpha chain variable domain of TCR clone 111251 (TRAV21, TRAJ45)
CAVSYSGGGADGLIF

SEQ ID NO: 222502 - protein, 13 aa, Homo sapiens
  CDR3 for beta chain variable domain of TCR clone 111251 (TRBV20-1, TRBJ2-5)
CSAATELQETQYF

SEQ ID NO: 222503 - protein, 14 aa, Homo sapiens
  CDR3 for alpha chain variable domain of TCR clone 111252 (TRAV35, TRAJ29)
CAGQLTSGNTPLVF

SEQ ID NO: 222504 - protein, 15 aa, Homo sapiens
  CDR3 for beta chain variable domain of TCR clone 111252 (TRBV28, TRBJ2-1)
CASSIIAGGRSEQFF

SEQ ID NO: 222505 - protein, 11 aa, Homo sapiens
  CDR3 for alpha chain variable domain of TCR clone 111253 (TRAV1-1, TRAJ23)
CAVRQVGKLIF

SEQ ID NO: 222506 - protein, 13 aa, Homo sapiens
  CDR3 for beta chain variable domain of TCR clone 111253 (TRBV7-3, TRBJ1-1)
CASSQDWGAEAFF

SEQ ID NO: 222507 - protein, 12 aa, Homo sapiens
  CDR3 for alpha chain variable domain of TCR clone 111254 (TRAV13-1, TRAJ21)
CAAKEGFSKFYF

SEQ ID NO: 222508 - protein, 14 aa, Homo sapiens
  CDR3 for beta chain variable domain of TCR clone 111254 (TRBV7-2, TRBJ2-5)
CASSLSGGGETQYF

SEQ ID NO: 222509 - protein, 11 aa, Homo sapiens
  CDR3 for alpha chain variable domain of TCR clone 111255 (TRAV17, TRAJ9)
CATTGGFKTIF

SEQ ID NO: 222510 - protein, 12 aa, Homo sapiens
  CDR3 for beta chain variable domain of TCR clone 111255 (TRBV29-1, TRBJ2-3)
CSVTGGADTQYF

SEQ ID NO: 222511 - protein, 15 aa, Homo sapiens
  CDR3 for alpha chain variable domain of TCR clone 111256 (TRAV2, TRAJ22)
CAVPSRGGSARHLTF

SEQ ID NO: 222512 - protein, 14 aa, Homo sapiens
  CDR3 for beta chain variable domain of TCR clone 111256 (TRBV7-6, TRBJ2-3)
CASSLGTVTDTQYF

SEQ ID NO: 222513 - protein, 11 aa, Homo sapiens
  CDR3 for alpha chain variable domain of TCR clone 111257 (TRAV23/DV6, TRAJ58)
CAVRLLRGETS

SEQ ID NO: 222514 - protein, 13 aa, Homo sapiens
  CDR3 for beta chain variable domain of TCR clone 111257 (TRBV6-4, TRBJ1-5)
CASSADLNQPQHF

SEQ ID NO: 222515 - protein, 11 aa, Homo sapiens
  CDR3 for alpha chain variable domain of TCR clone 111258 (TRAV1-2, TRAJ40)
CAVPGTYKYIF

SEQ ID NO: 222516 - protein, 16 aa, Homo sapiens
  CDR3 for beta chain variable domain of TCR clone 111258 (TRBV29-1, TRBJ2-7)
CSVEVVGSSGSYEQYF

SEQ ID NO: 222517 - protein, 17 aa, Homo sapiens
  CDR3 for alpha chain variable domain of TCR clone 111259 (TRAV13-1, TRAJ28)
CAASPPYSGAGSYQLTF

SEQ ID NO: 222518 - protein, 15 aa, Homo sapiens
  CDR3 for beta chain variable domain of TCR clone 111259 (TRBV6-3, TRBJ2-2)
CASSFLATLTGELFF

SEQ ID NO: 222519 - protein, 11 aa, Homo sapiens
  CDR3 for alpha chain variable domain of TCR clone 111260 (TRAV35, TRAJ22)
CAGPGVGQLTF

SEQ ID NO: 222520 - protein, 15 aa, Homo sapiens
  CDR3 for beta chain variable domain of TCR clone 111260 (TRBV6-3, TRBJ2-7)
CASSSPGTVFYEQYF

SEQ ID NO: 222521 - protein, 16 aa, Homo sapiens
  CDR3 for alpha chain variable domain of TCR clone 111261 (TRAV30, TRAJ24)
CGTEIVDADSWGKFQF

SEQ ID NO: 222522 - protein, 14 aa, Homo sapiens
  CDR3 for beta chain variable domain of TCR clone 111261 (TRBV29-1, TRBJ2-2)
CSVLAETNTGELFF

SEQ ID NO: 222523 - protein, 13 aa, Homo sapiens
  CDR3 for alpha chain variable domain of TCR clone 111262 (TRAV13-1, TRAJ6)
CARGSGGRYIPTF

SEQ ID NO: 222524 - protein, 17 aa, Homo sapiens
  CDR3 for beta chain variable domain of TCR clone 111262 (TRBV7-8, TRBJ2-1)
CASSPPTGTLAYNEQFF

SEQ ID NO: 222525 - protein, 12 aa, Homo sapiens
  CDR3 for alpha chain variable domain of TCR clone 111263 (TRAV9-2, TRAJ5)
CALSPGRRALTF

SEQ ID NO: 222526 - protein, 15 aa, Homo sapiens
  CDR3 for beta chain variable domain of TCR clone 111263 (TRBV7-9, TRBJ1-6)
CASSSPGRGNSPLHF

SEQ ID NO: 222527 - protein, 14 aa, Homo sapiens
  CDR3 for alpha chain variable domain of TCR clone 111264 (TRAV12-1, TRAJ3)
CGASRYSSASKIIF

SEQ ID NO: 222528 - protein, 15 aa, Homo sapiens
  CDR3 for beta chain variable domain of TCR clone 111264 (TRBV7-2, TRBJ2-6)
CASSREGSGANVLTF

SEQ ID NO: 222529 - protein, 14 aa, Homo sapiens
  CDR3 for alpha chain variable domain of TCR clone 111265 (TRAV1-2, TRAJ8)
CAVREDTGFQKLVF

SEQ ID NO: 222530 - protein, 16 aa, Homo sapiens
  CDR3 for beta chain variable domain of TCR clone 111265 (TRBV7-3, TRBJ2-2)
CASSLKRGTLSGEPFF

SEQ ID NO: 222531 - protein, 11 aa, Homo sapiens
  CDR3 for alpha chain variable domain of TCR clone 111266 (TRAV13-1, TRAJ8)
CAARGFQKLVV

SEQ ID NO: 222532 - protein, 16 aa, Homo sapiens
  CDR3 for beta chain variable domain of TCR clone 111266 (TRBV19, TRBJ1-5)
CASSTRGTRSNQPQHF

SEQ ID NO: 222533 - protein, 14 aa, Homo sapiens
  CDR3 for alpha chain variable domain of TCR clone 111267 (TRAV26-2, TRAJ32)
CCVGYGGATNKLIF

SEQ ID NO: 222534 - protein, 15 aa, Homo sapiens
  CDR3 for beta chain variable domain of TCR clone 111267 (TRBV11-2, TRBJ1-1)
CASSSRSSLLLSLDK

SEQ ID NO: 222535 - protein, 16 aa, Homo sapiens
  CDR3 for alpha chain variable domain of TCR clone 111268 (TRAV20, TRAJ22)
CAVQASSSGSATQLTF

SEQ ID NO: 222536 - protein, 13 aa, Homo sapiens
  CDR3 for beta chain variable domain of TCR clone 111268 (TRBV7-2, TRBJ2-5)
CASSQTSVETQYF

SEQ ID NO: 222537 - protein, 13 aa, Homo sapiens
  CDR3 for alpha chain variable domain of TCR clone 111269 (TRAV21, TRAJ27)
CAARPGNAGKSTF

SEQ ID NO: 222538 - protein, 15 aa, Homo sapiens
  CDR3 for beta chain variable domain of TCR clone 111269 (TRBV7-3, TRBJ2-1)
CQQLQTSGRYNEQFF

SEQ ID NO: 222539 - protein, 14 aa, Homo sapiens
  CDR3 for alpha chain variable domain of TCR clone 111270 (TRAV12-2, TRAJ13)
CTVKKAGGYQKVTF

SEQ ID NO: 222540 - protein, 15 aa, Homo sapiens
  CDR3 for beta chain variable domain of TCR clone 111270 (TRBV27, TRBJ2-1)
CASSNGGGSSNEQFF

SEQ ID NO: 222541 - protein, 14 aa, Homo sapiens
  CDR3 for alpha chain variable domain of TCR clone 111271 (TRAV12-1, TRAJ13)
CVVIDSGGYQKVTF

SEQ ID NO: 222542 - protein, 15 aa, Homo sapiens
  CDR3 for beta chain variable domain of TCR clone 111271 (TRBV19, TRBJ1-2)
CASTPGQVANYGYTF

SEQ ID NO: 222543 - protein, 14 aa, Homo sapiens
  CDR3 for alpha chain variable domain of TCR clone 111272 (TRAV12-1, TRAJ30)
CVVNKGGRDDKIIF

SEQ ID NO: 222544 - protein, 13 aa, Homo sapiens
  CDR3 for beta chain variable domain of TCR clone 111272 (TRBV12-5, TRBJ2-1)
CASGLGRGNEQFF

SEQ ID NO: 222545 - protein, 12 aa, Homo sapiens
  CDR3 for alpha chain variable domain of TCR clone 111273 (TRAV4, TRAJ26)
CLVGDYGQNFVF

SEQ ID NO: 222546 - protein, 11 aa, Homo sapiens
  CDR3 for beta chain variable domain of TCR clone 111273 (TRBV24-1, TRBJ2-5)
CATSIGETQYF

SEQ ID NO: 222547 - protein, 14 aa, Homo sapiens
  CDR3 for alpha chain variable domain of TCR clone 111274 (TRAV17, TRAJ6)
CATDVSGGSYIPTF

SEQ ID NO: 222548 - protein, 19 aa, Homo sapiens
  CDR3 for beta chain variable domain of TCR clone 111274 (TRBV4-3, TRBJ2-7)
CASSQEFIGWQVTPYEQYF

SEQ ID NO: 222549 - protein, 12 aa, Homo sapiens
  CDR3 for alpha chain variable domain of TCR clone 111275 (TRAV12-2, TRAJ43)
CAVNVNNNGMRF

SEQ ID NO: 222550 - protein, 14 aa, Homo sapiens
  CDR3 for beta chain variable domain of TCR clone 111275 (TRBV12-5, TRBJ2-5)
CASGSRTHQETQYF

SEQ ID NO: 222551 - protein, 12 aa, Homo sapiens
  CDR3 for alpha chain variable domain of TCR clone 111276 (TRAV12-3, TRAJ17)
CAMTLTGNKLTF

SEQ ID NO: 222552 - protein, 15 aa, Homo sapiens
  CDR3 for beta chain variable domain of TCR clone 111276 (TRBV11-3, TRBJ2-3)
YASLKDGREGDAQYF

SEQ ID NO: 222553 - protein, 15 aa, Homo sapiens
  CDR3 for alpha chain variable domain of TCR clone 111277 (TRAV14/DV4, TRAJ39)
CAMRAVNNAGNMLTF

SEQ ID NO: 222554 - protein, 14 aa, Homo sapiens
  CDR3 for beta chain variable domain of TCR clone 111277 (TRBV4-1, TRBJ2-2)
CASSQAVNTGELFF

SEQ ID NO: 222555 - protein, 11 aa, Homo sapiens
  CDR3 for alpha chain variable domain of TCR clone 111278 (TRAV3, TRAJ21)
CAVGNFNKFYF

SEQ ID NO: 222556 - protein, 13 aa, Homo sapiens
  CDR3 for beta chain variable domain of TCR clone 111278 (TRBV7-3, TRBJ1-1)
CASRQDWGAEAFF

SEQ ID NO: 222557 - protein, 13 aa, Homo sapiens
  CDR3 for alpha chain variable domain of TCR clone 111279 (TRAV1-2, TRAJ9)
CAVLNTGGFKTIF

SEQ ID NO: 222558 - protein, 16 aa, Homo sapiens
  CDR3 for beta chain variable domain of TCR clone 111279 (TRBV19, TRBJ2-1)
CASSKAGPSSYNEQFF

SEQ ID NO: 222559 - protein, 13 aa, Homo sapiens
  CDR3 for alpha chain variable domain of TCR clone 111280 (TRAV29/DV5, TRAJ49)
CAASTNTGNQFYF

SEQ ID NO: 222560 - protein, 13 aa, Homo sapiens
  CDR3 for beta chain variable domain of TCR clone 111280 (TRBV7-2, TRBJ1-4)
CASSSAGLEKLFF

SEQ ID NO: 222561 - protein, 13 aa, Homo sapiens
  CDR3 for alpha chain variable domain of TCR clone 111281 (TRAV2, TRAJ15)
CAVASQAGTALIF

SEQ ID NO: 222562 - protein, 13 aa, Homo sapiens
  CDR3 for beta chain variable domain of TCR clone 111281 (TRBV7-7, TRBJ2-5)
CASSRSGQETQYF

SEQ ID NO: 222563 - protein, 18 aa, Homo sapiens
  CDR3 for alpha chain variable domain of TCR clone 111282 (TRAV26-1, TRAJ23)
CIVRVGLGVWNQGGKLIF

SEQ ID NO: 222564 - protein, 16 aa, Homo sapiens
  CDR3 for beta chain variable domain of TCR clone 111282 (TRBV12-4, TRBJ2-5)
CASSFFVWGRQETQYF

SEQ ID NO: 222565 - protein, 13 aa, Homo sapiens
  CDR3 for alpha chain variable domain of TCR clone 111283 (TRAV21, TRAJ8)
CAAPNTGFRKLVF

SEQ ID NO: 222566 - protein, 13 aa, Homo sapiens
  CDR3 for beta chain variable domain of TCR clone 111283 (TRBV6-3, TRBJ2-3)
CASTLQGIDTQYF

SEQ ID NO: 222567 - protein, 15 aa, Homo sapiens
  CDR3 for alpha chain variable domain of TCR clone 111284 (TRAV25, TRAJ52)
CAGTSGGTSYGKLTF

SEQ ID NO: 222568 - protein, 16 aa, Homo sapiens
  CDR3 for beta chain variable domain of TCR clone 111284 (TRBV15, TRBJ1-2)
CATSRGPRAGGGGYTF

SEQ ID NO: 222569 - protein, 13 aa, Homo sapiens
  CDR3 for alpha chain variable domain of TCR clone 111285 (TRAV12-2, TRAJ34)
CAVRGYNTDKLTF

SEQ ID NO: 222570 - protein, 15 aa, Homo sapiens
  CDR3 for beta chain variable domain of TCR clone 111285 (TRBV28, TRBJ2-1)
CASRTGAGVIARQFF

SEQ ID NO: 222571 - protein, 14 aa, Homo sapiens
  CDR3 for alpha chain variable domain of TCR clone 111286 (TRAV1-2, TRAJ16)
CAVNRFSDGQKLLF

SEQ ID NO: 222572 - protein, 15 aa, Homo sapiens
  CDR3 for beta chain variable domain of TCR clone 111286 (TRBV3-1, TRBJ2-5)
CASSAKLGGPETQYF

SEQ ID NO: 222573 - protein, 13 aa, Homo sapiens
  CDR3 for alpha chain variable domain of TCR clone 111287 (TRAV12-3, TRAJ4)
CNEQAGGYNKLIF

SEQ ID NO: 222574 - protein, 15 aa, Homo sapiens
  CDR3 for beta chain variable domain of TCR clone 111287 (TRBV5-1, TRBJ1-1)
CASSLSDRGGTEAFF

SEQ ID NO: 222575 - protein, 15 aa, Homo sapiens
  CDR3 for alpha chain variable domain of TCR clone 111288 (TRAV26-1, TRAJ48)
CIARWSWFGSEKLTF

SEQ ID NO: 222576 - protein, 12 aa, Homo sapiens
  CDR3 for beta chain variable domain of TCR clone 111288 (TRBV19, TRBJ2-5)
CASSISEETQYF

SEQ ID NO: 222577 - protein, 15 aa, Homo sapiens
  CDR3 for alpha chain variable domain of TCR clone 111289 (TRAV21, TRAJ53)
CATLDSGGSNYKLTF

SEQ ID NO: 222578 - protein, 16 aa, Homo sapiens
  CDR3 for beta chain variable domain of TCR clone 111289 (TRBV12-4, TRBJ1-5)
CASSRPVGGSNQPQHF

SEQ ID NO: 222579 - protein, 13 aa, Homo sapiens
  CDR3 for alpha chain variable domain of TCR clone 111290 (TRAV1-1, TRAJ9)
CAAKNTGGFKTFF

SEQ ID NO: 222580 - protein, 17 aa, Homo sapiens
  CDR3 for beta chain variable domain of TCR clone 111290 (TRBV13, TRBJ2-3)
CASSLSRVAGGRNTQYF

SEQ ID NO: 222581 - protein, 17 aa, Homo sapiens
  CDR3 for alpha chain variable domain of TCR clone 111291 (TRAV12-3, TRAJ6)
CAMSARGGAGGSYIPTF

SEQ ID NO: 222582 - protein, 12 aa, Homo sapiens
  CDR3 for beta chain variable domain of TCR clone 111291 (TRBV12-4, TRBJ2-3)
CASSTLADTQYF

SEQ ID NO: 222583 - protein, 11 aa, Homo sapiens
  CDR3 for alpha chain variable domain of TCR clone 111292 (TRAV12-2, TRAJ39)
CAVNNMLTFGG

SEQ ID NO: 222584 - protein, 13 aa, Homo sapiens
  CDR3 for beta chain variable domain of TCR clone 111292 (TRBV2, TRBJ2-5)
CASGTPYQETQYF

SEQ ID NO: 222585 - protein, 14 aa, Homo sapiens
  CDR3 for alpha chain variable domain of TCR clone 111293 (TRAV9-2, TRAJ38)
CALSNAGNNRKLIW

SEQ ID NO: 222586 - protein, 16 aa, Homo sapiens
  CDR3 for beta chain variable domain of TCR clone 111293 (TRBV12-5, TRBJ2-5)
CASGPRTSGNQETQYF

SEQ ID NO: 222587 - protein, 14 aa, Homo sapiens
  CDR3 for alpha chain variable domain of TCR clone 111294 (TRAV13-2, TRAJ17)
CAENSKAAGNKLTF

SEQ ID NO: 222588 - protein, 11 aa, Homo sapiens
  CDR3 for beta chain variable domain of TCR clone 111294 (TRBV6-3, TRBJ2-3)
CAAGQADTQYF

SEQ ID NO: 222589 - protein, 12 aa, Homo sapiens
  CDR3 for alpha chain variable domain of TCR clone 111295 (TRAV12-3, TRAJ17)
CAMTLTGNEITF

SEQ ID NO: 222590 - protein, 15 aa, Homo sapiens
  CDR3 for beta chain variable domain of TCR clone 111295 (TRBV20-1, TRBJ2-7)
CSARDRVSGMDEQYF

SEQ ID NO: 222591 - protein, 12 aa, Homo sapiens
  CDR3 for alpha chain variable domain of TCR clone 111296 (TRAV21, TRAJ42)
CAVGGSQGNLIF

SEQ ID NO: 222592 - protein, 19 aa, Homo sapiens
  CDR3 for beta chain variable domain of TCR clone 111296 (TRBV5-1, TRBJ2-3)
CVSSLTRIAADWSTDTQYF

SEQ ID NO: 222593 - protein, 14 aa, Homo sapiens
  CDR3 for alpha chain variable domain of TCR clone 111297 (TRAV29/DV5, TRAJ47)
CAASSIEYGNKLVF

SEQ ID NO: 222594 - protein, 15 aa, Homo sapiens
  CDR3 for beta chain variable domain of TCR clone 111297 (TRBV7-2, TRBJ1-1)
CASSFAGDRDTEAFF

SEQ ID NO: 222595 - protein, 14 aa, Homo sapiens
  CDR3 for alpha chain variable domain of TCR clone 111298 (TRAV1-2, TRAJ8)
CAVREDTGSQKLVF

SEQ ID NO: 222596 - protein, 12 aa, Homo sapiens
  CDR3 for beta chain variable domain of TCR clone 111298 (TRBV2, TRBJ2-1)
CAYGPPGNEQFF

SEQ ID NO: 222597 - protein, 14 aa, Homo sapiens
  CDR3 for alpha chain variable domain of TCR clone 111299 (TRAV23/DV6, TRAJ57)
CAAALKGGSEKLVF

SEQ ID NO: 222598 - protein, 12 aa, Homo sapiens
  CDR3 for beta chain variable domain of TCR clone 111299 (TRBV5-7, TRBJ1-2)
CASSLVQNGYTF

SEQ ID NO: 222599 - protein, 11 aa, Homo sapiens
  CDR3 for alpha chain variable domain of TCR clone 111300 (TRAV26-1, TRAJ47)
CIFFHGVWKQT

SEQ ID NO: 222600 - protein, 13 aa, Homo sapiens
  CDR3 for beta chain variable domain of TCR clone 111300 (TRBV24-1, TRBJ2-7)
CATSDLGPYEQYF

SEQ ID NO: 222601 - protein, 10 aa, Homo sapiens
  CDR3 for alpha chain variable domain of TCR clone 111301 (TRAV12-1, TRAJ49)
CVVNPNQFYF

SEQ ID NO: 222602 - protein, 13 aa, Homo sapiens
  CDR3 for beta chain variable domain of TCR clone 111301 (TRBV12-5, TRBJ2-3)
CASGDRQSDTQYF

SEQ ID NO: 222603 - protein, 18 aa, Homo sapiens
  CDR3 for alpha chain variable domain of TCR clone 111302 (TRAV13-1, TRAJ52)
CAASKRSAGGTSYGKLTF

SEQ ID NO: 222604 - protein, 14 aa, Homo sapiens
  CDR3 for beta chain variable domain of TCR clone 111302 (TRBV20-1, TRBJ2-7)
CSAKRGRSSYEQYF

SEQ ID NO: 222605 - protein, 14 aa, Homo sapiens
  CDR3 for alpha chain variable domain of TCR clone 111303 (TRAV16, TRAJ40)
CALHESYYLRNLQI

SEQ ID NO: 222606 - protein, 18 aa, Homo sapiens
  CDR3 for beta chain variable domain of TCR clone 111303 (TRBV4-1, TRBJ1-4)
CASSPRTGGAWTNEKLFF

SEQ ID NO: 222607 - protein, 13 aa, Homo sapiens
  CDR3 for alpha chain variable domain of TCR clone 111304 (TRAV3, TRAJ31)
CAVREGNNARLMF

SEQ ID NO: 222608 - protein, 13 aa, Homo sapiens
  CDR3 for beta chain variable domain of TCR clone 111304 (TRBV7-3, TRBJ1-1)
CASSQDWGAEAFF

SEQ ID NO: 222609 - protein, 17 aa, Homo sapiens
  CDR3 for alpha chain variable domain of TCR clone 111305 (TRAV3, TRAJ6)
CAVRDDPRAGGSYIPTF

SEQ ID NO: 222610 - protein, 14 aa, Homo sapiens
  CDR3 for beta chain variable domain of TCR clone 111305 (TRBV7-2, TRBJ2-7)
CASSPKTSFYEKYF

SEQ ID NO: 222611 - protein, 14 aa, Homo sapiens
  CDR3 for alpha chain variable domain of TCR clone 111306 (TRAV12-1, TRAJ3)
CVVNPGSSASKIIL

SEQ ID NO: 222612 - protein, 15 aa, Homo sapiens
  CDR3 for beta chain variable domain of TCR clone 111306 (TRBV5-7, TRBJ1-2)
CAGSSPGQGNYGYTF

SEQ ID NO: 222613 - protein, 17 aa, Homo sapiens
  CDR3 for alpha chain variable domain of TCR clone 111307 (TRAV3, TRAJ6)
CAVRDGPRAGGSYIPTF

SEQ ID NO: 222614 - protein, 16 aa, Homo sapiens
  CDR3 for beta chain variable domain of TCR clone 111307 (TRBV5-7, TRBJ1-2)
CASSRGVTGGSYGYTF

SEQ ID NO: 222615 - protein, 14 aa, Homo sapiens
  CDR3 for alpha chain variable domain of TCR clone 111308 (TRAV8-4, TRAJ48)
CAVSETVGNEKLTF

SEQ ID NO: 222616 - protein, 14 aa, Homo sapiens
  CDR3 for beta chain variable domain of TCR clone 111308 (TRBV13, TRBJ2-7)
CASSLKGASYEQYF

SEQ ID NO: 222617 - protein, 13 aa, Homo sapiens
  CDR3 for alpha chain variable domain of TCR clone 111309 (TRAV2, TRAJ40)
CAVVTSGTYKYIF

SEQ ID NO: 222618 - protein, 14 aa, Homo sapiens
  CDR3 for beta chain variable domain of TCR clone 111309 (TRBV20-1, TRBJ2-5)
CSARDGRAGETQYF

SEQ ID NO: 222619 - protein, 13 aa, Homo sapiens
  CDR3 for alpha chain variable domain of TCR clone 111310 (TRAV13-1, TRAJ37)
CAARSGNTGKLIF

SEQ ID NO: 222620 - protein, 14 aa, Homo sapiens
  CDR3 for beta chain variable domain of TCR clone 111310 (TRBV12-4, TRBJ2-3)
CASSLGQGTGTQYF

SEQ ID NO: 222621 - protein, 14 aa, Homo sapiens
  CDR3 for alpha chain variable domain of TCR clone 111311 (TRAV13-1, TRAJ3)
CAASKSSSAYKIIF

SEQ ID NO: 222622 - protein, 13 aa, Homo sapiens
  CDR3 for beta chain variable domain of TCR clone 111311 (TRBV25-1, TRBJ2-5)
CASSESGRETQYF

SEQ ID NO: 222623 - protein, 16 aa, Homo sapiens
  CDR3 for alpha chain variable domain of TCR clone 111312 (TRAV17, TRAJ22)
CATGPISSGSARQLTF

SEQ ID NO: 222624 - protein, 13 aa, Homo sapiens
  CDR3 for beta chain variable domain of TCR clone 111312 (TRBV7-9, TRBJ2-7)
CASSLATVGEQYF

SEQ ID NO: 222625 - protein, 14 aa, Homo sapiens
  CDR3 for alpha chain variable domain of TCR clone 111313 (TRAV12-3, TRAJ10)
SHLPLTGGGNKLTF

SEQ ID NO: 222626 - protein, 13 aa, Homo sapiens
  CDR3 for beta chain variable domain of TCR clone 111313 (TRBV9, TRBJ2-1)
CASSPSGGSEQFF

SEQ ID NO: 222627 - protein, 15 aa, Homo sapiens
  CDR3 for alpha chain variable domain of TCR clone 111314 (TRAV26-2, TRAJ57)
CILREIRGGSEKLVF

SEQ ID NO: 222628 - protein, 15 aa, Homo sapiens
  CDR3 for beta chain variable domain of TCR clone 111314 (TRBV2, TRBJ2-1)
CASDIGLAGEGEQFF

SEQ ID NO: 222629 - protein, 13 aa, Homo sapiens
  CDR3 for alpha chain variable domain of TCR clone 111315 (TRAV26-1, TRAJ36)
CIVVGTGANNLFF

SEQ ID NO: 222630 - protein, 13 aa, Homo sapiens
  CDR3 for beta chain variable domain of TCR clone 111315 (TRBV6-5, TRBJ2-6)
CASSTSVPLRLDF

SEQ ID NO: 222631 - protein, 13 aa, Homo sapiens
  CDR3 for alpha chain variable domain of TCR clone 111316 (TRAV1-2, TRAJ9)
CAALNTGGFKTIF

SEQ ID NO: 222632 - protein, 17 aa, Homo sapiens
  CDR3 for beta chain variable domain of TCR clone 111316 (TRBV7-3, TRBJ2-2)
CASSLSGTSGGTGELFF

SEQ ID NO: 222633 - protein, 16 aa, Homo sapiens
  CDR3 for alpha chain variable domain of TCR clone 111317 (TRAV16, TRAJ52)
CALSAAGGTSYGKLTF

SEQ ID NO: 222634 - protein, 14 aa, Homo sapiens
  CDR3 for beta chain variable domain of TCR clone 111317 (TRBV4-2, TRBJ2-3)
CASSQERGTDTQYF

SEQ ID NO: 222635 - protein, 17 aa, Homo sapiens
  CDR3 for alpha chain variable domain of TCR clone 111318 (TRAV26-2, TRAJ42)
CILRDVVYGGSQGNLIF

SEQ ID NO: 222636 - protein, 16 aa, Homo sapiens
  CDR3 for beta chain variable domain of TCR clone 111318 (TRBV12-4, TRBJ2-7)
CASSLIGGTGTYEQYF

SEQ ID NO: 222637 - protein, 12 aa, Homo sapiens
  CDR3 for alpha chain variable domain of TCR clone 111319 (TRAV12-2, TRAJ44)
CADTGTASKLTF

SEQ ID NO: 222638 - protein, 17 aa, Homo sapiens
  CDR3 for beta chain variable domain of TCR clone 111319 (TRBV20-1, TRBJ1-1)
CSARGTGGSYGNTGAVF

SEQ ID NO: 222639 - protein, 13 aa, Homo sapiens
  CDR3 for alpha chain variable domain of TCR clone 111320 (TRAV1-2, TRAJ9)
CAALNTGGFKTIF

SEQ ID NO: 222640 - protein, 12 aa, Homo sapiens
  CDR3 for beta chain variable domain of TCR clone 111320 (TRBV11-2, TRBJ2-5)
CASSLGQETQYF

SEQ ID NO: 222641 - protein, 14 aa, Homo sapiens
  CDR3 for alpha chain variable domain of TCR clone 111321 (TRAV12-3, TRAJ10)
SHPPLTGGGNKLTF

SEQ ID NO: 222642 - protein, 15 aa, Homo sapiens
  CDR3 for beta chain variable domain of TCR clone 111321 (TRBV7-9, TRBJ1-4)
CASSRTGGFNEKLFF

SEQ ID NO: 222643 - protein, 13 aa, Homo sapiens
  CDR3 for alpha chain variable domain of TCR clone 111322 (TRAV17, TRAJ5)
CAPMDTGRRALTF

SEQ ID NO: 222644 - protein, 13 aa, Homo sapiens
  CDR3 for beta chain variable domain of TCR clone 111322 (TRBV7-9, TRBJ1-2)
CASSLKQNYGYSF

SEQ ID NO: 222645 - protein, 13 aa, Homo sapiens
  CDR3 for alpha chain variable domain of TCR clone 111323 (TRAV21, TRAJ36)
CAVIKPGANNLFF

SEQ ID NO: 222646 - protein, 13 aa, Homo sapiens
  CDR3 for beta chain variable domain of TCR clone 111323 (TRBV29-1, TRBJ2-3)
CSATRGGRDTQYF

SEQ ID NO: 222647 - protein, 10 aa, Homo sapiens
  CDR3 for alpha chain variable domain of TCR clone 111324 (TRAV16, TRAJ22)
SAMYIRQLTF

SEQ ID NO: 222648 - protein, 15 aa, Homo sapiens
  CDR3 for beta chain variable domain of TCR clone 111324 (TRBV7-9, TRBJ1-6)
CASSSPGRGNSPLHF

SEQ ID NO: 222649 - protein, 11 aa, Homo sapiens
  CDR3 for alpha chain variable domain of TCR clone 111325 (TRAV21, TRAJ34)
CAVTNTDKLIF

SEQ ID NO: 222650 - protein, 15 aa, Homo sapiens
  CDR3 for beta chain variable domain of TCR clone 111325 (TRBV6-3, TRBJ2-7)
CASSSPGTVFYEQYF

SEQ ID NO: 222651 - protein, 14 aa, Homo sapiens
  CDR3 for alpha chain variable domain of TCR clone 111326 (TRAV1-2, TRAJ8)
CAVREDTGFQKLVF

SEQ ID NO: 222652 - protein, 15 aa, Homo sapiens
  CDR3 for beta chain variable domain of TCR clone 111326 (TRBV28, TRBJ2-5)
CASSSGRVIQETQYF

SEQ ID NO: 222653 - protein, 14 aa, Homo sapiens
  CDR3 for alpha chain variable domain of TCR clone 111327 (TRAV12-2, TRAJ45)
CAVNKGGGADGRTF

SEQ ID NO: 222654 - protein, 14 aa, Homo sapiens
  CDR3 for beta chain variable domain of TCR clone 111327 (TRBV20-1, TRBJ1-1)
CSAMGGTANTEAFF

SEQ ID NO: 222655 - protein, 13 aa, Homo sapiens
  CDR3 for alpha chain variable domain of TCR clone 111328 (TRAV13-1, TRAJ21)
CAASIYNFNKFYF

SEQ ID NO: 222656 - protein, 15 aa, Homo sapiens
  CDR3 for beta chain variable domain of TCR clone 111328 (TRBV5-1, TRBJ2-7)
CASSPQGRPLDEQYF

SEQ ID NO: 222657 - protein, 17 aa, Homo sapiens
  CDR3 for alpha chain variable domain of TCR clone 111329 (TRAV26-1, TRAJ53)
CIVRVDDSGGSNYKLTF

SEQ ID NO: 222658 - protein, 15 aa, Homo sapiens
  CDR3 for beta chain variable domain of TCR clone 111329 (TRBV6-3, TRBJ2-7)
CASSSPGTVFYEQYF

SEQ ID NO: 222659 - protein, 13 aa, Homo sapiens
  CDR3 for alpha chain variable domain of TCR clone 111330 (TRAV2, TRAJ40)
CAVVTSGTYKYIF

SEQ ID NO: 222660 - protein, 15 aa, Homo sapiens
  CDR3 for beta chain variable domain of TCR clone 111330 (TRBV4-1, TRBJ2-3)
CASSQDRLPPDTQYF

SEQ ID NO: 222661 - protein, 14 aa, Homo sapiens
  CDR3 for alpha chain variable domain of TCR clone 111331 (TRAV35, TRAJ24)
CAGPRRDSWGKLQC

SEQ ID NO: 222662 - protein, 12 aa, Homo sapiens
  CDR3 for beta chain variable domain of TCR clone 111331 (TRBV12-4, TRBJ2-3)
CASSLGQDTQYF

SEQ ID NO: 222663 - protein, 13 aa, Homo sapiens
  CDR3 for alpha chain variable domain of TCR clone 111332 (TRAV13-2, TRAJ53)
CAENMGSNYKLTF

SEQ ID NO: 222664 - protein, 15 aa, Homo sapiens
  CDR3 for beta chain variable domain of TCR clone 111332 (TRBV20-1, TRBJ1-1)
CSASREVTGNTEAFF

SEQ ID NO: 222665 - protein, 13 aa, Homo sapiens
  CDR3 for alpha chain variable domain of TCR clone 111333 (TRAV12-2, TRAJ39)
CAVNNNAGNMLTF

SEQ ID NO: 222666 - protein, 17 aa, Homo sapiens
  CDR3 for beta chain variable domain of TCR clone 111333 (TRBV7-3, TRBJ2-2)
CASSLSGTSGGTGELFF

SEQ ID NO: 222667 - protein, 14 aa, Homo sapiens
  CDR3 for alpha chain variable domain of TCR clone 111334 (TRAV1-2, TRAJ16)
CAVNRFSDGQKLLF

SEQ ID NO: 222668 - protein, 14 aa, Homo sapiens
  CDR3 for beta chain variable domain of TCR clone 111334 (TRBV19, TRBJ1-4)
CASSINRGGEKLFF

SEQ ID NO: 222669 - protein, 14 aa, Homo sapiens
  CDR3 for alpha chain variable domain of TCR clone 111335 (TRAV17, TRAJ31)
CATVLRNNNARLMF

SEQ ID NO: 222670 - protein, 15 aa, Homo sapiens
  CDR3 for beta chain variable domain of TCR clone 111335 (TRBV7-2, TRBJ2-1)
CASTHGTGIYNEQFF

SEQ ID NO: 222671 - protein, 16 aa, Homo sapiens
  CDR3 for alpha chain variable domain of TCR clone 111336 (TRAV30, TRAJ24)
CGTEIVDADSWGKFQF

SEQ ID NO: 222672 - protein, 12 aa, Homo sapiens
  CDR3 for beta chain variable domain of TCR clone 111336 (TRBV7-2, TRBJ1-2)
CASRDSIYGYTF

SEQ ID NO: 222673 - protein, 13 aa, Homo sapiens
  CDR3 for alpha chain variable domain of TCR clone 111337 (TRAV13-1, TRAJ5)
CAASDTRRRALTF

SEQ ID NO: 222674 - protein, 12 aa, Homo sapiens
  CDR3 for beta chain variable domain of TCR clone 111337 (TRBV28, TRBJ2-3)
CASSLYRDTQYF

SEQ ID NO: 222675 - protein, 18 aa, Homo sapiens
  CDR3 for alpha chain variable domain of TCR clone 111338 (TRAV21, TRAJ52)
CAVRHSPAGGTSYGKLTF

SEQ ID NO: 222676 - protein, 14 aa, Homo sapiens
  CDR3 for beta chain variable domain of TCR clone 111338 (TRBV4-1, TRBJ2-2)
CASSQAVNTGELFF

SEQ ID NO: 222677 - protein, 12 aa, Homo sapiens
  CDR3 for alpha chain variable domain of TCR clone 111339 (TRAV12-3, TRAJ42)
YAPGGSQGNLIF

SEQ ID NO: 222678 - protein, 13 aa, Homo sapiens
  CDR3 for beta chain variable domain of TCR clone 111339 (TRBV5-7, TRBJ2-6)
CASTSSGANVLTF

SEQ ID NO: 222679 - protein, 13 aa, Homo sapiens
  CDR3 for alpha chain variable domain of TCR clone 111340 (TRAV2, TRAJ20)
RAVEDPSEYKLSF

SEQ ID NO: 222680 - protein, 16 aa, Homo sapiens
  CDR3 for beta chain variable domain of TCR clone 111340 (TRBV25-1, TRBJ2-7)
CASSELTGGGIYEQYF

SEQ ID NO: 222681 - protein, 14 aa, Homo sapiens
  CDR3 for alpha chain variable domain of TCR clone 111341 (TRAV3, TRAJ23)
CAVRARGTPTSSSL

SEQ ID NO: 222682 - protein, 20 aa, Homo sapiens
  CDR3 for beta chain variable domain of TCR clone 111341 (TRBV7-8, TRBJ2-2)
CASSHLFPGPTVHITGELFF

SEQ ID NO: 222683 - protein, 15 aa, Homo sapiens
  CDR3 for alpha chain variable domain of TCR clone 111342 (TRAV8-3, TRAJ13)
CAVAPNSGGYQKVTF

SEQ ID NO: 222684 - protein, 17 aa, Homo sapiens
  CDR3 for beta chain variable domain of TCR clone 111342 (TRBV19, TRBJ1-5)
CASSPGRTFYSNQPQHF

SEQ ID NO: 222685 - protein, 16 aa, Homo sapiens
  CDR3 for alpha chain variable domain of TCR clone 111343 (TRAV12-1, TRAJ8)
CVVNGRGNTGFQKLGF

SEQ ID NO: 222686 - protein, 15 aa, Homo sapiens
  CDR3 for beta chain variable domain of TCR clone 111343 (TRBV6-1, TRBJ1-2)
CASNPGRGGSYGYTF

SEQ ID NO: 222687 - protein, 12 aa, Homo sapiens
  CDR3 for alpha chain variable domain of TCR clone 111344 (TRAV12-3, TRAJ17)
CAMTLTGNKLTF

SEQ ID NO: 222688 - protein, 14 aa, Homo sapiens
  CDR3 for beta chain variable domain of TCR clone 111344 (TRBV19, TRBJ2-3)
CASSPSGATDTQYF

SEQ ID NO: 222689 - protein, 12 aa, Homo sapiens
  CDR3 for alpha chain variable domain of TCR clone 111345 (TRAV12-3, TRAJ40)
WAMSSGTYKYIF

SEQ ID NO: 222690 - protein, 13 aa, Homo sapiens
  CDR3 for beta chain variable domain of TCR clone 111345 (TRBV27, TRBJ1-1)
CASSLSIGAEAFF

SEQ ID NO: 222691 - protein, 14 aa, Homo sapiens
  CDR3 for alpha chain variable domain of TCR clone 111346 (TRAV12-2, TRAJ24)
CAVTPADSWGRLQF

SEQ ID NO: 222692 - protein, 12 aa, Homo sapiens
  CDR3 for beta chain variable domain of TCR clone 111346 (TRBV3-1, TRBJ2-1)
CASSQGSSGQFF

SEQ ID NO: 222693 - protein, 15 aa, Homo sapiens
  CDR3 for alpha chain variable domain of TCR clone 111347 (TRAV8-3, TRAJ45)
CASSYSGGGADGLTF

SEQ ID NO: 222694 - protein, 15 aa, Homo sapiens
  CDR3 for beta chain variable domain of TCR clone 111347 (TRBV7-3, TRBJ2-2)
CASSETGQGTGELFF

SEQ ID NO: 222695 - protein, 14 aa, Homo sapiens
  CDR3 for alpha chain variable domain of TCR clone 111348 (TRAV16, TRAJ33)
CALSAMDSNYQLIW

SEQ ID NO: 222696 - protein, 12 aa, Homo sapiens
  CDR3 for beta chain variable domain of TCR clone 111348 (TRBV5-1, TRBJ1-2)
CASSQDTYCYTF

SEQ ID NO: 222697 - protein, 15 aa, Homo sapiens
  CDR3 for alpha chain variable domain of TCR clone 111349 (TRAV21, TRAJ53)
CSTLNSGGSNYKLTF

SEQ ID NO: 222698 - protein, 16 aa, Homo sapiens
  CDR3 for beta chain variable domain of TCR clone 111349 (TRBV9, TRBJ2-1)
CASSVGGGGNYNEQFF

SEQ ID NO: 222699 - protein, 16 aa, Homo sapiens
  CDR3 for alpha chain variable domain of TCR clone 111350 (TRAV26-2, TRAJ57)
CILRDVGPGGSEKLVF

SEQ ID NO: 222700 - protein, 13 aa, Homo sapiens
  CDR3 for beta chain variable domain of TCR clone 111350 (TRBV18, TRBJ2-3)
CASSPGVTDTQYF

SEQ ID NO: 222701 - protein, 17 aa, Homo sapiens
  CDR3 for alpha chain variable domain of TCR clone 111351 (TRAV3, TRAJ6)
CAVRDGPRAGGSYIPTF

SEQ ID NO: 222702 - protein, 14 aa, Homo sapiens
  CDR3 for beta chain variable domain of TCR clone 111351 (TRBV19, TRBJ2-1)
CASPTFVLSGEQSF

SEQ ID NO: 222703 - protein, 13 aa, Homo sapiens
  CDR3 for alpha chain variable domain of TCR clone 111352 (TRAV13-2, TRAJ8)
CAFMNTGFQKLVF

SEQ ID NO: 222704 - protein, 12 aa, Homo sapiens
  CDR3 for beta chain variable domain of TCR clone 111352 (TRBV7-8, TRBJ2-7)
CASSLGDREQYF

SEQ ID NO: 222705 - protein, 14 aa, Homo sapiens
  CDR3 for alpha chain variable domain of TCR clone 111353 (TRAV26-2, TRAJ32)
CILFRGGATNKLIF

SEQ ID NO: 222706 - protein, 15 aa, Homo sapiens
  CDR3 for beta chain variable domain of TCR clone 111353 (TRBV2, TRBJ2-2)
CASSGFGAGTGELAF

SEQ ID NO: 222707 - protein, 14 aa, Homo sapiens
  CDR3 for alpha chain variable domain of TCR clone 111354 (TRAV12-1, TRAJ22)
CVVTTSGSARQLTF

SEQ ID NO: 222708 - protein, 16 aa, Homo sapiens
  CDR3 for beta chain variable domain of TCR clone 111354 (TRBV19, TRBJ2-2)
CASRSPGTGATGELFF

SEQ ID NO: 222709 - protein, 14 aa, Homo sapiens
  CDR3 for alpha chain variable domain of TCR clone 111355 (TRAV12-2, TRAJ17)
CAVNIKAAGHKLTF

SEQ ID NO: 222710 - protein, 16 aa, Homo sapiens
  CDR3 for beta chain variable domain of TCR clone 111355 (TRBV20-1, TRBJ2-6)
CSASSQGYDGANVLTF

SEQ ID NO: 222711 - protein, 13 aa, Homo sapiens
  CDR3 for alpha chain variable domain of TCR clone 111356 (TRAV20, TRAJ21)
CAVEGYNFNKFYF

SEQ ID NO: 222712 - protein, 14 aa, Homo sapiens
  CDR3 for beta chain variable domain of TCR clone 111356 (TRBV3-1, TRBJ2-5)
CASSQGPDQENQYF

SEQ ID NO: 222713 - protein, 14 aa, Homo sapiens
  CDR3 for alpha chain variable domain of TCR clone 111357 (TRAV30, TRAJ26)
CGTEIVSYGQNFVF

SEQ ID NO: 222714 - protein, 17 aa, Homo sapiens
  CDR3 for beta chain variable domain of TCR clone 111357 (TRBV7-8, TRBJ2-6)
CASSAGTGGAGANVLTF

SEQ ID NO: 222715 - protein, 14 aa, Homo sapiens
  CDR3 for alpha chain variable domain of TCR clone 111358 (TRAV21, TRAJ12)
CAVRHGDSSYKLIF

SEQ ID NO: 222716 - protein, 14 aa, Homo sapiens
  CDR3 for beta chain variable domain of TCR clone 111358 (TRBV7-6, TRBJ2-7)
CASSLTGTGNEQYF

SEQ ID NO: 222717 - protein, 12 aa, Homo sapiens
  CDR3 for alpha chain variable domain of TCR clone 111359 (TRAV1-2, TRAJ17)
CAVRAAGNKLTF

SEQ ID NO: 222718 - protein, 16 aa, Homo sapiens
  CDR3 for beta chain variable domain of TCR clone 111359 (TRBV20-1, TRBJ2-1)
CSAPGLAGSDSDEQFF

SEQ ID NO: 222719 - protein, 14 aa, Homo sapiens
  CDR3 for alpha chain variable domain of TCR clone 111360 (TRAV27, TRAJ13)
CRSSNSRGYQKVTF

SEQ ID NO: 222720 - protein, 13 aa, Homo sapiens
  CDR3 for beta chain variable domain of TCR clone 111360 (TRBV7-6, TRBJ2-1)
CQQLGGGADEQFF

SEQ ID NO: 222721 - protein, 14 aa, Homo sapiens
  CDR3 for alpha chain variable domain of TCR clone 111361 (TRAV27, TRAJ44)
CPRRNTGTASKLTF

SEQ ID NO: 222722 - protein, 14 aa, Homo sapiens
  CDR3 for beta chain variable domain of TCR clone 111361 (TRBV7-8, TRBJ2-3)
CASSFPDGQDTQYF

SEQ ID NO: 222723 - protein, 14 aa, Homo sapiens
  CDR3 for alpha chain variable domain of TCR clone 111362 (TRAV26-1, TRAJ34)
CIVRVAYNADKLIF

SEQ ID NO: 222724 - protein, 14 aa, Homo sapiens
  CDR3 for beta chain variable domain of TCR clone 111362 (TRBV20-1, TRBJ2-7)
CSAWTALSSYEQYF

SEQ ID NO: 222725 - protein, 16 aa, Homo sapiens
  CDR3 for alpha chain variable domain of TCR clone 111363 (TRAV30, TRAJ24)
CGTEIVDADSCGKFQF

SEQ ID NO: 222726 - protein, 13 aa, Homo sapiens
  CDR3 for beta chain variable domain of TCR clone 111363 (TRBV10-3, TRBJ2-7)
CASKLAVNYEQYF

SEQ ID NO: 222727 - protein, 13 aa, Homo sapiens
  CDR3 for alpha chain variable domain of TCR clone 111364 (TRAV12-2, TRAJ20)
CAVYPSNDYKLSF

SEQ ID NO: 222728 - protein, 15 aa, Homo sapiens
  CDR3 for beta chain variable domain of TCR clone 111364 (TRBV27, TRBJ2-5)
CASSLYPREGETQYF

SEQ ID NO: 222729 - protein, 13 aa, Homo sapiens
  CDR3 for alpha chain variable domain of TCR clone 111365 (TRAV8-6, TRAJ20)
CAVSYSNDYKLSF

SEQ ID NO: 222730 - protein, 12 aa, Homo sapiens
  CDR3 for beta chain variable domain of TCR clone 111365 (TRBV7-8, TRBJ2-7)
CASSLGDREQYF

SEQ ID NO: 222731 - protein, 14 aa, Homo sapiens
  CDR3 for alpha chain variable domain of TCR clone 111366 (TRAV8-1, TRAJ23)
CAVGTYNQGGKLIS

SEQ ID NO: 222732 - protein, 16 aa, Homo sapiens
  CDR3 for beta chain variable domain of TCR clone 111366 (TRBV18, TRBJ1-5)
CASSPSTGNSNQPQHS

SEQ ID NO: 222733 - protein, 12 aa, Homo sapiens
  CDR3 for alpha chain variable domain of TCR clone 111367 (TRAV2, TRAJ9)
CAVGGGGFKTIF

SEQ ID NO: 222734 - protein, 16 aa, Homo sapiens
  CDR3 for beta chain variable domain of TCR clone 111367 (TRBV13, TRBJ2-2)
CASSPRTGEHTGELFF

SEQ ID NO: 222735 - protein, 15 aa, Homo sapiens
  CDR3 for alpha chain variable domain of TCR clone 111368 (TRAV4, TRAJ36)
CLVGDRQTGANNLFF

SEQ ID NO: 222736 - protein, 15 aa, Homo sapiens
  CDR3 for beta chain variable domain of TCR clone 111368 (TRBV7-6, TRBJ2-1)
CASGSLAGEGNEQFF

SEQ ID NO: 222737 - protein, 13 aa, Homo sapiens
  CDR3 for alpha chain variable domain of TCR clone 111369 (TRAV13-1, TRAJ6)
CAASSGGSYIPPF

SEQ ID NO: 222738 - protein, 15 aa, Homo sapiens
  CDR3 for beta chain variable domain of TCR clone 111369 (TRBV12-4, TRBJ2-5)
CASSPPTGLQETQYF

SEQ ID NO: 222739 - protein, 13 aa, Homo sapiens
  CDR3 for alpha chain variable domain of TCR clone 111370 (TRAV27, TRAJ54)
CAVAGQGAQKLVF

SEQ ID NO: 222740 - protein, 15 aa, Homo sapiens
  CDR3 for beta chain variable domain of TCR clone 111370 (TRBV18, TRBJ2-6)
CASSPSYAGANVLTF

SEQ ID NO: 222741 - protein, 16 aa, Homo sapiens
  CDR3 for alpha chain variable domain of TCR clone 111371 (TRAV20, TRAJ10)
CAVLRGLTGGGNKRTF

SEQ ID NO: 222742 - protein, 14 aa, Homo sapiens
  CDR3 for beta chain variable domain of TCR clone 111371 (TRBV19, TRBJ1-5)
CASRAPDSFLSQHF

SEQ ID NO: 222743 - protein, 14 aa, Homo sapiens
  CDR3 for alpha chain variable domain of TCR clone 111372 (TRAV12-2, TRAJ40)
CAVKIPSGTYKYIF

SEQ ID NO: 222744 - protein, 14 aa, Homo sapiens
  CDR3 for beta chain variable domain of TCR clone 111372 (TRBV4-1, TRBJ2-3)
CASSQEGSTDTQYF

SEQ ID NO: 222745 - protein, 12 aa, Homo sapiens
  CDR3 for alpha chain variable domain of TCR clone 111373 (TRAV2, TRAJ9)
CAVGAGGFKTIF

SEQ ID NO: 222746 - protein, 16 aa, Homo sapiens
  CDR3 for beta chain variable domain of TCR clone 111373 (TRBV12-4, TRBJ2-7)
CASSLIGGTGTYEQYF

SEQ ID NO: 222747 - protein, 15 aa, Homo sapiens
  CDR3 for alpha chain variable domain of TCR clone 111374 (TRAV26-1, TRAJ44)
CIVRIGTGTASKLTF

SEQ ID NO: 222748 - protein, 15 aa, Homo sapiens
  CDR3 for beta chain variable domain of TCR clone 111374 (TRBV7-6, TRBJ2-1)
CAGSSLAGEGNEQLF

SEQ ID NO: 222749 - protein, 15 aa, Homo sapiens
  CDR3 for alpha chain variable domain of TCR clone 111375 (TRAV17, TRAJ57)
CATGPSQGGSEKLVF

SEQ ID NO: 222750 - protein, 16 aa, Homo sapiens
  CDR3 for beta chain variable domain of TCR clone 111375 (TRBV12-4, TRBJ1-5)
CAGSRPVGRSNQPQHF

SEQ ID NO: 222751 - protein, 17 aa, Homo sapiens
  CDR3 for alpha chain variable domain of TCR clone 111376 (TRAV27, TRAJ42)
CAERVIYYGGSQGNLIF

SEQ ID NO: 222752 - protein, 14 aa, Homo sapiens
  CDR3 for beta chain variable domain of TCR clone 111376 (TRBV7-2, TRBJ2-3)
CASSLGGGRDTQYF

SEQ ID NO: 222753 - protein, 16 aa, Homo sapiens
  CDR3 for alpha chain variable domain of TCR clone 111377 (TRAV17, TRAJ28)
CATASVSGAGSYQLTF

SEQ ID NO: 222754 - protein, 11 aa, Homo sapiens
  CDR3 for beta chain variable domain of TCR clone 111377 (TRBV7-9, TRBJ2-5)
CASSVGETQYF

SEQ ID NO: 222755 - protein, 11 aa, Homo sapiens
  CDR3 for alpha chain variable domain of TCR clone 111378 (TRAV25, TRAJ39)
CENNAGNMLTF

SEQ ID NO: 222756 - protein, 13 aa, Homo sapiens
  CDR3 for beta chain variable domain of TCR clone 111378 (TRBV5-5, TRBJ1-2)
CASSFWRGEDYTF

SEQ ID NO: 222757 - protein, 12 aa, Homo sapiens
  CDR3 for alpha chain variable domain of TCR clone 111379 (TRAV17, TRAJ26)
CATGNYGQNFVF

SEQ ID NO: 222758 - protein, 13 aa, Homo sapiens
  CDR3 for beta chain variable domain of TCR clone 111379 (TRBV18, TRBJ2-3)
CASSPGVTDTQYF

SEQ ID NO: 222759 - protein, 16 aa, Homo sapiens
  CDR3 for alpha chain variable domain of TCR clone 111380 (TRAV12-3, TRAJ53)
CAMSPGSGGSNYKLTF

SEQ ID NO: 222760 - protein, 12 aa, Homo sapiens
  CDR3 for beta chain variable domain of TCR clone 111380 (TRBV11-2, TRBJ2-5)
CASSLGQETQYF

SEQ ID NO: 222761 - protein, 12 aa, Homo sapiens
  CDR3 for alpha chain variable domain of TCR clone 111381 (TRAV12-1, TRAJ40)
CVVPSGTYKYIF

SEQ ID NO: 222762 - protein, 15 aa, Homo sapiens
  CDR3 for beta chain variable domain of TCR clone 111381 (TRBV12-4, TRBJ2-1)
CAGSPLSGRNSEQSF

SEQ ID NO: 222763 - protein, 18 aa, Homo sapiens
  CDR3 for alpha chain variable domain of TCR clone 111382 (TRAV8-4, TRAJ52)
CAVTRANAGGTSYGKLTF

SEQ ID NO: 222764 - protein, 16 aa, Homo sapiens
  CDR3 for beta chain variable domain of TCR clone 111382 (TRBV9, TRBJ1-2)
CASSVEEKVSPYGYTF

SEQ ID NO: 222765 - protein, 10 aa, Homo sapiens
  CDR3 for alpha chain variable domain of TCR clone 111383 (TRAV30, TRAJ48)
CGIGNETLTF

SEQ ID NO: 222766 - protein, 14 aa, Homo sapiens
  CDR3 for beta chain variable domain of TCR clone 111383 (TRBV7-6, TRBJ2-3)
CASSVAGGTDTQYF

SEQ ID NO: 222767 - protein, 16 aa, Homo sapiens
  CDR3 for alpha chain variable domain of TCR clone 111384 (TRAV30, TRAJ24)
CGAEIVDADSWGKFQV

SEQ ID NO: 222768 - protein, 14 aa, Homo sapiens
  CDR3 for beta chain variable domain of TCR clone 111384 (TRBV12-5, TRBJ2-5)
CASGSRTHQETQYF

SEQ ID NO: 222769 - protein, 13 aa, Homo sapiens
  CDR3 for alpha chain variable domain of TCR clone 111385 (TRAV8-3, TRAJ28)
CAVGAVASYQLTF

SEQ ID NO: 222770 - protein, 14 aa, Homo sapiens
  CDR3 for beta chain variable domain of TCR clone 111385 (TRBV7-2, TRBJ2-7)
CASRSQGAAYEQYF

SEQ ID NO: 222771 - protein, 17 aa, Homo sapiens
  CDR3 for alpha chain variable domain of TCR clone 111386 (TRAV4, )
CLVDIQNPDPAVYHLRD

SEQ ID NO: 222772 - protein, 15 aa, Homo sapiens
  CDR3 for beta chain variable domain of TCR clone 111386 (TRBV20-1, TRBJ1-5)
CSARVGRVVSQPQHF

SEQ ID NO: 222773 - protein, 13 aa, Homo sapiens
  CDR3 for alpha chain variable domain of TCR clone 111387 (TRAV38-1, TRAJ42)
CARWGGSQGNLIF

SEQ ID NO: 222774 - protein, 17 aa, Homo sapiens
  CDR3 for beta chain variable domain of TCR clone 111387 (TRBV20-1, TRBJ2-1)
CSARDPLTGVWDNEQFF

SEQ ID NO: 222775 - protein, 16 aa, Homo sapiens
  CDR3 for alpha chain variable domain of TCR clone 111388 (TRAV30, TRAJ24)
CGPEIVDADSWGKFQF

SEQ ID NO: 222776 - protein, 14 aa, Homo sapiens
  CDR3 for beta chain variable domain of TCR clone 111388 (TRBV12-5, TRBJ2-5)
CASGSRTHQGTQYF

SEQ ID NO: 222777 - protein, 14 aa, Homo sapiens
  CDR3 for alpha chain variable domain of TCR clone 111389 (TRAV1-1, TRAJ27)
CAVIYNTNAGKSTF

SEQ ID NO: 222778 - protein, 15 aa, Homo sapiens
  CDR3 for beta chain variable domain of TCR clone 111389 (TRBV7-2, TRBJ2-1)
CASSSGLEGGNEQFF

SEQ ID NO: 222779 - protein, 17 aa, Homo sapiens
  CDR3 for alpha chain variable domain of TCR clone 111390 (TRAV3, TRAJ38)
CAVRDCLNAGKNRKLIW

SEQ ID NO: 222780 - protein, 14 aa, Homo sapiens
  CDR3 for beta chain variable domain of TCR clone 111390 (TRBV12-5, TRBJ2-5)
CASGSRTHQETQYF

SEQ ID NO: 222781 - protein, 14 aa, Homo sapiens
  CDR3 for alpha chain variable domain of TCR clone 111391 (TRAV1-2, TRAJ16)
CAVNRFSDGQKLHF

SEQ ID NO: 222782 - protein, 11 aa, Homo sapiens
  CDR3 for beta chain variable domain of TCR clone 111391 (TRBV29-1, TRBJ2-5)
CSEDRTGTQYF

SEQ ID NO: 222783 - protein, 13 aa, Homo sapiens
  CDR3 for alpha chain variable domain of TCR clone 111392 (TRAV8-3, TRAJ37)
CAVPASNTGKLIF

SEQ ID NO: 222784 - protein, 12 aa, Homo sapiens
  CDR3 for beta chain variable domain of TCR clone 111392 (TRBV11-2, TRBJ2-1)
CASSPGNNEQFF

SEQ ID NO: 222785 - protein, 17 aa, Homo sapiens
  CDR3 for alpha chain variable domain of TCR clone 111393 (TRAV3, TRAJ6)
CAVRDGPRAGGSYITTF

SEQ ID NO: 222786 - protein, 15 aa, Homo sapiens
  CDR3 for beta chain variable domain of TCR clone 111393 (TRBV20-1, TRBJ1-1)
CSASWDRFLNTEAFF

SEQ ID NO: 222787 - protein, 15 aa, Homo sapiens
  CDR3 for alpha chain variable domain of TCR clone 111394 (TRAV25, TRAJ52)
CAGTSGGTSYGKLTF

SEQ ID NO: 222788 - protein, 16 aa, Homo sapiens
  CDR3 for beta chain variable domain of TCR clone 111394 (TRBV15, TRBJ1-2)
CATSRVPRTGGGGYTF

SEQ ID NO: 222789 - protein, 17 aa, Homo sapiens
  CDR3 for alpha chain variable domain of TCR clone 111395 (TRAV3, TRAJ6)
CAVRDGPRAGGSYIPTF

SEQ ID NO: 222790 - protein, 15 aa, Homo sapiens
  CDR3 for beta chain variable domain of TCR clone 111395 (TRBV5-1, TRBJ2-7)
CASSLYPDGGYEQYF

SEQ ID NO: 222791 - protein, 13 aa, Homo sapiens
  CDR3 for alpha chain variable domain of TCR clone 111396 (TRAV12-1, TRAJ6)
CVVFPWGSYIPTF

SEQ ID NO: 222792 - protein, 14 aa, Homo sapiens
  CDR3 for beta chain variable domain of TCR clone 111396 (TRBV20-1, TRBJ1-3)
CSASPTGAGNTIYF

SEQ ID NO: 222793 - protein, 12 aa, Homo sapiens
  CDR3 for alpha chain variable domain of TCR clone 111397 (TRAV36/DV7, TRAJ54)
CAVVRGAQKLVF

SEQ ID NO: 222794 - protein, 14 aa, Homo sapiens
  CDR3 for beta chain variable domain of TCR clone 111397 (TRBV15, TRBJ1-1)
CASSLKGGNTEAFL

SEQ ID NO: 222795 - protein, 12 aa, Homo sapiens
  CDR3 for alpha chain variable domain of TCR clone 111398 (TRAV3, TRAJ26)
CAVRDYGQNFVF

SEQ ID NO: 222796 - protein, 13 aa, Homo sapiens
  CDR3 for beta chain variable domain of TCR clone 111398 (TRBV14, TRBJ2-7)
CASSQDRRYEQYF

SEQ ID NO: 222797 - protein, 12 aa, Homo sapiens
  CDR3 for alpha chain variable domain of TCR clone 111399 (TRAV22, TRAJ29)
CAPPSGNTPLVF

SEQ ID NO: 222798 - protein, 14 aa, Homo sapiens
  CDR3 for beta chain variable domain of TCR clone 111399 (TRBV11-2, TRBJ2-7)
CASSLGAGAYGQYF

SEQ ID NO: 222799 - protein, 14 aa, Homo sapiens
  CDR3 for alpha chain variable domain of TCR clone 111400 (TRAV20, TRAJ29)
CAVQAWVGNTPLVF

SEQ ID NO: 222800 - protein, 17 aa, Homo sapiens
  CDR3 for beta chain variable domain of TCR clone 111400 (TRBV13, TRBJ2-3)
CASSLSRVAGGRNTQYF

SEQ ID NO: 222801 - protein, 18 aa, Homo sapiens
  CDR3 for alpha chain variable domain of TCR clone 111401 (TRAV13-1, TRAJ52)
CAAKNPNAGGTSYGKLTF

SEQ ID NO: 222802 - protein, 14 aa, Homo sapiens
  CDR3 for beta chain variable domain of TCR clone 111401 (TRBV7-9, TRBJ2-5)
CASSLVGGEETQYF

SEQ ID NO: 222803 - protein, 16 aa, Homo sapiens
  CDR3 for alpha chain variable domain of TCR clone 111402 (TRAV38-1, TRAJ56)
CAFMKRQTGANSKLTF

SEQ ID NO: 222804 - protein, 12 aa, Homo sapiens
  CDR3 for beta chain variable domain of TCR clone 111402 (TRBV3-1, TRBJ2-1)
CASSQGSSGQFF

SEQ ID NO: 222805 - protein, 12 aa, Homo sapiens
  CDR3 for alpha chain variable domain of TCR clone 111403 (TRAV29/DV5, TRAJ15)
CASNQAGTALIF

SEQ ID NO: 222806 - protein, 13 aa, Homo sapiens
  CDR3 for beta chain variable domain of TCR clone 111403 (TRBV11-2, TRBJ2-5)
CASSSTGEETQYF

SEQ ID NO: 222807 - protein, 17 aa, Homo sapiens
  CDR3 for alpha chain variable domain of TCR clone 111404 (TRAV3, TRAJ12)
CAVRDGGRMDRSYKLIF

SEQ ID NO: 222808 - protein, 16 aa, Homo sapiens
  CDR3 for beta chain variable domain of TCR clone 111404 (TRBV9, TRBJ2-2)
CASSAMGKGNTGELFF

SEQ ID NO: 222809 - protein, 14 aa, Homo sapiens
  CDR3 for alpha chain variable domain of TCR clone 111405 (TRAV12-2, TRAJ13)
CAVKKTGGYQKVTF

SEQ ID NO: 222810 - protein, 14 aa, Homo sapiens
  CDR3 for beta chain variable domain of TCR clone 111405 (TRBV5-5, TRBJ1-5)
CASSGQGVDQPQHF

SEQ ID NO: 222811 - protein, 12 aa, Homo sapiens
  CDR3 for alpha chain variable domain of TCR clone 111406 (TRAV12-3, TRAJ17)
CAMTLTCNKLTF

SEQ ID NO: 222812 - protein, 13 aa, Homo sapiens
  CDR3 for beta chain variable domain of TCR clone 111406 (TRBV7-9, TRBJ1-2)
CASSLKQNYGYTF

SEQ ID NO: 222813 - protein, 12 aa, Homo sapiens
  CDR3 for alpha chain variable domain of TCR clone 111407 (TRAV1-2, TRAJ29)
CAVRNLNTPLVF

SEQ ID NO: 222814 - protein, 15 aa, Homo sapiens
  CDR3 for beta chain variable domain of TCR clone 111407 (TRBV19, TRBJ1-5)
CASSIVWADNQPQHF

SEQ ID NO: 222815 - protein, 14 aa, Homo sapiens
  CDR3 for alpha chain variable domain of TCR clone 111408 (TRAV12-2, TRAJ40)
CAVKIPSGTYKYIF

SEQ ID NO: 222816 - protein, 14 aa, Homo sapiens
  CDR3 for beta chain variable domain of TCR clone 111408 (TRBV18, TRBJ1-2)
CASSPDRVVYGYTF

SEQ ID NO: 222817 - protein, 13 aa, Homo sapiens
  CDR3 for alpha chain variable domain of TCR clone 111409 (TRAV27, TRAJ56)
CAGKTGANSKLTF

SEQ ID NO: 222818 - protein, 18 aa, Homo sapiens
  CDR3 for beta chain variable domain of TCR clone 111409 (TRBV11-2, TRBJ2-3)
CASSLGGASRGAPNTQYF

SEQ ID NO: 222819 - protein, 11 aa, Homo sapiens
  CDR3 for alpha chain variable domain of TCR clone 111410 (TRAV3, TRAJ21)
CAVGNFNKFYF

SEQ ID NO: 222820 - protein, 12 aa, Homo sapiens
  CDR3 for beta chain variable domain of TCR clone 111410 (TRBV7-8, TRBJ2-7)
CASSRAQREQYF

SEQ ID NO: 222821 - protein, 13 aa, Homo sapiens
  CDR3 for alpha chain variable domain of TCR clone 111411 (TRAV21, TRAJ26)
CATEDNYGQNFVF

SEQ ID NO: 222822 - protein, 14 aa, Homo sapiens
  CDR3 for beta chain variable domain of TCR clone 111411 (TRBV19, TRBJ2-5)
CASSMTGQQETQYF

SEQ ID NO: 222823 - protein, 16 aa, Homo sapiens
  CDR3 for alpha chain variable domain of TCR clone 111412 (TRAV3, TRAJ37)
CAVRGKVSGNTGKLIF

SEQ ID NO: 222824 - protein, 16 aa, Homo sapiens
  CDR3 for beta chain variable domain of TCR clone 111412 (TRBV12-5, TRBJ2-5)
CASGPRTSGSQETQYF

SEQ ID NO: 222825 - protein, 14 aa, Homo sapiens
  CDR3 for alpha chain variable domain of TCR clone 111413 (TRAV17, TRAJ57)
CATDPQGGSEKLVF

SEQ ID NO: 222826 - protein, 11 aa, Homo sapiens
  CDR3 for beta chain variable domain of TCR clone 111413 (TRBV19, TRBJ2-7)
CASGNSYEQYF

SEQ ID NO: 222827 - protein, 17 aa, Homo sapiens
  CDR3 for alpha chain variable domain of TCR clone 111414 (TRAV3, TRAJ6)
CAVRDGPRAGGSYITTF

SEQ ID NO: 222828 - protein, 12 aa, Homo sapiens
  CDR3 for beta chain variable domain of TCR clone 111414 (TRBV11-2, TRBJ2-2)
CASSLGGGELFF

SEQ ID NO: 222829 - protein, 14 aa, Homo sapiens
  CDR3 for alpha chain variable domain of TCR clone 111415 (TRAV8-1, TRAJ5)
CAVRTDTGRRALTF

SEQ ID NO: 222830 - protein, 14 aa, Homo sapiens
  CDR3 for beta chain variable domain of TCR clone 111415 (TRBV5-5, TRBJ1-2)
CASSLDPYNYGDTF

SEQ ID NO: 222831 - protein, 13 aa, Homo sapiens
  CDR3 for alpha chain variable domain of TCR clone 111416 (TRAV12-3, TRAJ56)
CALATGANSKLTF

SEQ ID NO: 222832 - protein, 16 aa, Homo sapiens
  CDR3 for beta chain variable domain of TCR clone 111416 (TRBV19, TRBJ2-2)
CASSAAGTGGTGELFF

SEQ ID NO: 222833 - protein, 16 aa, Homo sapiens
  CDR3 for alpha chain variable domain of TCR clone 111417 (TRAV17, TRAJ52)
CATSNAGGTSYGKLTF

SEQ ID NO: 222834 - protein, 13 aa, Homo sapiens
  CDR3 for beta chain variable domain of TCR clone 111417 (TRBV27, TRBJ1-6)
CASSLVLVSTLHF

SEQ ID NO: 222835 - protein, 10 aa, Homo sapiens
  CDR3 for alpha chain variable domain of TCR clone 111418 (TRAV30, TRAJ48)
CGIGNEKLTF

SEQ ID NO: 222836 - protein, 17 aa, Homo sapiens
  CDR3 for beta chain variable domain of TCR clone 111418 (TRBV7-3, TRBJ2-3)
CASSLMKRMRGADTQYF

SEQ ID NO: 222837 - protein, 13 aa, Homo sapiens
  CDR3 for alpha chain variable domain of TCR clone 111419 (TRAV13-1, TRAJ40)
CAASKGGTYKYIF

SEQ ID NO: 222838 - protein, 13 aa, Homo sapiens
  CDR3 for beta chain variable domain of TCR clone 111419 (TRBV7-6, TRBJ1-2)
CASSVVADYGYTF

SEQ ID NO: 222839 - protein, 15 aa, Homo sapiens
  CDR3 for alpha chain variable domain of TCR clone 111420 (TRAV3, TRAJ22)
CAVRDRGGSARQRTF

SEQ ID NO: 222840 - protein, 15 aa, Homo sapiens
  CDR3 for beta chain variable domain of TCR clone 111420 (TRBV27, TRBJ2-1)
CASSNGGGSSNEQFF

SEQ ID NO: 222841 - protein, 13 aa, Homo sapiens
  CDR3 for alpha chain variable domain of TCR clone 111421 (TRAV29/DV5, TRAJ31)
CAASRNNNARLMF

SEQ ID NO: 222842 - protein, 17 aa, Homo sapiens
  CDR3 for beta chain variable domain of TCR clone 111421 (TRBV13, TRBJ2-3)
CASSLFRVAGGRNTQYF

SEQ ID NO: 222843 - protein, 13 aa, Homo sapiens
  CDR3 for alpha chain variable domain of TCR clone 111422 (TRAV3, TRAJ20)
CAVRDTGDYKLSF

SEQ ID NO: 222844 - protein, 16 aa, Homo sapiens
  CDR3 for beta chain variable domain of TCR clone 111422 (TRBV13, TRBJ2-2)
CASSPRTGEHTGELFF

SEQ ID NO: 222845 - protein, 14 aa, Homo sapiens
  CDR3 for alpha chain variable domain of TCR clone 111423 (TRAV26-1, TRAJ11)
CIVPLYSGYSTLTF

SEQ ID NO: 222846 - protein, 14 aa, Homo sapiens
  CDR3 for beta chain variable domain of TCR clone 111423 (TRBV19, TRBJ2-1)
CASPTFVLSGEQFF

SEQ ID NO: 222847 - protein, 15 aa, Homo sapiens
  CDR3 for alpha chain variable domain of TCR clone 111424 (TRAV3, TRAJ5)
CAVRDLDTGRRALTF

SEQ ID NO: 222848 - protein, 14 aa, Homo sapiens
  CDR3 for beta chain variable domain of TCR clone 111424 (TRBV25-1, TRBJ1-1)
CASTHLGGNTEAVF

SEQ ID NO: 222849 - protein, 12 aa, Homo sapiens
  CDR3 for alpha chain variable domain of TCR clone 111425 (TRAV8-3, TRAJ26)
CAGDNYGQNFVF

SEQ ID NO: 222850 - protein, 15 aa, Homo sapiens
  CDR3 for beta chain variable domain of TCR clone 111425 (TRBV19, TRBJ2-1)
CASSIQATSYNEQFF

SEQ ID NO: 222851 - protein, 14 aa, Homo sapiens
  CDR3 for alpha chain variable domain of TCR clone 111426 (TRAV2, TRAJ23)
CAVGLRNQGGKLIF

SEQ ID NO: 222852 - protein, 13 aa, Homo sapiens
  CDR3 for beta chain variable domain of TCR clone 111426 (TRBV12-4, TRBJ2-5)
CDSSPGTEETQYF

SEQ ID NO: 222853 - protein, 14 aa, Homo sapiens
  CDR3 for alpha chain variable domain of TCR clone 111427 (TRAV13-1, TRAJ15)
CAASINQAGTALIF

SEQ ID NO: 222854 - protein, 16 aa, Homo sapiens
  CDR3 for beta chain variable domain of TCR clone 111427 (TRBV28, TRBJ2-2)
CASSLEGGSNTGELFF

SEQ ID NO: 222855 - protein, 12 aa, Homo sapiens
  CDR3 for alpha chain variable domain of TCR clone 111428 (TRAV38-1, TRAJ47)
CAFETYGNNLVF

SEQ ID NO: 222856 - protein, 15 aa, Homo sapiens
  CDR3 for beta chain variable domain of TCR clone 111428 (TRBV20-1, TRBJ2-7)
CSARKGLAESYEQYF

SEQ ID NO: 222857 - protein, 12 aa, Homo sapiens
  CDR3 for alpha chain variable domain of TCR clone 111429 (TRAV12-1, TRAJ34)
CVVAGATDKLIF

SEQ ID NO: 222858 - protein, 13 aa, Homo sapiens
  CDR3 for beta chain variable domain of TCR clone 111429 (TRBV7-2, TRBJ2-7)
CASSSPSGSEQYF

SEQ ID NO: 222859 - protein, 16 aa, Homo sapiens
  CDR3 for alpha chain variable domain of TCR clone 111430 (TRAV13-1, TRAJ8)
CAAFYLLNTGFQRLVF

SEQ ID NO: 222860 - protein, 14 aa, Homo sapiens
  CDR3 for beta chain variable domain of TCR clone 111430 (TRBV29-1, TRBJ2-5)
CSVGPAGGQETQYF

SEQ ID NO: 222861 - protein, 16 aa, Homo sapiens
  CDR3 for alpha chain variable domain of TCR clone 111431 (TRAV3, TRAJ37)
CAVRGKGSGNTGKLIF

SEQ ID NO: 222862 - protein, 20 aa, Homo sapiens
  CDR3 for beta chain variable domain of TCR clone 111431 (TRBV7-8, TRBJ2-2)
CASSHLFPGPAIHITGELFF

SEQ ID NO: 222863 - protein, 11 aa, Homo sapiens
  CDR3 for alpha chain variable domain of TCR clone 111432 (TRAV2, TRAJ13)
CASGGYQKVTF

SEQ ID NO: 222864 - protein, 16 aa, Homo sapiens
  CDR3 for beta chain variable domain of TCR clone 111432 (TRBV6-1, TRBJ2-5)
CASSETLDRGAETQSF

SEQ ID NO: 222865 - protein, 13 aa, Homo sapiens
  CDR3 for alpha chain variable domain of TCR clone 111433 (TRAV39, TRAJ49)
CAVDRNTGNQVYF

SEQ ID NO: 222866 - protein, 12 aa, Homo sapiens
  CDR3 for beta chain variable domain of TCR clone 111433 (TRBV24-1, TRBJ1-1)
CATLYPDTEAFF

SEQ ID NO: 222867 - protein, 14 aa, Homo sapiens
  CDR3 for alpha chain variable domain of TCR clone 111434 (TRAV13-1, TRAJ35)
CAASKGGIGNVLHC

SEQ ID NO: 222868 - protein, 13 aa, Homo sapiens
  CDR3 for beta chain variable domain of TCR clone 111434 (TRBV7-3, TRBJ1-1)
CASSQDWGAEAFF

SEQ ID NO: 222869 - protein, 18 aa, Homo sapiens
  CDR3 for alpha chain variable domain of TCR clone 111435 (TRAV13-1, TRAJ52)
CAAKNPNAGGTSYGKLTF

SEQ ID NO: 222870 - protein, 15 aa, Homo sapiens
  CDR3 for beta chain variable domain of TCR clone 111435 (TRBV28, TRBJ2-4)
CAAGSGTLLMGMQYF

SEQ ID NO: 222871 - protein, 15 aa, Homo sapiens
  CDR3 for alpha chain variable domain of TCR clone 111436 (TRAV3, TRAJ4)
CAVRDGTGGYNKLIF

SEQ ID NO: 222872 - protein, 16 aa, Homo sapiens
  CDR3 for beta chain variable domain of TCR clone 111436 (TRBV2, TRBJ2-3)
CASSTSVEGVTDTQYF

SEQ ID NO: 222873 - protein, 18 aa, Homo sapiens
  CDR3 for alpha chain variable domain of TCR clone 111437 (TRAV8-4, TRAJ52)
CAVTRANAGGTSYGTLTF

SEQ ID NO: 222874 - protein, 12 aa, Homo sapiens
  CDR3 for beta chain variable domain of TCR clone 111437 (TRBV12-4, TRBJ2-7)
CASSLGGYEQYF

SEQ ID NO: 222875 - protein, 14 aa, Homo sapiens
  CDR3 for alpha chain variable domain of TCR clone 111438 (TRAV12-2, TRAJ53)
CAVKGGGSNYKLTF

SEQ ID NO: 222876 - protein, 14 aa, Homo sapiens
  CDR3 for beta chain variable domain of TCR clone 111438 (TRBV7-7, TRBJ2-2)
CATRQDSDTGELFV

SEQ ID NO: 222877 - protein, 15 aa, Homo sapiens
  CDR3 for alpha chain variable domain of TCR clone 111439 (TRAV20, TRAJ53)
CAVQASGGSNYKLTF

SEQ ID NO: 222878 - protein, 12 aa, Homo sapiens
  CDR3 for beta chain variable domain of TCR clone 111439 (TRBV7-6, TRBJ2-5)
CASSLAQETQYF

SEQ ID NO: 222879 - protein, 11 aa, Homo sapiens
  CDR3 for alpha chain variable domain of TCR clone 111440 (TRAV1-2, TRAJ31)
CAVNNNARLMF

SEQ ID NO: 222880 - protein, 15 aa, Homo sapiens
  CDR3 for beta chain variable domain of TCR clone 111440 (TRBV28, TRBJ2-1)
WASSIIAGGRSEQFF

SEQ ID NO: 222881 - protein, 14 aa, Homo sapiens
  CDR3 for alpha chain variable domain of TCR clone 111441 (TRAV12-3, TRAJ42)
CAMNCGGSQGNLIF

SEQ ID NO: 222882 - protein, 15 aa, Homo sapiens
  CDR3 for beta chain variable domain of TCR clone 111441 (TRBV5-7, TRBJ1-5)
CASSYGKLWDQPQHF

SEQ ID NO: 222883 - protein, 14 aa, Homo sapiens
  CDR3 for alpha chain variable domain of TCR clone 111442 (TRAV2, TRAJ9)
CAVEDRRGGFKTIF

SEQ ID NO: 222884 - protein, 14 aa, Homo sapiens
  CDR3 for beta chain variable domain of TCR clone 111442 (TRBV28, TRBJ2-7)
CASTFYGRAHEQYF

SEQ ID NO: 222885 - protein, 11 aa, Homo sapiens
  CDR3 for alpha chain variable domain of TCR clone 111443 (TRAV3, TRAJ17)
CSEAAGNKLTF

SEQ ID NO: 222886 - protein, 15 aa, Homo sapiens
  CDR3 for beta chain variable domain of TCR clone 111443 (TRBV12-4, TRBJ2-7)
CASSLGSGGPYEQYF

SEQ ID NO: 222887 - protein, 14 aa, Homo sapiens
  CDR3 for alpha chain variable domain of TCR clone 111444 (TRAV16, TRAJ15)
CALSGPQAGTALIF

SEQ ID NO: 222888 - protein, 12 aa, Homo sapiens
  CDR3 for beta chain variable domain of TCR clone 111444 (TRBV18, TRBJ2-5)
CASSPSKETHYL

SEQ ID NO: 222889 - protein, 16 aa, Homo sapiens
  CDR3 for alpha chain variable domain of TCR clone 111445 (TRAV14/DV4, TRAJ53)
CAMREGGGGSNYKLTF

SEQ ID NO: 222890 - protein, 16 aa, Homo sapiens
  CDR3 for beta chain variable domain of TCR clone 111445 (TRBV4-1, TRBJ2-5)
CASSSGLAGVLGTQYF

SEQ ID NO: 222891 - protein, 15 aa, Homo sapiens
  CDR3 for alpha chain variable domain of TCR clone 111446 (TRAV36/DV7, TRAJ53)
CAVEGSGGSNYKLTF

SEQ ID NO: 222892 - protein, 16 aa, Homo sapiens
  CDR3 for beta chain variable domain of TCR clone 111446 (TRBV11-2, TRBJ1-2)
CASSPSGREANYGYTF

SEQ ID NO: 222893 - protein, 12 aa, Homo sapiens
  CDR3 for alpha chain variable domain of TCR clone 111447 (TRAV1-2, TRAJ9)
CAGYTGGFKTIF

SEQ ID NO: 222894 - protein, 15 aa, Homo sapiens
  CDR3 for beta chain variable domain of TCR clone 111447 (TRBV11-2, TRBJ2-1)
CASSPAGQALNEQFF

SEQ ID NO: 222895 - protein, 16 aa, Homo sapiens
  CDR3 for alpha chain variable domain of TCR clone 111448 (TRAV26-2, TRAJ45)
CTTASPIGGGADGLTF

SEQ ID NO: 222896 - protein, 12 aa, Homo sapiens
  CDR3 for beta chain variable domain of TCR clone 111448 (TRBV7-9, TRBJ1-5)
CASSPQGQPQHF

SEQ ID NO: 222897 - protein, 14 aa, Homo sapiens
  CDR3 for alpha chain variable domain of TCR clone 111449 (TRAV20, TRAJ37)
RAVQAASNTGKLIF

SEQ ID NO: 222898 - protein, 14 aa, Homo sapiens
  CDR3 for beta chain variable domain of TCR clone 111449 (TRBV2, TRBJ2-7)
CASSLTSGGYEQYF

SEQ ID NO: 222899 - protein, 12 aa, Homo sapiens
  CDR3 for alpha chain variable domain of TCR clone 111450 (TRAV8-4, TRAJ43)
CAVSVNKNDMRF

SEQ ID NO: 222900 - protein, 14 aa, Homo sapiens
  CDR3 for beta chain variable domain of TCR clone 111450 (TRBV11-2, TRBJ1-2)
CASSLGTANYGYTF

SEQ ID NO: 222901 - protein, 16 aa, Homo sapiens
  CDR3 for alpha chain variable domain of TCR clone 111451 (TRAV30, TRAJ24)
CGTEIVDADSWGQFQF

SEQ ID NO: 222902 - protein, 16 aa, Homo sapiens
  CDR3 for beta chain variable domain of TCR clone 111451 (TRBV12-5, TRBJ2-5)
CASGPRTSGNQETQYF

SEQ ID NO: 222903 - protein, 11 aa, Homo sapiens
  CDR3 for alpha chain variable domain of TCR clone 111452 (TRAV1-2, TRAJ20)
CAVANDYKLSF

SEQ ID NO: 222904 - protein, 16 aa, Homo sapiens
  CDR3 for beta chain variable domain of TCR clone 111452 (TRBV4-3, TRBJ1-6)
CASSQDPGVYNSPLLF

SEQ ID NO: 222905 - protein, 15 aa, Homo sapiens
  CDR3 for alpha chain variable domain of TCR clone 111453 (TRAV35, TRAJ38)
CAGSSNAGNNRKLIW

SEQ ID NO: 222906 - protein, 18 aa, Homo sapiens
  CDR3 for beta chain variable domain of TCR clone 111453 (TRBV3-1, TRBJ1-2)
CASSQDVIGWNGDYGYTF

SEQ ID NO: 222907 - protein, 13 aa, Homo sapiens
  CDR3 for alpha chain variable domain of TCR clone 111454 (TRAV29/DV5, TRAJ31)
CAASRNKNARLMF

SEQ ID NO: 222908 - protein, 12 aa, Homo sapiens
  CDR3 for beta chain variable domain of TCR clone 111454 (TRBV14, TRBJ2-5)
CASSHLKETQYF

SEQ ID NO: 222909 - protein, 15 aa, Homo sapiens
  CDR3 for alpha chain variable domain of TCR clone 111455 (TRAV17, TRAJ57)
CATGPSQGGSEKLVF

SEQ ID NO: 222910 - protein, 18 aa, Homo sapiens
  CDR3 for beta chain variable domain of TCR clone 111455 (TRBV6-6, TRBJ1-3)
CASSYSKWDSISGNTIYF

SEQ ID NO: 222911 - protein, 16 aa, Homo sapiens
  CDR3 for alpha chain variable domain of TCR clone 111456 (TRAV12-2, TRAJ28)
CAVITDSGAGSYQPTF

SEQ ID NO: 222912 - protein, 12 aa, Homo sapiens
  CDR3 for beta chain variable domain of TCR clone 111456 (TRBV9, TRBJ2-2)
CASSLVTGELFF

SEQ ID NO: 222913 - protein, 13 aa, Homo sapiens
  CDR3 for alpha chain variable domain of TCR clone 111457 (TRAV26-1, TRAJ30)
CIVNMNRDDNIIF

SEQ ID NO: 222914 - protein, 16 aa, Homo sapiens
  CDR3 for beta chain variable domain of TCR clone 111457 (TRBV16, TRBJ2-7)
CASSRPAGGSSYEQYF

SEQ ID NO: 222915 - protein, 13 aa, Homo sapiens
  CDR3 for alpha chain variable domain of TCR clone 111458 (TRAV26-2, TRAJ43)
CILRAVNNNDMRF

SEQ ID NO: 222916 - protein, 18 aa, Homo sapiens
  CDR3 for beta chain variable domain of TCR clone 111458 (TRBV7-9, TRBJ2-7)
CASSLTTSGSRTWYEQYF

SEQ ID NO: 222917 - protein, 14 aa, Homo sapiens
  CDR3 for alpha chain variable domain of TCR clone 111459 (TRAV20, TRAJ37)
CAVQSSSNTGKLIF

SEQ ID NO: 222918 - protein, 14 aa, Homo sapiens
  CDR3 for beta chain variable domain of TCR clone 111459 (TRBV7-3, TRBJ2-2)
CASSLNSNAGELFF

SEQ ID NO: 222919 - protein, 17 aa, Homo sapiens
  CDR3 for alpha chain variable domain of TCR clone 111460 (TRAV4, TRAJ42)
CLVGVLNYGGSQGNLIF

SEQ ID NO: 222920 - protein, 12 aa, Homo sapiens
  CDR3 for beta chain variable domain of TCR clone 111460 (TRBV20-1, TRBJ2-1)
CSAQYTYKEQFF

SEQ ID NO: 222921 - protein, 13 aa, Homo sapiens
  CDR3 for alpha chain variable domain of TCR clone 111461 (TRAV3, TRAJ20)
CAVKSLNDYKLSF

SEQ ID NO: 222922 - protein, 13 aa, Homo sapiens
  CDR3 for beta chain variable domain of TCR clone 111461 (TRBV6-1, TRBJ2-1)
CAGMDPTNNEQFF

SEQ ID NO: 222923 - protein, 13 aa, Homo sapiens
  CDR3 for alpha chain variable domain of TCR clone 111462 (TRAV1-1, TRAJ6)
CAVRLGGSYIPTF

SEQ ID NO: 222924 - protein, 12 aa, Homo sapiens
  CDR3 for beta chain variable domain of TCR clone 111462 (TRBV7-8, TRBJ2-7)
CASSLGDREQYF

SEQ ID NO: 222925 - protein, 18 aa, Homo sapiens
  CDR3 for alpha chain variable domain of TCR clone 111463 (TRAV12-2, )
CAVEDIQNPDPAVYQLRD

SEQ ID NO: 222926 - protein, 16 aa, Homo sapiens
  CDR3 for beta chain variable domain of TCR clone 111463 (TRBV6-1, TRBJ1-2)
CASSGAWQGRSHGYAF

SEQ ID NO: 222927 - protein, 17 aa, Homo sapiens
  CDR3 for alpha chain variable domain of TCR clone 111464 (TRAV4, TRAJ20)
CTTASWVKGNNDYKLSF

SEQ ID NO: 222928 - protein, 17 aa, Homo sapiens
  CDR3 for beta chain variable domain of TCR clone 111464 (TRBV11-2, TRBJ2-1)
CARSLYPPGVEYNEQFF

SEQ ID NO: 222929 - protein, 14 aa, Homo sapiens
  CDR3 for alpha chain variable domain of TCR clone 111465 (TRAV26-1, TRAJ38)
CIADNAGNNRKLIW

SEQ ID NO: 222930 - protein, 12 aa, Homo sapiens
  CDR3 for beta chain variable domain of TCR clone 111465 (TRBV14, TRBJ1-1)
CASSQLKGLAFF

SEQ ID NO: 222931 - protein, 11 aa, Homo sapiens
  CDR3 for alpha chain variable domain of TCR clone 111466 (TRAV16, TRAJ31)
CALFNNARLMF

SEQ ID NO: 222932 - protein, 14 aa, Homo sapiens
  CDR3 for beta chain variable domain of TCR clone 111466 (TRBV7-3, TRBJ2-3)
CASSSLHTSDTQYF

SEQ ID NO: 222933 - protein, 13 aa, Homo sapiens
  CDR3 for alpha chain variable domain of TCR clone 111467 (TRAV2, TRAJ40)
CAVVTSGTYKYIL

SEQ ID NO: 222934 - protein, 14 aa, Homo sapiens
  CDR3 for beta chain variable domain of TCR clone 111467 (TRBV19, TRBJ2-1)
CASPTVVLSGEQFF

SEQ ID NO: 222935 - protein, 13 aa, Homo sapiens
  CDR3 for alpha chain variable domain of TCR clone 111468 (TRAV25, TRAJ54)
CAGTIQGAQKLVF

SEQ ID NO: 222936 - protein, 15 aa, Homo sapiens
  CDR3 for beta chain variable domain of TCR clone 111468 (TRBV19, TRBJ1-5)
CASSILTGENQTQHF

SEQ ID NO: 222937 - protein, 16 aa, Homo sapiens
  CDR3 for alpha chain variable domain of TCR clone 111469 (TRAV8-3, TRAJ10)
CAVCPILTGGGNKLTF

SEQ ID NO: 222938 - protein, 16 aa, Homo sapiens
  CDR3 for beta chain variable domain of TCR clone 111469 (TRBV7-2, TRBJ2-5)
CASSSKWLSGQETQYF

SEQ ID NO: 222939 - protein, 12 aa, Homo sapiens
  CDR3 for alpha chain variable domain of TCR clone 111470 (TRAV13-1, TRAJ11)
CSGPSGYSTLTF

SEQ ID NO: 222940 - protein, 13 aa, Homo sapiens
  CDR3 for beta chain variable domain of TCR clone 111470 (TRBV12-4, TRBJ2-1)
CASSLSPSNEQFF

SEQ ID NO: 222941 - protein, 15 aa, Homo sapiens
  CDR3 for alpha chain variable domain of TCR clone 111471 (TRAV26-1, TRAJ22)
CIVRVSFWLCKATDL

SEQ ID NO: 222942 - protein, 16 aa, Homo sapiens
  CDR3 for beta chain variable domain of TCR clone 111471 (TRBV24-1, TRBJ2-3)
CATSDPGTGATDTQYF

SEQ ID NO: 222943 - protein, 16 aa, Homo sapiens
  CDR3 for alpha chain variable domain of TCR clone 111472 (TRAV17, TRAJ53)
CATDALSGGSNYKLTF

SEQ ID NO: 222944 - protein, 12 aa, Homo sapiens
  CDR3 for beta chain variable domain of TCR clone 111472 (TRBV5-1, TRBJ2-7)
CASSSRGYEQYF

SEQ ID NO: 222945 - protein, 15 aa, Homo sapiens
  CDR3 for alpha chain variable domain of TCR clone 111473 (TRAV3, TRAJ5)
CAVRDLDTGRRALTF

SEQ ID NO: 222946 - protein, 15 aa, Homo sapiens
  CDR3 for beta chain variable domain of TCR clone 111473 (TRBV11-3, TRBJ2-3)
CASLKDGREGDTQYF

SEQ ID NO: 222947 - protein, 13 aa, Homo sapiens
  CDR3 for alpha chain variable domain of TCR clone 111474 (TRAV12-3, TRAJ43)
CAMIRPNNNYMRF

SEQ ID NO: 222948 - protein, 12 aa, Homo sapiens
  CDR3 for beta chain variable domain of TCR clone 111474 (TRBV11-2, TRBJ2-5)
CASSLGQETQYF

SEQ ID NO: 222949 - protein, 15 aa, Homo sapiens
  CDR3 for alpha chain variable domain of TCR clone 111475 (TRAV27, TRAJ50)
CAGRERGTSYDKVIF

SEQ ID NO: 222950 - protein, 16 aa, Homo sapiens
  CDR3 for beta chain variable domain of TCR clone 111475 (TRBV10-3, TRBJ1-5)
YAISDQVGAPNQPQHF

SEQ ID NO: 222951 - protein, 14 aa, Homo sapiens
  CDR3 for alpha chain variable domain of TCR clone 111476 (TRAV14/DV4, TRAJ15)
CAMRRDQAGTALVF

SEQ ID NO: 222952 - protein, 16 aa, Homo sapiens
  CDR3 for beta chain variable domain of TCR clone 111476 (TRBV15, TRBJ2-3)
CATSRDLGIVTDTQYF

SEQ ID NO: 222953 - protein, 15 aa, Homo sapiens
  CDR3 for alpha chain variable domain of TCR clone 111477 (TRAV38-1, TRAJ37)
CAFIFGSGNTGKLIF

SEQ ID NO: 222954 - protein, 14 aa, Homo sapiens
  CDR3 for beta chain variable domain of TCR clone 111477 (TRBV28, TRBJ2-7)
CASRAAGLGYEQYF

SEQ ID NO: 222955 - protein, 12 aa, Homo sapiens
  CDR3 for alpha chain variable domain of TCR clone 111478 (TRAV1-2, TRAJ7)
CAVAYVNNRLAF

SEQ ID NO: 222956 - protein, 16 aa, Homo sapiens
  CDR3 for beta chain variable domain of TCR clone 111478 (TRBV5-1, TRBJ2-7)
CASSPMTGALSYEQYF

SEQ ID NO: 222957 - protein, 18 aa, Homo sapiens
  CDR3 for alpha chain variable domain of TCR clone 111479 (TRAV12-3, TRAJ52)
CAMSRTNAGGTSYGKLTF

SEQ ID NO: 222958 - protein, 15 aa, Homo sapiens
  CDR3 for beta chain variable domain of TCR clone 111479 (TRBV27, TRBJ2-1)
CASSNGGGSSNEQFF

SEQ ID NO: 222959 - protein, 18 aa, Homo sapiens
  CDR3 for alpha chain variable domain of TCR clone 111480 (TRAV13-1, TRAJ52)
CAAKNPNAGGTSYGKLTF

SEQ ID NO: 222960 - protein, 16 aa, Homo sapiens
  CDR3 for beta chain variable domain of TCR clone 111480 (TRBV28, TRBJ2-1)
CASSSPEYPRDNEQFF

SEQ ID NO: 222961 - protein, 15 aa, Homo sapiens
  CDR3 for alpha chain variable domain of TCR clone 111481 (TRAV8-4, TRAJ10)
CAVSDGPGGGNKLTI

SEQ ID NO: 222962 - protein, 13 aa, Homo sapiens
  CDR3 for beta chain variable domain of TCR clone 111481 (TRBV28, TRBJ1-3)
CASSFLGSGTIYF

SEQ ID NO: 222963 - protein, 15 aa, Homo sapiens
  CDR3 for alpha chain variable domain of TCR clone 111482 (TRAV26-1, TRAJ22)
CIVRVSFWFCKATDL

SEQ ID NO: 222964 - protein, 15 aa, Homo sapiens
  CDR3 for beta chain variable domain of TCR clone 111482 (TRBV19, TRBJ1-1)
CASTSGQIQNTEAFF

SEQ ID NO: 222965 - protein, 14 aa, Homo sapiens
  CDR3 for alpha chain variable domain of TCR clone 111483 (TRAV8-6, TRAJ11)
CVVSEKSGYSTLTF

SEQ ID NO: 222966 - protein, 16 aa, Homo sapiens
  CDR3 for beta chain variable domain of TCR clone 111483 (TRBV28, TRBJ2-1)
CASSSPEYPRDNEQFF

SEQ ID NO: 222967 - protein, 17 aa, Homo sapiens
  CDR3 for alpha chain variable domain of TCR clone 111484 (TRAV8-6, TRAJ4)
CAVSDLGVAGGYNKLMF

SEQ ID NO: 222968 - protein, 15 aa, Homo sapiens
  CDR3 for beta chain variable domain of TCR clone 111484 (TRBV10-3, TRBJ2-1)
CAIRNGTSGHNEQFF

SEQ ID NO: 222969 - protein, 16 aa, Homo sapiens
  CDR3 for alpha chain variable domain of TCR clone 111485 (TRAV8-1, TRAJ42)
CAVTSRYGGSQGNLIF

SEQ ID NO: 222970 - protein, 12 aa, Homo sapiens
  CDR3 for beta chain variable domain of TCR clone 111485 (TRBV6-3, TRBJ2-7)
YASSLGRRGLYF

SEQ ID NO: 222971 - protein, 13 aa, Homo sapiens
  CDR3 for alpha chain variable domain of TCR clone 111486 (TRAV12-1, TRAJ7)
CVVNMRGNNRLAF

SEQ ID NO: 222972 - protein, 16 aa, Homo sapiens
  CDR3 for beta chain variable domain of TCR clone 111486 (TRBV15, TRBJ1-2)
CATSRGPRTGGGGYTF

SEQ ID NO: 222973 - protein, 13 aa, Homo sapiens
  CDR3 for alpha chain variable domain of TCR clone 111487 (TRAV14/DV4, TRAJ23)
CAMREVKGGKLIF

SEQ ID NO: 222974 - protein, 16 aa, Homo sapiens
  CDR3 for beta chain variable domain of TCR clone 111487 (TRBV19, TRBJ2-2)
CASRSPGTGATGELFF

SEQ ID NO: 222975 - protein, 13 aa, Homo sapiens
  CDR3 for alpha chain variable domain of TCR clone 111488 (TRAV12-1, TRAJ26)
CVVRRNYGQNFVF

SEQ ID NO: 222976 - protein, 15 aa, Homo sapiens
  CDR3 for beta chain variable domain of TCR clone 111488 (TRBV7-2, TRBJ2-6)
CASSLQEAGANVLTF

SEQ ID NO: 222977 - protein, 15 aa, Homo sapiens
  CDR3 for alpha chain variable domain of TCR clone 111489 (TRAV8-3, TRAJ44)
CAVGAGTGTASKLTF

SEQ ID NO: 222978 - protein, 12 aa, Homo sapiens
  CDR3 for beta chain variable domain of TCR clone 111489 (TRBV7-8, TRBJ2-4)
CASSLGGNIQYF

SEQ ID NO: 222979 - protein, 13 aa, Homo sapiens
  CDR3 for alpha chain variable domain of TCR clone 111490 (TRAV8-4, TRAJ49)
CAVRTLTGNQFYF

SEQ ID NO: 222980 - protein, 16 aa, Homo sapiens
  CDR3 for beta chain variable domain of TCR clone 111490 (TRBV5-6, TRBJ2-5)
CASTLAPAGGRETQYF

SEQ ID NO: 222981 - protein, 11 aa, Homo sapiens
  CDR3 for alpha chain variable domain of TCR clone 111491 (TRAV17, TRAJ9)
CATTGGFKTIF

SEQ ID NO: 222982 - protein, 14 aa, Homo sapiens
  CDR3 for beta chain variable domain of TCR clone 111491 (TRBV7-9, TRBJ2-1)
CASSPRDSLYEQFF

SEQ ID NO: 222983 - protein, 13 aa, Homo sapiens
  CDR3 for alpha chain variable domain of TCR clone 111492 (TRAV13-1, TRAJ6)
CAARRGGSYIPTF

SEQ ID NO: 222984 - protein, 16 aa, Homo sapiens
  CDR3 for beta chain variable domain of TCR clone 111492 (TRBV20-1, TRBJ1-4)
CSAPGQGLLTNEELFF

SEQ ID NO: 222985 - protein, 13 aa, Homo sapiens
  CDR3 for alpha chain variable domain of TCR clone 111493 (TRAV26-1, TRAJ48)
CIVRVVGDEKLTF

SEQ ID NO: 222986 - protein, 14 aa, Homo sapiens
  CDR3 for beta chain variable domain of TCR clone 111493 (TRBV7-2, TRBJ2-7)
CASRSQGAAYEQYF

SEQ ID NO: 222987 - protein, 12 aa, Homo sapiens
  CDR3 for alpha chain variable domain of TCR clone 111494 (TRAV35, TRAJ31)
CAAASNNARLMF

SEQ ID NO: 222988 - protein, 14 aa, Homo sapiens
  CDR3 for beta chain variable domain of TCR clone 111494 (TRBV7-3, TRBJ1-1)
CASSLRGGNTEAFF

SEQ ID NO: 222989 - protein, 15 aa, Homo sapiens
  CDR3 for alpha chain variable domain of TCR clone 111495 (TRAV8-3, TRAJ45)
CALSYSGGGDDGLTF

SEQ ID NO: 222990 - protein, 13 aa, Homo sapiens
  CDR3 for beta chain variable domain of TCR clone 111495 (TRBV10-3, TRBJ2-7)
CASKLAVNYEQYF

SEQ ID NO: 222991 - protein, 13 aa, Homo sapiens
  CDR3 for alpha chain variable domain of TCR clone 111496 (TRAV9-2, TRAJ39)
CALYIYNAGNMLT

SEQ ID NO: 222992 - protein, 14 aa, Homo sapiens
  CDR3 for beta chain variable domain of TCR clone 111496 (TRBV6-1, TRBJ1-3)
CASVQGGGGNTIYF

SEQ ID NO: 222993 - protein, 15 aa, Homo sapiens
  CDR3 for alpha chain variable domain of TCR clone 111497 (TRAV26-1, TRAJ29)
CIVRVEGSGNTPLAF

SEQ ID NO: 222994 - protein, 15 aa, Homo sapiens
  CDR3 for beta chain variable domain of TCR clone 111497 (TRBV7-9, TRBJ1-5)
CASSQGHQANQPQHF

SEQ ID NO: 222995 - protein, 16 aa, Homo sapiens
  CDR3 for alpha chain variable domain of TCR clone 111498 (TRAV30, TRAJ24)
CGTEIVDADSWGKFQF

SEQ ID NO: 222996 - protein, 15 aa, Homo sapiens
  CDR3 for beta chain variable domain of TCR clone 111498 (TRBV5-1, TRBJ1-4)
CASSLTADSDEKLFF

SEQ ID NO: 222997 - protein, 15 aa, Homo sapiens
  CDR3 for alpha chain variable domain of TCR clone 111499 (TRAV2, TRAJ32)
CAVAKYGGATNKLIF

SEQ ID NO: 222998 - protein, 15 aa, Homo sapiens
  CDR3 for beta chain variable domain of TCR clone 111499 (TRBV7-7, TRBJ2-5)
CASSQLERAEETQYF

SEQ ID NO: 222999 - protein, 13 aa, Homo sapiens
  CDR3 for alpha chain variable domain of TCR clone 111500 (TRAV27, TRAJ8)
CAGGPTGFQKLVF

SEQ ID NO: 223000 - protein, 20 aa, Homo sapiens
  CDR3 for beta chain variable domain of TCR clone 111500 (TRBV7-8, TRBJ2-2)
CASSHLFPGPTIHITGELFF

SEQ ID NO: 223001 - protein, 18 aa, Homo sapiens
  CDR3 for alpha chain variable domain of TCR clone 111501 (TRAV13-1, TRAJ52)
CAAKNPNAGGTIYRKLTF

SEQ ID NO: 223002 - protein, 16 aa, Homo sapiens
  CDR3 for beta chain variable domain of TCR clone 111501 (TRBV27, TRBJ2-2)
CASSFRGLVRTGELFF

SEQ ID NO: 223003 - protein, 14 aa, Homo sapiens
  CDR3 for alpha chain variable domain of TCR clone 111502 (TRAV12-2, TRAJ11)
CAVNRESGYSTLTF

SEQ ID NO: 223004 - protein, 10 aa, Homo sapiens
  CDR3 for beta chain variable domain of TCR clone 111502 (TRBV20-1, TRBJ2-5)
CSARFETQFF

SEQ ID NO: 223005 - protein, 17 aa, Homo sapiens
  CDR3 for alpha chain variable domain of TCR clone 111503 (TRAV26-2, TRAJ42)
CILRDVGYGGSQGNLIF

SEQ ID NO: 223006 - protein, 14 aa, Homo sapiens
  CDR3 for beta chain variable domain of TCR clone 111503 (TRBV7-8, TRBJ2-7)
CASSPRDRVYEQYF

SEQ ID NO: 223007 - protein, 15 aa, Homo sapiens
  CDR3 for alpha chain variable domain of TCR clone 111504 (TRAV13-1, TRAJ45)
CAASGSGGGADVLTF

SEQ ID NO: 223008 - protein, 14 aa, Homo sapiens
  CDR3 for beta chain variable domain of TCR clone 111504 (TRBV12-4, TRBJ1-2)
CASSFVGTAYGYTF

SEQ ID NO: 223009 - protein, 14 aa, Homo sapiens
  CDR3 for alpha chain variable domain of TCR clone 111505 (TRAV12-2, TRAJ40)
CAVKIPSGTYKYIF

SEQ ID NO: 223010 - protein, 15 aa, Homo sapiens
  CDR3 for beta chain variable domain of TCR clone 111505 (TRBV20-1, TRBJ1-4)
CSARREWGVNENLFF

SEQ ID NO: 223011 - protein, 14 aa, Homo sapiens
  CDR3 for alpha chain variable domain of TCR clone 111506 (TRAV8-1, TRAJ12)
CAVNAMDSSYKLIF

SEQ ID NO: 223012 - protein, 13 aa, Homo sapiens
  CDR3 for beta chain variable domain of TCR clone 111506 (TRBV7-2, TRBJ1-1)
CASNLKGAKVAFF

SEQ ID NO: 223013 - protein, 12 aa, Homo sapiens
  CDR3 for alpha chain variable domain of TCR clone 111507 (TRAV3, TRAJ7)
CADLLWEQQTRF

SEQ ID NO: 223014 - protein, 13 aa, Homo sapiens
  CDR3 for beta chain variable domain of TCR clone 111507 (TRBV7-3, TRBJ2-5)
CASSFQGGETQYF

SEQ ID NO: 223015 - protein, 15 aa, Homo sapiens
  CDR3 for alpha chain variable domain of TCR clone 111508 (TRAV27, TRAJ38)
CAARRNAGNNRKLIW

SEQ ID NO: 223016 - protein, 12 aa, Homo sapiens
  CDR3 for beta chain variable domain of TCR clone 111508 (TRBV11-2, TRBJ2-2)
CASSLPTGELFF

SEQ ID NO: 223017 - protein, 14 aa, Homo sapiens
  CDR3 for alpha chain variable domain of TCR clone 111509 (TRAV25, TRAJ27)
CAGPGNTNTGKSTF

SEQ ID NO: 223018 - protein, 16 aa, Homo sapiens
  CDR3 for beta chain variable domain of TCR clone 111509 (TRBV4-1, TRBJ2-6)
CASSQDGGPGANVLTF

SEQ ID NO: 223019 - protein, 17 aa, Homo sapiens
  CDR3 for alpha chain variable domain of TCR clone 111510 (TRAV16, TRAJ58)
CITVLSNGETSGSRLTF

SEQ ID NO: 223020 - protein, 15 aa, Homo sapiens
  CDR3 for beta chain variable domain of TCR clone 111510 (TRBV6-3, TRBJ2-7)
CASSSPGTVFYEQYF

SEQ ID NO: 223021 - protein, 16 aa, Homo sapiens
  CDR3 for alpha chain variable domain of TCR clone 111511 (TRAV3, TRAJ37)
CAVRGKGSGNTGKRIF

SEQ ID NO: 223022 - protein, 15 aa, Homo sapiens
  CDR3 for beta chain variable domain of TCR clone 111511 (TRBV7-3, TRBJ2-2)
CASSETGQGTGELFF

SEQ ID NO: 223023 - protein, 16 aa, Homo sapiens
  CDR3 for alpha chain variable domain of TCR clone 111512 (TRAV8-6, TRAJ58)
CCELLGRRNQCSRLTF

SEQ ID NO: 223024 - protein, 14 aa, Homo sapiens
  CDR3 for beta chain variable domain of TCR clone 111512 (TRBV4-2, TRBJ2-1)
CASGLDRAYNEQFF

SEQ ID NO: 223025 - protein, 12 aa, Homo sapiens
  CDR3 for alpha chain variable domain of TCR clone 111513 (TRAV26-1, TRAJ48)
CIVSGGNEKLTF

SEQ ID NO: 223026 - protein, 13 aa, Homo sapiens
  CDR3 for beta chain variable domain of TCR clone 111513 (TRBV18, TRBJ2-7)
CASFKDSAYEQYF

SEQ ID NO: 223027 - protein, 17 aa, Homo sapiens
  CDR3 for alpha chain variable domain of TCR clone 111514 (TRAV2, TRAJ36)
CAVEDRGNWGKQPLLWD

SEQ ID NO: 223028 - protein, 14 aa, Homo sapiens
  CDR3 for beta chain variable domain of TCR clone 111514 (TRBV7-9, TRBJ2-5)
CASRLDTAQETQYF

SEQ ID NO: 223029 - protein, 14 aa, Homo sapiens
  CDR3 for alpha chain variable domain of TCR clone 111515 (TRAV8-1, TRAJ5)
CAVRTDTGRRALTF

SEQ ID NO: 223030 - protein, 16 aa, Homo sapiens
  CDR3 for beta chain variable domain of TCR clone 111515 (TRBV19, TRBJ2-2)
CASSFPGQGLAGELFF

SEQ ID NO: 223031 - protein, 16 aa, Homo sapiens
  CDR3 for alpha chain variable domain of TCR clone 111516 (TRAV2, TRAJ32)
CAVEDGYGGATNKLIF

SEQ ID NO: 223032 - protein, 16 aa, Homo sapiens
  CDR3 for beta chain variable domain of TCR clone 111516 (TRBV12-5, TRBJ2-5)
CASGPRTSGNQETQYF

SEQ ID NO: 223033 - protein, 15 aa, Homo sapiens
  CDR3 for alpha chain variable domain of TCR clone 111517 (TRAV12-3, TRAJ6)
CAMSATTGGSYISTF

SEQ ID NO: 223034 - protein, 12 aa, Homo sapiens
  CDR3 for beta chain variable domain of TCR clone 111517 (TRBV12-4, TRBJ2-7)
CASSLGGYEQYF

SEQ ID NO: 223035 - protein, 14 aa, Homo sapiens
  CDR3 for alpha chain variable domain of TCR clone 111518 (TRAV4, TRAJ9)
CLVGSGTGGFKTIF

SEQ ID NO: 223036 - protein, 11 aa, Homo sapiens
  CDR3 for beta chain variable domain of TCR clone 111518 (TRBV19, TRBJ1-1)
CASSIGSEAFF

SEQ ID NO: 223037 - protein, 15 aa, Homo sapiens
  CDR3 for alpha chain variable domain of TCR clone 111519 (TRAV23/DV6, TRAJ45)
CAALSSGGGADGLTF

SEQ ID NO: 223038 - protein, 15 aa, Homo sapiens
  CDR3 for beta chain variable domain of TCR clone 111519 (TRBV7-2, TRBJ2-1)
CASTHGTGIYNEQFF

SEQ ID NO: 223039 - protein, 14 aa, Homo sapiens
  CDR3 for alpha chain variable domain of TCR clone 111520 (TRAV12-2, TRAJ17)
CAVLFKAACNKLTF

SEQ ID NO: 223040 - protein, 14 aa, Homo sapiens
  CDR3 for beta chain variable domain of TCR clone 111520 (TRBV7-8, TRBJ2-5)
CASSATGGQETQYF

SEQ ID NO: 223041 - protein, 13 aa, Homo sapiens
  CDR3 for alpha chain variable domain of TCR clone 111521 (TRAV27, TRAJ8)
CAGGPTGFQKLIF

SEQ ID NO: 223042 - protein, 15 aa, Homo sapiens
  CDR3 for beta chain variable domain of TCR clone 111521 (TRBV6-1, TRBJ2-7)
CASSESMGDFYEQYF

SEQ ID NO: 223043 - protein, 14 aa, Homo sapiens
  CDR3 for alpha chain variable domain of TCR clone 111522 (TRAV35, TRAJ22)
CAGLRPGSARQLTF

SEQ ID NO: 223044 - protein, 17 aa, Homo sapiens
  CDR3 for beta chain variable domain of TCR clone 111522 (TRBV28, TRBJ2-7)
CASSPLHRASGVYEQYF

SEQ ID NO: 223045 - protein, 15 aa, Homo sapiens
  CDR3 for alpha chain variable domain of TCR clone 111523 (TRAV3, TRAJ45)
CAVKTPWGGADGLTF

SEQ ID NO: 223046 - protein, 16 aa, Homo sapiens
  CDR3 for beta chain variable domain of TCR clone 111523 (TRBV6-1, TRBJ2-2)
CASSFGQGANTGELFF

SEQ ID NO: 223047 - protein, 16 aa, Homo sapiens
  CDR3 for alpha chain variable domain of TCR clone 111524 (TRAV12-1, TRAJ53)
CVVTSVAGGSNYKLTF

SEQ ID NO: 223048 - protein, 16 aa, Homo sapiens
  CDR3 for beta chain variable domain of TCR clone 111524 (TRBV7-3, TRBJ2-2)
CASSLKRGTLSGELFF

SEQ ID NO: 223049 - protein, 14 aa, Homo sapiens
  CDR3 for alpha chain variable domain of TCR clone 111525 (TRAV35, TRAJ22)
CAGLRPGSARQLTF

SEQ ID NO: 223050 - protein, 13 aa, Homo sapiens
  CDR3 for beta chain variable domain of TCR clone 111525 (TRBV20-1, TRBJ2-7)
CSATRTSGYEQYF

SEQ ID NO: 223051 - protein, 17 aa, Homo sapiens
  CDR3 for alpha chain variable domain of TCR clone 111526 (TRAV13-1, TRAJ52)
CAASSGAGGTSYGKLTF

SEQ ID NO: 223052 - protein, 18 aa, Homo sapiens
  CDR3 for beta chain variable domain of TCR clone 111526 (TRBV11-2, TRBJ2-3)
CASSLGGASRGAPNTQYF

SEQ ID NO: 223053 - protein, 13 aa, Homo sapiens
  CDR3 for alpha chain variable domain of TCR clone 111527 (TRAV35, TRAJ42)
CAGFPGSQGNLIF

SEQ ID NO: 223054 - protein, 14 aa, Homo sapiens
  CDR3 for beta chain variable domain of TCR clone 111527 (TRBV4-1, TRBJ2-2)
CASSQAVNAGELFF

SEQ ID NO: 223055 - protein, 12 aa, Homo sapiens
  CDR3 for alpha chain variable domain of TCR clone 111528 (TRAV13-2, TRAJ23)
CAERHRGGKLIF

SEQ ID NO: 223056 - protein, 15 aa, Homo sapiens
  CDR3 for beta chain variable domain of TCR clone 111528 (TRBV10-3, TRBJ2-3)
CAISLTSGGTDTQYF

SEQ ID NO: 223057 - protein, 15 aa, Homo sapiens
  CDR3 for alpha chain variable domain of TCR clone 111529 (TRAV17, TRAJ57)
CATGPSQGGSEKLVF

SEQ ID NO: 223058 - protein, 14 aa, Homo sapiens
  CDR3 for beta chain variable domain of TCR clone 111529 (TRBV12-5, TRBJ2-5)
CASGSRTHQDTQYF

SEQ ID NO: 223059 - protein, 11 aa, Homo sapiens
  CDR3 for alpha chain variable domain of TCR clone 111530 (TRAV27, TRAJ47)
SIVAYGNKLVF

SEQ ID NO: 223060 - protein, 18 aa, Homo sapiens
  CDR3 for beta chain variable domain of TCR clone 111530 (TRBV2, TRBJ2-1)
CASRGLAGGPRTYNEQFF

SEQ ID NO: 223061 - protein, 11 aa, Homo sapiens
  CDR3 for alpha chain variable domain of TCR clone 111531 (TRAV16, TRAJ33)
CALHSNYQLIW

SEQ ID NO: 223062 - protein, 15 aa, Homo sapiens
  CDR3 for beta chain variable domain of TCR clone 111531 (TRBV4-1, TRBJ2-7)
CASSQQEQGFDEQYF

SEQ ID NO: 223063 - protein, 11 aa, Homo sapiens
  CDR3 for alpha chain variable domain of TCR clone 111532 (TRAV3, TRAJ21)
CAVGNFNKFYF

SEQ ID NO: 223064 - protein, 14 aa, Homo sapiens
  CDR3 for beta chain variable domain of TCR clone 111532 (TRBV4-3, TRBJ1-5)
CASSQGGQGWPQHF

SEQ ID NO: 223065 - protein, 14 aa, Homo sapiens
  CDR3 for alpha chain variable domain of TCR clone 111533 (TRAV13-1, TRAJ44)
CAAKATGTASKLTF

SEQ ID NO: 223066 - protein, 15 aa, Homo sapiens
  CDR3 for beta chain variable domain of TCR clone 111533 (TRBV5-7, TRBJ2-7)
CASSLGPGRGHEQYF

SEQ ID NO: 223067 - protein, 13 aa, Homo sapiens
  CDR3 for alpha chain variable domain of TCR clone 111534 (TRAV22, TRAJ49)
CAVGMYTGNQFYF

SEQ ID NO: 223068 - protein, 14 aa, Homo sapiens
  CDR3 for beta chain variable domain of TCR clone 111534 (TRBV25-1, TRBJ1-1)
CASTHLGGNTEAFF

SEQ ID NO: 223069 - protein, 11 aa, Homo sapiens
  CDR3 for alpha chain variable domain of TCR clone 111535 (TRAV12-3, TRAJ13)
CGSGGYQKVTF

SEQ ID NO: 223070 - protein, 12 aa, Homo sapiens
  CDR3 for beta chain variable domain of TCR clone 111535 (TRBV11-2, TRBJ2-2)
CASSLGGGELFF

SEQ ID NO: 223071 - protein, 16 aa, Homo sapiens
  CDR3 for alpha chain variable domain of TCR clone 111536 (TRAV8-3, TRAJ44)
CAVGTLMAGTASKLTF

SEQ ID NO: 223072 - protein, 13 aa, Homo sapiens
  CDR3 for beta chain variable domain of TCR clone 111536 (TRBV11-2, TRBJ2-1)
CASSLRLTHEQFF

SEQ ID NO: 223073 - protein, 14 aa, Homo sapiens
  CDR3 for alpha chain variable domain of TCR clone 111537 (TRAV38-1, TRAJ45)
CASHSGGGADGLTF

SEQ ID NO: 223074 - protein, 15 aa, Homo sapiens
  CDR3 for beta chain variable domain of TCR clone 111537 (TRBV6-3, TRBJ2-7)
CASSSPGTVFYEQYF

SEQ ID NO: 223075 - protein, 11 aa, Homo sapiens
  CDR3 for alpha chain variable domain of TCR clone 111538 (TRAV12-3, TRAJ49)
CAANTGNQFYF

SEQ ID NO: 223076 - protein, 15 aa, Homo sapiens
  CDR3 for beta chain variable domain of TCR clone 111538 (TRBV11-2, TRBJ2-1)
CASGLGTSGLNEQFF

SEQ ID NO: 223077 - protein, 12 aa, Homo sapiens
  CDR3 for alpha chain variable domain of TCR clone 111539 (TRAV1-2, TRAJ33)
CAALDSNSQLIW

SEQ ID NO: 223078 - protein, 16 aa, Homo sapiens
  CDR3 for beta chain variable domain of TCR clone 111539 (TRBV6-4, TRBJ1-2)
CASSEAVGDPNYGYTF

SEQ ID NO: 223079 - protein, 14 aa, Homo sapiens
  CDR3 for alpha chain variable domain of TCR clone 111540 (TRAV1-2, TRAJ8)
CAVREDTGFQKLVF

SEQ ID NO: 223080 - protein, 10 aa, Homo sapiens
  CDR3 for beta chain variable domain of TCR clone 111540 (TRBV6-3, TRBJ2-7)
CASSSPAQFS

SEQ ID NO: 223081 - protein, 13 aa, Homo sapiens
  CDR3 for alpha chain variable domain of TCR clone 111541 (TRAV12-2, TRAJ9)
CAVKWAGGFKTIF

SEQ ID NO: 223082 - protein, 15 aa, Homo sapiens
  CDR3 for beta chain variable domain of TCR clone 111541 (TRBV5-1, TRBJ1-4)
CASSLTADSDETLFF

SEQ ID NO: 223083 - protein, 13 aa, Homo sapiens
  CDR3 for alpha chain variable domain of TCR clone 111542 (TRAV16, TRAJ58)
CALSIPSGSRLTF

SEQ ID NO: 223084 - protein, 16 aa, Homo sapiens
  CDR3 for beta chain variable domain of TCR clone 111542 (TRBV4-2, TRBJ2-6)
CASSQARSSGANVLTF

SEQ ID NO: 223085 - protein, 13 aa, Homo sapiens
  CDR3 for alpha chain variable domain of TCR clone 111543 (TRAV21, TRAJ57)
CAVTQGGSEKLVF

SEQ ID NO: 223086 - protein, 15 aa, Homo sapiens
  CDR3 for beta chain variable domain of TCR clone 111543 (TRBV5-1, TRBJ1-1)
CASSSTTGTNTESFF

SEQ ID NO: 223087 - protein, 14 aa, Homo sapiens
  CDR3 for alpha chain variable domain of TCR clone 111544 (TRAV6, TRAJ6)
CALPTSGGSYIPTF

SEQ ID NO: 223088 - protein, 11 aa, Homo sapiens
  CDR3 for beta chain variable domain of TCR clone 111544 (TRBV11-2, TRBJ2-2)
CASSLPGELFF

SEQ ID NO: 223089 - protein, 15 aa, Homo sapiens
  CDR3 for alpha chain variable domain of TCR clone 111545 (TRAV23/DV6, TRAJ33)
CAASNSGGGNYQLIW

SEQ ID NO: 223090 - protein, 16 aa, Homo sapiens
  CDR3 for beta chain variable domain of TCR clone 111545 (TRBV7-3, TRBJ2-2)
CASSLKRGTLSGELFF

SEQ ID NO: 223091 - protein, 14 aa, Homo sapiens
  CDR3 for alpha chain variable domain of TCR clone 111546 (TRAV29/DV5, TRAJ47)
CAASSIEYGNKLVF

SEQ ID NO: 223092 - protein, 16 aa, Homo sapiens
  CDR3 for beta chain variable domain of TCR clone 111546 (TRBV4-1, TRBJ1-4)
CASSQDLRRGGEKLFF

SEQ ID NO: 223093 - protein, 15 aa, Homo sapiens
  CDR3 for alpha chain variable domain of TCR clone 111547 (TRAV16, TRAJ4)
CALGDPSGGYNKLIF

SEQ ID NO: 223094 - protein, 13 aa, Homo sapiens
  CDR3 for beta chain variable domain of TCR clone 111547 (TRBV7-3, TRBJ2-7)
CASSQAGGYEQYF

SEQ ID NO: 223095 - protein, 11 aa, Homo sapiens
  CDR3 for alpha chain variable domain of TCR clone 111548 (TRAV2, TRAJ4)
CAVVWYNKLIF

SEQ ID NO: 223096 - protein, 15 aa, Homo sapiens
  CDR3 for beta chain variable domain of TCR clone 111548 (TRBV7-2, TRBJ2-2)
CASSFQRGETGELFF

SEQ ID NO: 223097 - protein, 15 aa, Homo sapiens
  CDR3 for alpha chain variable domain of TCR clone 111549 (TRAV8-4, TRAJ37)
CAVGRGSGNTGKLIF

SEQ ID NO: 223098 - protein, 16 aa, Homo sapiens
  CDR3 for beta chain variable domain of TCR clone 111549 (TRBV7-3, TRBJ2-3)
CASSLSGYRPEDTQYF

SEQ ID NO: 223099 - protein, 14 aa, Homo sapiens
  CDR3 for alpha chain variable domain of TCR clone 111550 (TRAV12-3, TRAJ10)
SHLPLTGGGNKLTF

SEQ ID NO: 223100 - protein, 18 aa, Homo sapiens
  CDR3 for beta chain variable domain of TCR clone 111550 (TRBV20-1, TRBJ2-5)
CSAKTGTTTNLYQETQYF

SEQ ID NO: 223101 - protein, 11 aa, Homo sapiens
  CDR3 for alpha chain variable domain of TCR clone 111551 (TRAV16, TRAJ33)
CALHSNYQLIW

SEQ ID NO: 223102 - protein, 17 aa, Homo sapiens
  CDR3 for beta chain variable domain of TCR clone 111551 (TRBV6-5, TRBJ2-2)
CASSYSTSGGNTGELFF

SEQ ID NO: 223103 - protein, 11 aa, Homo sapiens
  CDR3 for alpha chain variable domain of TCR clone 111552 (TRAV3, TRAJ21)
CAVGNFNKFYF

SEQ ID NO: 223104 - protein, 17 aa, Homo sapiens
  CDR3 for beta chain variable domain of TCR clone 111552 (TRBV20-1, TRBJ2-1)
CSASSSGIAGSYNEQFF

SEQ ID NO: 223105 - protein, 15 aa, Homo sapiens
  CDR3 for alpha chain variable domain of TCR clone 111553 (TRAV35, TRAJ40)
CAGQLGTSGTCKYIF

SEQ ID NO: 223106 - protein, 14 aa, Homo sapiens
  CDR3 for beta chain variable domain of TCR clone 111553 (TRBV7-3, TRBJ2-1)
CASSLAGGTNEQFF

SEQ ID NO: 223107 - protein, 13 aa, Homo sapiens
  CDR3 for alpha chain variable domain of TCR clone 111554 (TRAV38-2/DV8, TRAJ34)
CAHRNYNTDKLIF

SEQ ID NO: 223108 - protein, 15 aa, Homo sapiens
  CDR3 for beta chain variable domain of TCR clone 111554 (TRBV20-1, TRBJ2-5)
CSAEGTGGLQETQYF

SEQ ID NO: 223109 - protein, 14 aa, Homo sapiens
  CDR3 for alpha chain variable domain of TCR clone 111555 (TRAV2, TRAJ9)
CAVEDRGGGFKTIF

SEQ ID NO: 223110 - protein, 15 aa, Homo sapiens
  CDR3 for beta chain variable domain of TCR clone 111555 (TRBV11-3, TRBJ2-3)
CASLKDGREGDTQYF

SEQ ID NO: 223111 - protein, 14 aa, Homo sapiens
  CDR3 for alpha chain variable domain of TCR clone 111556 (TRAV25, TRAJ44)
CAVLPTGTASKLTF

SEQ ID NO: 223112 - protein, 14 aa, Homo sapiens
  CDR3 for beta chain variable domain of TCR clone 111556 (TRBV19, TRBJ1-1)
CASTGHRLNTEAFF

SEQ ID NO: 223113 - protein, 10 aa, Homo sapiens
  CDR3 for alpha chain variable domain of TCR clone 111557 (TRAV16, TRAJ22)
SAMYLRQLTF

SEQ ID NO: 223114 - protein, 15 aa, Homo sapiens
  CDR3 for beta chain variable domain of TCR clone 111557 (TRBV7-9, TRBJ1-6)
CASSSPGRGNSPLYF

SEQ ID NO: 223115 - protein, 12 aa, Homo sapiens
  CDR3 for alpha chain variable domain of TCR clone 111558 (TRAV2, TRAJ10)
CASTGRGNKLTF

SEQ ID NO: 223116 - protein, 14 aa, Homo sapiens
  CDR3 for beta chain variable domain of TCR clone 111558 (TRBV7-2, TRBJ2-2)
CASRGQGAAGELFF

SEQ ID NO: 223117 - protein, 14 aa, Homo sapiens
  CDR3 for alpha chain variable domain of TCR clone 111559 (TRAV17, TRAJ6)
FATDASGGSYIPTF

SEQ ID NO: 223118 - protein, 19 aa, Homo sapiens
  CDR3 for beta chain variable domain of TCR clone 111559 (TRBV4-3, TRBJ2-7)
CASSQEFIGWQVTPYEQYF

SEQ ID NO: 223119 - protein, 17 aa, Homo sapiens
  CDR3 for alpha chain variable domain of TCR clone 111560 (TRAV26-1, TRAJ22)
CTVRVPSHSGSASQLTF

SEQ ID NO: 223120 - protein, 16 aa, Homo sapiens
  CDR3 for beta chain variable domain of TCR clone 111560 (TRBV28, TRBJ2-1)
CASRRSGRVVGNEQFF

SEQ ID NO: 223121 - protein, 14 aa, Homo sapiens
  CDR3 for alpha chain variable domain of TCR clone 111561 (TRAV35, TRAJ22)
CAGLRPGSARQLTF

SEQ ID NO: 223122 - protein, 15 aa, Homo sapiens
  CDR3 for beta chain variable domain of TCR clone 111561 (TRBV12-4, TRBJ2-5)
CGSSPPTGLQETQYF

SEQ ID NO: 223123 - protein, 16 aa, Homo sapiens
  CDR3 for alpha chain variable domain of TCR clone 111562 (TRAV23/DV6, TRAJ9)
CAASIGGNTGCFKTIF

SEQ ID NO: 223124 - protein, 14 aa, Homo sapiens
  CDR3 for beta chain variable domain of TCR clone 111562 (TRBV9, TRBJ2-7)
CASSVGVGSYEQYF

SEQ ID NO: 223125 - protein, 13 aa, Homo sapiens
  CDR3 for alpha chain variable domain of TCR clone 111563 (TRAV20, TRAJ48)
CAVQGVGNEKLTF

SEQ ID NO: 223126 - protein, 19 aa, Homo sapiens
  CDR3 for beta chain variable domain of TCR clone 111563 (TRBV2, TRBJ2-2)
CARSQPGLAGGGNTGELFF

SEQ ID NO: 223127 - protein, 16 aa, Homo sapiens
  CDR3 for alpha chain variable domain of TCR clone 111564 (TRAV27, TRAJ45)
CPPRGRRGGGADGLTF

SEQ ID NO: 223128 - protein, 14 aa, Homo sapiens
  CDR3 for beta chain variable domain of TCR clone 111564 (TRBV19, TRBJ2-1)
CASKDPSSYNEQFF

SEQ ID NO: 223129 - protein, 15 aa, Homo sapiens
  CDR3 for alpha chain variable domain of TCR clone 111565 (TRAV2, TRAJ9)
CAVEDRGTGGFKTIF

SEQ ID NO: 223130 - protein, 16 aa, Homo sapiens
  CDR3 for beta chain variable domain of TCR clone 111565 (TRBV24-1, TRBJ2-3)
CAISDPGTGATDTQYF

SEQ ID NO: 223131 - protein, 13 aa, Homo sapiens
  CDR3 for alpha chain variable domain of TCR clone 111566 (TRAV21, TRAJ45)
CAVMGGGSDGLTF

SEQ ID NO: 223132 - protein, 14 aa, Homo sapiens
  CDR3 for beta chain variable domain of TCR clone 111566 (TRBV4-3, TRBJ1-4)
CASSPLQRNEKLFF

SEQ ID NO: 223133 - protein, 16 aa, Homo sapiens
  CDR3 for alpha chain variable domain of TCR clone 111567 (TRAV21, TRAJ45)
CAVSWGSGGGADGPTF

SEQ ID NO: 223134 - protein, 14 aa, Homo sapiens
  CDR3 for beta chain variable domain of TCR clone 111567 (TRBV4-2, TRBJ1-2)
CASSPGGSNYGYTF

SEQ ID NO: 223135 - protein, 16 aa, Homo sapiens
  CDR3 for alpha chain variable domain of TCR clone 111568 (TRAV30, TRAJ24)
CGTEIVDANSWGKFQF

SEQ ID NO: 223136 - protein, 15 aa, Homo sapiens
  CDR3 for beta chain variable domain of TCR clone 111568 (TRBV27, TRBJ2-1)
CASSNGGGSSNEQFF

SEQ ID NO: 223137 - protein, 13 aa, Homo sapiens
  CDR3 for alpha chain variable domain of TCR clone 111569 (TRAV12-2, TRAJ24)
CAVSTDSCGKLQF

SEQ ID NO: 223138 - protein, 12 aa, Homo sapiens
  CDR3 for beta chain variable domain of TCR clone 111569 (TRBV7-6, TRBJ2-7)
CASSLADSGQYF

SEQ ID NO: 223139 - protein, 14 aa, Homo sapiens
  CDR3 for alpha chain variable domain of TCR clone 111570 (TRAV26-1, TRAJ38)
CIADNAGNNRKLIW

SEQ ID NO: 223140 - protein, 16 aa, Homo sapiens
  CDR3 for beta chain variable domain of TCR clone 111570 (TRBV3-1, TRBJ2-7)
CASSQGATGVAYEQYF

SEQ ID NO: 223141 - protein, 13 aa, Homo sapiens
  CDR3 for alpha chain variable domain of TCR clone 111571 (TRAV26-2, TRAJ33)
CILTLDSNYQLIW

SEQ ID NO: 223142 - protein, 15 aa, Homo sapiens
  CDR3 for beta chain variable domain of TCR clone 111571 (TRBV7-8, TRBJ1-1)
CASSLGDSRNTEAFF

SEQ ID NO: 223143 - protein, 12 aa, Homo sapiens
  CDR3 for alpha chain variable domain of TCR clone 111572 (TRAV12-3, TRAJ17)
CAMTLTGNKLTF

SEQ ID NO: 223144 - protein, 13 aa, Homo sapiens
  CDR3 for beta chain variable domain of TCR clone 111572 (TRBV25-1, TRBJ1-1)
CQHPPGGNTEAFF

SEQ ID NO: 223145 - protein, 17 aa, Homo sapiens
  CDR3 for alpha chain variable domain of TCR clone 111573 (TRAV3, TRAJ12)
CAVRDGRRMDSSYKLIF

SEQ ID NO: 223146 - protein, 13 aa, Homo sapiens
  CDR3 for beta chain variable domain of TCR clone 111573 (TRBV15, TRBJ1-6)
CATSEGLNSPLHF

SEQ ID NO: 223147 - protein, 15 aa, Homo sapiens
  CDR3 for alpha chain variable domain of TCR clone 111574 (TRAV8-3, TRAJ28)
CAVAYSGAGSYQLTF

SEQ ID NO: 223148 - protein, 13 aa, Homo sapiens
  CDR3 for beta chain variable domain of TCR clone 111574 (TRBV24-1, TRBJ2-2)
CATSDWSTGELLF

SEQ ID NO: 223149 - protein, 15 aa, Homo sapiens
  CDR3 for alpha chain variable domain of TCR clone 111575 (TRAV8-3, TRAJ45)
CASSYSGGGADGLTF

SEQ ID NO: 223150 - protein, 15 aa, Homo sapiens
  CDR3 for beta chain variable domain of TCR clone 111575 (TRBV12-4, TRBJ1-2)
CASSPITGGGYGYTF

SEQ ID NO: 223151 - protein, 11 aa, Homo sapiens
  CDR3 for alpha chain variable domain of TCR clone 111576 (TRAV21, TRAJ41)
CAVRSGYALNF

SEQ ID NO: 223152 - protein, 13 aa, Homo sapiens
  CDR3 for beta chain variable domain of TCR clone 111576 (TRBV7-9, TRBJ1-2)
CASSLKQNYGNTF

SEQ ID NO: 223153 - protein, 14 aa, Homo sapiens
  CDR3 for alpha chain variable domain of TCR clone 111577 (TRAV21, TRAJ37)
CAVKGSSDTGKLIF

SEQ ID NO: 223154 - protein, 14 aa, Homo sapiens
  CDR3 for beta chain variable domain of TCR clone 111577 (TRBV7-2, TRBJ2-1)
CASSRGGARNEQFF

SEQ ID NO: 223155 - protein, 14 aa, Homo sapiens
  CDR3 for alpha chain variable domain of TCR clone 111578 (TRAV35, TRAJ50)
CAGYRKTSYDKVIF

SEQ ID NO: 223156 - protein, 13 aa, Homo sapiens
  CDR3 for beta chain variable domain of TCR clone 111578 (TRBV7-7, TRBJ2-3)
CASSLSRADTQYF

SEQ ID NO: 223157 - protein, 13 aa, Homo sapiens
  CDR3 for alpha chain variable domain of TCR clone 111579 (TRAV21, TRAJ57)
CAVTQGGSEKLVF

SEQ ID NO: 223158 - protein, 14 aa, Homo sapiens
  CDR3 for beta chain variable domain of TCR clone 111579 (TRBV28, TRBJ1-1)
CASSESGRGTEAFF

SEQ ID NO: 223159 - protein, 16 aa, Homo sapiens
  CDR3 for alpha chain variable domain of TCR clone 111580 (TRAV1-2, TRAJ10)
CAVRGVLTGGGNKLNF

SEQ ID NO: 223160 - protein, 12 aa, Homo sapiens
  CDR3 for beta chain variable domain of TCR clone 111580 (TRBV12-4, TRBJ2-7)
CASSLGGYEQYF

SEQ ID NO: 223161 - protein, 16 aa, Homo sapiens
  CDR3 for alpha chain variable domain of TCR clone 111581 (TRAV17, TRAJ28)
CATASVSGAGSYQLTS

SEQ ID NO: 223162 - protein, 11 aa, Homo sapiens
  CDR3 for beta chain variable domain of TCR clone 111581 (TRBV7-9, TRBJ2-5)
CASSLGETQYF

SEQ ID NO: 223163 - protein, 12 aa, Homo sapiens
  CDR3 for alpha chain variable domain of TCR clone 111582 (TRAV21, TRAJ33)
CAKMDSNYQLIW

SEQ ID NO: 223164 - protein, 16 aa, Homo sapiens
  CDR3 for beta chain variable domain of TCR clone 111582 (TRBV5-1, TRBJ2-2)
CASSSRTGGRTGELFF

SEQ ID NO: 223165 - protein, 13 aa, Homo sapiens
  CDR3 for alpha chain variable domain of TCR clone 111583 (TRAV29/DV5, TRAJ31)
CAASRNNNARLMF

SEQ ID NO: 223166 - protein, 16 aa, Homo sapiens
  CDR3 for beta chain variable domain of TCR clone 111583 (TRBV5-1, TRBJ2-5)
CASSSSGLGGAETQYF

SEQ ID NO: 223167 - protein, 14 aa, Homo sapiens
  CDR3 for alpha chain variable domain of TCR clone 111584 (TRAV13-2, TRAJ11)
CAETGNSGYSTLTF

SEQ ID NO: 223168 - protein, 11 aa, Homo sapiens
  CDR3 for beta chain variable domain of TCR clone 111584 (TRBV10-3, TRBJ2-7)
CAIGEGLEQYF

SEQ ID NO: 223169 - protein, 14 aa, Homo sapiens
  CDR3 for alpha chain variable domain of TCR clone 111585 (TRAV12-3, TRAJ10)
SHLPLTGGGNKLTF

SEQ ID NO: 223170 - protein, 15 aa, Homo sapiens
  CDR3 for beta chain variable domain of TCR clone 111585 (TRBV9, TRBJ2-1)
CASSLAGSSHNEQFF

SEQ ID NO: 223171 - protein, 14 aa, Homo sapiens
  CDR3 for alpha chain variable domain of TCR clone 111586 (TRAV12-2, TRAJ17)
CAVDIKAAGNKLTF

SEQ ID NO: 223172 - protein, 16 aa, Homo sapiens
  CDR3 for beta chain variable domain of TCR clone 111586 (TRBV20-1, TRBJ2-6)
CSASSQGYDGANVLTF

SEQ ID NO: 223173 - protein, 17 aa, Homo sapiens
  CDR3 for alpha chain variable domain of TCR clone 111587 (TRAV23/DV6, TRAJ57)
CAASSTLSQGGSEKLVF

SEQ ID NO: 223174 - protein, 14 aa, Homo sapiens
  CDR3 for beta chain variable domain of TCR clone 111587 (TRBV25-1, TRBJ1-1)
CGSTHLGGNTEAFF

SEQ ID NO: 223175 - protein, 12 aa, Homo sapiens
  CDR3 for alpha chain variable domain of TCR clone 111588 (TRAV12-3, TRAJ17)
CAMTLTGNKLTF

SEQ ID NO: 223176 - protein, 16 aa, Homo sapiens
  CDR3 for beta chain variable domain of TCR clone 111588 (TRBV10-3, TRBJ1-5)
CAISDQVGAPNQPQHF

SEQ ID NO: 223177 - protein, 14 aa, Homo sapiens
  CDR3 for alpha chain variable domain of TCR clone 111589 (TRAV12-2, TRAJ13)
CAVKKTGGYQKVTF

SEQ ID NO: 223178 - protein, 16 aa, Homo sapiens
  CDR3 for beta chain variable domain of TCR clone 111589 (TRBV4-1, TRBJ2-1)
CASSQEAGQGSDEQFF

SEQ ID NO: 223179 - protein, 14 aa, Homo sapiens
  CDR3 for alpha chain variable domain of TCR clone 111590 (TRAV17, TRAJ39)
CATDPVRAGNMRTF

SEQ ID NO: 223180 - protein, 15 aa, Homo sapiens
  CDR3 for beta chain variable domain of TCR clone 111590 (TRBV13, TRBJ1-5)
CASSFGQGGVQPQHF

SEQ ID NO: 223181 - protein, 13 aa, Homo sapiens
  CDR3 for alpha chain variable domain of TCR clone 111591 (TRAV2, TRAJ20)
CAVEDPSEYKPSF

SEQ ID NO: 223182 - protein, 16 aa, Homo sapiens
  CDR3 for beta chain variable domain of TCR clone 111591 (TRBV25-1, TRBJ2-7)
CASSELTGGGIYEQYF

SEQ ID NO: 223183 - protein, 18 aa, Homo sapiens
  CDR3 for alpha chain variable domain of TCR clone 111592 (TRAV21, TRAJ52)
CAVRPSPAGGTSYGKLTF

SEQ ID NO: 223184 - protein, 14 aa, Homo sapiens
  CDR3 for beta chain variable domain of TCR clone 111592 (TRBV19, TRBJ2-3)
CASSAPRGTDTQYF

SEQ ID NO: 223185 - protein, 14 aa, Homo sapiens
  CDR3 for alpha chain variable domain of TCR clone 111593 (TRAV12-2, TRAJ45)
CALPERGGADGLTF

SEQ ID NO: 223186 - protein, 16 aa, Homo sapiens
  CDR3 for beta chain variable domain of TCR clone 111593 (TRBV13, TRBJ2-2)
CASSPRTGEHTGELFF

SEQ ID NO: 223187 - protein, 15 aa, Homo sapiens
  CDR3 for alpha chain variable domain of TCR clone 111594 (TRAV23/DV6, TRAJ18)
CAASFRGSTMGRLYF

SEQ ID NO: 223188 - protein, 13 aa, Homo sapiens
  CDR3 for beta chain variable domain of TCR clone 111594 (TRBV28, TRBJ2-7)
CAILDRAGGEQYF

SEQ ID NO: 223189 - protein, 12 aa, Homo sapiens
  CDR3 for alpha chain variable domain of TCR clone 111595 (TRAV21, TRAJ57)
CAVTQGGSKAGL

SEQ ID NO: 223190 - protein, 16 aa, Homo sapiens
  CDR3 for beta chain variable domain of TCR clone 111595 (TRBV29-1, TRBJ2-7)
CSVEDAEDGTAYEQYF

SEQ ID NO: 223191 - protein, 15 aa, Homo sapiens
  CDR3 for alpha chain variable domain of TCR clone 111596 (TRAV3, TRAJ5)
CAVRDLDTGRRALTF

SEQ ID NO: 223192 - protein, 13 aa, Homo sapiens
  CDR3 for beta chain variable domain of TCR clone 111596 (TRBV12-4, TRBJ2-7)
CPSSPTETYEQYF

SEQ ID NO: 223193 - protein, 11 aa, Homo sapiens
  CDR3 for alpha chain variable domain of TCR clone 111597 (TRAV17, TRAJ31)
CATSNNAILMF

SEQ ID NO: 223194 - protein, 16 aa, Homo sapiens
  CDR3 for beta chain variable domain of TCR clone 111597 (TRBV7-8, TRBJ2-4)
CASSAERTLAKNIQYF

SEQ ID NO: 223195 - protein, 13 aa, Homo sapiens
  CDR3 for alpha chain variable domain of TCR clone 111598 (TRAV8-3, TRAJ36)
CAVGATGANNLFF

SEQ ID NO: 223196 - protein, 15 aa, Homo sapiens
  CDR3 for beta chain variable domain of TCR clone 111598 (TRBV7-2, TRBJ2-1)
CASSLVAGRYNEQFF

SEQ ID NO: 223197 - protein, 15 aa, Homo sapiens
  CDR3 for alpha chain variable domain of TCR clone 111599 (TRAV41, TRAJ45)
CAASYSGGGADGLTF

SEQ ID NO: 223198 - protein, 14 aa, Homo sapiens
  CDR3 for beta chain variable domain of TCR clone 111599 (TRBV20-1, TRBJ2-7)
CSAPELAGVGEQYF

SEQ ID NO: 223199 - protein, 14 aa, Homo sapiens
  CDR3 for alpha chain variable domain of TCR clone 111600 (TRAV13-1, TRAJ44)
CAAQATGTASKLTF

SEQ ID NO: 223200 - protein, 13 aa, Homo sapiens
  CDR3 for beta chain variable domain of TCR clone 111600 (TRBV5-5, TRBJ1-2)
CASSFWRGEDYTF

SEQ ID NO: 223201 - protein, 14 aa, Homo sapiens
  CDR3 for alpha chain variable domain of TCR clone 111601 (TRAV17, TRAJ34)
CATDSLEGTDKLIF

SEQ ID NO: 223202 - protein, 14 aa, Homo sapiens
  CDR3 for beta chain variable domain of TCR clone 111601 (TRBV7-6, TRBJ2-3)
CASSLGTVTDTQYF

SEQ ID NO: 223203 - protein, 16 aa, Homo sapiens
  CDR3 for alpha chain variable domain of TCR clone 111602 (TRAV35, TRAJ28)
CAGQRYSGAGSYQLTS

SEQ ID NO: 223204 - protein, 13 aa, Homo sapiens
  CDR3 for beta chain variable domain of TCR clone 111602 (TRBV19, TRBJ1-2)
CASSQGQVYGYTF

SEQ ID NO: 223205 - protein, 22 aa, Homo sapiens
  CDR3 for alpha chain variable domain of TCR clone 111603 (TRAV4, )
CLVGPHNYDIQNPDPAVYPLRD

SEQ ID NO: 223206 - protein, 17 aa, Homo sapiens
  CDR3 for beta chain variable domain of TCR clone 111603 (TRBV24-1, TRBJ2-1)
CATSDVSTSGTYNEQFF

SEQ ID NO: 223207 - protein, 14 aa, Homo sapiens
  CDR3 for alpha chain variable domain of TCR clone 111604 (TRAV1-2, TRAJ16)
CAVNRFSDGQKLLF

SEQ ID NO: 223208 - protein, 16 aa, Homo sapiens
  CDR3 for beta chain variable domain of TCR clone 111604 (TRBV20-1, TRBJ1-4)
CSAPGRGLLTNEKLFF

SEQ ID NO: 223209 - protein, 14 aa, Homo sapiens
  CDR3 for alpha chain variable domain of TCR clone 111605 (TRAV13-1, TRAJ44)
CAAKATGTASKLTF

SEQ ID NO: 223210 - protein, 12 aa, Homo sapiens
  CDR3 for beta chain variable domain of TCR clone 111605 (TRBV7-9, TRBJ1-4)
CASSTDREKLFF

SEQ ID NO: 223211 - protein, 14 aa, Homo sapiens
  CDR3 for alpha chain variable domain of TCR clone 111606 (TRAV16, TRAJ17)
CALSEGAAGNKLTF

SEQ ID NO: 223212 - protein, 13 aa, Homo sapiens
  CDR3 for beta chain variable domain of TCR clone 111606 (TRBV7-9, TRBJ1-2)
CASSLKQNYGYTF

SEQ ID NO: 223213 - protein, 16 aa, Homo sapiens
  CDR3 for alpha chain variable domain of TCR clone 111607 (TRAV12-3, TRAJ53)
CAMSPGSGGSNYKLTF

SEQ ID NO: 223214 - protein, 16 aa, Homo sapiens
  CDR3 for beta chain variable domain of TCR clone 111607 (TRBV4-2, TRBJ1-1)
CASSQAGFAMNTEAFF

SEQ ID NO: 223215 - protein, 14 aa, Homo sapiens
  CDR3 for alpha chain variable domain of TCR clone 111608 (TRAV12-2, TRAJ40)
CAVKIPSGTYKYIF

SEQ ID NO: 223216 - protein, 17 aa, Homo sapiens
  CDR3 for beta chain variable domain of TCR clone 111608 (TRBV7-2, TRBJ2-5)
CASNSHSGRGKAETQYF

SEQ ID NO: 223217 - protein, 13 aa, Homo sapiens
  CDR3 for alpha chain variable domain of TCR clone 111609 (TRAV2, TRAJ40)
CAVVTSGTYKYIF

SEQ ID NO: 223218 - protein, 16 aa, Homo sapiens
  CDR3 for beta chain variable domain of TCR clone 111609 (TRBV19, TRBJ2-1)
CAISKAGPSSYNEQFF

SEQ ID NO: 223219 - protein, 15 aa, Homo sapiens
  CDR3 for alpha chain variable domain of TCR clone 111610 (TRAV17, TRAJ35)
CATAFVIGFGNVLNC

SEQ ID NO: 223220 - protein, 14 aa, Homo sapiens
  CDR3 for beta chain variable domain of TCR clone 111610 (TRBV6-1, TRBJ1-3)
CASVQGGGGNTIYF

SEQ ID NO: 223221 - protein, 14 aa, Homo sapiens
  CDR3 for alpha chain variable domain of TCR clone 111611 (TRAV20, TRAJ29)
CAVQAGVGNTPLVF

SEQ ID NO: 223222 - protein, 15 aa, Homo sapiens
  CDR3 for beta chain variable domain of TCR clone 111611 (TRBV29-1, TRBJ2-7)
CSVEFFDRGSYEQYF

SEQ ID NO: 223223 - protein, 17 aa, Homo sapiens
  CDR3 for alpha chain variable domain of TCR clone 111612 (TRAV8-1, TRAJ43)
CAVTNGMRFGAGTRLTV

SEQ ID NO: 223224 - protein, 17 aa, Homo sapiens
  CDR3 for beta chain variable domain of TCR clone 111612 (TRBV5-4, TRBJ2-1)
CASSSAGGRGPYNEQFF

SEQ ID NO: 223225 - protein, 14 aa, Homo sapiens
  CDR3 for alpha chain variable domain of TCR clone 111613 (TRAV8-2, TRAJ4)
CVVSPSGGYNKLIF

SEQ ID NO: 223226 - protein, 17 aa, Homo sapiens
  CDR3 for beta chain variable domain of TCR clone 111613 (TRBV4-1, TRBJ1-4)
CASSDTGGTNENCFLAV

SEQ ID NO: 223227 - protein, 15 aa, Homo sapiens
  CDR3 for alpha chain variable domain of TCR clone 111614 (TRAV25, TRAJ52)
CAGRPGGTSYGKLTF

SEQ ID NO: 223228 - protein, 11 aa, Homo sapiens
  CDR3 for beta chain variable domain of TCR clone 111614 (TRBV29-1, TRBJ2-5)
CSEDRTGTQYF

SEQ ID NO: 223229 - protein, 13 aa, Homo sapiens
  CDR3 for alpha chain variable domain of TCR clone 111615 (TRAV35, TRAJ42)
CAGFPGSQGNLIF

SEQ ID NO: 223230 - protein, 14 aa, Homo sapiens
  CDR3 for beta chain variable domain of TCR clone 111615 (TRBV19, TRBJ2-1)
CASPTLVLSGEQFF

SEQ ID NO: 223231 - protein, 14 aa, Homo sapiens
  CDR3 for alpha chain variable domain of TCR clone 111616 (TRAV12-3, TRAJ29)
CAMSPYSGNTPLVF

SEQ ID NO: 223232 - protein, 15 aa, Homo sapiens
  CDR3 for beta chain variable domain of TCR clone 111616 (TRBV20-1, TRBJ2-7)
CSARDRVSGMDEQYF

SEQ ID NO: 223233 - protein, 11 aa, Homo sapiens
  CDR3 for alpha chain variable domain of TCR clone 111617 (TRAV1-1, TRAJ23)
CAVRQGGKLIF

SEQ ID NO: 223234 - protein, 16 aa, Homo sapiens
  CDR3 for beta chain variable domain of TCR clone 111617 (TRBV2, TRBJ1-4)
CASNLLQGATNEKLFL

SEQ ID NO: 223235 - protein, 16 aa, Homo sapiens
  CDR3 for alpha chain variable domain of TCR clone 111618 (TRAV4, TRAJ22)
CLVGDLYSGSARQLTF

SEQ ID NO: 223236 - protein, 13 aa, Homo sapiens
  CDR3 for beta chain variable domain of TCR clone 111618 (TRBV7-9, TRBJ2-5)
CASTPVGQETQYF

SEQ ID NO: 223237 - protein, 12 aa, Homo sapiens
  CDR3 for alpha chain variable domain of TCR clone 111619 (TRAV4, TRAJ26)
CLVGDDGQNFVF

SEQ ID NO: 223238 - protein, 16 aa, Homo sapiens
  CDR3 for beta chain variable domain of TCR clone 111619 (TRBV7-2, TRBJ1-2)
CASSSNQDRRGHGYTF

SEQ ID NO: 223239 - protein, 13 aa, Homo sapiens
  CDR3 for alpha chain variable domain of TCR clone 111620 (TRAV8-4, TRAJ34)
CAVTLYNTDKLVF

SEQ ID NO: 223240 - protein, 17 aa, Homo sapiens
  CDR3 for beta chain variable domain of TCR clone 111620 (TRBV7-2, TRBJ2-2)
CASSPSWRGGGTGELFF

SEQ ID NO: 223241 - protein, 15 aa, Homo sapiens
  CDR3 for alpha chain variable domain of TCR clone 111621 (TRAV21, TRAJ53)
CATLNSGGSNYKLTF

SEQ ID NO: 223242 - protein, 16 aa, Homo sapiens
  CDR3 for beta chain variable domain of TCR clone 111621 (TRBV9, TRBJ2-1)
CASSVGGGGNYNVQFF

SEQ ID NO: 223243 - protein, 13 aa, Homo sapiens
  CDR3 for alpha chain variable domain of TCR clone 111622 (TRAV2, TRAJ40)
CAVVTSGTYKYIF

SEQ ID NO: 223244 - protein, 15 aa, Homo sapiens
  CDR3 for beta chain variable domain of TCR clone 111622 (TRBV11-3, TRBJ2-3)
CGSLKDGREGDTQYF

SEQ ID NO: 223245 - protein, 12 aa, Homo sapiens
  CDR3 for alpha chain variable domain of TCR clone 111623 (TRAV12-1, TRAJ40)
CVVYSGTYKYIF

SEQ ID NO: 223246 - protein, 13 aa, Homo sapiens
  CDR3 for beta chain variable domain of TCR clone 111623 (TRBV2, TRBJ1-1)
CASSEGGNTEAFF

SEQ ID NO: 223247 - protein, 14 aa, Homo sapiens
  CDR3 for alpha chain variable domain of TCR clone 111624 (TRAV13-2, TRAJ22)
FADGTLGSARQLTF

SEQ ID NO: 223248 - protein, 16 aa, Homo sapiens
  CDR3 for beta chain variable domain of TCR clone 111624 (TRBV19, TRBJ2-1)
CASSSKGTRSYNEQFF

SEQ ID NO: 223249 - protein, 12 aa, Homo sapiens
  CDR3 for alpha chain variable domain of TCR clone 111625 (TRAV36/DV7, TRAJ54)
CAVVRGAQKLVF

SEQ ID NO: 223250 - protein, 16 aa, Homo sapiens
  CDR3 for beta chain variable domain of TCR clone 111625 (TRBV7-8, TRBJ2-4)
CASSAERTLAKNIQYF

SEQ ID NO: 223251 - protein, 13 aa, Homo sapiens
  CDR3 for alpha chain variable domain of TCR clone 111626 (TRAV2, TRAJ40)
CAVVTSGTYKYIF

SEQ ID NO: 223252 - protein, 13 aa, Homo sapiens
  CDR3 for beta chain variable domain of TCR clone 111626 (TRBV13, TRBJ2-2)
CASSGGNTGELFF

SEQ ID NO: 223253 - protein, 17 aa, Homo sapiens
  CDR3 for alpha chain variable domain of TCR clone 111627 (TRAV3, TRAJ6)
CAVRDGPRTGGSYIPTF

SEQ ID NO: 223254 - protein, 18 aa, Homo sapiens
  CDR3 for beta chain variable domain of TCR clone 111627 (TRBV7-9, TRBJ2-7)
CASSLTTSGSRTWYEQYF

SEQ ID NO: 223255 - protein, 14 aa, Homo sapiens
  CDR3 for alpha chain variable domain of TCR clone 111628 (TRAV1-2, TRAJ16)
CAVNRFSDGQKLLF

SEQ ID NO: 223256 - protein, 15 aa, Homo sapiens
  CDR3 for beta chain variable domain of TCR clone 111628 (TRBV20-1, TRBJ2-7)
CSARDRVSRMDEQYF

SEQ ID NO: 223257 - protein, 12 aa, Homo sapiens
  CDR3 for alpha chain variable domain of TCR clone 111629 (TRAV2, TRAJ31)
CAVEDNNARLMF

SEQ ID NO: 223258 - protein, 16 aa, Homo sapiens
  CDR3 for beta chain variable domain of TCR clone 111629 (TRBV27, TRBJ1-1)
CASSSRGRTGYTEAFF

SEQ ID NO: 223259 - protein, 16 aa, Homo sapiens
  CDR3 for alpha chain variable domain of TCR clone 111630 (TRAV3, TRAJ13)
CAVRDPTSGGYQKVTF

SEQ ID NO: 223260 - protein, 13 aa, Homo sapiens
  CDR3 for beta chain variable domain of TCR clone 111630 (TRBV7-9, TRBJ2-7)
CASSLQGSYEQYF

SEQ ID NO: 223261 - protein, 14 aa, Homo sapiens
  CDR3 for alpha chain variable domain of TCR clone 111631 (TRAV2, TRAJ37)
CAVDFTSNTGKLIF

SEQ ID NO: 223262 - protein, 14 aa, Homo sapiens
  CDR3 for beta chain variable domain of TCR clone 111631 (TRBV7-6, TRBJ1-6)
CASSQAGGGSPLHF

SEQ ID NO: 223263 - protein, 15 aa, Homo sapiens
  CDR3 for alpha chain variable domain of TCR clone 111632 (TRAV14/DV4, TRAJ47)
CAMREAMEYGNKLVF

SEQ ID NO: 223264 - protein, 12 aa, Homo sapiens
  CDR3 for beta chain variable domain of TCR clone 111632 (TRBV18, TRBJ1-4)
CASSPSREKLFF

SEQ ID NO: 223265 - protein, 13 aa, Homo sapiens
  CDR3 for alpha chain variable domain of TCR clone 111633 (TRAV8-4, TRAJ4)
CAVSDIGYNKLIF

SEQ ID NO: 223266 - protein, 13 aa, Homo sapiens
  CDR3 for beta chain variable domain of TCR clone 111633 (TRBV19, TRBJ1-2)
CASSRGQVYGYTF

SEQ ID NO: 223267 - protein, 15 aa, Homo sapiens
  CDR3 for alpha chain variable domain of TCR clone 111634 (TRAV12-1, TRAJ9)
CVVSFGDTGGFKTIF

SEQ ID NO: 223268 - protein, 17 aa, Homo sapiens
  CDR3 for beta chain variable domain of TCR clone 111634 (TRBV27, TRBJ2-2)
CTSVPAGGLAGGRELFF

SEQ ID NO: 223269 - protein, 16 aa, Homo sapiens
  CDR3 for alpha chain variable domain of TCR clone 111635 (TRAV12-3, TRAJ53)
CAMSPGRGGSNYKLTF

SEQ ID NO: 223270 - protein, 16 aa, Homo sapiens
  CDR3 for beta chain variable domain of TCR clone 111635 (TRBV5-1, TRBJ2-3)
CASSLEGGSFTDTQYF

SEQ ID NO: 223271 - protein, 13 aa, Homo sapiens
  CDR3 for alpha chain variable domain of TCR clone 111636 (TRAV25, TRAJ35)
CAGGGALGMCCIA

SEQ ID NO: 223272 - protein, 15 aa, Homo sapiens
  CDR3 for beta chain variable domain of TCR clone 111636 (TRBV12-4, TRBJ2-5)
CASSPPTGLQETQYF

SEQ ID NO: 223273 - protein, 11 aa, Homo sapiens
  CDR3 for alpha chain variable domain of TCR clone 111637 (TRAV13-1, TRAJ6)
CATLGSYLPTF

SEQ ID NO: 223274 - protein, 12 aa, Homo sapiens
  CDR3 for beta chain variable domain of TCR clone 111637 (TRBV11-2, TRBJ2-1)
CASSPGNNEQFF

SEQ ID NO: 223275 - protein, 15 aa, Homo sapiens
  CDR3 for alpha chain variable domain of TCR clone 111638 (TRAV3, TRAJ22)
CAVRDRGGSARQLTL

SEQ ID NO: 223276 - protein, 14 aa, Homo sapiens
  CDR3 for beta chain variable domain of TCR clone 111638 (TRBV19, TRBJ2-1)
CASSRLASINEQFF

SEQ ID NO: 223277 - protein, 14 aa, Homo sapiens
  CDR3 for alpha chain variable domain of TCR clone 111639 (TRAV17, TRAJ31)
CATVLRNNNARLMF

SEQ ID NO: 223278 - protein, 14 aa, Homo sapiens
  CDR3 for beta chain variable domain of TCR clone 111639 (TRBV12-4, TRBJ2-5)
CASSLSQKQETQYF

SEQ ID NO: 223279 - protein, 12 aa, Homo sapiens
  CDR3 for alpha chain variable domain of TCR clone 111640 (TRAV8-6, TRAJ43)
CAVSNNNNDMRF

SEQ ID NO: 223280 - protein, 16 aa, Homo sapiens
  CDR3 for beta chain variable domain of TCR clone 111640 (TRBV18, TRBJ2-7)
CASSPRSQGISYEQYF

SEQ ID NO: 223281 - protein, 10 aa, Homo sapiens
  CDR3 for alpha chain variable domain of TCR clone 111641 (TRAV20, TRAJ37)
CSSNTGKLIF

SEQ ID NO: 223282 - protein, 11 aa, Homo sapiens
  CDR3 for beta chain variable domain of TCR clone 111641 (TRBV12-4, TRBJ2-3)
CASTATDTQYF

SEQ ID NO: 223283 - protein, 14 aa, Homo sapiens
  CDR3 for alpha chain variable domain of TCR clone 111642 (TRAV16, TRAJ33)
CALSAMDSNYQLIW

SEQ ID NO: 223284 - protein, 15 aa, Homo sapiens
  CDR3 for beta chain variable domain of TCR clone 111642 (TRBV28, TRBJ1-5)
CASSRTGGYVQPQHF

SEQ ID NO: 223285 - protein, 15 aa, Homo sapiens
  CDR3 for alpha chain variable domain of TCR clone 111643 (TRAV27, TRAJ38)
CAARRNAGNNRQLIW

SEQ ID NO: 223286 - protein, 11 aa, Homo sapiens
  CDR3 for beta chain variable domain of TCR clone 111643 (TRBV12-4, TRBJ2-2)
CASSSAGELFF

SEQ ID NO: 223287 - protein, 13 aa, Homo sapiens
  CDR3 for alpha chain variable domain of TCR clone 111644 (TRAV17, TRAJ9)
CATDYTGGFKTIF

SEQ ID NO: 223288 - protein, 18 aa, Homo sapiens
  CDR3 for beta chain variable domain of TCR clone 111644 (TRBV7-6, TRBJ2-1)
CASSPRTSGMSSYNEQFF

SEQ ID NO: 223289 - protein, 10 aa, Homo sapiens
  CDR3 for alpha chain variable domain of TCR clone 111645 (TRAV16, TRAJ26)
CAPEELWSEF

SEQ ID NO: 223290 - protein, 15 aa, Homo sapiens
  CDR3 for beta chain variable domain of TCR clone 111645 (TRBV7-2, TRBJ2-3)
CASSVTGTSTDTQYF

SEQ ID NO: 223291 - protein, 17 aa, Homo sapiens
  CDR3 for alpha chain variable domain of TCR clone 111646 (TRAV13-1, TRAJ52)
CAAGRNAGGTSYGKLTL

SEQ ID NO: 223292 - protein, 15 aa, Homo sapiens
  CDR3 for beta chain variable domain of TCR clone 111646 (TRBV9, TRBJ1-6)
CASSVAGTGDSPLHF

SEQ ID NO: 223293 - protein, 14 aa, Homo sapiens
  CDR3 for alpha chain variable domain of TCR clone 111647 (TRAV1-2, TRAJ16)
CAVNRFSDGQKLPF

SEQ ID NO: 223294 - protein, 15 aa, Homo sapiens
  CDR3 for beta chain variable domain of TCR clone 111647 (TRBV7-3, TRBJ2-2)
ELSLKRGTLSGELFF

SEQ ID NO: 223295 - protein, 18 aa, Homo sapiens
  CDR3 for alpha chain variable domain of TCR clone 111648 (TRAV21, TRAJ52)
CAVRPSPAGGTSNGKLTF

SEQ ID NO: 223296 - protein, 15 aa, Homo sapiens
  CDR3 for beta chain variable domain of TCR clone 111648 (TRBV19, TRBJ1-1)
CASTSGQIQNTEAFF

SEQ ID NO: 223297 - protein, 14 aa, Homo sapiens
  CDR3 for alpha chain variable domain of TCR clone 111649 (TRAV1-2, TRAJ16)
CAVNRFSYGQKLLF

SEQ ID NO: 223298 - protein, 16 aa, Homo sapiens
  CDR3 for beta chain variable domain of TCR clone 111649 (TRBV19, TRBJ2-1)
CASSKAGPSSYNEQFF

SEQ ID NO: 223299 - protein, 11 aa, Homo sapiens
  CDR3 for alpha chain variable domain of TCR clone 111650 (TRAV1-1, TRAJ23)
CAVRQGGKLIF

SEQ ID NO: 223300 - protein, 14 aa, Homo sapiens
  CDR3 for beta chain variable domain of TCR clone 111650 (TRBV19, TRBJ2-1)
CASPTFVLSGEHFF

SEQ ID NO: 223301 - protein, 16 aa, Homo sapiens
  CDR3 for alpha chain variable domain of TCR clone 111651 (TRAV3, TRAJ4)
CAVRAFFSGGYNKLIF

SEQ ID NO: 223302 - protein, 14 aa, Homo sapiens
  CDR3 for beta chain variable domain of TCR clone 111651 (TRBV6-1, TRBJ1-3)
CASVQGGGGNTIYF

SEQ ID NO: 223303 - protein, 13 aa, Homo sapiens
  CDR3 for alpha chain variable domain of TCR clone 111652 (TRAV2, TRAJ29)
CAEQNSGNTPLVF

SEQ ID NO: 223304 - protein, 13 aa, Homo sapiens
  CDR3 for beta chain variable domain of TCR clone 111652 (TRBV28, TRBJ1-2)
CASSPGSRNGYSF

SEQ ID NO: 223305 - protein, 13 aa, Homo sapiens
  CDR3 for alpha chain variable domain of TCR clone 111653 (TRAV27, TRAJ54)
CAGAGQGAQKLVF

SEQ ID NO: 223306 - protein, 14 aa, Homo sapiens
  CDR3 for beta chain variable domain of TCR clone 111653 (TRBV2, TRBJ2-1)
CASSEALIYNEQFF

SEQ ID NO: 223307 - protein, 14 aa, Homo sapiens
  CDR3 for alpha chain variable domain of TCR clone 111654 (TRAV12-2, TRAJ40)
CAVKIPSGTYKYIF

SEQ ID NO: 223308 - protein, 16 aa, Homo sapiens
  CDR3 for beta chain variable domain of TCR clone 111654 (TRBV12-5, TRBJ2-5)
CASGPRISGNQETQYF

SEQ ID NO: 223309 - protein, 12 aa, Homo sapiens
  CDR3 for alpha chain variable domain of TCR clone 111655 (TRAV12-3, TRAJ17)
CAMTLTGNKLTF

SEQ ID NO: 223310 - protein, 16 aa, Homo sapiens
  CDR3 for beta chain variable domain of TCR clone 111655 (TRBV19, TRBJ2-1)
CASSRAGPSSYNEQFF

SEQ ID NO: 223311 - protein, 14 aa, Homo sapiens
  CDR3 for alpha chain variable domain of TCR clone 111656 (TRAV16, TRAJ33)
CALSAMDSNYQLIW

SEQ ID NO: 223312 - protein, 14 aa, Homo sapiens
  CDR3 for beta chain variable domain of TCR clone 111656 (TRBV28, TRBJ2-7)
CASSLRARGNEQYF

SEQ ID NO: 223313 - protein, 15 aa, Homo sapiens
  CDR3 for alpha chain variable domain of TCR clone 111657 (TRAV14/DV4, TRAJ26)
CAMREGQNYGQNFVF

SEQ ID NO: 223314 - protein, 13 aa, Homo sapiens
  CDR3 for beta chain variable domain of TCR clone 111657 (TRBV19, TRBJ1-2)
CASSVPGQDGYTF

SEQ ID NO: 223315 - protein, 13 aa, Homo sapiens
  CDR3 for alpha chain variable domain of TCR clone 111658 (TRAV17, TRAJ29)
CATDAFRKHTSCL

SEQ ID NO: 223316 - protein, 13 aa, Homo sapiens
  CDR3 for beta chain variable domain of TCR clone 111658 (TRBV24-1, TRBJ2-1)
CATSAGPYNEQFF

SEQ ID NO: 223317 - protein, 12 aa, Homo sapiens
  CDR3 for alpha chain variable domain of TCR clone 111659 (TRAV12-3, TRAJ20)
CAMVRGEYKLSF

SEQ ID NO: 223318 - protein, 12 aa, Homo sapiens
  CDR3 for beta chain variable domain of TCR clone 111659 (TRBV6-1, TRBJ2-7)
CASSDYSYEQYF

SEQ ID NO: 223319 - protein, 11 aa, Homo sapiens
  CDR3 for alpha chain variable domain of TCR clone 111660 (TRAV1-1, TRAJ23)
CAVRQGGKLIF

SEQ ID NO: 223320 - protein, 16 aa, Homo sapiens
  CDR3 for beta chain variable domain of TCR clone 111660 (TRBV9, TRBJ2-2)
CASSGPSGTGIGELFF

SEQ ID NO: 223321 - protein, 13 aa, Homo sapiens
  CDR3 for alpha chain variable domain of TCR clone 111661 (TRAV27, TRAJ45)
CRGGGGGADGLTL

SEQ ID NO: 223322 - protein, 13 aa, Homo sapiens
  CDR3 for beta chain variable domain of TCR clone 111661 (TRBV20-1, TRBJ1-1)
CSAPEGGNTEAFF

SEQ ID NO: 223323 - protein, 13 aa, Homo sapiens
  CDR3 for alpha chain variable domain of TCR clone 111662 (TRAV17, TRAJ9)
CATDYTGGFKTIF

SEQ ID NO: 223324 - protein, 16 aa, Homo sapiens
  CDR3 for beta chain variable domain of TCR clone 111662 (TRBV4-1, TRBJ2-3)
CASSQSTSGAEDTQYF

SEQ ID NO: 223325 - protein, 15 aa, Homo sapiens
  CDR3 for alpha chain variable domain of TCR clone 111663 (TRAV21, TRAJ24)
CAARSSTDSWGKLQF

SEQ ID NO: 223326 - protein, 19 aa, Homo sapiens
  CDR3 for beta chain variable domain of TCR clone 111663 (TRBV7-2, TRBJ2-3)
CASSFLSRNWGGGTDTQYF

SEQ ID NO: 223327 - protein, 15 aa, Homo sapiens
  CDR3 for alpha chain variable domain of TCR clone 111664 (TRAV17, TRAJ57)
CATGPSQGGSEKLVF

SEQ ID NO: 223328 - protein, 16 aa, Homo sapiens
  CDR3 for beta chain variable domain of TCR clone 111664 (TRBV12-4, TRBJ1-5)
CASSRPVGGSNQPQLF

SEQ ID NO: 223329 - protein, 13 aa, Homo sapiens
  CDR3 for alpha chain variable domain of TCR clone 111665 (TRAV12-2, TRAJ6)
CAVNVSRNLHTYI

SEQ ID NO: 223330 - protein, 12 aa, Homo sapiens
  CDR3 for beta chain variable domain of TCR clone 111665 (TRBV29-1, TRBJ2-3)
CSVTGGADTQYF

SEQ ID NO: 223331 - protein, 14 aa, Homo sapiens
  CDR3 for alpha chain variable domain of TCR clone 111666 (TRAV9-2, TRAJ39)
CALYIYNAGNMLTF

SEQ ID NO: 223332 - protein, 18 aa, Homo sapiens
  CDR3 for beta chain variable domain of TCR clone 111666 (TRBV11-2, TRBJ2-6)
CASSLNPFLGTGANVLTF

SEQ ID NO: 223333 - protein, 12 aa, Homo sapiens
  CDR3 for alpha chain variable domain of TCR clone 111667 (TRAV20, TRAJ49)
CAVNKDGNQFYF

SEQ ID NO: 223334 - protein, 12 aa, Homo sapiens
  CDR3 for beta chain variable domain of TCR clone 111667 (TRBV11-2, TRBJ2-2)
CASSLGGGELFF

SEQ ID NO: 223335 - protein, 13 aa, Homo sapiens
  CDR3 for alpha chain variable domain of TCR clone 111668 (TRAV17, TRAJ34)
CATDLYNTAKLIF

SEQ ID NO: 223336 - protein, 15 aa, Homo sapiens
  CDR3 for beta chain variable domain of TCR clone 111668 (TRBV20-1, TRBJ2-3)
CSATGTSGFTDTQYF

SEQ ID NO: 223337 - protein, 23 aa, Homo sapiens
  CDR3 for alpha chain variable domain of TCR clone 111669 (TRAV26-1, TRAJ38)
CIADNAGNNHIQNPDPAVYQLRD

SEQ ID NO: 223338 - protein, 15 aa, Homo sapiens
  CDR3 for beta chain variable domain of TCR clone 111669 (TRBV11-2, TRBJ2-1)
CASSLGTSGLNEQFF

SEQ ID NO: 223339 - protein, 10 aa, Homo sapiens
  CDR3 for alpha chain variable domain of TCR clone 111670 (TRAV12-3, TRAJ49)
CAMNDDQFYF

SEQ ID NO: 223340 - protein, 15 aa, Homo sapiens
  CDR3 for beta chain variable domain of TCR clone 111670 (TRBV20-1, TRBJ2-7)
CSARVPAAYFYEQYF

SEQ ID NO: 223341 - protein, 13 aa, Homo sapiens
  CDR3 for alpha chain variable domain of TCR clone 111671 (TRAV13-2, TRAJ53)
CAENMGSNYKLTF

SEQ ID NO: 223342 - protein, 12 aa, Homo sapiens
  CDR3 for beta chain variable domain of TCR clone 111671 (TRBV4-1, TRBJ2-2)
RQQPREHRELFF

SEQ ID NO: 223343 - protein, 12 aa, Homo sapiens
  CDR3 for alpha chain variable domain of TCR clone 111672 (TRAV26-1, TRAJ36)
CIVRVRADNLFF

SEQ ID NO: 223344 - protein, 13 aa, Homo sapiens
  CDR3 for beta chain variable domain of TCR clone 111672 (TRBV20-1, TRBJ1-1)
CSARVGGNTEAFF

SEQ ID NO: 223345 - protein, 16 aa, Homo sapiens
  CDR3 for alpha chain variable domain of TCR clone 111673 (TRAV3, TRAJ5)
CAVRNLMDTGRRALTF

SEQ ID NO: 223346 - protein, 17 aa, Homo sapiens
  CDR3 for beta chain variable domain of TCR clone 111673 (TRBV13, TRBJ2-3)
CASSLSRVAGGRNTQYF

SEQ ID NO: 223347 - protein, 18 aa, Homo sapiens
  CDR3 for alpha chain variable domain of TCR clone 111674 (TRAV26-1, TRAJ23)
CIVRVGLEVWNQGGKLIF

SEQ ID NO: 223348 - protein, 15 aa, Homo sapiens
  CDR3 for beta chain variable domain of TCR clone 111674 (TRBV10-3, TRBJ2-3)
CAVSDWDRDTDTQYF

SEQ ID NO: 223349 - protein, 15 aa, Homo sapiens
  CDR3 for alpha chain variable domain of TCR clone 111675 (TRAV27, TRAJ38)
CAARRNAGNNRKLMW

SEQ ID NO: 223350 - protein, 13 aa, Homo sapiens
  CDR3 for beta chain variable domain of TCR clone 111675 (TRBV7-3, TRBJ2-1)
CASSLDSYNEQFF

SEQ ID NO: 223351 - protein, 15 aa, Homo sapiens
  CDR3 for alpha chain variable domain of TCR clone 111676 (TRAV21, TRAJ53)
CATLNSGGSNYKLTF

SEQ ID NO: 223352 - protein, 16 aa, Homo sapiens
  CDR3 for beta chain variable domain of TCR clone 111676 (TRBV9, TRBJ2-1)
CASSVGGRGNYNEQFF

SEQ ID NO: 223353 - protein, 13 aa, Homo sapiens
  CDR3 for alpha chain variable domain of TCR clone 111677 (TRAV12-3, TRAJ9)
CAMRNTGGFKTIF

SEQ ID NO: 223354 - protein, 17 aa, Homo sapiens
  CDR3 for beta chain variable domain of TCR clone 111677 (TRBV7-9, TRBJ2-1)
CASSLVASYPSYNEQFF

SEQ ID NO: 223355 - protein, 13 aa, Homo sapiens
  CDR3 for alpha chain variable domain of TCR clone 111678 (TRAV12-2, TRAJ3)
CAFQYSSASKIIF

SEQ ID NO: 223356 - protein, 11 aa, Homo sapiens
  CDR3 for beta chain variable domain of TCR clone 111678 (TRBV20-1, TRBJ2-3)
CSGASSTTQYF

SEQ ID NO: 223357 - protein, 13 aa, Homo sapiens
  CDR3 for alpha chain variable domain of TCR clone 111679 (TRAV3, TRAJ20)
CCEAFCNDYKLSF

SEQ ID NO: 223358 - protein, 15 aa, Homo sapiens
  CDR3 for beta chain variable domain of TCR clone 111679 (TRBV7-2, TRBJ2-1)
CASSSGLAGGNEQFF

SEQ ID NO: 223359 - protein, 13 aa, Homo sapiens
  CDR3 for alpha chain variable domain of TCR clone 111680 (TRAV27, TRAJ6)
CAGGTRGSYIPTF

SEQ ID NO: 223360 - protein, 15 aa, Homo sapiens
  CDR3 for beta chain variable domain of TCR clone 111680 (TRBV20-1, TRBJ2-7)
CSAESGTSGAYEQYF

SEQ ID NO: 223361 - protein, 13 aa, Homo sapiens
  CDR3 for alpha chain variable domain of TCR clone 111681 (TRAV17, TRAJ40)
CAGALGGTYKYIF

SEQ ID NO: 223362 - protein, 16 aa, Homo sapiens
  CDR3 for beta chain variable domain of TCR clone 111681 (TRBV7-2, TRBJ1-4)
CASSVAPGRRDEKLFF

SEQ ID NO: 223363 - protein, 12 aa, Homo sapiens
  CDR3 for alpha chain variable domain of TCR clone 111682 (TRAV21, TRAJ11)
CAATSGYSTLTF

SEQ ID NO: 223364 - protein, 16 aa, Homo sapiens
  CDR3 for beta chain variable domain of TCR clone 111682 (TRBV5-1, TRBJ2-3)
CASSLQGRVGADTQYF

SEQ ID NO: 223365 - protein, 13 aa, Homo sapiens
  CDR3 for alpha chain variable domain of TCR clone 111683 (TRAV21, TRAJ10)
CAVRPGGGNKPTF

SEQ ID NO: 223366 - protein, 14 aa, Homo sapiens
  CDR3 for beta chain variable domain of TCR clone 111683 (TRBV5-4, TRBJ2-7)
CASSADAGSYEQYF

SEQ ID NO: 223367 - protein, 12 aa, Homo sapiens
  CDR3 for alpha chain variable domain of TCR clone 111684 (TRAV13-1, TRAJ15)
CAANQAGTALIF

SEQ ID NO: 223368 - protein, 15 aa, Homo sapiens
  CDR3 for beta chain variable domain of TCR clone 111684 (TRBV9, TRBJ1-6)
CASSVAGTGDSPLHF

SEQ ID NO: 223369 - protein, 15 aa, Homo sapiens
  CDR3 for alpha chain variable domain of TCR clone 111685 (TRAV25, TRAJ52)
CAGRPGGTSYGKLTF

SEQ ID NO: 223370 - protein, 17 aa, Homo sapiens
  CDR3 for beta chain variable domain of TCR clone 111685 (TRBV7-8, TRBJ2-6)
CGSSAGTGGAGANVLTF

SEQ ID NO: 223371 - protein, 15 aa, Homo sapiens
  CDR3 for alpha chain variable domain of TCR clone 111686 (TRAV14/DV4, TRAJ26)
CAMREGQNYGQNFVF

SEQ ID NO: 223372 - protein, 13 aa, Homo sapiens
  CDR3 for beta chain variable domain of TCR clone 111686 (TRBV10-3, TRBJ2-7)
CASKLAVNYEQYF

SEQ ID NO: 223373 - protein, 16 aa, Homo sapiens
  CDR3 for alpha chain variable domain of TCR clone 111687 (TRAV8-2, TRAJ50)
CVVSDHMKTSYDKLIF

SEQ ID NO: 223374 - protein, 15 aa, Homo sapiens
  CDR3 for beta chain variable domain of TCR clone 111687 (TRBV7-2, TRBJ2-1)
CASSFQADEYNEQFF

SEQ ID NO: 223375 - protein, 16 aa, Homo sapiens
  CDR3 for alpha chain variable domain of TCR clone 111688 (TRAV3, TRAJ37)
CAVRVSGSGNTGKLIF

SEQ ID NO: 223376 - protein, 11 aa, Homo sapiens
  CDR3 for beta chain variable domain of TCR clone 111688 (TRBV11-2, TRBJ2-2)
CASSLPGELFF

SEQ ID NO: 223377 - protein, 17 aa, Homo sapiens
  CDR3 for alpha chain variable domain of TCR clone 111689 (TRAV12-2, TRAJ4)
CAVNVRPVSGGYNKLIF

SEQ ID NO: 223378 - protein, 17 aa, Homo sapiens
  CDR3 for beta chain variable domain of TCR clone 111689 (TRBV6-3, TRBJ2-1)
CASSYSPGTRGLDEQFF

SEQ ID NO: 223379 - protein, 12 aa, Homo sapiens
  CDR3 for alpha chain variable domain of TCR clone 111690 (TRAV12-3, TRAJ17)
CAMTLTGNKLTF

SEQ ID NO: 223380 - protein, 14 aa, Homo sapiens
  CDR3 for beta chain variable domain of TCR clone 111690 (TRBV25-1, TRBJ1-4)
CASSYSGGQEKLFF

SEQ ID NO: 223381 - protein, 16 aa, Homo sapiens
  CDR3 for alpha chain variable domain of TCR clone 111691 (TRAV3, TRAJ37)
CAVRGKGSGNKGKLIF

SEQ ID NO: 223382 - protein, 16 aa, Homo sapiens
  CDR3 for beta chain variable domain of TCR clone 111691 (TRBV12-4, TRBJ1-5)
CASSRPVGGSNQPQHF

SEQ ID NO: 223383 - protein, 15 aa, Homo sapiens
  CDR3 for alpha chain variable domain of TCR clone 111692 (TRAV12-3, TRAJ6)
CAMSATSGGSYIPTF

SEQ ID NO: 223384 - protein, 14 aa, Homo sapiens
  CDR3 for beta chain variable domain of TCR clone 111692 (TRBV19, TRBJ2-1)
CASPTFVLSGEQFF

SEQ ID NO: 223385 - protein, 13 aa, Homo sapiens
  CDR3 for alpha chain variable domain of TCR clone 111693 (TRAV12-1, TRAJ34)
CVVTGYNTGKLIF

SEQ ID NO: 223386 - protein, 13 aa, Homo sapiens
  CDR3 for beta chain variable domain of TCR clone 111693 (TRBV28, TRBJ2-7)
CASKAGGVYEQYF

SEQ ID NO: 223387 - protein, 14 aa, Homo sapiens
  CDR3 for alpha chain variable domain of TCR clone 111694 (TRAV12-2, TRAJ40)
CAVKIPSGTYKFIF

SEQ ID NO: 223388 - protein, 12 aa, Homo sapiens
  CDR3 for beta chain variable domain of TCR clone 111694 (TRBV11-2, TRBJ2-2)
CASSLGGGELFF

SEQ ID NO: 223389 - protein, 15 aa, Homo sapiens
  CDR3 for alpha chain variable domain of TCR clone 111695 (TRAV26-1, TRAJ29)
CIVRVEGSGNTPLVF

SEQ ID NO: 223390 - protein, 13 aa, Homo sapiens
  CDR3 for beta chain variable domain of TCR clone 111695 (TRBV12-4, TRBJ1-2)
CASSLRQGKGYTF

SEQ ID NO: 223391 - protein, 20 aa, Homo sapiens
  CDR3 for alpha chain variable domain of TCR clone 111696 (TRAV21, TRAJ22)
SLVTQPPTLKSSGSARQLTF

SEQ ID NO: 223392 - protein, 15 aa, Homo sapiens
  CDR3 for beta chain variable domain of TCR clone 111696 (TRBV7-3, TRBJ2-2)
CQQLRAGDLVRGAVF

SEQ ID NO: 223393 - protein, 14 aa, Homo sapiens
  CDR3 for alpha chain variable domain of TCR clone 111697 (TRAV23/DV6, TRAJ8)
CAASKNTGFQKLVF

SEQ ID NO: 223394 - protein, 16 aa, Homo sapiens
  CDR3 for beta chain variable domain of TCR clone 111697 (TRBV6-1, TRBJ2-1)
CASILRQGSSYNEQFF

SEQ ID NO: 223395 - protein, 13 aa, Homo sapiens
  CDR3 for alpha chain variable domain of TCR clone 111698 (TRAV12-1, TRAJ26)
CVVRRNYGQHFVF

SEQ ID NO: 223396 - protein, 14 aa, Homo sapiens
  CDR3 for beta chain variable domain of TCR clone 111698 (TRBV6-3, TRBJ1-1)
CASRYTGESTEAFF

SEQ ID NO: 223397 - protein, 14 aa, Homo sapiens
  CDR3 for alpha chain variable domain of TCR clone 111699 (TRAV26-1, TRAJ39)
CIVRAYNAGNMLTF

SEQ ID NO: 223398 - protein, 16 aa, Homo sapiens
  CDR3 for beta chain variable domain of TCR clone 111699 (TRBV15, TRBJ2-7)
CATSRDFGAAVYGQYF

SEQ ID NO: 223399 - protein, 15 aa, Homo sapiens
  CDR3 for alpha chain variable domain of TCR clone 111700 (TRAV26-1, TRAJ22)
CIVRVSFWFCKATDL

SEQ ID NO: 223400 - protein, 13 aa, Homo sapiens
  CDR3 for beta chain variable domain of TCR clone 111700 (TRBV7-9, TRBJ1-2)
CASSLKQNYGYAC

SEQ ID NO: 223401 - protein, 14 aa, Homo sapiens
  CDR3 for alpha chain variable domain of TCR clone 111701 (TRAV12-1, TRAJ12)
CVVTRMDSSYKLIF

SEQ ID NO: 223402 - protein, 13 aa, Homo sapiens
  CDR3 for beta chain variable domain of TCR clone 111701 (TRBV4-2, TRBJ1-1)
CASSQAGNTEAFF

SEQ ID NO: 223403 - protein, 12 aa, Homo sapiens
  CDR3 for alpha chain variable domain of TCR clone 111702 (TRAV12-3, TRAJ17)
CAMTLTGNKLTL

SEQ ID NO: 223404 - protein, 12 aa, Homo sapiens
  CDR3 for beta chain variable domain of TCR clone 111702 (TRBV11-2, TRBJ2-2)
CASSLPTGELFF

SEQ ID NO: 223405 - protein, 14 aa, Homo sapiens
  CDR3 for alpha chain variable domain of TCR clone 111703 (TRAV20, TRAJ56)
CAVQFGGANSKLTF

SEQ ID NO: 223406 - protein, 12 aa, Homo sapiens
  CDR3 for beta chain variable domain of TCR clone 111703 (TRBV24-1, TRBJ1-1)
CATLYPDTEAFF

SEQ ID NO: 223407 - protein, 11 aa, Homo sapiens
  CDR3 for alpha chain variable domain of TCR clone 111704 (TRAV3, TRAJ21)
CAVGNSNKFHF

SEQ ID NO: 223408 - protein, 16 aa, Homo sapiens
  CDR3 for beta chain variable domain of TCR clone 111704 (TRBV19, TRBJ2-1)
CASSKAGPSSYNEQFF

SEQ ID NO: 223409 - protein, 11 aa, Homo sapiens
  CDR3 for alpha chain variable domain of TCR clone 111705 (TRAV2, TRAJ20)
CAVLNDYKLSF

SEQ ID NO: 223410 - protein, 16 aa, Homo sapiens
  CDR3 for beta chain variable domain of TCR clone 111705 (TRBV11-2, TRBJ1-1)
CASSLRQGGEHSKAFF

SEQ ID NO: 223411 - protein, 10 aa, Homo sapiens
  CDR3 for alpha chain variable domain of TCR clone 111706 (TRAV12-2, TRAJ52)
RSTSYGKLTF

SEQ ID NO: 223412 - protein, 15 aa, Homo sapiens
  CDR3 for beta chain variable domain of TCR clone 111706 (TRBV5-1, TRBJ2-1)
CASSQAGYWWNEQFF

SEQ ID NO: 223413 - protein, 15 aa, Homo sapiens
  CDR3 for alpha chain variable domain of TCR clone 111707 (TRAV36/DV7, TRAJ54)
CAVEKQVQGAQKLVF

SEQ ID NO: 223414 - protein, 14 aa, Homo sapiens
  CDR3 for beta chain variable domain of TCR clone 111707 (TRBV4-3, TRBJ2-2)
CASSQGHVTGELFF

SEQ ID NO: 223415 - protein, 15 aa, Homo sapiens
  CDR3 for alpha chain variable domain of TCR clone 111708 (TRAV12-1, TRAJ43)
CVVNRGRYNNNGMRF

SEQ ID NO: 223416 - protein, 16 aa, Homo sapiens
  CDR3 for beta chain variable domain of TCR clone 111708 (TRBV19, TRBJ2-3)
CASSFYTTGIGDTQYF

SEQ ID NO: 223417 - protein, 16 aa, Homo sapiens
  CDR3 for alpha chain variable domain of TCR clone 111709 (TRAV12-2, TRAJ10)
CAVNRVLTGGGNKLTF

SEQ ID NO: 223418 - protein, 16 aa, Homo sapiens
  CDR3 for beta chain variable domain of TCR clone 111709 (TRBV19, TRBJ1-1)
CASSPTRFWPGTEAFF

SEQ ID NO: 223419 - protein, 12 aa, Homo sapiens
  CDR3 for alpha chain variable domain of TCR clone 111710 (TRAV13-1, TRAJ21)
CAAKEGINKFYF

SEQ ID NO: 223420 - protein, 14 aa, Homo sapiens
  CDR3 for beta chain variable domain of TCR clone 111710 (TRBV5-4, TRBJ1-1)
CASSLDSRRDEAFF

SEQ ID NO: 223421 - protein, 15 aa, Homo sapiens
  CDR3 for alpha chain variable domain of TCR clone 111711 (TRAV21, TRAJ38)
CAVRQDAGNNRKLNW

SEQ ID NO: 223422 - protein, 16 aa, Homo sapiens
  CDR3 for beta chain variable domain of TCR clone 111711 (TRBV4-2, TRBJ1-1)
CASRPLDGGGDTEAFF

SEQ ID NO: 223423 - protein, 13 aa, Homo sapiens
  CDR3 for alpha chain variable domain of TCR clone 111712 (TRAV12-3, TRAJ33)
CAMSVNSNCQLIW

SEQ ID NO: 223424 - protein, 13 aa, Homo sapiens
  CDR3 for beta chain variable domain of TCR clone 111712 (TRBV7-2, TRBJ2-2)
CASSLAVTGELFF

SEQ ID NO: 223425 - protein, 10 aa, Homo sapiens
  CDR3 for alpha chain variable domain of TCR clone 111713 (TRAV12-1, TRAJ37)
ARGNTGKLIF

SEQ ID NO: 223426 - protein, 15 aa, Homo sapiens
  CDR3 for beta chain variable domain of TCR clone 111713 (TRBV7-2, TRBJ2-3)
CASSLEQGGTDAQYF

SEQ ID NO: 223427 - protein, 15 aa, Homo sapiens
  CDR3 for alpha chain variable domain of TCR clone 111714 (TRAV17, TRAJ37)
CATDGGPSNTGKLIF

SEQ ID NO: 223428 - protein, 15 aa, Homo sapiens
  CDR3 for beta chain variable domain of TCR clone 111714 (TRBV28, TRBJ2-5)
CASSSGRTIQETQYF

SEQ ID NO: 223429 - protein, 13 aa, Homo sapiens
  CDR3 for alpha chain variable domain of TCR clone 111715 (TRAV2, TRAJ40)
CAVVTSGTYKYIF

SEQ ID NO: 223430 - protein, 14 aa, Homo sapiens
  CDR3 for beta chain variable domain of TCR clone 111715 (TRBV7-9, TRBJ1-6)
CASSLGPSNSPLHF

SEQ ID NO: 223431 - protein, 13 aa, Homo sapiens
  CDR3 for alpha chain variable domain of TCR clone 111716 (TRAV1-2, TRAJ31)
CAVRPNNNARLMF

SEQ ID NO: 223432 - protein, 13 aa, Homo sapiens
  CDR3 for beta chain variable domain of TCR clone 111716 (TRBV27, TRBJ1-1)
CASSLSIGAEAFF

SEQ ID NO: 223433 - protein, 12 aa, Homo sapiens
  CDR3 for alpha chain variable domain of TCR clone 111717 (TRAV12-3, TRAJ17)
CAMTLTGNKLTF

SEQ ID NO: 223434 - protein, 14 aa, Homo sapiens
  CDR3 for beta chain variable domain of TCR clone 111717 (TRBV27, TRBJ1-1)
CASSPQGKRAEAFF

SEQ ID NO: 223435 - protein, 12 aa, Homo sapiens
  CDR3 for alpha chain variable domain of TCR clone 111718 (TRAV8-3, TRAJ41)
CAVALSGYALNF

SEQ ID NO: 223436 - protein, 16 aa, Homo sapiens
  CDR3 for beta chain variable domain of TCR clone 111718 (TRBV27, TRBJ2-7)
CASSSDRRDSAYEQYF

SEQ ID NO: 223437 - protein, 12 aa, Homo sapiens
  CDR3 for alpha chain variable domain of TCR clone 111719 (TRAV21, TRAJ33)
CAKMDSNYQLIW

SEQ ID NO: 223438 - protein, 14 aa, Homo sapiens
  CDR3 for beta chain variable domain of TCR clone 111719 (TRBV2, TRBJ2-7)
CASGLTSGGYEQYF

SEQ ID NO: 223439 - protein, 17 aa, Homo sapiens
  CDR3 for alpha chain variable domain of TCR clone 111720 (TRAV3, TRAJ6)
CAVRDGPRAGGSYIPTF

SEQ ID NO: 223440 - protein, 15 aa, Homo sapiens
  CDR3 for beta chain variable domain of TCR clone 111720 (TRBV11-2, TRBJ2-2)
CASSSDRVNAGELFF

SEQ ID NO: 223441 - protein, 15 aa, Homo sapiens
  CDR3 for alpha chain variable domain of TCR clone 111721 (TRAV38-1, TRAJ57)
CAFMDSHGGSEKLVF

SEQ ID NO: 223442 - protein, 16 aa, Homo sapiens
  CDR3 for beta chain variable domain of TCR clone 111721 (TRBV10-3, TRBJ2-1)
CAIRGGGRGDYNEQFF

SEQ ID NO: 223443 - protein, 15 aa, Homo sapiens
  CDR3 for alpha chain variable domain of TCR clone 111722 (TRAV8-3, TRAJ45)
CASSYSGGGADGLTF

SEQ ID NO: 223444 - protein, 18 aa, Homo sapiens
  CDR3 for beta chain variable domain of TCR clone 111722 (TRBV7-9, TRBJ2-7)
CASSLTTSGSRTWYEQYF

SEQ ID NO: 223445 - protein, 15 aa, Homo sapiens
  CDR3 for alpha chain variable domain of TCR clone 111723 (TRAV3, TRAJ9)
CAVRARNTGGFKTIF

SEQ ID NO: 223446 - protein, 16 aa, Homo sapiens
  CDR3 for beta chain variable domain of TCR clone 111723 (TRBV19, TRBJ2-1)
CASSKAGPSSYNEQFF

SEQ ID NO: 223447 - protein, 14 aa, Homo sapiens
  CDR3 for alpha chain variable domain of TCR clone 111724 (TRAV13-1, TRAJ31)
CAAIVTMPDSCLEM

SEQ ID NO: 223448 - protein, 11 aa, Homo sapiens
  CDR3 for beta chain variable domain of TCR clone 111724 (TRBV20-1, TRBJ2-7)
CSARTSYEQYF

SEQ ID NO: 223449 - protein, 12 aa, Homo sapiens
  CDR3 for alpha chain variable domain of TCR clone 111725 (TRAV2, TRAJ31)
CAVEDNNARLMF

SEQ ID NO: 223450 - protein, 16 aa, Homo sapiens
  CDR3 for beta chain variable domain of TCR clone 111725 (TRBV5-7, TRBJ2-3)
CASSPWTSGGTDTQYF

SEQ ID NO: 223451 - protein, 14 aa, Homo sapiens
  CDR3 for alpha chain variable domain of TCR clone 111726 (TRAV8-3, TRAJ4)
CAVGAAGGYNKLIF

SEQ ID NO: 223452 - protein, 10 aa, Homo sapiens
  CDR3 for beta chain variable domain of TCR clone 111726 (TRBV7-3, TRBJ2-1)
DSSSYNEQFF

SEQ ID NO: 223453 - protein, 16 aa, Homo sapiens
  CDR3 for alpha chain variable domain of TCR clone 111727 (TRAV3, TRAJ10)
CAVRDMRAGGGNKLTF

SEQ ID NO: 223454 - protein, 16 aa, Homo sapiens
  CDR3 for beta chain variable domain of TCR clone 111727 (TRBV12-5, TRBJ2-5)
CASGPRTSGKQETQYF

SEQ ID NO: 223455 - protein, 12 aa, Homo sapiens
  CDR3 for alpha chain variable domain of TCR clone 111728 (TRAV13-1, TRAJ15)
CAASQAGTALIF

SEQ ID NO: 223456 - protein, 17 aa, Homo sapiens
  CDR3 for beta chain variable domain of TCR clone 111728 (TRBV5-1, TRBJ2-1)
CASSLGQISFSYNEQFF

SEQ ID NO: 223457 - protein, 13 aa, Homo sapiens
  CDR3 for alpha chain variable domain of TCR clone 111729 (TRAV13-1, TRAJ49)
CAASIGTGNQFYF

SEQ ID NO: 223458 - protein, 14 aa, Homo sapiens
  CDR3 for beta chain variable domain of TCR clone 111729 (TRBV19, TRBJ2-2)
CASSGQGIAGELFF

SEQ ID NO: 223459 - protein, 17 aa, Homo sapiens
  CDR3 for alpha chain variable domain of TCR clone 111730 (TRAV3, TRAJ42)
CAVRDRDYGGSRGNLIF

SEQ ID NO: 223460 - protein, 15 aa, Homo sapiens
  CDR3 for beta chain variable domain of TCR clone 111730 (TRBV6-6, TRBJ2-7)
CASSYLYGGSYEQYF

SEQ ID NO: 223461 - protein, 12 aa, Homo sapiens
  CDR3 for alpha chain variable domain of TCR clone 111731 (TRAV12-2, TRAJ10)
WGVTGGGNKLTF

SEQ ID NO: 223462 - protein, 20 aa, Homo sapiens
  CDR3 for beta chain variable domain of TCR clone 111731 (TRBV19, TRBJ2-1)
CASSIPRTVTSTRLNNEQFF

SEQ ID NO: 223463 - protein, 11 aa, Homo sapiens
  CDR3 for alpha chain variable domain of TCR clone 111732 (TRAV27, TRAJ37)
CAGTQGGKLIF

SEQ ID NO: 223464 - protein, 15 aa, Homo sapiens
  CDR3 for beta chain variable domain of TCR clone 111732 (TRBV6-1, TRBJ2-2)
CASSAGQGYTGELFF

SEQ ID NO: 223465 - protein, 17 aa, Homo sapiens
  CDR3 for alpha chain variable domain of TCR clone 111733 (TRAV3, TRAJ42)
CAVRDRDYRGSQGNLIF

SEQ ID NO: 223466 - protein, 15 aa, Homo sapiens
  CDR3 for beta chain variable domain of TCR clone 111733 (TRBV6-6, TRBJ2-7)
CVSSYSYGGSYEQYF

SEQ ID NO: 223467 - protein, 13 aa, Homo sapiens
  CDR3 for alpha chain variable domain of TCR clone 111734 (TRAV2, TRAJ47)
CAVDREYGNRLVF

SEQ ID NO: 223468 - protein, 17 aa, Homo sapiens
  CDR3 for beta chain variable domain of TCR clone 111734 (TRBV15, TRBJ1-5)
CATSRVKGIYSNQPQHF

SEQ ID NO: 223469 - protein, 12 aa, Homo sapiens
  CDR3 for alpha chain variable domain of TCR clone 111735 (TRAV29/DV5, TRAJ49)
CAATDTGNQFYF

SEQ ID NO: 223470 - protein, 14 aa, Homo sapiens
  CDR3 for beta chain variable domain of TCR clone 111735 (TRBV7-9, TRBJ2-2)
CASGLVQDTGELFF

SEQ ID NO: 223471 - protein, 16 aa, Homo sapiens
  CDR3 for alpha chain variable domain of TCR clone 111736 (TRAV4, TRAJ9)
CLVGDPNGPGGFKTIF

SEQ ID NO: 223472 - protein, 16 aa, Homo sapiens
  CDR3 for beta chain variable domain of TCR clone 111736 (TRBV28, TRBJ1-4)
CASSPPYRGRSEKLFF

SEQ ID NO: 223473 - protein, 14 aa, Homo sapiens
  CDR3 for alpha chain variable domain of TCR clone 111737 (TRAV1-2, TRAJ8)
CAVREDTGFQKLVF

SEQ ID NO: 223474 - protein, 14 aa, Homo sapiens
  CDR3 for beta chain variable domain of TCR clone 111737 (TRBV7-9, TRBJ1-1)
CASTPLQSYTEDFF

SEQ ID NO: 223475 - protein, 15 aa, Homo sapiens
  CDR3 for alpha chain variable domain of TCR clone 111738 (TRAV4, TRAJ39)
CLVGPNNNAGNMLTF

SEQ ID NO: 223476 - protein, 15 aa, Homo sapiens
  CDR3 for beta chain variable domain of TCR clone 111738 (TRBV15, TRBJ1-1)
CATSLQGGRNTEAFF

SEQ ID NO: 223477 - protein, 14 aa, Homo sapiens
  CDR3 for alpha chain variable domain of TCR clone 111739 (TRAV26-1, TRAJ45)
CIVRVVGGADGLTF

SEQ ID NO: 223478 - protein, 16 aa, Homo sapiens
  CDR3 for beta chain variable domain of TCR clone 111739 (TRBV7-3, TRBJ2-1)
CASSLEGYRSYNEQFF

SEQ ID NO: 223479 - protein, 13 aa, Homo sapiens
  CDR3 for alpha chain variable domain of TCR clone 111740 (TRAV1-2, TRAJ12)
CAVSMDSSYKLIF

SEQ ID NO: 223480 - protein, 14 aa, Homo sapiens
  CDR3 for beta chain variable domain of TCR clone 111740 (TRBV19, TRBJ2-1)
CASSSGRDYNGQFF

SEQ ID NO: 223481 - protein, 12 aa, Homo sapiens
  CDR3 for alpha chain variable domain of TCR clone 111741 (TRAV12-3, TRAJ49)
CAMSGTGNQFYF

SEQ ID NO: 223482 - protein, 12 aa, Homo sapiens
  CDR3 for beta chain variable domain of TCR clone 111741 (TRBV11-2, TRBJ2-2)
CASSLGGGELFF

SEQ ID NO: 223483 - protein, 14 aa, Homo sapiens
  CDR3 for alpha chain variable domain of TCR clone 111742 (TRAV23/DV6, TRAJ23)
CAAGPYNQGGKLIF

SEQ ID NO: 223484 - protein, 13 aa, Homo sapiens
  CDR3 for beta chain variable domain of TCR clone 111742 (TRBV10-3, TRBJ2-7)
CASKLAVNYEQYF

SEQ ID NO: 223485 - protein, 16 aa, Homo sapiens
  CDR3 for alpha chain variable domain of TCR clone 111743 (TRAV26-2, TRAJ57)
CILRDGGSGGSEKLVF

SEQ ID NO: 223486 - protein, 13 aa, Homo sapiens
  CDR3 for beta chain variable domain of TCR clone 111743 (TRBV18, TRBJ2-3)
CASSPGVTDTQYF

SEQ ID NO: 223487 - protein, 15 aa, Homo sapiens
  CDR3 for alpha chain variable domain of TCR clone 111744 (TRAV8-3, TRAJ27)
CAVGPSKTNAGKSTF

SEQ ID NO: 223488 - protein, 14 aa, Homo sapiens
  CDR3 for beta chain variable domain of TCR clone 111744 (TRBV12-4, TRBJ2-5)
CASSLWQKQETQYF

SEQ ID NO: 223489 - protein, 15 aa, Homo sapiens
  CDR3 for alpha chain variable domain of TCR clone 111745 (TRAV3, TRAJ22)
CAVRDRGGSARQLPF

SEQ ID NO: 223490 - protein, 15 aa, Homo sapiens
  CDR3 for beta chain variable domain of TCR clone 111745 (TRBV27, TRBJ2-1)
CASSNGGGSSNEQFF

SEQ ID NO: 223491 - protein, 11 aa, Homo sapiens
  CDR3 for alpha chain variable domain of TCR clone 111746 (TRAV3, TRAJ21)
CAAGNFNKFYF

SEQ ID NO: 223492 - protein, 16 aa, Homo sapiens
  CDR3 for beta chain variable domain of TCR clone 111746 (TRBV7-6, TRBJ2-1)
CASSAPGPSSYNEQFF

SEQ ID NO: 223493 - protein, 14 aa, Homo sapiens
  CDR3 for alpha chain variable domain of TCR clone 111747 (TRAV12-3, TRAJ10)
SHLPLTGGGNKFTF

SEQ ID NO: 223494 - protein, 13 aa, Homo sapiens
  CDR3 for beta chain variable domain of TCR clone 111747 (TRBV7-7, TRBJ2-5)
CASSRSGQETQYF

SEQ ID NO: 223495 - protein, 18 aa, Homo sapiens
  CDR3 for alpha chain variable domain of TCR clone 111748 (TRAV26-1, TRAJ5)
CIVSVVPPRDTGRRALTF

SEQ ID NO: 223496 - protein, 15 aa, Homo sapiens
  CDR3 for beta chain variable domain of TCR clone 111748 (TRBV7-9, TRBJ2-7)
CASSLPMGQANEQYF

SEQ ID NO: 223497 - protein, 16 aa, Homo sapiens
  CDR3 for alpha chain variable domain of TCR clone 111749 (TRAV3, TRAJ6)
CGERRPQGRRKLHTYI

SEQ ID NO: 223498 - protein, 14 aa, Homo sapiens
  CDR3 for beta chain variable domain of TCR clone 111749 (TRBV7-2, TRBJ2-7)
CASSPKTSFYEQYF

SEQ ID NO: 223499 - protein, 13 aa, Homo sapiens
  CDR3 for alpha chain variable domain of TCR clone 111750 (TRAV2, TRAJ11)
CAVEEIGYSTLTF

SEQ ID NO: 223500 - protein, 16 aa, Homo sapiens
  CDR3 for beta chain variable domain of TCR clone 111750 (TRBV19, TRBJ2-1)
CASSMGGGSSYNEQFF

SEQ ID NO: 223501 - protein, 12 aa, Homo sapiens
  CDR3 for alpha chain variable domain of TCR clone 111751 (TRAV25, TRAJ16)
CAGNRDGQKLLF

SEQ ID NO: 223502 - protein, 12 aa, Homo sapiens
  CDR3 for beta chain variable domain of TCR clone 111751 (TRBV15, TRBJ2-3)
CATSTSPPGQTD

SEQ ID NO: 223503 - protein, 12 aa, Homo sapiens
  CDR3 for alpha chain variable domain of TCR clone 111752 (TRAV3, TRAJ20)
CAVRDGDCKLSF

SEQ ID NO: 223504 - protein, 13 aa, Homo sapiens
  CDR3 for beta chain variable domain of TCR clone 111752 (TRBV9, TRBJ2-1)
CASSVGQGGEQFF

SEQ ID NO: 223505 - protein, 14 aa, Homo sapiens
  CDR3 for alpha chain variable domain of TCR clone 111753 (TRAV12-1, TRAJ13)
CVVIDSGSYQKVTF

SEQ ID NO: 223506 - protein, 16 aa, Homo sapiens
  CDR3 for beta chain variable domain of TCR clone 111753 (TRBV28, TRBJ2-7)
CASSSGTSGRGYEQYF

SEQ ID NO: 223507 - protein, 12 aa, Homo sapiens
  CDR3 for alpha chain variable domain of TCR clone 111754 (TRAV23/DV6, TRAJ30)
CAASKGDDKIIF

SEQ ID NO: 223508 - protein, 13 aa, Homo sapiens
  CDR3 for beta chain variable domain of TCR clone 111754 (TRBV19, TRBJ1-2)
CASSVTGQDGYTF

SEQ ID NO: 223509 - protein, 14 aa, Homo sapiens
  CDR3 for alpha chain variable domain of TCR clone 111755 (TRAV1-2, TRAJ16)
CAVDRFSDGQKLLF

SEQ ID NO: 223510 - protein, 14 aa, Homo sapiens
  CDR3 for beta chain variable domain of TCR clone 111755 (TRBV7-2, TRBJ2-5)
CASSPLGQSETQYF

SEQ ID NO: 223511 - protein, 16 aa, Homo sapiens
  CDR3 for alpha chain variable domain of TCR clone 111756 (TRAV13-2, TRAJ53)
CAENANSGGSNYKLTV

SEQ ID NO: 223512 - protein, 19 aa, Homo sapiens
  CDR3 for beta chain variable domain of TCR clone 111756 (TRBV28, TRBJ2-7)
CASSYSGTSRLGWVYEQYF

SEQ ID NO: 223513 - protein, 11 aa, Homo sapiens
  CDR3 for alpha chain variable domain of TCR clone 111757 (TRAV29/DV5, TRAJ49)
CAAVPGNQFYF

SEQ ID NO: 223514 - protein, 15 aa, Homo sapiens
  CDR3 for beta chain variable domain of TCR clone 111757 (TRBV4-3, TRBJ1-2)
CASSRGQGRNYGYTF

SEQ ID NO: 223515 - protein, 18 aa, Homo sapiens
  CDR3 for alpha chain variable domain of TCR clone 111758 (TRAV21, TRAJ52)
CAVRPSPAGGTSYGKLTF

SEQ ID NO: 223516 - protein, 15 aa, Homo sapiens
  CDR3 for beta chain variable domain of TCR clone 111758 (TRBV10-3, TRBJ2-1)
CAISGGREGSDEQFF

SEQ ID NO: 223517 - protein, 15 aa, Homo sapiens
  CDR3 for alpha chain variable domain of TCR clone 111759 (TRAV23/DV6, TRAJ44)
CAAMKPTGTASKLTL

SEQ ID NO: 223518 - protein, 16 aa, Homo sapiens
  CDR3 for beta chain variable domain of TCR clone 111759 (TRBV28, TRBJ2-5)
CATSGWPSRLKETQYF

SEQ ID NO: 223519 - protein, 11 aa, Homo sapiens
  CDR3 for alpha chain variable domain of TCR clone 111760 (TRAV2, TRAJ13)
CASGGYQKVTF

SEQ ID NO: 223520 - protein, 14 aa, Homo sapiens
  CDR3 for beta chain variable domain of TCR clone 111760 (TRBV7-3, TRBJ2-1)
RASSLAGGTNEQFF

SEQ ID NO: 223521 - protein, 14 aa, Homo sapiens
  CDR3 for alpha chain variable domain of TCR clone 111761 (TRAV12-2, TRAJ13)
CAVKKTGGYQKVTF

SEQ ID NO: 223522 - protein, 13 aa, Homo sapiens
  CDR3 for beta chain variable domain of TCR clone 111761 (TRBV4-1, TRBJ1-1)
CASSRKMNTEAFF

SEQ ID NO: 223523 - protein, 15 aa, Homo sapiens
  CDR3 for alpha chain variable domain of TCR clone 111762 (TRAV13-1, TRAJ44)
CAASRNTGTASKPTF

SEQ ID NO: 223524 - protein, 14 aa, Homo sapiens
  CDR3 for beta chain variable domain of TCR clone 111762 (TRBV2, TRBJ2-7)
CASSLTSGGYEQYF

SEQ ID NO: 223525 - protein, 16 aa, Homo sapiens
  CDR3 for alpha chain variable domain of TCR clone 111763 (TRAV3, TRAJ37)
CAVRGKRSGNTGKLIF

SEQ ID NO: 223526 - protein, 13 aa, Homo sapiens
  CDR3 for beta chain variable domain of TCR clone 111763 (TRBV4-2, TRBJ1-1)
CASSQAGNTEAFF

SEQ ID NO: 223527 - protein, 14 aa, Homo sapiens
  CDR3 for alpha chain variable domain of TCR clone 111764 (TRAV12-1, TRAJ43)
CVVNGRSNNNDMRF

SEQ ID NO: 223528 - protein, 14 aa, Homo sapiens
  CDR3 for beta chain variable domain of TCR clone 111764 (TRBV28, TRBJ1-5)
CASSGQALYQPQHF

SEQ ID NO: 223529 - protein, 11 aa, Homo sapiens
  CDR3 for alpha chain variable domain of TCR clone 111765 (TRAV2, TRAJ23)
CAVETRGKLIF

SEQ ID NO: 223530 - protein, 15 aa, Homo sapiens
  CDR3 for beta chain variable domain of TCR clone 111765 (TRBV28, TRBJ2-1)
CASSIIAGGRSEQFF

SEQ ID NO: 223531 - protein, 13 aa, Homo sapiens
  CDR3 for alpha chain variable domain of TCR clone 111766 (TRAV17, TRAJ34)
CATYLYNTDKLIF

SEQ ID NO: 223532 - protein, 12 aa, Homo sapiens
  CDR3 for beta chain variable domain of TCR clone 111766 (TRBV11-2, TRBJ2-2)
CASSLGGGELFF

SEQ ID NO: 223533 - protein, 14 aa, Homo sapiens
  CDR3 for alpha chain variable domain of TCR clone 111767 (TRAV1-2, TRAJ16)
CAVNRFSDGQKLLF

SEQ ID NO: 223534 - protein, 15 aa, Homo sapiens
  CDR3 for beta chain variable domain of TCR clone 111767 (TRBV5-1, TRBJ2-2)
CASTIQGGDTGELFF

SEQ ID NO: 223535 - protein, 20 aa, Homo sapiens
  CDR3 for alpha chain variable domain of TCR clone 111768 (TRAV1-1, TRAJ4)
CLLLPRCEGFLSGGYNKLIF

SEQ ID NO: 223536 - protein, 16 aa, Homo sapiens
  CDR3 for beta chain variable domain of TCR clone 111768 (TRBV28, TRBJ1-4)
CASSPPYRGRSEKLSF

SEQ ID NO: 223537 - protein, 14 aa, Homo sapiens
  CDR3 for alpha chain variable domain of TCR clone 111769 (TRAV3, TRAJ9)
CAVRGNTGGFKTIF

SEQ ID NO: 223538 - protein, 16 aa, Homo sapiens
  CDR3 for beta chain variable domain of TCR clone 111769 (TRBV19, TRBJ2-3)
CASSPGAASRTDTQYF

SEQ ID NO: 223539 - protein, 15 aa, Homo sapiens
  CDR3 for alpha chain variable domain of TCR clone 111770 (TRAV17, TRAJ57)
CATGPSQGGSEKLVF

SEQ ID NO: 223540 - protein, 15 aa, Homo sapiens
  CDR3 for beta chain variable domain of TCR clone 111770 (TRBV25-1, TRBJ1-4)
CASSPGDSTNENLFF

SEQ ID NO: 223541 - protein, 17 aa, Homo sapiens
  CDR3 for alpha chain variable domain of TCR clone 111771 (TRAV26-1, TRAJ53)
CIVRVDDSGGSNYKLTF

SEQ ID NO: 223542 - protein, 13 aa, Homo sapiens
  CDR3 for beta chain variable domain of TCR clone 111771 (TRBV5-1, TRBJ2-3)
CASSLKGQYTQYF

SEQ ID NO: 223543 - protein, 14 aa, Homo sapiens
  CDR3 for alpha chain variable domain of TCR clone 111772 (TRAV17, TRAJ22)
CATSPSGSARQLTF

SEQ ID NO: 223544 - protein, 13 aa, Homo sapiens
  CDR3 for beta chain variable domain of TCR clone 111772 (TRBV12-5, TRBJ2-3)
CASGDRQSDTQYF

SEQ ID NO: 223545 - protein, 18 aa, Homo sapiens
  CDR3 for alpha chain variable domain of TCR clone 111773 (TRAV12-3, TRAJ52)
CAMSVGGAGGTSYGKLTF

SEQ ID NO: 223546 - protein, 18 aa, Homo sapiens
  CDR3 for beta chain variable domain of TCR clone 111773 (TRBV11-2, TRBJ2-3)
CASSLGGASRGAPNTQYF

SEQ ID NO: 223547 - protein, 14 aa, Homo sapiens
  CDR3 for alpha chain variable domain of TCR clone 111774 (TRAV12-3, TRAJ58)
CAMSTATSGSRLTF

SEQ ID NO: 223548 - protein, 13 aa, Homo sapiens
  CDR3 for beta chain variable domain of TCR clone 111774 (TRBV27, TRBJ2-3)
CASSWGRTDTQYF

SEQ ID NO: 223549 - protein, 15 aa, Homo sapiens
  CDR3 for alpha chain variable domain of TCR clone 111775 (TRAV2, TRAJ15)
CAVEDRNQAGTAMIF

SEQ ID NO: 223550 - protein, 13 aa, Homo sapiens
  CDR3 for beta chain variable domain of TCR clone 111775 (TRBV10-2, TRBJ2-1)
CASGASGDAKQFF

SEQ ID NO: 223551 - protein, 11 aa, Homo sapiens
  CDR3 for alpha chain variable domain of TCR clone 111776 (TRAV1-1, TRAJ23)
CAVRQGGTLIF

SEQ ID NO: 223552 - protein, 12 aa, Homo sapiens
  CDR3 for beta chain variable domain of TCR clone 111776 (TRBV19, TRBJ1-5)
CASSIAQQPQHF

SEQ ID NO: 223553 - protein, 12 aa, Homo sapiens
  CDR3 for alpha chain variable domain of TCR clone 111777 (TRAV12-1, TRAJ29)
CVSDSGNTPLVF

SEQ ID NO: 223554 - protein, 12 aa, Homo sapiens
  CDR3 for beta chain variable domain of TCR clone 111777 (TRBV2, TRBJ2-7)
CASKRGSYEQYF

SEQ ID NO: 223555 - protein, 12 aa, Homo sapiens
  CDR3 for alpha chain variable domain of TCR clone 111778 (TRAV21, TRAJ33)
CAKMDSHYQLIW

SEQ ID NO: 223556 - protein, 14 aa, Homo sapiens
  CDR3 for beta chain variable domain of TCR clone 111778 (TRBV2, TRBJ2-7)
CASSLTSGGYEQYF

SEQ ID NO: 223557 - protein, 14 aa, Homo sapiens
  CDR3 for alpha chain variable domain of TCR clone 111779 (TRAV12-1, TRAJ17)
CVVNYKAAGNKLTF

SEQ ID NO: 223558 - protein, 14 aa, Homo sapiens
  CDR3 for beta chain variable domain of TCR clone 111779 (TRBV5-1, TRBJ2-5)
CASSLTGGQETQYF

SEQ ID NO: 223559 - protein, 12 aa, Homo sapiens
  CDR3 for alpha chain variable domain of TCR clone 111780 (TRAV12-1, TRAJ34)
CVVTFNTDKLIL

SEQ ID NO: 223560 - protein, 14 aa, Homo sapiens
  CDR3 for beta chain variable domain of TCR clone 111780 (TRBV19, TRBJ1-1)
CASLRTGLNTEAFF

SEQ ID NO: 223561 - protein, 11 aa, Homo sapiens
  CDR3 for alpha chain variable domain of TCR clone 111781 (TRAV3, TRAJ21)
CAVGHFNKFYF

SEQ ID NO: 223562 - protein, 17 aa, Homo sapiens
  CDR3 for beta chain variable domain of TCR clone 111781 (TRBV24-1, TRBJ2-1)
CATSDVSTSGTYNEQFF

SEQ ID NO: 223563 - protein, 14 aa, Homo sapiens
  CDR3 for alpha chain variable domain of TCR clone 111782 (TRAV12-3, TRAJ31)
CAMRLRNNNARLMF

SEQ ID NO: 223564 - protein, 15 aa, Homo sapiens
  CDR3 for beta chain variable domain of TCR clone 111782 (TRBV5-6, TRBJ2-7)
CASSEPGSGWREQYF

SEQ ID NO: 223565 - protein, 13 aa, Homo sapiens
  CDR3 for alpha chain variable domain of TCR clone 111783 (TRAV3, TRAJ20)
CAVRSLNDYKLSF

SEQ ID NO: 223566 - protein, 13 aa, Homo sapiens
  CDR3 for beta chain variable domain of TCR clone 111783 (TRBV7-9, TRBJ1-2)
CASSLKQNYGYTF

SEQ ID NO: 223567 - protein, 15 aa, Homo sapiens
  CDR3 for alpha chain variable domain of TCR clone 111784 (TRAV20, TRAJ40)
CAVQRGTSGTYKYIF

SEQ ID NO: 223568 - protein, 13 aa, Homo sapiens
  CDR3 for beta chain variable domain of TCR clone 111784 (TRBV11-2, TRBJ2-5)
CASSSTGEETQYF

SEQ ID NO: 223569 - protein, 23 aa, Homo sapiens
  CDR3 for alpha chain variable domain of TCR clone 111785 (TRAV8-6, TRAJ36)
CAVSDWLGQTTSSLGLERDSPLF

SEQ ID NO: 223570 - protein, 15 aa, Homo sapiens
  CDR3 for beta chain variable domain of TCR clone 111785 (TRBV10-3, TRBJ2-2)
CAISVATSNTGELFF

SEQ ID NO: 223571 - protein, 16 aa, Homo sapiens
  CDR3 for alpha chain variable domain of TCR clone 111786 (TRAV30, TRAJ24)
CGTEIVGADSWGKFQF

SEQ ID NO: 223572 - protein, 12 aa, Homo sapiens
  CDR3 for beta chain variable domain of TCR clone 111786 (TRBV11-2, TRBJ2-1)
CASSPGNNEQFF

SEQ ID NO: 223573 - protein, 15 aa, Homo sapiens
  CDR3 for alpha chain variable domain of TCR clone 111787 (TRAV12-2, TRAJ53)
CAVNGGGGSNYKLTF

SEQ ID NO: 223574 - protein, 17 aa, Homo sapiens
  CDR3 for beta chain variable domain of TCR clone 111787 (TRBV7-3, TRBJ2-3)
CASSLMERMRGADTQYF

SEQ ID NO: 223575 - protein, 14 aa, Homo sapiens
  CDR3 for alpha chain variable domain of TCR clone 111788 (TRAV17, TRAJ57)
CATDPQGGSEKLVF

SEQ ID NO: 223576 - protein, 14 aa, Homo sapiens
  CDR3 for beta chain variable domain of TCR clone 111788 (TRBV6-1, TRBJ1-3)
CASVQGGGGNTIYF

SEQ ID NO: 223577 - protein, 23 aa, Homo sapiens
  CDR3 for alpha chain variable domain of TCR clone 111789 (TRAV1-1, TRAJ29)
LLQELQMKDSASYFLGGNTPLVF

SEQ ID NO: 223578 - protein, 13 aa, Homo sapiens
  CDR3 for beta chain variable domain of TCR clone 111789 (TRBV25-1, TRBJ2-7)
CAGSEDGDYEQYF

SEQ ID NO: 223579 - protein, 17 aa, Homo sapiens
  CDR3 for alpha chain variable domain of TCR clone 111790 (TRAV3, TRAJ6)
CAVRDGPRAGGSDIPTF

SEQ ID NO: 223580 - protein, 14 aa, Homo sapiens
  CDR3 for beta chain variable domain of TCR clone 111790 (TRBV7-2, TRBJ2-7)
CASSPKTSFHEQYF

SEQ ID NO: 223581 - protein, 14 aa, Homo sapiens
  CDR3 for alpha chain variable domain of TCR clone 111791 (TRAV12-2, TRAJ40)
CAVKIPSGTYEYIF

SEQ ID NO: 223582 - protein, 15 aa, Homo sapiens
  CDR3 for beta chain variable domain of TCR clone 111791 (TRBV2, TRBJ2-7)
CASSEGLARSYEQYF

SEQ ID NO: 223583 - protein, 13 aa, Homo sapiens
  CDR3 for alpha chain variable domain of TCR clone 111792 (TRAV12-3, TRAJ33)
CAMSVNSNYQLIW

SEQ ID NO: 223584 - protein, 14 aa, Homo sapiens
  CDR3 for beta chain variable domain of TCR clone 111792 (TRBV7-6, TRBJ2-3)
CASSLGTVTDTQYF

SEQ ID NO: 223585 - protein, 15 aa, Homo sapiens
  CDR3 for alpha chain variable domain of TCR clone 111793 (TRAV13-1, TRAJ49)
CGTSSILGQGQVLRS

SEQ ID NO: 223586 - protein, 16 aa, Homo sapiens
  CDR3 for beta chain variable domain of TCR clone 111793 (TRBV5-1, TRBJ2-7)
CASRPSFSNNPYEQYF

SEQ ID NO: 223587 - protein, 14 aa, Homo sapiens
  CDR3 for alpha chain variable domain of TCR clone 111794 (TRAV12-2, TRAJ23)
CAGGGYNQGGKLIF

SEQ ID NO: 223588 - protein, 15 aa, Homo sapiens
  CDR3 for beta chain variable domain of TCR clone 111794 (TRBV20-1, TRBJ2-3)
CSASSGGPRTDTQYF

SEQ ID NO: 223589 - protein, 15 aa, Homo sapiens
  CDR3 for alpha chain variable domain of TCR clone 111795 (TRAV12-1, TRAJ42)
CVVTRDGGSQGNVIF

SEQ ID NO: 223590 - protein, 14 aa, Homo sapiens
  CDR3 for beta chain variable domain of TCR clone 111795 (TRBV11-2, TRBJ2-3)
CASSLGGGANTQYF

SEQ ID NO: 223591 - protein, 14 aa, Homo sapiens
  CDR3 for alpha chain variable domain of TCR clone 111796 (TRAV26-1, TRAJ38)
CIADNAGNKRKLIW

SEQ ID NO: 223592 - protein, 13 aa, Homo sapiens
  CDR3 for beta chain variable domain of TCR clone 111796 (TRBV19, TRBJ1-2)
CASSVPGQDGYTF

SEQ ID NO: 223593 - protein, 13 aa, Homo sapiens
  CDR3 for alpha chain variable domain of TCR clone 111797 (TRAV35, TRAJ42)
CAGFPGSQGSLIF

SEQ ID NO: 223594 - protein, 14 aa, Homo sapiens
  CDR3 for beta chain variable domain of TCR clone 111797 (TRBV19, TRBJ2-1)
CASPTFVLSGEQFF

SEQ ID NO: 223595 - protein, 12 aa, Homo sapiens
  CDR3 for alpha chain variable domain of TCR clone 111798 (TRAV12-3, TRAJ29)
CAAREGNTPLVF

SEQ ID NO: 223596 - protein, 13 aa, Homo sapiens
  CDR3 for beta chain variable domain of TCR clone 111798 (TRBV20-1, TRBJ2-2)
CSALSGGAGELFF

SEQ ID NO: 223597 - protein, 15 aa, Homo sapiens
  CDR3 for alpha chain variable domain of TCR clone 111799 (TRAV8-3, TRAJ21)
CAVGALPPRGYKFYF

SEQ ID NO: 223598 - protein, 18 aa, Homo sapiens
  CDR3 for beta chain variable domain of TCR clone 111799 (TRBV25-1, TRBJ1-2)
CASSGLQNGQGLICGYTF

SEQ ID NO: 223599 - protein, 16 aa, Homo sapiens
  CDR3 for alpha chain variable domain of TCR clone 111800 (TRAV1-1, TRAJ29)
CAVRSTRNSGNTPLVF

SEQ ID NO: 223600 - protein, 14 aa, Homo sapiens
  CDR3 for beta chain variable domain of TCR clone 111800 (TRBV27, TRBJ2-1)
CAGSIAETYNEQFF

SEQ ID NO: 223601 - protein, 12 aa, Homo sapiens
  CDR3 for alpha chain variable domain of TCR clone 111801 (TRAV12-3, TRAJ31)
CAMSAPNARLMF

SEQ ID NO: 223602 - protein, 12 aa, Homo sapiens
  CDR3 for beta chain variable domain of TCR clone 111801 (TRBV11-2, TRBJ2-1)
CASSVQREGQFF

SEQ ID NO: 223603 - protein, 13 aa, Homo sapiens
  CDR3 for alpha chain variable domain of TCR clone 111802 (TRAV21, TRAJ15)
CAVANQAGTALIF

SEQ ID NO: 223604 - protein, 14 aa, Homo sapiens
  CDR3 for beta chain variable domain of TCR clone 111802 (TRBV27, TRBJ2-2)
CASSVGAATGELFF

SEQ ID NO: 223605 - protein, 16 aa, Homo sapiens
  CDR3 for alpha chain variable domain of TCR clone 111803 (TRAV30, TRAJ24)
CGTDIVDADSWGKFQF

SEQ ID NO: 223606 - protein, 18 aa, Homo sapiens
  CDR3 for beta chain variable domain of TCR clone 111803 (TRBV7-9, TRBJ2-7)
CASSLTTSGSRTWYEQYF

SEQ ID NO: 223607 - protein, 13 aa, Homo sapiens
  CDR3 for alpha chain variable domain of TCR clone 111804 (TRAV3, TRAJ29)
CAVRDIIDTPLVF

SEQ ID NO: 223608 - protein, 14 aa, Homo sapiens
  CDR3 for beta chain variable domain of TCR clone 111804 (TRBV27, TRBJ2-1)
CASSATGGYNEQYF

SEQ ID NO: 223609 - protein, 14 aa, Homo sapiens
  CDR3 for alpha chain variable domain of TCR clone 111805 (TRAV12-2, TRAJ45)
CTLPERGGADGLTF

SEQ ID NO: 223610 - protein, 14 aa, Homo sapiens
  CDR3 for beta chain variable domain of TCR clone 111805 (TRBV18, TRBJ1-5)
CASSPGNSNQPQHF

SEQ ID NO: 223611 - protein, 16 aa, Homo sapiens
  CDR3 for alpha chain variable domain of TCR clone 111806 (TRAV3, TRAJ3)
CAVIDRAKSSASKIIF

SEQ ID NO: 223612 - protein, 16 aa, Homo sapiens
  CDR3 for beta chain variable domain of TCR clone 111806 (TRBV20-1, TRBJ2-4)
CSATSLAELAKNIQYF

SEQ ID NO: 223613 - protein, 13 aa, Homo sapiens
  CDR3 for alpha chain variable domain of TCR clone 111807 (TRAV36/DV7, TRAJ37)
CAVFSSNTGKLIF

SEQ ID NO: 223614 - protein, 15 aa, Homo sapiens
  CDR3 for beta chain variable domain of TCR clone 111807 (TRBV12-4, TRBJ2-5)
CQQFFVRGRHETQYF

SEQ ID NO: 223615 - protein, 17 aa, Homo sapiens
  CDR3 for alpha chain variable domain of TCR clone 111808 (TRAV3, TRAJ42)
CAVRDRDYGGSQGNFIF

SEQ ID NO: 223616 - protein, 14 aa, Homo sapiens
  CDR3 for beta chain variable domain of TCR clone 111808 (TRBV7-2, TRBJ2-5)
CASSPRGSSETQYF

SEQ ID NO: 223617 - protein, 13 aa, Homo sapiens
  CDR3 for alpha chain variable domain of TCR clone 111809 (TRAV13-2, TRAJ48)
CAEMDFGNEKLTF

SEQ ID NO: 223618 - protein, 12 aa, Homo sapiens
  CDR3 for beta chain variable domain of TCR clone 111809 (TRBV11-2, TRBJ2-2)
CASSLPTGELFF

SEQ ID NO: 223619 - protein, 15 aa, Homo sapiens
  CDR3 for alpha chain variable domain of TCR clone 111810 (TRAV3, TRAJ20)
CAVRDIKLSDYKLSF

SEQ ID NO: 223620 - protein, 14 aa, Homo sapiens
  CDR3 for beta chain variable domain of TCR clone 111810 (TRBV4-1, TRBJ2-2)
CASSQAVNTGELFF

SEQ ID NO: 223621 - protein, 11 aa, Homo sapiens
  CDR3 for alpha chain variable domain of TCR clone 111811 (TRAV1-1, TRAJ3)
CAVRSASKIIF

SEQ ID NO: 223622 - protein, 14 aa, Homo sapiens
  CDR3 for beta chain variable domain of TCR clone 111811 (TRBV7-2, TRBJ2-7)
CASRSQGAAYEQYF

SEQ ID NO: 223623 - protein, 18 aa, Homo sapiens
  CDR3 for alpha chain variable domain of TCR clone 111812 (TRAV26-2, TRAJ45)
CILRLWGYSGGGSDGLTF

SEQ ID NO: 223624 - protein, 17 aa, Homo sapiens
  CDR3 for beta chain variable domain of TCR clone 111812 (TRBV28, TRBJ2-3)
CASSPTPAGGRVDTQYF

SEQ ID NO: 223625 - protein, 19 aa, Homo sapiens
  CDR3 for alpha chain variable domain of TCR clone 111813 (TRAV38-1, TRAJ53)
CAFMKHGLESGGSNYKLPF

SEQ ID NO: 223626 - protein, 13 aa, Homo sapiens
  CDR3 for beta chain variable domain of TCR clone 111813 (TRBV19, TRBJ2-7)
CASSPRQSYEQYF

SEQ ID NO: 223627 - protein, 16 aa, Homo sapiens
  CDR3 for alpha chain variable domain of TCR clone 111814 (TRAV14/DV4, TRAJ53)
CAMREGGGGSNYKLTF

SEQ ID NO: 223628 - protein, 14 aa, Homo sapiens
  CDR3 for beta chain variable domain of TCR clone 111814 (TRBV4-1, TRBJ2-2)
CASSQAVNTGELFF

SEQ ID NO: 223629 - protein, 13 aa, Homo sapiens
  CDR3 for alpha chain variable domain of TCR clone 111815 (TRAV12-1, TRAJ7)
CVVNMRGNNRLAF

SEQ ID NO: 223630 - protein, 13 aa, Homo sapiens
  CDR3 for beta chain variable domain of TCR clone 111815 (TRBV19, TRBJ1-1)
CASTRRGDTEAFF

SEQ ID NO: 223631 - protein, 14 aa, Homo sapiens
  CDR3 for alpha chain variable domain of TCR clone 111816 (TRAV2, TRAJ9)
CAVEERSGGFKTIF

SEQ ID NO: 223632 - protein, 13 aa, Homo sapiens
  CDR3 for beta chain variable domain of TCR clone 111816 (TRBV7-3, TRBJ1-1)
CASSQDWGAEAFF

SEQ ID NO: 223633 - protein, 15 aa, Homo sapiens
  CDR3 for alpha chain variable domain of TCR clone 111817 (TRAV27, TRAJ38)
CAARRNAGNNRKLIW

SEQ ID NO: 223634 - protein, 15 aa, Homo sapiens
  CDR3 for beta chain variable domain of TCR clone 111817 (TRBV12-4, TRBJ1-2)
CASSPITGGGYGYTF

SEQ ID NO: 223635 - protein, 14 aa, Homo sapiens
  CDR3 for alpha chain variable domain of TCR clone 111818 (TRAV3, TRAJ6)
CAVRDWGGSYIPTF

SEQ ID NO: 223636 - protein, 13 aa, Homo sapiens
  CDR3 for beta chain variable domain of TCR clone 111818 (TRBV7-3, TRBJ1-1)
CASSQDWGAEAFF

SEQ ID NO: 223637 - protein, 13 aa, Homo sapiens
  CDR3 for alpha chain variable domain of TCR clone 111819 (TRAV29/DV5, TRAJ31)
CAASRNNNARLMF

SEQ ID NO: 223638 - protein, 11 aa, Homo sapiens
  CDR3 for beta chain variable domain of TCR clone 111819 (TRBV6-3, TRBJ2-3)
CATGQADTQYF

SEQ ID NO: 223639 - protein, 13 aa, Homo sapiens
  CDR3 for alpha chain variable domain of TCR clone 111820 (TRAV27, TRAJ57)
CAGFQGGSEKLVF

SEQ ID NO: 223640 - protein, 14 aa, Homo sapiens
  CDR3 for beta chain variable domain of TCR clone 111820 (TRBV20-1, TRBJ1-2)
CSGRKDGRAYGYNF

SEQ ID NO: 223641 - protein, 13 aa, Homo sapiens
  CDR3 for alpha chain variable domain of TCR clone 111821 (TRAV16, TRAJ29)
CALSRRGNTPLVF

SEQ ID NO: 223642 - protein, 16 aa, Homo sapiens
  CDR3 for beta chain variable domain of TCR clone 111821 (TRBV13, TRBJ2-2)
CASSPRTGEHTGELFF

SEQ ID NO: 223643 - protein, 14 aa, Homo sapiens
  CDR3 for alpha chain variable domain of TCR clone 111822 (TRAV2, TRAJ9)
CAVEDQSGGFKTIF

SEQ ID NO: 223644 - protein, 15 aa, Homo sapiens
  CDR3 for beta chain variable domain of TCR clone 111822 (TRBV19, TRBJ2-1)
CASSHRDRGPNEQFF

SEQ ID NO: 223645 - protein, 13 aa, Homo sapiens
  CDR3 for alpha chain variable domain of TCR clone 111823 (TRAV29/DV5, TRAJ40)
CAAVWSPGYKYIF

SEQ ID NO: 223646 - protein, 13 aa, Homo sapiens
  CDR3 for beta chain variable domain of TCR clone 111823 (TRBV2, TRBJ2-7)
CASSVGGSGEQYF

SEQ ID NO: 223647 - protein, 14 aa, Homo sapiens
  CDR3 for alpha chain variable domain of TCR clone 111824 (TRAV1-2, TRAJ16)
CAVNRFSDGQKLLF

SEQ ID NO: 223648 - protein, 12 aa, Homo sapiens
  CDR3 for beta chain variable domain of TCR clone 111824 (TRBV9, TRBJ2-2)
CASSLVTGELFF

SEQ ID NO: 223649 - protein, 17 aa, Homo sapiens
  CDR3 for alpha chain variable domain of TCR clone 111825 (TRAV26-1, TRAJ34)
CCVLLHRQTWITDKLIF

SEQ ID NO: 223650 - protein, 13 aa, Homo sapiens
  CDR3 for beta chain variable domain of TCR clone 111825 (TRBV5-1, TRBJ2-1)
CASSLGSYNEQFF

SEQ ID NO: 223651 - protein, 17 aa, Homo sapiens
  CDR3 for alpha chain variable domain of TCR clone 111826 (TRAV1-1, TRAJ32)
CAVRVDELWWCYKQAHL

SEQ ID NO: 223652 - protein, 15 aa, Homo sapiens
  CDR3 for beta chain variable domain of TCR clone 111826 (TRBV19, TRBJ2-1)
CASSGGGTLYNEQFF

SEQ ID NO: 223653 - protein, 14 aa, Homo sapiens
  CDR3 for alpha chain variable domain of TCR clone 111827 (TRAV29/DV5, TRAJ44)
CAAFLVGTASKLTF

SEQ ID NO: 223654 - protein, 15 aa, Homo sapiens
  CDR3 for beta chain variable domain of TCR clone 111827 (TRBV7-3, TRBJ2-2)
CASSETGQGTRELFF

SEQ ID NO: 223655 - protein, 15 aa, Homo sapiens
  CDR3 for alpha chain variable domain of TCR clone 111828 (TRAV17, TRAJ37)
CATDHGSSNTGKRIF

SEQ ID NO: 223656 - protein, 14 aa, Homo sapiens
  CDR3 for beta chain variable domain of TCR clone 111828 (TRBV7-2, TRBJ2-3)
CASSRTSGADTQYF

SEQ ID NO: 223657 - protein, 11 aa, Homo sapiens
  CDR3 for alpha chain variable domain of TCR clone 111829 (TRAV1-2, TRAJ31)
CAVNNIARLMF

SEQ ID NO: 223658 - protein, 15 aa, Homo sapiens
  CDR3 for beta chain variable domain of TCR clone 111829 (TRBV28, TRBJ2-1)
CASSIIAGGRSEQFF

SEQ ID NO: 223659 - protein, 14 aa, Homo sapiens
  CDR3 for alpha chain variable domain of TCR clone 111830 (TRAV12-3, TRAJ42)
CAMNYGGSQGNLIF

SEQ ID NO: 223660 - protein, 14 aa, Homo sapiens
  CDR3 for beta chain variable domain of TCR clone 111830 (TRBV7-2, TRBJ2-7)
CASSLPPGQGPQYF

SEQ ID NO: 223661 - protein, 14 aa, Homo sapiens
  CDR3 for alpha chain variable domain of TCR clone 111831 (TRAV1-2, TRAJ8)
CAVREETGFQKLVF

SEQ ID NO: 223662 - protein, 14 aa, Homo sapiens
  CDR3 for beta chain variable domain of TCR clone 111831 (TRBV7-2, TRBJ2-7)
CASSPKTSFYEQYF

SEQ ID NO: 223663 - protein, 17 aa, Homo sapiens
  CDR3 for alpha chain variable domain of TCR clone 111832 (TRAV3, TRAJ6)
CAVRDGPRAGGSYIPTF

SEQ ID NO: 223664 - protein, 15 aa, Homo sapiens
  CDR3 for beta chain variable domain of TCR clone 111832 (TRBV3-1, TRBJ2-2)
CASSQDWTRAGELFF

SEQ ID NO: 223665 - protein, 15 aa, Homo sapiens
  CDR3 for alpha chain variable domain of TCR clone 111833 (TRAV17, TRAJ57)
CATGPSQGGSEKLVF

SEQ ID NO: 223666 - protein, 15 aa, Homo sapiens
  CDR3 for beta chain variable domain of TCR clone 111833 (TRBV7-9, TRBJ2-7)
CASSLALAEAYEQYF

SEQ ID NO: 223667 - protein, 14 aa, Homo sapiens
  CDR3 for alpha chain variable domain of TCR clone 111834 (TRAV2, TRAJ9)
CAVDPNTGGFKTIF

SEQ ID NO: 223668 - protein, 13 aa, Homo sapiens
  CDR3 for beta chain variable domain of TCR clone 111834 (TRBV20-1, TRBJ2-1)
CSASTGTSNEQFV

SEQ ID NO: 223669 - protein, 15 aa, Homo sapiens
  CDR3 for alpha chain variable domain of TCR clone 111835 (TRAV12-3, TRAJ49)
CAMAVTPNTGNQFYF

SEQ ID NO: 223670 - protein, 18 aa, Homo sapiens
  CDR3 for beta chain variable domain of TCR clone 111835 (TRBV4-1, TRBJ1-5)
CASSQDPRGQVLNQPQHF

SEQ ID NO: 223671 - protein, 12 aa, Homo sapiens
  CDR3 for alpha chain variable domain of TCR clone 111836 (TRAV12-1, TRAJ34)
CVVAGAADKLIF

SEQ ID NO: 223672 - protein, 12 aa, Homo sapiens
  CDR3 for beta chain variable domain of TCR clone 111836 (TRBV7-9, TRBJ1-1)
CASSLVRGEAFF

SEQ ID NO: 223673 - protein, 14 aa, Homo sapiens
  CDR3 for alpha chain variable domain of TCR clone 111837 (TRAV35, TRAJ22)
CAGLRPGPARQLTF

SEQ ID NO: 223674 - protein, 14 aa, Homo sapiens
  CDR3 for beta chain variable domain of TCR clone 111837 (TRBV4-1, TRBJ2-7)
CASSPVAGGDEQYF

SEQ ID NO: 223675 - protein, 11 aa, Homo sapiens
  CDR3 for alpha chain variable domain of TCR clone 111838 (TRAV35, TRAJ22)
CAGPGVGQLTF

SEQ ID NO: 223676 - protein, 16 aa, Homo sapiens
  CDR3 for beta chain variable domain of TCR clone 111838 (TRBV7-2, TRBJ1-2)
CASSSNQDRRGHGYTF

SEQ ID NO: 223677 - protein, 14 aa, Homo sapiens
  CDR3 for alpha chain variable domain of TCR clone 111839 (TRAV12-2, TRAJ13)
CAVKKTGGYQKVTF

SEQ ID NO: 223678 - protein, 15 aa, Homo sapiens
  CDR3 for beta chain variable domain of TCR clone 111839 (TRBV20-1, TRBJ2-7)
RSARDRVSGMDEQYF

SEQ ID NO: 223679 - protein, 15 aa, Homo sapiens
  CDR3 for alpha chain variable domain of TCR clone 111840 (TRAV16, TRAJ26)
CITVLQRNYGQNVVF

SEQ ID NO: 223680 - protein, 15 aa, Homo sapiens
  CDR3 for beta chain variable domain of TCR clone 111840 (TRBV7-2, TRBJ2-3)
CASSLTGTSTDTQYF

SEQ ID NO: 223681 - protein, 15 aa, Homo sapiens
  CDR3 for alpha chain variable domain of TCR clone 111841 (TRAV26-1, TRAJ15)
FIVRAANQAGTALIF

SEQ ID NO: 223682 - protein, 15 aa, Homo sapiens
  CDR3 for beta chain variable domain of TCR clone 111841 (TRBV20-1, TRBJ1-1)
CSARSAATSNTEAFF

SEQ ID NO: 223683 - protein, 19 aa, Homo sapiens
  CDR3 for alpha chain variable domain of TCR clone 111842 (TRAV17, TRAJ40)
TASRAADTASYFCASKYIF

SEQ ID NO: 223684 - protein, 14 aa, Homo sapiens
  CDR3 for beta chain variable domain of TCR clone 111842 (TRBV25-1, TRBJ1-1)
CASTHLGGNTEAFF

SEQ ID NO: 223685 - protein, 16 aa, Homo sapiens
  CDR3 for alpha chain variable domain of TCR clone 111843 (TRAV12-3, TRAJ10)
CAMKKGITGGGNKLTF

SEQ ID NO: 223686 - protein, 14 aa, Homo sapiens
  CDR3 for beta chain variable domain of TCR clone 111843 (TRBV15, TRBJ2-3)
CATRSGTSIDTQYF

SEQ ID NO: 223687 - protein, 13 aa, Homo sapiens
  CDR3 for alpha chain variable domain of TCR clone 111844 (TRAV8-1, TRAJ30)
CAVNSNRDDKIIF

SEQ ID NO: 223688 - protein, 13 aa, Homo sapiens
  CDR3 for beta chain variable domain of TCR clone 111844 (TRBV20-1, TRBJ1-1)
CSAPRGGGTEAFF

SEQ ID NO: 223689 - protein, 18 aa, Homo sapiens
  CDR3 for alpha chain variable domain of TCR clone 111845 (TRAV29/DV5, TRAJ52)
CAAGFRGAGGTSYGKLTF

SEQ ID NO: 223690 - protein, 18 aa, Homo sapiens
  CDR3 for beta chain variable domain of TCR clone 111845 (TRBV28, TRBJ2-6)
CASSLAGRAVSGANVLTF

SEQ ID NO: 223691 - protein, 13 aa, Homo sapiens
  CDR3 for alpha chain variable domain of TCR clone 111846 (TRAV29/DV5, TRAJ31)
CAASRNNNARLMF

SEQ ID NO: 223692 - protein, 16 aa, Homo sapiens
  CDR3 for beta chain variable domain of TCR clone 111846 (TRBV12-4, TRBJ2-5)
CASSFFVRGRQETQYF

SEQ ID NO: 223693 - protein, 14 aa, Homo sapiens
  CDR3 for alpha chain variable domain of TCR clone 111847 (TRAV8-4, TRAJ17)
RAVSDQAAGNKLTF

SEQ ID NO: 223694 - protein, 15 aa, Homo sapiens
  CDR3 for beta chain variable domain of TCR clone 111847 (TRBV7-2, TRBJ1-2)
CASSLAPDRGLGYTF

SEQ ID NO: 223695 - protein, 13 aa, Homo sapiens
  CDR3 for alpha chain variable domain of TCR clone 111848 (TRAV21, TRAJ27)
CAARPGNAGKSTF

SEQ ID NO: 223696 - protein, 12 aa, Homo sapiens
  CDR3 for beta chain variable domain of TCR clone 111848 (TRBV5-1, TRBJ2-1)
CASIGGYNEQFF

SEQ ID NO: 223697 - protein, 14 aa, Homo sapiens
  CDR3 for alpha chain variable domain of TCR clone 111849 (TRAV8-4, TRAJ9)
CAVRINTGGFKTIF

SEQ ID NO: 223698 - protein, 13 aa, Homo sapiens
  CDR3 for beta chain variable domain of TCR clone 111849 (TRBV7-2, TRBJ2-4)
CASSREHANIQYF

SEQ ID NO: 223699 - protein, 10 aa, Homo sapiens
  CDR3 for alpha chain variable domain of TCR clone 111850 (TRAV12-3, TRAJ49)
CAMNDDQFYF

SEQ ID NO: 223700 - protein, 16 aa, Homo sapiens
  CDR3 for beta chain variable domain of TCR clone 111850 (TRBV12-4, TRBJ2-2)
CASSFWIVGNTGELFF

SEQ ID NO: 223701 - protein, 12 aa, Homo sapiens
  CDR3 for alpha chain variable domain of TCR clone 111851 (TRAV21, TRAJ58)
CALSASGSMLTF

SEQ ID NO: 223702 - protein, 13 aa, Homo sapiens
  CDR3 for beta chain variable domain of TCR clone 111851 (TRBV5-7, TRBJ1-2)
CASSLGVFNGYTF

SEQ ID NO: 223703 - protein, 14 aa, Homo sapiens
  CDR3 for alpha chain variable domain of TCR clone 111852 (TRAV2, TRAJ37)
CAVDFTSNTGKLIF

SEQ ID NO: 223704 - protein, 12 aa, Homo sapiens
  CDR3 for beta chain variable domain of TCR clone 111852 (TRBV7-8, TRBJ2-7)
CASSLGDREQYF

SEQ ID NO: 223705 - protein, 14 aa, Homo sapiens
  CDR3 for alpha chain variable domain of TCR clone 111853 (TRAV12-2, TRAJ3)
CAVSLYSSASKIIF

SEQ ID NO: 223706 - protein, 14 aa, Homo sapiens
  CDR3 for beta chain variable domain of TCR clone 111853 (TRBV27, TRBJ2-1)
CAGSIAETYNEQFF

SEQ ID NO: 223707 - protein, 14 aa, Homo sapiens
  CDR3 for alpha chain variable domain of TCR clone 111854 (TRAV13-1, TRAJ48)
CAASRSFGNEKLTF

SEQ ID NO: 223708 - protein, 13 aa, Homo sapiens
  CDR3 for beta chain variable domain of TCR clone 111854 (TRBV12-4, TRBJ1-5)
CASSPRQYQPQHF

SEQ ID NO: 223709 - protein, 14 aa, Homo sapiens
  CDR3 for alpha chain variable domain of TCR clone 111855 (TRAV26-1, TRAJ44)
CIVRPTGTASKLTF

SEQ ID NO: 223710 - protein, 12 aa, Homo sapiens
  CDR3 for beta chain variable domain of TCR clone 111855 (TRBV11-3, TRBJ1-1)
CASSVRDSEAFF

SEQ ID NO: 223711 - protein, 13 aa, Homo sapiens
  CDR3 for alpha chain variable domain of TCR clone 111856 (TRAV26-2, TRAJ43)
CILRAVNNNDMRF

SEQ ID NO: 223712 - protein, 15 aa, Homo sapiens
  CDR3 for beta chain variable domain of TCR clone 111856 (TRBV7-2, TRBJ2-1)
CASTHGTGIYKEQFF

SEQ ID NO: 223713 - protein, 15 aa, Homo sapiens
  CDR3 for alpha chain variable domain of TCR clone 111857 (TRAV8-3, TRAJ45)
CASSYSGGGADGLTF

SEQ ID NO: 223714 - protein, 12 aa, Homo sapiens
  CDR3 for beta chain variable domain of TCR clone 111857 (TRBV7-8, TRBJ2-7)
CASSLGDKEQYF

SEQ ID NO: 223715 - protein, 16 aa, Homo sapiens
  CDR3 for alpha chain variable domain of TCR clone 111858 (TRAV16, TRAJ4)
CALSRMFSGGYNKLIF

SEQ ID NO: 223716 - protein, 13 aa, Homo sapiens
  CDR3 for beta chain variable domain of TCR clone 111858 (TRBV10-3, TRBJ2-7)
CASKLAVNYEQYF

SEQ ID NO: 223717 - protein, 13 aa, Homo sapiens
  CDR3 for alpha chain variable domain of TCR clone 111859 (TRAV1-1, TRAJ33)
CASHMDSNYQLIW

SEQ ID NO: 223718 - protein, 13 aa, Homo sapiens
  CDR3 for beta chain variable domain of TCR clone 111859 (TRBV7-9, TRBJ1-2)
CASSLKQNYGYTF

SEQ ID NO: 223719 - protein, 14 aa, Homo sapiens
  CDR3 for alpha chain variable domain of TCR clone 111860 (TRAV12-1, TRAJ17)
CVVNPKAAGNKLTF

SEQ ID NO: 223720 - protein, 15 aa, Homo sapiens
  CDR3 for beta chain variable domain of TCR clone 111860 (TRBV19, TRBJ2-2)
CASSPRTGWTGELFF

SEQ ID NO: 223721 - protein, 11 aa, Homo sapiens
  CDR3 for alpha chain variable domain of TCR clone 111861 (TRAV13-1, TRAJ23)
CAASSRGKLIF

SEQ ID NO: 223722 - protein, 13 aa, Homo sapiens
  CDR3 for beta chain variable domain of TCR clone 111861 (TRBV7-3, TRBJ2-5)
CASSCRGGETQYF

SEQ ID NO: 223723 - protein, 14 aa, Homo sapiens
  CDR3 for alpha chain variable domain of TCR clone 111862 (TRAV8-1, TRAJ5)
CAVSMDTGRRALTF

SEQ ID NO: 223724 - protein, 12 aa, Homo sapiens
  CDR3 for beta chain variable domain of TCR clone 111862 (TRBV12-4, TRBJ2-7)
CASSLGGYEQYF

SEQ ID NO: 223725 - protein, 14 aa, Homo sapiens
  CDR3 for alpha chain variable domain of TCR clone 111863 (TRAV3, TRAJ34)
CAVRDINNTNKLIF

SEQ ID NO: 223726 - protein, 15 aa, Homo sapiens
  CDR3 for beta chain variable domain of TCR clone 111863 (TRBV20-1, TRBJ2-7)
CSARDRVSGMDEQYF

SEQ ID NO: 223727 - protein, 12 aa, Homo sapiens
  CDR3 for alpha chain variable domain of TCR clone 111864 (TRAV27, TRAJ35)
CAGADFGNGLHC

SEQ ID NO: 223728 - protein, 16 aa, Homo sapiens
  CDR3 for beta chain variable domain of TCR clone 111864 (TRBV6-1, TRBJ2-1)
CASISRQGSSYNEQFF

SEQ ID NO: 223729 - protein, 14 aa, Homo sapiens
  CDR3 for alpha chain variable domain of TCR clone 111865 (TRAV29/DV5, TRAJ49)
CAASAQNTGNQFYF

SEQ ID NO: 223730 - protein, 15 aa, Homo sapiens
  CDR3 for beta chain variable domain of TCR clone 111865 (TRBV6-3, TRBJ2-7)
CASSSPGTVFYEQYF

SEQ ID NO: 223731 - protein, 15 aa, Homo sapiens
  CDR3 for alpha chain variable domain of TCR clone 111866 (TRAV13-1, TRAJ10)
CAATILKGGGNKLTF

SEQ ID NO: 223732 - protein, 15 aa, Homo sapiens
  CDR3 for beta chain variable domain of TCR clone 111866 (TRBV2, TRBJ2-7)
CASTLLGSGATEQYF

SEQ ID NO: 223733 - protein, 14 aa, Homo sapiens
  CDR3 for alpha chain variable domain of TCR clone 111867 (TRAV20, TRAJ56)
CAVQFGGANSTLTF

SEQ ID NO: 223734 - protein, 14 aa, Homo sapiens
  CDR3 for beta chain variable domain of TCR clone 111867 (TRBV20-1, TRBJ2-7)
CSAKRGRSSYEQYF

SEQ ID NO: 223735 - protein, 14 aa, Homo sapiens
  CDR3 for alpha chain variable domain of TCR clone 111868 (TRAV1-2, TRAJ16)
CAVNRFSDGQQLLF

SEQ ID NO: 223736 - protein, 13 aa, Homo sapiens
  CDR3 for beta chain variable domain of TCR clone 111868 (TRBV12-4, TRBJ2-5)
CASSLGGSRTQYF

SEQ ID NO: 223737 - protein, 13 aa, Homo sapiens
  CDR3 for alpha chain variable domain of TCR clone 111869 (TRAV12-2, TRAJ49)
CAANMRTGNQFYF

SEQ ID NO: 223738 - protein, 11 aa, Homo sapiens
  CDR3 for beta chain variable domain of TCR clone 111869 (TRBV5-5, TRBJ1-1)
CASSLGVEAFF

SEQ ID NO: 223739 - protein, 13 aa, Homo sapiens
  CDR3 for alpha chain variable domain of TCR clone 111870 (TRAV1-2, TRAJ12)
CAVSMDSSYKLIF

SEQ ID NO: 223740 - protein, 18 aa, Homo sapiens
  CDR3 for beta chain variable domain of TCR clone 111870 (TRBV11-2, TRBJ2-3)
CASSLGGASRGAPNTQYF

SEQ ID NO: 223741 - protein, 16 aa, Homo sapiens
  CDR3 for alpha chain variable domain of TCR clone 111871 (TRAV12-2, TRAJ45)
CAVKRNPGGGADGLTF

SEQ ID NO: 223742 - protein, 12 aa, Homo sapiens
  CDR3 for beta chain variable domain of TCR clone 111871 (TRBV6-1, TRBJ2-5)
CASSEGRETKYF

SEQ ID NO: 223743 - protein, 15 aa, Homo sapiens
  CDR3 for alpha chain variable domain of TCR clone 111872 (TRAV13-1, TRAJ50)
CAAKGAETSYDKVIF

SEQ ID NO: 223744 - protein, 18 aa, Homo sapiens
  CDR3 for beta chain variable domain of TCR clone 111872 (TRBV10-3, TRBJ2-1)
CTSVPSVSLRGGVDEQFF

SEQ ID NO: 223745 - protein, 17 aa, Homo sapiens
  CDR3 for alpha chain variable domain of TCR clone 111873 (TRAV3, TRAJ28)
CAVRPLYSGAGSYQLTF

SEQ ID NO: 223746 - protein, 15 aa, Homo sapiens
  CDR3 for beta chain variable domain of TCR clone 111873 (TRBV7-2, TRBJ2-1)
CASSSGLAGGNEQFF

SEQ ID NO: 223747 - protein, 17 aa, Homo sapiens
  CDR3 for alpha chain variable domain of TCR clone 111874 (TRAV13-1, TRAJ28)
CAASPPYSGAGSYQLTF

SEQ ID NO: 223748 - protein, 16 aa, Homo sapiens
  CDR3 for beta chain variable domain of TCR clone 111874 (TRBV7-9, TRBJ1-2)
CASSLGFSSGEDGYTF

SEQ ID NO: 223749 - protein, 11 aa, Homo sapiens
  CDR3 for alpha chain variable domain of TCR clone 111875 (TRAV12-3, TRAJ43)
CAMSVSNDMRF

SEQ ID NO: 223750 - protein, 13 aa, Homo sapiens
  CDR3 for beta chain variable domain of TCR clone 111875 (TRBV19, TRBJ2-7)
CASSPRQSYEQYF

SEQ ID NO: 223751 - protein, 15 aa, Homo sapiens
  CDR3 for alpha chain variable domain of TCR clone 111876 (TRAV17, TRAJ22)
CATVAPSGSARQLTL

SEQ ID NO: 223752 - protein, 16 aa, Homo sapiens
  CDR3 for beta chain variable domain of TCR clone 111876 (TRBV10-3, TRBJ2-7)
CAISADFADRPYEQYF

SEQ ID NO: 223753 - protein, 15 aa, Homo sapiens
  CDR3 for alpha chain variable domain of TCR clone 111877 (TRAV8-4, TRAJ7)
CAVSGGNYGNNRLAF

SEQ ID NO: 223754 - protein, 13 aa, Homo sapiens
  CDR3 for beta chain variable domain of TCR clone 111877 (TRBV7-3, TRBJ1-1)
CASSQDWGAEAFF

SEQ ID NO: 223755 - protein, 16 aa, Homo sapiens
  CDR3 for alpha chain variable domain of TCR clone 111878 (TRAV30, TRAJ24)
CGTEIVDADSWGKFQF

SEQ ID NO: 223756 - protein, 13 aa, Homo sapiens
  CDR3 for beta chain variable domain of TCR clone 111878 (TRBV20-1, TRBJ1-1)
CSAPPGGHTGAFF

SEQ ID NO: 223757 - protein, 13 aa, Homo sapiens
  CDR3 for alpha chain variable domain of TCR clone 111879 (TRAV12-2, TRAJ42)
CAVKRGSQGNLIF

SEQ ID NO: 223758 - protein, 13 aa, Homo sapiens
  CDR3 for beta chain variable domain of TCR clone 111879 (TRBV7-9, TRBJ2-3)
CASNPGSTDTQYF

SEQ ID NO: 223759 - protein, 17 aa, Homo sapiens
  CDR3 for alpha chain variable domain of TCR clone 111880 (TRAV3, TRAJ6)
CAVRDGPRAGGSYIPTF

SEQ ID NO: 223760 - protein, 13 aa, Homo sapiens
  CDR3 for beta chain variable domain of TCR clone 111880 (TRBV2, TRBJ2-7)
CASSVGGSGEQYF

SEQ ID NO: 223761 - protein, 14 aa, Homo sapiens
  CDR3 for alpha chain variable domain of TCR clone 111881 (TRAV13-1, TRAJ44)
CAAKATGTASKLTF

SEQ ID NO: 223762 - protein, 13 aa, Homo sapiens
  CDR3 for beta chain variable domain of TCR clone 111881 (TRBV7-2, TRBJ2-7)
CASSSPSGSEQYF

SEQ ID NO: 223763 - protein, 14 aa, Homo sapiens
  CDR3 for alpha chain variable domain of TCR clone 111882 (TRAV16, TRAJ42)
CALLAGGSQGNLIF

SEQ ID NO: 223764 - protein, 14 aa, Homo sapiens
  CDR3 for beta chain variable domain of TCR clone 111882 (TRBV6-1, TRBJ1-3)
CASVQGGGGNTIYF

SEQ ID NO: 223765 - protein, 13 aa, Homo sapiens
  CDR3 for alpha chain variable domain of TCR clone 111883 (TRAV12-2, TRAJ27)
CAVINTNAGKSTF

SEQ ID NO: 223766 - protein, 20 aa, Homo sapiens
  CDR3 for beta chain variable domain of TCR clone 111883 (TRBV28, TRBJ2-1)
CASTPIGRSPGLAGGNEQFF

SEQ ID NO: 223767 - protein, 15 aa, Homo sapiens
  CDR3 for alpha chain variable domain of TCR clone 111884 (TRAV27, TRAJ38)
CAARRNAGNNRKLIW

SEQ ID NO: 223768 - protein, 16 aa, Homo sapiens
  CDR3 for beta chain variable domain of TCR clone 111884 (TRBV13, TRBJ2-7)
CASSSRESGRTYEQYF

SEQ ID NO: 223769 - protein, 11 aa, Homo sapiens
  CDR3 for alpha chain variable domain of TCR clone 111885 (TRAV12-1, TRAJ37)
CVVNTPGKLIF

SEQ ID NO: 223770 - protein, 13 aa, Homo sapiens
  CDR3 for beta chain variable domain of TCR clone 111885 (TRBV12-4, TRBJ1-5)
CASSPDRAQPQHS

SEQ ID NO: 223771 - protein, 13 aa, Homo sapiens
  CDR3 for alpha chain variable domain of TCR clone 111886 (TRAV12-3, TRAJ33)
CAMSVNSNYQLIW

SEQ ID NO: 223772 - protein, 13 aa, Homo sapiens
  CDR3 for beta chain variable domain of TCR clone 111886 (TRBV12-4, TRBJ1-2)
CTSVPAVSYDYTF

SEQ ID NO: 223773 - protein, 14 aa, Homo sapiens
  CDR3 for alpha chain variable domain of TCR clone 111887 (TRAV26-1, TRAJ21)
CIVRTPYNFNKFYF

SEQ ID NO: 223774 - protein, 14 aa, Homo sapiens
  CDR3 for beta chain variable domain of TCR clone 111887 (TRBV11-3, TRBJ2-1)
CASSATTSGSIQFF

SEQ ID NO: 223775 - protein, 14 aa, Homo sapiens
  CDR3 for alpha chain variable domain of TCR clone 111888 (TRAV1-2, TRAJ16)
CAVNRFSDGQKLLF

SEQ ID NO: 223776 - protein, 16 aa, Homo sapiens
  CDR3 for beta chain variable domain of TCR clone 111888 (TRBV29-1, TRBJ2-7)
CSVEVVGTSGSYEQYV

SEQ ID NO: 223777 - protein, 12 aa, Homo sapiens
  CDR3 for alpha chain variable domain of TCR clone 111889 (TRAV12-1, TRAJ40)
CVVYSGTYKYIF

SEQ ID NO: 223778 - protein, 13 aa, Homo sapiens
  CDR3 for beta chain variable domain of TCR clone 111889 (TRBV19, TRBJ2-5)
CASRDSRRETQYF

SEQ ID NO: 223779 - protein, 16 aa, Homo sapiens
  CDR3 for alpha chain variable domain of TCR clone 111890 (TRAV26-1, )
CIDIQNPDPAVYQLRD

SEQ ID NO: 223780 - protein, 19 aa, Homo sapiens
  CDR3 for beta chain variable domain of TCR clone 111890 (TRBV19, TRBJ2-5)
CASSIGQFTDFFLGETQYF

SEQ ID NO: 223781 - protein, 19 aa, Homo sapiens
  CDR3 for alpha chain variable domain of TCR clone 111891 (TRAV2, TRAJ20)
ILQVREADAAVYRDCKLSF

SEQ ID NO: 223782 - protein, 13 aa, Homo sapiens
  CDR3 for beta chain variable domain of TCR clone 111891 (TRBV27, TRBJ1-4)
CASSLMGDEKLFF

SEQ ID NO: 223783 - protein, 12 aa, Homo sapiens
  CDR3 for alpha chain variable domain of TCR clone 111892 (TRAV2, TRAJ26)
CAASPGRLWSEF

SEQ ID NO: 223784 - protein, 13 aa, Homo sapiens
  CDR3 for beta chain variable domain of TCR clone 111892 (TRBV7-9, TRBJ1-2)
CASSLKQNYGYTF

SEQ ID NO: 223785 - protein, 12 aa, Homo sapiens
  CDR3 for alpha chain variable domain of TCR clone 111893 (TRAV12-3, TRAJ20)
CAMVRGDYKLSF

SEQ ID NO: 223786 - protein, 13 aa, Homo sapiens
  CDR3 for beta chain variable domain of TCR clone 111893 (TRBV20-1, TRBJ1-1)
CSAGTVGNTEAFF

SEQ ID NO: 223787 - protein, 15 aa, Homo sapiens
  CDR3 for alpha chain variable domain of TCR clone 111894 (TRAV38-2/DV8, TRAJ26)
CAYRSRDNYGQNFVF

SEQ ID NO: 223788 - protein, 14 aa, Homo sapiens
  CDR3 for beta chain variable domain of TCR clone 111894 (TRBV19, TRBJ2-1)
CASPTFVLSGEQFF

SEQ ID NO: 223789 - protein, 12 aa, Homo sapiens
  CDR3 for alpha chain variable domain of TCR clone 111895 (TRAV3, TRAJ20)
CAVRDGDYKLSF

SEQ ID NO: 223790 - protein, 16 aa, Homo sapiens
  CDR3 for beta chain variable domain of TCR clone 111895 (TRBV20-1, TRBJ1-4)
CSAPGQGLLTNEKLFF

SEQ ID NO: 223791 - protein, 13 aa, Homo sapiens
  CDR3 for alpha chain variable domain of TCR clone 111896 (TRAV13-1, TRAJ21)
CAASIYNFNKFYF

SEQ ID NO: 223792 - protein, 13 aa, Homo sapiens
  CDR3 for beta chain variable domain of TCR clone 111896 (TRBV27, TRBJ1-4)
CASSLMGDEKMFF

SEQ ID NO: 223793 - protein, 18 aa, Homo sapiens
  CDR3 for alpha chain variable domain of TCR clone 111897 (TRAV26-1, TRAJ22)
CIVRVALISSSSARQLTF

SEQ ID NO: 223794 - protein, 13 aa, Homo sapiens
  CDR3 for beta chain variable domain of TCR clone 111897 (TRBV13, TRBJ2-5)
CASSPEVGETQYF

SEQ ID NO: 223795 - protein, 13 aa, Homo sapiens
  CDR3 for alpha chain variable domain of TCR clone 111898 (TRAV27, TRAJ45)
CRSSGGGADGLTF

SEQ ID NO: 223796 - protein, 14 aa, Homo sapiens
  CDR3 for beta chain variable domain of TCR clone 111898 (TRBV19, TRBJ2-2)
CASSGQGIAGELFF

SEQ ID NO: 223797 - protein, 16 aa, Homo sapiens
  CDR3 for alpha chain variable domain of TCR clone 111899 (TRAV8-2, TRAJ44)
CVREGPALPVNSPLGL

SEQ ID NO: 223798 - protein, 13 aa, Homo sapiens
  CDR3 for beta chain variable domain of TCR clone 111899 (TRBV12-4, TRBJ2-7)
CASSRQASYEQYF

SEQ ID NO: 223799 - protein, 13 aa, Homo sapiens
  CDR3 for alpha chain variable domain of TCR clone 111900 (TRAV8-6, TRAJ36)
CAVIGPGANNLFF

SEQ ID NO: 223800 - protein, 15 aa, Homo sapiens
  CDR3 for beta chain variable domain of TCR clone 111900 (TRBV5-1, TRBJ2-1)
CASTGSGRTYNEQFF

SEQ ID NO: 223801 - protein, 13 aa, Homo sapiens
  CDR3 for alpha chain variable domain of TCR clone 111901 (TRAV8-6, TRAJ49)
CAVITNTGNQFYF

SEQ ID NO: 223802 - protein, 13 aa, Homo sapiens
  CDR3 for beta chain variable domain of TCR clone 111901 (TRBV18, TRBJ2-5)
CASSPPGKETQYF

SEQ ID NO: 223803 - protein, 16 aa, Homo sapiens
  CDR3 for alpha chain variable domain of TCR clone 111902 (TRAV12-2, TRAJ32)
CAVNMNYGGATNNLIF

SEQ ID NO: 223804 - protein, 16 aa, Homo sapiens
  CDR3 for beta chain variable domain of TCR clone 111902 (TRBV7-8, TRBJ2-3)
CASSTEGQRETDTQYF

SEQ ID NO: 223805 - protein, 12 aa, Homo sapiens
  CDR3 for alpha chain variable domain of TCR clone 111903 (TRAV21, TRAJ33)
CAKMDSNYQLIW

SEQ ID NO: 223806 - protein, 14 aa, Homo sapiens
  CDR3 for beta chain variable domain of TCR clone 111903 (TRBV2, TRBJ2-7)
GASSLTSGGYEQYF

SEQ ID NO: 223807 - protein, 14 aa, Homo sapiens
  CDR3 for alpha chain variable domain of TCR clone 111904 (TRAV12-2, TRAJ45)
CAVNIGGGADGLTF

SEQ ID NO: 223808 - protein, 13 aa, Homo sapiens
  CDR3 for beta chain variable domain of TCR clone 111904 (TRBV19, TRBJ2-2)
CASSIWSTGEMFF

SEQ ID NO: 223809 - protein, 14 aa, Homo sapiens
  CDR3 for alpha chain variable domain of TCR clone 111905 (TRAV16, TRAJ33)
CALSAMDSNYQLIW

SEQ ID NO: 223810 - protein, 12 aa, Homo sapiens
  CDR3 for beta chain variable domain of TCR clone 111905 (TRBV5-1, TRBJ1-2)
CASSQETYGYTF

SEQ ID NO: 223811 - protein, 18 aa, Homo sapiens
  CDR3 for alpha chain variable domain of TCR clone 111906 (TRAV21, TRAJ52)
CAVRPSPAGGTSYGKLTF

SEQ ID NO: 223812 - protein, 13 aa, Homo sapiens
  CDR3 for beta chain variable domain of TCR clone 111906 (TRBV7-2, TRBJ2-5)
CASSQTSVETQYF

SEQ ID NO: 223813 - protein, 13 aa, Homo sapiens
  CDR3 for alpha chain variable domain of TCR clone 111907 (TRAV12-3, TRAJ33)
CAMSVNSNYQLIW

SEQ ID NO: 223814 - protein, 13 aa, Homo sapiens
  CDR3 for beta chain variable domain of TCR clone 111907 (TRBV7-2, TRBJ2-2)
CASSLADTGELFF

SEQ ID NO: 223815 - protein, 14 aa, Homo sapiens
  CDR3 for alpha chain variable domain of TCR clone 111908 (TRAV12-1, TRAJ17)
CVVNYKAAGNKLTF

SEQ ID NO: 223816 - protein, 14 aa, Homo sapiens
  CDR3 for beta chain variable domain of TCR clone 111908 (TRBV11-2, TRBJ2-5)
CASSRTGGIETQYF

SEQ ID NO: 223817 - protein, 14 aa, Homo sapiens
  CDR3 for alpha chain variable domain of TCR clone 111909 (TRAV29/DV5, TRAJ45)
CAASFRGGADGLTF

SEQ ID NO: 223818 - protein, 14 aa, Homo sapiens
  CDR3 for beta chain variable domain of TCR clone 111909 (TRBV7-2, TRBJ2-7)
CASRSQGAAYEQYF

SEQ ID NO: 223819 - protein, 15 aa, Homo sapiens
  CDR3 for alpha chain variable domain of TCR clone 111910 (TRAV38-1, TRAJ37)
CAFIHGSGDTGKLIF

SEQ ID NO: 223820 - protein, 12 aa, Homo sapiens
  CDR3 for beta chain variable domain of TCR clone 111910 (TRBV7-9, TRBJ2-7)
CASSFGSYEQYF

SEQ ID NO: 223821 - protein, 13 aa, Homo sapiens
  CDR3 for alpha chain variable domain of TCR clone 111911 (TRAV17, TRAJ29)
CATSPSGNTPLVF

SEQ ID NO: 223822 - protein, 18 aa, Homo sapiens
  CDR3 for beta chain variable domain of TCR clone 111911 (TRBV7-9, TRBJ2-7)
CASSLTTSGSRTWYEQYF

SEQ ID NO: 223823 - protein, 19 aa, Homo sapiens
  CDR3 for alpha chain variable domain of TCR clone 111912 (TRAV2, TRAJ20)
ILQVREADAAVYRDCKLSF

SEQ ID NO: 223824 - protein, 14 aa, Homo sapiens
  CDR3 for beta chain variable domain of TCR clone 111912 (TRBV4-2, TRBJ2-1)
CASGLDRAYNEQFF

SEQ ID NO: 223825 - protein, 15 aa, Homo sapiens
  CDR3 for alpha chain variable domain of TCR clone 111913 (TRAV3, TRAJ22)
CAVRDRGGFARQLTF

SEQ ID NO: 223826 - protein, 15 aa, Homo sapiens
  CDR3 for beta chain variable domain of TCR clone 111913 (TRBV7-3, TRBJ2-2)
CASSETGQGTGELFF

SEQ ID NO: 223827 - protein, 15 aa, Homo sapiens
  CDR3 for alpha chain variable domain of TCR clone 111914 (TRAV3, TRAJ5)
CAVRDRKTGRRALTF

SEQ ID NO: 223828 - protein, 15 aa, Homo sapiens
  CDR3 for beta chain variable domain of TCR clone 111914 (TRBV12-4, TRBJ2-5)
CQQFFVRGRQETQYF

SEQ ID NO: 223829 - protein, 12 aa, Homo sapiens
  CDR3 for alpha chain variable domain of TCR clone 111915 (TRAV8-6, TRAJ36)
CAVSDWLGQTTS

SEQ ID NO: 223830 - protein, 18 aa, Homo sapiens
  CDR3 for beta chain variable domain of TCR clone 111915 (TRBV12-4, TRBJ2-2)
CASSLVAGTRGRTGELFF

SEQ ID NO: 223831 - protein, 14 aa, Homo sapiens
  CDR3 for alpha chain variable domain of TCR clone 111916 (TRAV16, TRAJ33)
CALSAMDSNYQLIW

SEQ ID NO: 223832 - protein, 12 aa, Homo sapiens
  CDR3 for beta chain variable domain of TCR clone 111916 (TRBV5-1, TRBJ1-2)
CVSSQDTYGYTF

SEQ ID NO: 223833 - protein, 13 aa, Homo sapiens
  CDR3 for alpha chain variable domain of TCR clone 111917 (TRAV17, TRAJ9)
CATAITGVFKTIF

SEQ ID NO: 223834 - protein, 16 aa, Homo sapiens
  CDR3 for beta chain variable domain of TCR clone 111917 (TRBV15, TRBJ2-1)
CATSRNLAGGYNEQFF

SEQ ID NO: 223835 - protein, 11 aa, Homo sapiens
  CDR3 for alpha chain variable domain of TCR clone 111918 (TRAV3, TRAJ21)
CAVGNFNKFYF

SEQ ID NO: 223836 - protein, 16 aa, Homo sapiens
  CDR3 for beta chain variable domain of TCR clone 111918 (TRBV29-1, TRBJ2-7)
CSVEVVGTSGSYEQYF

SEQ ID NO: 223837 - protein, 15 aa, Homo sapiens
  CDR3 for alpha chain variable domain of TCR clone 111919 (TRAV2, TRAJ24)
CAVEVLTDSWGKFKF

SEQ ID NO: 223838 - protein, 14 aa, Homo sapiens
  CDR3 for beta chain variable domain of TCR clone 111919 (TRBV19, TRBJ2-1)
CASSMGSGRRSSSS

SEQ ID NO: 223839 - protein, 14 aa, Homo sapiens
  CDR3 for alpha chain variable domain of TCR clone 111920 (TRAV12-2, TRAJ40)
CAVKIPSGTYKYIF

SEQ ID NO: 223840 - protein, 13 aa, Homo sapiens
  CDR3 for beta chain variable domain of TCR clone 111920 (TRBV7-9, TRBJ1-2)
CASSLRQNYGYTF

SEQ ID NO: 223841 - protein, 15 aa, Homo sapiens
  CDR3 for alpha chain variable domain of TCR clone 111921 (TRAV13-1, TRAJ16)
CAARYQMARSCPLQG

SEQ ID NO: 223842 - protein, 13 aa, Homo sapiens
  CDR3 for beta chain variable domain of TCR clone 111921 (TRBV4-1, TRBJ2-1)
CASSQAGGDEQFF

SEQ ID NO: 223843 - protein, 12 aa, Homo sapiens
  CDR3 for alpha chain variable domain of TCR clone 111922 (TRAV29/DV5, TRAJ49)
CAATDTGNQFYF

SEQ ID NO: 223844 - protein, 15 aa, Homo sapiens
  CDR3 for beta chain variable domain of TCR clone 111922 (TRBV4-1, TRBJ2-5)
CASSQWDLYQETQYF

SEQ ID NO: 223845 - protein, 13 aa, Homo sapiens
  CDR3 for alpha chain variable domain of TCR clone 111923 (TRAV21, TRAJ57)
CAVTQGGSEKLVF

SEQ ID NO: 223846 - protein, 13 aa, Homo sapiens
  CDR3 for beta chain variable domain of TCR clone 111923 (TRBV2, TRBJ1-1)
CASRWTVNTEAFF

SEQ ID NO: 223847 - protein, 13 aa, Homo sapiens
  CDR3 for alpha chain variable domain of TCR clone 111924 (TRAV8-6, TRAJ49)
CAVITNTGNQFYF

SEQ ID NO: 223848 - protein, 14 aa, Homo sapiens
  CDR3 for beta chain variable domain of TCR clone 111924 (TRBV5-1, TRBJ2-7)
CASSRGESLYERYF

SEQ ID NO: 223849 - protein, 17 aa, Homo sapiens
  CDR3 for alpha chain variable domain of TCR clone 111925 (TRAV3, TRAJ6)
CAMRDGPRAGGSYIPTF

SEQ ID NO: 223850 - protein, 18 aa, Homo sapiens
  CDR3 for beta chain variable domain of TCR clone 111925 (TRBV7-3, TRBJ2-3)
CASSSTGTYPGSTDTQYF

SEQ ID NO: 223851 - protein, 14 aa, Homo sapiens
  CDR3 for alpha chain variable domain of TCR clone 111926 (TRAV26-1, TRAJ34)
CIVRVAYNTDKLIF

SEQ ID NO: 223852 - protein, 16 aa, Homo sapiens
  CDR3 for beta chain variable domain of TCR clone 111926 (TRBV20-1, TRBJ1-4)
CSAPGQGLLTNEKLFF

SEQ ID NO: 223853 - protein, 16 aa, Homo sapiens
  CDR3 for alpha chain variable domain of TCR clone 111927 (TRAV21, TRAJ17)
CAVSPGEEAAGNKLTF

SEQ ID NO: 223854 - protein, 16 aa, Homo sapiens
  CDR3 for beta chain variable domain of TCR clone 111927 (TRBV2, TRBJ2-7)
CASSEPWTGPSYEQYF

SEQ ID NO: 223855 - protein, 14 aa, Homo sapiens
  CDR3 for alpha chain variable domain of TCR clone 111928 (TRAV29/DV5, TRAJ28)
CAATEGAGSYQLTF

SEQ ID NO: 223856 - protein, 13 aa, Homo sapiens
  CDR3 for beta chain variable domain of TCR clone 111928 (TRBV20-1, TRBJ1-5)
CSASGGGNQPQHF

SEQ ID NO: 223857 - protein, 14 aa, Homo sapiens
  CDR3 for alpha chain variable domain of TCR clone 111929 (TRAV12-3, TRAJ33)
CAMSVPGSNYQLIW

SEQ ID NO: 223858 - protein, 15 aa, Homo sapiens
  CDR3 for beta chain variable domain of TCR clone 111929 (TRBV14, TRBJ2-5)
CASSQGEAVQETQYF

SEQ ID NO: 223859 - protein, 11 aa, Homo sapiens
  CDR3 for alpha chain variable domain of TCR clone 111930 (TRAV1-2, TRAJ20)
CAVSNDYKLSF

SEQ ID NO: 223860 - protein, 16 aa, Homo sapiens
  CDR3 for beta chain variable domain of TCR clone 111930 (TRBV25-1, TRBJ2-3)
CASSLRGFSGTDTQYF

SEQ ID NO: 223861 - protein, 15 aa, Homo sapiens
  CDR3 for alpha chain variable domain of TCR clone 111931 (TRAV12-2, TRAJ53)
CAVNGGGGSNYKLTF

SEQ ID NO: 223862 - protein, 17 aa, Homo sapiens
  CDR3 for beta chain variable domain of TCR clone 111931 (TRBV7-3, TRBJ2-3)
YASSLMKRMRGADTQYF

SEQ ID NO: 223863 - protein, 15 aa, Homo sapiens
  CDR3 for alpha chain variable domain of TCR clone 111932 (TRAV26-1, TRAJ56)
CIVRVDNGANSNLTF

SEQ ID NO: 223864 - protein, 14 aa, Homo sapiens
  CDR3 for beta chain variable domain of TCR clone 111932 (TRBV5-1, TRBJ2-7)
CASSRGESLYEQYF

SEQ ID NO: 223865 - protein, 14 aa, Homo sapiens
  CDR3 for alpha chain variable domain of TCR clone 111933 (TRAV2, TRAJ9)
CAVEDRSGGFKTIF

SEQ ID NO: 223866 - protein, 18 aa, Homo sapiens
  CDR3 for beta chain variable domain of TCR clone 111933 (TRBV28, TRBJ2-5)
CASSSYLTSGRGQETQYF

SEQ ID NO: 223867 - protein, 14 aa, Homo sapiens
  CDR3 for alpha chain variable domain of TCR clone 111934 (TRAV38-2/DV8, TRAJ30)
CAYMDGLGGAKIIF

SEQ ID NO: 223868 - protein, 15 aa, Homo sapiens
  CDR3 for beta chain variable domain of TCR clone 111934 (TRBV7-9, TRBJ2-2)
CASRPADRDTGELFF

SEQ ID NO: 223869 - protein, 12 aa, Homo sapiens
  CDR3 for alpha chain variable domain of TCR clone 111935 (TRAV21, TRAJ13)
PGPSGGYQTVTF

SEQ ID NO: 223870 - protein, 15 aa, Homo sapiens
  CDR3 for beta chain variable domain of TCR clone 111935 (TRBV7-9, TRBJ1-6)
CASSSPGRGNSPLHF

SEQ ID NO: 223871 - protein, 13 aa, Homo sapiens
  CDR3 for alpha chain variable domain of TCR clone 111936 (TRAV21, TRAJ27)
CAARPGNAGNSTF

SEQ ID NO: 223872 - protein, 13 aa, Homo sapiens
  CDR3 for beta chain variable domain of TCR clone 111936 (TRBV13, TRBJ2-1)
CASILGGRGEQFF

SEQ ID NO: 223873 - protein, 13 aa, Homo sapiens
  CDR3 for alpha chain variable domain of TCR clone 111937 (TRAV17, TRAJ5)
CAPMDTGRRALTF

SEQ ID NO: 223874 - protein, 14 aa, Homo sapiens
  CDR3 for beta chain variable domain of TCR clone 111937 (TRBV19, TRBJ2-1)
CASPTVVLSGEQFF

SEQ ID NO: 223875 - protein, 15 aa, Homo sapiens
  CDR3 for alpha chain variable domain of TCR clone 111938 (TRAV14/DV4, TRAJ45)
CAMRFSGGGADGLTF

SEQ ID NO: 223876 - protein, 13 aa, Homo sapiens
  CDR3 for beta chain variable domain of TCR clone 111938 (TRBV7-3, TRBJ2-1)
CASSLWPYNEQFF

SEQ ID NO: 223877 - protein, 14 aa, Homo sapiens
  CDR3 for alpha chain variable domain of TCR clone 111939 (TRAV12-2, TRAJ45)
CAVNKGGGADGLTF

SEQ ID NO: 223878 - protein, 14 aa, Homo sapiens
  CDR3 for beta chain variable domain of TCR clone 111939 (TRBV20-1, TRBJ1-1)
CSAMGGTANTEAVF

SEQ ID NO: 223879 - protein, 13 aa, Homo sapiens
  CDR3 for alpha chain variable domain of TCR clone 111940 (TRAV12-1, TRAJ21)
CVVIPYNFNKFYF

SEQ ID NO: 223880 - protein, 13 aa, Homo sapiens
  CDR3 for beta chain variable domain of TCR clone 111940 (TRBV27, TRBJ2-1)
CASRTLGVGEQFF

SEQ ID NO: 223881 - protein, 15 aa, Homo sapiens
  CDR3 for alpha chain variable domain of TCR clone 111941 (TRAV34, TRAJ38)
CGADFTPGNNRKLIW

SEQ ID NO: 223882 - protein, 13 aa, Homo sapiens
  CDR3 for beta chain variable domain of TCR clone 111941 (TRBV7-8, TRBJ2-5)
CASSLGTTYEQYF

SEQ ID NO: 223883 - protein, 13 aa, Homo sapiens
  CDR3 for alpha chain variable domain of TCR clone 111942 (TRAV8-3, TRAJ43)
CAVGPDNINDMRF

SEQ ID NO: 223884 - protein, 14 aa, Homo sapiens
  CDR3 for beta chain variable domain of TCR clone 111942 (TRBV19, TRBJ2-1)
CASPTFVLSGEQFF

SEQ ID NO: 223885 - protein, 12 aa, Homo sapiens
  CDR3 for alpha chain variable domain of TCR clone 111943 (TRAV13-1, TRAJ49)
CAASPMGNQFYF

SEQ ID NO: 223886 - protein, 17 aa, Homo sapiens
  CDR3 for beta chain variable domain of TCR clone 111943 (TRBV28, TRBJ2-5)
CASSTPEGDALQETQYF

SEQ ID NO: 223887 - protein, 15 aa, Homo sapiens
  CDR3 for alpha chain variable domain of TCR clone 111944 (TRAV13-1, TRAJ52)
SYYNAGGTSYGKLTF

SEQ ID NO: 223888 - protein, 15 aa, Homo sapiens
  CDR3 for beta chain variable domain of TCR clone 111944 (TRBV10-2, TRBJ2-6)
CASSEQGTGANVLTF

SEQ ID NO: 223889 - protein, 13 aa, Homo sapiens
  CDR3 for alpha chain variable domain of TCR clone 111945 (TRAV1-1, TRAJ39)
CAVRDGAGNMLTF

SEQ ID NO: 223890 - protein, 16 aa, Homo sapiens
  CDR3 for beta chain variable domain of TCR clone 111945 (TRBV5-7, TRBJ1-5)
CASSLRQDREYQPQHF

SEQ ID NO: 223891 - protein, 14 aa, Homo sapiens
  CDR3 for alpha chain variable domain of TCR clone 111946 (TRAV12-1, TRAJ12)
CVVNGRDSSYKLIF

SEQ ID NO: 223892 - protein, 13 aa, Homo sapiens
  CDR3 for beta chain variable domain of TCR clone 111946 (TRBV28, TRBJ2-2)
CASIRERTGELFF

SEQ ID NO: 223893 - protein, 14 aa, Homo sapiens
  CDR3 for alpha chain variable domain of TCR clone 111947 (TRAV17, TRAJ57)
CATDPQGGSEKLVF

SEQ ID NO: 223894 - protein, 14 aa, Homo sapiens
  CDR3 for beta chain variable domain of TCR clone 111947 (TRBV2, TRBJ1-1)
CARVTGTDGSEAFF

SEQ ID NO: 223895 - protein, 11 aa, Homo sapiens
  CDR3 for alpha chain variable domain of TCR clone 111948 (TRAV1-2, TRAJ20)
CAVNGDYKLSF

SEQ ID NO: 223896 - protein, 15 aa, Homo sapiens
  CDR3 for beta chain variable domain of TCR clone 111948 (TRBV6-3, TRBJ2-7)
CASSSPGTVFYEQYF

SEQ ID NO: 223897 - protein, 17 aa, Homo sapiens
  CDR3 for alpha chain variable domain of TCR clone 111949 (TRAV21, TRAJ40)
CAVRPQSGTSGTYKYIF

SEQ ID NO: 223898 - protein, 13 aa, Homo sapiens
  CDR3 for beta chain variable domain of TCR clone 111949 (TRBV12-4, TRBJ2-7)
CASSPSRDTTRSF

SEQ ID NO: 223899 - protein, 13 aa, Homo sapiens
  CDR3 for alpha chain variable domain of TCR clone 111950 (TRAV8-3, TRAJ43)
CAVVPYNNNDMRF

SEQ ID NO: 223900 - protein, 14 aa, Homo sapiens
  CDR3 for beta chain variable domain of TCR clone 111950 (TRBV7-6, TRBJ2-3)
CASSLGTVTDTQYF

SEQ ID NO: 223901 - protein, 13 aa, Homo sapiens
  CDR3 for alpha chain variable domain of TCR clone 111951 (TRAV12-1, TRAJ16)
CVVNGPDGQKLLF

SEQ ID NO: 223902 - protein, 13 aa, Homo sapiens
  CDR3 for beta chain variable domain of TCR clone 111951 (TRBV2, TRBJ1-1)
CARNLTGGFHAFF

SEQ ID NO: 223903 - protein, 15 aa, Homo sapiens
  CDR3 for alpha chain variable domain of TCR clone 111952 (TRAV38-2/DV8, TRAJ45)
CAYWDSGGGADGLTF

SEQ ID NO: 223904 - protein, 14 aa, Homo sapiens
  CDR3 for beta chain variable domain of TCR clone 111952 (TRBV7-2, TRBJ2-7)
CASRSQGAGYEQYF

SEQ ID NO: 223905 - protein, 12 aa, Homo sapiens
  CDR3 for alpha chain variable domain of TCR clone 111953 (TRAV20, TRAJ56)
CAVTGANSKLTF

SEQ ID NO: 223906 - protein, 14 aa, Homo sapiens
  CDR3 for beta chain variable domain of TCR clone 111953 (TRBV20-1, TRBJ2-5)
CSALVPGYQENQYF

SEQ ID NO: 223907 - protein, 17 aa, Homo sapiens
  CDR3 for alpha chain variable domain of TCR clone 111954 (TRAV3, TRAJ38)
CAVRDCLNAGNNRKLIV

SEQ ID NO: 223908 - protein, 14 aa, Homo sapiens
  CDR3 for beta chain variable domain of TCR clone 111954 (TRBV5-5, TRBJ1-5)
CASSGQGVDQPQHF

SEQ ID NO: 223909 - protein, 16 aa, Homo sapiens
  CDR3 for alpha chain variable domain of TCR clone 111955 (TRAV3, TRAJ37)
CAVRGKGSGNTGKLIF

SEQ ID NO: 223910 - protein, 15 aa, Homo sapiens
  CDR3 for beta chain variable domain of TCR clone 111955 (TRBV11-2, TRBJ2-1)
CASCTGTSGYNEQFF

SEQ ID NO: 223911 - protein, 13 aa, Homo sapiens
  CDR3 for alpha chain variable domain of TCR clone 111956 (TRAV8-3, TRAJ37)
CAVPSSNTGKLIV

SEQ ID NO: 223912 - protein, 12 aa, Homo sapiens
  CDR3 for beta chain variable domain of TCR clone 111956 (TRBV11-2, TRBJ2-1)
CASSPGNNEQFF

SEQ ID NO: 223913 - protein, 11 aa, Homo sapiens
  CDR3 for alpha chain variable domain of TCR clone 111957 (TRAV2, TRAJ13)
CASEGYQKVTF

SEQ ID NO: 223914 - protein, 20 aa, Homo sapiens
  CDR3 for beta chain variable domain of TCR clone 111957 (TRBV28, TRBJ2-1)
CASTPIGRSPGLAGGNEQFF

SEQ ID NO: 223915 - protein, 14 aa, Homo sapiens
  CDR3 for alpha chain variable domain of TCR clone 111958 (TRAV8-1, TRAJ36)
CAVNSPTGANNLFF

SEQ ID NO: 223916 - protein, 15 aa, Homo sapiens
  CDR3 for beta chain variable domain of TCR clone 111958 (TRBV7-2, TRBJ2-3)
CASSVEQGGTDTQYF

SEQ ID NO: 223917 - protein, 14 aa, Homo sapiens
  CDR3 for alpha chain variable domain of TCR clone 111959 (TRAV8-4, TRAJ13)
CAVTLSGGYQKVTF

SEQ ID NO: 223918 - protein, 16 aa, Homo sapiens
  CDR3 for beta chain variable domain of TCR clone 111959 (TRBV5-7, TRBJ1-4)
CASSPSGALKTEKLFF

SEQ ID NO: 223919 - protein, 14 aa, Homo sapiens
  CDR3 for alpha chain variable domain of TCR clone 111960 (TRAV4, TRAJ26)
CLVGPHNYGQNFVF

SEQ ID NO: 223920 - protein, 17 aa, Homo sapiens
  CDR3 for beta chain variable domain of TCR clone 111960 (TRBV13, TRBJ2-3)
CASSLSRVAGGRNTQYF

SEQ ID NO: 223921 - protein, 18 aa, Homo sapiens
  CDR3 for alpha chain variable domain of TCR clone 111961 (TRAV13-1, TRAJ52)
CAASKRSAGGTSYGKLTF

SEQ ID NO: 223922 - protein, 14 aa, Homo sapiens
  CDR3 for beta chain variable domain of TCR clone 111961 (TRBV4-1, TRBJ2-2)
CASSQAVNTGELFF

SEQ ID NO: 223923 - protein, 13 aa, Homo sapiens
  CDR3 for alpha chain variable domain of TCR clone 111962 (TRAV27, TRAJ49)
CAPRPYTGNQFYF

SEQ ID NO: 223924 - protein, 15 aa, Homo sapiens
  CDR3 for beta chain variable domain of TCR clone 111962 (TRBV19, TRBJ2-7)
CASSPAGSGEALRYF

SEQ ID NO: 223925 - protein, 14 aa, Homo sapiens
  CDR3 for alpha chain variable domain of TCR clone 111963 (TRAV13-1, TRAJ44)
CAAKATGTASKLTF

SEQ ID NO: 223926 - protein, 13 aa, Homo sapiens
  CDR3 for beta chain variable domain of TCR clone 111963 (TRBV19, TRBJ1-2)
CASSVPGQDGYTF

SEQ ID NO: 223927 - protein, 12 aa, Homo sapiens
  CDR3 for alpha chain variable domain of TCR clone 111964 (TRAV3, TRAJ20)
CAMRDPDYKLSF

SEQ ID NO: 223928 - protein, 14 aa, Homo sapiens
  CDR3 for beta chain variable domain of TCR clone 111964 (TRBV4-2, TRBJ2-1)
CASGLDRAYNEQFF

SEQ ID NO: 223929 - protein, 16 aa, Homo sapiens
  CDR3 for alpha chain variable domain of TCR clone 111965 (TRAV30, TRAJ24)
CGTEIVDADSWGKFQF

SEQ ID NO: 223930 - protein, 15 aa, Homo sapiens
  CDR3 for beta chain variable domain of TCR clone 111965 (TRBV7-2, TRBJ2-2)
CAISPTGANTGELFF

SEQ ID NO: 223931 - protein, 15 aa, Homo sapiens
  CDR3 for alpha chain variable domain of TCR clone 111966 (TRAV3, TRAJ32)
CAVSSYGGATNKLIF

SEQ ID NO: 223932 - protein, 13 aa, Homo sapiens
  CDR3 for beta chain variable domain of TCR clone 111966 (TRBV20-1, TRBJ2-7)
CSARPSANYEQYF

SEQ ID NO: 223933 - protein, 10 aa, Homo sapiens
  CDR3 for alpha chain variable domain of TCR clone 111967 (TRAV17, TRAJ35)
CATAEGGIGF

SEQ ID NO: 223934 - protein, 16 aa, Homo sapiens
  CDR3 for beta chain variable domain of TCR clone 111967 (TRBV6-5, TRBJ2-7)
CASSSDPTSGFYEQYF

SEQ ID NO: 223935 - protein, 17 aa, Homo sapiens
  CDR3 for alpha chain variable domain of TCR clone 111968 (TRAV3, TRAJ6)
CAVRDGPRAGGSYIPTF

SEQ ID NO: 223936 - protein, 14 aa, Homo sapiens
  CDR3 for beta chain variable domain of TCR clone 111968 (TRBV7-9, TRBJ2-2)
CASSGLADTGELFF

SEQ ID NO: 223937 - protein, 13 aa, Homo sapiens
  CDR3 for alpha chain variable domain of TCR clone 111969 (TRAV12-2, TRAJ13)
CAVVSGGYQKVTF

SEQ ID NO: 223938 - protein, 12 aa, Homo sapiens
  CDR3 for beta chain variable domain of TCR clone 111969 (TRBV12-4, TRBJ2-1)
CASSPGRNEQFF

SEQ ID NO: 223939 - protein, 14 aa, Homo sapiens
  CDR3 for alpha chain variable domain of TCR clone 111970 (TRAV8-3, TRAJ4)
CAVGASGGYNKLIF

SEQ ID NO: 223940 - protein, 16 aa, Homo sapiens
  CDR3 for beta chain variable domain of TCR clone 111970 (TRBV19, TRBJ2-2)
CASSHSGGLNTGELFF

SEQ ID NO: 223941 - protein, 15 aa, Homo sapiens
  CDR3 for alpha chain variable domain of TCR clone 111971 (TRAV12-2, TRAJ43)
CAFDMRFGAGTRLTV

SEQ ID NO: 223942 - protein, 15 aa, Homo sapiens
  CDR3 for beta chain variable domain of TCR clone 111971 (TRBV19, TRBJ2-4)
CASRGPRRGENIQYF

SEQ ID NO: 223943 - protein, 16 aa, Homo sapiens
  CDR3 for alpha chain variable domain of TCR clone 111972 (TRAV12-1, TRAJ48)
CVVNMVSNFGDEKLTF

SEQ ID NO: 223944 - protein, 18 aa, Homo sapiens
  CDR3 for beta chain variable domain of TCR clone 111972 (TRBV11-2, TRBJ2-6)
CASSLNPFLGTGANVLTF

SEQ ID NO: 223945 - protein, 14 aa, Homo sapiens
  CDR3 for alpha chain variable domain of TCR clone 111973 (TRAV13-1, TRAJ40)
CAASMTSGTYKYIF

SEQ ID NO: 223946 - protein, 14 aa, Homo sapiens
  CDR3 for beta chain variable domain of TCR clone 111973 (TRBV12-4, TRBJ1-1)
CASSLGTGGTEAFF

SEQ ID NO: 223947 - protein, 12 aa, Homo sapiens
  CDR3 for alpha chain variable domain of TCR clone 111974 (TRAV13-1, TRAJ21)
CAAKEGFNKFYF

SEQ ID NO: 223948 - protein, 18 aa, Homo sapiens
  CDR3 for beta chain variable domain of TCR clone 111974 (TRBV20-1, TRBJ2-6)
CSAETTPTHGSGANVLSF

SEQ ID NO: 223949 - protein, 12 aa, Homo sapiens
  CDR3 for alpha chain variable domain of TCR clone 111975 (TRAV1-2, TRAJ33)
CAALDSNYQLIW

SEQ ID NO: 223950 - protein, 13 aa, Homo sapiens
  CDR3 for beta chain variable domain of TCR clone 111975 (TRBV7-6, TRBJ2-7)
CASSLDHTHEQYF

SEQ ID NO: 223951 - protein, 13 aa, Homo sapiens
  CDR3 for alpha chain variable domain of TCR clone 111976 (TRAV8-3, TRAJ43)
CAGGPDNNNDMRF

SEQ ID NO: 223952 - protein, 12 aa, Homo sapiens
  CDR3 for beta chain variable domain of TCR clone 111976 (TRBV7-2, TRBJ1-6)
CASSLSSSPLHF

SEQ ID NO: 223953 - protein, 14 aa, Homo sapiens
  CDR3 for alpha chain variable domain of TCR clone 111977 (TRAV29/DV5, TRAJ22)
CAASATGSARPLTF

SEQ ID NO: 223954 - protein, 14 aa, Homo sapiens
  CDR3 for beta chain variable domain of TCR clone 111977 (TRBV19, TRBJ2-1)
CASSPGLAPNEQFF

SEQ ID NO: 223955 - protein, 18 aa, Homo sapiens
  CDR3 for alpha chain variable domain of TCR clone 111978 (TRAV13-1, TRAJ52)
CAAKNPNAGGTSYGKLTF

SEQ ID NO: 223956 - protein, 13 aa, Homo sapiens
  CDR3 for beta chain variable domain of TCR clone 111978 (TRBV19, TRBJ2-5)
CASSETAPETQYF

SEQ ID NO: 223957 - protein, 14 aa, Homo sapiens
  CDR3 for alpha chain variable domain of TCR clone 111979 (TRAV35, TRAJ42)
CCVPYGGSQGNLIF

SEQ ID NO: 223958 - protein, 16 aa, Homo sapiens
  CDR3 for beta chain variable domain of TCR clone 111979 (TRBV7-2, TRBJ2-5)
CASSPFPTGGEETQYF

SEQ ID NO: 223959 - protein, 15 aa, Homo sapiens
  CDR3 for alpha chain variable domain of TCR clone 111980 (TRAV35, TRAJ58)
CAGRRQETSGSRLTF

SEQ ID NO: 223960 - protein, 12 aa, Homo sapiens
  CDR3 for beta chain variable domain of TCR clone 111980 (TRBV11-2, TRBJ2-2)
CASSLPTGELFF

SEQ ID NO: 223961 - protein, 11 aa, Homo sapiens
  CDR3 for alpha chain variable domain of TCR clone 111981 (TRAV13-1, TRAJ20)
CAASNYYKLSF

SEQ ID NO: 223962 - protein, 14 aa, Homo sapiens
  CDR3 for beta chain variable domain of TCR clone 111981 (TRBV7-2, TRBJ2-7)
CASSPKTSFYEQYF

SEQ ID NO: 223963 - protein, 14 aa, Homo sapiens
  CDR3 for alpha chain variable domain of TCR clone 111982 (TRAV12-2, TRAJ40)
CAVKIPSGTYKYIF

SEQ ID NO: 223964 - protein, 13 aa, Homo sapiens
  CDR3 for beta chain variable domain of TCR clone 111982 (TRBV20-1, TRBJ2-5)
CSASLTGRETQYF

SEQ ID NO: 223965 - protein, 14 aa, Homo sapiens
  CDR3 for alpha chain variable domain of TCR clone 111983 (TRAV1-2, TRAJ16)
CAVNRFSDGQKLLF

SEQ ID NO: 223966 - protein, 12 aa, Homo sapiens
  CDR3 for beta chain variable domain of TCR clone 111983 (TRBV6-5, TRBJ2-5)
CASSVGSETQYF

SEQ ID NO: 223967 - protein, 17 aa, Homo sapiens
  CDR3 for alpha chain variable domain of TCR clone 111984 (TRAV4, TRAJ18)
CLVGERSVGSTLGRLYF

SEQ ID NO: 223968 - protein, 14 aa, Homo sapiens
  CDR3 for beta chain variable domain of TCR clone 111984 (TRBV4-1, TRBJ2-2)
CASSQAVNTGELFF

SEQ ID NO: 223969 - protein, 13 aa, Homo sapiens
  CDR3 for alpha chain variable domain of TCR clone 111985 (TRAV8-3, TRAJ6)
CAARRGGSYIPAF

SEQ ID NO: 223970 - protein, 15 aa, Homo sapiens
  CDR3 for beta chain variable domain of TCR clone 111985 (TRBV4-1, TRBJ2-3)
CASSNLAGGRDTQYF

SEQ ID NO: 223971 - protein, 14 aa, Homo sapiens
  CDR3 for alpha chain variable domain of TCR clone 111986 (TRAV1-2, TRAJ8)
CAVREDTGFQKLVF

SEQ ID NO: 223972 - protein, 15 aa, Homo sapiens
  CDR3 for beta chain variable domain of TCR clone 111986 (TRBV15, TRBJ1-1)
CASSLQGGGNTEAFF

SEQ ID NO: 223973 - protein, 14 aa, Homo sapiens
  CDR3 for alpha chain variable domain of TCR clone 111987 (TRAV34, TRAJ44)
CGADGTGTATKLTF

SEQ ID NO: 223974 - protein, 15 aa, Homo sapiens
  CDR3 for beta chain variable domain of TCR clone 111987 (TRBV5-1, TRBJ2-1)
CASSPPRAPYNEQFF

SEQ ID NO: 223975 - protein, 16 aa, Homo sapiens
  CDR3 for alpha chain variable domain of TCR clone 111988 (TRAV3, TRAJ37)
CAVRPHGSGNTGKLIF

SEQ ID NO: 223976 - protein, 16 aa, Homo sapiens
  CDR3 for beta chain variable domain of TCR clone 111988 (TRBV9, TRBJ1-2)
CASSVEEKVYPYGYTF

SEQ ID NO: 223977 - protein, 14 aa, Homo sapiens
  CDR3 for alpha chain variable domain of TCR clone 111989 (TRAV1-2, TRAJ29)
CAVRELTSATPLVF

SEQ ID NO: 223978 - protein, 16 aa, Homo sapiens
  CDR3 for beta chain variable domain of TCR clone 111989 (TRBV11-2, TRBJ2-7)
CASSPTTGGVSYEQYF

SEQ ID NO: 223979 - protein, 14 aa, Homo sapiens
  CDR3 for alpha chain variable domain of TCR clone 111990 (TRAV12-2, TRAJ13)
CAVNPSGGYQKVTF

SEQ ID NO: 223980 - protein, 14 aa, Homo sapiens
  CDR3 for beta chain variable domain of TCR clone 111990 (TRBV11-1, TRBJ1-1)
CASSLEHPNTEAFF

SEQ ID NO: 223981 - protein, 12 aa, Homo sapiens
  CDR3 for alpha chain variable domain of TCR clone 111991 (TRAV12-3, TRAJ40)
CAMSSGTYKYIF

SEQ ID NO: 223982 - protein, 15 aa, Homo sapiens
  CDR3 for beta chain variable domain of TCR clone 111991 (TRBV7-3, TRBJ2-2)
CASGETGQGTGELFF

SEQ ID NO: 223983 - protein, 14 aa, Homo sapiens
  CDR3 for alpha chain variable domain of TCR clone 111992 (TRAV29/DV5, TRAJ45)
CAASFRGGADGLTF

SEQ ID NO: 223984 - protein, 14 aa, Homo sapiens
  CDR3 for beta chain variable domain of TCR clone 111992 (TRBV4-1, TRBJ2-2)
CASSQAVNTGELFF

SEQ ID NO: 223985 - protein, 13 aa, Homo sapiens
  CDR3 for alpha chain variable domain of TCR clone 111993 (TRAV8-3, TRAJ28)
CAVGAVGSYQLTF

SEQ ID NO: 223986 - protein, 14 aa, Homo sapiens
  CDR3 for beta chain variable domain of TCR clone 111993 (TRBV7-2, TRBJ2-7)
CASKSRGAAYEQYF

SEQ ID NO: 223987 - protein, 15 aa, Homo sapiens
  CDR3 for alpha chain variable domain of TCR clone 111994 (TRAV3, TRAJ5)
CAVRDLDTGRRALTF

SEQ ID NO: 223988 - protein, 12 aa, Homo sapiens
  CDR3 for beta chain variable domain of TCR clone 111994 (TRBV5-1, TRBJ2-7)
CASSLDSYEQYF

SEQ ID NO: 223989 - protein, 19 aa, Homo sapiens
  CDR3 for alpha chain variable domain of TCR clone 111995 (TRAV1-2, TRAJ26)
CLLPLCCERPDNYGQNFVF

SEQ ID NO: 223990 - protein, 14 aa, Homo sapiens
  CDR3 for beta chain variable domain of TCR clone 111995 (TRBV20-1, TRBJ2-5)
CSALVPGYQETQYF

SEQ ID NO: 223991 - protein, 18 aa, Homo sapiens
  CDR3 for alpha chain variable domain of TCR clone 111996 (TRAV21, TRAJ52)
CAVRPSPAGGTSYGKLTF

SEQ ID NO: 223992 - protein, 12 aa, Homo sapiens
  CDR3 for beta chain variable domain of TCR clone 111996 (TRBV20-1, TRBJ2-1)
CSARLGTDEQFF

SEQ ID NO: 223993 - protein, 14 aa, Homo sapiens
  CDR3 for alpha chain variable domain of TCR clone 111997 (TRAV13-2, TRAJ40)
CADLEGSGTYKYIF

SEQ ID NO: 223994 - protein, 16 aa, Homo sapiens
  CDR3 for beta chain variable domain of TCR clone 111997 (TRBV7-9, TRBJ2-7)
CASSYPDREGGYEQYF

SEQ ID NO: 223995 - protein, 13 aa, Homo sapiens
  CDR3 for alpha chain variable domain of TCR clone 111998 (TRAV29/DV5, TRAJ13)
CAAVSGGYQKVTF

SEQ ID NO: 223996 - protein, 17 aa, Homo sapiens
  CDR3 for beta chain variable domain of TCR clone 111998 (TRBV13, TRBJ2-3)
CASSLSRVAGGRNTQYF

SEQ ID NO: 223997 - protein, 14 aa, Homo sapiens
  CDR3 for alpha chain variable domain of TCR clone 111999 (TRAV1-2, TRAJ33)
CAVRAPDSNYQLIW

SEQ ID NO: 223998 - protein, 14 aa, Homo sapiens
  CDR3 for beta chain variable domain of TCR clone 111999 (TRBV11-3, TRBJ1-6)
CASSFAGGDSPLHF

SEQ ID NO: 223999 - protein, 14 aa, Homo sapiens
  CDR3 for alpha chain variable domain of TCR clone 112000 (TRAV17, TRAJ35)
CATDRPGFGNVLHC

SEQ ID NO: 224000 - protein, 15 aa, Homo sapiens
  CDR3 for beta chain variable domain of TCR clone 112000 (TRBV28, TRBJ2-5)
CASSPGRVIQETQYF

SEQ ID NO: 224001 - protein, 15 aa, Homo sapiens
  CDR3 for alpha chain variable domain of TCR clone 112001 (TRAV13-1, TRAJ44)
CAASRGGGTASKLTC

SEQ ID NO: 224002 - protein, 14 aa, Homo sapiens
  CDR3 for beta chain variable domain of TCR clone 112001 (TRBV7-2, TRBJ2-5)
CASSPRGSSETQYF

SEQ ID NO: 224003 - protein, 13 aa, Homo sapiens
  CDR3 for alpha chain variable domain of TCR clone 112002 (TRAV21, TRAJ27)
CAARPGNAGKSTF

SEQ ID NO: 224004 - protein, 16 aa, Homo sapiens
  CDR3 for beta chain variable domain of TCR clone 112002 (TRBV4-3, TRBJ2-2)
CASSHLQGSGTGELFF

SEQ ID NO: 224005 - protein, 14 aa, Homo sapiens
  CDR3 for alpha chain variable domain of TCR clone 112003 (TRAV1-2, TRAJ8)
CAVREDTGFQKLGF

SEQ ID NO: 224006 - protein, 16 aa, Homo sapiens
  CDR3 for beta chain variable domain of TCR clone 112003 (TRBV12-4, TRBJ1-5)
CASSRPVGGSNQPQHF

SEQ ID NO: 224007 - protein, 14 aa, Homo sapiens
  CDR3 for alpha chain variable domain of TCR clone 112004 (TRAV26-1, TRAJ45)
CIEVTGGGADGLTF

SEQ ID NO: 224008 - protein, 16 aa, Homo sapiens
  CDR3 for beta chain variable domain of TCR clone 112004 (TRBV2, TRBJ2-1)
CASSVGGSLSYNEQFF

SEQ ID NO: 224009 - protein, 10 aa, Homo sapiens
  CDR3 for alpha chain variable domain of TCR clone 112005 (TRAV17, TRAJ36)
CATVAGNLFF

SEQ ID NO: 224010 - protein, 12 aa, Homo sapiens
  CDR3 for beta chain variable domain of TCR clone 112005 (TRBV11-2, TRBJ2-4)
CASSAASGSEYF

SEQ ID NO: 224011 - protein, 16 aa, Homo sapiens
  CDR3 for alpha chain variable domain of TCR clone 112006 (TRAV1-2, TRAJ10)
CAVRGVLTGGGNKLTF

SEQ ID NO: 224012 - protein, 15 aa, Homo sapiens
  CDR3 for beta chain variable domain of TCR clone 112006 (TRBV7-9, TRBJ1-6)
CASSSPGRGNSALHF

SEQ ID NO: 224013 - protein, 10 aa, Homo sapiens
  CDR3 for alpha chain variable domain of TCR clone 112007 (TRAV12-3, TRAJ49)
CAMNDHQFYF

SEQ ID NO: 224014 - protein, 13 aa, Homo sapiens
  CDR3 for beta chain variable domain of TCR clone 112007 (TRBV12-4, TRBJ1-1)
CASSPGTGFEAFF

SEQ ID NO: 224015 - protein, 11 aa, Homo sapiens
  CDR3 for alpha chain variable domain of TCR clone 112008 (TRAV12-2, TRAJ31)
CAILNNARLMF

SEQ ID NO: 224016 - protein, 13 aa, Homo sapiens
  CDR3 for beta chain variable domain of TCR clone 112008 (TRBV20-1, TRBJ1-1)
CSARLGQGTEASF

SEQ ID NO: 224017 - protein, 14 aa, Homo sapiens
  CDR3 for alpha chain variable domain of TCR clone 112009 (TRAV2, TRAJ9)
CAVEDRSGGFKTIF

SEQ ID NO: 224018 - protein, 15 aa, Homo sapiens
  CDR3 for beta chain variable domain of TCR clone 112009 (TRBV20-1, TRBJ2-7)
CSARVPAAYFYEQYF

SEQ ID NO: 224019 - protein, 13 aa, Homo sapiens
  CDR3 for alpha chain variable domain of TCR clone 112010 (TRAV8-3, TRAJ44)
CAVVPGTASKLTF

SEQ ID NO: 224020 - protein, 14 aa, Homo sapiens
  CDR3 for beta chain variable domain of TCR clone 112010 (TRBV11-2, TRBJ2-3)
CDSRRLARTDTQYF

SEQ ID NO: 224021 - protein, 14 aa, Homo sapiens
  CDR3 for alpha chain variable domain of TCR clone 112011 (TRAV26-1, TRAJ38)
CIADNAGNNRKLLW

SEQ ID NO: 224022 - protein, 13 aa, Homo sapiens
  CDR3 for beta chain variable domain of TCR clone 112011 (TRBV2, TRBJ1-5)
CATAGPGNQPQHF

SEQ ID NO: 224023 - protein, 13 aa, Homo sapiens
  CDR3 for alpha chain variable domain of TCR clone 112012 (TRAV12-1, TRAJ26)
SATYLYYGQNFVF

SEQ ID NO: 224024 - protein, 15 aa, Homo sapiens
  CDR3 for beta chain variable domain of TCR clone 112012 (TRBV5-1, TRBJ2-6)
CASSLDPSGANDLTF

SEQ ID NO: 224025 - protein, 16 aa, Homo sapiens
  CDR3 for alpha chain variable domain of TCR clone 112013 (TRAV4, TRAJ28)
CTTAFLSGAGSYQLTF

SEQ ID NO: 224026 - protein, 14 aa, Homo sapiens
  CDR3 for beta chain variable domain of TCR clone 112013 (TRBV7-9, TRBJ2-5)
CASSLDTAQETQYF

SEQ ID NO: 224027 - protein, 12 aa, Homo sapiens
  CDR3 for alpha chain variable domain of TCR clone 112014 (TRAV17, TRAJ4)
CAMDGGYNKLIF

SEQ ID NO: 224028 - protein, 13 aa, Homo sapiens
  CDR3 for beta chain variable domain of TCR clone 112014 (TRBV29-1, TRBJ2-2)
CSTTGVNTGELFF

SEQ ID NO: 224029 - protein, 14 aa, Homo sapiens
  CDR3 for alpha chain variable domain of TCR clone 112015 (TRAV13-1, TRAJ13)
CAASRVGGYQKVTF

SEQ ID NO: 224030 - protein, 17 aa, Homo sapiens
  CDR3 for beta chain variable domain of TCR clone 112015 (TRBV15, TRBJ1-5)
CATSRAPPGTRNHPQHF

SEQ ID NO: 224031 - protein, 16 aa, Homo sapiens
  CDR3 for alpha chain variable domain of TCR clone 112016 (TRAV21, TRAJ37)
CAVRKAGSSNTGKLIF

SEQ ID NO: 224032 - protein, 13 aa, Homo sapiens
  CDR3 for beta chain variable domain of TCR clone 112016 (TRBV7-9, TRBJ2-5)
CASLPSGRETQYF

SEQ ID NO: 224033 - protein, 15 aa, Homo sapiens
  CDR3 for alpha chain variable domain of TCR clone 112017 (TRAV3, TRAJ4)
CAVRDGTGGYNKLIF

SEQ ID NO: 224034 - protein, 16 aa, Homo sapiens
  CDR3 for beta chain variable domain of TCR clone 112017 (TRBV2, TRBJ2-1)
CASSVGGSLSYNEQFF

SEQ ID NO: 224035 - protein, 12 aa, Homo sapiens
  CDR3 for alpha chain variable domain of TCR clone 112018 (TRAV26-1, TRAJ26)
CIVYNYGQNFVF

SEQ ID NO: 224036 - protein, 14 aa, Homo sapiens
  CDR3 for beta chain variable domain of TCR clone 112018 (TRBV7-2, TRBJ1-1)
CASSFLTGTTEAFF

SEQ ID NO: 224037 - protein, 14 aa, Homo sapiens
  CDR3 for alpha chain variable domain of TCR clone 112019 (TRAV10, TRAJ32)
CGEPRGGATNKRIF

SEQ ID NO: 224038 - protein, 14 aa, Homo sapiens
  CDR3 for beta chain variable domain of TCR clone 112019 (TRBV5-4, TRBJ2-2)
CASRLDGGTGELFF

SEQ ID NO: 224039 - protein, 16 aa, Homo sapiens
  CDR3 for alpha chain variable domain of TCR clone 112020 (TRAV17, TRAJ53)
CATDALSGGSNYKLTF

SEQ ID NO: 224040 - protein, 12 aa, Homo sapiens
  CDR3 for beta chain variable domain of TCR clone 112020 (TRBV11-2, TRBJ2-2)
CASSLPTGELFF

SEQ ID NO: 224041 - protein, 12 aa, Homo sapiens
  CDR3 for alpha chain variable domain of TCR clone 112021 (TRAV27, TRAJ35)
CAGADFGNVLHC

SEQ ID NO: 224042 - protein, 14 aa, Homo sapiens
  CDR3 for beta chain variable domain of TCR clone 112021 (TRBV20-1, TRBJ2-5)
CSARDGRAGETQYF

SEQ ID NO: 224043 - protein, 15 aa, Homo sapiens
  CDR3 for alpha chain variable domain of TCR clone 112022 (TRAV13-1, TRAJ44)
CAASRGGGTASKLTF

SEQ ID NO: 224044 - protein, 13 aa, Homo sapiens
  CDR3 for beta chain variable domain of TCR clone 112022 (TRBV19, TRBJ2-7)
CASSIRSSYEQYF

SEQ ID NO: 224045 - protein, 16 aa, Homo sapiens
  CDR3 for alpha chain variable domain of TCR clone 112023 (TRAV8-3, TRAJ10)
CAVGPILTGGGNKRTF

SEQ ID NO: 224046 - protein, 16 aa, Homo sapiens
  CDR3 for beta chain variable domain of TCR clone 112023 (TRBV7-2, TRBJ2-5)
CASSSKWLSGQETQYF

SEQ ID NO: 224047 - protein, 12 aa, Homo sapiens
  CDR3 for alpha chain variable domain of TCR clone 112024 (TRAV17, TRAJ57)
CATDGGSEKLVF

SEQ ID NO: 224048 - protein, 15 aa, Homo sapiens
  CDR3 for beta chain variable domain of TCR clone 112024 (TRBV5-1, TRBJ2-5)
CASSFKGGDQETQYF

SEQ ID NO: 224049 - protein, 13 aa, Homo sapiens
  CDR3 for alpha chain variable domain of TCR clone 112025 (TRAV8-3, TRAJ28)
CAVGAVGSYQLTF

SEQ ID NO: 224050 - protein, 14 aa, Homo sapiens
  CDR3 for beta chain variable domain of TCR clone 112025 (TRBV7-2, TRBJ2-7)
CASRSQGAAHEQYF

SEQ ID NO: 224051 - protein, 19 aa, Homo sapiens
  CDR3 for alpha chain variable domain of TCR clone 112026 (TRAV4, )
CLVGPHNYDIQNPDPAVYQ

SEQ ID NO: 224052 - protein, 17 aa, Homo sapiens
  CDR3 for beta chain variable domain of TCR clone 112026 (TRBV24-1, TRBJ2-1)
CATSDVSTSGTYNEQFF

SEQ ID NO: 224053 - protein, 14 aa, Homo sapiens
  CDR3 for alpha chain variable domain of TCR clone 112027 (TRAV16, TRAJ33)
FALSAMDSNYQLIW

SEQ ID NO: 224054 - protein, 15 aa, Homo sapiens
  CDR3 for beta chain variable domain of TCR clone 112027 (TRBV9, TRBJ1-6)
CASSVAGTGDSPLHF

SEQ ID NO: 224055 - protein, 15 aa, Homo sapiens
  CDR3 for alpha chain variable domain of TCR clone 112028 (TRAV27, TRAJ38)
CAARRNAGNNHKLIW

SEQ ID NO: 224056 - protein, 13 aa, Homo sapiens
  CDR3 for beta chain variable domain of TCR clone 112028 (TRBV28, TRBJ2-5)
CAGVSRGEETQYF

SEQ ID NO: 224057 - protein, 14 aa, Homo sapiens
  CDR3 for alpha chain variable domain of TCR clone 112029 (TRAV12-3, TRAJ10)
SHLPLTGGGNKLTF

SEQ ID NO: 224058 - protein, 15 aa, Homo sapiens
  CDR3 for beta chain variable domain of TCR clone 112029 (TRBV12-4, TRBJ2-1)
CASSLLATGNNEQFF

SEQ ID NO: 224059 - protein, 12 aa, Homo sapiens
  CDR3 for alpha chain variable domain of TCR clone 112030 (TRAV21, TRAJ30)
CAVMNRDDKIIF

SEQ ID NO: 224060 - protein, 11 aa, Homo sapiens
  CDR3 for beta chain variable domain of TCR clone 112030 (TRBV19, TRBJ1-1)
CASSIGSEAFF

SEQ ID NO: 224061 - protein, 12 aa, Homo sapiens
  CDR3 for alpha chain variable domain of TCR clone 112031 (TRAV8-1, TRAJ6)
CASSGGSYIPTF

SEQ ID NO: 224062 - protein, 16 aa, Homo sapiens
  CDR3 for beta chain variable domain of TCR clone 112031 (TRBV7-3, TRBJ2-2)
CASSLKRGTLSGELFF

SEQ ID NO: 224063 - protein, 13 aa, Homo sapiens
  CDR3 for alpha chain variable domain of TCR clone 112032 (TRAV21, TRAJ57)
CAVTHGGSEELVF

SEQ ID NO: 224064 - protein, 16 aa, Homo sapiens
  CDR3 for beta chain variable domain of TCR clone 112032 (TRBV29-1, TRBJ2-7)
CSVEDAEDGTAYEQYF

SEQ ID NO: 224065 - protein, 15 aa, Homo sapiens
  CDR3 for alpha chain variable domain of TCR clone 112033 (TRAV26-1, TRAJ15)
CIVREANQAGTALIF

SEQ ID NO: 224066 - protein, 15 aa, Homo sapiens
  CDR3 for beta chain variable domain of TCR clone 112033 (TRBV20-1, TRBJ1-1)
CSARSAATSNTEAFF

SEQ ID NO: 224067 - protein, 13 aa, Homo sapiens
  CDR3 for alpha chain variable domain of TCR clone 112034 (TRAV20, TRAJ48)
CAVQGVGNEKLTF

SEQ ID NO: 224068 - protein, 14 aa, Homo sapiens
  CDR3 for beta chain variable domain of TCR clone 112034 (TRBV27, TRBJ2-7)
CASGFRDGPYEQYF

SEQ ID NO: 224069 - protein, 14 aa, Homo sapiens
  CDR3 for alpha chain variable domain of TCR clone 112035 (TRAV13-1, TRAJ35)
CAASKGGFGIVLHC

SEQ ID NO: 224070 - protein, 13 aa, Homo sapiens
  CDR3 for beta chain variable domain of TCR clone 112035 (TRBV7-3, TRBJ1-1)
CASSQDWGAEASF

SEQ ID NO: 224071 - protein, 11 aa, Homo sapiens
  CDR3 for alpha chain variable domain of TCR clone 112036 (TRAV3, TRAJ21)
CAVGNFNKFYF

SEQ ID NO: 224072 - protein, 16 aa, Homo sapiens
  CDR3 for beta chain variable domain of TCR clone 112036 (TRBV19, TRBJ2-1)
CASSKAGPSSYNEPFF

SEQ ID NO: 224073 - protein, 14 aa, Homo sapiens
  CDR3 for alpha chain variable domain of TCR clone 112037 (TRAV13-1, TRAJ52)
SVLPGGTSYGKLTF

SEQ ID NO: 224074 - protein, 16 aa, Homo sapiens
  CDR3 for beta chain variable domain of TCR clone 112037 (TRBV28, TRBJ2-7)
CASSPWVATGDLSQYF

SEQ ID NO: 224075 - protein, 14 aa, Homo sapiens
  CDR3 for alpha chain variable domain of TCR clone 112038 (TRAV4, TRAJ17)
CLVGDPLVGNKLTF

SEQ ID NO: 224076 - protein, 20 aa, Homo sapiens
  CDR3 for beta chain variable domain of TCR clone 112038 (TRBV20-1, TRBJ2-1)
CSASPYSVAGGPSYYNEQFF

SEQ ID NO: 224077 - protein, 13 aa, Homo sapiens
  CDR3 for alpha chain variable domain of TCR clone 112039 (TRAV3, TRAJ29)
CAVRDIIDTPLVF

SEQ ID NO: 224078 - protein, 11 aa, Homo sapiens
  CDR3 for beta chain variable domain of TCR clone 112039 (TRBV28, TRBJ2-3)
CASSSDPPQYF

SEQ ID NO: 224079 - protein, 15 aa, Homo sapiens
  CDR3 for alpha chain variable domain of TCR clone 112040 (TRAV13-1, TRAJ11)
CAASNRNSGCSTLTF

SEQ ID NO: 224080 - protein, 11 aa, Homo sapiens
  CDR3 for beta chain variable domain of TCR clone 112040 (TRBV20-1, TRBJ2-7)
CSARLSYEQYF

SEQ ID NO: 224081 - protein, 16 aa, Homo sapiens
  CDR3 for alpha chain variable domain of TCR clone 112041 (TRAV30, TRAJ24)
CGTEIVDADSWGKFQF

SEQ ID NO: 224082 - protein, 15 aa, Homo sapiens
  CDR3 for beta chain variable domain of TCR clone 112041 (TRBV20-1, TRBJ1-5)
CSAFKNGQRNQPQHF

SEQ ID NO: 224083 - protein, 15 aa, Homo sapiens
  CDR3 for alpha chain variable domain of TCR clone 112042 (TRAV38-1, TRAJ30)
CAFMMSYGGDDKIIF

SEQ ID NO: 224084 - protein, 16 aa, Homo sapiens
  CDR3 for beta chain variable domain of TCR clone 112042 (TRBV7-9, TRBJ2-7)
CASSCGLAGPSYEQYF

SEQ ID NO: 224085 - protein, 18 aa, Homo sapiens
  CDR3 for alpha chain variable domain of TCR clone 112043 (TRAV13-1, TRAJ52)
CAASKRSAGGTSYGKLTL

SEQ ID NO: 224086 - protein, 13 aa, Homo sapiens
  CDR3 for beta chain variable domain of TCR clone 112043 (TRBV12-4, TRBJ1-2)
CASSLRQGKGYSF

SEQ ID NO: 224087 - protein, 14 aa, Homo sapiens
  CDR3 for alpha chain variable domain of TCR clone 112044 (TRAV38-1, TRAJ54)
CAFMSPSGALKLVF

SEQ ID NO: 224088 - protein, 16 aa, Homo sapiens
  CDR3 for beta chain variable domain of TCR clone 112044 (TRBV28, TRBJ2-1)
CASSLGGSGSYNEQFF

SEQ ID NO: 224089 - protein, 16 aa, Homo sapiens
  CDR3 for alpha chain variable domain of TCR clone 112045 (TRAV26-1, TRAJ53)
CIVRDAMGGSNYKLTF

SEQ ID NO: 224090 - protein, 12 aa, Homo sapiens
  CDR3 for beta chain variable domain of TCR clone 112045 (TRBV7-9, TRBJ1-5)
CASSPQGQPQHF

SEQ ID NO: 224091 - protein, 16 aa, Homo sapiens
  CDR3 for alpha chain variable domain of TCR clone 112046 (TRAV21, TRAJ52)
CAVTNAGGTSYGKLTF

SEQ ID NO: 224092 - protein, 15 aa, Homo sapiens
  CDR3 for beta chain variable domain of TCR clone 112046 (TRBV28, TRBJ1-3)
CASGMGWASGNTIYF

SEQ ID NO: 224093 - protein, 13 aa, Homo sapiens
  CDR3 for alpha chain variable domain of TCR clone 112047 (TRAV9-2, TRAJ10)
CALATGGGNKLTF

SEQ ID NO: 224094 - protein, 16 aa, Homo sapiens
  CDR3 for beta chain variable domain of TCR clone 112047 (TRBV7-3, TRBJ2-1)
CASSLEGYRSYNEQFF

SEQ ID NO: 224095 - protein, 14 aa, Homo sapiens
  CDR3 for alpha chain variable domain of TCR clone 112048 (TRAV21, TRAJ45)
CAVSSGGGADGLTF

SEQ ID NO: 224096 - protein, 11 aa, Homo sapiens
  CDR3 for beta chain variable domain of TCR clone 112048 (TRBV11-2, TRBJ2-2)
CASSLPGELFF

SEQ ID NO: 224097 - protein, 13 aa, Homo sapiens
  CDR3 for alpha chain variable domain of TCR clone 112049 (TRAV2, TRAJ40)
CAVVTSGTYKYIF

SEQ ID NO: 224098 - protein, 12 aa, Homo sapiens
  CDR3 for beta chain variable domain of TCR clone 112049 (TRBV11-2, TRBJ2-5)
CASSLGQETQYF

SEQ ID NO: 224099 - protein, 16 aa, Homo sapiens
  CDR3 for alpha chain variable domain of TCR clone 112050 (TRAV16, TRAJ52)
CAISAAGGTSYGKLTF

SEQ ID NO: 224100 - protein, 12 aa, Homo sapiens
  CDR3 for beta chain variable domain of TCR clone 112050 (TRBV12-4, TRBJ1-3)
CASSFSGNTIYF

SEQ ID NO: 224101 - protein, 11 aa, Homo sapiens
  CDR3 for alpha chain variable domain of TCR clone 112051 (TRAV8-6, TRAJ20)
CAVSYYYKLSF

SEQ ID NO: 224102 - protein, 14 aa, Homo sapiens
  CDR3 for beta chain variable domain of TCR clone 112051 (TRBV10-2, TRBJ2-2)
CASSERSNTGELFF

SEQ ID NO: 224103 - protein, 15 aa, Homo sapiens
  CDR3 for alpha chain variable domain of TCR clone 112052 (TRAV17, TRAJ57)
CATGPSQGGSEKLVF

SEQ ID NO: 224104 - protein, 15 aa, Homo sapiens
  CDR3 for beta chain variable domain of TCR clone 112052 (TRBV5-7, TRBJ2-7)
CASSLGPGRGHEQYF

SEQ ID NO: 224105 - protein, 23 aa, Homo sapiens
  CDR3 for alpha chain variable domain of TCR clone 112053 (TRAV26-1, TRAJ38)
CIADNAGNNHIQNPDPAVYQLRD

SEQ ID NO: 224106 - protein, 17 aa, Homo sapiens
  CDR3 for beta chain variable domain of TCR clone 112053 (TRBV11-2, TRBJ2-6)
CVSSQRDIFSGANVLTF

SEQ ID NO: 224107 - protein, 14 aa, Homo sapiens
  CDR3 for alpha chain variable domain of TCR clone 112054 (TRAV12-3, TRAJ12)
CAMSRMDSSYKLIF

SEQ ID NO: 224108 - protein, 14 aa, Homo sapiens
  CDR3 for beta chain variable domain of TCR clone 112054 (TRBV20-1, TRBJ1-4)
CSARSGQSNEKLFS

SEQ ID NO: 224109 - protein, 16 aa, Homo sapiens
  CDR3 for alpha chain variable domain of TCR clone 112055 (TRAV3, TRAJ21)
CAVRDIERGNFIKFYF

SEQ ID NO: 224110 - protein, 13 aa, Homo sapiens
  CDR3 for beta chain variable domain of TCR clone 112055 (TRBV27, TRBJ2-7)
CASSLTTGYEQYF

SEQ ID NO: 224111 - protein, 14 aa, Homo sapiens
  CDR3 for alpha chain variable domain of TCR clone 112056 (TRAV1-2, TRAJ16)
CAVNRFSDGEKLLF

SEQ ID NO: 224112 - protein, 16 aa, Homo sapiens
  CDR3 for beta chain variable domain of TCR clone 112056 (TRBV12-4, TRBJ1-5)
CASSRPVGGSNQPQHF

SEQ ID NO: 224113 - protein, 17 aa, Homo sapiens
  CDR3 for alpha chain variable domain of TCR clone 112057 (TRAV8-6, TRAJ58)
CAVSSWVGETSGSRLTF

SEQ ID NO: 224114 - protein, 12 aa, Homo sapiens
  CDR3 for beta chain variable domain of TCR clone 112057 (TRBV19, TRBJ1-5)
CASSIAQQPQHF

SEQ ID NO: 224115 - protein, 16 aa, Homo sapiens
  CDR3 for alpha chain variable domain of TCR clone 112058 (TRAV14/DV4, TRAJ54)
CAMREGRIQGAQKLVF

SEQ ID NO: 224116 - protein, 12 aa, Homo sapiens
  CDR3 for beta chain variable domain of TCR clone 112058 (TRBV3-1, TRBJ2-7)
CASSQDRDEQYF

SEQ ID NO: 224117 - protein, 12 aa, Homo sapiens
  CDR3 for alpha chain variable domain of TCR clone 112059 (TRAV3, TRAJ43)
CAVRDPNNDMRF

SEQ ID NO: 224118 - protein, 17 aa, Homo sapiens
  CDR3 for beta chain variable domain of TCR clone 112059 (TRBV7-8, TRBJ2-6)
RASSAGTGGAGANVLTF

SEQ ID NO: 224119 - protein, 12 aa, Homo sapiens
  CDR3 for alpha chain variable domain of TCR clone 112060 (TRAV12-3, TRAJ17)
CTMTLTGNKLTF

SEQ ID NO: 224120 - protein, 15 aa, Homo sapiens
  CDR3 for beta chain variable domain of TCR clone 112060 (TRBV20-1, TRBJ2-7)
CSARDRASGMDEQYF

SEQ ID NO: 224121 - protein, 12 aa, Homo sapiens
  CDR3 for alpha chain variable domain of TCR clone 112061 (TRAV8-3, TRAJ20)
CAVGANDYKLSF

SEQ ID NO: 224122 - protein, 16 aa, Homo sapiens
  CDR3 for beta chain variable domain of TCR clone 112061 (TRBV19, TRBJ2-2)
CASRSPATGATGELFF

SEQ ID NO: 224123 - protein, 12 aa, Homo sapiens
  CDR3 for alpha chain variable domain of TCR clone 112062 (TRAV26-1, TRAJ40)
CSTTSGTYKYIF

SEQ ID NO: 224124 - protein, 12 aa, Homo sapiens
  CDR3 for beta chain variable domain of TCR clone 112062 (TRBV13, TRBJ2-7)
CASSLWGREQYF

SEQ ID NO: 224125 - protein, 18 aa, Homo sapiens
  CDR3 for alpha chain variable domain of TCR clone 112063 (TRAV12-3, TRAJ52)
CAMSVGGAGGTSYGKLTF

SEQ ID NO: 224126 - protein, 17 aa, Homo sapiens
  CDR3 for beta chain variable domain of TCR clone 112063 (TRBV13, TRBJ2-3)
CASSLSRAAGGRNTQYF

SEQ ID NO: 224127 - protein, 16 aa, Homo sapiens
  CDR3 for alpha chain variable domain of TCR clone 112064 (TRAV8-3, TRAJ10)
CAVGPILTGGGNKLTF

SEQ ID NO: 224128 - protein, 13 aa, Homo sapiens
  CDR3 for beta chain variable domain of TCR clone 112064 (TRBV7-3, TRBJ1-1)
CASSQDWGAEAFF

SEQ ID NO: 224129 - protein, 15 aa, Homo sapiens
  CDR3 for alpha chain variable domain of TCR clone 112065 (TRAV13-1, TRAJ44)
CAASRGGGTASKRTF

SEQ ID NO: 224130 - protein, 14 aa, Homo sapiens
  CDR3 for beta chain variable domain of TCR clone 112065 (TRBV7-2, TRBJ2-5)
CASSPRGSSETQYF

SEQ ID NO: 224131 - protein, 11 aa, Homo sapiens
  CDR3 for alpha chain variable domain of TCR clone 112066 (TRAV13-1, TRAJ24)
CAASDWGKLQF

SEQ ID NO: 224132 - protein, 15 aa, Homo sapiens
  CDR3 for beta chain variable domain of TCR clone 112066 (TRBV11-2, TRBJ2-2)
CASSLDTGNTGELFF

SEQ ID NO: 224133 - protein, 17 aa, Homo sapiens
  CDR3 for alpha chain variable domain of TCR clone 112067 (TRAV27, TRAJ18)
CAGLHRGRGPTLGRLYF

SEQ ID NO: 224134 - protein, 14 aa, Homo sapiens
  CDR3 for beta chain variable domain of TCR clone 112067 (TRBV20-1, TRBJ1-5)
CSARGRGSNQPQHF

SEQ ID NO: 224135 - protein, 14 aa, Homo sapiens
  CDR3 for alpha chain variable domain of TCR clone 112068 (TRAV12-3, TRAJ10)
SHLPLTGGGNKLTF

SEQ ID NO: 224136 - protein, 13 aa, Homo sapiens
  CDR3 for beta chain variable domain of TCR clone 112068 (TRBV3-1, TRBJ1-1)
CASSPGVITEAFF

SEQ ID NO: 224137 - protein, 16 aa, Homo sapiens
  CDR3 for alpha chain variable domain of TCR clone 112069 (TRAV21, TRAJ52)
CAVTNAGGTSYGKLTF

SEQ ID NO: 224138 - protein, 17 aa, Homo sapiens
  CDR3 for beta chain variable domain of TCR clone 112069 (TRBV28, TRBJ2-5)
CASGRQGGLAGAETQYF

SEQ ID NO: 224139 - protein, 14 aa, Homo sapiens
  CDR3 for alpha chain variable domain of TCR clone 112070 (TRAV8-4, TRAJ38)
CARLNAGSNRKLIW

SEQ ID NO: 224140 - protein, 12 aa, Homo sapiens
  CDR3 for beta chain variable domain of TCR clone 112070 (TRBV6-1, TRBJ2-7)
CASSEPLYEQYF

SEQ ID NO: 224141 - protein, 13 aa, Homo sapiens
  CDR3 for alpha chain variable domain of TCR clone 112071 (TRAV3, TRAJ36)
CAVRDTGANNLFF

SEQ ID NO: 224142 - protein, 15 aa, Homo sapiens
  CDR3 for beta chain variable domain of TCR clone 112071 (TRBV11-2, TRBJ2-1)
CASSLGTSGLNEQFF

SEQ ID NO: 224143 - protein, 14 aa, Homo sapiens
  CDR3 for alpha chain variable domain of TCR clone 112072 (TRAV8-3, TRAJ4)
CAVGAAGGYNKLIF

SEQ ID NO: 224144 - protein, 15 aa, Homo sapiens
  CDR3 for beta chain variable domain of TCR clone 112072 (TRBV7-9, TRBJ1-4)
CASSRTGGFNEKLFF

SEQ ID NO: 224145 - protein, 14 aa, Homo sapiens
  CDR3 for alpha chain variable domain of TCR clone 112073 (TRAV2, TRAJ9)
CAVEDRRGGFKTIF

SEQ ID NO: 224146 - protein, 15 aa, Homo sapiens
  CDR3 for beta chain variable domain of TCR clone 112073 (TRBV5-7, TRBJ1-5)
CASSYGKLWDQPQHF

SEQ ID NO: 224147 - protein, 23 aa, Homo sapiens
  CDR3 for alpha chain variable domain of TCR clone 112074 (TRAV1-1, TRAJ11)
LLQELQMKDSASYFCAGYSTLTF

SEQ ID NO: 224148 - protein, 15 aa, Homo sapiens
  CDR3 for beta chain variable domain of TCR clone 112074 (TRBV6-5, TRBJ2-1)
CASRGGFDSYNEQFF

SEQ ID NO: 224149 - protein, 16 aa, Homo sapiens
  CDR3 for alpha chain variable domain of TCR clone 112075 (TRAV1-1, TRAJ31)
CLLLLRCEANNARLMF

SEQ ID NO: 224150 - protein, 15 aa, Homo sapiens
  CDR3 for beta chain variable domain of TCR clone 112075 (TRBV7-3, TRBJ2-1)
CASSPTGGGEVEQFF

SEQ ID NO: 224151 - protein, 14 aa, Homo sapiens
  CDR3 for alpha chain variable domain of TCR clone 112076 (TRAV8-4, TRAJ45)
CASGGGGGADGLTF

SEQ ID NO: 224152 - protein, 20 aa, Homo sapiens
  CDR3 for beta chain variable domain of TCR clone 112076 (TRBV4-3, TRBJ2-3)
CASSPRVERRASGRPDTQYF

SEQ ID NO: 224153 - protein, 16 aa, Homo sapiens
  CDR3 for alpha chain variable domain of TCR clone 112077 (TRAV30, TRAJ24)
CGTAIADADSWGKFQF

SEQ ID NO: 224154 - protein, 14 aa, Homo sapiens
  CDR3 for beta chain variable domain of TCR clone 112077 (TRBV12-5, TRBJ2-5)
CASGSRTHQETQYF

SEQ ID NO: 224155 - protein, 17 aa, Homo sapiens
  CDR3 for alpha chain variable domain of TCR clone 112078 (TRAV3, TRAJ6)
CAVRDGPRAGGRYIPTF

SEQ ID NO: 224156 - protein, 16 aa, Homo sapiens
  CDR3 for beta chain variable domain of TCR clone 112078 (TRBV5-1, TRBJ1-3)
CASSPWAPSSGNTIYF

SEQ ID NO: 224157 - protein, 13 aa, Homo sapiens
  CDR3 for alpha chain variable domain of TCR clone 112079 (TRAV17, TRAJ11)
CATRNSGYSTLTF

SEQ ID NO: 224158 - protein, 12 aa, Homo sapiens
  CDR3 for beta chain variable domain of TCR clone 112079 (TRBV19, TRBJ1-1)
CASMNRYTEAFF

SEQ ID NO: 224159 - protein, 17 aa, Homo sapiens
  CDR3 for alpha chain variable domain of TCR clone 112080 (TRAV4, TRAJ31)
CTTASWVKGYNNARLMF

SEQ ID NO: 224160 - protein, 19 aa, Homo sapiens
  CDR3 for beta chain variable domain of TCR clone 112080 (TRBV12-4, TRBJ2-1)
CASTLAFDPRDKEANEQFF

SEQ ID NO: 224161 - protein, 14 aa, Homo sapiens
  CDR3 for alpha chain variable domain of TCR clone 112081 (TRAV17, TRAJ16)
CATADFSDGQKLLL

SEQ ID NO: 224162 - protein, 15 aa, Homo sapiens
  CDR3 for beta chain variable domain of TCR clone 112081 (TRBV6-5, TRBJ2-1)
CASSYDAGAGNEQFF

SEQ ID NO: 224163 - protein, 17 aa, Homo sapiens
  CDR3 for alpha chain variable domain of TCR clone 112082 (TRAV17, TRAJ28)
CATDPRRGEAGSYQLTF

SEQ ID NO: 224164 - protein, 16 aa, Homo sapiens
  CDR3 for beta chain variable domain of TCR clone 112082 (TRBV25-1, TRBJ1-1)
CASSGDRDRGRIEAFF

SEQ ID NO: 224165 - protein, 12 aa, Homo sapiens
  CDR3 for alpha chain variable domain of TCR clone 112083 (TRAV13-1, TRAJ21)
CAAKEGFNKFSF

SEQ ID NO: 224166 - protein, 17 aa, Homo sapiens
  CDR3 for beta chain variable domain of TCR clone 112083 (TRBV19, TRBJ2-7)
CASSISFYDSYPYEQYF

SEQ ID NO: 224167 - protein, 16 aa, Homo sapiens
  CDR3 for alpha chain variable domain of TCR clone 112084 (TRAV3, TRAJ21)
CAVRDIERGNFTKFYF

SEQ ID NO: 224168 - protein, 16 aa, Homo sapiens
  CDR3 for beta chain variable domain of TCR clone 112084 (TRBV12-4, TRBJ1-5)
CASSRPVGGSNQPQHF

SEQ ID NO: 224169 - protein, 16 aa, Homo sapiens
  CDR3 for alpha chain variable domain of TCR clone 112085 (TRAV3, TRAJ27)
CAVRDPHGTNAGKSTF

SEQ ID NO: 224170 - protein, 17 aa, Homo sapiens
  CDR3 for beta chain variable domain of TCR clone 112085 (TRBV4-1, TRBJ2-7)
CASSQGRGLQTSYEQYF

SEQ ID NO: 224171 - protein, 14 aa, Homo sapiens
  CDR3 for alpha chain variable domain of TCR clone 112086 (TRAV8-6, TRAJ12)
CAVKAADSSYKLIF

SEQ ID NO: 224172 - protein, 15 aa, Homo sapiens
  CDR3 for beta chain variable domain of TCR clone 112086 (TRBV5-1, TRBJ2-1)
CASSPPRAPYNEQFF

SEQ ID NO: 224173 - protein, 16 aa, Homo sapiens
  CDR3 for alpha chain variable domain of TCR clone 112087 (TRAV4, TRAJ5)
CLVGPDHGHGQESTYF

SEQ ID NO: 224174 - protein, 14 aa, Homo sapiens
  CDR3 for beta chain variable domain of TCR clone 112087 (TRBV7-2, TRBJ2-7)
CASSPKTSFYEQYF

SEQ ID NO: 224175 - protein, 15 aa, Homo sapiens
  CDR3 for alpha chain variable domain of TCR clone 112088 (TRAV38-2/DV8, TRAJ48)
CADRSGGFGNEKLNF

SEQ ID NO: 224176 - protein, 16 aa, Homo sapiens
  CDR3 for beta chain variable domain of TCR clone 112088 (TRBV28, TRBJ2-7)
CASSPWVATGDLSQYF

SEQ ID NO: 224177 - protein, 13 aa, Homo sapiens
  CDR3 for alpha chain variable domain of TCR clone 112089 (TRAV2, TRAJ40)
CAVVTSGTYKYIF

SEQ ID NO: 224178 - protein, 14 aa, Homo sapiens
  CDR3 for beta chain variable domain of TCR clone 112089 (TRBV19, TRBJ2-1)
RASPTFVLSGGQFF

SEQ ID NO: 224179 - protein, 15 aa, Homo sapiens
  CDR3 for alpha chain variable domain of TCR clone 112090 (TRAV20, TRAJ50)
CAVRQMKTSYDKVIF

SEQ ID NO: 224180 - protein, 16 aa, Homo sapiens
  CDR3 for beta chain variable domain of TCR clone 112090 (TRBV15, TRBJ1-2)
CATSRGPRTGGGGYAF

SEQ ID NO: 224181 - protein, 13 aa, Homo sapiens
  CDR3 for alpha chain variable domain of TCR clone 112091 (TRAV2, TRAJ40)
CAVVTSGTYKYIF

SEQ ID NO: 224182 - protein, 16 aa, Homo sapiens
  CDR3 for beta chain variable domain of TCR clone 112091 (TRBV29-1, TRBJ2-7)
CSVEVVGTSGSYEQYF

SEQ ID NO: 224183 - protein, 18 aa, Homo sapiens
  CDR3 for alpha chain variable domain of TCR clone 112092 (TRAV1-2, TRAJ18)
CAVRDMGDRGSTLGRLYF

SEQ ID NO: 224184 - protein, 13 aa, Homo sapiens
  CDR3 for beta chain variable domain of TCR clone 112092 (TRBV12-5, TRBJ2-3)
CASGDRQSDTQYF

SEQ ID NO: 224185 - protein, 12 aa, Homo sapiens
  CDR3 for alpha chain variable domain of TCR clone 112093 (TRAV13-1, TRAJ26)
STSFSKGQNFVF

SEQ ID NO: 224186 - protein, 15 aa, Homo sapiens
  CDR3 for beta chain variable domain of TCR clone 112093 (TRBV11-3, TRBJ1-1)
CASSLGGPGDTEAFF

SEQ ID NO: 224187 - protein, 13 aa, Homo sapiens
  CDR3 for alpha chain variable domain of TCR clone 112094 (TRAV21, TRAJ56)
CAVRTGANSKLTF

SEQ ID NO: 224188 - protein, 15 aa, Homo sapiens
  CDR3 for beta chain variable domain of TCR clone 112094 (TRBV7-9, TRBJ1-1)
CASSHRGTVNAEAFF

SEQ ID NO: 224189 - protein, 14 aa, Homo sapiens
  CDR3 for alpha chain variable domain of TCR clone 112095 (TRAV8-3, TRAJ9)
CAVVYNTGGFNTIF

SEQ ID NO: 224190 - protein, 16 aa, Homo sapiens
  CDR3 for beta chain variable domain of TCR clone 112095 (TRBV7-3, TRBJ2-2)
CASSLKRGTLSGELFF

SEQ ID NO: 224191 - protein, 11 aa, Homo sapiens
  CDR3 for alpha chain variable domain of TCR clone 112096 (TRAV23/DV6, TRAJ11)
FAVGGYSTLTF

SEQ ID NO: 224192 - protein, 15 aa, Homo sapiens
  CDR3 for beta chain variable domain of TCR clone 112096 (TRBV7-8, TRBJ2-5)
CASSFQSSGEETQYF

SEQ ID NO: 224193 - protein, 14 aa, Homo sapiens
  CDR3 for alpha chain variable domain of TCR clone 112097 (TRAV13-2, TRAJ32)
CAENHGGATNKLIF

SEQ ID NO: 224194 - protein, 16 aa, Homo sapiens
  CDR3 for beta chain variable domain of TCR clone 112097 (TRBV15, TRBJ2-7)
CATSRGRAGGTYEQYF

SEQ ID NO: 224195 - protein, 14 aa, Homo sapiens
  CDR3 for alpha chain variable domain of TCR clone 112098 (TRAV17, TRAJ34)
CATVPTYNTDKLIF

SEQ ID NO: 224196 - protein, 14 aa, Homo sapiens
  CDR3 for beta chain variable domain of TCR clone 112098 (TRBV6-1, TRBJ1-3)
CASVQGGGGNTIYF

SEQ ID NO: 224197 - protein, 14 aa, Homo sapiens
  CDR3 for alpha chain variable domain of TCR clone 112099 (TRAV1-2, TRAJ16)
CAVNRFSDGQKLPF

SEQ ID NO: 224198 - protein, 14 aa, Homo sapiens
  CDR3 for beta chain variable domain of TCR clone 112099 (TRBV28, TRBJ1-5)
CASIPYGLEQPQHF

SEQ ID NO: 224199 - protein, 15 aa, Homo sapiens
  CDR3 for alpha chain variable domain of TCR clone 112100 (TRAV3, TRAJ4)
CAVRDGTGGYNKLIF

SEQ ID NO: 224200 - protein, 16 aa, Homo sapiens
  CDR3 for beta chain variable domain of TCR clone 112100 (TRBV27, TRBJ2-2)
CASSSSGVSNTGELFV

SEQ ID NO: 224201 - protein, 17 aa, Homo sapiens
  CDR3 for alpha chain variable domain of TCR clone 112101 (TRAV12-2, TRAJ42)
CAVNILNYGGSQGNLLF

SEQ ID NO: 224202 - protein, 16 aa, Homo sapiens
  CDR3 for beta chain variable domain of TCR clone 112101 (TRBV7-2, TRBJ2-7)
CASSNRQGATSSTSGR

SEQ ID NO: 224203 - protein, 20 aa, Homo sapiens
  CDR3 for alpha chain variable domain of TCR clone 112102 (TRAV12-3, TRAJ41)
SLFIRDSQPSDSATPEALNF

SEQ ID NO: 224204 - protein, 11 aa, Homo sapiens
  CDR3 for beta chain variable domain of TCR clone 112102 (TRBV6-3, TRBJ2-3)
CATGQADTQYF

SEQ ID NO: 224205 - protein, 14 aa, Homo sapiens
  CDR3 for alpha chain variable domain of TCR clone 112103 (TRAV1-2, TRAJ16)
CAVNRFSDGQKLLF

SEQ ID NO: 224206 - protein, 15 aa, Homo sapiens
  CDR3 for beta chain variable domain of TCR clone 112103 (TRBV29-1, TRBJ2-7)
CCVEFFDRGSYEQYF

SEQ ID NO: 224207 - protein, 13 aa, Homo sapiens
  CDR3 for alpha chain variable domain of TCR clone 112104 (TRAV3, TRAJ21)
CAVREPAFNKFYF

SEQ ID NO: 224208 - protein, 14 aa, Homo sapiens
  CDR3 for beta chain variable domain of TCR clone 112104 (TRBV4-1, TRBJ2-2)
CASSQAVNTGELFF

SEQ ID NO: 224209 - protein, 14 aa, Homo sapiens
  CDR3 for alpha chain variable domain of TCR clone 112105 (TRAV17, TRAJ57)
CATDPPGGSEKLVF

SEQ ID NO: 224210 - protein, 16 aa, Homo sapiens
  CDR3 for beta chain variable domain of TCR clone 112105 (TRBV27, TRBJ2-2)
CASSFRGLVRTGELFF

SEQ ID NO: 224211 - protein, 11 aa, Homo sapiens
  CDR3 for alpha chain variable domain of TCR clone 112106 (TRAV23/DV6, TRAJ48)
CAPRWGEKLTI

SEQ ID NO: 224212 - protein, 13 aa, Homo sapiens
  CDR3 for beta chain variable domain of TCR clone 112106 (TRBV12-4, TRBJ2-5)
CASSPGTEETQYF

SEQ ID NO: 224213 - protein, 13 aa, Homo sapiens
  CDR3 for alpha chain variable domain of TCR clone 112107 (TRAV30, TRAJ6)
CGFIEGGSYIPTF

SEQ ID NO: 224214 - protein, 13 aa, Homo sapiens
  CDR3 for beta chain variable domain of TCR clone 112107 (TRBV5-4, TRBJ2-5)
CASSTVSQETQYF

SEQ ID NO: 224215 - protein, 15 aa, Homo sapiens
  CDR3 for alpha chain variable domain of TCR clone 112108 (TRAV3, TRAJ17)
CAVSPKEAAGNKLTF

SEQ ID NO: 224216 - protein, 14 aa, Homo sapiens
  CDR3 for beta chain variable domain of TCR clone 112108 (TRBV4-1, TRBJ2-2)
CASSQAVNTGELFF

SEQ ID NO: 224217 - protein, 19 aa, Homo sapiens
  CDR3 for alpha chain variable domain of TCR clone 112109 (TRAV3, TRAJ37)
CAVRDIVGGDPSNTGKLIF

SEQ ID NO: 224218 - protein, 14 aa, Homo sapiens
  CDR3 for beta chain variable domain of TCR clone 112109 (TRBV7-8, TRBJ2-3)
CASSLEAGTDTQYF

SEQ ID NO: 224219 - protein, 16 aa, Homo sapiens
  CDR3 for alpha chain variable domain of TCR clone 112110 (TRAV4, TRAJ9)
CLVGGPNRPGGFKTIF

SEQ ID NO: 224220 - protein, 16 aa, Homo sapiens
  CDR3 for beta chain variable domain of TCR clone 112110 (TRBV28, TRBJ1-4)
CASSPPYRGRSEKLFF

SEQ ID NO: 224221 - protein, 14 aa, Homo sapiens
  CDR3 for alpha chain variable domain of TCR clone 112111 (TRAV17, TRAJ12)
CATDEKDSSYKLIF

SEQ ID NO: 224222 - protein, 16 aa, Homo sapiens
  CDR3 for beta chain variable domain of TCR clone 112111 (TRBV11-2, TRBJ2-1)
CASSHRLAGVYNEQFF

SEQ ID NO: 224223 - protein, 19 aa, Homo sapiens
  CDR3 for alpha chain variable domain of TCR clone 112112 (TRAV2, TRAJ20)
ILQVREADAAVYRDCKLSF

SEQ ID NO: 224224 - protein, 13 aa, Homo sapiens
  CDR3 for beta chain variable domain of TCR clone 112112 (TRBV15, TRBJ1-6)
CATSGGLNAPLHF

SEQ ID NO: 224225 - protein, 15 aa, Homo sapiens
  CDR3 for alpha chain variable domain of TCR clone 112113 (TRAV26-1, TRAJ3)
CIVRSGYSSASKIII

SEQ ID NO: 224226 - protein, 14 aa, Homo sapiens
  CDR3 for beta chain variable domain of TCR clone 112113 (TRBV13, TRBJ2-5)
CASYRRLAEETQYF

SEQ ID NO: 224227 - protein, 12 aa, Homo sapiens
  CDR3 for alpha chain variable domain of TCR clone 112114 (TRAV21, TRAJ30)
CAVMNRDDKIIF

SEQ ID NO: 224228 - protein, 17 aa, Homo sapiens
  CDR3 for beta chain variable domain of TCR clone 112114 (TRBV5-1, TRBJ1-1)
CASRPIRTGGVNTEAVF

SEQ ID NO: 224229 - protein, 15 aa, Homo sapiens
  CDR3 for alpha chain variable domain of TCR clone 112115 (TRAV26-1, TRAJ22)
CIVRVSFWFCKATDL

SEQ ID NO: 224230 - protein, 15 aa, Homo sapiens
  CDR3 for beta chain variable domain of TCR clone 112115 (TRBV27, TRBJ2-1)
CASSNGGGSSNEQFF

SEQ ID NO: 224231 - protein, 14 aa, Homo sapiens
  CDR3 for alpha chain variable domain of TCR clone 112116 (TRAV12-3, TRAJ20)
CAMSARRGDYKLSF

SEQ ID NO: 224232 - protein, 16 aa, Homo sapiens
  CDR3 for beta chain variable domain of TCR clone 112116 (TRBV12-4, TRBJ2-5)
CASSFFVRGRQETQYF

SEQ ID NO: 224233 - protein, 15 aa, Homo sapiens
  CDR3 for alpha chain variable domain of TCR clone 112117 (TRAV21, TRAJ32)
CAMNSYGGATNKLIF

SEQ ID NO: 224234 - protein, 18 aa, Homo sapiens
  CDR3 for beta chain variable domain of TCR clone 112117 (TRBV7-9, TRBJ2-1)
CASSTGLAEGSSYNEQFF

SEQ ID NO: 224235 - protein, 14 aa, Homo sapiens
  CDR3 for alpha chain variable domain of TCR clone 112118 (TRAV8-6, TRAJ33)
CAVSGMDSNYQLIW

SEQ ID NO: 224236 - protein, 17 aa, Homo sapiens
  CDR3 for beta chain variable domain of TCR clone 112118 (TRBV20-1, TRBJ2-1)
CSAPPRLAGTRYNEQFF

SEQ ID NO: 224237 - protein, 13 aa, Homo sapiens
  CDR3 for alpha chain variable domain of TCR clone 112119 (TRAV27, TRAJ53)
CAVQGGSNYKLTF

SEQ ID NO: 224238 - protein, 13 aa, Homo sapiens
  CDR3 for beta chain variable domain of TCR clone 112119 (TRBV29-1, TRBJ1-1)
CSVESGFGTEAFF

SEQ ID NO: 224239 - protein, 16 aa, Homo sapiens
  CDR3 for alpha chain variable domain of TCR clone 112120 (TRAV1-2, TRAJ10)
CAVRGVLTGGGNKLTF

SEQ ID NO: 224240 - protein, 13 aa, Homo sapiens
  CDR3 for beta chain variable domain of TCR clone 112120 (TRBV11-2, TRBJ2-5)
CASSFSSQETQYF

SEQ ID NO: 224241 - protein, 12 aa, Homo sapiens
  CDR3 for alpha chain variable domain of TCR clone 112121 (TRAV38-1, TRAJ32)
CAPLGDTNKLIF

SEQ ID NO: 224242 - protein, 17 aa, Homo sapiens
  CDR3 for beta chain variable domain of TCR clone 112121 (TRBV13, TRBJ2-3)
CASSLSRVAGGRNTQYF

SEQ ID NO: 224243 - protein, 15 aa, Homo sapiens
  CDR3 for alpha chain variable domain of TCR clone 112122 (TRAV12-3, TRAJ6)
CAMSATTGGSYIPTF

SEQ ID NO: 224244 - protein, 13 aa, Homo sapiens
  CDR3 for beta chain variable domain of TCR clone 112122 (TRBV5-5, TRBJ1-2)
CASSFWRGEDYTF

SEQ ID NO: 224245 - protein, 14 aa, Homo sapiens
  CDR3 for alpha chain variable domain of TCR clone 112123 (TRAV1-1, TRAJ27)
CAVIYNTNAGKSTF

SEQ ID NO: 224246 - protein, 15 aa, Homo sapiens
  CDR3 for beta chain variable domain of TCR clone 112123 (TRBV2, TRBJ2-1)
CASSELAGSYNEQFF

SEQ ID NO: 224247 - protein, 16 aa, Homo sapiens
  CDR3 for alpha chain variable domain of TCR clone 112124 (TRAV21, TRAJ37)
CAVRTAGSSNTGKLIF

SEQ ID NO: 224248 - protein, 13 aa, Homo sapiens
  CDR3 for beta chain variable domain of TCR clone 112124 (TRBV7-9, TRBJ2-5)
CASLPSGRETQSF

SEQ ID NO: 224249 - protein, 14 aa, Homo sapiens
  CDR3 for alpha chain variable domain of TCR clone 112125 (TRAV20, TRAJ26)
CAVQAAIYGQNSVF

SEQ ID NO: 224250 - protein, 14 aa, Homo sapiens
  CDR3 for beta chain variable domain of TCR clone 112125 (TRBV27, TRBJ2-2)
CASSLGDTTGELFF

SEQ ID NO: 224251 - protein, 15 aa, Homo sapiens
  CDR3 for alpha chain variable domain of TCR clone 112126 (TRAV17, TRAJ57)
CATGPSPGGSEKLVF

SEQ ID NO: 224252 - protein, 13 aa, Homo sapiens
  CDR3 for beta chain variable domain of TCR clone 112126 (TRBV6-5, TRBJ2-5)
CASSPQGGETQYF

SEQ ID NO: 224253 - protein, 14 aa, Homo sapiens
  CDR3 for alpha chain variable domain of TCR clone 112127 (TRAV2, TRAJ39)
CAVEGDNAGNMLTF

SEQ ID NO: 224254 - protein, 14 aa, Homo sapiens
  CDR3 for beta chain variable domain of TCR clone 112127 (TRBV28, TRBJ2-7)
CASSLRARGNEQYL

SEQ ID NO: 224255 - protein, 11 aa, Homo sapiens
  CDR3 for alpha chain variable domain of TCR clone 112128 (TRAV1-2, TRAJ40)
CSVPGTYKYIF

SEQ ID NO: 224256 - protein, 16 aa, Homo sapiens
  CDR3 for beta chain variable domain of TCR clone 112128 (TRBV7-3, TRBJ2-2)
CASSLKRGTLSGELFF

SEQ ID NO: 224257 - protein, 15 aa, Homo sapiens
  CDR3 for alpha chain variable domain of TCR clone 112129 (TRAV12-3, TRAJ49)
CAMAVTPNNGNQFYF

SEQ ID NO: 224258 - protein, 18 aa, Homo sapiens
  CDR3 for beta chain variable domain of TCR clone 112129 (TRBV4-1, TRBJ1-5)
CASSQDPRGQGLNQPQHF

SEQ ID NO: 224259 - protein, 16 aa, Homo sapiens
  CDR3 for alpha chain variable domain of TCR clone 112130 (TRAV12-3, TRAJ53)
CAMIPGSGGSNYKLTF

SEQ ID NO: 224260 - protein, 20 aa, Homo sapiens
  CDR3 for beta chain variable domain of TCR clone 112130 (TRBV7-8, TRBJ2-2)
CASSHLFPGPTIHITGELFF

SEQ ID NO: 224261 - protein, 13 aa, Homo sapiens
  CDR3 for alpha chain variable domain of TCR clone 112131 (TRAV21, TRAJ23)
CAVSYSQGGKLIF

SEQ ID NO: 224262 - protein, 14 aa, Homo sapiens
  CDR3 for beta chain variable domain of TCR clone 112131 (TRBV7-2, TRBJ2-3)
CASSLTSGTDTQYF

SEQ ID NO: 224263 - protein, 14 aa, Homo sapiens
  CDR3 for alpha chain variable domain of TCR clone 112132 (TRAV26-1, TRAJ45)
CIEVTGGGAVGLTF

SEQ ID NO: 224264 - protein, 13 aa, Homo sapiens
  CDR3 for beta chain variable domain of TCR clone 112132 (TRBV7-6, TRBJ1-2)
CASSLVADYGYTF

SEQ ID NO: 224265 - protein, 15 aa, Homo sapiens
  CDR3 for alpha chain variable domain of TCR clone 112133 (TRAV13-1, TRAJ17)
CAASIEKAAGNKLTF

SEQ ID NO: 224266 - protein, 12 aa, Homo sapiens
  CDR3 for beta chain variable domain of TCR clone 112133 (TRBV5-7, TRBJ1-1)
CASSLGRGKAFF

SEQ ID NO: 224267 - protein, 15 aa, Homo sapiens
  CDR3 for alpha chain variable domain of TCR clone 112134 (TRAV3, TRAJ5)
CAVRDLDTGRRALTF

SEQ ID NO: 224268 - protein, 15 aa, Homo sapiens
  CDR3 for beta chain variable domain of TCR clone 112134 (TRBV28, TRBJ1-3)
CASSMGWASGNTIYF

SEQ ID NO: 224269 - protein, 14 aa, Homo sapiens
  CDR3 for alpha chain variable domain of TCR clone 112135 (TRAV12-3, TRAJ29)
CAMSPYSGNTPLVF

SEQ ID NO: 224270 - protein, 15 aa, Homo sapiens
  CDR3 for beta chain variable domain of TCR clone 112135 (TRBV27, TRBJ2-1)
CDSSNGGGSSNEQFF

SEQ ID NO: 224271 - protein, 15 aa, Homo sapiens
  CDR3 for alpha chain variable domain of TCR clone 112136 (TRAV40, TRAJ45)
CLLGDLGGGAEGLTF

SEQ ID NO: 224272 - protein, 13 aa, Homo sapiens
  CDR3 for beta chain variable domain of TCR clone 112136 (TRBV7-9, TRBJ1-2)
CASSLKQNYGYTF

SEQ ID NO: 224273 - protein, 15 aa, Homo sapiens
  CDR3 for alpha chain variable domain of TCR clone 112137 (TRAV13-1, TRAJ10)
CAATILTGGRNKLTF

SEQ ID NO: 224274 - protein, 15 aa, Homo sapiens
  CDR3 for beta chain variable domain of TCR clone 112137 (TRBV2, TRBJ2-7)
CASTLLGSGATEQYF

SEQ ID NO: 224275 - protein, 13 aa, Homo sapiens
  CDR3 for alpha chain variable domain of TCR clone 112138 (TRAV27, TRAJ41)
CAGEGNSWYALNF

SEQ ID NO: 224276 - protein, 14 aa, Homo sapiens
  CDR3 for beta chain variable domain of TCR clone 112138 (TRBV7-2, TRBJ1-1)
CASSFLTGTTEAFF

SEQ ID NO: 224277 - protein, 15 aa, Homo sapiens
  CDR3 for alpha chain variable domain of TCR clone 112139 (TRAV25, TRAJ52)
CAGTSGGTSYGKLTF

SEQ ID NO: 224278 - protein, 16 aa, Homo sapiens
  CDR3 for beta chain variable domain of TCR clone 112139 (TRBV15, TRBJ1-2)
CATSRGPRTWGGGYTF

SEQ ID NO: 224279 - protein, 10 aa, Homo sapiens
  CDR3 for alpha chain variable domain of TCR clone 112140 (TRAV2, TRAJ34)
CAVVNDKLIF

SEQ ID NO: 224280 - protein, 20 aa, Homo sapiens
  CDR3 for beta chain variable domain of TCR clone 112140 (TRBV19, TRBJ2-1)
CASSISRTVTSTRLNNEQIF

SEQ ID NO: 224281 - protein, 13 aa, Homo sapiens
  CDR3 for alpha chain variable domain of TCR clone 112141 (TRAV8-2, TRAJ49)
CVVTPNTGNQFSF

SEQ ID NO: 224282 - protein, 15 aa, Homo sapiens
  CDR3 for beta chain variable domain of TCR clone 112141 (TRBV11-2, TRBJ2-1)
CASSLTSGGYNEQFF

SEQ ID NO: 224283 - protein, 16 aa, Homo sapiens
  CDR3 for alpha chain variable domain of TCR clone 112142 (TRAV3, TRAJ10)
CAVRDMRAGGGNKLTF

SEQ ID NO: 224284 - protein, 13 aa, Homo sapiens
  CDR3 for beta chain variable domain of TCR clone 112142 (TRBV6-5, TRBJ2-5)
CASSPQGGETQYF

SEQ ID NO: 224285 - protein, 14 aa, Homo sapiens
  CDR3 for alpha chain variable domain of TCR clone 112143 (TRAV12-1, TRAJ46)
CVVTAKGSGDKLTF

SEQ ID NO: 224286 - protein, 17 aa, Homo sapiens
  CDR3 for beta chain variable domain of TCR clone 112143 (TRBV4-1, TRBJ2-3)
CASSQDPAGGPLDTQYF

SEQ ID NO: 224287 - protein, 13 aa, Homo sapiens
  CDR3 for alpha chain variable domain of TCR clone 112144 (TRAV13-1, TRAJ17)
CAADGAAGNELTF

SEQ ID NO: 224288 - protein, 14 aa, Homo sapiens
  CDR3 for beta chain variable domain of TCR clone 112144 (TRBV11-2, TRBJ1-3)
CASSLTQGRNTIYF

SEQ ID NO: 224289 - protein, 15 aa, Homo sapiens
  CDR3 for alpha chain variable domain of TCR clone 112145 (TRAV3, TRAJ22)
CAVRDRGGSARQLTF

SEQ ID NO: 224290 - protein, 16 aa, Homo sapiens
  CDR3 for beta chain variable domain of TCR clone 112145 (TRBV4-2, TRBJ2-4)
CASSQELRRAKNVQYF

SEQ ID NO: 224291 - protein, 11 aa, Homo sapiens
  CDR3 for alpha chain variable domain of TCR clone 112146 (TRAV3, TRAJ31)
CAVRPDARLMF

SEQ ID NO: 224292 - protein, 14 aa, Homo sapiens
  CDR3 for beta chain variable domain of TCR clone 112146 (TRBV7-2, TRBJ2-5)
CASSPRGSSETQYF

SEQ ID NO: 224293 - protein, 13 aa, Homo sapiens
  CDR3 for alpha chain variable domain of TCR clone 112147 (TRAV20, TRAJ37)
CAGCSSNTGKLIF

SEQ ID NO: 224294 - protein, 18 aa, Homo sapiens
  CDR3 for beta chain variable domain of TCR clone 112147 (TRBV6-5, TRBJ2-5)
CASSYSQAGGSYQETQYF

SEQ ID NO: 224295 - protein, 17 aa, Homo sapiens
  CDR3 for alpha chain variable domain of TCR clone 112148 (TRAV3, TRAJ42)
CAVRDRDYGGSQGNLIF

SEQ ID NO: 224296 - protein, 14 aa, Homo sapiens
  CDR3 for beta chain variable domain of TCR clone 112148 (TRBV19, TRBJ2-1)
CASKDPGLANEQFF

SEQ ID NO: 224297 - protein, 14 aa, Homo sapiens
  CDR3 for alpha chain variable domain of TCR clone 112149 (TRAV29/DV5, TRAJ32)
CTAAYGGATNKLIF

SEQ ID NO: 224298 - protein, 13 aa, Homo sapiens
  CDR3 for beta chain variable domain of TCR clone 112149 (TRBV20-1, TRBJ1-1)
CSARVGGNTEAFF

SEQ ID NO: 224299 - protein, 13 aa, Homo sapiens
  CDR3 for alpha chain variable domain of TCR clone 112150 (TRAV21, TRAJ57)
CAVTQGGSEKLVF

SEQ ID NO: 224300 - protein, 11 aa, Homo sapiens
  CDR3 for beta chain variable domain of TCR clone 112150 (TRBV11-2, TRBJ2-2)
CASSLPVELFF

SEQ ID NO: 224301 - protein, 17 aa, Homo sapiens
  CDR3 for alpha chain variable domain of TCR clone 112151 (TRAV36/DV7, TRAJ52)
CAVAQRAGGTSDGKLTF

SEQ ID NO: 224302 - protein, 15 aa, Homo sapiens
  CDR3 for beta chain variable domain of TCR clone 112151 (TRBV6-5, TRBJ1-2)
CASSYSQAFNYGYTF

SEQ ID NO: 224303 - protein, 14 aa, Homo sapiens
  CDR3 for alpha chain variable domain of TCR clone 112152 (TRAV1-2, TRAJ16)
CAVNRFSDGQKLLF

SEQ ID NO: 224304 - protein, 18 aa, Homo sapiens
  CDR3 for beta chain variable domain of TCR clone 112152 (TRBV20-1, TRBJ2-6)
CSAETTPTNGSGANVLTF

SEQ ID NO: 224305 - protein, 10 aa, Homo sapiens
  CDR3 for alpha chain variable domain of TCR clone 112153 (TRAV23/DV6, TRAJ57)
CAASSTLSQG

SEQ ID NO: 224306 - protein, 14 aa, Homo sapiens
  CDR3 for beta chain variable domain of TCR clone 112153 (TRBV27, TRBJ2-1)
CASSRRGAFNEQFF

SEQ ID NO: 224307 - protein, 13 aa, Homo sapiens
  CDR3 for alpha chain variable domain of TCR clone 112154 (TRAV2, TRAJ40)
CAVVTSGTYKYIF

SEQ ID NO: 224308 - protein, 16 aa, Homo sapiens
  CDR3 for beta chain variable domain of TCR clone 112154 (TRBV7-9, TRBJ2-3)
CASSLGAGGPTDTQYF

SEQ ID NO: 224309 - protein, 17 aa, Homo sapiens
  CDR3 for alpha chain variable domain of TCR clone 112155 (TRAV4, TRAJ13)
CLVGVQGYSGGYQKVTF

SEQ ID NO: 224310 - protein, 18 aa, Homo sapiens
  CDR3 for beta chain variable domain of TCR clone 112155 (TRBV15, TRBJ2-3)
CATSRDGARSWDTDTQYF

SEQ ID NO: 224311 - protein, 11 aa, Homo sapiens
  CDR3 for alpha chain variable domain of TCR clone 112156 (TRAV17, TRAJ9)
CATTGGFKTIF

SEQ ID NO: 224312 - protein, 12 aa, Homo sapiens
  CDR3 for beta chain variable domain of TCR clone 112156 (TRBV20-1, TRBJ1-1)
QCSTWGGTEAFF

SEQ ID NO: 224313 - protein, 12 aa, Homo sapiens
  CDR3 for alpha chain variable domain of TCR clone 112157 (TRAV17, TRAJ4)
CATVGGYNKLIF

SEQ ID NO: 224314 - protein, 13 aa, Homo sapiens
  CDR3 for beta chain variable domain of TCR clone 112157 (TRBV29-1, TRBJ2-2)
CSTTGVNTGELFF

SEQ ID NO: 224315 - protein, 14 aa, Homo sapiens
  CDR3 for alpha chain variable domain of TCR clone 112158 (TRAV21, TRAJ56)
CAVTILGANSKLTF

SEQ ID NO: 224316 - protein, 14 aa, Homo sapiens
  CDR3 for beta chain variable domain of TCR clone 112158 (TRBV2, TRBJ1-6)
CASEVSSYNSPLHF

SEQ ID NO: 224317 - protein, 12 aa, Homo sapiens
  CDR3 for alpha chain variable domain of TCR clone 112159 (TRAV17, TRAJ40)
CATESGTYKYIF

SEQ ID NO: 224318 - protein, 13 aa, Homo sapiens
  CDR3 for beta chain variable domain of TCR clone 112159 (TRBV28, TRBJ2-7)
CASRSSGVYEQYF

SEQ ID NO: 224319 - protein, 18 aa, Homo sapiens
  CDR3 for alpha chain variable domain of TCR clone 112160 (TRAV13-1, TRAJ52)
CAAKNPNAGGTSYGKLTF

SEQ ID NO: 224320 - protein, 15 aa, Homo sapiens
  CDR3 for beta chain variable domain of TCR clone 112160 (TRBV6-1, TRBJ2-3)
CASSERGGIADTQYF

SEQ ID NO: 224321 - protein, 17 aa, Homo sapiens
  CDR3 for alpha chain variable domain of TCR clone 112161 (TRAV3, TRAJ13)
CAVRDMRRTGGYQKVTF

SEQ ID NO: 224322 - protein, 15 aa, Homo sapiens
  CDR3 for beta chain variable domain of TCR clone 112161 (TRBV9, TRBJ1-6)
CASSVAGTGDSPLHF

SEQ ID NO: 224323 - protein, 10 aa, Homo sapiens
  CDR3 for alpha chain variable domain of TCR clone 112162 (TRAV12-2, TRAJ52)
RSTSYRKLTF

SEQ ID NO: 224324 - protein, 17 aa, Homo sapiens
  CDR3 for beta chain variable domain of TCR clone 112162 (TRBV28, TRBJ2-5)
CASSRQGGLAGAETQYF

SEQ ID NO: 224325 - protein, 14 aa, Homo sapiens
  CDR3 for alpha chain variable domain of TCR clone 112163 (TRAV1-2, TRAJ8)
CAVREDTGFQKLVF

SEQ ID NO: 224326 - protein, 16 aa, Homo sapiens
  CDR3 for beta chain variable domain of TCR clone 112163 (TRBV20-1, TRBJ1-4)
CSAPGQGLLNNEKLFF

SEQ ID NO: 224327 - protein, 15 aa, Homo sapiens
  CDR3 for alpha chain variable domain of TCR clone 112164 (TRAV25, TRAJ53)
CAATGGGGSNYRLTF

SEQ ID NO: 224328 - protein, 19 aa, Homo sapiens
  CDR3 for beta chain variable domain of TCR clone 112164 (TRBV7-2, TRBJ2-3)
CASSFLSRNWGGGTDTQYF

SEQ ID NO: 224329 - protein, 15 aa, Homo sapiens
  CDR3 for alpha chain variable domain of TCR clone 112165 (TRAV8-3, TRAJ11)
CAVGLLNSGYSTLTF

SEQ ID NO: 224330 - protein, 16 aa, Homo sapiens
  CDR3 for beta chain variable domain of TCR clone 112165 (TRBV7-3, TRBJ2-2)
CASSLKRGTLSGELSF

SEQ ID NO: 224331 - protein, 14 aa, Homo sapiens
  CDR3 for alpha chain variable domain of TCR clone 112166 (TRAV20, TRAJ42)
CAVQAGGVQGNLIF

SEQ ID NO: 224332 - protein, 14 aa, Homo sapiens
  CDR3 for beta chain variable domain of TCR clone 112166 (TRBV28, TRBJ1-2)
CASRIQGANYGYTF

SEQ ID NO: 224333 - protein, 15 aa, Homo sapiens
  CDR3 for alpha chain variable domain of TCR clone 112167 (TRAV3, TRAJ5)
CAVRDRKTGRRELTF

SEQ ID NO: 224334 - protein, 15 aa, Homo sapiens
  CDR3 for beta chain variable domain of TCR clone 112167 (TRBV7-9, TRBJ2-2)
CASGPLDTFPGELFF

SEQ ID NO: 224335 - protein, 16 aa, Homo sapiens
  CDR3 for alpha chain variable domain of TCR clone 112168 (TRAV30, TRAJ24)
CGTEIVDADSWGKFQF

SEQ ID NO: 224336 - protein, 16 aa, Homo sapiens
  CDR3 for beta chain variable domain of TCR clone 112168 (TRBV7-9, TRBJ1-3)
CASSLGAGSSGNTIYF

SEQ ID NO: 224337 - protein, 10 aa, Homo sapiens
  CDR3 for alpha chain variable domain of TCR clone 112169 (TRAV13-1, TRAJ52)
CGTSYGKLTF

SEQ ID NO: 224338 - protein, 16 aa, Homo sapiens
  CDR3 for beta chain variable domain of TCR clone 112169 (TRBV28, TRBJ2-7)
CASSPWVATGDLSQYF

SEQ ID NO: 224339 - protein, 15 aa, Homo sapiens
  CDR3 for alpha chain variable domain of TCR clone 112170 (TRAV12-2, TRAJ8)
CAVREENTGFQKLVF

SEQ ID NO: 224340 - protein, 15 aa, Homo sapiens
  CDR3 for beta chain variable domain of TCR clone 112170 (TRBV7-8, TRBJ1-2)
CASSLVRDGGLGYTF

SEQ ID NO: 224341 - protein, 13 aa, Homo sapiens
  CDR3 for alpha chain variable domain of TCR clone 112171 (TRAV26-1, TRAJ29)
CIVSRSGNTPLVF

SEQ ID NO: 224342 - protein, 16 aa, Homo sapiens
  CDR3 for beta chain variable domain of TCR clone 112171 (TRBV11-2, TRBJ2-7)
CASSLAPTGVNYEQYF

SEQ ID NO: 224343 - protein, 14 aa, Homo sapiens
  CDR3 for alpha chain variable domain of TCR clone 112172 (TRAV12-2, TRAJ13)
CAVKKTGGYQKVTF

SEQ ID NO: 224344 - protein, 14 aa, Homo sapiens
  CDR3 for beta chain variable domain of TCR clone 112172 (TRBV7-2, TRBJ2-1)
CASSLGVGYNEQFF

SEQ ID NO: 224345 - protein, 12 aa, Homo sapiens
  CDR3 for alpha chain variable domain of TCR clone 112173 (TRAV1-2, TRAJ20)
CAVREVGYKLSF

SEQ ID NO: 224346 - protein, 18 aa, Homo sapiens
  CDR3 for beta chain variable domain of TCR clone 112173 (TRBV11-2, TRBJ2-3)
CASSLGGASRGAPNTQYF

SEQ ID NO: 224347 - protein, 12 aa, Homo sapiens
  CDR3 for alpha chain variable domain of TCR clone 112174 (TRAV12-3, TRAJ41)
CAMSYSGYALNF

SEQ ID NO: 224348 - protein, 13 aa, Homo sapiens
  CDR3 for beta chain variable domain of TCR clone 112174 (TRBV7-3, TRBJ1-1)
CASSQDWGAEAFF

SEQ ID NO: 224349 - protein, 12 aa, Homo sapiens
  CDR3 for alpha chain variable domain of TCR clone 112175 (TRAV27, TRAJ9)
CAGESGGFKTIF

SEQ ID NO: 224350 - protein, 18 aa, Homo sapiens
  CDR3 for beta chain variable domain of TCR clone 112175 (TRBV10-2, TRBJ2-2)
CISEPAVHRQADAGELFF

SEQ ID NO: 224351 - protein, 14 aa, Homo sapiens
  CDR3 for alpha chain variable domain of TCR clone 112176 (TRAV1-2, TRAJ8)
CAGREDTGFQKLVF

SEQ ID NO: 224352 - protein, 14 aa, Homo sapiens
  CDR3 for beta chain variable domain of TCR clone 112176 (TRBV11-2, TRBJ2-3)
CASSRLARTDTQYF

SEQ ID NO: 224353 - protein, 14 aa, Homo sapiens
  CDR3 for alpha chain variable domain of TCR clone 112177 (TRAV12-3, TRAJ10)
SHLPLTGGGNKLTF

SEQ ID NO: 224354 - protein, 16 aa, Homo sapiens
  CDR3 for beta chain variable domain of TCR clone 112177 (TRBV18, TRBJ1-4)
CASSPLVGDRAEKLFF

SEQ ID NO: 224355 - protein, 13 aa, Homo sapiens
  CDR3 for alpha chain variable domain of TCR clone 112178 (TRAV12-3, TRAJ40)
CAMSARGTYKYIF

SEQ ID NO: 224356 - protein, 15 aa, Homo sapiens
  CDR3 for beta chain variable domain of TCR clone 112178 (TRBV9, TRBJ1-6)
CASSVAGTGDSTLHF

SEQ ID NO: 224357 - protein, 15 aa, Homo sapiens
  CDR3 for alpha chain variable domain of TCR clone 112179 (TRAV2, TRAJ22)
CAVPSRGGSASQLTF

SEQ ID NO: 224358 - protein, 11 aa, Homo sapiens
  CDR3 for beta chain variable domain of TCR clone 112179 (TRBV27, TRBJ2-3)
CASSLGDTQYF

SEQ ID NO: 224359 - protein, 14 aa, Homo sapiens
  CDR3 for alpha chain variable domain of TCR clone 112180 (TRAV12-2, TRAJ13)
CAVKKTGGYQKVTF

SEQ ID NO: 224360 - protein, 13 aa, Homo sapiens
  CDR3 for beta chain variable domain of TCR clone 112180 (TRBV20-1, TRBJ1-6)
CSAPLGVGSPLHF

SEQ ID NO: 224361 - protein, 10 aa, Homo sapiens
  CDR3 for alpha chain variable domain of TCR clone 112181 (TRAV21, TRAJ49)
CAVTGNQFYF

SEQ ID NO: 224362 - protein, 16 aa, Homo sapiens
  CDR3 for beta chain variable domain of TCR clone 112181 (TRBV19, TRBJ1-5)
CASSIDRGGPRQPQHF

SEQ ID NO: 224363 - protein, 17 aa, Homo sapiens
  CDR3 for alpha chain variable domain of TCR clone 112182 (TRAV3, TRAJ6)
CAVRDGPRAGGSHIPTF

SEQ ID NO: 224364 - protein, 14 aa, Homo sapiens
  CDR3 for beta chain variable domain of TCR clone 112182 (TRBV11-2, TRBJ2-3)
CASSRLARTDTQYF

SEQ ID NO: 224365 - protein, 18 aa, Homo sapiens
  CDR3 for alpha chain variable domain of TCR clone 112183 (TRAV13-1, TRAJ52)
CAASKRSAGGTSYGKLTF

SEQ ID NO: 224366 - protein, 13 aa, Homo sapiens
  CDR3 for beta chain variable domain of TCR clone 112183 (TRBV12-4, TRBJ1-2)
CASSLRQGKVYTF

SEQ ID NO: 224367 - protein, 14 aa, Homo sapiens
  CDR3 for alpha chain variable domain of TCR clone 112184 (TRAV8-3, TRAJ4)
CAVGAAGGYNKLIF

SEQ ID NO: 224368 - protein, 15 aa, Homo sapiens
  CDR3 for beta chain variable domain of TCR clone 112184 (TRBV6-5, TRBJ2-1)
CASSYDARAGNEHFF

SEQ ID NO: 224369 - protein, 12 aa, Homo sapiens
  CDR3 for alpha chain variable domain of TCR clone 112185 (TRAV13-1, TRAJ34)
CAASKGTDKLIF

SEQ ID NO: 224370 - protein, 16 aa, Homo sapiens
  CDR3 for beta chain variable domain of TCR clone 112185 (TRBV19, TRBJ2-1)
CASSKAGPSSYNEQFF

SEQ ID NO: 224371 - protein, 12 aa, Homo sapiens
  CDR3 for alpha chain variable domain of TCR clone 112186 (TRAV17, TRAJ4)
CATDGGYNKLIF

SEQ ID NO: 224372 - protein, 17 aa, Homo sapiens
  CDR3 for beta chain variable domain of TCR clone 112186 (TRBV13, TRBJ2-3)
CASSLSRVAGGRNTQYF

SEQ ID NO: 224373 - protein, 17 aa, Homo sapiens
  CDR3 for alpha chain variable domain of TCR clone 112187 (TRAV13-1, TRAJ31)
CAPRDRLMFGDATQLVV

SEQ ID NO: 224374 - protein, 12 aa, Homo sapiens
  CDR3 for beta chain variable domain of TCR clone 112187 (TRBV7-9, TRBJ2-7)
CASSLEGYEQYF

SEQ ID NO: 224375 - protein, 15 aa, Homo sapiens
  CDR3 for alpha chain variable domain of TCR clone 112188 (TRAV13-1, TRAJ16)
CAARHQMARSCSLQG

SEQ ID NO: 224376 - protein, 13 aa, Homo sapiens
  CDR3 for beta chain variable domain of TCR clone 112188 (TRBV4-1, TRBJ2-1)
CASSQAGGDEQFF

SEQ ID NO: 224377 - protein, 14 aa, Homo sapiens
  CDR3 for alpha chain variable domain of TCR clone 112189 (TRAV26-1, TRAJ39)
CIVRGSRAGNMLTF

SEQ ID NO: 224378 - protein, 15 aa, Homo sapiens
  CDR3 for beta chain variable domain of TCR clone 112189 (TRBV7-9, TRBJ1-5)
CASSQGHQPNQPQDF

SEQ ID NO: 224379 - protein, 18 aa, Homo sapiens
  CDR3 for alpha chain variable domain of TCR clone 112190 (TRAV29/DV5, TRAJ52)
CSAGFRGAGGTSYGKLTF

SEQ ID NO: 224380 - protein, 15 aa, Homo sapiens
  CDR3 for beta chain variable domain of TCR clone 112190 (TRBV7-2, TRBJ2-2)
CASRRPGQNTGELFF

SEQ ID NO: 224381 - protein, 13 aa, Homo sapiens
  CDR3 for alpha chain variable domain of TCR clone 112191 (TRAV8-6, TRAJ49)
CAVITNTGNPFYF

SEQ ID NO: 224382 - protein, 13 aa, Homo sapiens
  CDR3 for beta chain variable domain of TCR clone 112191 (TRBV7-9, TRBJ1-2)
CASSLKQNYGYTF

SEQ ID NO: 224383 - protein, 16 aa, Homo sapiens
  CDR3 for alpha chain variable domain of TCR clone 112192 (TRAV39, TRAJ32)
CAVDMAYGGATNKLIF

SEQ ID NO: 224384 - protein, 14 aa, Homo sapiens
  CDR3 for beta chain variable domain of TCR clone 112192 (TRBV9, TRBJ2-4)
CASSPSGTSGSQYF

SEQ ID NO: 224385 - protein, 13 aa, Homo sapiens
  CDR3 for alpha chain variable domain of TCR clone 112193 (TRAV17, TRAJ9)
SATDYTGGFKTIF

SEQ ID NO: 224386 - protein, 13 aa, Homo sapiens
  CDR3 for beta chain variable domain of TCR clone 112193 (TRBV7-9, TRBJ1-2)
CASSLKQNYGYTF

SEQ ID NO: 224387 - protein, 12 aa, Homo sapiens
  CDR3 for alpha chain variable domain of TCR clone 112194 (TRAV16, TRAJ10)
CSRTGGGNKLTF

SEQ ID NO: 224388 - protein, 15 aa, Homo sapiens
  CDR3 for beta chain variable domain of TCR clone 112194 (TRBV28, TRBJ2-5)
CASSSGRTIQETQYF

SEQ ID NO: 224389 - protein, 11 aa, Homo sapiens
  CDR3 for alpha chain variable domain of TCR clone 112195 (TRAV3, TRAJ21)
CAVGNFNKFYF

SEQ ID NO: 224390 - protein, 16 aa, Homo sapiens
  CDR3 for beta chain variable domain of TCR clone 112195 (TRBV4-3, TRBJ2-2)
CASSHLQGSGTGELFF

SEQ ID NO: 224391 - protein, 12 aa, Homo sapiens
  CDR3 for alpha chain variable domain of TCR clone 112196 (TRAV21, TRAJ29)
CAVTSGNAPLVF

SEQ ID NO: 224392 - protein, 15 aa, Homo sapiens
  CDR3 for beta chain variable domain of TCR clone 112196 (TRBV12-4, TRBJ1-2)
CASRLGVAGNYGYTF

SEQ ID NO: 224393 - protein, 12 aa, Homo sapiens
  CDR3 for alpha chain variable domain of TCR clone 112197 (TRAV1-2, TRAJ33)
CAALASNYQLIW

SEQ ID NO: 224394 - protein, 13 aa, Homo sapiens
  CDR3 for beta chain variable domain of TCR clone 112197 (TRBV19, TRBJ2-7)
CASRKAGGSEQYF

SEQ ID NO: 224395 - protein, 18 aa, Homo sapiens
  CDR3 for alpha chain variable domain of TCR clone 112198 (TRAV26-2, TRAJ17)
CCVLLHPAIKAAGTKLTF

SEQ ID NO: 224396 - protein, 12 aa, Homo sapiens
  CDR3 for beta chain variable domain of TCR clone 112198 (TRBV29-1, TRBJ2-7)
CSARDRPYEQYF

SEQ ID NO: 224397 - protein, 16 aa, Homo sapiens
  CDR3 for alpha chain variable domain of TCR clone 112199 (TRAV20, TRAJ38)
CAVQASNAGNNRKLSW

SEQ ID NO: 224398 - protein, 16 aa, Homo sapiens
  CDR3 for beta chain variable domain of TCR clone 112199 (TRBV7-8, TRBJ2-6)
CASRVGDSSGANVLTF

SEQ ID NO: 224399 - protein, 17 aa, Homo sapiens
  CDR3 for alpha chain variable domain of TCR clone 112200 (TRAV14/DV4, TRAJ28)
CAMREGSSGAGSYQLTF

SEQ ID NO: 224400 - protein, 15 aa, Homo sapiens
  CDR3 for beta chain variable domain of TCR clone 112200 (TRBV11-2, TRBJ1-6)
CASTLRETGNSPLHF

SEQ ID NO: 224401 - protein, 15 aa, Homo sapiens
  CDR3 for alpha chain variable domain of TCR clone 112201 (TRAV8-4, TRAJ3)
CAVTGENLVQQCFQD

SEQ ID NO: 224402 - protein, 16 aa, Homo sapiens
  CDR3 for beta chain variable domain of TCR clone 112201 (TRBV4-2, TRBJ1-1)
CASSQAGFGTNTEAFF

SEQ ID NO: 224403 - protein, 14 aa, Homo sapiens
  CDR3 for alpha chain variable domain of TCR clone 112202 (TRAV16, TRAJ37)
CALDISGNTGKLIF

SEQ ID NO: 224404 - protein, 14 aa, Homo sapiens
  CDR3 for beta chain variable domain of TCR clone 112202 (TRBV12-5, TRBJ2-5)
CASGSRTHQETQYF

SEQ ID NO: 224405 - protein, 14 aa, Homo sapiens
  CDR3 for alpha chain variable domain of TCR clone 112203 (TRAV26-1, TRAJ38)
CIADNAGNNRKLIW

SEQ ID NO: 224406 - protein, 16 aa, Homo sapiens
  CDR3 for beta chain variable domain of TCR clone 112203 (TRBV13, TRBJ2-2)
CASSTRTGEHTGELFF

SEQ ID NO: 224407 - protein, 11 aa, Homo sapiens
  CDR3 for alpha chain variable domain of TCR clone 112204 (TRAV2, TRAJ13)
CASGGYQKVTF

SEQ ID NO: 224408 - protein, 14 aa, Homo sapiens
  CDR3 for beta chain variable domain of TCR clone 112204 (TRBV19, TRBJ2-1)
CASPTFVLSGEQLF

SEQ ID NO: 224409 - protein, 15 aa, Homo sapiens
  CDR3 for alpha chain variable domain of TCR clone 112205 (TRAV12-3, TRAJ22)
CAMRTISGSARQLTS

SEQ ID NO: 224410 - protein, 16 aa, Homo sapiens
  CDR3 for beta chain variable domain of TCR clone 112205 (TRBV20-1, TRBJ2-2)
CSARRPGTGNTGELFF

SEQ ID NO: 224411 - protein, 14 aa, Homo sapiens
  CDR3 for alpha chain variable domain of TCR clone 112206 (TRAV1-2, TRAJ8)
CAVREDTCFQKLVF

SEQ ID NO: 224412 - protein, 16 aa, Homo sapiens
  CDR3 for beta chain variable domain of TCR clone 112206 (TRBV12-5, TRBJ2-5)
CASGPRTSGNQETQYF

SEQ ID NO: 224413 - protein, 17 aa, Homo sapiens
  CDR3 for alpha chain variable domain of TCR clone 112207 (TRAV13-1, TRAJ28)
CAASPQYSGAGSYQLTF

SEQ ID NO: 224414 - protein, 15 aa, Homo sapiens
  CDR3 for beta chain variable domain of TCR clone 112207 (TRBV6-3, TRBJ2-2)
CASSFLATLTGELFF

SEQ ID NO: 224415 - protein, 12 aa, Homo sapiens
  CDR3 for alpha chain variable domain of TCR clone 112208 (TRAV13-1, TRAJ48)
CAANFGNEKLTF

SEQ ID NO: 224416 - protein, 15 aa, Homo sapiens
  CDR3 for beta chain variable domain of TCR clone 112208 (TRBV27, TRBJ2-7)
CASSPDQGRLYEQYF

SEQ ID NO: 224417 - protein, 15 aa, Homo sapiens
  CDR3 for alpha chain variable domain of TCR clone 112209 (TRAV2, TRAJ42)
CAVEGYGGSQGNLIF

SEQ ID NO: 224418 - protein, 17 aa, Homo sapiens
  CDR3 for beta chain variable domain of TCR clone 112209 (TRBV4-1, TRBJ1-4)
CASSQEGPRGVEEKLFF

SEQ ID NO: 224419 - protein, 14 aa, Homo sapiens
  CDR3 for alpha chain variable domain of TCR clone 112210 (TRAV12-1, TRAJ12)
CVVTRMDSSYKLIF

SEQ ID NO: 224420 - protein, 13 aa, Homo sapiens
  CDR3 for beta chain variable domain of TCR clone 112210 (TRBV20-1, TRBJ1-1)
CSARGRGNTEAFF

SEQ ID NO: 224421 - protein, 14 aa, Homo sapiens
  CDR3 for alpha chain variable domain of TCR clone 112211 (TRAV9-2, TRAJ31)
CALYIYNAGNMLTF

SEQ ID NO: 224422 - protein, 15 aa, Homo sapiens
  CDR3 for beta chain variable domain of TCR clone 112211 (TRBV4-2, TRBJ1-1)
CASSQDQGLNTEAFF

SEQ ID NO: 224423 - protein, 11 aa, Homo sapiens
  CDR3 for alpha chain variable domain of TCR clone 112212 (TRAV3, TRAJ21)
CAVGNFNKFYF

SEQ ID NO: 224424 - protein, 16 aa, Homo sapiens
  CDR3 for beta chain variable domain of TCR clone 112212 (TRBV19, TRBJ2-1)
CAGSKAGQSSYNEQFF

SEQ ID NO: 224425 - protein, 13 aa, Homo sapiens
  CDR3 for alpha chain variable domain of TCR clone 112213 (TRAV20, TRAJ31)
CAVQAWNNARLMF

SEQ ID NO: 224426 - protein, 13 aa, Homo sapiens
  CDR3 for beta chain variable domain of TCR clone 112213 (TRBV12-4, TRBJ1-2)
CASSLRQGKGDTF

SEQ ID NO: 224427 - protein, 12 aa, Homo sapiens
  CDR3 for alpha chain variable domain of TCR clone 112214 (TRAV12-2, TRAJ52)
IGGGTSYGKLTF

SEQ ID NO: 224428 - protein, 13 aa, Homo sapiens
  CDR3 for beta chain variable domain of TCR clone 112214 (TRBV12-4, TRBJ1-1)
CASSSGTGFEAFF

SEQ ID NO: 224429 - protein, 14 aa, Homo sapiens
  CDR3 for alpha chain variable domain of TCR clone 112215 (TRAV12-3, TRAJ10)
SHLPLTGGGNKLTF

SEQ ID NO: 224430 - protein, 13 aa, Homo sapiens
  CDR3 for beta chain variable domain of TCR clone 112215 (TRBV12-4, TRBJ2-6)
CASSGTGANVLTF

SEQ ID NO: 224431 - protein, 13 aa, Homo sapiens
  CDR3 for alpha chain variable domain of TCR clone 112216 (TRAV3, TRAJ21)
CAVREPDFNKFYF

SEQ ID NO: 224432 - protein, 10 aa, Homo sapiens
  CDR3 for beta chain variable domain of TCR clone 112216 (TRBV19, TRBJ1-1)
CASRQVEAFF

SEQ ID NO: 224433 - protein, 10 aa, Homo sapiens
  CDR3 for alpha chain variable domain of TCR clone 112217 (TRAV13-1, TRAJ15)
INQAGTALTF

SEQ ID NO: 224434 - protein, 14 aa, Homo sapiens
  CDR3 for beta chain variable domain of TCR clone 112217 (TRBV7-9, TRBJ2-1)
CASSDNSGYNEQFF

SEQ ID NO: 224435 - protein, 12 aa, Homo sapiens
  CDR3 for alpha chain variable domain of TCR clone 112218 (TRAV12-1, TRAJ34)
CVVAGATEKLIF

SEQ ID NO: 224436 - protein, 12 aa, Homo sapiens
  CDR3 for beta chain variable domain of TCR clone 112218 (TRBV7-9, TRBJ1-1)
CASSLVRGEAFF

SEQ ID NO: 224437 - protein, 12 aa, Homo sapiens
  CDR3 for alpha chain variable domain of TCR clone 112219 (TRAV21, TRAJ11)
CAATSGYSTLTF

SEQ ID NO: 224438 - protein, 15 aa, Homo sapiens
  CDR3 for beta chain variable domain of TCR clone 112219 (TRBV11-3, TRBJ2-3)
CASLKDGREGDTQYF

SEQ ID NO: 224439 - protein, 15 aa, Homo sapiens
  CDR3 for alpha chain variable domain of TCR clone 112220 (TRAV27, TRAJ38)
CAARRNAGNNRKLIW

SEQ ID NO: 224440 - protein, 13 aa, Homo sapiens
  CDR3 for beta chain variable domain of TCR clone 112220 (TRBV7-2, TRBJ2-2)
CASSLAVTGELFF

SEQ ID NO: 224441 - protein, 15 aa, Homo sapiens
  CDR3 for alpha chain variable domain of TCR clone 112221 (TRAV38-1, TRAJ37)
CAFIHGSGNTGKLIF

SEQ ID NO: 224442 - protein, 17 aa, Homo sapiens
  CDR3 for beta chain variable domain of TCR clone 112221 (TRBV13, TRBJ2-3)
CASSLSRVAGGRNTQYF

SEQ ID NO: 224443 - protein, 15 aa, Homo sapiens
  CDR3 for alpha chain variable domain of TCR clone 112222 (TRAV8-3, TRAJ27)
CAVGTSKTNAGKSTF

SEQ ID NO: 224444 - protein, 14 aa, Homo sapiens
  CDR3 for beta chain variable domain of TCR clone 112222 (TRBV11-2, TRBJ2-3)
CASSRLARTDTQYF

SEQ ID NO: 224445 - protein, 13 aa, Homo sapiens
  CDR3 for alpha chain variable domain of TCR clone 112223 (TRAV27, TRAJ45)
CRSSGGGADGLTF

SEQ ID NO: 224446 - protein, 19 aa, Homo sapiens
  CDR3 for beta chain variable domain of TCR clone 112223 (TRBV25-1, TRBJ2-2)
CAILVYRVDRGRKTGELFF

SEQ ID NO: 224447 - protein, 12 aa, Homo sapiens
  CDR3 for alpha chain variable domain of TCR clone 112224 (TRAV21, TRAJ33)
CAKMDSNYQLIC

SEQ ID NO: 224448 - protein, 14 aa, Homo sapiens
  CDR3 for beta chain variable domain of TCR clone 112224 (TRBV7-3, TRBJ1-1)
CASSLKGGNTEAFF

SEQ ID NO: 224449 - protein, 15 aa, Homo sapiens
  CDR3 for alpha chain variable domain of TCR clone 112225 (TRAV38-1, TRAJ37)
CAFIFGSGNTGKLIF

SEQ ID NO: 224450 - protein, 16 aa, Homo sapiens
  CDR3 for beta chain variable domain of TCR clone 112225 (TRBV6-5, TRBJ2-2)
CASSYGRVPDTGELFF

SEQ ID NO: 224451 - protein, 15 aa, Homo sapiens
  CDR3 for alpha chain variable domain of TCR clone 112226 (TRAV12-2, TRAJ53)
CAVNGGGGSNYKLTF

SEQ ID NO: 224452 - protein, 14 aa, Homo sapiens
  CDR3 for beta chain variable domain of TCR clone 112226 (TRBV19, TRBJ2-2)
CASSTPHRSGELFF

SEQ ID NO: 224453 - protein, 13 aa, Homo sapiens
  CDR3 for alpha chain variable domain of TCR clone 112227 (TRAV8-3, TRAJ28)
CAVGAVGSYQLTF

SEQ ID NO: 224454 - protein, 18 aa, Homo sapiens
  CDR3 for beta chain variable domain of TCR clone 112227 (TRBV12-4, TRBJ2-7)
CASSSSDSQPTGSYEQYF

SEQ ID NO: 224455 - protein, 14 aa, Homo sapiens
  CDR3 for alpha chain variable domain of TCR clone 112228 (TRAV1-2, TRAJ16)
CAVNRFSDGQKLLF

SEQ ID NO: 224456 - protein, 15 aa, Homo sapiens
  CDR3 for beta chain variable domain of TCR clone 112228 (TRBV7-2, TRBJ2-1)
CASSSGRAGGNEQFF

SEQ ID NO: 224457 - protein, 14 aa, Homo sapiens
  CDR3 for alpha chain variable domain of TCR clone 112229 (TRAV12-2, TRAJ40)
CAVKIPSGTYKYIF

SEQ ID NO: 224458 - protein, 13 aa, Homo sapiens
  CDR3 for beta chain variable domain of TCR clone 112229 (TRBV4-1, TRBJ2-7)
CASSQGQAYEQYF

SEQ ID NO: 224459 - protein, 13 aa, Homo sapiens
  CDR3 for alpha chain variable domain of TCR clone 112230 (TRAV8-4, TRAJ10)
CSAFTGGGNKLTF

SEQ ID NO: 224460 - protein, 15 aa, Homo sapiens
  CDR3 for beta chain variable domain of TCR clone 112230 (TRBV2, TRBJ2-3)
CASSDFEKATDTQYF

SEQ ID NO: 224461 - protein, 10 aa, Homo sapiens
  CDR3 for alpha chain variable domain of TCR clone 112231 (TRAV16, TRAJ26)
CAPEELWPEF

SEQ ID NO: 224462 - protein, 15 aa, Homo sapiens
  CDR3 for beta chain variable domain of TCR clone 112231 (TRBV7-2, TRBJ2-3)
CASSLTGTSTDTQYF

SEQ ID NO: 224463 - protein, 15 aa, Homo sapiens
  CDR3 for alpha chain variable domain of TCR clone 112232 (TRAV38-1, TRAJ37)
RAFIHGSGNTGKLIF

SEQ ID NO: 224464 - protein, 12 aa, Homo sapiens
  CDR3 for beta chain variable domain of TCR clone 112232 (TRBV7-9, TRBJ2-7)
CASSFGSYEQYF

SEQ ID NO: 224465 - protein, 12 aa, Homo sapiens
  CDR3 for alpha chain variable domain of TCR clone 112233 (TRAV12-3, TRAJ17)
CAMTLTGNKITF

SEQ ID NO: 224466 - protein, 15 aa, Homo sapiens
  CDR3 for beta chain variable domain of TCR clone 112233 (TRBV20-1, TRBJ2-7)
CSARDRVSEMDEQYF

SEQ ID NO: 224467 - protein, 16 aa, Homo sapiens
  CDR3 for alpha chain variable domain of TCR clone 112234 (TRAV23/DV6, TRAJ9)
CAASIVGNTGGFKTIF

SEQ ID NO: 224468 - protein, 14 aa, Homo sapiens
  CDR3 for beta chain variable domain of TCR clone 112234 (TRBV9, TRBJ2-7)
CASSVGVGSYEQYF

SEQ ID NO: 224469 - protein, 14 aa, Homo sapiens
  CDR3 for alpha chain variable domain of TCR clone 112235 (TRAV41, TRAJ32)
CCPNYGGATNKLIF

SEQ ID NO: 224470 - protein, 15 aa, Homo sapiens
  CDR3 for beta chain variable domain of TCR clone 112235 (TRBV11-2, TRBJ2-1)
RASSKNRGLIYEQFF

SEQ ID NO: 224471 - protein, 15 aa, Homo sapiens
  CDR3 for alpha chain variable domain of TCR clone 112236 (TRAV26-2, TRAJ16)
CILSLRFSDGQKLLF

SEQ ID NO: 224472 - protein, 13 aa, Homo sapiens
  CDR3 for beta chain variable domain of TCR clone 112236 (TRBV10-3, TRBJ2-7)
CAIRPTEAYEQYL

SEQ ID NO: 224473 - protein, 12 aa, Homo sapiens
  CDR3 for alpha chain variable domain of TCR clone 112237 (TRAV2, TRAJ31)
CAVEDNNARLMF

SEQ ID NO: 224474 - protein, 16 aa, Homo sapiens
  CDR3 for beta chain variable domain of TCR clone 112237 (TRBV10-3, TRBJ2-1)
CSISGVGDGGGGEQFF

SEQ ID NO: 224475 - protein, 13 aa, Homo sapiens
  CDR3 for alpha chain variable domain of TCR clone 112238 (TRAV8-6, TRAJ49)
CAVITNTGNQFYF

SEQ ID NO: 224476 - protein, 14 aa, Homo sapiens
  CDR3 for beta chain variable domain of TCR clone 112238 (TRBV5-1, TRBJ2-7)
CASSKGESLYEQYF

SEQ ID NO: 224477 - protein, 15 aa, Homo sapiens
  CDR3 for alpha chain variable domain of TCR clone 112239 (TRAV2, TRAJ15)
CAVEDRGQAGTALIF

SEQ ID NO: 224478 - protein, 17 aa, Homo sapiens
  CDR3 for beta chain variable domain of TCR clone 112239 (TRBV13, TRBJ2-3)
CASSLSRVAGGRNTQYF

SEQ ID NO: 224479 - protein, 16 aa, Homo sapiens
  CDR3 for alpha chain variable domain of TCR clone 112240 (TRAV17, TRAJ22)
CATGPISSGSARQLTF

SEQ ID NO: 224480 - protein, 15 aa, Homo sapiens
  CDR3 for beta chain variable domain of TCR clone 112240 (TRBV20-1, TRBJ2-7)
CSARDRVSGMDEQYF

SEQ ID NO: 224481 - protein, 19 aa, Homo sapiens
  CDR3 for alpha chain variable domain of TCR clone 112241 (TRAV2, )
CAVEEDIQNPDPVVYQLRD

SEQ ID NO: 224482 - protein, 14 aa, Homo sapiens
  CDR3 for beta chain variable domain of TCR clone 112241 (TRBV19, TRBJ1-2)
CASNPGQAPYGYTF

SEQ ID NO: 224483 - protein, 12 aa, Homo sapiens
  CDR3 for alpha chain variable domain of TCR clone 112242 (TRAV3, TRAJ20)
CAVRDGDYKLSF

SEQ ID NO: 224484 - protein, 18 aa, Homo sapiens
  CDR3 for beta chain variable domain of TCR clone 112242 (TRBV5-1, TRBJ2-7)
CASSSTGGASGYSYEQYF

SEQ ID NO: 224485 - protein, 14 aa, Homo sapiens
  CDR3 for alpha chain variable domain of TCR clone 112243 (TRAV12-3, TRAJ9)
CAMSPNTGVFKTIF

SEQ ID NO: 224486 - protein, 12 aa, Homo sapiens
  CDR3 for beta chain variable domain of TCR clone 112243 (TRBV19, TRBJ1-5)
CASSIAQQPQHF

SEQ ID NO: 224487 - protein, 10 aa, Homo sapiens
  CDR3 for alpha chain variable domain of TCR clone 112244 (TRAV1-2, TRAJ20)
RACNDYKLSF

SEQ ID NO: 224488 - protein, 16 aa, Homo sapiens
  CDR3 for beta chain variable domain of TCR clone 112244 (TRBV20-1, TRBJ2-1)
CSARDLKQGMNNEQFF

SEQ ID NO: 224489 - protein, 14 aa, Homo sapiens
  CDR3 for alpha chain variable domain of TCR clone 112245 (TRAV3, TRAJ6)
CAVRDPWGSYIPTF

SEQ ID NO: 224490 - protein, 16 aa, Homo sapiens
  CDR3 for beta chain variable domain of TCR clone 112245 (TRBV7-3, TRBJ2-2)
CASSLKRGTLSGELFF

SEQ ID NO: 224491 - protein, 13 aa, Homo sapiens
  CDR3 for alpha chain variable domain of TCR clone 112246 (TRAV16, TRAJ22)
SAMLAGSARQLTF

SEQ ID NO: 224492 - protein, 13 aa, Homo sapiens
  CDR3 for beta chain variable domain of TCR clone 112246 (TRBV7-9, TRBJ1-2)
CASSLKQNYGYTF

SEQ ID NO: 224493 - protein, 14 aa, Homo sapiens
  CDR3 for alpha chain variable domain of TCR clone 112247 (TRAV12-3, TRAJ7)
CAMSEIGGNNRLAF

SEQ ID NO: 224494 - protein, 14 aa, Homo sapiens
  CDR3 for beta chain variable domain of TCR clone 112247 (TRBV12-4, TRBJ2-1)
CASSLGSSPLEQFF

SEQ ID NO: 224495 - protein, 12 aa, Homo sapiens
  CDR3 for alpha chain variable domain of TCR clone 112248 (TRAV8-3, TRAJ20)
CAVGANDYKLSF

SEQ ID NO: 224496 - protein, 16 aa, Homo sapiens
  CDR3 for beta chain variable domain of TCR clone 112248 (TRBV2, TRBJ2-1)
CASSVGGSLSYNEQFF

SEQ ID NO: 224497 - protein, 13 aa, Homo sapiens
  CDR3 for alpha chain variable domain of TCR clone 112249 (TRAV21, TRAJ36)
CAVIKTGAINLFF

SEQ ID NO: 224498 - protein, 13 aa, Homo sapiens
  CDR3 for beta chain variable domain of TCR clone 112249 (TRBV29-1, TRBJ2-3)
CSATRGGRDTQYF

SEQ ID NO: 224499 - protein, 14 aa, Homo sapiens
  CDR3 for alpha chain variable domain of TCR clone 112250 (TRAV1-2, TRAJ6)
CAVSLSGGSYIPTF

SEQ ID NO: 224500 - protein, 15 aa, Homo sapiens
  CDR3 for beta chain variable domain of TCR clone 112250 (TRBV27, TRBJ2-1)
CASSNGGGSSNEQFF

SEQ ID NO: 224501 - protein, 14 aa, Homo sapiens
  CDR3 for alpha chain variable domain of TCR clone 112251 (TRAV17, TRAJ31)
CATFLRNNNARLMF

SEQ ID NO: 224502 - protein, 14 aa, Homo sapiens
  CDR3 for beta chain variable domain of TCR clone 112251 (TRBV12-4, TRBJ2-5)
CASSLWQKQETQYF

SEQ ID NO: 224503 - protein, 15 aa, Homo sapiens
  CDR3 for alpha chain variable domain of TCR clone 112252 (TRAV26-1, TRAJ22)
CIVRVSFWFCKATDL

SEQ ID NO: 224504 - protein, 13 aa, Homo sapiens
  CDR3 for beta chain variable domain of TCR clone 112252 (TRBV7-2, TRBJ2-1)
CASSLGVYNEQFF

SEQ ID NO: 224505 - protein, 12 aa, Homo sapiens
  CDR3 for alpha chain variable domain of TCR clone 112253 (TRAV8-3, TRAJ20)
CSVDFNDYKLSF

SEQ ID NO: 224506 - protein, 17 aa, Homo sapiens
  CDR3 for beta chain variable domain of TCR clone 112253 (TRBV7-8, TRBJ2-6)
CASSAGTGGAGANVLTF

SEQ ID NO: 224507 - protein, 15 aa, Homo sapiens
  CDR3 for alpha chain variable domain of TCR clone 112254 (TRAV29/DV5, TRAJ40)
CAASEGTSGTYKYTF

SEQ ID NO: 224508 - protein, 15 aa, Homo sapiens
  CDR3 for beta chain variable domain of TCR clone 112254 (TRBV27, TRBJ1-5)
CASKIQGAGNQPQHF

SEQ ID NO: 224509 - protein, 13 aa, Homo sapiens
  CDR3 for alpha chain variable domain of TCR clone 112255 (TRAV12-1, TRAJ17)
CVVNKAAGNKLTF

SEQ ID NO: 224510 - protein, 16 aa, Homo sapiens
  CDR3 for beta chain variable domain of TCR clone 112255 (TRBV11-2, TRBJ2-2)
CASSLRTGNLIVELFF

SEQ ID NO: 224511 - protein, 14 aa, Homo sapiens
  CDR3 for alpha chain variable domain of TCR clone 112256 (TRAV9-2, TRAJ39)
CALYIYNAGNMLTF

SEQ ID NO: 224512 - protein, 17 aa, Homo sapiens
  CDR3 for beta chain variable domain of TCR clone 112256 (TRBV28, TRBJ1-4)
CASRLPGTGIINEKLFF

SEQ ID NO: 224513 - protein, 11 aa, Homo sapiens
  CDR3 for alpha chain variable domain of TCR clone 112257 (TRAV12-1, TRAJ15)
CVVNAGTALIS

SEQ ID NO: 224514 - protein, 16 aa, Homo sapiens
  CDR3 for beta chain variable domain of TCR clone 112257 (TRBV28, TRBJ2-1)
CASSSRVRDSYNEQFF

SEQ ID NO: 224515 - protein, 18 aa, Homo sapiens
  CDR3 for alpha chain variable domain of TCR clone 112258 (TRAV26-2, TRAJ45)
FILRLWGYSGGGADGLTF

SEQ ID NO: 224516 - protein, 17 aa, Homo sapiens
  CDR3 for beta chain variable domain of TCR clone 112258 (TRBV28, TRBJ2-3)
CASSPTPAGGRVDTQYF

SEQ ID NO: 224517 - protein, 11 aa, Homo sapiens
  CDR3 for alpha chain variable domain of TCR clone 112259 (TRAV13-1, TRAJ16)
CAALDGQKPLF

SEQ ID NO: 224518 - protein, 15 aa, Homo sapiens
  CDR3 for beta chain variable domain of TCR clone 112259 (TRBV20-1, TRBJ2-7)
CSARDRVSGMDEQYF

SEQ ID NO: 224519 - protein, 18 aa, Homo sapiens
  CDR3 for alpha chain variable domain of TCR clone 112260 (TRAV9-2, TRAJ52)
CALSRHNAGGSSYGKLTF

SEQ ID NO: 224520 - protein, 13 aa, Homo sapiens
  CDR3 for beta chain variable domain of TCR clone 112260 (TRBV7-9, TRBJ1-2)
CASSLKQNYGYTF

SEQ ID NO: 224521 - protein, 18 aa, Homo sapiens
  CDR3 for alpha chain variable domain of TCR clone 112261 (TRAV17, TRAJ45)
CATSLDLYSGGGADGRTF

SEQ ID NO: 224522 - protein, 15 aa, Homo sapiens
  CDR3 for beta chain variable domain of TCR clone 112261 (TRBV11-2, TRBJ2-1)
CASSKNRGLIYEQFF

SEQ ID NO: 224523 - protein, 15 aa, Homo sapiens
  CDR3 for alpha chain variable domain of TCR clone 112262 (TRAV12-3, TRAJ6)
CAMSATTGGSYIPTF

SEQ ID NO: 224524 - protein, 13 aa, Homo sapiens
  CDR3 for beta chain variable domain of TCR clone 112262 (TRBV7-9, TRBJ2-1)
CASSWESYNEQFF

SEQ ID NO: 224525 - protein, 13 aa, Homo sapiens
  CDR3 for alpha chain variable domain of TCR clone 112263 (TRAV13-1, TRAJ40)
CAAISPGTYKYIF

SEQ ID NO: 224526 - protein, 13 aa, Homo sapiens
  CDR3 for beta chain variable domain of TCR clone 112263 (TRBV10-3, TRBJ2-7)
RAIRAGGPHEQYF

SEQ ID NO: 224527 - protein, 13 aa, Homo sapiens
  CDR3 for alpha chain variable domain of TCR clone 112264 (TRAV20, TRAJ54)
CAVQAVGAQKLVF

SEQ ID NO: 224528 - protein, 14 aa, Homo sapiens
  CDR3 for beta chain variable domain of TCR clone 112264 (TRBV20-1, TRBJ2-7)
CSAKTGTGGYEQYF

SEQ ID NO: 224529 - protein, 15 aa, Homo sapiens
  CDR3 for alpha chain variable domain of TCR clone 112265 (TRAV13-1, TRAJ43)
CAATPELGGNNDMRS

SEQ ID NO: 224530 - protein, 15 aa, Homo sapiens
  CDR3 for beta chain variable domain of TCR clone 112265 (TRBV10-2, TRBJ2-6)
CASSEQGTGANVLTF

SEQ ID NO: 224531 - protein, 17 aa, Homo sapiens
  CDR3 for alpha chain variable domain of TCR clone 112266 (TRAV3, TRAJ6)
CAVRDGPRAGGSYIPTF

SEQ ID NO: 224532 - protein, 13 aa, Homo sapiens
  CDR3 for beta chain variable domain of TCR clone 112266 (TRBV28, TRBJ1-5)
CASSDRGNQPQHF

SEQ ID NO: 224533 - protein, 14 aa, Homo sapiens
  CDR3 for alpha chain variable domain of TCR clone 112267 (TRAV38-1, TRAJ45)
CAYYSGGGADGLTF

SEQ ID NO: 224534 - protein, 15 aa, Homo sapiens
  CDR3 for beta chain variable domain of TCR clone 112267 (TRBV19, TRBJ1-2)
CASSVGQVLNYGYTF

SEQ ID NO: 224535 - protein, 15 aa, Homo sapiens
  CDR3 for alpha chain variable domain of TCR clone 112268 (TRAV27, TRAJ38)
CAARRNAVNNRKLIW

SEQ ID NO: 224536 - protein, 13 aa, Homo sapiens
  CDR3 for beta chain variable domain of TCR clone 112268 (TRBV12-5, TRBJ2-3)
CASGDRQSDTRYF

SEQ ID NO: 224537 - protein, 11 aa, Homo sapiens
  CDR3 for alpha chain variable domain of TCR clone 112269 (TRAV12-2, TRAJ33)
CAVGRNYQLIW

SEQ ID NO: 224538 - protein, 14 aa, Homo sapiens
  CDR3 for beta chain variable domain of TCR clone 112269 (TRBV6-1, TRBJ2-2)
CASVEHIESGELFF

SEQ ID NO: 224539 - protein, 17 aa, Homo sapiens
  CDR3 for alpha chain variable domain of TCR clone 112270 (TRAV2, TRAJ36)
CAVEDRGNWGKQPLLWD

SEQ ID NO: 224540 - protein, 14 aa, Homo sapiens
  CDR3 for beta chain variable domain of TCR clone 112270 (TRBV7-9, TRBJ2-5)
CASSLDTAQGTQYF

SEQ ID NO: 224541 - protein, 14 aa, Homo sapiens
  CDR3 for alpha chain variable domain of TCR clone 112271 (TRAV13-1, TRAJ40)
CAARSTSGTYKYIF

SEQ ID NO: 224542 - protein, 15 aa, Homo sapiens
  CDR3 for beta chain variable domain of TCR clone 112271 (TRBV18, TRBJ1-5)
CASSEAGGNNQPQHF

SEQ ID NO: 224543 - protein, 13 aa, Homo sapiens
  CDR3 for alpha chain variable domain of TCR clone 112272 (TRAV20, TRAJ34)
CAVRSYNTDKPIF

SEQ ID NO: 224544 - protein, 12 aa, Homo sapiens
  CDR3 for beta chain variable domain of TCR clone 112272 (TRBV11-2, TRBJ2-1)
CASSPGNNEQFF

SEQ ID NO: 224545 - protein, 14 aa, Homo sapiens
  CDR3 for alpha chain variable domain of TCR clone 112273 (TRAV2, TRAJ6)
CAVVFVGGSYIPTF

SEQ ID NO: 224546 - protein, 17 aa, Homo sapiens
  CDR3 for beta chain variable domain of TCR clone 112273 (TRBV3-1, TRBJ2-5)
CASSLGLAGEDQETQYF

SEQ ID NO: 224547 - protein, 15 aa, Homo sapiens
  CDR3 for alpha chain variable domain of TCR clone 112274 (TRAV9-2, TRAJ8)
CALRGLNTGFQKLVF

SEQ ID NO: 224548 - protein, 16 aa, Homo sapiens
  CDR3 for beta chain variable domain of TCR clone 112274 (TRBV4-2, TRBJ2-3)
CASSQELAGDTDTQYF

SEQ ID NO: 224549 - protein, 14 aa, Homo sapiens
  CDR3 for alpha chain variable domain of TCR clone 112275 (TRAV1-2, TRAJ8)
CAVREDTGFQKLVF

SEQ ID NO: 224550 - protein, 15 aa, Homo sapiens
  CDR3 for beta chain variable domain of TCR clone 112275 (TRBV6-3, TRBJ2-7)
CASRSPGTVFYGQYF

SEQ ID NO: 224551 - protein, 16 aa, Homo sapiens
  CDR3 for alpha chain variable domain of TCR clone 112276 (TRAV3, TRAJ21)
CAVRDIERGNFNKFYF

SEQ ID NO: 224552 - protein, 17 aa, Homo sapiens
  CDR3 for beta chain variable domain of TCR clone 112276 (TRBV20-1, TRBJ2-2)
CSASGSGQGGLTGELFF

SEQ ID NO: 224553 - protein, 13 aa, Homo sapiens
  CDR3 for alpha chain variable domain of TCR clone 112277 (TRAV13-2, TRAJ13)
CAARPGGYQKVTF

SEQ ID NO: 224554 - protein, 15 aa, Homo sapiens
  CDR3 for beta chain variable domain of TCR clone 112277 (TRBV11-3, TRBJ2-7)
CASSPGPASSYEQYF

SEQ ID NO: 224555 - protein, 17 aa, Homo sapiens
  CDR3 for alpha chain variable domain of TCR clone 112278 (TRAV3, TRAJ6)
CAVRDGPRAGGSYIPTF

SEQ ID NO: 224556 - protein, 15 aa, Homo sapiens
  CDR3 for beta chain variable domain of TCR clone 112278 (TRBV7-8, TRBJ1-5)
CASSLERRGLGPQHF

SEQ ID NO: 224557 - protein, 14 aa, Homo sapiens
  CDR3 for alpha chain variable domain of TCR clone 112279 (TRAV16, TRAJ39)
CATRRFNAGNMLTF

SEQ ID NO: 224558 - protein, 13 aa, Homo sapiens
  CDR3 for beta chain variable domain of TCR clone 112279 (TRBV7-6, TRBJ1-2)
CASSLVADYGYTF

SEQ ID NO: 224559 - protein, 14 aa, Homo sapiens
  CDR3 for alpha chain variable domain of TCR clone 112280 (TRAV3, TRAJ8)
CAVSLNTGFQKLVF

SEQ ID NO: 224560 - protein, 15 aa, Homo sapiens
  CDR3 for beta chain variable domain of TCR clone 112280 (TRBV20-1, TRBJ2-7)
CSARDRVSGMDEQYF

SEQ ID NO: 224561 - protein, 12 aa, Homo sapiens
  CDR3 for alpha chain variable domain of TCR clone 112281 (TRAV12-3, TRAJ17)
CAMTLTGNKLTF

SEQ ID NO: 224562 - protein, 13 aa, Homo sapiens
  CDR3 for beta chain variable domain of TCR clone 112281 (TRBV15, TRBJ2-7)
CATSTTGHYEQYF

SEQ ID NO: 224563 - protein, 17 aa, Homo sapiens
  CDR3 for alpha chain variable domain of TCR clone 112282 (TRAV13-1, TRAJ10)
CAARIWRGTGGGNKLTF

SEQ ID NO: 224564 - protein, 13 aa, Homo sapiens
  CDR3 for beta chain variable domain of TCR clone 112282 (TRBV20-1, TRBJ1-1)
CSARGGGNTEAFF

SEQ ID NO: 224565 - protein, 14 aa, Homo sapiens
  CDR3 for alpha chain variable domain of TCR clone 112283 (TRAV35, TRAJ10)
CAGILTGGGNKLTF

SEQ ID NO: 224566 - protein, 17 aa, Homo sapiens
  CDR3 for beta chain variable domain of TCR clone 112283 (TRBV20-1, TRBJ2-1)
CSAPPRLAGTRYNEQFF

SEQ ID NO: 224567 - protein, 11 aa, Homo sapiens
  CDR3 for alpha chain variable domain of TCR clone 112284 (TRAV21, TRAJ9)
CAVPGVFKTIF

SEQ ID NO: 224568 - protein, 12 aa, Homo sapiens
  CDR3 for beta chain variable domain of TCR clone 112284 (TRBV20-1, TRBJ2-3)
CSARVGTDTQYF

SEQ ID NO: 224569 - protein, 14 aa, Homo sapiens
  CDR3 for alpha chain variable domain of TCR clone 112285 (TRAV1-2, TRAJ16)
CAVNRFLDGQKLLF

SEQ ID NO: 224570 - protein, 11 aa, Homo sapiens
  CDR3 for beta chain variable domain of TCR clone 112285 (TRBV29-1, TRBJ2-5)
CSEDRTGTQYF

SEQ ID NO: 224571 - protein, 19 aa, Homo sapiens
  CDR3 for alpha chain variable domain of TCR clone 112286 (TRAV2, TRAJ20)
ILQAREADAAVYRDCKLSF

SEQ ID NO: 224572 - protein, 16 aa, Homo sapiens
  CDR3 for beta chain variable domain of TCR clone 112286 (TRBV19, TRBJ2-1)
CASSKAGPSSYNEQFF

SEQ ID NO: 224573 - protein, 15 aa, Homo sapiens
  CDR3 for alpha chain variable domain of TCR clone 112287 (TRAV12-3, TRAJ18)
CAMSAEAQPWGGYTL

SEQ ID NO: 224574 - protein, 13 aa, Homo sapiens
  CDR3 for beta chain variable domain of TCR clone 112287 (TRBV15, TRBJ1-6)
CATSGGLNSPLHF

SEQ ID NO: 224575 - protein, 12 aa, Homo sapiens
  CDR3 for alpha chain variable domain of TCR clone 112288 (TRAV12-3, TRAJ3)
CAIDSSASKIIF

SEQ ID NO: 224576 - protein, 17 aa, Homo sapiens
  CDR3 for beta chain variable domain of TCR clone 112288 (TRBV7-3, TRBJ2-3)
CASSLMKRMRGADTQYF

SEQ ID NO: 224577 - protein, 11 aa, Homo sapiens
  CDR3 for alpha chain variable domain of TCR clone 112289 (TRAV1-2, TRAJ11)
CAVRGYSTLTF

SEQ ID NO: 224578 - protein, 12 aa, Homo sapiens
  CDR3 for beta chain variable domain of TCR clone 112289 (TRBV11-2, TRBJ2-2)
CASSLGGGELFF

SEQ ID NO: 224579 - protein, 13 aa, Homo sapiens
  CDR3 for alpha chain variable domain of TCR clone 112290 (TRAV36/DV7, TRAJ33)
CAVDMYSNYQLIW

SEQ ID NO: 224580 - protein, 16 aa, Homo sapiens
  CDR3 for beta chain variable domain of TCR clone 112290 (TRBV15, TRBJ2-3)
CATRLSGGRAPDTQYF

SEQ ID NO: 224581 - protein, 14 aa, Homo sapiens
  CDR3 for alpha chain variable domain of TCR clone 112291 (TRAV2, TRAJ20)
CAVEDGTNDYKLSL

SEQ ID NO: 224582 - protein, 13 aa, Homo sapiens
  CDR3 for beta chain variable domain of TCR clone 112291 (TRBV7-2, TRBJ1-1)
CASSRNTNTEAFF

SEQ ID NO: 224583 - protein, 12 aa, Homo sapiens
  CDR3 for alpha chain variable domain of TCR clone 112292 (TRAV12-2, TRAJ8)
CAVNTGSQKLVF

SEQ ID NO: 224584 - protein, 15 aa, Homo sapiens
  CDR3 for beta chain variable domain of TCR clone 112292 (TRBV7-8, TRBJ1-5)
CASSLERRGLEPQHF

SEQ ID NO: 224585 - protein, 13 aa, Homo sapiens
  CDR3 for alpha chain variable domain of TCR clone 112293 (TRAV2, TRAJ40)
CAVVTSGTYKYIF

SEQ ID NO: 224586 - protein, 15 aa, Homo sapiens
  CDR3 for beta chain variable domain of TCR clone 112293 (TRBV20-1, TRBJ2-7)
YSARDRVSGMDEQYF

SEQ ID NO: 224587 - protein, 15 aa, Homo sapiens
  CDR3 for alpha chain variable domain of TCR clone 112294 (TRAV12-2, TRAJ8)
CAVREENTGFQKLVF

SEQ ID NO: 224588 - protein, 15 aa, Homo sapiens
  CDR3 for beta chain variable domain of TCR clone 112294 (TRBV28, TRBJ2-4)
CAAGSGTLLMGIQYL

SEQ ID NO: 224589 - protein, 17 aa, Homo sapiens
  CDR3 for alpha chain variable domain of TCR clone 112295 (TRAV2, TRAJ22)
ILQVRGADAAEQRQLTF

SEQ ID NO: 224590 - protein, 16 aa, Homo sapiens
  CDR3 for beta chain variable domain of TCR clone 112295 (TRBV2, TRBJ2-5)
CASSETQGVGEETQYF

SEQ ID NO: 224591 - protein, 16 aa, Homo sapiens
  CDR3 for alpha chain variable domain of TCR clone 112296 (TRAV1-1, TRAJ45)
CAVRAYSGGGADGFTF

SEQ ID NO: 224592 - protein, 13 aa, Homo sapiens
  CDR3 for beta chain variable domain of TCR clone 112296 (TRBV20-1, TRBJ1-2)
CSARGTADYGYTF

SEQ ID NO: 224593 - protein, 16 aa, Homo sapiens
  CDR3 for alpha chain variable domain of TCR clone 112297 (TRAV30, TRAJ24)
CGTEIVDADSWGKFQF

SEQ ID NO: 224594 - protein, 12 aa, Homo sapiens
  CDR3 for beta chain variable domain of TCR clone 112297 (TRBV11-2, TRBJ2-2)
CAGSLGGGELFF

SEQ ID NO: 224595 - protein, 11 aa, Homo sapiens
  CDR3 for alpha chain variable domain of TCR clone 112298 (TRAV12-3, TRAJ43)
CAMSVSNDMRF

SEQ ID NO: 224596 - protein, 12 aa, Homo sapiens
  CDR3 for beta chain variable domain of TCR clone 112298 (TRBV6-3, TRBJ2-7)
CASSLTPYEQYF

SEQ ID NO: 224597 - protein, 14 aa, Homo sapiens
  CDR3 for alpha chain variable domain of TCR clone 112299 (TRAV39, TRAJ54)
CAVELIQGAQKLVF

SEQ ID NO: 224598 - protein, 16 aa, Homo sapiens
  CDR3 for beta chain variable domain of TCR clone 112299 (TRBV3-1, TRBJ2-7)
CASSQGATGVAYEQYF

SEQ ID NO: 224599 - protein, 14 aa, Homo sapiens
  CDR3 for alpha chain variable domain of TCR clone 112300 (TRAV20, TRAJ42)
CAVQAGGSQGNLIF

SEQ ID NO: 224600 - protein, 14 aa, Homo sapiens
  CDR3 for beta chain variable domain of TCR clone 112300 (TRBV28, TRBJ1-2)
CASRIQGAKYGYTF

SEQ ID NO: 224601 - protein, 16 aa, Homo sapiens
  CDR3 for alpha chain variable domain of TCR clone 112301 (TRAV14/DV4, TRAJ53)
CAMREGGGGSNYKLTF

SEQ ID NO: 224602 - protein, 11 aa, Homo sapiens
  CDR3 for beta chain variable domain of TCR clone 112301 (TRBV12-4, TRBJ2-2)
CASSLTGELFF

SEQ ID NO: 224603 - protein, 16 aa, Homo sapiens
  CDR3 for alpha chain variable domain of TCR clone 112302 (TRAV12-2, )
CAVEDIQNPDPAVYQL

SEQ ID NO: 224604 - protein, 14 aa, Homo sapiens
  CDR3 for beta chain variable domain of TCR clone 112302 (TRBV11-2, TRBJ2-5)
CASSLDLGRETQYF

SEQ ID NO: 224605 - protein, 16 aa, Homo sapiens
  CDR3 for alpha chain variable domain of TCR clone 112303 (TRAV35, TRAJ28)
CAGYLYSGDGSYQLTF

SEQ ID NO: 224606 - protein, 16 aa, Homo sapiens
  CDR3 for beta chain variable domain of TCR clone 112303 (TRBV5-1, TRBJ2-1)
CASSHGLAGPQNEQFF

SEQ ID NO: 224607 - protein, 13 aa, Homo sapiens
  CDR3 for alpha chain variable domain of TCR clone 112304 (TRAV3, TRAJ36)
CAVRETGANNLFF

SEQ ID NO: 224608 - protein, 15 aa, Homo sapiens
  CDR3 for beta chain variable domain of TCR clone 112304 (TRBV24-1, TRBJ2-1)
CATSGSGGFYNEQFF

SEQ ID NO: 224609 - protein, 16 aa, Homo sapiens
  CDR3 for alpha chain variable domain of TCR clone 112305 (TRAV26-1, TRAJ22)
CIVRVPSPGSARQLTF

SEQ ID NO: 224610 - protein, 16 aa, Homo sapiens
  CDR3 for beta chain variable domain of TCR clone 112305 (TRBV13, TRBJ2-2)
CASSPRTGEHTGELFF

SEQ ID NO: 224611 - protein, 13 aa, Homo sapiens
  CDR3 for alpha chain variable domain of TCR clone 112306 (TRAV8-3, TRAJ36)
CAVGATGANNLFF

SEQ ID NO: 224612 - protein, 14 aa, Homo sapiens
  CDR3 for beta chain variable domain of TCR clone 112306 (TRBV12-4, TRBJ1-6)
CASNLQGKGSPLHF

SEQ ID NO: 224613 - protein, 14 aa, Homo sapiens
  CDR3 for alpha chain variable domain of TCR clone 112307 (TRAV13-1, TRAJ35)
CAASKGGFGNVLHC

SEQ ID NO: 224614 - protein, 15 aa, Homo sapiens
  CDR3 for beta chain variable domain of TCR clone 112307 (TRBV7-9, TRBJ1-5)
CASSLGDGSNQPQHF

SEQ ID NO: 224615 - protein, 13 aa, Homo sapiens
  CDR3 for alpha chain variable domain of TCR clone 112308 (TRAV23/DV6, TRAJ58)
CAASEIGGSRLAF

SEQ ID NO: 224616 - protein, 14 aa, Homo sapiens
  CDR3 for beta chain variable domain of TCR clone 112308 (TRBV28, TRBJ2-5)
CASSRLAGGETQYF

SEQ ID NO: 224617 - protein, 22 aa, Homo sapiens
  CDR3 for alpha chain variable domain of TCR clone 112309 (TRAV27, TRAJ41)
CAVLTQIPDIQNPDPAVYQLRD

SEQ ID NO: 224618 - protein, 16 aa, Homo sapiens
  CDR3 for beta chain variable domain of TCR clone 112309 (TRBV5-1, TRBJ2-3)
CASSLGLAVYTDTQYF

SEQ ID NO: 224619 - protein, 11 aa, Homo sapiens
  CDR3 for alpha chain variable domain of TCR clone 112310 (TRAV26-1, TRAJ27)
CIDPNAGKSTF

SEQ ID NO: 224620 - protein, 18 aa, Homo sapiens
  CDR3 for beta chain variable domain of TCR clone 112310 (TRBV7-9, TRBJ2-6)
CASSFAGAGISGANVLTF

SEQ ID NO: 224621 - protein, 14 aa, Homo sapiens
  CDR3 for alpha chain variable domain of TCR clone 112311 (TRAV38-1, TRAJ39)
YAFAYNNAGNMLTF

SEQ ID NO: 224622 - protein, 15 aa, Homo sapiens
  CDR3 for beta chain variable domain of TCR clone 112311 (TRBV19, TRBJ2-6)
CASSIGPSGANVLTF

SEQ ID NO: 224623 - protein, 12 aa, Homo sapiens
  CDR3 for alpha chain variable domain of TCR clone 112312 (TRAV27, TRAJ35)
CVGADFGNVLHC

SEQ ID NO: 224624 - protein, 14 aa, Homo sapiens
  CDR3 for beta chain variable domain of TCR clone 112312 (TRBV7-2, TRBJ2-2)
CASRGQGAAGELFF

SEQ ID NO: 224625 - protein, 11 aa, Homo sapiens
  CDR3 for alpha chain variable domain of TCR clone 112313 (TRAV17, TRAJ36)
FAPTGANNLFF

SEQ ID NO: 224626 - protein, 12 aa, Homo sapiens
  CDR3 for beta chain variable domain of TCR clone 112313 (TRBV29-1, TRBJ2-3)
CSVTGGADTQYF

SEQ ID NO: 224627 - protein, 14 aa, Homo sapiens
  CDR3 for alpha chain variable domain of TCR clone 112314 (TRAV23/DV6, TRAJ24)
CAASLSDSWGKLQF

SEQ ID NO: 224628 - protein, 13 aa, Homo sapiens
  CDR3 for beta chain variable domain of TCR clone 112314 (TRBV7-2, TRBJ2-4)
CASSREHANIQYF

SEQ ID NO: 224629 - protein, 15 aa, Homo sapiens
  CDR3 for alpha chain variable domain of TCR clone 112315 (TRAV3, TRAJ30)
CTVRDEYGRDDKIIF

SEQ ID NO: 224630 - protein, 16 aa, Homo sapiens
  CDR3 for beta chain variable domain of TCR clone 112315 (TRBV5-1, TRBJ2-5)
CASSLANHRGRETQYF

SEQ ID NO: 224631 - protein, 16 aa, Homo sapiens
  CDR3 for alpha chain variable domain of TCR clone 112316 (TRAV12-2, TRAJ45)
CAVIFLSGGGADGLAF

SEQ ID NO: 224632 - protein, 19 aa, Homo sapiens
  CDR3 for beta chain variable domain of TCR clone 112316 (TRBV28, TRBJ2-4)
CASSFRPGGPAHSKNIQYF

SEQ ID NO: 224633 - protein, 13 aa, Homo sapiens
  CDR3 for alpha chain variable domain of TCR clone 112317 (TRAV29/DV5, TRAJ31)
CAASRNNNARRMF

SEQ ID NO: 224634 - protein, 12 aa, Homo sapiens
  CDR3 for beta chain variable domain of TCR clone 112317 (TRBV14, TRBJ2-5)
CASSQLKETQYF

SEQ ID NO: 224635 - protein, 15 aa, Homo sapiens
  CDR3 for alpha chain variable domain of TCR clone 112318 (TRAV26-2, TRAJ28)
CILVESGAGSYQLTF

SEQ ID NO: 224636 - protein, 13 aa, Homo sapiens
  CDR3 for beta chain variable domain of TCR clone 112318 (TRBV7-9, TRBJ1-2)
CASSLKQNYGYTF

SEQ ID NO: 224637 - protein, 13 aa, Homo sapiens
  CDR3 for alpha chain variable domain of TCR clone 112319 (TRAV8-6, TRAJ9)
CAVSDTGGFKTIF

SEQ ID NO: 224638 - protein, 14 aa, Homo sapiens
  CDR3 for beta chain variable domain of TCR clone 112319 (TRBV19, TRBJ2-1)
CASPTFVLSGEQFF

SEQ ID NO: 224639 - protein, 12 aa, Homo sapiens
  CDR3 for alpha chain variable domain of TCR clone 112320 (TRAV8-6, TRAJ57)
CAVQGGSEELVF

SEQ ID NO: 224640 - protein, 11 aa, Homo sapiens
  CDR3 for beta chain variable domain of TCR clone 112320 (TRBV19, TRBJ1-1)
CASSIGSEAFF

SEQ ID NO: 224641 - protein, 13 aa, Homo sapiens
  CDR3 for alpha chain variable domain of TCR clone 112321 (TRAV12-1, TRAJ6)
CVVFPGGSYIPTF

SEQ ID NO: 224642 - protein, 16 aa, Homo sapiens
  CDR3 for beta chain variable domain of TCR clone 112321 (TRBV2, TRBJ2-1)
CAGSVGGSLSYNEQFF

SEQ ID NO: 224643 - protein, 14 aa, Homo sapiens
  CDR3 for alpha chain variable domain of TCR clone 112322 (TRAV1-2, TRAJ16)
CDVNRFSDGQKLFF

SEQ ID NO: 224644 - protein, 16 aa, Homo sapiens
  CDR3 for beta chain variable domain of TCR clone 112322 (TRBV3-1, TRBJ2-5)
CASSPGQFNGFGTQYF

SEQ ID NO: 224645 - protein, 15 aa, Homo sapiens
  CDR3 for alpha chain variable domain of TCR clone 112323 (TRAV8-3, TRAJ6)
CAVGEDRGGSHIPTF

SEQ ID NO: 224646 - protein, 14 aa, Homo sapiens
  CDR3 for beta chain variable domain of TCR clone 112323 (TRBV27, TRBJ2-2)
CASLRSPPGGELFF

SEQ ID NO: 224647 - protein, 12 aa, Homo sapiens
  CDR3 for alpha chain variable domain of TCR clone 112324 (TRAV12-3, TRAJ17)
CAMTLTGNKLTF

SEQ ID NO: 224648 - protein, 18 aa, Homo sapiens
  CDR3 for beta chain variable domain of TCR clone 112324 (TRBV4-3, TRBJ1-6)
CASIQETPASSYNSPLHF

SEQ ID NO: 224649 - protein, 16 aa, Homo sapiens
  CDR3 for alpha chain variable domain of TCR clone 112325 (TRAV22, TRAJ45)
CAVERGKRGGADGRTF

SEQ ID NO: 224650 - protein, 13 aa, Homo sapiens
  CDR3 for beta chain variable domain of TCR clone 112325 (TRBV27, TRBJ1-1)
CASSLSIGAEAFF

SEQ ID NO: 224651 - protein, 13 aa, Homo sapiens
  CDR3 for alpha chain variable domain of TCR clone 112326 (TRAV6, TRAJ16)
CALDDSDGQKLPF

SEQ ID NO: 224652 - protein, 16 aa, Homo sapiens
  CDR3 for beta chain variable domain of TCR clone 112326 (TRBV12-4, TRBJ1-6)
CASNLQGKGSPLHLGT

SEQ ID NO: 224653 - protein, 13 aa, Homo sapiens
  CDR3 for alpha chain variable domain of TCR clone 112327 (TRAV8-3, TRAJ44)
CAVVPGTASKLTF

SEQ ID NO: 224654 - protein, 13 aa, Homo sapiens
  CDR3 for beta chain variable domain of TCR clone 112327 (TRBV4-2, TRBJ1-1)
CASSQAGNTEAFF

SEQ ID NO: 224655 - protein, 14 aa, Homo sapiens
  CDR3 for alpha chain variable domain of TCR clone 112328 (TRAV16, TRAJ17)
CAPRIKAAGNKLTF

SEQ ID NO: 224656 - protein, 11 aa, Homo sapiens
  CDR3 for beta chain variable domain of TCR clone 112328 (TRBV12-4, TRBJ2-3)
CASTATDTQYF

SEQ ID NO: 224657 - protein, 13 aa, Homo sapiens
  CDR3 for alpha chain variable domain of TCR clone 112329 (TRAV9-2, TRAJ53)
CALCGGSNYKLTF

SEQ ID NO: 224658 - protein, 17 aa, Homo sapiens
  CDR3 for beta chain variable domain of TCR clone 112329 (TRBV11-2, TRBJ2-1)
CASSLYPPGVEYNEQFF

SEQ ID NO: 224659 - protein, 14 aa, Homo sapiens
  CDR3 for alpha chain variable domain of TCR clone 112330 (TRAV8-1, TRAJ39)
CAVNASNAGNMLTF

SEQ ID NO: 224660 - protein, 13 aa, Homo sapiens
  CDR3 for beta chain variable domain of TCR clone 112330 (TRBV19, TRBJ1-1)
CASTRRGDTEAFF

SEQ ID NO: 224661 - protein, 13 aa, Homo sapiens
  CDR3 for alpha chain variable domain of TCR clone 112331 (TRAV12-3, TRAJ13)
CAMGTGGYQKVTF

SEQ ID NO: 224662 - protein, 14 aa, Homo sapiens
  CDR3 for beta chain variable domain of TCR clone 112331 (TRBV7-2, TRBJ2-5)
CASSKGGELKTQYF

SEQ ID NO: 224663 - protein, 18 aa, Homo sapiens
  CDR3 for alpha chain variable domain of TCR clone 112332 (TRAV26-2, TRAJ45)
CVLRVDKYSGGGADGLTF

SEQ ID NO: 224664 - protein, 16 aa, Homo sapiens
  CDR3 for beta chain variable domain of TCR clone 112332 (TRBV2, TRBJ1-4)
CASNLLQGATNEKLFF

SEQ ID NO: 224665 - protein, 15 aa, Homo sapiens
  CDR3 for alpha chain variable domain of TCR clone 112333 (TRAV3, TRAJ5)
CAVRDLATGRRALTF

SEQ ID NO: 224666 - protein, 14 aa, Homo sapiens
  CDR3 for beta chain variable domain of TCR clone 112333 (TRBV25-1, TRBJ1-4)
CASSGGGQPEKLFF

SEQ ID NO: 224667 - protein, 15 aa, Homo sapiens
  CDR3 for alpha chain variable domain of TCR clone 112334 (TRAV17, TRAJ52)
CATEAGGTSYGKVTF

SEQ ID NO: 224668 - protein, 14 aa, Homo sapiens
  CDR3 for beta chain variable domain of TCR clone 112334 (TRBV28, TRBJ1-5)
CASSLGVLVKPQHF

SEQ ID NO: 224669 - protein, 18 aa, Homo sapiens
  CDR3 for alpha chain variable domain of TCR clone 112335 (TRAV17, TRAJ45)
CATSLDLYSGGGADGLTF

SEQ ID NO: 224670 - protein, 15 aa, Homo sapiens
  CDR3 for beta chain variable domain of TCR clone 112335 (TRBV11-2, TRBJ2-1)
CASSKNRGLIYEQFL

SEQ ID NO: 224671 - protein, 17 aa, Homo sapiens
  CDR3 for alpha chain variable domain of TCR clone 112336 (TRAV13-1, TRAJ31)
CATRDRLMFGDGTQLVV

SEQ ID NO: 224672 - protein, 12 aa, Homo sapiens
  CDR3 for beta chain variable domain of TCR clone 112336 (TRBV7-9, TRBJ2-7)
CASSLEGYEQYF

SEQ ID NO: 224673 - protein, 14 aa, Homo sapiens
  CDR3 for alpha chain variable domain of TCR clone 112337 (TRAV1-2, TRAJ29)
CAVRELTSATPLVF

SEQ ID NO: 224674 - protein, 14 aa, Homo sapiens
  CDR3 for beta chain variable domain of TCR clone 112337 (TRBV7-2, TRBJ2-7)
CASSPKTSFYEQYF

SEQ ID NO: 224675 - protein, 15 aa, Homo sapiens
  CDR3 for alpha chain variable domain of TCR clone 112338 (TRAV21, TRAJ32)
CAVNSYGGATNNLIF

SEQ ID NO: 224676 - protein, 18 aa, Homo sapiens
  CDR3 for beta chain variable domain of TCR clone 112338 (TRBV7-9, TRBJ2-1)
CASSTGLAEGSSYNEQFF

SEQ ID NO: 224677 - protein, 14 aa, Homo sapiens
  CDR3 for alpha chain variable domain of TCR clone 112339 (TRAV35, TRAJ46)
CAGPQKSSGDKLTF

SEQ ID NO: 224678 - protein, 12 aa, Homo sapiens
  CDR3 for beta chain variable domain of TCR clone 112339 (TRBV11-2, TRBJ2-2)
CASSLGGGELFF

SEQ ID NO: 224679 - protein, 14 aa, Homo sapiens
  CDR3 for alpha chain variable domain of TCR clone 112340 (TRAV23/DV6, TRAJ4)
CAANLSGGYNKLIF

SEQ ID NO: 224680 - protein, 13 aa, Homo sapiens
  CDR3 for beta chain variable domain of TCR clone 112340 (TRBV19, TRBJ1-2)
CASSVPGQDGYTF

SEQ ID NO: 224681 - protein, 15 aa, Homo sapiens
  CDR3 for alpha chain variable domain of TCR clone 112341 (TRAV8-3, TRAJ15)
CAVGAPNQAGTALIF

SEQ ID NO: 224682 - protein, 14 aa, Homo sapiens
  CDR3 for beta chain variable domain of TCR clone 112341 (TRBV20-1, TRBJ2-1)
CSAQIGGSANEQFF

SEQ ID NO: 224683 - protein, 14 aa, Homo sapiens
  CDR3 for alpha chain variable domain of TCR clone 112342 (TRAV13-1, TRAJ40)
CAASMTSGTYKYIF

SEQ ID NO: 224684 - protein, 14 aa, Homo sapiens
  CDR3 for beta chain variable domain of TCR clone 112342 (TRBV7-2, TRBJ2-7)
CASSLYPGRYEQYF

SEQ ID NO: 224685 - protein, 14 aa, Homo sapiens
  CDR3 for alpha chain variable domain of TCR clone 112343 (TRAV17, TRAJ54)
CATDANQGAQKLVF

SEQ ID NO: 224686 - protein, 15 aa, Homo sapiens
  CDR3 for beta chain variable domain of TCR clone 112343 (TRBV20-1, TRBJ2-7)
CSARDRASGMDEQYF

SEQ ID NO: 224687 - protein, 23 aa, Homo sapiens
  CDR3 for alpha chain variable domain of TCR clone 112344 (TRAV12-2, TRAJ36)
SLLIRDSQPSDSATLERANNLFF

SEQ ID NO: 224688 - protein, 14 aa, Homo sapiens
  CDR3 for beta chain variable domain of TCR clone 112344 (TRBV25-1, TRBJ1-1)
CASTHLGGNTEAFF

SEQ ID NO: 224689 - protein, 15 aa, Homo sapiens
  CDR3 for alpha chain variable domain of TCR clone 112345 (TRAV38-1, TRAJ37)
CAFLFGSGNTGKLIF

SEQ ID NO: 224690 - protein, 12 aa, Homo sapiens
  CDR3 for beta chain variable domain of TCR clone 112345 (TRBV7-9, TRBJ2-7)
CASSLEGYEQYF

SEQ ID NO: 224691 - protein, 14 aa, Homo sapiens
  CDR3 for alpha chain variable domain of TCR clone 112346 (TRAV17, TRAJ52)
CATDGGTSYGKLTF

SEQ ID NO: 224692 - protein, 14 aa, Homo sapiens
  CDR3 for beta chain variable domain of TCR clone 112346 (TRBV11-2, TRBJ2-3)
CASSRLARTDTQYF

SEQ ID NO: 224693 - protein, 14 aa, Homo sapiens
  CDR3 for alpha chain variable domain of TCR clone 112347 (TRAV35, TRAJ24)
CAGPRRDSWGNLQF

SEQ ID NO: 224694 - protein, 12 aa, Homo sapiens
  CDR3 for beta chain variable domain of TCR clone 112347 (TRBV12-4, TRBJ2-3)
CASSLGQDTQYF

SEQ ID NO: 224695 - protein, 13 aa, Homo sapiens
  CDR3 for alpha chain variable domain of TCR clone 112348 (TRAV23/DV6, TRAJ15)
CAALPAGRNCSDL

SEQ ID NO: 224696 - protein, 14 aa, Homo sapiens
  CDR3 for beta chain variable domain of TCR clone 112348 (TRBV7-9, TRBJ1-2)
CASSRQGANYGYAF

SEQ ID NO: 224697 - protein, 12 aa, Homo sapiens
  CDR3 for alpha chain variable domain of TCR clone 112349 (TRAV12-3, TRAJ17)
CAMTFTGNKLTF

SEQ ID NO: 224698 - protein, 15 aa, Homo sapiens
  CDR3 for beta chain variable domain of TCR clone 112349 (TRBV19, TRBJ2-1)
CASSILGEGRNEQFF

SEQ ID NO: 224699 - protein, 14 aa, Homo sapiens
  CDR3 for alpha chain variable domain of TCR clone 112350 (TRAV2, TRAJ9)
CAVEDRSGGFKTIF

SEQ ID NO: 224700 - protein, 22 aa, Homo sapiens
  CDR3 for beta chain variable domain of TCR clone 112350 (TRBV6-1, TRBJ1-3)
CASVQGGGWKHHIFWRGKLAHC

SEQ ID NO: 224701 - protein, 18 aa, Homo sapiens
  CDR3 for alpha chain variable domain of TCR clone 112351 (TRAV26-1, TRAJ22)
CIVRVALIPSGSARQLTF

SEQ ID NO: 224702 - protein, 13 aa, Homo sapiens
  CDR3 for beta chain variable domain of TCR clone 112351 (TRBV13, TRBJ2-5)
CASSPEVGETQYF

SEQ ID NO: 224703 - protein, 12 aa, Homo sapiens
  CDR3 for alpha chain variable domain of TCR clone 112352 (TRAV12-2, TRAJ21)
CAGRYNFNKFYF

SEQ ID NO: 224704 - protein, 14 aa, Homo sapiens
  CDR3 for beta chain variable domain of TCR clone 112352 (TRBV28, TRBJ2-1)
CASSYYTAYNEQFF

SEQ ID NO: 224705 - protein, 12 aa, Homo sapiens
  CDR3 for alpha chain variable domain of TCR clone 112353 (TRAV12-3, TRAJ17)
CAMTLTGNKLTF

SEQ ID NO: 224706 - protein, 16 aa, Homo sapiens
  CDR3 for beta chain variable domain of TCR clone 112353 (TRBV18, TRBJ2-7)
CASSPGRAGGAYEQYF

SEQ ID NO: 224707 - protein, 15 aa, Homo sapiens
  CDR3 for alpha chain variable domain of TCR clone 112354 (TRAV2, TRAJ21)
CAVEDLTSTNFTLDL

SEQ ID NO: 224708 - protein, 15 aa, Homo sapiens
  CDR3 for beta chain variable domain of TCR clone 112354 (TRBV28, TRBJ2-5)
CASSPGQGSIETQYF

SEQ ID NO: 224709 - protein, 18 aa, Homo sapiens
  CDR3 for alpha chain variable domain of TCR clone 112355 (TRAV35, TRAJ28)
CAGHNYPLSGAGSYQLSF

SEQ ID NO: 224710 - protein, 12 aa, Homo sapiens
  CDR3 for beta chain variable domain of TCR clone 112355 (TRBV7-9, TRBJ1-1)
CASSLEGTEAFF

SEQ ID NO: 224711 - protein, 22 aa, Homo sapiens
  CDR3 for alpha chain variable domain of TCR clone 112356 (TRAV26-1, TRAJ30)
CIVRVRTEMTRSSLEKGHDFIF

SEQ ID NO: 224712 - protein, 18 aa, Homo sapiens
  CDR3 for beta chain variable domain of TCR clone 112356 (TRBV4-1, TRBJ1-5)
CASSQDPQGQGLNQPQHF

SEQ ID NO: 224713 - protein, 15 aa, Homo sapiens
  CDR3 for alpha chain variable domain of TCR clone 112357 (TRAV3, TRAJ20)
CAVRDIKLSDYKLSF

SEQ ID NO: 224714 - protein, 13 aa, Homo sapiens
  CDR3 for beta chain variable domain of TCR clone 112357 (TRBV12-4, TRBJ1-2)
CASSLRQGKGYTF

SEQ ID NO: 224715 - protein, 11 aa, Homo sapiens
  CDR3 for alpha chain variable domain of TCR clone 112358 (TRAV2, TRAJ13)
CASGGYQKVTF

SEQ ID NO: 224716 - protein, 15 aa, Homo sapiens
  CDR3 for beta chain variable domain of TCR clone 112358 (TRBV29-1, TRBJ2-1)
CSGRDRRSSYNEQFF

SEQ ID NO: 224717 - protein, 12 aa, Homo sapiens
  CDR3 for alpha chain variable domain of TCR clone 112359 (TRAV3, TRAJ43)
CAVRDPNNDMRF

SEQ ID NO: 224718 - protein, 15 aa, Homo sapiens
  CDR3 for beta chain variable domain of TCR clone 112359 (TRBV27, TRBJ1-5)
YASSLGTGFDQPQHF

SEQ ID NO: 224719 - protein, 12 aa, Homo sapiens
  CDR3 for alpha chain variable domain of TCR clone 112360 (TRAV30, TRAJ43)
CGTEERGNDMRF

SEQ ID NO: 224720 - protein, 15 aa, Homo sapiens
  CDR3 for beta chain variable domain of TCR clone 112360 (TRBV5-1, TRBJ2-3)
CASSVTSGSTDTQYF

SEQ ID NO: 224721 - protein, 13 aa, Homo sapiens
  CDR3 for alpha chain variable domain of TCR clone 112361 (TRAV36/DV7, TRAJ38)
CVANAGNNRKLIW

SEQ ID NO: 224722 - protein, 14 aa, Homo sapiens
  CDR3 for beta chain variable domain of TCR clone 112361 (TRBV4-1, TRBJ2-2)
CASSQAVNTGELFF

SEQ ID NO: 224723 - protein, 14 aa, Homo sapiens
  CDR3 for alpha chain variable domain of TCR clone 112362 (TRAV8-1, TRAJ5)
CAVRTDTGRRALTF

SEQ ID NO: 224724 - protein, 13 aa, Homo sapiens
  CDR3 for beta chain variable domain of TCR clone 112362 (TRBV5-4, TRBJ1-2)
CASSNRGTYGYTF

SEQ ID NO: 224725 - protein, 13 aa, Homo sapiens
  CDR3 for alpha chain variable domain of TCR clone 112363 (TRAV2, TRAJ40)
CAVVTSVAYKYIF

SEQ ID NO: 224726 - protein, 14 aa, Homo sapiens
  CDR3 for beta chain variable domain of TCR clone 112363 (TRBV19, TRBJ2-1)
CASPTFVLSGEQFF

SEQ ID NO: 224727 - protein, 15 aa, Homo sapiens
  CDR3 for alpha chain variable domain of TCR clone 112364 (TRAV8-4, TRAJ47)
CAVSDPEEFGNKLVF

SEQ ID NO: 224728 - protein, 15 aa, Homo sapiens
  CDR3 for beta chain variable domain of TCR clone 112364 (TRBV11-2, TRBJ2-1)
CASSLGPDSYNEQFF

SEQ ID NO: 224729 - protein, 11 aa, Homo sapiens
  CDR3 for alpha chain variable domain of TCR clone 112365 (TRAV1-2, TRAJ31)
CAVNNNARHMF

SEQ ID NO: 224730 - protein, 15 aa, Homo sapiens
  CDR3 for beta chain variable domain of TCR clone 112365 (TRBV28, TRBJ2-1)
CASSIIAGGRSEQFF

SEQ ID NO: 224731 - protein, 14 aa, Homo sapiens
  CDR3 for alpha chain variable domain of TCR clone 112366 (TRAV12-2, TRAJ40)
CAVKIPSGTYKYIF

SEQ ID NO: 224732 - protein, 20 aa, Homo sapiens
  CDR3 for beta chain variable domain of TCR clone 112366 (TRBV28, TRBJ2-1)
CASTPIGLSPGLAGGNEQFF

SEQ ID NO: 224733 - protein, 15 aa, Homo sapiens
  CDR3 for alpha chain variable domain of TCR clone 112367 (TRAV12-3, TRAJ5)
CAMSGLGPGRRALTF

SEQ ID NO: 224734 - protein, 16 aa, Homo sapiens
  CDR3 for beta chain variable domain of TCR clone 112367 (TRBV20-1, TRBJ2-3)
CSARLHSAGAIDTQYF

SEQ ID NO: 224735 - protein, 12 aa, Homo sapiens
  CDR3 for alpha chain variable domain of TCR clone 112368 (TRAV2, TRAJ26)
CAGSPGRLWSEF

SEQ ID NO: 224736 - protein, 13 aa, Homo sapiens
  CDR3 for beta chain variable domain of TCR clone 112368 (TRBV7-9, TRBJ1-2)
CASSLKQNYGDTF

SEQ ID NO: 224737 - protein, 17 aa, Homo sapiens
  CDR3 for alpha chain variable domain of TCR clone 112369 (TRAV3, TRAJ6)
CAVRDGPRAGGSYIPTF

SEQ ID NO: 224738 - protein, 14 aa, Homo sapiens
  CDR3 for beta chain variable domain of TCR clone 112369 (TRBV13, TRBJ1-1)
CASTVITVNTEAFF

SEQ ID NO: 224739 - protein, 14 aa, Homo sapiens
  CDR3 for alpha chain variable domain of TCR clone 112370 (TRAV1-2, TRAJ16)
CAVNRFSDGQKLLF

SEQ ID NO: 224740 - protein, 11 aa, Homo sapiens
  CDR3 for beta chain variable domain of TCR clone 112370 (TRBV29-1, TRBJ2-5)
CSDDRTGTQYF

SEQ ID NO: 224741 - protein, 14 aa, Homo sapiens
  CDR3 for alpha chain variable domain of TCR clone 112371 (TRAV5, TRAJ4)
CAASFSGGYNRLIF

SEQ ID NO: 224742 - protein, 19 aa, Homo sapiens
  CDR3 for beta chain variable domain of TCR clone 112371 (TRBV2, TRBJ2-7)
CASSDDETSGRANDYEQYF

SEQ ID NO: 224743 - protein, 17 aa, Homo sapiens
  CDR3 for alpha chain variable domain of TCR clone 112372 (TRAV3, TRAJ6)
CAVRDGPRAGGSYIPTF

SEQ ID NO: 224744 - protein, 15 aa, Homo sapiens
  CDR3 for beta chain variable domain of TCR clone 112372 (TRBV20-1, TRBJ1-1)
CSASRDRFLNTEAFF

SEQ ID NO: 224745 - protein, 14 aa, Homo sapiens
  CDR3 for alpha chain variable domain of TCR clone 112373 (TRAV17, TRAJ39)
YATDASGAGNMLTF

SEQ ID NO: 224746 - protein, 15 aa, Homo sapiens
  CDR3 for beta chain variable domain of TCR clone 112373 (TRBV7-3, TRBJ2-2)
CASSETGQGTGELFF

SEQ ID NO: 224747 - protein, 15 aa, Homo sapiens
  CDR3 for alpha chain variable domain of TCR clone 112374 (TRAV21, TRAJ24)
CAAGSSTDSWGKLQF

SEQ ID NO: 224748 - protein, 13 aa, Homo sapiens
  CDR3 for beta chain variable domain of TCR clone 112374 (TRBV11-2, TRBJ2-5)
CASSSTGEETQYF

SEQ ID NO: 224749 - protein, 13 aa, Homo sapiens
  CDR3 for alpha chain variable domain of TCR clone 112375 (TRAV26-1, TRAJ48)
CIVRVVGDEKLTF

SEQ ID NO: 224750 - protein, 19 aa, Homo sapiens
  CDR3 for beta chain variable domain of TCR clone 112375 (TRBV11-3, TRBJ2-2)
CASRTRPGAKTTNTGELFF

SEQ ID NO: 224751 - protein, 13 aa, Homo sapiens
  CDR3 for alpha chain variable domain of TCR clone 112376 (TRAV2, TRAJ20)
CAVEDPSDYKLSF

SEQ ID NO: 224752 - protein, 16 aa, Homo sapiens
  CDR3 for beta chain variable domain of TCR clone 112376 (TRBV25-1, TRBJ2-7)
CASSELTGGGIYEQYF

SEQ ID NO: 224753 - protein, 14 aa, Homo sapiens
  CDR3 for alpha chain variable domain of TCR clone 112377 (TRAV21, TRAJ35)
CAVMPIGFGNVLHC

SEQ ID NO: 224754 - protein, 14 aa, Homo sapiens
  CDR3 for beta chain variable domain of TCR clone 112377 (TRBV7-8, TRBJ2-3)
CASSLEAGTDTQYL

SEQ ID NO: 224755 - protein, 15 aa, Homo sapiens
  CDR3 for alpha chain variable domain of TCR clone 112378 (TRAV3, TRAJ4)
RAVRDGTGGYNKLIF

SEQ ID NO: 224756 - protein, 16 aa, Homo sapiens
  CDR3 for beta chain variable domain of TCR clone 112378 (TRBV27, TRBJ2-2)
CASSSSGVSNTGELFF

SEQ ID NO: 224757 - protein, 14 aa, Homo sapiens
  CDR3 for alpha chain variable domain of TCR clone 112379 (TRAV3, TRAJ26)
CAVRDYNYGQNFFF

SEQ ID NO: 224758 - protein, 15 aa, Homo sapiens
  CDR3 for beta chain variable domain of TCR clone 112379 (TRBV20-1, TRBJ2-5)
CSANPPGRGGETQYF

SEQ ID NO: 224759 - protein, 15 aa, Homo sapiens
  CDR3 for alpha chain variable domain of TCR clone 112380 (TRAV12-1, TRAJ44)
CVVFVNTGTASKLTF

SEQ ID NO: 224760 - protein, 17 aa, Homo sapiens
  CDR3 for beta chain variable domain of TCR clone 112380 (TRBV20-1, TRBJ2-2)
CSASGSGQGGLTGELFF

SEQ ID NO: 224761 - protein, 17 aa, Homo sapiens
  CDR3 for alpha chain variable domain of TCR clone 112381 (TRAV3, TRAJ42)
CAVRDRDYGGSQGNLNF

SEQ ID NO: 224762 - protein, 15 aa, Homo sapiens
  CDR3 for beta chain variable domain of TCR clone 112381 (TRBV6-6, TRBJ2-7)
CASSYSYGGSYEQYF

SEQ ID NO: 224763 - protein, 11 aa, Homo sapiens
  CDR3 for alpha chain variable domain of TCR clone 112382 (TRAV12-1, TRAJ30)
CVVNGQDKIIF

SEQ ID NO: 224764 - protein, 15 aa, Homo sapiens
  CDR3 for beta chain variable domain of TCR clone 112382 (TRBV27, TRBJ2-1)
CASSNGGGSSNEQFF

SEQ ID NO: 224765 - protein, 11 aa, Homo sapiens
  CDR3 for alpha chain variable domain of TCR clone 112383 (TRAV21, TRAJ48)
CAVDGNEKLTF

SEQ ID NO: 224766 - protein, 16 aa, Homo sapiens
  CDR3 for beta chain variable domain of TCR clone 112383 (TRBV12-4, TRBJ1-5)
CASSSGPRGSKQPQHF

SEQ ID NO: 224767 - protein, 14 aa, Homo sapiens
  CDR3 for alpha chain variable domain of TCR clone 112384 (TRAV13-1, TRAJ44)
GAAKATGTASKLTF

SEQ ID NO: 224768 - protein, 17 aa, Homo sapiens
  CDR3 for beta chain variable domain of TCR clone 112384 (TRBV7-3, TRBJ2-3)
CASSLMKRMRGADTQYF

SEQ ID NO: 224769 - protein, 12 aa, Homo sapiens
  CDR3 for alpha chain variable domain of TCR clone 112385 (TRAV4, TRAJ34)
CLVGEGTAKLIF

SEQ ID NO: 224770 - protein, 13 aa, Homo sapiens
  CDR3 for beta chain variable domain of TCR clone 112385 (TRBV2, TRBJ2-7)
CATSMGLVYEQYF

SEQ ID NO: 224771 - protein, 15 aa, Homo sapiens
  CDR3 for alpha chain variable domain of TCR clone 112386 (TRAV3, TRAJ22)
CAVRDRGGSARQLTF

SEQ ID NO: 224772 - protein, 12 aa, Homo sapiens
  CDR3 for beta chain variable domain of TCR clone 112386 (TRBV7-3, TRBJ2-5)
CQQLPGGETQYF

SEQ ID NO: 224773 - protein, 12 aa, Homo sapiens
  CDR3 for alpha chain variable domain of TCR clone 112387 (TRAV27, TRAJ9)
CAGESGGSKTIF

SEQ ID NO: 224774 - protein, 18 aa, Homo sapiens
  CDR3 for beta chain variable domain of TCR clone 112387 (TRBV10-2, TRBJ2-2)
CISAPAVHRQADAGELFF

SEQ ID NO: 224775 - protein, 14 aa, Homo sapiens
  CDR3 for alpha chain variable domain of TCR clone 112388 (TRAV14/DV4, TRAJ47)
CAMREREYGNELVF

SEQ ID NO: 224776 - protein, 15 aa, Homo sapiens
  CDR3 for beta chain variable domain of TCR clone 112388 (TRBV7-2, TRBJ2-3)
CASSSTGLETDTQYF

SEQ ID NO: 224777 - protein, 15 aa, Homo sapiens
  CDR3 for alpha chain variable domain of TCR clone 112389 (TRAV8-3, TRAJ11)
CAVGLLNSGYSTLTF

SEQ ID NO: 224778 - protein, 15 aa, Homo sapiens
  CDR3 for beta chain variable domain of TCR clone 112389 (TRBV13, TRBJ2-1)
CASSLLSGLNNEQSF

SEQ ID NO: 224779 - protein, 13 aa, Homo sapiens
  CDR3 for alpha chain variable domain of TCR clone 112390 (TRAV12-3, TRAJ13)
CAMGTGGYQKFTF

SEQ ID NO: 224780 - protein, 14 aa, Homo sapiens
  CDR3 for beta chain variable domain of TCR clone 112390 (TRBV7-2, TRBJ2-5)
CASSTGGELKTQYF

SEQ ID NO: 224781 - protein, 14 aa, Homo sapiens
  CDR3 for alpha chain variable domain of TCR clone 112391 (TRAV12-2, TRAJ32)
CAHPESGATNKLIF

SEQ ID NO: 224782 - protein, 14 aa, Homo sapiens
  CDR3 for beta chain variable domain of TCR clone 112391 (TRBV4-2, TRBJ2-3)
CASRETRAPGMQYF

SEQ ID NO: 224783 - protein, 17 aa, Homo sapiens
  CDR3 for alpha chain variable domain of TCR clone 112392 (TRAV23/DV6, TRAJ57)
CSASSTLSQGGSEKLVF

SEQ ID NO: 224784 - protein, 14 aa, Homo sapiens
  CDR3 for beta chain variable domain of TCR clone 112392 (TRBV7-8, TRBJ2-1)
CASSSQGTYNEQFF

SEQ ID NO: 224785 - protein, 12 aa, Homo sapiens
  CDR3 for alpha chain variable domain of TCR clone 112393 (TRAV16, TRAJ10)
CSRTGGGNKLTF

SEQ ID NO: 224786 - protein, 16 aa, Homo sapiens
  CDR3 for beta chain variable domain of TCR clone 112393 (TRBV5-4, TRBJ2-3)
CASQQPGAGGADTQYF

SEQ ID NO: 224787 - protein, 15 aa, Homo sapiens
  CDR3 for alpha chain variable domain of TCR clone 112394 (TRAV12-1, TRAJ9)
CVVSFGDTGGFKTIF

SEQ ID NO: 224788 - protein, 15 aa, Homo sapiens
  CDR3 for beta chain variable domain of TCR clone 112394 (TRBV2, TRBJ2-1)
CASSEEREGDNEQFF

SEQ ID NO: 224789 - protein, 14 aa, Homo sapiens
  CDR3 for alpha chain variable domain of TCR clone 112395 (TRAV12-1, TRAJ12)
CVVIAMDSSYKLIF

SEQ ID NO: 224790 - protein, 12 aa, Homo sapiens
  CDR3 for beta chain variable domain of TCR clone 112395 (TRBV11-2, TRBJ2-2)
CASSLGGGELFF

SEQ ID NO: 224791 - protein, 12 aa, Homo sapiens
  CDR3 for alpha chain variable domain of TCR clone 112396 (TRAV13-1, TRAJ9)
CASHTGGFKTIF

SEQ ID NO: 224792 - protein, 18 aa, Homo sapiens
  CDR3 for beta chain variable domain of TCR clone 112396 (TRBV11-2, TRBJ2-3)
CASSLGGASRGAPNTQYL

SEQ ID NO: 224793 - protein, 12 aa, Homo sapiens
  CDR3 for alpha chain variable domain of TCR clone 112397 (TRAV21, TRAJ39)
CAADNACNMLTF

SEQ ID NO: 224794 - protein, 15 aa, Homo sapiens
  CDR3 for beta chain variable domain of TCR clone 112397 (TRBV27, TRBJ2-1)
CASSNGGGSSNEQFF

SEQ ID NO: 224795 - protein, 13 aa, Homo sapiens
  CDR3 for alpha chain variable domain of TCR clone 112398 (TRAV35, TRAJ43)
CAGYPYNNNDMRF

SEQ ID NO: 224796 - protein, 15 aa, Homo sapiens
  CDR3 for beta chain variable domain of TCR clone 112398 (TRBV25-1, TRBJ1-4)
CASSKRLATNEKLFF

SEQ ID NO: 224797 - protein, 15 aa, Homo sapiens
  CDR3 for alpha chain variable domain of TCR clone 112399 (TRAV8-4, TRAJ3)
CAVTGGNLVQQCFQD

SEQ ID NO: 224798 - protein, 16 aa, Homo sapiens
  CDR3 for beta chain variable domain of TCR clone 112399 (TRBV4-2, TRBJ1-1)
CASSQAGFGMNTEAFF

SEQ ID NO: 224799 - protein, 14 aa, Homo sapiens
  CDR3 for alpha chain variable domain of TCR clone 112400 (TRAV12-3, TRAJ10)
SHPPLTGGGNKLTF

SEQ ID NO: 224800 - protein, 17 aa, Homo sapiens
  CDR3 for beta chain variable domain of TCR clone 112400 (TRBV13, TRBJ2-3)
CASSLSRVAGGRNTQYF

SEQ ID NO: 224801 - protein, 14 aa, Homo sapiens
  CDR3 for alpha chain variable domain of TCR clone 112401 (TRAV12-2, TRAJ13)
CAVKETGGYQKVTF

SEQ ID NO: 224802 - protein, 15 aa, Homo sapiens
  CDR3 for beta chain variable domain of TCR clone 112401 (TRBV9, TRBJ1-6)
CASSVAGTGDSPLHF

SEQ ID NO: 224803 - protein, 14 aa, Homo sapiens
  CDR3 for alpha chain variable domain of TCR clone 112402 (TRAV8-6, TRAJ53)
CAALVLGSNYKLTF

SEQ ID NO: 224804 - protein, 19 aa, Homo sapiens
  CDR3 for beta chain variable domain of TCR clone 112402 (TRBV25-1, TRBJ2-2)
CAILVYRVDRGRKTGELFF

SEQ ID NO: 224805 - protein, 15 aa, Homo sapiens
  CDR3 for alpha chain variable domain of TCR clone 112403 (TRAV26-1, TRAJ13)
CIVRHEAGGYQKVTF

SEQ ID NO: 224806 - protein, 16 aa, Homo sapiens
  CDR3 for beta chain variable domain of TCR clone 112403 (TRBV7-3, TRBJ2-2)
CASSLKRGTLSGELFF

SEQ ID NO: 224807 - protein, 13 aa, Homo sapiens
  CDR3 for alpha chain variable domain of TCR clone 112404 (TRAV35, TRAJ22)
CAGLSGSARQLTF

SEQ ID NO: 224808 - protein, 16 aa, Homo sapiens
  CDR3 for beta chain variable domain of TCR clone 112404 (TRBV7-9, TRBJ2-1)
CASSLVLMGQGNEQFF

SEQ ID NO: 224809 - protein, 13 aa, Homo sapiens
  CDR3 for alpha chain variable domain of TCR clone 112405 (TRAV12-3, TRAJ40)
CAMSDSGTYKYIL

SEQ ID NO: 224810 - protein, 22 aa, Homo sapiens
  CDR3 for beta chain variable domain of TCR clone 112405 (TRBV14, TRBJ1-5)
CASSQDGVTPYLPPIGNQPQHF

SEQ ID NO: 224811 - protein, 16 aa, Homo sapiens
  CDR3 for alpha chain variable domain of TCR clone 112406 (TRAV3, TRAJ37)
CAVRPHGSGNTGKLIF

SEQ ID NO: 224812 - protein, 18 aa, Homo sapiens
  CDR3 for beta chain variable domain of TCR clone 112406 (TRBV7-9, TRBJ2-7)
CASSLTTSGSRTWYEQYF

SEQ ID NO: 224813 - protein, 16 aa, Homo sapiens
  CDR3 for alpha chain variable domain of TCR clone 112407 (TRAV30, TRAJ24)
CGTAIVDADSWGKFQF

SEQ ID NO: 224814 - protein, 13 aa, Homo sapiens
  CDR3 for beta chain variable domain of TCR clone 112407 (TRBV12-4, TRBJ2-7)
CASSPTETYEQYF

SEQ ID NO: 224815 - protein, 13 aa, Homo sapiens
  CDR3 for alpha chain variable domain of TCR clone 112408 (TRAV2, TRAJ15)
CAVASQAGTALIF

SEQ ID NO: 224816 - protein, 14 aa, Homo sapiens
  CDR3 for beta chain variable domain of TCR clone 112408 (TRBV11-2, TRBJ2-3)
CASSRLARTDTQYF

SEQ ID NO: 224817 - protein, 18 aa, Homo sapiens
  CDR3 for alpha chain variable domain of TCR clone 112409 (TRAV26-2, TRAJ45)
CILRVDKYSGGGADGLTS

SEQ ID NO: 224818 - protein, 16 aa, Homo sapiens
  CDR3 for beta chain variable domain of TCR clone 112409 (TRBV2, TRBJ1-4)
CASNLLQGATNEKLFF

SEQ ID NO: 224819 - protein, 15 aa, Homo sapiens
  CDR3 for alpha chain variable domain of TCR clone 112410 (TRAV8-2, TRAJ40)
CVVSDRGSGTYKYIF

SEQ ID NO: 224820 - protein, 16 aa, Homo sapiens
  CDR3 for beta chain variable domain of TCR clone 112410 (TRBV20-1, TRBJ1-4)
CSAPGQGLLTNEKLFF

SEQ ID NO: 224821 - protein, 15 aa, Homo sapiens
  CDR3 for alpha chain variable domain of TCR clone 112411 (TRAV26-1, TRAJ44)
CIVRANTGTASKLTF

SEQ ID NO: 224822 - protein, 16 aa, Homo sapiens
  CDR3 for beta chain variable domain of TCR clone 112411 (TRBV7-7, TRBJ2-1)
CACSLASGTSYNEQFF

SEQ ID NO: 224823 - protein, 15 aa, Homo sapiens
  CDR3 for alpha chain variable domain of TCR clone 112412 (TRAV14/DV4, TRAJ46)
CAMREKKSSGDKLTF

SEQ ID NO: 224824 - protein, 13 aa, Homo sapiens
  CDR3 for beta chain variable domain of TCR clone 112412 (TRBV20-1, TRBJ2-5)
CSARESFQETQYF

SEQ ID NO: 224825 - protein, 14 aa, Homo sapiens
  CDR3 for alpha chain variable domain of TCR clone 112413 (TRAV8-2, TRAJ4)
CVVSPSGGYNKLIF

SEQ ID NO: 224826 - protein, 15 aa, Homo sapiens
  CDR3 for beta chain variable domain of TCR clone 112413 (TRBV6-3, TRBJ2-7)
CASSSPGTVFYEQYF

SEQ ID NO: 224827 - protein, 15 aa, Homo sapiens
  CDR3 for alpha chain variable domain of TCR clone 112414 (TRAV3, TRAJ17)
CAVSPKEAAGNKLTF

SEQ ID NO: 224828 - protein, 12 aa, Homo sapiens
  CDR3 for beta chain variable domain of TCR clone 112414 (TRBV7-9, TRBJ1-6)
CASSLMTSPLYF

SEQ ID NO: 224829 - protein, 13 aa, Homo sapiens
  CDR3 for alpha chain variable domain of TCR clone 112415 (TRAV21, TRAJ27)
CAARPGNAGKSTF

SEQ ID NO: 224830 - protein, 16 aa, Homo sapiens
  CDR3 for beta chain variable domain of TCR clone 112415 (TRBV7-9, TRBJ2-1)
CASSPVLASGTVEQFF

SEQ ID NO: 224831 - protein, 16 aa, Homo sapiens
  CDR3 for alpha chain variable domain of TCR clone 112416 (TRAV1-2, TRAJ10)
CAVRDQGGGGGNKLTF

SEQ ID NO: 224832 - protein, 15 aa, Homo sapiens
  CDR3 for beta chain variable domain of TCR clone 112416 (TRBV4-3, TRBJ2-7)
CASSQDLVSSYEQYF

SEQ ID NO: 224833 - protein, 11 aa, Homo sapiens
  CDR3 for alpha chain variable domain of TCR clone 112417 (TRAV12-1, TRAJ34)
CVVNKGRELIF

SEQ ID NO: 224834 - protein, 11 aa, Homo sapiens
  CDR3 for beta chain variable domain of TCR clone 112417 (TRBV29-1, TRBJ2-5)
CSEDRTGTQYF

SEQ ID NO: 224835 - protein, 10 aa, Homo sapiens
  CDR3 for alpha chain variable domain of TCR clone 112418 (TRAV8-4, TRAJ43)
CVVSADDMRF

SEQ ID NO: 224836 - protein, 15 aa, Homo sapiens
  CDR3 for beta chain variable domain of TCR clone 112418 (TRBV5-1, TRBJ2-3)
CASSVTSGSTDTQYF

SEQ ID NO: 224837 - protein, 11 aa, Homo sapiens
  CDR3 for alpha chain variable domain of TCR clone 112419 (TRAV21, TRAJ39)
LLVNAGNMLTL

SEQ ID NO: 224838 - protein, 15 aa, Homo sapiens
  CDR3 for beta chain variable domain of TCR clone 112419 (TRBV29-1, TRBJ2-1)
CSGRDRKSSYNEQFF

SEQ ID NO: 224839 - protein, 13 aa, Homo sapiens
  CDR3 for alpha chain variable domain of TCR clone 112420 (TRAV2, TRAJ40)
CAVVTSGTYKYIF

SEQ ID NO: 224840 - protein, 16 aa, Homo sapiens
  CDR3 for beta chain variable domain of TCR clone 112420 (TRBV7-3, TRBJ2-1)
CASSLEGDRSYNEQFF

SEQ ID NO: 224841 - protein, 14 aa, Homo sapiens
  CDR3 for alpha chain variable domain of TCR clone 112421 (TRAV30, TRAJ50)
CGTALKTSYDKVIF

SEQ ID NO: 224842 - protein, 13 aa, Homo sapiens
  CDR3 for beta chain variable domain of TCR clone 112421 (TRBV4-2, TRBJ1-1)
CASSQAGNTEAFF

SEQ ID NO: 224843 - protein, 14 aa, Homo sapiens
  CDR3 for alpha chain variable domain of TCR clone 112422 (TRAV12-2, TRAJ40)
CAVKIPSGTYKYIF

SEQ ID NO: 224844 - protein, 11 aa, Homo sapiens
  CDR3 for beta chain variable domain of TCR clone 112422 (TRBV6-1, TRBJ2-1)
CAGISSNEQFF

SEQ ID NO: 224845 - protein, 12 aa, Homo sapiens
  CDR3 for alpha chain variable domain of TCR clone 112423 (TRAV12-3, TRAJ17)
CAMTLTGNKLTF

SEQ ID NO: 224846 - protein, 13 aa, Homo sapiens
  CDR3 for beta chain variable domain of TCR clone 112423 (TRBV11-1, TRBJ2-1)
CASRTLGVGEQFF

SEQ ID NO: 224847 - protein, 13 aa, Homo sapiens
  CDR3 for alpha chain variable domain of TCR clone 112424 (TRAV12-1, TRAJ33)
CGDAPDSNYQLIW

SEQ ID NO: 224848 - protein, 16 aa, Homo sapiens
  CDR3 for beta chain variable domain of TCR clone 112424 (TRBV19, TRBJ2-3)
CASSPGAASRTDTQYF

SEQ ID NO: 224849 - protein, 11 aa, Homo sapiens
  CDR3 for alpha chain variable domain of TCR clone 112425 (TRAV2, TRAJ33)
CAVESNYQLIW

SEQ ID NO: 224850 - protein, 17 aa, Homo sapiens
  CDR3 for beta chain variable domain of TCR clone 112425 (TRBV25-1, TRBJ2-7)
CASSDARVVFSSYEQYF

SEQ ID NO: 224851 - protein, 13 aa, Homo sapiens
  CDR3 for alpha chain variable domain of TCR clone 112426 (TRAV1-1, TRAJ9)
CAAINTGGFKTIF

SEQ ID NO: 224852 - protein, 14 aa, Homo sapiens
  CDR3 for beta chain variable domain of TCR clone 112426 (TRBV20-1, TRBJ2-1)
CSAQIGGSANEQFF

SEQ ID NO: 224853 - protein, 12 aa, Homo sapiens
  CDR3 for alpha chain variable domain of TCR clone 112427 (TRAV3, TRAJ27)
CAVRDKAGKLTF

SEQ ID NO: 224854 - protein, 13 aa, Homo sapiens
  CDR3 for beta chain variable domain of TCR clone 112427 (TRBV6-5, TRBJ2-5)
CASSPQGGETQYF

SEQ ID NO: 224855 - protein, 11 aa, Homo sapiens
  CDR3 for alpha chain variable domain of TCR clone 112428 (TRAV21, TRAJ9)
CAMPGGFKTIF

SEQ ID NO: 224856 - protein, 17 aa, Homo sapiens
  CDR3 for beta chain variable domain of TCR clone 112428 (TRBV7-9, TRBJ2-5)
CATSGGARDPVLRARHA

SEQ ID NO: 224857 - protein, 16 aa, Homo sapiens
  CDR3 for alpha chain variable domain of TCR clone 112429 (TRAV3, TRAJ10)
CAVRDMRAGGGNKLTF

SEQ ID NO: 224858 - protein, 13 aa, Homo sapiens
  CDR3 for beta chain variable domain of TCR clone 112429 (TRBV7-6, TRBJ2-3)
CASSLRSDNTQYF

SEQ ID NO: 224859 - protein, 14 aa, Homo sapiens
  CDR3 for alpha chain variable domain of TCR clone 112430 (TRAV1-2, TRAJ8)
CAVREDTGFQKLVF

SEQ ID NO: 224860 - protein, 13 aa, Homo sapiens
  CDR3 for beta chain variable domain of TCR clone 112430 (TRBV2, TRBJ1-1)
CARNPTGGSHAFF

SEQ ID NO: 224861 - protein, 12 aa, Homo sapiens
  CDR3 for alpha chain variable domain of TCR clone 112431 (TRAV16, TRAJ10)
CSRTGGGNKLTF

SEQ ID NO: 224862 - protein, 13 aa, Homo sapiens
  CDR3 for beta chain variable domain of TCR clone 112431 (TRBV19, TRBJ2-2)
CASSIWSTGELFF

SEQ ID NO: 224863 - protein, 15 aa, Homo sapiens
  CDR3 for alpha chain variable domain of TCR clone 112432 (TRAV12-2, TRAJ53)
CAVNGGGGSNYKLTF

SEQ ID NO: 224864 - protein, 16 aa, Homo sapiens
  CDR3 for beta chain variable domain of TCR clone 112432 (TRBV7-9, TRBJ2-3)
CASSFSVAGGTDTQYF

SEQ ID NO: 224865 - protein, 11 aa, Homo sapiens
  CDR3 for alpha chain variable domain of TCR clone 112433 (TRAV8-3, TRAJ49)
CAVGGGNQFYF

SEQ ID NO: 224866 - protein, 13 aa, Homo sapiens
  CDR3 for beta chain variable domain of TCR clone 112433 (TRBV7-9, TRBJ2-3)
CASSPGSTDTQYF

SEQ ID NO: 224867 - protein, 13 aa, Homo sapiens
  CDR3 for alpha chain variable domain of TCR clone 112434 (TRAV13-2, TRAJ13)
CADLSGGYQKVTF

SEQ ID NO: 224868 - protein, 15 aa, Homo sapiens
  CDR3 for beta chain variable domain of TCR clone 112434 (TRBV19, TRBJ1-1)
CASSIGGGLNTEAFF

SEQ ID NO: 224869 - protein, 12 aa, Homo sapiens
  CDR3 for alpha chain variable domain of TCR clone 112435 (TRAV12-2, TRAJ8)
CAVNTGFQELVF

SEQ ID NO: 224870 - protein, 15 aa, Homo sapiens
  CDR3 for beta chain variable domain of TCR clone 112435 (TRBV7-8, TRBJ1-5)
CASSLERRGLEPQHF

SEQ ID NO: 224871 - protein, 12 aa, Homo sapiens
  CDR3 for alpha chain variable domain of TCR clone 112436 (TRAV13-2, TRAJ39)
CAENSERIMLTF

SEQ ID NO: 224872 - protein, 14 aa, Homo sapiens
  CDR3 for beta chain variable domain of TCR clone 112436 (TRBV20-1, TRBJ1-1)
CSAMGGTANTEAFF

SEQ ID NO: 224873 - protein, 12 aa, Homo sapiens
  CDR3 for alpha chain variable domain of TCR clone 112437 (TRAV16, TRAJ10)
CSRTGGGNKLTF

SEQ ID NO: 224874 - protein, 14 aa, Homo sapiens
  CDR3 for beta chain variable domain of TCR clone 112437 (TRBV19, TRBJ2-1)
CASPTLVLSGEQFF

SEQ ID NO: 224875 - protein, 14 aa, Homo sapiens
  CDR3 for alpha chain variable domain of TCR clone 112438 (TRAV3, TRAJ9)
CAVRGNTGGFKTIF

SEQ ID NO: 224876 - protein, 12 aa, Homo sapiens
  CDR3 for beta chain variable domain of TCR clone 112438 (TRBV11-2, TRBJ2-1)
CASSPGNNEQFF

SEQ ID NO: 224877 - protein, 13 aa, Homo sapiens
  CDR3 for alpha chain variable domain of TCR clone 112439 (TRAV4, TRAJ42)
CLVGGGSKGNLIF

SEQ ID NO: 224878 - protein, 16 aa, Homo sapiens
  CDR3 for beta chain variable domain of TCR clone 112439 (TRBV5-1, TRBJ2-3)
CASSLQGRVGADTQYF

SEQ ID NO: 224879 - protein, 11 aa, Homo sapiens
  CDR3 for alpha chain variable domain of TCR clone 112440 (TRAV17, TRAJ9)
CATTGGFKTIF

SEQ ID NO: 224880 - protein, 13 aa, Homo sapiens
  CDR3 for beta chain variable domain of TCR clone 112440 (TRBV2, TRBJ2-7)
CASSVGGSGEQYF

SEQ ID NO: 224881 - protein, 14 aa, Homo sapiens
  CDR3 for alpha chain variable domain of TCR clone 112441 (TRAV16, TRAJ17)
CDLSGRAAGNKLTF

SEQ ID NO: 224882 - protein, 15 aa, Homo sapiens
  CDR3 for beta chain variable domain of TCR clone 112441 (TRBV3-1, TRBJ1-2)
CASSPTRLPEGGYTF

SEQ ID NO: 224883 - protein, 14 aa, Homo sapiens
  CDR3 for alpha chain variable domain of TCR clone 112442 (TRAV38-2/DV8, TRAJ40)
CAYRRISGTYKYIF

SEQ ID NO: 224884 - protein, 15 aa, Homo sapiens
  CDR3 for beta chain variable domain of TCR clone 112442 (TRBV12-4, TRBJ2-5)
CASSPPTGLQETQYF

SEQ ID NO: 224885 - protein, 14 aa, Homo sapiens
  CDR3 for alpha chain variable domain of TCR clone 112443 (TRAV13-2, TRAJ43)
CAEIPTYNNNDMRF

SEQ ID NO: 224886 - protein, 13 aa, Homo sapiens
  CDR3 for beta chain variable domain of TCR clone 112443 (TRBV7-3, TRBJ1-1)
CASSQDWGAEAFF

SEQ ID NO: 224887 - protein, 14 aa, Homo sapiens
  CDR3 for alpha chain variable domain of TCR clone 112444 (TRAV12-3, TRAJ35)
CAMSLIGFGNVLHC

SEQ ID NO: 224888 - protein, 12 aa, Homo sapiens
  CDR3 for beta chain variable domain of TCR clone 112444 (TRBV12-4, TRBJ1-1)
CASSVAGLEAFF

SEQ ID NO: 224889 - protein, 12 aa, Homo sapiens
  CDR3 for alpha chain variable domain of TCR clone 112445 (TRAV13-1, TRAJ40)
CAASWVTYKYIF

SEQ ID NO: 224890 - protein, 15 aa, Homo sapiens
  CDR3 for beta chain variable domain of TCR clone 112445 (TRBV7-8, TRBJ2-1)
CASSSRLAAYNEQFF

SEQ ID NO: 224891 - protein, 14 aa, Homo sapiens
  CDR3 for alpha chain variable domain of TCR clone 112446 (TRAV9-2, TRAJ39)
CALYIYNAGNMLTF

SEQ ID NO: 224892 - protein, 12 aa, Homo sapiens
  CDR3 for beta chain variable domain of TCR clone 112446 (TRBV2, TRBJ2-7)
CASSDPDYEQYF

SEQ ID NO: 224893 - protein, 12 aa, Homo sapiens
  CDR3 for alpha chain variable domain of TCR clone 112447 (TRAV2, TRAJ33)
CAVPDSNYQLIW

SEQ ID NO: 224894 - protein, 14 aa, Homo sapiens
  CDR3 for beta chain variable domain of TCR clone 112447 (TRBV25-1, TRBJ1-1)
CASTHLGGNTEAFF

SEQ ID NO: 224895 - protein, 13 aa, Homo sapiens
  CDR3 for alpha chain variable domain of TCR clone 112448 (TRAV2, TRAJ40)
CAVVTSGTYKYIF

SEQ ID NO: 224896 - protein, 13 aa, Homo sapiens
  CDR3 for beta chain variable domain of TCR clone 112448 (TRBV12-4, TRBJ2-5)
CASRLAVQETQYF

SEQ ID NO: 224897 - protein, 13 aa, Homo sapiens
  CDR3 for alpha chain variable domain of TCR clone 112449 (TRAV12-2, TRAJ20)
CAVYPSNDYKLSF

SEQ ID NO: 224898 - protein, 15 aa, Homo sapiens
  CDR3 for beta chain variable domain of TCR clone 112449 (TRBV27, TRBJ2-1)
CASSNGGGSSNEQFF

SEQ ID NO: 224899 - protein, 14 aa, Homo sapiens
  CDR3 for alpha chain variable domain of TCR clone 112450 (TRAV1-2, TRAJ27)
CAPAEYTNAGKSTF

SEQ ID NO: 224900 - protein, 18 aa, Homo sapiens
  CDR3 for beta chain variable domain of TCR clone 112450 (TRBV28, TRBJ1-2)
CASRQQQGKSGSNYGYTF

SEQ ID NO: 224901 - protein, 14 aa, Homo sapiens
  CDR3 for alpha chain variable domain of TCR clone 112451 (TRAV12-2, TRAJ40)
CAVKIPSGTYKYIF

SEQ ID NO: 224902 - protein, 16 aa, Homo sapiens
  CDR3 for beta chain variable domain of TCR clone 112451 (TRBV12-4, TRBJ2-7)
CASSPEGQGSSYEQYF

SEQ ID NO: 224903 - protein, 15 aa, Homo sapiens
  CDR3 for alpha chain variable domain of TCR clone 112452 (TRAV17, TRAJ13)
CATAAGSGGYQKVTF

SEQ ID NO: 224904 - protein, 17 aa, Homo sapiens
  CDR3 for beta chain variable domain of TCR clone 112452 (TRBV11-2, TRBJ2-1)
CASSLYPPGVEYNEQFF

SEQ ID NO: 224905 - protein, 15 aa, Homo sapiens
  CDR3 for alpha chain variable domain of TCR clone 112453 (TRAV25, TRAJ52)
CAGRPGGTSYGKLTF

SEQ ID NO: 224906 - protein, 11 aa, Homo sapiens
  CDR3 for beta chain variable domain of TCR clone 112453 (TRBV11-2, TRBJ1-1)
CASSINTEAFF

SEQ ID NO: 224907 - protein, 13 aa, Homo sapiens
  CDR3 for alpha chain variable domain of TCR clone 112454 (TRAV16, TRAJ31)
CALSAHNNARLMF

SEQ ID NO: 224908 - protein, 17 aa, Homo sapiens
  CDR3 for beta chain variable domain of TCR clone 112454 (TRBV12-4, TRBJ2-1)
CASSPGLAGGRINEQFF

SEQ ID NO: 224909 - protein, 17 aa, Homo sapiens
  CDR3 for alpha chain variable domain of TCR clone 112455 (TRAV3, TRAJ6)
CAVRDGPRAGGSYIPTF

SEQ ID NO: 224910 - protein, 13 aa, Homo sapiens
  CDR3 for beta chain variable domain of TCR clone 112455 (TRBV27, TRBJ2-1)
RASRTLGLGEQFF

SEQ ID NO: 224911 - protein, 10 aa, Homo sapiens
  CDR3 for alpha chain variable domain of TCR clone 112456 (TRAV1-2, TRAJ20)
CALNDYKLSF

SEQ ID NO: 224912 - protein, 15 aa, Homo sapiens
  CDR3 for beta chain variable domain of TCR clone 112456 (TRBV2, TRBJ2-7)
CASSGDGRGRYEQYF

SEQ ID NO: 224913 - protein, 12 aa, Homo sapiens
  CDR3 for alpha chain variable domain of TCR clone 112457 (TRAV21, TRAJ13)
PGPSGGYQNVTF

SEQ ID NO: 224914 - protein, 15 aa, Homo sapiens
  CDR3 for beta chain variable domain of TCR clone 112457 (TRBV27, TRBJ2-5)
CASSLYPRGGETQYF

SEQ ID NO: 224915 - protein, 18 aa, Homo sapiens
  CDR3 for alpha chain variable domain of TCR clone 112458 (TRAV20, TRAJ4)
CAVQPYYMFSGGYNKLIF

SEQ ID NO: 224916 - protein, 13 aa, Homo sapiens
  CDR3 for beta chain variable domain of TCR clone 112458 (TRBV19, TRBJ2-3)
CATWDKITDTQHF

SEQ ID NO: 224917 - protein, 12 aa, Homo sapiens
  CDR3 for alpha chain variable domain of TCR clone 112459 (TRAV13-1, TRAJ21)
CAAFFNFNKFYF

SEQ ID NO: 224918 - protein, 12 aa, Homo sapiens
  CDR3 for beta chain variable domain of TCR clone 112459 (TRBV11-2, TRBJ2-5)
CASSPPAETQYF

SEQ ID NO: 224919 - protein, 13 aa, Homo sapiens
  CDR3 for alpha chain variable domain of TCR clone 112460 (TRAV36/DV7, TRAJ7)
CAVERYGNNRLAF

SEQ ID NO: 224920 - protein, 11 aa, Homo sapiens
  CDR3 for beta chain variable domain of TCR clone 112460 (TRBV7-2, TRBJ2-3)
CASSSSDTQYF

SEQ ID NO: 224921 - protein, 14 aa, Homo sapiens
  CDR3 for alpha chain variable domain of TCR clone 112461 (TRAV26-1, TRAJ38)
CIADNAGNNRKLIW

SEQ ID NO: 224922 - protein, 13 aa, Homo sapiens
  CDR3 for beta chain variable domain of TCR clone 112461 (TRBV7-8, TRBJ2-7)
CASSLTGGREQYF

SEQ ID NO: 224923 - protein, 13 aa, Homo sapiens
  CDR3 for alpha chain variable domain of TCR clone 112462 (TRAV2, TRAJ40)
CAVVTSGTYKYIF

SEQ ID NO: 224924 - protein, 13 aa, Homo sapiens
  CDR3 for beta chain variable domain of TCR clone 112462 (TRBV12-4, TRBJ1-1)
CASSPGTGFEAFF

SEQ ID NO: 224925 - protein, 13 aa, Homo sapiens
  CDR3 for alpha chain variable domain of TCR clone 112463 (TRAV8-6, TRAJ9)
CAVSDTGGFKTIF

SEQ ID NO: 224926 - protein, 14 aa, Homo sapiens
  CDR3 for beta chain variable domain of TCR clone 112463 (TRBV6-1, TRBJ2-1)
CASAKDGFYNEQFF

SEQ ID NO: 224927 - protein, 15 aa, Homo sapiens
  CDR3 for alpha chain variable domain of TCR clone 112464 (TRAV26-2, TRAJ13)
CILRDLSEGYQKVTF

SEQ ID NO: 224928 - protein, 11 aa, Homo sapiens
  CDR3 for beta chain variable domain of TCR clone 112464 (TRBV7-9, TRBJ2-3)
CASSYTDTQYF

SEQ ID NO: 224929 - protein, 15 aa, Homo sapiens
  CDR3 for alpha chain variable domain of TCR clone 112465 (TRAV26-1, TRAJ38)
CIVRAEGGNNRKLIW

SEQ ID NO: 224930 - protein, 14 aa, Homo sapiens
  CDR3 for beta chain variable domain of TCR clone 112465 (TRBV7-6, TRBJ2-5)
CASSSPSRSETQYF

SEQ ID NO: 224931 - protein, 11 aa, Homo sapiens
  CDR3 for alpha chain variable domain of TCR clone 112466 (TRAV12-2, TRAJ49)
CAVHTGNQFYF

SEQ ID NO: 224932 - protein, 15 aa, Homo sapiens
  CDR3 for beta chain variable domain of TCR clone 112466 (TRBV28, TRBJ2-1)
CASSIIAGGRSEQFF

SEQ ID NO: 224933 - protein, 16 aa, Homo sapiens
  CDR3 for alpha chain variable domain of TCR clone 112467 (TRAV21, TRAJ37)
CAVRTAGSTNTGKLIF

SEQ ID NO: 224934 - protein, 13 aa, Homo sapiens
  CDR3 for beta chain variable domain of TCR clone 112467 (TRBV7-9, TRBJ2-5)
CASLPSGRETQYF

SEQ ID NO: 224935 - protein, 18 aa, Homo sapiens
  CDR3 for alpha chain variable domain of TCR clone 112468 (TRAV29/DV5, TRAJ52)
CAAGFRGASGTSYGKLTF

SEQ ID NO: 224936 - protein, 16 aa, Homo sapiens
  CDR3 for beta chain variable domain of TCR clone 112468 (TRBV7-3, TRBJ2-2)
CASSLKRGTLSGELFF

SEQ ID NO: 224937 - protein, 13 aa, Homo sapiens
  CDR3 for alpha chain variable domain of TCR clone 112469 (TRAV3, TRAJ15)
CAVRGQAGTALIF

SEQ ID NO: 224938 - protein, 15 aa, Homo sapiens
  CDR3 for beta chain variable domain of TCR clone 112469 (TRBV11-1, TRBJ2-7)
CASSLNYGASYEQYF

SEQ ID NO: 224939 - protein, 17 aa, Homo sapiens
  CDR3 for alpha chain variable domain of TCR clone 112470 (TRAV3, TRAJ42)
CAVRDRDYGGSQGNLIF

SEQ ID NO: 224940 - protein, 13 aa, Homo sapiens
  CDR3 for beta chain variable domain of TCR clone 112470 (TRBV10-3, TRBJ2-7)
CAFKLAVNYEQYF

SEQ ID NO: 224941 - protein, 21 aa, Homo sapiens
  CDR3 for alpha chain variable domain of TCR clone 112471 (TRAV12-1, TRAJ37)
CVVNGGLWQHRQTNLWARDNF

SEQ ID NO: 224942 - protein, 12 aa, Homo sapiens
  CDR3 for beta chain variable domain of TCR clone 112471 (TRBV20-1, TRBJ1-2)
CSAPGFNYSYTF

SEQ ID NO: 224943 - protein, 12 aa, Homo sapiens
  CDR3 for alpha chain variable domain of TCR clone 112472 (TRAV12-3, TRAJ27)
CAMKRPAGKSTF

SEQ ID NO: 224944 - protein, 13 aa, Homo sapiens
  CDR3 for beta chain variable domain of TCR clone 112472 (TRBV7-9, TRBJ1-2)
CASSLKQNYGYTF

SEQ ID NO: 224945 - protein, 14 aa, Homo sapiens
  CDR3 for alpha chain variable domain of TCR clone 112473 (TRAV35, TRAJ34)
CAGQSPRNTDKLIF

SEQ ID NO: 224946 - protein, 15 aa, Homo sapiens
  CDR3 for beta chain variable domain of TCR clone 112473 (TRBV3-1, TRBJ1-1)
CASSRLNPPNTEAFF

SEQ ID NO: 224947 - protein, 11 aa, Homo sapiens
  CDR3 for alpha chain variable domain of TCR clone 112474 (TRAV35, TRAJ34)
CWARNTDKLIF

SEQ ID NO: 224948 - protein, 13 aa, Homo sapiens
  CDR3 for beta chain variable domain of TCR clone 112474 (TRBV7-9, TRBJ1-2)
CASSLKQNYGYTS

SEQ ID NO: 224949 - protein, 16 aa, Homo sapiens
  CDR3 for alpha chain variable domain of TCR clone 112475 (TRAV3, TRAJ21)
CDVRDIERGNFNKFYF

SEQ ID NO: 224950 - protein, 14 aa, Homo sapiens
  CDR3 for beta chain variable domain of TCR clone 112475 (TRBV12-4, TRBJ2-5)
CASSLSSGRETQYF

SEQ ID NO: 224951 - protein, 14 aa, Homo sapiens
  CDR3 for alpha chain variable domain of TCR clone 112476 (TRAV34, TRAJ44)
CGADGTGTASKLTF

SEQ ID NO: 224952 - protein, 15 aa, Homo sapiens
  CDR3 for beta chain variable domain of TCR clone 112476 (TRBV7-9, TRBJ1-4)
CASSARTGGNEKLFF

SEQ ID NO: 224953 - protein, 15 aa, Homo sapiens
  CDR3 for alpha chain variable domain of TCR clone 112477 (TRAV3, TRAJ29)
RAVRDINSGNTPLVF

SEQ ID NO: 224954 - protein, 16 aa, Homo sapiens
  CDR3 for beta chain variable domain of TCR clone 112477 (TRBV4-1, TRBJ2-5)
CASSQTFYGDQETQYF

SEQ ID NO: 224955 - protein, 12 aa, Homo sapiens
  CDR3 for alpha chain variable domain of TCR clone 112478 (TRAV13-2, TRAJ23)
CAERHRGGKLIF

SEQ ID NO: 224956 - protein, 19 aa, Homo sapiens
  CDR3 for beta chain variable domain of TCR clone 112478 (TRBV19, TRBJ2-5)
CASSIGQVTGFFLGETQYF

SEQ ID NO: 224957 - protein, 13 aa, Homo sapiens
  CDR3 for alpha chain variable domain of TCR clone 112479 (TRAV1-2, TRAJ11)
CAVRDSGYSTLTF

SEQ ID NO: 224958 - protein, 13 aa, Homo sapiens
  CDR3 for beta chain variable domain of TCR clone 112479 (TRBV7-9, TRBJ1-2)
CASSLKQNYGYTF

SEQ ID NO: 224959 - protein, 16 aa, Homo sapiens
  CDR3 for alpha chain variable domain of TCR clone 112480 (TRAV13-1, TRAJ37)
CAASSLGSSNTGKLIF

SEQ ID NO: 224960 - protein, 12 aa, Homo sapiens
  CDR3 for beta chain variable domain of TCR clone 112480 (TRBV6-1, TRBJ2-5)
CASSDGRETQYF

SEQ ID NO: 224961 - protein, 15 aa, Homo sapiens
  CDR3 for alpha chain variable domain of TCR clone 112481 (TRAV13-1, TRAJ3)
CAASKLASSASNIIF

SEQ ID NO: 224962 - protein, 16 aa, Homo sapiens
  CDR3 for beta chain variable domain of TCR clone 112481 (TRBV25-1, TRBJ1-5)
CASGAPTVNSNQPQHF

SEQ ID NO: 224963 - protein, 13 aa, Homo sapiens
  CDR3 for alpha chain variable domain of TCR clone 112482 (TRAV20, TRAJ40)
CAVRTSGTYKYIF

SEQ ID NO: 224964 - protein, 13 aa, Homo sapiens
  CDR3 for beta chain variable domain of TCR clone 112482 (TRBV14, TRBJ2-1)
CASSREGGTEQFF

SEQ ID NO: 224965 - protein, 15 aa, Homo sapiens
  CDR3 for alpha chain variable domain of TCR clone 112483 (TRAV8-4, TRAJ39)
CAVSHHRGAGNMLTF

SEQ ID NO: 224966 - protein, 15 aa, Homo sapiens
  CDR3 for beta chain variable domain of TCR clone 112483 (TRBV20-1, TRBJ1-1)
CSARPRQGAPTEAVF

SEQ ID NO: 224967 - protein, 14 aa, Homo sapiens
  CDR3 for alpha chain variable domain of TCR clone 112484 (TRAV13-1, TRAJ42)
CEGYYGGSQGNLIF

SEQ ID NO: 224968 - protein, 14 aa, Homo sapiens
  CDR3 for beta chain variable domain of TCR clone 112484 (TRBV5-1, TRBJ2-5)
CASSLGQGRETQYF

SEQ ID NO: 224969 - protein, 10 aa, Homo sapiens
  CDR3 for alpha chain variable domain of TCR clone 112485 (TRAV26-2, TRAJ22)
LQGSARQLTF

SEQ ID NO: 224970 - protein, 14 aa, Homo sapiens
  CDR3 for beta chain variable domain of TCR clone 112485 (TRBV5-1, TRBJ2-2)
CASSLGGGSGELFF

SEQ ID NO: 224971 - protein, 17 aa, Homo sapiens
  CDR3 for alpha chain variable domain of TCR clone 112486 (TRAV3, TRAJ6)
GAVRDGPRAGGSYIPTF

SEQ ID NO: 224972 - protein, 20 aa, Homo sapiens
  CDR3 for beta chain variable domain of TCR clone 112486 (TRBV28, TRBJ2-1)
CASTPIGRSPGLAGGNEQFF

SEQ ID NO: 224973 - protein, 15 aa, Homo sapiens
  CDR3 for alpha chain variable domain of TCR clone 112487 (TRAV13-1, TRAJ44)
CAASRGGGTASKLTV

SEQ ID NO: 224974 - protein, 14 aa, Homo sapiens
  CDR3 for beta chain variable domain of TCR clone 112487 (TRBV7-2, TRBJ2-5)
CASSPRGSSETQYF

SEQ ID NO: 224975 - protein, 12 aa, Homo sapiens
  CDR3 for alpha chain variable domain of TCR clone 112488 (TRAV21, TRAJ11)
CAATSGYSTLTF

SEQ ID NO: 224976 - protein, 14 aa, Homo sapiens
  CDR3 for beta chain variable domain of TCR clone 112488 (TRBV18, TRBJ2-5)
CASSPGVSQETQYF

SEQ ID NO: 224977 - protein, 13 aa, Homo sapiens
  CDR3 for alpha chain variable domain of TCR clone 112489 (TRAV12-2, TRAJ6)
CAVNVSRKLHTYI

SEQ ID NO: 224978 - protein, 16 aa, Homo sapiens
  CDR3 for beta chain variable domain of TCR clone 112489 (TRBV19, TRBJ2-1)
CASSKAGPSSYNEQFF

SEQ ID NO: 224979 - protein, 15 aa, Homo sapiens
  CDR3 for alpha chain variable domain of TCR clone 112490 (TRAV12-3, TRAJ42)
CAMSGHGGSQGNLIF

SEQ ID NO: 224980 - protein, 15 aa, Homo sapiens
  CDR3 for beta chain variable domain of TCR clone 112490 (TRBV7-7, TRBJ2-2)
CATSKLAKNTGELFF

SEQ ID NO: 224981 - protein, 14 aa, Homo sapiens
  CDR3 for alpha chain variable domain of TCR clone 112491 (TRAV16, TRAJ17)
CALSEGAAGNKLTF

SEQ ID NO: 224982 - protein, 11 aa, Homo sapiens
  CDR3 for beta chain variable domain of TCR clone 112491 (TRBV29-1, TRBJ2-5)
CSEDRTGTQYF

SEQ ID NO: 224983 - protein, 12 aa, Homo sapiens
  CDR3 for alpha chain variable domain of TCR clone 112492 (TRAV2, TRAJ31)
CAVEEGDARLMF

SEQ ID NO: 224984 - protein, 18 aa, Homo sapiens
  CDR3 for beta chain variable domain of TCR clone 112492 (TRBV7-9, TRBJ2-3)
CASSLDLAGLATPDTQYF

SEQ ID NO: 224985 - protein, 14 aa, Homo sapiens
  CDR3 for alpha chain variable domain of TCR clone 112493 (TRAV1-2, TRAJ16)
CAVNRFSDGQKLLF

SEQ ID NO: 224986 - protein, 14 aa, Homo sapiens
  CDR3 for beta chain variable domain of TCR clone 112493 (TRBV2, TRBJ2-7)
CASSRDRSSYEQYF

SEQ ID NO: 224987 - protein, 13 aa, Homo sapiens
  CDR3 for alpha chain variable domain of TCR clone 112494 (TRAV38-2/DV8, TRAJ34)
CAYRTWNTDKLIF

SEQ ID NO: 224988 - protein, 12 aa, Homo sapiens
  CDR3 for beta chain variable domain of TCR clone 112494 (TRBV5-1, TRBJ2-7)
CASSFRGYEQYF

SEQ ID NO: 224989 - protein, 14 aa, Homo sapiens
  CDR3 for alpha chain variable domain of TCR clone 112495 (TRAV12-1, TRAJ3)
CGAARYSSASKIIF

SEQ ID NO: 224990 - protein, 19 aa, Homo sapiens
  CDR3 for beta chain variable domain of TCR clone 112495 (TRBV7-2, TRBJ2-3)
CASSFLSRNWGGGTDTQYF

SEQ ID NO: 224991 - protein, 13 aa, Homo sapiens
  CDR3 for alpha chain variable domain of TCR clone 112496 (TRAV8-3, TRAJ44)
CAVVPGTASKLTF

SEQ ID NO: 224992 - protein, 14 aa, Homo sapiens
  CDR3 for beta chain variable domain of TCR clone 112496 (TRBV11-2, TRBJ2-3)
CAISRLARTDTQYF

SEQ ID NO: 224993 - protein, 13 aa, Homo sapiens
  CDR3 for alpha chain variable domain of TCR clone 112497 (TRAV12-1, TRAJ16)
CVVNGPDGQKLLF

SEQ ID NO: 224994 - protein, 13 aa, Homo sapiens
  CDR3 for beta chain variable domain of TCR clone 112497 (TRBV2, TRBJ1-1)
CARNPTVGFHAFF

SEQ ID NO: 224995 - protein, 18 aa, Homo sapiens
  CDR3 for alpha chain variable domain of TCR clone 112498 (TRAV13-1, TRAJ52)
CAASKRSAGGTSYGKLTF

SEQ ID NO: 224996 - protein, 15 aa, Homo sapiens
  CDR3 for beta chain variable domain of TCR clone 112498 (TRBV6-1, TRBJ2-6)
CASSSRPSGANVLTF

SEQ ID NO: 224997 - protein, 14 aa, Homo sapiens
  CDR3 for alpha chain variable domain of TCR clone 112499 (TRAV12-3, TRAJ9)
CAMSPNTGGFKIIF

SEQ ID NO: 224998 - protein, 12 aa, Homo sapiens
  CDR3 for beta chain variable domain of TCR clone 112499 (TRBV19, TRBJ1-5)
CASSIAQQPQHF

SEQ ID NO: 224999 - protein, 14 aa, Homo sapiens
  CDR3 for alpha chain variable domain of TCR clone 112500 (TRAV23/DV6, TRAJ39)
CAASIGNAGHMLTF

SEQ ID NO: 225000 - protein, 12 aa, Homo sapiens
  CDR3 for beta chain variable domain of TCR clone 112500 (TRBV20-1, TRBJ2-5)
CSVGTGSETQYF

SEQ ID NO: 225001 - protein, 12 aa, Homo sapiens
  CDR3 for alpha chain variable domain of TCR clone 112501 (TRAV26-1, TRAJ35)
CIGLSFGNVLHC

SEQ ID NO: 225002 - protein, 14 aa, Homo sapiens
  CDR3 for beta chain variable domain of TCR clone 112501 (TRBV18, TRBJ2-7)
CASSPRGGAYEQYF

SEQ ID NO: 225003 - protein, 15 aa, Homo sapiens
  CDR3 for alpha chain variable domain of TCR clone 112502 (TRAV35, TRAJ52)
CAELAGGTSYGKLTF

SEQ ID NO: 225004 - protein, 16 aa, Homo sapiens
  CDR3 for beta chain variable domain of TCR clone 112502 (TRBV5-1, TRBJ2-2)
CASSSRTGGRTGELFF

SEQ ID NO: 225005 - protein, 21 aa, Homo sapiens
  CDR3 for alpha chain variable domain of TCR clone 112503 (TRAV1-1, TRAJ6)
CLLLLRCERLERTGGSYIPTF

SEQ ID NO: 225006 - protein, 22 aa, Homo sapiens
  CDR3 for beta chain variable domain of TCR clone 112503 (TRBV19, TRBJ2-1)
CASSVRDRVTGTSGRIYNEQFF

SEQ ID NO: 225007 - protein, 12 aa, Homo sapiens
  CDR3 for alpha chain variable domain of TCR clone 112504 (TRAV12-2, TRAJ21)
CAVNRNFNKFYF

SEQ ID NO: 225008 - protein, 14 aa, Homo sapiens
  CDR3 for beta chain variable domain of TCR clone 112504 (TRBV12-4, TRBJ2-3)
CASSLSVATDTQYF

SEQ ID NO: 225009 - protein, 13 aa, Homo sapiens
  CDR3 for alpha chain variable domain of TCR clone 112505 (TRAV26-1, TRAJ29)
CIVRRSGNTPLVF

SEQ ID NO: 225010 - protein, 14 aa, Homo sapiens
  CDR3 for beta chain variable domain of TCR clone 112505 (TRBV19, TRBJ2-1)
CASPTFVLSGEQFF

SEQ ID NO: 225011 - protein, 17 aa, Homo sapiens
  CDR3 for alpha chain variable domain of TCR clone 112506 (TRAV2, TRAJ40)
CCLPLCCGTSGTYKYIF

SEQ ID NO: 225012 - protein, 14 aa, Homo sapiens
  CDR3 for beta chain variable domain of TCR clone 112506 (TRBV19, TRBJ2-1)
CASPTFVLSGEQFF

SEQ ID NO: 225013 - protein, 16 aa, Homo sapiens
  CDR3 for alpha chain variable domain of TCR clone 112507 (TRAV1-2, TRAJ10)
CAVRGVLTGGGNKLSF

SEQ ID NO: 225014 - protein, 12 aa, Homo sapiens
  CDR3 for beta chain variable domain of TCR clone 112507 (TRBV7-8, TRBJ2-7)
CASSLGDREQYF

SEQ ID NO: 225015 - protein, 12 aa, Homo sapiens
  CDR3 for alpha chain variable domain of TCR clone 112508 (TRAV3, TRAJ43)
CAVIDPNNDMRF

SEQ ID NO: 225016 - protein, 13 aa, Homo sapiens
  CDR3 for beta chain variable domain of TCR clone 112508 (TRBV19, TRBJ1-2)
CASSVPGQDGYTF

SEQ ID NO: 225017 - protein, 15 aa, Homo sapiens
  CDR3 for alpha chain variable domain of TCR clone 112509 (TRAV16, TRAJ40)
CALSGTTSGTYKYIF

SEQ ID NO: 225018 - protein, 17 aa, Homo sapiens
  CDR3 for beta chain variable domain of TCR clone 112509 (TRBV7-3, TRBJ2-3)
CASSLMKRMRGADTQYF

SEQ ID NO: 225019 - protein, 13 aa, Homo sapiens
  CDR3 for alpha chain variable domain of TCR clone 112510 (TRAV12-3, TRAJ33)
CATSVNSNYQLIW

SEQ ID NO: 225020 - protein, 16 aa, Homo sapiens
  CDR3 for beta chain variable domain of TCR clone 112510 (TRBV13, TRBJ2-5)
CASSLRTGGSWETQYF

SEQ ID NO: 225021 - protein, 16 aa, Homo sapiens
  CDR3 for alpha chain variable domain of TCR clone 112511 (TRAV3, TRAJ37)
CAVRPHGSGNTGKLIF

SEQ ID NO: 225022 - protein, 15 aa, Homo sapiens
  CDR3 for beta chain variable domain of TCR clone 112511 (TRBV7-2, TRBJ2-3)
CASSSTGLETDTQYF

SEQ ID NO: 225023 - protein, 13 aa, Homo sapiens
  CDR3 for alpha chain variable domain of TCR clone 112512 (TRAV8-3, TRAJ4)
WVFYSGGYNKLFF

SEQ ID NO: 225024 - protein, 14 aa, Homo sapiens
  CDR3 for beta chain variable domain of TCR clone 112512 (TRBV7-9, TRBJ2-3)
CASSLEDGTDTQYF

SEQ ID NO: 225025 - protein, 18 aa, Homo sapiens
  CDR3 for alpha chain variable domain of TCR clone 112513 (TRAV8-3, TRAJ28)
CAVGATLGLGVTNSLSGS

SEQ ID NO: 225026 - protein, 14 aa, Homo sapiens
  CDR3 for beta chain variable domain of TCR clone 112513 (TRBV7-2, TRBJ2-1)
CASSLGVGYNEQFF

SEQ ID NO: 225027 - protein, 14 aa, Homo sapiens
  CDR3 for alpha chain variable domain of TCR clone 112514 (TRAV13-2, TRAJ10)
CAETLPGGGNKPTF

SEQ ID NO: 225028 - protein, 15 aa, Homo sapiens
  CDR3 for beta chain variable domain of TCR clone 112514 (TRBV6-6, TRBJ2-7)
CASSYSYGGSYEQYF

SEQ ID NO: 225029 - protein, 14 aa, Homo sapiens
  CDR3 for alpha chain variable domain of TCR clone 112515 (TRAV2, TRAJ37)
CAVDFTSNTGKLIF

SEQ ID NO: 225030 - protein, 12 aa, Homo sapiens
  CDR3 for beta chain variable domain of TCR clone 112515 (TRBV7-9, TRBJ2-7)
CASSQGVYEQYF

SEQ ID NO: 225031 - protein, 11 aa, Homo sapiens
  CDR3 for alpha chain variable domain of TCR clone 112516 (TRAV12-2, TRAJ31)
CAILNNARRMF

SEQ ID NO: 225032 - protein, 16 aa, Homo sapiens
  CDR3 for beta chain variable domain of TCR clone 112516 (TRBV13, TRBJ2-2)
CASSPRTGEHTGELFF

SEQ ID NO: 225033 - protein, 15 aa, Homo sapiens
  CDR3 for alpha chain variable domain of TCR clone 112517 (TRAV13-1, TRAJ50)
CAAKGSETSYDKMIF

SEQ ID NO: 225034 - protein, 13 aa, Homo sapiens
  CDR3 for beta chain variable domain of TCR clone 112517 (TRBV20-1, TRBJ2-3)
CSARAGGRDTQYF

SEQ ID NO: 225035 - protein, 14 aa, Homo sapiens
  CDR3 for alpha chain variable domain of TCR clone 112518 (TRAV12-2, TRAJ17)
CAVLFKAAGNKLTF

SEQ ID NO: 225036 - protein, 13 aa, Homo sapiens
  CDR3 for beta chain variable domain of TCR clone 112518 (TRBV19, TRBJ1-2)
CDSSQGQVYGYTF

SEQ ID NO: 225037 - protein, 14 aa, Homo sapiens
  CDR3 for alpha chain variable domain of TCR clone 112519 (TRAV30, TRAJ33)
CGTVAPRSNYQLIC

SEQ ID NO: 225038 - protein, 18 aa, Homo sapiens
  CDR3 for beta chain variable domain of TCR clone 112519 (TRBV11-2, TRBJ2-3)
CASSLGGASRGAPNTQYF

SEQ ID NO: 225039 - protein, 17 aa, Homo sapiens
  CDR3 for alpha chain variable domain of TCR clone 112520 (TRAV3, TRAJ6)
CAVRDGPRAGGSYIPTF

SEQ ID NO: 225040 - protein, 13 aa, Homo sapiens
  CDR3 for beta chain variable domain of TCR clone 112520 (TRBV4-2, TRBJ2-3)
CASSQGNTDTQYF

SEQ ID NO: 225041 - protein, 16 aa, Homo sapiens
  CDR3 for alpha chain variable domain of TCR clone 112521 (TRAV22, TRAJ45)
CAVERGKRGGADGITF

SEQ ID NO: 225042 - protein, 13 aa, Homo sapiens
  CDR3 for beta chain variable domain of TCR clone 112521 (TRBV27, TRBJ1-1)
CASSLSIGAEAFF

SEQ ID NO: 225043 - protein, 14 aa, Homo sapiens
  CDR3 for alpha chain variable domain of TCR clone 112522 (TRAV12-3, TRAJ12)
CAMSEEDSSYKLIF

SEQ ID NO: 225044 - protein, 12 aa, Homo sapiens
  CDR3 for beta chain variable domain of TCR clone 112522 (TRBV18, TRBJ1-4)
CASSPSREKLFF

SEQ ID NO: 225045 - protein, 15 aa, Homo sapiens
  CDR3 for alpha chain variable domain of TCR clone 112523 (TRAV16, TRAJ4)
CALEDPSGGYNKLIF

SEQ ID NO: 225046 - protein, 13 aa, Homo sapiens
  CDR3 for beta chain variable domain of TCR clone 112523 (TRBV7-3, TRBJ2-7)
CVSSQAGGYEQYF

SEQ ID NO: 225047 - protein, 12 aa, Homo sapiens
  CDR3 for alpha chain variable domain of TCR clone 112524 (TRAV17, TRAJ57)
CATDGGSEKLVF

SEQ ID NO: 225048 - protein, 13 aa, Homo sapiens
  CDR3 for beta chain variable domain of TCR clone 112524 (TRBV7-9, TRBJ2-7)
CASSYAGAYEQYF

SEQ ID NO: 225049 - protein, 15 aa, Homo sapiens
  CDR3 for alpha chain variable domain of TCR clone 112525 (TRAV4, TRAJ39)
CLVGPNNNARNMLTF

SEQ ID NO: 225050 - protein, 13 aa, Homo sapiens
  CDR3 for beta chain variable domain of TCR clone 112525 (TRBV11-2, TRBJ2-5)
CASSSTGEETQYF

SEQ ID NO: 225051 - protein, 16 aa, Homo sapiens
  CDR3 for alpha chain variable domain of TCR clone 112526 (TRAV3, TRAJ32)
CAVRDVEGGATNKLIF

SEQ ID NO: 225052 - protein, 16 aa, Homo sapiens
  CDR3 for beta chain variable domain of TCR clone 112526 (TRBV12-4, TRBJ1-5)
CASSRPVGGSNQPQHF

SEQ ID NO: 225053 - protein, 14 aa, Homo sapiens
  CDR3 for alpha chain variable domain of TCR clone 112527 (TRAV8-4, TRAJ8)
CAVSLNTGFQKLVF

SEQ ID NO: 225054 - protein, 13 aa, Homo sapiens
  CDR3 for beta chain variable domain of TCR clone 112527 (TRBV7-9, TRBJ1-2)
CASSLKQNYGYTF

SEQ ID NO: 225055 - protein, 15 aa, Homo sapiens
  CDR3 for alpha chain variable domain of TCR clone 112528 (TRAV25, TRAJ41)
CAGPWNSNSGYALNF

SEQ ID NO: 225056 - protein, 13 aa, Homo sapiens
  CDR3 for beta chain variable domain of TCR clone 112528 (TRBV15, TRBJ1-1)
CAASRGIQARAFF

SEQ ID NO: 225057 - protein, 16 aa, Homo sapiens
  CDR3 for alpha chain variable domain of TCR clone 112529 (TRAV26-1, TRAJ37)
CIVRGDGSGNTGKLIF

SEQ ID NO: 225058 - protein, 17 aa, Homo sapiens
  CDR3 for beta chain variable domain of TCR clone 112529 (TRBV4-1, TRBJ2-7)
CASSRGPLGGRGGEQYF

SEQ ID NO: 225059 - protein, 12 aa, Homo sapiens
  CDR3 for alpha chain variable domain of TCR clone 112530 (TRAV12-3, TRAJ20)
CAMVGGDYKLSF

SEQ ID NO: 225060 - protein, 14 aa, Homo sapiens
  CDR3 for beta chain variable domain of TCR clone 112530 (TRBV5-5, TRBJ1-5)
CASSGQGVDQPQHF

SEQ ID NO: 225061 - protein, 13 aa, Homo sapiens
  CDR3 for alpha chain variable domain of TCR clone 112531 (TRAV30, TRAJ24)
CVTVTDSWGKLQF

SEQ ID NO: 225062 - protein, 16 aa, Homo sapiens
  CDR3 for beta chain variable domain of TCR clone 112531 (TRBV7-3, TRBJ2-2)
CASSLKRGTLSGELFF

SEQ ID NO: 225063 - protein, 15 aa, Homo sapiens
  CDR3 for alpha chain variable domain of TCR clone 112532 (TRAV21, TRAJ53)
CATLNSGGSNYKLTF

SEQ ID NO: 225064 - protein, 16 aa, Homo sapiens
  CDR3 for beta chain variable domain of TCR clone 112532 (TRBV13, TRBJ2-2)
CASSPRTGEHTGELFF

SEQ ID NO: 225065 - protein, 15 aa, Homo sapiens
  CDR3 for alpha chain variable domain of TCR clone 112533 (TRAV26-1, TRAJ29)
CIVRVEGSGNTPLVF

SEQ ID NO: 225066 - protein, 14 aa, Homo sapiens
  CDR3 for beta chain variable domain of TCR clone 112533 (TRBV25-1, TRBJ1-1)
CASTHLGGNTEAFS

SEQ ID NO: 225067 - protein, 11 aa, Homo sapiens
  CDR3 for alpha chain variable domain of TCR clone 112534 (TRAV8-3, TRAJ13)
CAVGAYPSGSY

SEQ ID NO: 225068 - protein, 15 aa, Homo sapiens
  CDR3 for beta chain variable domain of TCR clone 112534 (TRBV19, TRBJ1-5)
CASSIVWADNQPQHF

SEQ ID NO: 225069 - protein, 12 aa, Homo sapiens
  CDR3 for alpha chain variable domain of TCR clone 112535 (TRAV27, TRAJ33)
CAGDGSNYQLIW

SEQ ID NO: 225070 - protein, 12 aa, Homo sapiens
  CDR3 for beta chain variable domain of TCR clone 112535 (TRBV5-5, TRBJ1-2)
CASSALNYGYTF

SEQ ID NO: 225071 - protein, 16 aa, Homo sapiens
  CDR3 for alpha chain variable domain of TCR clone 112536 (TRAV3, TRAJ10)
CAVRDMRAGGGNKLTF

SEQ ID NO: 225072 - protein, 18 aa, Homo sapiens
  CDR3 for beta chain variable domain of TCR clone 112536 (TRBV20-1, TRBJ2-6)
CSAETTPTHGSGANVLTF

SEQ ID NO: 225073 - protein, 12 aa, Homo sapiens
  CDR3 for alpha chain variable domain of TCR clone 112537 (TRAV8-3, TRAJ26)
CAGDNYGQNFVF

SEQ ID NO: 225074 - protein, 14 aa, Homo sapiens
  CDR3 for beta chain variable domain of TCR clone 112537 (TRBV9, TRBJ1-2)
CASSVSTRSYGYTF

SEQ ID NO: 225075 - protein, 14 aa, Homo sapiens
  CDR3 for alpha chain variable domain of TCR clone 112538 (TRAV12-3, TRAJ21)
CAMEGHQGFNKFYF

SEQ ID NO: 225076 - protein, 16 aa, Homo sapiens
  CDR3 for beta chain variable domain of TCR clone 112538 (TRBV19, TRBJ2-1)
CASSKAGPSSYNGQFF

SEQ ID NO: 225077 - protein, 14 aa, Homo sapiens
  CDR3 for alpha chain variable domain of TCR clone 112539 (TRAV1-2, TRAJ8)
CAVREDTGFQKLVF

SEQ ID NO: 225078 - protein, 13 aa, Homo sapiens
  CDR3 for beta chain variable domain of TCR clone 112539 (TRBV7-3, TRBJ2-1)
CASSLDNYNEQFF

SEQ ID NO: 225079 - protein, 14 aa, Homo sapiens
  CDR3 for alpha chain variable domain of TCR clone 112540 (TRAV12-1, TRAJ29)
CVVNEGAGNTPLVF

SEQ ID NO: 225080 - protein, 13 aa, Homo sapiens
  CDR3 for beta chain variable domain of TCR clone 112540 (TRBV7-9, TRBJ2-3)
CASSPGSTDTQYF

SEQ ID NO: 225081 - protein, 14 aa, Homo sapiens
  CDR3 for alpha chain variable domain of TCR clone 112541 (TRAV8-3, TRAJ9)
CAVVYNTGGFKTIF

SEQ ID NO: 225082 - protein, 14 aa, Homo sapiens
  CDR3 for beta chain variable domain of TCR clone 112541 (TRBV7-3, TRBJ2-2)
CASSSGGYTGELFS

SEQ ID NO: 225083 - protein, 14 aa, Homo sapiens
  CDR3 for alpha chain variable domain of TCR clone 112542 (TRAV26-1, TRAJ34)
CIVRVAYNTDKLIF

SEQ ID NO: 225084 - protein, 15 aa, Homo sapiens
  CDR3 for beta chain variable domain of TCR clone 112542 (TRBV20-1, TRBJ2-7)
CSAGVPAAYFYEQYL

SEQ ID NO: 225085 - protein, 15 aa, Homo sapiens
  CDR3 for alpha chain variable domain of TCR clone 112543 (TRAV2, TRAJ9)
CAVEDRGTGGFKTIF

SEQ ID NO: 225086 - protein, 16 aa, Homo sapiens
  CDR3 for beta chain variable domain of TCR clone 112543 (TRBV24-1, TRBJ2-3)
CATSDPGTGTTDTQYF

SEQ ID NO: 225087 - protein, 13 aa, Homo sapiens
  CDR3 for alpha chain variable domain of TCR clone 112544 (TRAV25, TRAJ10)
CAGRTGGGNKLTF

SEQ ID NO: 225088 - protein, 16 aa, Homo sapiens
  CDR3 for beta chain variable domain of TCR clone 112544 (TRBV12-5, TRBJ2-5)
CASGPRTSGNQETQYF

SEQ ID NO: 225089 - protein, 14 aa, Homo sapiens
  CDR3 for alpha chain variable domain of TCR clone 112545 (TRAV2, TRAJ37)
CAVDFTSNTGKLIF

SEQ ID NO: 225090 - protein, 14 aa, Homo sapiens
  CDR3 for beta chain variable domain of TCR clone 112545 (TRBV19, TRBJ1-1)
CASSSPGRTTEAFF

SEQ ID NO: 225091 - protein, 12 aa, Homo sapiens
  CDR3 for alpha chain variable domain of TCR clone 112546 (TRAV21, TRAJ33)
CAKMDSNYQLIW

SEQ ID NO: 225092 - protein, 16 aa, Homo sapiens
  CDR3 for beta chain variable domain of TCR clone 112546 (TRBV29-1, TRBJ2-7)
CSVEDAEDGTAYEQYF

SEQ ID NO: 225093 - protein, 14 aa, Homo sapiens
  CDR3 for alpha chain variable domain of TCR clone 112547 (TRAV1-2, TRAJ8)
CAVREDTGFQKLVF

SEQ ID NO: 225094 - protein, 15 aa, Homo sapiens
  CDR3 for beta chain variable domain of TCR clone 112547 (TRBV6-3, TRBJ2-7)
CASSSPGTVFYEQNF

SEQ ID NO: 225095 - protein, 13 aa, Homo sapiens
  CDR3 for alpha chain variable domain of TCR clone 112548 (TRAV27, TRAJ8)
CAGGPTGFQKLVF

SEQ ID NO: 225096 - protein, 15 aa, Homo sapiens
  CDR3 for beta chain variable domain of TCR clone 112548 (TRBV28, TRBJ2-1)
CASSIIAGGRSEQFF

SEQ ID NO: 225097 - protein, 13 aa, Homo sapiens
  CDR3 for alpha chain variable domain of TCR clone 112549 (TRAV12-1, TRAJ40)
CVVPTSGTYKYIF

SEQ ID NO: 225098 - protein, 15 aa, Homo sapiens
  CDR3 for beta chain variable domain of TCR clone 112549 (TRBV4-1, TRBJ1-4)
CASSDTGGTNEKLFF

SEQ ID NO: 225099 - protein, 14 aa, Homo sapiens
  CDR3 for alpha chain variable domain of TCR clone 112550 (TRAV12-2, TRAJ45)
CAVNKGGGADGLTF

SEQ ID NO: 225100 - protein, 19 aa, Homo sapiens
  CDR3 for beta chain variable domain of TCR clone 112550 (TRBV7-2, TRBJ2-3)
CASSLVLSAYIARPDTQYF

SEQ ID NO: 225101 - protein, 14 aa, Homo sapiens
  CDR3 for alpha chain variable domain of TCR clone 112551 (TRAV26-2, TRAJ31)
CCVLLPLNNARLMF

SEQ ID NO: 225102 - protein, 15 aa, Homo sapiens
  CDR3 for beta chain variable domain of TCR clone 112551 (TRBV28, TRBJ2-1)
CASSIIAGGRSEQFF

SEQ ID NO: 225103 - protein, 14 aa, Homo sapiens
  CDR3 for alpha chain variable domain of TCR clone 112552 (TRAV17, TRAJ45)
CATASGGGDDGLTF

SEQ ID NO: 225104 - protein, 13 aa, Homo sapiens
  CDR3 for beta chain variable domain of TCR clone 112552 (TRBV15, TRBJ2-7)
CATSTTGHYEQYF

SEQ ID NO: 225105 - protein, 11 aa, Homo sapiens
  CDR3 for alpha chain variable domain of TCR clone 112553 (TRAV16, TRAJ31)
CALFNNARLMF

SEQ ID NO: 225106 - protein, 15 aa, Homo sapiens
  CDR3 for beta chain variable domain of TCR clone 112553 (TRBV7-9, TRBJ1-6)
CASSSPGRGNSPLHF

SEQ ID NO: 225107 - protein, 14 aa, Homo sapiens
  CDR3 for alpha chain variable domain of TCR clone 112554 (TRAV2, TRAJ9)
CAVEDRSGGFRTIF

SEQ ID NO: 225108 - protein, 11 aa, Homo sapiens
  CDR3 for beta chain variable domain of TCR clone 112554 (TRBV7-9, TRBJ2-5)
CASSLGETQYF

SEQ ID NO: 225109 - protein, 14 aa, Homo sapiens
  CDR3 for alpha chain variable domain of TCR clone 112555 (TRAV12-1, TRAJ17)
CVVNFKAAGNKLTF

SEQ ID NO: 225110 - protein, 15 aa, Homo sapiens
  CDR3 for beta chain variable domain of TCR clone 112555 (TRBV28, TRBJ2-3)
CAPTFRDWSTDTQYF

SEQ ID NO: 225111 - protein, 14 aa, Homo sapiens
  CDR3 for alpha chain variable domain of TCR clone 112556 (TRAV12-2, TRAJ13)
CAVKKTGGYQEVTF

SEQ ID NO: 225112 - protein, 15 aa, Homo sapiens
  CDR3 for beta chain variable domain of TCR clone 112556 (TRBV19, TRBJ1-6)
CASSTQGAVGSPLHF

SEQ ID NO: 225113 - protein, 13 aa, Homo sapiens
  CDR3 for alpha chain variable domain of TCR clone 112557 (TRAV13-2, TRAJ13)
CAERPGGYQTVTF

SEQ ID NO: 225114 - protein, 16 aa, Homo sapiens
  CDR3 for beta chain variable domain of TCR clone 112557 (TRBV18, TRBJ2-5)
CASSPPSSGGAKTQYF

SEQ ID NO: 225115 - protein, 13 aa, Homo sapiens
  CDR3 for alpha chain variable domain of TCR clone 112558 (TRAV3, TRAJ15)
CAVRDQAGTALIF

SEQ ID NO: 225116 - protein, 15 aa, Homo sapiens
  CDR3 for beta chain variable domain of TCR clone 112558 (TRBV11-1, TRBJ2-7)
CASSLNYGAFYEQYF

SEQ ID NO: 225117 - protein, 15 aa, Homo sapiens
  CDR3 for alpha chain variable domain of TCR clone 112559 (TRAV3, TRAJ20)
CAVRDIKLSDFKLSF

SEQ ID NO: 225118 - protein, 15 aa, Homo sapiens
  CDR3 for beta chain variable domain of TCR clone 112559 (TRBV7-9, TRBJ1-6)
CASSSPGRGNSPLHF

SEQ ID NO: 225119 - protein, 13 aa, Homo sapiens
  CDR3 for alpha chain variable domain of TCR clone 112560 (TRAV17, TRAJ15)
CATVNQAGTALIF

SEQ ID NO: 225120 - protein, 16 aa, Homo sapiens
  CDR3 for beta chain variable domain of TCR clone 112560 (TRBV7-3, TRBJ2-2)
CASSLKRGTLSGELFF

SEQ ID NO: 225121 - protein, 17 aa, Homo sapiens
  CDR3 for alpha chain variable domain of TCR clone 112561 (TRAV16, TRAJ42)
CALSPKLYGGSQGNLIF

SEQ ID NO: 225122 - protein, 14 aa, Homo sapiens
  CDR3 for beta chain variable domain of TCR clone 112561 (TRBV2, TRBJ1-6)
CASEVSSYNSPLHF

SEQ ID NO: 225123 - protein, 15 aa, Homo sapiens
  CDR3 for alpha chain variable domain of TCR clone 112562 (TRAV38-1, TRAJ57)
CAFMDSQGGSEKLVF

SEQ ID NO: 225124 - protein, 14 aa, Homo sapiens
  CDR3 for beta chain variable domain of TCR clone 112562 (TRBV7-2, TRBJ2-7)
CASSGLAGRGEQYF

SEQ ID NO: 225125 - protein, 17 aa, Homo sapiens
  CDR3 for alpha chain variable domain of TCR clone 112563 (TRAV4, TRAJ18)
CLVGERSVGSTLGRLYF

SEQ ID NO: 225126 - protein, 18 aa, Homo sapiens
  CDR3 for beta chain variable domain of TCR clone 112563 (TRBV11-2, TRBJ2-3)
CASSLRGASRGAPNTQYF

SEQ ID NO: 225127 - protein, 14 aa, Homo sapiens
  CDR3 for alpha chain variable domain of TCR clone 112564 (TRAV13-1, TRAJ10)
CAAKEPGGGNKLTF

SEQ ID NO: 225128 - protein, 14 aa, Homo sapiens
  CDR3 for beta chain variable domain of TCR clone 112564 (TRBV6-6, TRBJ2-7)
CTSSDSGAGYEQYF

SEQ ID NO: 225129 - protein, 13 aa, Homo sapiens
  CDR3 for alpha chain variable domain of TCR clone 112565 (TRAV13-1, TRAJ21)
CAASIYNFNKFYF

SEQ ID NO: 225130 - protein, 12 aa, Homo sapiens
  CDR3 for beta chain variable domain of TCR clone 112565 (TRBV7-9, TRBJ1-4)
CASSTDREKLFF

SEQ ID NO: 225131 - protein, 14 aa, Homo sapiens
  CDR3 for alpha chain variable domain of TCR clone 112566 (TRAV17, TRAJ4)
CSTAPLGGYNKLIF

SEQ ID NO: 225132 - protein, 13 aa, Homo sapiens
  CDR3 for beta chain variable domain of TCR clone 112566 (TRBV12-4, TRBJ1-3)
CASSLASGNTIYF

SEQ ID NO: 225133 - protein, 13 aa, Homo sapiens
  CDR3 for alpha chain variable domain of TCR clone 112567 (TRAV8-3, TRAJ28)
CAVGAVGRYQLTF

SEQ ID NO: 225134 - protein, 14 aa, Homo sapiens
  CDR3 for beta chain variable domain of TCR clone 112567 (TRBV25-1, TRBJ1-1)
CASTHLGGNTEAFF

SEQ ID NO: 225135 - protein, 14 aa, Homo sapiens
  CDR3 for alpha chain variable domain of TCR clone 112568 (TRAV1-1, TRAJ27)
CAVIYNTNAGKSTF

SEQ ID NO: 225136 - protein, 15 aa, Homo sapiens
  CDR3 for beta chain variable domain of TCR clone 112568 (TRBV7-8, TRBJ2-1)
CASSSGLAGGNEQFF

SEQ ID NO: 225137 - protein, 12 aa, Homo sapiens
  CDR3 for alpha chain variable domain of TCR clone 112569 (TRAV3, TRAJ20)
CAVRDPDYKLSF

SEQ ID NO: 225138 - protein, 15 aa, Homo sapiens
  CDR3 for beta chain variable domain of TCR clone 112569 (TRBV7-9, TRBJ2-7)
CASSLALAEAYEQYF

SEQ ID NO: 225139 - protein, 14 aa, Homo sapiens
  CDR3 for alpha chain variable domain of TCR clone 112570 (TRAV12-1, TRAJ9)
CVVTGYTGGFKTIF

SEQ ID NO: 225140 - protein, 13 aa, Homo sapiens
  CDR3 for beta chain variable domain of TCR clone 112570 (TRBV20-1, TRBJ1-1)
CSARAGGNTEAVF

SEQ ID NO: 225141 - protein, 14 aa, Homo sapiens
  CDR3 for alpha chain variable domain of TCR clone 112571 (TRAV13-1, TRAJ40)
CAASMTSGTYKYIF

SEQ ID NO: 225142 - protein, 16 aa, Homo sapiens
  CDR3 for beta chain variable domain of TCR clone 112571 (TRBV7-3, TRBJ2-2)
CASSLKRGTLSGELFF

SEQ ID NO: 225143 - protein, 12 aa, Homo sapiens
  CDR3 for alpha chain variable domain of TCR clone 112572 (TRAV21, TRAJ33)
CAKMDSNYQLIW

SEQ ID NO: 225144 - protein, 14 aa, Homo sapiens
  CDR3 for beta chain variable domain of TCR clone 112572 (TRBV7-3, TRBJ1-1)
CASSLKGGNTEAVF

SEQ ID NO: 225145 - protein, 15 aa, Homo sapiens
  CDR3 for alpha chain variable domain of TCR clone 112573 (TRAV1-1, TRAJ4)
CAVRAFSGGYNKLIF

SEQ ID NO: 225146 - protein, 16 aa, Homo sapiens
  CDR3 for beta chain variable domain of TCR clone 112573 (TRBV7-2, TRBJ2-6)
CDILSGVSSGANVLTF

SEQ ID NO: 225147 - protein, 14 aa, Homo sapiens
  CDR3 for alpha chain variable domain of TCR clone 112574 (TRAV8-4, TRAJ13)
CAVTLSGGYQKVTF

SEQ ID NO: 225148 - protein, 11 aa, Homo sapiens
  CDR3 for beta chain variable domain of TCR clone 112574 (TRBV19, TRBJ1-1)
CASSIGSEAFF

SEQ ID NO: 225149 - protein, 12 aa, Homo sapiens
  CDR3 for alpha chain variable domain of TCR clone 112575 (TRAV26-1, TRAJ26)
CIVFIYGQNFVF

SEQ ID NO: 225150 - protein, 13 aa, Homo sapiens
  CDR3 for beta chain variable domain of TCR clone 112575 (TRBV27, TRBJ2-1)
CASSSGSYNEQFF

SEQ ID NO: 225151 - protein, 13 aa, Homo sapiens
  CDR3 for alpha chain variable domain of TCR clone 112576 (TRAV13-2, TRAJ13)
CAERPGGYQKVTF

SEQ ID NO: 225152 - protein, 14 aa, Homo sapiens
  CDR3 for beta chain variable domain of TCR clone 112576 (TRBV20-1, TRBJ2-7)
CSAISREASYEQYF

SEQ ID NO: 225153 - protein, 14 aa, Homo sapiens
  CDR3 for alpha chain variable domain of TCR clone 112577 (TRAV16, TRAJ17)
CAPRIKAAVNKLTF

SEQ ID NO: 225154 - protein, 17 aa, Homo sapiens
  CDR3 for beta chain variable domain of TCR clone 112577 (TRBV7-2, TRBJ2-3)
CASSSYSGTRRADTQYF

SEQ ID NO: 225155 - protein, 14 aa, Homo sapiens
  CDR3 for alpha chain variable domain of TCR clone 112578 (TRAV38-1, TRAJ28)
CAFTSGAGSYQLTF

SEQ ID NO: 225156 - protein, 14 aa, Homo sapiens
  CDR3 for beta chain variable domain of TCR clone 112578 (TRBV7-6, TRBJ2-3)
CASSLGTVTDTQYF

SEQ ID NO: 225157 - protein, 14 aa, Homo sapiens
  CDR3 for alpha chain variable domain of TCR clone 112579 (TRAV12-1, TRAJ17)
CVVNYKAAGNELTF

SEQ ID NO: 225158 - protein, 17 aa, Homo sapiens
  CDR3 for beta chain variable domain of TCR clone 112579 (TRBV20-1, TRBJ2-1)
CSASSSGLAGSYNDQFF

SEQ ID NO: 225159 - protein, 15 aa, Homo sapiens
  CDR3 for alpha chain variable domain of TCR clone 112580 (TRAV35, TRAJ40)
CAGQLGTSGTYKYIF

SEQ ID NO: 225160 - protein, 15 aa, Homo sapiens
  CDR3 for beta chain variable domain of TCR clone 112580 (TRBV11-3, TRBJ2-3)
CASLKDGREGDTQYF

SEQ ID NO: 225161 - protein, 13 aa, Homo sapiens
  CDR3 for alpha chain variable domain of TCR clone 112581 (TRAV27, TRAJ49)
RAPRPYTGNQFYF

SEQ ID NO: 225162 - protein, 18 aa, Homo sapiens
  CDR3 for beta chain variable domain of TCR clone 112581 (TRBV7-3, TRBJ2-5)
CASSLGGAAQGRWETQYF

SEQ ID NO: 225163 - protein, 12 aa, Homo sapiens
  CDR3 for alpha chain variable domain of TCR clone 112582 (TRAV12-2, TRAJ10)
WGVTGGGSKLTF

SEQ ID NO: 225164 - protein, 15 aa, Homo sapiens
  CDR3 for beta chain variable domain of TCR clone 112582 (TRBV20-1, TRBJ2-7)
CSARDRVSGMDEQYF

SEQ ID NO: 225165 - protein, 15 aa, Homo sapiens
  CDR3 for alpha chain variable domain of TCR clone 112583 (TRAV8-4, TRAJ29)
CAVSRLNSGNTPLVF

SEQ ID NO: 225166 - protein, 15 aa, Homo sapiens
  CDR3 for beta chain variable domain of TCR clone 112583 (TRBV7-9, TRBJ1-5)
CASSQGHQPNQPQHF

SEQ ID NO: 225167 - protein, 16 aa, Homo sapiens
  CDR3 for alpha chain variable domain of TCR clone 112584 (TRAV8-3, TRAJ10)
CAVGPILTGGGDKLTF

SEQ ID NO: 225168 - protein, 16 aa, Homo sapiens
  CDR3 for beta chain variable domain of TCR clone 112584 (TRBV7-2, TRBJ2-5)
CASSSKWLSGQKTQYF

SEQ ID NO: 225169 - protein, 17 aa, Homo sapiens
  CDR3 for alpha chain variable domain of TCR clone 112585 (TRAV8-6, TRAJ58)
CAVSSWVGETSGSRLTF

SEQ ID NO: 225170 - protein, 13 aa, Homo sapiens
  CDR3 for beta chain variable domain of TCR clone 112585 (TRBV18, TRBJ1-1)
CASSGGRNTEAFF

SEQ ID NO: 225171 - protein, 15 aa, Homo sapiens
  CDR3 for alpha chain variable domain of TCR clone 112586 (TRAV3, TRAJ22)
CAVRDRGGSARQLTF

SEQ ID NO: 225172 - protein, 16 aa, Homo sapiens
  CDR3 for beta chain variable domain of TCR clone 112586 (TRBV5-4, TRBJ2-3)
CASQQPGTGGADTQYF

SEQ ID NO: 225173 - protein, 14 aa, Homo sapiens
  CDR3 for alpha chain variable domain of TCR clone 112587 (TRAV1-2, TRAJ16)
CAVNRFSDGQKLLF

SEQ ID NO: 225174 - protein, 14 aa, Homo sapiens
  CDR3 for beta chain variable domain of TCR clone 112587 (TRBV7-9, TRBJ2-3)
CASSLEDGKDTQYF

SEQ ID NO: 225175 - protein, 16 aa, Homo sapiens
  CDR3 for alpha chain variable domain of TCR clone 112588 (TRAV3, TRAJ37)
CAVRGKGSGNTGKLTF

SEQ ID NO: 225176 - protein, 13 aa, Homo sapiens
  CDR3 for beta chain variable domain of TCR clone 112588 (TRBV10-3, TRBJ1-2)
CAISERDSYGYTF

SEQ ID NO: 225177 - protein, 14 aa, Homo sapiens
  CDR3 for alpha chain variable domain of TCR clone 112589 (TRAV16, TRAJ57)
CALPTQGGSEKLFF

SEQ ID NO: 225178 - protein, 15 aa, Homo sapiens
  CDR3 for beta chain variable domain of TCR clone 112589 (TRBV28, TRBJ1-3)
CASWGGHLSGNTIYF

SEQ ID NO: 225179 - protein, 11 aa, Homo sapiens
  CDR3 for alpha chain variable domain of TCR clone 112590 (TRAV2, TRAJ33)
CAADSNYQLIW

SEQ ID NO: 225180 - protein, 15 aa, Homo sapiens
  CDR3 for beta chain variable domain of TCR clone 112590 (TRBV19, TRBJ1-2)
CASSVGQVLNYGYTF

SEQ ID NO: 225181 - protein, 12 aa, Homo sapiens
  CDR3 for alpha chain variable domain of TCR clone 112591 (TRAV21, TRAJ37)
CAVRGNTGKRIF

SEQ ID NO: 225182 - protein, 14 aa, Homo sapiens
  CDR3 for beta chain variable domain of TCR clone 112591 (TRBV19, TRBJ2-1)
CASEVTGARNEQFF

SEQ ID NO: 225183 - protein, 11 aa, Homo sapiens
  CDR3 for alpha chain variable domain of TCR clone 112592 (TRAV20, TRAJ34)
CRTKGTDKLIF

SEQ ID NO: 225184 - protein, 15 aa, Homo sapiens
  CDR3 for beta chain variable domain of TCR clone 112592 (TRBV6-3, TRBJ2-7)
CASSSPGTVFYEQYF

SEQ ID NO: 225185 - protein, 14 aa, Homo sapiens
  CDR3 for alpha chain variable domain of TCR clone 112593 (TRAV12-3, TRAJ9)
CAMSPNTGGFKTIF

SEQ ID NO: 225186 - protein, 12 aa, Homo sapiens
  CDR3 for beta chain variable domain of TCR clone 112593 (TRBV19, TRBJ1-5)
CASSTAQQPQHF

SEQ ID NO: 225187 - protein, 13 aa, Homo sapiens
  CDR3 for alpha chain variable domain of TCR clone 112594 (TRAV36/DV7, TRAJ32)
CAGYGGATNKLIF

SEQ ID NO: 225188 - protein, 12 aa, Homo sapiens
  CDR3 for beta chain variable domain of TCR clone 112594 (TRBV7-2, TRBJ1-6)
CASSLSSSPLHF

SEQ ID NO: 225189 - protein, 15 aa, Homo sapiens
  CDR3 for alpha chain variable domain of TCR clone 112595 (TRAV38-1, TRAJ37)
CAFIHGSGNTGKLIF

SEQ ID NO: 225190 - protein, 15 aa, Homo sapiens
  CDR3 for beta chain variable domain of TCR clone 112595 (TRBV20-1, TRBJ2-7)
CSARDRVSGMDEQYF

SEQ ID NO: 225191 - protein, 14 aa, Homo sapiens
  CDR3 for alpha chain variable domain of TCR clone 112596 (TRAV35, TRAJ41)
CAGQASVRRNALNF

SEQ ID NO: 225192 - protein, 14 aa, Homo sapiens
  CDR3 for beta chain variable domain of TCR clone 112596 (TRBV20-1, TRBJ1-2)
CSASEQGAVYVYTF

SEQ ID NO: 225193 - protein, 17 aa, Homo sapiens
  CDR3 for alpha chain variable domain of TCR clone 112597 (TRAV26-1, TRAJ53)
CIVRVDDSGGSNYKLTF

SEQ ID NO: 225194 - protein, 15 aa, Homo sapiens
  CDR3 for beta chain variable domain of TCR clone 112597 (TRBV20-1, TRBJ2-7)
CSARVPAAYFYEQYC

SEQ ID NO: 225195 - protein, 13 aa, Homo sapiens
  CDR3 for alpha chain variable domain of TCR clone 112598 (TRAV8-3, TRAJ6)
CAVGSGGSCMPTF

SEQ ID NO: 225196 - protein, 14 aa, Homo sapiens
  CDR3 for beta chain variable domain of TCR clone 112598 (TRBV11-2, TRBJ1-1)
CASSTQRGRTEAFF

SEQ ID NO: 225197 - protein, 16 aa, Homo sapiens
  CDR3 for alpha chain variable domain of TCR clone 112599 (TRAV35, TRAJ28)
CARQRYSGAGSYQLTF

SEQ ID NO: 225198 - protein, 13 aa, Homo sapiens
  CDR3 for beta chain variable domain of TCR clone 112599 (TRBV19, TRBJ1-2)
CASSQGQVYGYTF

SEQ ID NO: 225199 - protein, 13 aa, Homo sapiens
  CDR3 for alpha chain variable domain of TCR clone 112600 (TRAV2, TRAJ40)
CAVVTSGTYKYIF

SEQ ID NO: 225200 - protein, 12 aa, Homo sapiens
  CDR3 for beta chain variable domain of TCR clone 112600 (TRBV5-7, TRBJ1-1)
CASSLGRGKAFF

SEQ ID NO: 225201 - protein, 11 aa, Homo sapiens
  CDR3 for alpha chain variable domain of TCR clone 112601 (TRAV12-3, TRAJ39)
YLSNAGNMLTF

SEQ ID NO: 225202 - protein, 13 aa, Homo sapiens
  CDR3 for beta chain variable domain of TCR clone 112601 (TRBV28, TRBJ1-2)
CASSPGNRNGYTF

SEQ ID NO: 225203 - protein, 22 aa, Homo sapiens
  CDR3 for alpha chain variable domain of TCR clone 112602 (TRAV2, TRAJ10)
ILQVREADAAVYYTGGGNKLTF

SEQ ID NO: 225204 - protein, 11 aa, Homo sapiens
  CDR3 for beta chain variable domain of TCR clone 112602 (TRBV7-3, TRBJ2-5)
CASSLSETQYF

SEQ ID NO: 225205 - protein, 18 aa, Homo sapiens
  CDR3 for alpha chain variable domain of TCR clone 112603 (TRAV12-3, TRAJ52)
CAMSVGGAGGTSYGKLTF

SEQ ID NO: 225206 - protein, 12 aa, Homo sapiens
  CDR3 for beta chain variable domain of TCR clone 112603 (TRBV28, TRBJ2-6)
CAIQAGANVLTF

SEQ ID NO: 225207 - protein, 15 aa, Homo sapiens
  CDR3 for alpha chain variable domain of TCR clone 112604 (TRAV3, TRAJ29)
CAVRDSPSGNTPLVF

SEQ ID NO: 225208 - protein, 14 aa, Homo sapiens
  CDR3 for beta chain variable domain of TCR clone 112604 (TRBV11-2, TRBJ1-2)
CASSLGTANYGYTF

SEQ ID NO: 225209 - protein, 11 aa, Homo sapiens
  CDR3 for alpha chain variable domain of TCR clone 112605 (TRAV21, TRAJ34)
CAVTNTDKLIF

SEQ ID NO: 225210 - protein, 18 aa, Homo sapiens
  CDR3 for beta chain variable domain of TCR clone 112605 (TRBV7-2, TRBJ2-2)
CASSLESGPRMNTGELFF

SEQ ID NO: 225211 - protein, 14 aa, Homo sapiens
  CDR3 for alpha chain variable domain of TCR clone 112606 (TRAV1-2, TRAJ16)
CAVNRFSDGQKLLF

SEQ ID NO: 225212 - protein, 18 aa, Homo sapiens
  CDR3 for beta chain variable domain of TCR clone 112606 (TRBV20-1, TRBJ2-6)
CSAETTPTHGSGANGLTF

SEQ ID NO: 225213 - protein, 17 aa, Homo sapiens
  CDR3 for alpha chain variable domain of TCR clone 112607 (TRAV16, TRAJ37)
CAFWPKNGSSNTGKLIF

SEQ ID NO: 225214 - protein, 14 aa, Homo sapiens
  CDR3 for beta chain variable domain of TCR clone 112607 (TRBV7-6, TRBJ2-3)
CASSLGTVTDTQYF

SEQ ID NO: 225215 - protein, 11 aa, Homo sapiens
  CDR3 for alpha chain variable domain of TCR clone 112608 (TRAV4, TRAJ31)
CLVGRNARLMF

SEQ ID NO: 225216 - protein, 16 aa, Homo sapiens
  CDR3 for beta chain variable domain of TCR clone 112608 (TRBV15, TRBJ2-6)
CATSVNGGFLANVLTF

SEQ ID NO: 225217 - protein, 13 aa, Homo sapiens
  CDR3 for alpha chain variable domain of TCR clone 112609 (TRAV8-3, TRAJ28)
CAVGAVGSYQLTF

SEQ ID NO: 225218 - protein, 13 aa, Homo sapiens
  CDR3 for beta chain variable domain of TCR clone 112609 (TRBV19, TRBJ1-2)
CASSIPGQDGYTF

SEQ ID NO: 225219 - protein, 17 aa, Homo sapiens
  CDR3 for alpha chain variable domain of TCR clone 112610 (TRAV13-1, TRAJ31)
CAPRDRLMFGDGTQLVV

SEQ ID NO: 225220 - protein, 16 aa, Homo sapiens
  CDR3 for beta chain variable domain of TCR clone 112610 (TRBV7-9, TRBJ2-7)
CASSLGLRAVLRAGHQ

SEQ ID NO: 225221 - protein, 17 aa, Homo sapiens
  CDR3 for alpha chain variable domain of TCR clone 112611 (TRAV4, TRAJ13)
CLVGVQGSSGGYQKVTF

SEQ ID NO: 225222 - protein, 18 aa, Homo sapiens
  CDR3 for beta chain variable domain of TCR clone 112611 (TRBV15, TRBJ2-3)
CATSRDGARSWYTDTQYF

SEQ ID NO: 225223 - protein, 10 aa, Homo sapiens
  CDR3 for alpha chain variable domain of TCR clone 112612 (TRAV8-4, TRAJ43)
CAVSADDMRF

SEQ ID NO: 225224 - protein, 17 aa, Homo sapiens
  CDR3 for beta chain variable domain of TCR clone 112612 (TRBV11-2, TRBJ2-1)
CASSLYPPGVEYNEQFF

SEQ ID NO: 225225 - protein, 14 aa, Homo sapiens
  CDR3 for alpha chain variable domain of TCR clone 112613 (TRAV8-2, TRAJ37)
CVVSISGNTGKLIF

SEQ ID NO: 225226 - protein, 16 aa, Homo sapiens
  CDR3 for beta chain variable domain of TCR clone 112613 (TRBV7-9, TRBJ1-2)
CASSLGFSSGEDGYTF

SEQ ID NO: 225227 - protein, 14 aa, Homo sapiens
  CDR3 for alpha chain variable domain of TCR clone 112614 (TRAV30, TRAJ33)
CGTVASRSNYQLIW

SEQ ID NO: 225228 - protein, 16 aa, Homo sapiens
  CDR3 for beta chain variable domain of TCR clone 112614 (TRBV3-1, TRBJ2-5)
CASSPGQFNGFGTQYF

SEQ ID NO: 225229 - protein, 15 aa, Homo sapiens
  CDR3 for alpha chain variable domain of TCR clone 112615 (TRAV3, TRAJ22)
CAVRGRGGSARQLTF

SEQ ID NO: 225230 - protein, 14 aa, Homo sapiens
  CDR3 for beta chain variable domain of TCR clone 112615 (TRBV19, TRBJ1-5)
CASSLGLIGQPQHF

SEQ ID NO: 225231 - protein, 13 aa, Homo sapiens
  CDR3 for alpha chain variable domain of TCR clone 112616 (TRAV13-1, TRAJ20)
CAARVSNDYKLSF

SEQ ID NO: 225232 - protein, 12 aa, Homo sapiens
  CDR3 for beta chain variable domain of TCR clone 112616 (TRBV20-1, TRBJ2-1)
CSARLGTDEQFS

SEQ ID NO: 225233 - protein, 13 aa, Homo sapiens
  CDR3 for alpha chain variable domain of TCR clone 112617 (TRAV29/DV5, TRAJ44)
CAASNGTASKLTF

SEQ ID NO: 225234 - protein, 13 aa, Homo sapiens
  CDR3 for beta chain variable domain of TCR clone 112617 (TRBV19, TRBJ2-7)
CASRKAGGSEQYF

SEQ ID NO: 225235 - protein, 19 aa, Homo sapiens
  CDR3 for alpha chain variable domain of TCR clone 112618 (TRAV26-1, TRAJ52)
CIVRAHRNAAGTSYGKLTF

SEQ ID NO: 225236 - protein, 15 aa, Homo sapiens
  CDR3 for beta chain variable domain of TCR clone 112618 (TRBV12-4, TRBJ2-5)
CASSPPTGLQETQYF

SEQ ID NO: 225237 - protein, 16 aa, Homo sapiens
  CDR3 for alpha chain variable domain of TCR clone 112619 (TRAV3, TRAJ23)
CAVKIGIYNQGGKLTF

SEQ ID NO: 225238 - protein, 17 aa, Homo sapiens
  CDR3 for beta chain variable domain of TCR clone 112619 (TRBV10-3, TRBJ2-6)
CAISESTAPSGANVLTF

SEQ ID NO: 225239 - protein, 16 aa, Homo sapiens
  CDR3 for alpha chain variable domain of TCR clone 112620 (TRAV12-2, TRAJ18)
CSVTTDRGSTLGRLYF

SEQ ID NO: 225240 - protein, 15 aa, Homo sapiens
  CDR3 for beta chain variable domain of TCR clone 112620 (TRBV9, TRBJ1-6)
CASSVAGTGDSPLHF

SEQ ID NO: 225241 - protein, 13 aa, Homo sapiens
  CDR3 for alpha chain variable domain of TCR clone 112621 (TRAV35, TRAJ42)
CAGFPGSQGNLIL

SEQ ID NO: 225242 - protein, 14 aa, Homo sapiens
  CDR3 for beta chain variable domain of TCR clone 112621 (TRBV4-1, TRBJ2-2)
CASSQAVNTGELFF

SEQ ID NO: 225243 - protein, 14 aa, Homo sapiens
  CDR3 for alpha chain variable domain of TCR clone 112622 (TRAV35, TRAJ13)
CAGSPSGGYQKVTF

SEQ ID NO: 225244 - protein, 13 aa, Homo sapiens
  CDR3 for beta chain variable domain of TCR clone 112622 (TRBV29-1, TRBJ1-1)
CSVGDSGNTEAFF

SEQ ID NO: 225245 - protein, 16 aa, Homo sapiens
  CDR3 for alpha chain variable domain of TCR clone 112623 (TRAV26-1, TRAJ52)
CIVSNAGVTSYGKLTF

SEQ ID NO: 225246 - protein, 15 aa, Homo sapiens
  CDR3 for beta chain variable domain of TCR clone 112623 (TRBV7-3, TRBJ2-1)
CASSPTGGGEVEQFF

SEQ ID NO: 225247 - protein, 13 aa, Homo sapiens
  CDR3 for alpha chain variable domain of TCR clone 112624 (TRAV3, TRAJ21)
CAGREPDFNKFYF

SEQ ID NO: 225248 - protein, 18 aa, Homo sapiens
  CDR3 for beta chain variable domain of TCR clone 112624 (TRBV11-2, TRBJ2-3)
CASSLGGASRGAPNTQYF

SEQ ID NO: 225249 - protein, 15 aa, Homo sapiens
  CDR3 for alpha chain variable domain of TCR clone 112625 (TRAV13-2, TRAJ58)
CVTAQKETSGPRLTF

SEQ ID NO: 225250 - protein, 14 aa, Homo sapiens
  CDR3 for beta chain variable domain of TCR clone 112625 (TRBV7-2, TRBJ2-3)
CASRRGLAADTQYF

SEQ ID NO: 225251 - protein, 13 aa, Homo sapiens
  CDR3 for alpha chain variable domain of TCR clone 112626 (TRAV3, TRAJ21)
CAVREPDFNKFYF

SEQ ID NO: 225252 - protein, 14 aa, Homo sapiens
  CDR3 for beta chain variable domain of TCR clone 112626 (TRBV18, TRBJ2-7)
CASSPRGGAYEQYF

SEQ ID NO: 225253 - protein, 17 aa, Homo sapiens
  CDR3 for alpha chain variable domain of TCR clone 112627 (TRAV16, TRAJ53)
CALPAMNSGGSNYKLTF

SEQ ID NO: 225254 - protein, 12 aa, Homo sapiens
  CDR3 for beta chain variable domain of TCR clone 112627 (TRBV6-3, TRBJ2-7)
CASSLTPYEQYF

SEQ ID NO: 225255 - protein, 12 aa, Homo sapiens
  CDR3 for alpha chain variable domain of TCR clone 112628 (TRAV21, TRAJ58)
CAFSASGSRLTF

SEQ ID NO: 225256 - protein, 13 aa, Homo sapiens
  CDR3 for beta chain variable domain of TCR clone 112628 (TRBV5-7, TRBJ1-2)
CASSLGVFNGYTF

SEQ ID NO: 225257 - protein, 13 aa, Homo sapiens
  CDR3 for alpha chain variable domain of TCR clone 112629 (TRAV8-3, TRAJ28)
CAVGAVGSYQLTF

SEQ ID NO: 225258 - protein, 14 aa, Homo sapiens
  CDR3 for beta chain variable domain of TCR clone 112629 (TRBV5-1, TRBJ2-7)
CASSATGGYDEQYF

SEQ ID NO: 225259 - protein, 16 aa, Homo sapiens
  CDR3 for alpha chain variable domain of TCR clone 112630 (TRAV16, TRAJ52)
CALSGVGGTSYGKLTF

SEQ ID NO: 225260 - protein, 12 aa, Homo sapiens
  CDR3 for beta chain variable domain of TCR clone 112630 (TRBV12-4, TRBJ2-7)
CASSLGGYEQYF

SEQ ID NO: 225261 - protein, 14 aa, Homo sapiens
  CDR3 for alpha chain variable domain of TCR clone 112631 (TRAV8-4, TRAJ9)
CAVRINTGGFKTIF

SEQ ID NO: 225262 - protein, 15 aa, Homo sapiens
  CDR3 for beta chain variable domain of TCR clone 112631 (TRBV10-2, TRBJ2-6)
CASSEQGTGANVLTF

SEQ ID NO: 225263 - protein, 11 aa, Homo sapiens
  CDR3 for alpha chain variable domain of TCR clone 112632 (TRAV1-2, TRAJ20)
CAVANDYKLSF

SEQ ID NO: 225264 - protein, 18 aa, Homo sapiens
  CDR3 for beta chain variable domain of TCR clone 112632 (TRBV4-3, TRBJ1-6)
CASSQDPGVYNSPSTLGM

SEQ ID NO: 225265 - protein, 14 aa, Homo sapiens
  CDR3 for alpha chain variable domain of TCR clone 112633 (TRAV13-1, TRAJ11)
CAASRRSGYSTLTF

SEQ ID NO: 225266 - protein, 13 aa, Homo sapiens
  CDR3 for beta chain variable domain of TCR clone 112633 (TRBV20-1, TRBJ2-1)
CSARSSPRDEQFF

SEQ ID NO: 225267 - protein, 15 aa, Homo sapiens
  CDR3 for alpha chain variable domain of TCR clone 112634 (TRAV38-1, TRAJ37)
CAFIHGSGSTGKLIF

SEQ ID NO: 225268 - protein, 12 aa, Homo sapiens
  CDR3 for beta chain variable domain of TCR clone 112634 (TRBV7-9, TRBJ2-7)
CASSFGSYEQYF

SEQ ID NO: 225269 - protein, 15 aa, Homo sapiens
  CDR3 for alpha chain variable domain of TCR clone 112635 (TRAV35, TRAJ50)
CAGQLRKTTYDKVIF

SEQ ID NO: 225270 - protein, 12 aa, Homo sapiens
  CDR3 for beta chain variable domain of TCR clone 112635 (TRBV5-1, TRBJ2-5)
CASSLGLETQYF

SEQ ID NO: 225271 - protein, 14 aa, Homo sapiens
  CDR3 for alpha chain variable domain of TCR clone 112636 (TRAV26-1, TRAJ44)
CIVKSTGTASKLTF

SEQ ID NO: 225272 - protein, 15 aa, Homo sapiens
  CDR3 for beta chain variable domain of TCR clone 112636 (TRBV19, TRBJ2-4)
CASSDGGGAKNSQYF

SEQ ID NO: 225273 - protein, 11 aa, Homo sapiens
  CDR3 for alpha chain variable domain of TCR clone 112637 (TRAV13-1, TRAJ49)
CACVGGNQFYF

SEQ ID NO: 225274 - protein, 15 aa, Homo sapiens
  CDR3 for beta chain variable domain of TCR clone 112637 (TRBV7-9, TRBJ1-6)
CASSSPGRGNSPLHF

SEQ ID NO: 225275 - protein, 10 aa, Homo sapiens
  CDR3 for alpha chain variable domain of TCR clone 112638 (TRAV12-1, TRAJ43)
CLVHNNDMRF

SEQ ID NO: 225276 - protein, 13 aa, Homo sapiens
  CDR3 for beta chain variable domain of TCR clone 112638 (TRBV12-4, TRBJ1-2)
CASSSGLTVISTF

SEQ ID NO: 225277 - protein, 12 aa, Homo sapiens
  CDR3 for alpha chain variable domain of TCR clone 112639 (TRAV2, TRAJ5)
CALDTGRRALTF

SEQ ID NO: 225278 - protein, 15 aa, Homo sapiens
  CDR3 for beta chain variable domain of TCR clone 112639 (TRBV10-3, TRBJ2-1)
CAISDVQDMAYEQFF

SEQ ID NO: 225279 - protein, 15 aa, Homo sapiens
  CDR3 for alpha chain variable domain of TCR clone 112640 (TRAV26-1, TRAJ15)
CIVRAANQAGTALIF

SEQ ID NO: 225280 - protein, 15 aa, Homo sapiens
  CDR3 for beta chain variable domain of TCR clone 112640 (TRBV20-1, TRBJ1-1)
CIARSAATSNTEAFF

SEQ ID NO: 225281 - protein, 22 aa, Homo sapiens
  CDR3 for alpha chain variable domain of TCR clone 112641 (TRAV39, TRAJ49)
PCMSSLPPTSVPWTNTGNQFYF

SEQ ID NO: 225282 - protein, 17 aa, Homo sapiens
  CDR3 for beta chain variable domain of TCR clone 112641 (TRBV20-1, TRBJ2-1)
CSARDRRRASSYNEQFF

SEQ ID NO: 225283 - protein, 12 aa, Homo sapiens
  CDR3 for alpha chain variable domain of TCR clone 112642 (TRAV17, TRAJ20)
CATDSNDCKLSF

SEQ ID NO: 225284 - protein, 17 aa, Homo sapiens
  CDR3 for beta chain variable domain of TCR clone 112642 (TRBV5-1, TRBJ2-2)
CASSLAGLSGGTGELFF

SEQ ID NO: 225285 - protein, 14 aa, Homo sapiens
  CDR3 for alpha chain variable domain of TCR clone 112643 (TRAV17, TRAJ57)
CATDPQGGSEKLVF

SEQ ID NO: 225286 - protein, 16 aa, Homo sapiens
  CDR3 for beta chain variable domain of TCR clone 112643 (TRBV7-2, TRBJ1-2)
CASSSNQDRRGHGYTF

SEQ ID NO: 225287 - protein, 15 aa, Homo sapiens
  CDR3 for alpha chain variable domain of TCR clone 112644 (TRAV26-1, TRAJ23)
CIVRVAGYQGGKLIF

SEQ ID NO: 225288 - protein, 18 aa, Homo sapiens
  CDR3 for beta chain variable domain of TCR clone 112644 (TRBV28, TRBJ2-1)
CASSSTSGSANSYNEQFF

SEQ ID NO: 225289 - protein, 13 aa, Homo sapiens
  CDR3 for alpha chain variable domain of TCR clone 112645 (TRAV8-3, TRAJ28)
CAVGAVGSYQLTF

SEQ ID NO: 225290 - protein, 15 aa, Homo sapiens
  CDR3 for beta chain variable domain of TCR clone 112645 (TRBV7-9, TRBJ1-5)
CASSQGDQPNQPQHF

SEQ ID NO: 225291 - protein, 16 aa, Homo sapiens
  CDR3 for alpha chain variable domain of TCR clone 112646 (TRAV3, TRAJ37)
CAVRPHGSGNTGKLNF

SEQ ID NO: 225292 - protein, 16 aa, Homo sapiens
  CDR3 for beta chain variable domain of TCR clone 112646 (TRBV9, TRBJ1-2)
CASSVEEKVSPYGYTF

SEQ ID NO: 225293 - protein, 14 aa, Homo sapiens
  CDR3 for alpha chain variable domain of TCR clone 112647 (TRAV34, TRAJ44)
CGADGTGTASKLTF

SEQ ID NO: 225294 - protein, 13 aa, Homo sapiens
  CDR3 for beta chain variable domain of TCR clone 112647 (TRBV2, TRBJ1-5)
CATAGPGNQPQHF

SEQ ID NO: 225295 - protein, 13 aa, Homo sapiens
  CDR3 for alpha chain variable domain of TCR clone 112648 (TRAV27, TRAJ56)
CAGKPGANRKLTF

SEQ ID NO: 225296 - protein, 15 aa, Homo sapiens
  CDR3 for beta chain variable domain of TCR clone 112648 (TRBV6-1, TRBJ2-3)
CASSERWDSTDTQYF

SEQ ID NO: 225297 - protein, 12 aa, Homo sapiens
  CDR3 for alpha chain variable domain of TCR clone 112649 (TRAV8-3, TRAJ26)
CAGDNYGQNFVF

SEQ ID NO: 225298 - protein, 12 aa, Homo sapiens
  CDR3 for beta chain variable domain of TCR clone 112649 (TRBV11-2, TRBJ2-2)
CASSRGGGELFF

SEQ ID NO: 225299 - protein, 13 aa, Homo sapiens
  CDR3 for alpha chain variable domain of TCR clone 112650 (TRAV8-4, TRAJ9)
CAVSETGGFKTIF

SEQ ID NO: 225300 - protein, 16 aa, Homo sapiens
  CDR3 for beta chain variable domain of TCR clone 112650 (TRBV19, TRBJ2-3)
CASSSIAGTRTDTQYF

SEQ ID NO: 225301 - protein, 11 aa, Homo sapiens
  CDR3 for alpha chain variable domain of TCR clone 112651 (TRAV12-2, TRAJ31)
CAILNNARPMF

SEQ ID NO: 225302 - protein, 16 aa, Homo sapiens
  CDR3 for beta chain variable domain of TCR clone 112651 (TRBV13, TRBJ2-2)
CASSPRTGEHTGELFF

SEQ ID NO: 225303 - protein, 16 aa, Homo sapiens
  CDR3 for alpha chain variable domain of TCR clone 112652 (TRAV30, TRAJ24)
CGTEIVDADSWGKFQF

SEQ ID NO: 225304 - protein, 17 aa, Homo sapiens
  CDR3 for beta chain variable domain of TCR clone 112652 (TRBV18, TRBJ2-3)
CASSPFGDGGFTDTQYF

SEQ ID NO: 225305 - protein, 14 aa, Homo sapiens
  CDR3 for alpha chain variable domain of TCR clone 112653 (TRAV1-2, TRAJ16)
CAVNRFSDGQKLLF

SEQ ID NO: 225306 - protein, 17 aa, Homo sapiens
  CDR3 for beta chain variable domain of TCR clone 112653 (TRBV3-1, TRBJ2-7)
CASSQDLTGLSSYEQYF

SEQ ID NO: 225307 - protein, 12 aa, Homo sapiens
  CDR3 for alpha chain variable domain of TCR clone 112654 (TRAV13-2, TRAJ23)
CAGRHRGGKLIF

SEQ ID NO: 225308 - protein, 14 aa, Homo sapiens
  CDR3 for beta chain variable domain of TCR clone 112654 (TRBV6-1, TRBJ1-3)
CASVQGGGGNTIYF

SEQ ID NO: 225309 - protein, 15 aa, Homo sapiens
  CDR3 for alpha chain variable domain of TCR clone 112655 (TRAV25, TRAJ53)
CAATGGGGSNYKLTF

SEQ ID NO: 225310 - protein, 16 aa, Homo sapiens
  CDR3 for beta chain variable domain of TCR clone 112655 (TRBV12-5, TRBJ2-5)
CASGPRTSGNQETQYF

SEQ ID NO: 225311 - protein, 14 aa, Homo sapiens
  CDR3 for alpha chain variable domain of TCR clone 112656 (TRAV8-4, TRAJ34)
CAVSDPGDTDKLIF

SEQ ID NO: 225312 - protein, 15 aa, Homo sapiens
  CDR3 for beta chain variable domain of TCR clone 112656 (TRBV5-1, TRBJ2-7)
CASSLNGGPAREQYF

SEQ ID NO: 225313 - protein, 13 aa, Homo sapiens
  CDR3 for alpha chain variable domain of TCR clone 112657 (TRAV12-2, TRAJ10)
CAVPTGGGNRLTF

SEQ ID NO: 225314 - protein, 14 aa, Homo sapiens
  CDR3 for beta chain variable domain of TCR clone 112657 (TRBV6-1, TRBJ1-3)
CASVQGGGGNTIYF

SEQ ID NO: 225315 - protein, 13 aa, Homo sapiens
  CDR3 for alpha chain variable domain of TCR clone 112658 (TRAV8-4, TRAJ30)
CAVSVNRDDKIIF

SEQ ID NO: 225316 - protein, 12 aa, Homo sapiens
  CDR3 for beta chain variable domain of TCR clone 112658 (TRBV29-1, TRBJ2-3)
CSVTGGADTQYF

SEQ ID NO: 225317 - protein, 13 aa, Homo sapiens
  CDR3 for alpha chain variable domain of TCR clone 112659 (TRAV35, TRAJ36)
CAGPRIGANNLFF

SEQ ID NO: 225318 - protein, 15 aa, Homo sapiens
  CDR3 for beta chain variable domain of TCR clone 112659 (TRBV28, TRBJ2-5)
CASSHPWSYQETQYF

SEQ ID NO: 225319 - protein, 13 aa, Homo sapiens
  CDR3 for alpha chain variable domain of TCR clone 112660 (TRAV16, TRAJ34)
CALTGYNTDKLIF

SEQ ID NO: 225320 - protein, 13 aa, Homo sapiens
  CDR3 for beta chain variable domain of TCR clone 112660 (TRBV6-1, TRBJ2-1)
CASREDGGNEQFF

SEQ ID NO: 225321 - protein, 13 aa, Homo sapiens
  CDR3 for alpha chain variable domain of TCR clone 112661 (TRAV13-2, TRAJ48)
CAEMDFGNEKLTF

SEQ ID NO: 225322 - protein, 13 aa, Homo sapiens
  CDR3 for beta chain variable domain of TCR clone 112661 (TRBV7-9, TRBJ1-2)
CASSLKQSYGYTF

SEQ ID NO: 225323 - protein, 23 aa, Homo sapiens
  CDR3 for alpha chain variable domain of TCR clone 112662 (TRAV12-2, TRAJ36)
SLLIRDSQPSDSATLERANNLFF

SEQ ID NO: 225324 - protein, 15 aa, Homo sapiens
  CDR3 for beta chain variable domain of TCR clone 112662 (TRBV7-3, TRBJ2-1)
CASSPTGGGEVEQFF

SEQ ID NO: 225325 - protein, 11 aa, Homo sapiens
  CDR3 for alpha chain variable domain of TCR clone 112663 (TRAV1-1, TRAJ23)
CAVRQGGKLIF

SEQ ID NO: 225326 - protein, 15 aa, Homo sapiens
  CDR3 for beta chain variable domain of TCR clone 112663 (TRBV7-2, TRBJ2-7)
CASSLKGALTYEQYF

SEQ ID NO: 225327 - protein, 12 aa, Homo sapiens
  CDR3 for alpha chain variable domain of TCR clone 112664 (TRAV10, TRAJ43)
CVVVRVGNDMRF

SEQ ID NO: 225328 - protein, 13 aa, Homo sapiens
  CDR3 for beta chain variable domain of TCR clone 112664 (TRBV6-3, TRBJ2-1)
CASLAGGFDEQFF

SEQ ID NO: 225329 - protein, 13 aa, Homo sapiens
  CDR3 for alpha chain variable domain of TCR clone 112665 (TRAV1-2, TRAJ9)
CAVLNTGGFKTIF

SEQ ID NO: 225330 - protein, 14 aa, Homo sapiens
  CDR3 for beta chain variable domain of TCR clone 112665 (TRBV20-1, TRBJ2-3)
CSARGGTNTDTQYF

SEQ ID NO: 225331 - protein, 13 aa, Homo sapiens
  CDR3 for alpha chain variable domain of TCR clone 112666 (TRAV21, TRAJ27)
CAARPGNAGKSTF

SEQ ID NO: 225332 - protein, 15 aa, Homo sapiens
  CDR3 for beta chain variable domain of TCR clone 112666 (TRBV6-6, TRBJ2-2)
CASSRTSGNTGELFF

SEQ ID NO: 225333 - protein, 16 aa, Homo sapiens
  CDR3 for alpha chain variable domain of TCR clone 112667 (TRAV30, TRAJ24)
CGTEIVDADSWGKFRF

SEQ ID NO: 225334 - protein, 15 aa, Homo sapiens
  CDR3 for beta chain variable domain of TCR clone 112667 (TRBV18, TRBJ2-1)
CASLPDRGRDNEQFF

SEQ ID NO: 225335 - protein, 18 aa, Homo sapiens
  CDR3 for alpha chain variable domain of TCR clone 112668 (TRAV16, TRAJ52)
CALRGVDAGGTSYGKLTF

SEQ ID NO: 225336 - protein, 15 aa, Homo sapiens
  CDR3 for beta chain variable domain of TCR clone 112668 (TRBV11-3, TRBJ2-3)
CASSAGTVVTNTQYF

SEQ ID NO: 225337 - protein, 16 aa, Homo sapiens
  CDR3 for alpha chain variable domain of TCR clone 112669 (TRAV12-2, TRAJ43)
CAGDDMRFGAGTRLTV

SEQ ID NO: 225338 - protein, 14 aa, Homo sapiens
  CDR3 for beta chain variable domain of TCR clone 112669 (TRBV7-6, TRBJ2-3)
CASSLGTVTDTQYF

SEQ ID NO: 225339 - protein, 14 aa, Homo sapiens
  CDR3 for alpha chain variable domain of TCR clone 112670 (TRAV14/DV4, TRAJ15)
CAMRRDQAGTALIF

SEQ ID NO: 225340 - protein, 16 aa, Homo sapiens
  CDR3 for beta chain variable domain of TCR clone 112670 (TRBV15, TRBJ2-3)
CATGRDLGIVTDTQYF

SEQ ID NO: 225341 - protein, 13 aa, Homo sapiens
  CDR3 for alpha chain variable domain of TCR clone 112671 (TRAV17, TRAJ5)
CALRGTGRRALTF

SEQ ID NO: 225342 - protein, 15 aa, Homo sapiens
  CDR3 for beta chain variable domain of TCR clone 112671 (TRBV6-1, TRBJ1-5)
CASSELREGSQPQHF

SEQ ID NO: 225343 - protein, 16 aa, Homo sapiens
  CDR3 for alpha chain variable domain of TCR clone 112672 (TRAV3, TRAJ37)
CAVRGKGSGNTGKIIF

SEQ ID NO: 225344 - protein, 16 aa, Homo sapiens
  CDR3 for beta chain variable domain of TCR clone 112672 (TRBV12-5, TRBJ2-5)
CASGPRTSGNQETQYF

SEQ ID NO: 225345 - protein, 14 aa, Homo sapiens
  CDR3 for alpha chain variable domain of TCR clone 112673 (TRAV12-2, TRAJ40)
CAVKIPQGTYKYIF

SEQ ID NO: 225346 - protein, 14 aa, Homo sapiens
  CDR3 for beta chain variable domain of TCR clone 112673 (TRBV20-1, TRBJ1-1)
CSAQTRIGGTEAFF

SEQ ID NO: 225347 - protein, 13 aa, Homo sapiens
  CDR3 for alpha chain variable domain of TCR clone 112674 (TRAV1-1, TRAJ9)
CAANNTGGFKTIF

SEQ ID NO: 225348 - protein, 14 aa, Homo sapiens
  CDR3 for beta chain variable domain of TCR clone 112674 (TRBV12-5, TRBJ2-5)
CASGSRTHQETQYF

SEQ ID NO: 225349 - protein, 23 aa, Homo sapiens
  CDR3 for alpha chain variable domain of TCR clone 112675 (TRAV17, TRAJ36)
CAQLGQTTSSLGLERDSPLFPIS

SEQ ID NO: 225350 - protein, 12 aa, Homo sapiens
  CDR3 for beta chain variable domain of TCR clone 112675 (TRBV29-1, TRBJ2-3)
CSVVLGADTQYF

SEQ ID NO: 225351 - protein, 13 aa, Homo sapiens
  CDR3 for alpha chain variable domain of TCR clone 112676 (TRAV2, TRAJ21)
CAVEDLNVNKFYF

SEQ ID NO: 225352 - protein, 15 aa, Homo sapiens
  CDR3 for beta chain variable domain of TCR clone 112676 (TRBV28, TRBJ2-5)
CASSPGQGSIETQYF

SEQ ID NO: 225353 - protein, 11 aa, Homo sapiens
  CDR3 for alpha chain variable domain of TCR clone 112677 (TRAV2, TRAJ33)
CAVDSNYQLIW

SEQ ID NO: 225354 - protein, 13 aa, Homo sapiens
  CDR3 for beta chain variable domain of TCR clone 112677 (TRBV7-9, TRBJ2-2)
CASSLDPTGELFF

SEQ ID NO: 225355 - protein, 12 aa, Homo sapiens
  CDR3 for alpha chain variable domain of TCR clone 112678 (TRAV8-3, TRAJ26)
CAGDNYGQNFVF

SEQ ID NO: 225356 - protein, 14 aa, Homo sapiens
  CDR3 for beta chain variable domain of TCR clone 112678 (TRBV7-3, TRBJ2-1)
CASSLAGGTNEQFF

SEQ ID NO: 225357 - protein, 14 aa, Homo sapiens
  CDR3 for alpha chain variable domain of TCR clone 112679 (TRAV3, TRAJ21)
CAVRDAYNFNKFYF

SEQ ID NO: 225358 - protein, 13 aa, Homo sapiens
  CDR3 for beta chain variable domain of TCR clone 112679 (TRBV11-2, TRBJ2-7)
CASSGTRPYEQYF

SEQ ID NO: 225359 - protein, 13 aa, Homo sapiens
  CDR3 for alpha chain variable domain of TCR clone 112680 (TRAV16, TRAJ54)
CALKVRGAQKLVF

SEQ ID NO: 225360 - protein, 14 aa, Homo sapiens
  CDR3 for beta chain variable domain of TCR clone 112680 (TRBV7-2, TRBJ1-1)
CASSFLTGTTEAFF

SEQ ID NO: 225361 - protein, 15 aa, Homo sapiens
  CDR3 for alpha chain variable domain of TCR clone 112681 (TRAV38-1, TRAJ57)
CAFMDSQGGSEKLVF

SEQ ID NO: 225362 - protein, 15 aa, Homo sapiens
  CDR3 for beta chain variable domain of TCR clone 112681 (TRBV12-4, TRBJ1-2)
CASSPITGGGYGYTF

SEQ ID NO: 225363 - protein, 15 aa, Homo sapiens
  CDR3 for alpha chain variable domain of TCR clone 112682 (TRAV17, TRAJ16)
CATALRFSDGKKLLF

SEQ ID NO: 225364 - protein, 15 aa, Homo sapiens
  CDR3 for beta chain variable domain of TCR clone 112682 (TRBV13, TRBJ1-5)
CASSFGQGGVQPQHF

SEQ ID NO: 225365 - protein, 15 aa, Homo sapiens
  CDR3 for alpha chain variable domain of TCR clone 112683 (TRAV29/DV5, TRAJ29)
CAASERSPGNTPLVF

SEQ ID NO: 225366 - protein, 12 aa, Homo sapiens
  CDR3 for beta chain variable domain of TCR clone 112683 (TRBV7-9, TRBJ1-4)
CASSTDREKLFF

SEQ ID NO: 225367 - protein, 15 aa, Homo sapiens
  CDR3 for alpha chain variable domain of TCR clone 112684 (TRAV3, TRAJ29)
CAVRDINSGNAPLVF

SEQ ID NO: 225368 - protein, 16 aa, Homo sapiens
  CDR3 for beta chain variable domain of TCR clone 112684 (TRBV4-1, TRBJ2-5)
CASSQTFYGDQETQYL

SEQ ID NO: 225369 - protein, 12 aa, Homo sapiens
  CDR3 for alpha chain variable domain of TCR clone 112685 (TRAV29/DV5, TRAJ41)
CAAISSGYALNF

SEQ ID NO: 225370 - protein, 16 aa, Homo sapiens
  CDR3 for beta chain variable domain of TCR clone 112685 (TRBV7-3, TRBJ2-2)
CASSLKRGTLSGELFF

SEQ ID NO: 225371 - protein, 17 aa, Homo sapiens
  CDR3 for alpha chain variable domain of TCR clone 112686 (TRAV13-1, TRAJ31)
CAPRDRLMFGDGTQLVV

SEQ ID NO: 225372 - protein, 18 aa, Homo sapiens
  CDR3 for beta chain variable domain of TCR clone 112686 (TRBV4-1, TRBJ2-7)
CASSQAPGTGTLGDEQYF

SEQ ID NO: 225373 - protein, 16 aa, Homo sapiens
  CDR3 for alpha chain variable domain of TCR clone 112687 (TRAV30, TRAJ24)
CGTEIVDADSWGKFQF

SEQ ID NO: 225374 - protein, 14 aa, Homo sapiens
  CDR3 for beta chain variable domain of TCR clone 112687 (TRBV28, TRBJ1-1)
CASSFPRKNTEAFF

SEQ ID NO: 225375 - protein, 14 aa, Homo sapiens
  CDR3 for alpha chain variable domain of TCR clone 112688 (TRAV8-3, TRAJ35)
CAVVPQGFGNVLHC

SEQ ID NO: 225376 - protein, 15 aa, Homo sapiens
  CDR3 for beta chain variable domain of TCR clone 112688 (TRBV20-1, TRBJ2-7)
CSARDRVSGMDEQYF

SEQ ID NO: 225377 - protein, 10 aa, Homo sapiens
  CDR3 for alpha chain variable domain of TCR clone 112689 (TRAV23/DV6, TRAJ57)
CSASPTLSQG

SEQ ID NO: 225378 - protein, 14 aa, Homo sapiens
  CDR3 for beta chain variable domain of TCR clone 112689 (TRBV25-1, TRBJ1-1)
CASTHLGGNTEAFF

SEQ ID NO: 225379 - protein, 14 aa, Homo sapiens
  CDR3 for alpha chain variable domain of TCR clone 112690 (TRAV12-2, TRAJ13)
CAVEKTGGYQKVTF

SEQ ID NO: 225380 - protein, 15 aa, Homo sapiens
  CDR3 for beta chain variable domain of TCR clone 112690 (TRBV27, TRBJ2-1)
CASSDGGGSSNEQFF

SEQ ID NO: 225381 - protein, 14 aa, Homo sapiens
  CDR3 for alpha chain variable domain of TCR clone 112691 (TRAV12-3, TRAJ58)
CAMSTETRGSRLTF

SEQ ID NO: 225382 - protein, 13 aa, Homo sapiens
  CDR3 for beta chain variable domain of TCR clone 112691 (TRBV27, TRBJ2-3)
CASSWGRTDTQYF

SEQ ID NO: 225383 - protein, 16 aa, Homo sapiens
  CDR3 for alpha chain variable domain of TCR clone 112692 (TRAV3, TRAJ37)
CAVRPHGSGNTGKLIF

SEQ ID NO: 225384 - protein, 14 aa, Homo sapiens
  CDR3 for beta chain variable domain of TCR clone 112692 (TRBV25-1, TRBJ1-1)
CASTNLGGNTEAFF

SEQ ID NO: 225385 - protein, 10 aa, Homo sapiens
  CDR3 for alpha chain variable domain of TCR clone 112693 (TRAV12-3, TRAJ49)
CAMNDDQFYF

SEQ ID NO: 225386 - protein, 13 aa, Homo sapiens
  CDR3 for beta chain variable domain of TCR clone 112693 (TRBV12-4, TRBJ1-1)
CASSPGRGFEAFF

SEQ ID NO: 225387 - protein, 14 aa, Homo sapiens
  CDR3 for alpha chain variable domain of TCR clone 112694 (TRAV1-2, TRAJ16)
CAVNRFSDGQKLLF

SEQ ID NO: 225388 - protein, 15 aa, Homo sapiens
  CDR3 for beta chain variable domain of TCR clone 112694 (TRBV11-3, TRBJ2-2)
CASSYFSTGTGELFF

SEQ ID NO: 225389 - protein, 15 aa, Homo sapiens
  CDR3 for alpha chain variable domain of TCR clone 112695 (TRAV26-1, TRAJ29)
CIVRVEGSGNTPLVF

SEQ ID NO: 225390 - protein, 14 aa, Homo sapiens
  CDR3 for beta chain variable domain of TCR clone 112695 (TRBV25-1, TRBJ1-1)
CASTHLGGNTESFF

SEQ ID NO: 225391 - protein, 16 aa, Homo sapiens
  CDR3 for alpha chain variable domain of TCR clone 112696 (TRAV30, TRAJ24)
CGTEIVDADSWGKFQF

SEQ ID NO: 225392 - protein, 15 aa, Homo sapiens
  CDR3 for beta chain variable domain of TCR clone 112696 (TRBV18, TRBJ2-7)
CASSPRSGTAYEQYF

SEQ ID NO: 225393 - protein, 12 aa, Homo sapiens
  CDR3 for alpha chain variable domain of TCR clone 112697 (TRAV26-1, TRAJ35)
CIGLSFGNVLHC

SEQ ID NO: 225394 - protein, 17 aa, Homo sapiens
  CDR3 for beta chain variable domain of TCR clone 112697 (TRBV11-3, TRBJ2-5)
CASSLPGVRGGKETQYF

SEQ ID NO: 225395 - protein, 13 aa, Homo sapiens
  CDR3 for alpha chain variable domain of TCR clone 112698 (TRAV12-2, TRAJ10)
CAVPTGGGNKLTF

SEQ ID NO: 225396 - protein, 14 aa, Homo sapiens
  CDR3 for beta chain variable domain of TCR clone 112698 (TRBV6-1, TRBJ1-3)
CASVQGGGGNNIYF

SEQ ID NO: 225397 - protein, 17 aa, Homo sapiens
  CDR3 for alpha chain variable domain of TCR clone 112699 (TRAV13-1, TRAJ28)
CAASHPYSGAGSYQLTF

SEQ ID NO: 225398 - protein, 15 aa, Homo sapiens
  CDR3 for beta chain variable domain of TCR clone 112699 (TRBV6-3, TRBJ2-2)
CASSFLATLTGELFF

SEQ ID NO: 225399 - protein, 14 aa, Homo sapiens
  CDR3 for alpha chain variable domain of TCR clone 112700 (TRAV1-1, TRAJ30)
CAVRSLNRDDKIIF

SEQ ID NO: 225400 - protein, 15 aa, Homo sapiens
  CDR3 for beta chain variable domain of TCR clone 112700 (TRBV27, TRBJ1-4)
RASSAQQDLNEKLFF

SEQ ID NO: 225401 - protein, 14 aa, Homo sapiens
  CDR3 for alpha chain variable domain of TCR clone 112701 (TRAV1-2, TRAJ8)
CAVREDTGFQRLGF

SEQ ID NO: 225402 - protein, 15 aa, Homo sapiens
  CDR3 for beta chain variable domain of TCR clone 112701 (TRBV12-4, TRBJ2-5)
CASSPPTGLQETQYF

SEQ ID NO: 225403 - protein, 15 aa, Homo sapiens
  CDR3 for alpha chain variable domain of TCR clone 112702 (TRAV26-1, TRAJ23)
CIVRVAGYQGGKLIF

SEQ ID NO: 225404 - protein, 18 aa, Homo sapiens
  CDR3 for beta chain variable domain of TCR clone 112702 (TRBV28, TRBJ2-1)
CASSSTSGRANSYTEQFF

SEQ ID NO: 225405 - protein, 12 aa, Homo sapiens
  CDR3 for alpha chain variable domain of TCR clone 112703 (TRAV8-3, TRAJ43)
CAVVAGNNDMRF

SEQ ID NO: 225406 - protein, 14 aa, Homo sapiens
  CDR3 for beta chain variable domain of TCR clone 112703 (TRBV4-2, TRBJ1-5)
CASSRDRGNQPQHF

SEQ ID NO: 225407 - protein, 10 aa, Homo sapiens
  CDR3 for alpha chain variable domain of TCR clone 112704 (TRAV26-1, TRAJ40)
CIAGTYKYIF

SEQ ID NO: 225408 - protein, 15 aa, Homo sapiens
  CDR3 for beta chain variable domain of TCR clone 112704 (TRBV19, TRBJ2-1)
CASSSPGVRLDEQFF

SEQ ID NO: 225409 - protein, 15 aa, Homo sapiens
  CDR3 for alpha chain variable domain of TCR clone 112705 (TRAV27, TRAJ38)
CAARRNAGNNRKLVG

SEQ ID NO: 225410 - protein, 13 aa, Homo sapiens
  CDR3 for beta chain variable domain of TCR clone 112705 (TRBV12-5, TRBJ2-3)
CASGDRQSDTQYF

SEQ ID NO: 225411 - protein, 15 aa, Homo sapiens
  CDR3 for alpha chain variable domain of TCR clone 112706 (TRAV26-1, TRAJ22)
CIVRVSFSFCKATDL

SEQ ID NO: 225412 - protein, 13 aa, Homo sapiens
  CDR3 for beta chain variable domain of TCR clone 112706 (TRBV7-9, TRBJ1-2)
CASSLKQNYGYTF

SEQ ID NO: 225413 - protein, 13 aa, Homo sapiens
  CDR3 for alpha chain variable domain of TCR clone 112707 (TRAV38-1, TRAJ42)
CARCGGSQGNLIF

SEQ ID NO: 225414 - protein, 14 aa, Homo sapiens
  CDR3 for beta chain variable domain of TCR clone 112707 (TRBV7-9, TRBJ1-1)
CASTPLQSYTEAFF

SEQ ID NO: 225415 - protein, 12 aa, Homo sapiens
  CDR3 for alpha chain variable domain of TCR clone 112708 (TRAV21, TRAJ33)
CAKMDSNYQLIW

SEQ ID NO: 225416 - protein, 14 aa, Homo sapiens
  CDR3 for beta chain variable domain of TCR clone 112708 (TRBV2, TRBJ2-7)
CASSRTAGGYEQYF

SEQ ID NO: 225417 - protein, 15 aa, Homo sapiens
  CDR3 for alpha chain variable domain of TCR clone 112709 (TRAV12-3, TRAJ6)
CAMSATSGGSYIPTF

SEQ ID NO: 225418 - protein, 11 aa, Homo sapiens
  CDR3 for beta chain variable domain of TCR clone 112709 (TRBV20-1, TRBJ1-5)
YSAQGDQPQHF

SEQ ID NO: 225419 - protein, 11 aa, Homo sapiens
  CDR3 for alpha chain variable domain of TCR clone 112710 (TRAV21, TRAJ48)
CAVDGNEKLTF

SEQ ID NO: 225420 - protein, 16 aa, Homo sapiens
  CDR3 for beta chain variable domain of TCR clone 112710 (TRBV19, TRBJ2-1)
CASSSKSTRSYNEQFF

SEQ ID NO: 225421 - protein, 14 aa, Homo sapiens
  CDR3 for alpha chain variable domain of TCR clone 112711 (TRAV22, TRAJ16)
CAPAGGTSYGKLLF

SEQ ID NO: 225422 - protein, 14 aa, Homo sapiens
  CDR3 for beta chain variable domain of TCR clone 112711 (TRBV12-5, TRBJ2-5)
CASGSRTHQETQYF

SEQ ID NO: 225423 - protein, 14 aa, Homo sapiens
  CDR3 for alpha chain variable domain of TCR clone 112712 (TRAV16, TRAJ39)
CALSKNNAGNMLTF

SEQ ID NO: 225424 - protein, 13 aa, Homo sapiens
  CDR3 for beta chain variable domain of TCR clone 112712 (TRBV10-3, TRBJ1-2)
CATGGTGNYGYTF

SEQ ID NO: 225425 - protein, 14 aa, Homo sapiens
  CDR3 for alpha chain variable domain of TCR clone 112713 (TRAV13-1, TRAJ35)
CAASKGGFGNVLHC

SEQ ID NO: 225426 - protein, 13 aa, Homo sapiens
  CDR3 for beta chain variable domain of TCR clone 112713 (TRBV7-2, TRBJ2-2)
CASISVRAGELFF

SEQ ID NO: 225427 - protein, 11 aa, Homo sapiens
  CDR3 for alpha chain variable domain of TCR clone 112714 (TRAV2, TRAJ13)
CASGGYQKVTF

SEQ ID NO: 225428 - protein, 15 aa, Homo sapiens
  CDR3 for beta chain variable domain of TCR clone 112714 (TRBV7-9, TRBJ1-6)
CASSSPGRGNSPLHL

SEQ ID NO: 225429 - protein, 14 aa, Homo sapiens
  CDR3 for alpha chain variable domain of TCR clone 112715 (TRAV36/DV7, TRAJ40)
CAVETTSGTYKYIF

SEQ ID NO: 225430 - protein, 16 aa, Homo sapiens
  CDR3 for beta chain variable domain of TCR clone 112715 (TRBV7-2, TRBJ2-5)
CASSSKWLSGQETQYF

SEQ ID NO: 225431 - protein, 13 aa, Homo sapiens
  CDR3 for alpha chain variable domain of TCR clone 112716 (TRAV1-2, TRAJ12)
CAVSMDSSYKLIF

SEQ ID NO: 225432 - protein, 16 aa, Homo sapiens
  CDR3 for beta chain variable domain of TCR clone 112716 (TRBV5-1, TRBJ1-1)
CASSSGGNSLNTEAFF

SEQ ID NO: 225433 - protein, 11 aa, Homo sapiens
  CDR3 for alpha chain variable domain of TCR clone 112717 (TRAV2, TRAJ13)
CASGGYQKVTF

SEQ ID NO: 225434 - protein, 16 aa, Homo sapiens
  CDR3 for beta chain variable domain of TCR clone 112717 (TRBV2, TRBJ1-6)
CASSETGEIYNSPLHF

SEQ ID NO: 225435 - protein, 14 aa, Homo sapiens
  CDR3 for alpha chain variable domain of TCR clone 112718 (TRAV16, TRAJ37)
CALDISGNTGKLIF

SEQ ID NO: 225436 - protein, 15 aa, Homo sapiens
  CDR3 for beta chain variable domain of TCR clone 112718 (TRBV9, TRBJ1-6)
CASSVAGTGDSPLHF

SEQ ID NO: 225437 - protein, 16 aa, Homo sapiens
  CDR3 for alpha chain variable domain of TCR clone 112719 (TRAV4, TRAJ8)
CLVGDSGNTGFQKLVF

SEQ ID NO: 225438 - protein, 15 aa, Homo sapiens
  CDR3 for beta chain variable domain of TCR clone 112719 (TRBV15, TRBJ1-2)
CATSRVRASGSGYAF

SEQ ID NO: 225439 - protein, 16 aa, Homo sapiens
  CDR3 for alpha chain variable domain of TCR clone 112720 (TRAV26-1, TRAJ52)
RIVSNAGGTSYGKLTF

SEQ ID NO: 225440 - protein, 16 aa, Homo sapiens
  CDR3 for beta chain variable domain of TCR clone 112720 (TRBV5-1, TRBJ2-1)
CASSLEGRGLYNEQFF

SEQ ID NO: 225441 - protein, 13 aa, Homo sapiens
  CDR3 for alpha chain variable domain of TCR clone 112721 (TRAV2, TRAJ40)
CAVVTSGTYKYIF

SEQ ID NO: 225442 - protein, 14 aa, Homo sapiens
  CDR3 for beta chain variable domain of TCR clone 112721 (TRBV19, TRBJ2-1)
CASPTCVVSGEQFF

SEQ ID NO: 225443 - protein, 15 aa, Homo sapiens
  CDR3 for alpha chain variable domain of TCR clone 112722 (TRAV3, TRAJ47)
CAVRDIGEYGNKLVF

SEQ ID NO: 225444 - protein, 14 aa, Homo sapiens
  CDR3 for beta chain variable domain of TCR clone 112722 (TRBV13, TRBJ2-5)
CASSLERVGEIQYF

SEQ ID NO: 225445 - protein, 14 aa, Homo sapiens
  CDR3 for alpha chain variable domain of TCR clone 112723 (TRAV12-1, TRAJ23)
CVVNIPNQGGKLIF

SEQ ID NO: 225446 - protein, 12 aa, Homo sapiens
  CDR3 for beta chain variable domain of TCR clone 112723 (TRBV12-4, TRBJ2-1)
CASTYVLSEQFF

SEQ ID NO: 225447 - protein, 13 aa, Homo sapiens
  CDR3 for alpha chain variable domain of TCR clone 112724 (TRAV13-2, TRAJ53)
CAENMGSNYKLTF

SEQ ID NO: 225448 - protein, 14 aa, Homo sapiens
  CDR3 for beta chain variable domain of TCR clone 112724 (TRBV12-5, TRBJ2-5)
CASGSRTHQETQYF

SEQ ID NO: 225449 - protein, 16 aa, Homo sapiens
  CDR3 for alpha chain variable domain of TCR clone 112725 (TRAV12-2, TRAJ32)
CAVNLGQGGATNKLIF

SEQ ID NO: 225450 - protein, 15 aa, Homo sapiens
  CDR3 for beta chain variable domain of TCR clone 112725 (TRBV20-1, TRBJ2-7)
CRARGPLAGGREQYF

SEQ ID NO: 225451 - protein, 13 aa, Homo sapiens
  CDR3 for alpha chain variable domain of TCR clone 112726 (TRAV8-4, TRAJ39)
STPPSAAGNMLTF

SEQ ID NO: 225452 - protein, 13 aa, Homo sapiens
  CDR3 for beta chain variable domain of TCR clone 112726 (TRBV12-4, TRBJ2-7)
CASSPTETYEQYF

SEQ ID NO: 225453 - protein, 14 aa, Homo sapiens
  CDR3 for alpha chain variable domain of TCR clone 112727 (TRAV8-4, TRAJ9)
CAVRINTGGFKTIF

SEQ ID NO: 225454 - protein, 14 aa, Homo sapiens
  CDR3 for beta chain variable domain of TCR clone 112727 (TRBV7-8, TRBJ2-3)
CASSLEAGTDTQYF

SEQ ID NO: 225455 - protein, 13 aa, Homo sapiens
  CDR3 for alpha chain variable domain of TCR clone 112728 (TRAV26-1, TRAJ29)
RIVRRSGNTPLVF

SEQ ID NO: 225456 - protein, 14 aa, Homo sapiens
  CDR3 for beta chain variable domain of TCR clone 112728 (TRBV20-1, TRBJ1-1)
CSAKTPGANTEAFF

SEQ ID NO: 225457 - protein, 18 aa, Homo sapiens
  CDR3 for alpha chain variable domain of TCR clone 112729 (TRAV21, TRAJ52)
CAVRPSPAGGTSYGKLTF

SEQ ID NO: 225458 - protein, 15 aa, Homo sapiens
  CDR3 for beta chain variable domain of TCR clone 112729 (TRBV7-8, TRBJ2-1)
CASSLASGRVNEQFF

SEQ ID NO: 225459 - protein, 13 aa, Homo sapiens
  CDR3 for alpha chain variable domain of TCR clone 112730 (TRAV27, TRAJ42)
CAGDRGSQGNLIF

SEQ ID NO: 225460 - protein, 15 aa, Homo sapiens
  CDR3 for beta chain variable domain of TCR clone 112730 (TRBV10-3, TRBJ2-2)
CAIRTDREDTGELFF

SEQ ID NO: 225461 - protein, 13 aa, Homo sapiens
  CDR3 for alpha chain variable domain of TCR clone 112731 (TRAV12-1, TRAJ40)
CVVPTSGTYKYIF

SEQ ID NO: 225462 - protein, 16 aa, Homo sapiens
  CDR3 for beta chain variable domain of TCR clone 112731 (TRBV7-3, TRBJ2-2)
CASSLKRGTLSGELFF

SEQ ID NO: 225463 - protein, 17 aa, Homo sapiens
  CDR3 for alpha chain variable domain of TCR clone 112732 (TRAV26-1, TRAJ53)
CIVRVDDSGGSNYKLTF

SEQ ID NO: 225464 - protein, 15 aa, Homo sapiens
  CDR3 for beta chain variable domain of TCR clone 112732 (TRBV20-1, TRBJ2-7)
CSARVPAAYVYEQYF

SEQ ID NO: 225465 - protein, 15 aa, Homo sapiens
  CDR3 for alpha chain variable domain of TCR clone 112733 (TRAV17, TRAJ57)
CATGPSQGGSEKLVF

SEQ ID NO: 225466 - protein, 12 aa, Homo sapiens
  CDR3 for beta chain variable domain of TCR clone 112733 (TRBV2, TRBJ2-1)
CAYGPPGNEQFF

SEQ ID NO: 225467 - protein, 12 aa, Homo sapiens
  CDR3 for alpha chain variable domain of TCR clone 112734 (TRAV21, TRAJ11)
CAVRGGNSTLTF

SEQ ID NO: 225468 - protein, 15 aa, Homo sapiens
  CDR3 for beta chain variable domain of TCR clone 112734 (TRBV6-1, TRBJ2-7)
CASSETIAATTEQYF

SEQ ID NO: 225469 - protein, 13 aa, Homo sapiens
  CDR3 for alpha chain variable domain of TCR clone 112735 (TRAV12-3, TRAJ7)
CAMTPYGNNRLAF

SEQ ID NO: 225470 - protein, 15 aa, Homo sapiens
  CDR3 for beta chain variable domain of TCR clone 112735 (TRBV7-9, TRBJ1-5)
CASSQGHQPNQPQHF

SEQ ID NO: 225471 - protein, 15 aa, Homo sapiens
  CDR3 for alpha chain variable domain of TCR clone 112736 (TRAV3, TRAJ17)
CAVRDTGAAGNKLTF

SEQ ID NO: 225472 - protein, 12 aa, Homo sapiens
  CDR3 for beta chain variable domain of TCR clone 112736 (TRBV7-9, TRBJ2-7)
CASSIKREEQYF

SEQ ID NO: 225473 - protein, 12 aa, Homo sapiens
  CDR3 for alpha chain variable domain of TCR clone 112737 (TRAV12-1, TRAJ40)
CVVYSGTYKYIF

SEQ ID NO: 225474 - protein, 14 aa, Homo sapiens
  CDR3 for beta chain variable domain of TCR clone 112737 (TRBV11-2, TRBJ2-7)
CASSLGAGAYEQYF

SEQ ID NO: 225475 - protein, 11 aa, Homo sapiens
  CDR3 for alpha chain variable domain of TCR clone 112738 (TRAV2, TRAJ13)
CDSGGYQKVTF

SEQ ID NO: 225476 - protein, 16 aa, Homo sapiens
  CDR3 for beta chain variable domain of TCR clone 112738 (TRBV19, TRBJ2-1)
CASSMGGGSSYNEQFF

SEQ ID NO: 225477 - protein, 16 aa, Homo sapiens
  CDR3 for alpha chain variable domain of TCR clone 112739 (TRAV20, TRAJ52)
CAVLPDGGTSYAKLTF

SEQ ID NO: 225478 - protein, 12 aa, Homo sapiens
  CDR3 for beta chain variable domain of TCR clone 112739 (TRBV19, TRBJ2-1)
CASSQISNEQFF

SEQ ID NO: 225479 - protein, 15 aa, Homo sapiens
  CDR3 for alpha chain variable domain of TCR clone 112740 (TRAV17, TRAJ48)
CATDETNFGNEKLTF

SEQ ID NO: 225480 - protein, 18 aa, Homo sapiens
  CDR3 for beta chain variable domain of TCR clone 112740 (TRBV7-9, TRBJ2-3)
CASSLPINGQISTDTQYF

SEQ ID NO: 225481 - protein, 15 aa, Homo sapiens
  CDR3 for alpha chain variable domain of TCR clone 112741 (TRAV13-1, TRAJ32)
CAASNGWWCYKQAHL

SEQ ID NO: 225482 - protein, 13 aa, Homo sapiens
  CDR3 for beta chain variable domain of TCR clone 112741 (TRBV4-1, TRBJ2-2)
CASSQENTGELFF

SEQ ID NO: 225483 - protein, 13 aa, Homo sapiens
  CDR3 for alpha chain variable domain of TCR clone 112742 (TRAV3, TRAJ21)
CAVREPDFNKFYF

SEQ ID NO: 225484 - protein, 13 aa, Homo sapiens
  CDR3 for beta chain variable domain of TCR clone 112742 (TRBV20-1, TRBJ1-1)
CSAPLGGGTEAFF

SEQ ID NO: 225485 - protein, 10 aa, Homo sapiens
  CDR3 for alpha chain variable domain of TCR clone 112743 (TRAV29/DV5, TRAJ54)
LIQGAQKLVF

SEQ ID NO: 225486 - protein, 18 aa, Homo sapiens
  CDR3 for beta chain variable domain of TCR clone 112743 (TRBV3-1, TRBJ1-2)
CASSQDVIGWNGDYGYAF

SEQ ID NO: 225487 - protein, 18 aa, Homo sapiens
  CDR3 for alpha chain variable domain of TCR clone 112744 (TRAV13-1, TRAJ52)
CAAKNPNAGGTSSGKMTF

SEQ ID NO: 225488 - protein, 15 aa, Homo sapiens
  CDR3 for beta chain variable domain of TCR clone 112744 (TRBV6-1, TRBJ2-3)
CASSERGGITDTQYF

SEQ ID NO: 225489 - protein, 12 aa, Homo sapiens
  CDR3 for alpha chain variable domain of TCR clone 112745 (TRAV38-1, TRAJ43)
CAAKFNNNDMRF

SEQ ID NO: 225490 - protein, 14 aa, Homo sapiens
  CDR3 for beta chain variable domain of TCR clone 112745 (TRBV12-4, TRBJ2-7)
CASSSGLATSEQYF

SEQ ID NO: 225491 - protein, 15 aa, Homo sapiens
  CDR3 for alpha chain variable domain of TCR clone 112746 (TRAV13-1, TRAJ32)
CAASIYGGATNKLIF

SEQ ID NO: 225492 - protein, 17 aa, Homo sapiens
  CDR3 for beta chain variable domain of TCR clone 112746 (TRBV7-3, TRBJ2-5)
CASSWGSGRSGSETQYF

SEQ ID NO: 225493 - protein, 12 aa, Homo sapiens
  CDR3 for alpha chain variable domain of TCR clone 112747 (TRAV1-1, TRAJ39)
CAVPVVGNMLTF

SEQ ID NO: 225494 - protein, 13 aa, Homo sapiens
  CDR3 for beta chain variable domain of TCR clone 112747 (TRBV29-1, TRBJ2-1)
CSVEGGRVNEQFF

SEQ ID NO: 225495 - protein, 15 aa, Homo sapiens
  CDR3 for alpha chain variable domain of TCR clone 112748 (TRAV3, TRAJ3)
CAVRDRDSSASKIIF

SEQ ID NO: 225496 - protein, 18 aa, Homo sapiens
  CDR3 for beta chain variable domain of TCR clone 112748 (TRBV25-1, TRBJ1-2)
CASSGLQNGQGLIFGYTY

SEQ ID NO: 225497 - protein, 11 aa, Homo sapiens
  CDR3 for alpha chain variable domain of TCR clone 112749 (TRAV3, TRAJ21)
CAVGNFNKFYF

SEQ ID NO: 225498 - protein, 17 aa, Homo sapiens
  CDR3 for beta chain variable domain of TCR clone 112749 (TRBV20-1, TRBJ2-1)
FSASSSGLAGSYNEQFF

SEQ ID NO: 225499 - protein, 15 aa, Homo sapiens
  CDR3 for alpha chain variable domain of TCR clone 112750 (TRAV1-2, TRAJ28)
CAVQYSGAGSYQLTF

SEQ ID NO: 225500 - protein, 13 aa, Homo sapiens
  CDR3 for beta chain variable domain of TCR clone 112750 (TRBV20-1, TRBJ2-7)
CIATHTSGYEQYF

SEQ ID NO: 225501 - protein, 14 aa, Homo sapiens
  CDR3 for alpha chain variable domain of TCR clone 112751 (TRAV1-2, TRAJ16)
CAVNRFSDGQKLLF

SEQ ID NO: 225502 - protein, 16 aa, Homo sapiens
  CDR3 for beta chain variable domain of TCR clone 112751 (TRBV24-1, TRBJ2-3)
CATSDRRQDLTDTQYF

SEQ ID NO: 225503 - protein, 11 aa, Homo sapiens
  CDR3 for alpha chain variable domain of TCR clone 112752 (TRAV2, TRAJ33)
CAVESNYQLIW

SEQ ID NO: 225504 - protein, 13 aa, Homo sapiens
  CDR3 for beta chain variable domain of TCR clone 112752 (TRBV2, TRBJ1-5)
CATAGPGNQPQHF

SEQ ID NO: 225505 - protein, 15 aa, Homo sapiens
  CDR3 for alpha chain variable domain of TCR clone 112753 (TRAV38-1, TRAJ37)
CAFIHGCGNTGKLIF

SEQ ID NO: 225506 - protein, 12 aa, Homo sapiens
  CDR3 for beta chain variable domain of TCR clone 112753 (TRBV7-9, TRBJ2-7)
CASSFGSYEQYF

SEQ ID NO: 225507 - protein, 14 aa, Homo sapiens
  CDR3 for alpha chain variable domain of TCR clone 112754 (TRAV27, TRAJ23)
CAGLSYNQGGKLIL

SEQ ID NO: 225508 - protein, 15 aa, Homo sapiens
  CDR3 for beta chain variable domain of TCR clone 112754 (TRBV19, TRBJ2-2)
CASSLNRGVTGELFF

SEQ ID NO: 225509 - protein, 17 aa, Homo sapiens
  CDR3 for alpha chain variable domain of TCR clone 112755 (TRAV3, TRAJ6)
CAVRDGPRAGGSYIPTF

SEQ ID NO: 225510 - protein, 15 aa, Homo sapiens
  CDR3 for beta chain variable domain of TCR clone 112755 (TRBV5-1, TRBJ2-7)
CASSLNGGPAREQYF

SEQ ID NO: 225511 - protein, 16 aa, Homo sapiens
  CDR3 for alpha chain variable domain of TCR clone 112756 (TRAV8-3, TRAJ8)
CAVPRDGNTGFQKLVF

SEQ ID NO: 225512 - protein, 17 aa, Homo sapiens
  CDR3 for beta chain variable domain of TCR clone 112756 (TRBV13, TRBJ2-3)
CASSLSRVAGGRNTQYF

SEQ ID NO: 225513 - protein, 16 aa, Homo sapiens
  CDR3 for alpha chain variable domain of TCR clone 112757 (TRAV16, TRAJ52)
CALSAAGGTSYGKLTF

SEQ ID NO: 225514 - protein, 17 aa, Homo sapiens
  CDR3 for beta chain variable domain of TCR clone 112757 (TRBV11-2, TRBJ2-1)
WASSLYPPGVEYNEQFF

SEQ ID NO: 225515 - protein, 13 aa, Homo sapiens
  CDR3 for alpha chain variable domain of TCR clone 112758 (TRAV13-1, TRAJ6)
CAASTGGSYIPTF

SEQ ID NO: 225516 - protein, 14 aa, Homo sapiens
  CDR3 for beta chain variable domain of TCR clone 112758 (TRBV7-2, TRBJ2-1)
CASSLGVGYNEQFF

SEQ ID NO: 225517 - protein, 14 aa, Homo sapiens
  CDR3 for alpha chain variable domain of TCR clone 112759 (TRAV1-2, TRAJ29)
CAVRTDPGNTPLVF

SEQ ID NO: 225518 - protein, 14 aa, Homo sapiens
  CDR3 for beta chain variable domain of TCR clone 112759 (TRBV7-2, TRBJ2-7)
CASSPKTSFYEQYF

SEQ ID NO: 225519 - protein, 12 aa, Homo sapiens
  CDR3 for alpha chain variable domain of TCR clone 112760 (TRAV1-1, TRAJ8)
CAGGTGFQKLVF

SEQ ID NO: 225520 - protein, 14 aa, Homo sapiens
  CDR3 for beta chain variable domain of TCR clone 112760 (TRBV7-8, TRBJ2-3)
CASSLEAGTDTQYF

SEQ ID NO: 225521 - protein, 16 aa, Homo sapiens
  CDR3 for alpha chain variable domain of TCR clone 112761 (TRAV8-3, TRAJ44)
CAVGASNTGTASKLTF

SEQ ID NO: 225522 - protein, 15 aa, Homo sapiens
  CDR3 for beta chain variable domain of TCR clone 112761 (TRBV27, TRBJ1-5)
CASTCNRGSNQPQHF

SEQ ID NO: 225523 - protein, 14 aa, Homo sapiens
  CDR3 for alpha chain variable domain of TCR clone 112762 (TRAV8-2, TRAJ4)
CVVSPSGGYNKLIF

SEQ ID NO: 225524 - protein, 15 aa, Homo sapiens
  CDR3 for beta chain variable domain of TCR clone 112762 (TRBV6-5, TRBJ2-1)
CASSYDAGAGNEQFF

SEQ ID NO: 225525 - protein, 17 aa, Homo sapiens
  CDR3 for alpha chain variable domain of TCR clone 112763 (TRAV3, TRAJ6)
CSVRDGPRAGGSYIPTF

SEQ ID NO: 225526 - protein, 14 aa, Homo sapiens
  CDR3 for beta chain variable domain of TCR clone 112763 (TRBV6-1, TRBJ1-3)
CASVQGGGGNTIYF

SEQ ID NO: 225527 - protein, 12 aa, Homo sapiens
  CDR3 for alpha chain variable domain of TCR clone 112764 (TRAV13-2, TRAJ23)
CAERHRGGKLIF

SEQ ID NO: 225528 - protein, 17 aa, Homo sapiens
  CDR3 for beta chain variable domain of TCR clone 112764 (TRBV7-9, TRBJ1-4)
CASSSGQLGGRSEKLFF

SEQ ID NO: 225529 - protein, 13 aa, Homo sapiens
  CDR3 for alpha chain variable domain of TCR clone 112765 (TRAV27, TRAJ41)
CAGEGNAGYALNF

SEQ ID NO: 225530 - protein, 14 aa, Homo sapiens
  CDR3 for beta chain variable domain of TCR clone 112765 (TRBV25-1, TRBJ1-1)
CASTHLGGNTEAFF

SEQ ID NO: 225531 - protein, 17 aa, Homo sapiens
  CDR3 for alpha chain variable domain of TCR clone 112766 (TRAV26-1, TRAJ28)
CIVRVPDSGAGSYQLTF

SEQ ID NO: 225532 - protein, 17 aa, Homo sapiens
  CDR3 for beta chain variable domain of TCR clone 112766 (TRBV28, TRBJ2-7)
CASSPLPAGGKYYEQYF

SEQ ID NO: 225533 - protein, 11 aa, Homo sapiens
  CDR3 for alpha chain variable domain of TCR clone 112767 (TRAV12-2, TRAJ36)
CAVDGANNLLF

SEQ ID NO: 225534 - protein, 13 aa, Homo sapiens
  CDR3 for beta chain variable domain of TCR clone 112767 (TRBV28, TRBJ2-5)
CAGVSRGEETQYF

SEQ ID NO: 225535 - protein, 12 aa, Homo sapiens
  CDR3 for alpha chain variable domain of TCR clone 112768 (TRAV21, TRAJ56)
CAVYGANSKLTF

SEQ ID NO: 225536 - protein, 17 aa, Homo sapiens
  CDR3 for beta chain variable domain of TCR clone 112768 (TRBV10-3, TRBJ2-6)
CAISGLAESSGANVLTF

SEQ ID NO: 225537 - protein, 16 aa, Homo sapiens
  CDR3 for alpha chain variable domain of TCR clone 112769 (TRAV12-3, TRAJ53)
CAMSPGSGGSNYKLTF

SEQ ID NO: 225538 - protein, 12 aa, Homo sapiens
  CDR3 for beta chain variable domain of TCR clone 112769 (TRBV5-1, TRBJ1-1)
CASSFGNTEAFF

SEQ ID NO: 225539 - protein, 13 aa, Homo sapiens
  CDR3 for alpha chain variable domain of TCR clone 112770 (TRAV12-3, TRAJ13)
CAMTSGGYQKVTF

SEQ ID NO: 225540 - protein, 11 aa, Homo sapiens
  CDR3 for beta chain variable domain of TCR clone 112770 (TRBV19, TRBJ1-1)
CASSIGSEAFF

SEQ ID NO: 225541 - protein, 13 aa, Homo sapiens
  CDR3 for alpha chain variable domain of TCR clone 112771 (TRAV12-2, TRAJ37)
CAGGSGNTGKLLF

SEQ ID NO: 225542 - protein, 14 aa, Homo sapiens
  CDR3 for beta chain variable domain of TCR clone 112771 (TRBV6-1, TRBJ2-6)
CASQQGAGANVLTF

SEQ ID NO: 225543 - protein, 16 aa, Homo sapiens
  CDR3 for alpha chain variable domain of TCR clone 112772 (TRAV8-3, TRAJ13)
CAVGAYPSGGYQKVTF

SEQ ID NO: 225544 - protein, 13 aa, Homo sapiens
  CDR3 for beta chain variable domain of TCR clone 112772 (TRBV19, TRBJ2-7)
CASEGTTTYEQYF

SEQ ID NO: 225545 - protein, 14 aa, Homo sapiens
  CDR3 for alpha chain variable domain of TCR clone 112773 (TRAV2, TRAJ29)
CAVSPPSGNTPLVF

SEQ ID NO: 225546 - protein, 13 aa, Homo sapiens
  CDR3 for beta chain variable domain of TCR clone 112773 (TRBV11-2, TRBJ2-1)
CASSLGLAGGRFF

SEQ ID NO: 225547 - protein, 21 aa, Homo sapiens
  CDR3 for alpha chain variable domain of TCR clone 112774 (TRAV12-1, TRAJ32)
SSVIQPPTSMNYGGATNKLIF

SEQ ID NO: 225548 - protein, 12 aa, Homo sapiens
  CDR3 for beta chain variable domain of TCR clone 112774 (TRBV7-8, TRBJ2-7)
CASSLGDREQYF

SEQ ID NO: 225549 - protein, 13 aa, Homo sapiens
  CDR3 for alpha chain variable domain of TCR clone 112775 (TRAV27, TRAJ42)
CAGARGSQGNLIF

SEQ ID NO: 225550 - protein, 15 aa, Homo sapiens
  CDR3 for beta chain variable domain of TCR clone 112775 (TRBV10-3, TRBJ2-2)
CGIRTDREDTGELFF

SEQ ID NO: 225551 - protein, 20 aa, Homo sapiens
  CDR3 for alpha chain variable domain of TCR clone 112776 (TRAV12-3, TRAJ41)
SLFIRDSQPSDSATPEALNF

SEQ ID NO: 225552 - protein, 15 aa, Homo sapiens
  CDR3 for beta chain variable domain of TCR clone 112776 (TRBV5-1, TRBJ2-7)
CASSLELTSSYEQYF

SEQ ID NO: 225553 - protein, 12 aa, Homo sapiens
  CDR3 for alpha chain variable domain of TCR clone 112777 (TRAV21, TRAJ56)
CAVGVNRSKLTF

SEQ ID NO: 225554 - protein, 13 aa, Homo sapiens
  CDR3 for beta chain variable domain of TCR clone 112777 (TRBV7-3, TRBJ1-1)
CASSQDWGAEAFF

SEQ ID NO: 225555 - protein, 11 aa, Homo sapiens
  CDR3 for alpha chain variable domain of TCR clone 112778 (TRAV2, TRAJ23)
CAVETRGKLIL

SEQ ID NO: 225556 - protein, 17 aa, Homo sapiens
  CDR3 for beta chain variable domain of TCR clone 112778 (TRBV20-1, TRBJ2-1)
CSASSSGLAGSYNEQFF

SEQ ID NO: 225557 - protein, 14 aa, Homo sapiens
  CDR3 for alpha chain variable domain of TCR clone 112779 (TRAV4, TRAJ26)
CLVGPHNYDQNFVF

SEQ ID NO: 225558 - protein, 17 aa, Homo sapiens
  CDR3 for beta chain variable domain of TCR clone 112779 (TRBV24-1, TRBJ2-1)
CATSDVSTSGTYNEQFF

SEQ ID NO: 225559 - protein, 12 aa, Homo sapiens
  CDR3 for alpha chain variable domain of TCR clone 112780 (TRAV16, TRAJ26)
CASKDGGQNFFF

SEQ ID NO: 225560 - protein, 13 aa, Homo sapiens
  CDR3 for beta chain variable domain of TCR clone 112780 (TRBV25-1, TRBJ1-1)
CASSDRGRAEAFF

SEQ ID NO: 225561 - protein, 14 aa, Homo sapiens
  CDR3 for alpha chain variable domain of TCR clone 112781 (TRAV1-2, TRAJ16)
CAVNRFSDVQKLLF

SEQ ID NO: 225562 - protein, 15 aa, Homo sapiens
  CDR3 for beta chain variable domain of TCR clone 112781 (TRBV19, TRBJ1-5)
CASSIVWADNQPQHF

SEQ ID NO: 225563 - protein, 16 aa, Homo sapiens
  CDR3 for alpha chain variable domain of TCR clone 112782 (TRAV30, TRAJ24)
CGTEIVDADSWGKFQF

SEQ ID NO: 225564 - protein, 14 aa, Homo sapiens
  CDR3 for beta chain variable domain of TCR clone 112782 (TRBV13, TRBJ2-1)
RASSPRPRYNEQFF

SEQ ID NO: 225565 - protein, 14 aa, Homo sapiens
  CDR3 for alpha chain variable domain of TCR clone 112783 (TRAV13-1, TRAJ35)
CAASKGGFGNVLHC

SEQ ID NO: 225566 - protein, 13 aa, Homo sapiens
  CDR3 for beta chain variable domain of TCR clone 112783 (TRBV7-9, TRBJ2-5)
CASLPSGRETQYF

SEQ ID NO: 225567 - protein, 16 aa, Homo sapiens
  CDR3 for alpha chain variable domain of TCR clone 112784 (TRAV3, TRAJ18)
CAVRDGRGSTLGRLYS

SEQ ID NO: 225568 - protein, 15 aa, Homo sapiens
  CDR3 for beta chain variable domain of TCR clone 112784 (TRBV7-9, TRBJ1-6)
CASSSPGRGNSPLHF

SEQ ID NO: 225569 - protein, 14 aa, Homo sapiens
  CDR3 for alpha chain variable domain of TCR clone 112785 (TRAV35, TRAJ13)
RAGSPSGGYRKVTF

SEQ ID NO: 225570 - protein, 13 aa, Homo sapiens
  CDR3 for beta chain variable domain of TCR clone 112785 (TRBV29-1, TRBJ1-1)
CSVGDSRNTEAFF

SEQ ID NO: 225571 - protein, 12 aa, Homo sapiens
  CDR3 for alpha chain variable domain of TCR clone 112786 (TRAV12-3, TRAJ17)
CAMTLTGNKLTF

SEQ ID NO: 225572 - protein, 15 aa, Homo sapiens
  CDR3 for beta chain variable domain of TCR clone 112786 (TRBV20-1, TRBJ2-7)
CSARDRVSGMDEQCV

SEQ ID NO: 225573 - protein, 15 aa, Homo sapiens
  CDR3 for alpha chain variable domain of TCR clone 112787 (TRAV8-3, TRAJ45)
CASSYSGGGADGLTF

SEQ ID NO: 225574 - protein, 16 aa, Homo sapiens
  CDR3 for beta chain variable domain of TCR clone 112787 (TRBV9, TRBJ2-2)
CASSAMGKGNTGELFF

SEQ ID NO: 225575 - protein, 14 aa, Homo sapiens
  CDR3 for alpha chain variable domain of TCR clone 112788 (TRAV12-2, TRAJ13)
CAVKKTGGYQKVTF

SEQ ID NO: 225576 - protein, 16 aa, Homo sapiens
  CDR3 for beta chain variable domain of TCR clone 112788 (TRBV28, TRBJ2-7)
CASSLFFETGGPEQYF

SEQ ID NO: 225577 - protein, 12 aa, Homo sapiens
  CDR3 for alpha chain variable domain of TCR clone 112789 (TRAV8-3, TRAJ26)
CAGDNYGQNFVF

SEQ ID NO: 225578 - protein, 15 aa, Homo sapiens
  CDR3 for beta chain variable domain of TCR clone 112789 (TRBV11-2, TRBJ2-1)
CASSLGTSGLSEQFF

SEQ ID NO: 225579 - protein, 11 aa, Homo sapiens
  CDR3 for alpha chain variable domain of TCR clone 112790 (TRAV23/DV6, TRAJ29)
CAASRNTPLVF

SEQ ID NO: 225580 - protein, 15 aa, Homo sapiens
  CDR3 for beta chain variable domain of TCR clone 112790 (TRBV7-3, TRBJ2-2)
CASSETGQGTGELFF

SEQ ID NO: 225581 - protein, 12 aa, Homo sapiens
  CDR3 for alpha chain variable domain of TCR clone 112791 (TRAV38-1, TRAJ47)
CAFETYGNKLVF

SEQ ID NO: 225582 - protein, 15 aa, Homo sapiens
  CDR3 for beta chain variable domain of TCR clone 112791 (TRBV5-7, TRBJ2-7)
CASSGGLPVPYEQYF

SEQ ID NO: 225583 - protein, 14 aa, Homo sapiens
  CDR3 for alpha chain variable domain of TCR clone 112792 (TRAV8-2, TRAJ4)
CVVSPSGGYNKLIF

SEQ ID NO: 225584 - protein, 15 aa, Homo sapiens
  CDR3 for beta chain variable domain of TCR clone 112792 (TRBV7-9, TRBJ1-1)
CASSLLEQGGTEAFF

SEQ ID NO: 225585 - protein, 10 aa, Homo sapiens
  CDR3 for alpha chain variable domain of TCR clone 112793 (TRAV30, TRAJ16)
CGTGGQKLLF

SEQ ID NO: 225586 - protein, 14 aa, Homo sapiens
  CDR3 for beta chain variable domain of TCR clone 112793 (TRBV5-5, TRBJ2-2)
CASSLLGDTGELFF

SEQ ID NO: 225587 - protein, 17 aa, Homo sapiens
  CDR3 for alpha chain variable domain of TCR clone 112794 (TRAV12-3, TRAJ18)
CAMIRADRGSTLGRLYL

SEQ ID NO: 225588 - protein, 14 aa, Homo sapiens
  CDR3 for beta chain variable domain of TCR clone 112794 (TRBV5-7, TRBJ1-6)
CASTPWPADSPLHF

SEQ ID NO: 225589 - protein, 13 aa, Homo sapiens
  CDR3 for alpha chain variable domain of TCR clone 112795 (TRAV3, TRAJ33)
FAVRDRSNYQLIW

SEQ ID NO: 225590 - protein, 16 aa, Homo sapiens
  CDR3 for beta chain variable domain of TCR clone 112795 (TRBV4-2, TRBJ2-7)
CASSQDRGTSSYEQYF

SEQ ID NO: 225591 - protein, 13 aa, Homo sapiens
  CDR3 for alpha chain variable domain of TCR clone 112796 (TRAV3, TRAJ43)
CAVKARNNNDMRF

SEQ ID NO: 225592 - protein, 17 aa, Homo sapiens
  CDR3 for beta chain variable domain of TCR clone 112796 (TRBV19, TRBJ2-7)
CASSISFYDSYPYEQYF

SEQ ID NO: 225593 - protein, 15 aa, Homo sapiens
  CDR3 for alpha chain variable domain of TCR clone 112797 (TRAV9-2, TRAJ52)
CALNAGGTSYGKLTF

SEQ ID NO: 225594 - protein, 17 aa, Homo sapiens
  CDR3 for beta chain variable domain of TCR clone 112797 (TRBV11-2, TRBJ2-1)
CASSLYPPGVEYNEQFF

SEQ ID NO: 225595 - protein, 15 aa, Homo sapiens
  CDR3 for alpha chain variable domain of TCR clone 112798 (TRAV3, TRAJ22)
CAVRDRGGSARQLTF

SEQ ID NO: 225596 - protein, 14 aa, Homo sapiens
  CDR3 for beta chain variable domain of TCR clone 112798 (TRBV7-8, TRBJ2-1)
CASSLAGSYNEQFF

SEQ ID NO: 225597 - protein, 14 aa, Homo sapiens
  CDR3 for alpha chain variable domain of TCR clone 112799 (TRAV3, TRAJ17)
CAMRDAAAGNKLTF

SEQ ID NO: 225598 - protein, 16 aa, Homo sapiens
  CDR3 for beta chain variable domain of TCR clone 112799 (TRBV20-1, TRBJ1-2)
CSASMGQGVANYGYTF

SEQ ID NO: 225599 - protein, 15 aa, Homo sapiens
  CDR3 for alpha chain variable domain of TCR clone 112800 (TRAV23/DV6, TRAJ18)
CASRYRGSTLGRLYF

SEQ ID NO: 225600 - protein, 13 aa, Homo sapiens
  CDR3 for beta chain variable domain of TCR clone 112800 (TRBV7-2, TRBJ2-7)
CASSSPSGSEQYF

SEQ ID NO: 225601 - protein, 18 aa, Homo sapiens
  CDR3 for alpha chain variable domain of TCR clone 112801 (TRAV9-2, TRAJ52)
CALSRHNAGGTSYVKLTF

SEQ ID NO: 225602 - protein, 13 aa, Homo sapiens
  CDR3 for beta chain variable domain of TCR clone 112801 (TRBV7-9, TRBJ1-2)
CASSLKQNYGYTF

SEQ ID NO: 225603 - protein, 12 aa, Homo sapiens
  CDR3 for alpha chain variable domain of TCR clone 112802 (TRAV21, TRAJ33)
CAKMDSNYQLIW

SEQ ID NO: 225604 - protein, 17 aa, Homo sapiens
  CDR3 for beta chain variable domain of TCR clone 112802 (TRBV24-1, TRBJ2-1)
CATSDVSTSGTYNEQFF

SEQ ID NO: 225605 - protein, 12 aa, Homo sapiens
  CDR3 for alpha chain variable domain of TCR clone 112803 (TRAV12-1, TRAJ40)
CVVYSGTYKYIF

SEQ ID NO: 225606 - protein, 18 aa, Homo sapiens
  CDR3 for beta chain variable domain of TCR clone 112803 (TRBV11-2, TRBJ2-3)
CASSLGGASRGAPTTQYF

SEQ ID NO: 225607 - protein, 11 aa, Homo sapiens
  CDR3 for alpha chain variable domain of TCR clone 112804 (TRAV2, TRAJ33)
CAVESNYQLIW

SEQ ID NO: 225608 - protein, 13 aa, Homo sapiens
  CDR3 for beta chain variable domain of TCR clone 112804 (TRBV6-6, TRBJ2-7)
CASSPKHLAEQYF

SEQ ID NO: 225609 - protein, 11 aa, Homo sapiens
  CDR3 for alpha chain variable domain of TCR clone 112805 (TRAV2, TRAJ13)
CASGGYQKVTF

SEQ ID NO: 225610 - protein, 16 aa, Homo sapiens
  CDR3 for beta chain variable domain of TCR clone 112805 (TRBV18, TRBJ1-5)
CASSPSTGNSNQPQHF

SEQ ID NO: 225611 - protein, 14 aa, Homo sapiens
  CDR3 for alpha chain variable domain of TCR clone 112806 (TRAV30, TRAJ26)
CGTEIVSYGQNFVF

SEQ ID NO: 225612 - protein, 13 aa, Homo sapiens
  CDR3 for beta chain variable domain of TCR clone 112806 (TRBV19, TRBJ1-3)
CASRLSLGNTIDF

SEQ ID NO: 225613 - protein, 14 aa, Homo sapiens
  CDR3 for alpha chain variable domain of TCR clone 112807 (TRAV23/DV6, TRAJ40)
CAASLTSGTYKYIF

SEQ ID NO: 225614 - protein, 14 aa, Homo sapiens
  CDR3 for beta chain variable domain of TCR clone 112807 (TRBV5-1, TRBJ2-3)
CASSRGEGGGTQYF

SEQ ID NO: 225615 - protein, 14 aa, Homo sapiens
  CDR3 for alpha chain variable domain of TCR clone 112808 (TRAV1-2, TRAJ29)
CAVRTASGNTPLVF

SEQ ID NO: 225616 - protein, 14 aa, Homo sapiens
  CDR3 for beta chain variable domain of TCR clone 112808 (TRBV7-2, TRBJ2-7)
CASSPKTSFYEQYF

SEQ ID NO: 225617 - protein, 14 aa, Homo sapiens
  CDR3 for alpha chain variable domain of TCR clone 112809 (TRAV12-2, TRAJ29)
CAVRRNSVNTPLVF

SEQ ID NO: 225618 - protein, 13 aa, Homo sapiens
  CDR3 for beta chain variable domain of TCR clone 112809 (TRBV12-4, TRBJ2-1)
CASSHYTDNEQFF

SEQ ID NO: 225619 - protein, 15 aa, Homo sapiens
  CDR3 for alpha chain variable domain of TCR clone 112810 (TRAV17, TRAJ13)
CATDAGSGGYQKVTF

SEQ ID NO: 225620 - protein, 17 aa, Homo sapiens
  CDR3 for beta chain variable domain of TCR clone 112810 (TRBV11-2, TRBJ2-1)
CASSLYPPGVEYSEQFF

SEQ ID NO: 225621 - protein, 15 aa, Homo sapiens
  CDR3 for alpha chain variable domain of TCR clone 112811 (TRAV3, TRAJ3)
CAMRDRDSSASKIIF

SEQ ID NO: 225622 - protein, 18 aa, Homo sapiens
  CDR3 for beta chain variable domain of TCR clone 112811 (TRBV25-1, TRBJ1-2)
CASSGLQNGQGLIFGYTF

SEQ ID NO: 225623 - protein, 14 aa, Homo sapiens
  CDR3 for alpha chain variable domain of TCR clone 112812 (TRAV1-2, TRAJ8)
CAVREDTGFQKLVF

SEQ ID NO: 225624 - protein, 15 aa, Homo sapiens
  CDR3 for beta chain variable domain of TCR clone 112812 (TRBV11-3, TRBJ2-3)
CASLKDGREGDTQYC

SEQ ID NO: 225625 - protein, 17 aa, Homo sapiens
  CDR3 for alpha chain variable domain of TCR clone 112813 (TRAV1-1, TRAJ28)
CAVDPAYPGAGSYQLPF

SEQ ID NO: 225626 - protein, 14 aa, Homo sapiens
  CDR3 for beta chain variable domain of TCR clone 112813 (TRBV19, TRBJ2-1)
CASPTFVLSGEQFF

SEQ ID NO: 225627 - protein, 13 aa, Homo sapiens
  CDR3 for alpha chain variable domain of TCR clone 112814 (TRAV20, TRAJ42)
CAVQGGSQGDLIF

SEQ ID NO: 225628 - protein, 15 aa, Homo sapiens
  CDR3 for beta chain variable domain of TCR clone 112814 (TRBV10-1, TRBJ2-1)
CASSEWRGTYNEQFF

SEQ ID NO: 225629 - protein, 14 aa, Homo sapiens
  CDR3 for alpha chain variable domain of TCR clone 112815 (TRAV1-2, TRAJ16)
CAVNRFSDGQKLLF

SEQ ID NO: 225630 - protein, 14 aa, Homo sapiens
  CDR3 for beta chain variable domain of TCR clone 112815 (TRBV3-1, TRBJ2-5)
CASSQGPDQETQYF

SEQ ID NO: 225631 - protein, 12 aa, Homo sapiens
  CDR3 for alpha chain variable domain of TCR clone 112816 (TRAV27, TRAJ42)
CAGGGSPGNLIF

SEQ ID NO: 225632 - protein, 13 aa, Homo sapiens
  CDR3 for beta chain variable domain of TCR clone 112816 (TRBV19, TRBJ2-7)
CASSIRSSYEQYF

SEQ ID NO: 225633 - protein, 14 aa, Homo sapiens
  CDR3 for alpha chain variable domain of TCR clone 112817 (TRAV1-1, TRAJ30)
CAVRSLNRDDKIIF

SEQ ID NO: 225634 - protein, 12 aa, Homo sapiens
  CDR3 for beta chain variable domain of TCR clone 112817 (TRBV20-1, TRBJ2-7)
CSAGLKMGEQYF

SEQ ID NO: 225635 - protein, 14 aa, Homo sapiens
  CDR3 for alpha chain variable domain of TCR clone 112818 (TRAV20, TRAJ20)
CAVRRGYNDYKLSF

SEQ ID NO: 225636 - protein, 13 aa, Homo sapiens
  CDR3 for beta chain variable domain of TCR clone 112818 (TRBV19, TRBJ2-5)
CAGSETAPETQYF

SEQ ID NO: 225637 - protein, 12 aa, Homo sapiens
  CDR3 for alpha chain variable domain of TCR clone 112819 (TRAV8-6, TRAJ36)
CAVSDWLGRTTS

SEQ ID NO: 225638 - protein, 13 aa, Homo sapiens
  CDR3 for beta chain variable domain of TCR clone 112819 (TRBV2, TRBJ2-5)
CASGTPYQETQYF

SEQ ID NO: 225639 - protein, 13 aa, Homo sapiens
  CDR3 for alpha chain variable domain of TCR clone 112820 (TRAV8-6, TRAJ21)
CAVSPSSLNKFYF

SEQ ID NO: 225640 - protein, 14 aa, Homo sapiens
  CDR3 for beta chain variable domain of TCR clone 112820 (TRBV7-9, TRBJ2-5)
YASSLDTAQETQYF

SEQ ID NO: 225641 - protein, 15 aa, Homo sapiens
  CDR3 for alpha chain variable domain of TCR clone 112821 (TRAV12-1, TRAJ44)
CVADLPTGTASKLTF

SEQ ID NO: 225642 - protein, 13 aa, Homo sapiens
  CDR3 for beta chain variable domain of TCR clone 112821 (TRBV6-5, TRBJ2-5)
CASSPQGGEIQYF

SEQ ID NO: 225643 - protein, 16 aa, Homo sapiens
  CDR3 for alpha chain variable domain of TCR clone 112822 (TRAV8-3, TRAJ13)
CAVGAYPSGGYQKVTF

SEQ ID NO: 225644 - protein, 13 aa, Homo sapiens
  CDR3 for beta chain variable domain of TCR clone 112822 (TRBV18, TRBJ2-2)
CASSPTRGGELFF

SEQ ID NO: 225645 - protein, 15 aa, Homo sapiens
  CDR3 for alpha chain variable domain of TCR clone 112823 (TRAV12-2, TRAJ53)
CAVNGGGGSNYKLTF

SEQ ID NO: 225646 - protein, 18 aa, Homo sapiens
  CDR3 for beta chain variable domain of TCR clone 112823 (TRBV20-1, TRBJ2-6)
CSAETTPTHGSGANVLTF

SEQ ID NO: 225647 - protein, 16 aa, Homo sapiens
  CDR3 for alpha chain variable domain of TCR clone 112824 (TRAV8-3, TRAJ18)
CAVALDRGSTLVRLYF

SEQ ID NO: 225648 - protein, 11 aa, Homo sapiens
  CDR3 for beta chain variable domain of TCR clone 112824 (TRBV29-1, TRBJ1-1)
CSVEILTEAFF

SEQ ID NO: 225649 - protein, 14 aa, Homo sapiens
  CDR3 for alpha chain variable domain of TCR clone 112825 (TRAV23/DV6, TRAJ8)
CAASKATGFLKLVF

SEQ ID NO: 225650 - protein, 15 aa, Homo sapiens
  CDR3 for beta chain variable domain of TCR clone 112825 (TRBV28, TRBJ2-3)
CASSPDRQGANTQYF

SEQ ID NO: 225651 - protein, 14 aa, Homo sapiens
  CDR3 for alpha chain variable domain of TCR clone 112826 (TRAV12-2, TRAJ17)
CAVLFKAAGNKLTF

SEQ ID NO: 225652 - protein, 17 aa, Homo sapiens
  CDR3 for beta chain variable domain of TCR clone 112826 (TRBV20-1, TRBJ2-2)
CSASGSGQGGLTGEMFL

SEQ ID NO: 225653 - protein, 12 aa, Homo sapiens
  CDR3 for alpha chain variable domain of TCR clone 112827 (TRAV12-3, TRAJ40)
CAVSSGTYKYIF

SEQ ID NO: 225654 - protein, 15 aa, Homo sapiens
  CDR3 for beta chain variable domain of TCR clone 112827 (TRBV19, TRBJ2-4)
CASRGPRRGENIQYF

SEQ ID NO: 225655 - protein, 12 aa, Homo sapiens
  CDR3 for alpha chain variable domain of TCR clone 112828 (TRAV12-1, TRAJ40)
CVVNGETYKYIF

SEQ ID NO: 225656 - protein, 16 aa, Homo sapiens
  CDR3 for beta chain variable domain of TCR clone 112828 (TRBV5-1, TRBJ2-3)
CASSLGLAVYTDTQYF

SEQ ID NO: 225657 - protein, 14 aa, Homo sapiens
  CDR3 for alpha chain variable domain of TCR clone 112829 (TRAV1-2, TRAJ16)
CAVNRFSDGQKLLF

SEQ ID NO: 225658 - protein, 14 aa, Homo sapiens
  CDR3 for beta chain variable domain of TCR clone 112829 (TRBV5-1, TRBJ1-1)
CASSFTGRNTEAFF

SEQ ID NO: 225659 - protein, 12 aa, Homo sapiens
  CDR3 for alpha chain variable domain of TCR clone 112830 (TRAV25, TRAJ17)
CAGEAAGNKLTF

SEQ ID NO: 225660 - protein, 14 aa, Homo sapiens
  CDR3 for beta chain variable domain of TCR clone 112830 (TRBV5-1, TRBJ2-1)
CASSALWAGNEQFL

SEQ ID NO: 225661 - protein, 15 aa, Homo sapiens
  CDR3 for alpha chain variable domain of TCR clone 112831 (TRAV12-1, TRAJ9)
CVLSFGDTGGFKTIF

SEQ ID NO: 225662 - protein, 19 aa, Homo sapiens
  CDR3 for beta chain variable domain of TCR clone 112831 (TRBV25-1, TRBJ2-2)
CAILVYRVDRGRKTGELFF

SEQ ID NO: 225663 - protein, 16 aa, Homo sapiens
  CDR3 for alpha chain variable domain of TCR clone 112832 (TRAV3, TRAJ21)
CAVRDIERGNFNKFHF

SEQ ID NO: 225664 - protein, 13 aa, Homo sapiens
  CDR3 for beta chain variable domain of TCR clone 112832 (TRBV27, TRBJ2-7)
CASSLTTGYEQYF

SEQ ID NO: 225665 - protein, 17 aa, Homo sapiens
  CDR3 for alpha chain variable domain of TCR clone 112833 (TRAV20, TRAJ42)
CAVQAWGYGGSQGNPIF

SEQ ID NO: 225666 - protein, 16 aa, Homo sapiens
  CDR3 for beta chain variable domain of TCR clone 112833 (TRBV29-1, TRBJ2-5)
CSVEGLAGDYQETQYF

SEQ ID NO: 225667 - protein, 14 aa, Homo sapiens
  CDR3 for alpha chain variable domain of TCR clone 112834 (TRAV22, TRAJ24)
FAVDSSNSWGKLQF

SEQ ID NO: 225668 - protein, 11 aa, Homo sapiens
  CDR3 for beta chain variable domain of TCR clone 112834 (TRBV29-1, TRBJ2-3)
CSVEIGDTQYF

SEQ ID NO: 225669 - protein, 14 aa, Homo sapiens
  CDR3 for alpha chain variable domain of TCR clone 112835 (TRAV12-2, TRAJ40)
CAVKIPSGTYKYIL

SEQ ID NO: 225670 - protein, 14 aa, Homo sapiens
  CDR3 for beta chain variable domain of TCR clone 112835 (TRBV13, TRBJ2-5)
CASSLGTAQETQYF

SEQ ID NO: 225671 - protein, 12 aa, Homo sapiens
  CDR3 for alpha chain variable domain of TCR clone 112836 (TRAV8-3, TRAJ22)
FGGQSSARQLTF

SEQ ID NO: 225672 - protein, 15 aa, Homo sapiens
  CDR3 for beta chain variable domain of TCR clone 112836 (TRBV20-1, TRBJ1-1)
CSASRGVTGNTEAFF

SEQ ID NO: 225673 - protein, 15 aa, Homo sapiens
  CDR3 for alpha chain variable domain of TCR clone 112837 (TRAV2, TRAJ9)
CAVEDRGTGGFKTIF

SEQ ID NO: 225674 - protein, 14 aa, Homo sapiens
  CDR3 for beta chain variable domain of TCR clone 112837 (TRBV19, TRBJ2-5)
CASSMTGQQETQYF

SEQ ID NO: 225675 - protein, 16 aa, Homo sapiens
  CDR3 for alpha chain variable domain of TCR clone 112838 (TRAV21, TRAJ17)
CAVRPGEEAAGNKLTF

SEQ ID NO: 225676 - protein, 13 aa, Homo sapiens
  CDR3 for beta chain variable domain of TCR clone 112838 (TRBV7-2, TRBJ1-3)
CASSLDRGNTIYF

SEQ ID NO: 225677 - protein, 15 aa, Homo sapiens
  CDR3 for alpha chain variable domain of TCR clone 112839 (TRAV26-1, TRAJ17)
CIVRVVKAAGNKLTF

SEQ ID NO: 225678 - protein, 16 aa, Homo sapiens
  CDR3 for beta chain variable domain of TCR clone 112839 (TRBV7-9, TRBJ2-1)
CASSLVSGPSYNEQSF

SEQ ID NO: 225679 - protein, 11 aa, Homo sapiens
  CDR3 for alpha chain variable domain of TCR clone 112840 (TRAV8-4, TRAJ20)
CAVTNVLTTTS

SEQ ID NO: 225680 - protein, 13 aa, Homo sapiens
  CDR3 for beta chain variable domain of TCR clone 112840 (TRBV7-9, TRBJ1-2)
CASSLKQNYGYTF

SEQ ID NO: 225681 - protein, 14 aa, Homo sapiens
  CDR3 for alpha chain variable domain of TCR clone 112841 (TRAV17, TRAJ34)
CATVPTYNTDKLIF

SEQ ID NO: 225682 - protein, 13 aa, Homo sapiens
  CDR3 for beta chain variable domain of TCR clone 112841 (TRBV7-3, TRBJ1-1)
CASSQDWGAEAFF

SEQ ID NO: 225683 - protein, 16 aa, Homo sapiens
  CDR3 for alpha chain variable domain of TCR clone 112842 (TRAV12-3, TRAJ53)
YAMSPGSGGSNYKLTF

SEQ ID NO: 225684 - protein, 12 aa, Homo sapiens
  CDR3 for beta chain variable domain of TCR clone 112842 (TRBV7-8, TRBJ2-7)
CASSLGDREQYF

SEQ ID NO: 225685 - protein, 13 aa, Homo sapiens
  CDR3 for alpha chain variable domain of TCR clone 112843 (TRAV8-3, TRAJ36)
CAVGATGANNLFF

SEQ ID NO: 225686 - protein, 13 aa, Homo sapiens
  CDR3 for beta chain variable domain of TCR clone 112843 (TRBV27, TRBJ2-7)
CASSLTTGYEQYF

SEQ ID NO: 225687 - protein, 16 aa, Homo sapiens
  CDR3 for alpha chain variable domain of TCR clone 112844 (TRAV30, TRAJ49)
SAAQRVGPNTGNQFYF

SEQ ID NO: 225688 - protein, 15 aa, Homo sapiens
  CDR3 for beta chain variable domain of TCR clone 112844 (TRBV2, TRBJ2-1)
CAGSELAGSYNEQFF

SEQ ID NO: 225689 - protein, 11 aa, Homo sapiens
  CDR3 for alpha chain variable domain of TCR clone 112845 (TRAV2, TRAJ33)
CAVDSNDQLIW

SEQ ID NO: 225690 - protein, 15 aa, Homo sapiens
  CDR3 for beta chain variable domain of TCR clone 112845 (TRBV19, TRBJ1-2)
CASSVGQVLNYGYTF

SEQ ID NO: 225691 - protein, 18 aa, Homo sapiens
  CDR3 for alpha chain variable domain of TCR clone 112846 (TRAV13-1, TRAJ52)
CAASKRSAGGTSYGKLTF

SEQ ID NO: 225692 - protein, 14 aa, Homo sapiens
  CDR3 for beta chain variable domain of TCR clone 112846 (TRBV19, TRBJ2-2)
CASSGQGIAGELFF

SEQ ID NO: 225693 - protein, 11 aa, Homo sapiens
  CDR3 for alpha chain variable domain of TCR clone 112847 (TRAV1-2, TRAJ20)
CAVSNDYKLSF

SEQ ID NO: 225694 - protein, 15 aa, Homo sapiens
  CDR3 for beta chain variable domain of TCR clone 112847 (TRBV19, TRBJ2-1)
CASSTGTSSYNEQFF

SEQ ID NO: 225695 - protein, 13 aa, Homo sapiens
  CDR3 for alpha chain variable domain of TCR clone 112848 (TRAV2, TRAJ40)
CAVVTSGTYKYIF

SEQ ID NO: 225696 - protein, 13 aa, Homo sapiens
  CDR3 for beta chain variable domain of TCR clone 112848 (TRBV24-1, TRBJ2-1)
CATSAGPYNEQFF

SEQ ID NO: 225697 - protein, 17 aa, Homo sapiens
  CDR3 for alpha chain variable domain of TCR clone 112849 (TRAV3, TRAJ6)
CAVRDGPRAGGSYIPTF

SEQ ID NO: 225698 - protein, 12 aa, Homo sapiens
  CDR3 for beta chain variable domain of TCR clone 112849 (TRBV4-3, TRBJ2-1)
CASSLSGYEQFF

SEQ ID NO: 225699 - protein, 14 aa, Homo sapiens
  CDR3 for alpha chain variable domain of TCR clone 112850 (TRAV13-2, TRAJ45)
CVEMPGGGADGLTF

SEQ ID NO: 225700 - protein, 11 aa, Homo sapiens
  CDR3 for beta chain variable domain of TCR clone 112850 (TRBV7-3, TRBJ2-5)
CASSLSETQYF

SEQ ID NO: 225701 - protein, 13 aa, Homo sapiens
  CDR3 for alpha chain variable domain of TCR clone 112851 (TRAV8-3, TRAJ21)
CAVGAYNFNKFYF

SEQ ID NO: 225702 - protein, 16 aa, Homo sapiens
  CDR3 for beta chain variable domain of TCR clone 112851 (TRBV7-3, TRBJ2-2)
CASSLKRGTLSGELFF

SEQ ID NO: 225703 - protein, 11 aa, Homo sapiens
  CDR3 for alpha chain variable domain of TCR clone 112852 (TRAV2, TRAJ13)
CASGGYQKVTF

SEQ ID NO: 225704 - protein, 13 aa, Homo sapiens
  CDR3 for beta chain variable domain of TCR clone 112852 (TRBV19, TRBJ2-7)
CASSPRQSYEQYF

SEQ ID NO: 225705 - protein, 14 aa, Homo sapiens
  CDR3 for alpha chain variable domain of TCR clone 112853 (TRAV21, TRAJ45)
CAVSSGGGADGLTF

SEQ ID NO: 225706 - protein, 14 aa, Homo sapiens
  CDR3 for beta chain variable domain of TCR clone 112853 (TRBV7-9, TRBJ2-1)
CASSPRDSLYEQFF

SEQ ID NO: 225707 - protein, 13 aa, Homo sapiens
  CDR3 for alpha chain variable domain of TCR clone 112854 (TRAV12-2, TRAJ50)
CAVIVTSYDKVIF

SEQ ID NO: 225708 - protein, 14 aa, Homo sapiens
  CDR3 for beta chain variable domain of TCR clone 112854 (TRBV6-1, TRBJ1-3)
CASVQGGGGNTIYF

SEQ ID NO: 225709 - protein, 19 aa, Homo sapiens
  CDR3 for alpha chain variable domain of TCR clone 112855 (TRAV21, TRAJ45)
CAVEAPRGDQEGVLTDSPF

SEQ ID NO: 225710 - protein, 12 aa, Homo sapiens
  CDR3 for beta chain variable domain of TCR clone 112855 (TRBV29-1, TRBJ1-3)
CSTRDSGNTIYF

SEQ ID NO: 225711 - protein, 10 aa, Homo sapiens
  CDR3 for alpha chain variable domain of TCR clone 112856 (TRAV12-2, TRAJ48)
CAVTSEKLTF

SEQ ID NO: 225712 - protein, 17 aa, Homo sapiens
  CDR3 for beta chain variable domain of TCR clone 112856 (TRBV11-1, TRBJ2-7)
CASSLTGSFGLDYEQYL

SEQ ID NO: 225713 - protein, 14 aa, Homo sapiens
  CDR3 for alpha chain variable domain of TCR clone 112857 (TRAV13-1, TRAJ35)
CAASKGGFGNVLHC

SEQ ID NO: 225714 - protein, 14 aa, Homo sapiens
  CDR3 for beta chain variable domain of TCR clone 112857 (TRBV19, TRBJ1-5)
CASRAPDSFLSQHF

SEQ ID NO: 225715 - protein, 15 aa, Homo sapiens
  CDR3 for alpha chain variable domain of TCR clone 112858 (TRAV4, TRAJ39)
CLVGPNNNAGNMLTF

SEQ ID NO: 225716 - protein, 14 aa, Homo sapiens
  CDR3 for beta chain variable domain of TCR clone 112858 (TRBV7-2, TRBJ2-7)
CASSPKTSFYEQYF

SEQ ID NO: 225717 - protein, 13 aa, Homo sapiens
  CDR3 for alpha chain variable domain of TCR clone 112859 (TRAV17, TRAJ5)
CAPMDTGRRALTF

SEQ ID NO: 225718 - protein, 15 aa, Homo sapiens
  CDR3 for beta chain variable domain of TCR clone 112859 (TRBV20-1, TRBJ2-5)
CSAEGTGGLQETQYF

SEQ ID NO: 225719 - protein, 14 aa, Homo sapiens
  CDR3 for alpha chain variable domain of TCR clone 112860 (TRAV12-1, TRAJ23)
CVVIVYNQGGKLIF

SEQ ID NO: 225720 - protein, 15 aa, Homo sapiens
  CDR3 for beta chain variable domain of TCR clone 112860 (TRBV20-1, TRBJ1-5)
CSAKPPGQGPQHQHF

SEQ ID NO: 225721 - protein, 11 aa, Homo sapiens
  CDR3 for alpha chain variable domain of TCR clone 112861 (TRAV4, TRAJ31)
CLVGLNARLMF

SEQ ID NO: 225722 - protein, 16 aa, Homo sapiens
  CDR3 for beta chain variable domain of TCR clone 112861 (TRBV15, TRBJ2-6)
CATSVDGGFLANVLTF

SEQ ID NO: 225723 - protein, 14 aa, Homo sapiens
  CDR3 for alpha chain variable domain of TCR clone 112862 (TRAV26-1, TRAJ38)
CIADNAGNNRKLLW

SEQ ID NO: 225724 - protein, 15 aa, Homo sapiens
  CDR3 for beta chain variable domain of TCR clone 112862 (TRBV7-2, TRBJ2-1)
CASSLVAGRYNEQFF

SEQ ID NO: 225725 - protein, 15 aa, Homo sapiens
  CDR3 for alpha chain variable domain of TCR clone 112863 (TRAV8-3, TRAJ27)
CAVGPSKTNAGKSTF

SEQ ID NO: 225726 - protein, 13 aa, Homo sapiens
  CDR3 for beta chain variable domain of TCR clone 112863 (TRBV13, TRBJ2-5)
CASSPEVGETQYF

SEQ ID NO: 225727 - protein, 15 aa, Homo sapiens
  CDR3 for alpha chain variable domain of TCR clone 112864 (TRAV26-1, TRAJ40)
CIVRVTTSGTYKYIF

SEQ ID NO: 225728 - protein, 16 aa, Homo sapiens
  CDR3 for beta chain variable domain of TCR clone 112864 (TRBV5-1, TRBJ1-2)
CASSLNVNGGSYGYTF

SEQ ID NO: 225729 - protein, 12 aa, Homo sapiens
  CDR3 for alpha chain variable domain of TCR clone 112865 (TRAV12-2, TRAJ8)
CAVNTAFQKLVF

SEQ ID NO: 225730 - protein, 15 aa, Homo sapiens
  CDR3 for beta chain variable domain of TCR clone 112865 (TRBV7-8, TRBJ1-5)
CASSLERRGLEPQHF

SEQ ID NO: 225731 - protein, 12 aa, Homo sapiens
  CDR3 for alpha chain variable domain of TCR clone 112866 (TRAV13-2, TRAJ8)
CAPWLGFQKLVF

SEQ ID NO: 225732 - protein, 16 aa, Homo sapiens
  CDR3 for beta chain variable domain of TCR clone 112866 (TRBV7-2, TRBJ1-2)
CASSSNQDRRGHGYTF

SEQ ID NO: 225733 - protein, 14 aa, Homo sapiens
  CDR3 for alpha chain variable domain of TCR clone 112867 (TRAV8-3, TRAJ11)
CAVGSNSGYSTLTF

SEQ ID NO: 225734 - protein, 14 aa, Homo sapiens
  CDR3 for beta chain variable domain of TCR clone 112867 (TRBV5-1, TRBJ2-7)
CASSLTSGGYEHYF

SEQ ID NO: 225735 - protein, 18 aa, Homo sapiens
  CDR3 for alpha chain variable domain of TCR clone 112868 (TRAV21, TRAJ52)
CAVRPSPAGGTSYGKLTF

SEQ ID NO: 225736 - protein, 15 aa, Homo sapiens
  CDR3 for beta chain variable domain of TCR clone 112868 (TRBV7-2, TRBJ2-2)
CASRRPGQNTGELFF

SEQ ID NO: 225737 - protein, 14 aa, Homo sapiens
  CDR3 for alpha chain variable domain of TCR clone 112869 (TRAV14/DV4, TRAJ41)
CARGGPDSGYALNF

SEQ ID NO: 225738 - protein, 14 aa, Homo sapiens
  CDR3 for beta chain variable domain of TCR clone 112869 (TRBV7-2, TRBJ2-7)
CASSLYPGRYEQYF

SEQ ID NO: 225739 - protein, 12 aa, Homo sapiens
  CDR3 for alpha chain variable domain of TCR clone 112870 (TRAV8-3, TRAJ20)
CAVGANDYKLSF

SEQ ID NO: 225740 - protein, 13 aa, Homo sapiens
  CDR3 for beta chain variable domain of TCR clone 112870 (TRBV24-1, TRBJ1-5)
CATSDRGDQPQHF

SEQ ID NO: 225741 - protein, 15 aa, Homo sapiens
  CDR3 for alpha chain variable domain of TCR clone 112871 (TRAV21, TRAJ37)
CAVRPTLSNTGKLIF

SEQ ID NO: 225742 - protein, 15 aa, Homo sapiens
  CDR3 for beta chain variable domain of TCR clone 112871 (TRBV20-1, TRBJ2-7)
CSARDRVSGMDEQYF

SEQ ID NO: 225743 - protein, 13 aa, Homo sapiens
  CDR3 for alpha chain variable domain of TCR clone 112872 (TRAV13-1, TRAJ20)
CAARVSNDCKLSF

SEQ ID NO: 225744 - protein, 16 aa, Homo sapiens
  CDR3 for beta chain variable domain of TCR clone 112872 (TRBV11-1, TRBJ1-1)
CATNPRDRAFNTEAFF

SEQ ID NO: 225745 - protein, 13 aa, Homo sapiens
  CDR3 for alpha chain variable domain of TCR clone 112873 (TRAV17, TRAJ7)
CATDNYGNNRLAF

SEQ ID NO: 225746 - protein, 16 aa, Homo sapiens
  CDR3 for beta chain variable domain of TCR clone 112873 (TRBV4-1, TRBJ2-5)
CASSQAIAASSATQYV

SEQ ID NO: 225747 - protein, 15 aa, Homo sapiens
  CDR3 for alpha chain variable domain of TCR clone 112874 (TRAV29/DV5, TRAJ40)
CAASAPGSGTYKYIF

SEQ ID NO: 225748 - protein, 11 aa, Homo sapiens
  CDR3 for beta chain variable domain of TCR clone 112874 (TRBV29-1, TRBJ2-5)
CSEDRTGTQYF

SEQ ID NO: 225749 - protein, 12 aa, Homo sapiens
  CDR3 for alpha chain variable domain of TCR clone 112875 (TRAV3, TRAJ31)
CAVRDGNARLMF

SEQ ID NO: 225750 - protein, 18 aa, Homo sapiens
  CDR3 for beta chain variable domain of TCR clone 112875 (TRBV7-2, TRBJ2-3)
CASSLKRDGSGITDTQHF

SEQ ID NO: 225751 - protein, 10 aa, Homo sapiens
  CDR3 for alpha chain variable domain of TCR clone 112876 (TRAV12-2, TRAJ52)
RSTSYGKLTF

SEQ ID NO: 225752 - protein, 11 aa, Homo sapiens
  CDR3 for beta chain variable domain of TCR clone 112876 (TRBV11-2, TRBJ2-2)
CAGSLPGELFF

SEQ ID NO: 225753 - protein, 14 aa, Homo sapiens
  CDR3 for alpha chain variable domain of TCR clone 112877 (TRAV12-2, TRAJ40)
CAVEIPSGTYKYIF

SEQ ID NO: 225754 - protein, 11 aa, Homo sapiens
  CDR3 for beta chain variable domain of TCR clone 112877 (TRBV29-1, TRBJ2-5)
CSEDRTGTQYF

SEQ ID NO: 225755 - protein, 14 aa, Homo sapiens
  CDR3 for alpha chain variable domain of TCR clone 112878 (TRAV3, TRAJ17)
CAVRDAAAGNKLTF

SEQ ID NO: 225756 - protein, 14 aa, Homo sapiens
  CDR3 for beta chain variable domain of TCR clone 112878 (TRBV11-2, TRBJ2-7)
CASSLGAGAYEQYF

SEQ ID NO: 225757 - protein, 16 aa, Homo sapiens
  CDR3 for alpha chain variable domain of TCR clone 112879 (TRAV38-2/DV8, TRAJ45)
CAYRGNSGGGAEGLTF

SEQ ID NO: 225758 - protein, 14 aa, Homo sapiens
  CDR3 for beta chain variable domain of TCR clone 112879 (TRBV7-2, TRBJ2-7)
CASSPKTSFYEQYF

SEQ ID NO: 225759 - protein, 12 aa, Homo sapiens
  CDR3 for alpha chain variable domain of TCR clone 112880 (TRAV1-2, TRAJ33)
CAALDSNYRLIW

SEQ ID NO: 225760 - protein, 14 aa, Homo sapiens
  CDR3 for beta chain variable domain of TCR clone 112880 (TRBV5-4, TRBJ2-2)
CASRLDGGTGELFF

SEQ ID NO: 225761 - protein, 12 aa, Homo sapiens
  CDR3 for alpha chain variable domain of TCR clone 112881 (TRAV16, TRAJ56)
CAPTGASSKLTF

SEQ ID NO: 225762 - protein, 13 aa, Homo sapiens
  CDR3 for beta chain variable domain of TCR clone 112881 (TRBV10-3, TRBJ2-7)
CASKLAVNYEQYF

SEQ ID NO: 225763 - protein, 16 aa, Homo sapiens
  CDR3 for alpha chain variable domain of TCR clone 112882 (TRAV13-1, TRAJ13)
CTAFFLGVTRKLPLEL

SEQ ID NO: 225764 - protein, 15 aa, Homo sapiens
  CDR3 for beta chain variable domain of TCR clone 112882 (TRBV7-8, TRBJ2-1)
CASSLAGSLYNEQFF

SEQ ID NO: 225765 - protein, 12 aa, Homo sapiens
  CDR3 for alpha chain variable domain of TCR clone 112883 (TRAV4, TRAJ26)
CLVGDYGQNFVF

SEQ ID NO: 225766 - protein, 14 aa, Homo sapiens
  CDR3 for beta chain variable domain of TCR clone 112883 (TRBV7-2, TRBJ2-7)
CASRSQGAAYEQYF

SEQ ID NO: 225767 - protein, 18 aa, Homo sapiens
  CDR3 for alpha chain variable domain of TCR clone 112884 (TRAV26-1, TRAJ22)
CIVRVALIYSGSARQLTF

SEQ ID NO: 225768 - protein, 13 aa, Homo sapiens
  CDR3 for beta chain variable domain of TCR clone 112884 (TRBV13, TRBJ2-5)
CASSPEVGETQYF

SEQ ID NO: 225769 - protein, 14 aa, Homo sapiens
  CDR3 for alpha chain variable domain of TCR clone 112885 (TRAV27, TRAJ22)
CAGVSVLGKRQLTF

SEQ ID NO: 225770 - protein, 14 aa, Homo sapiens
  CDR3 for beta chain variable domain of TCR clone 112885 (TRBV7-2, TRBJ1-1)
CASSFLTGTTEAFF

SEQ ID NO: 225771 - protein, 14 aa, Homo sapiens
  CDR3 for alpha chain variable domain of TCR clone 112886 (TRAV23/DV6, TRAJ8)
CAAIKATGFQKLVF

SEQ ID NO: 225772 - protein, 15 aa, Homo sapiens
  CDR3 for beta chain variable domain of TCR clone 112886 (TRBV28, TRBJ2-3)
CASSPDRQGANTQYF

SEQ ID NO: 225773 - protein, 12 aa, Homo sapiens
  CDR3 for alpha chain variable domain of TCR clone 112887 (TRAV16, TRAJ10)
CSRTGGGNKLTF

SEQ ID NO: 225774 - protein, 17 aa, Homo sapiens
  CDR3 for beta chain variable domain of TCR clone 112887 (TRBV20-1, TRBJ2-1)
CSARDPLAGVWDNEQFF

SEQ ID NO: 225775 - protein, 15 aa, Homo sapiens
  CDR3 for alpha chain variable domain of TCR clone 112888 (TRAV34, TRAJ38)
CGADFTPGNNRKLIW

SEQ ID NO: 225776 - protein, 16 aa, Homo sapiens
  CDR3 for beta chain variable domain of TCR clone 112888 (TRBV12-5, TRBJ2-5)
CASGPRTSGNQETQSF

SEQ ID NO: 225777 - protein, 13 aa, Homo sapiens
  CDR3 for alpha chain variable domain of TCR clone 112889 (TRAV17, TRAJ9)
RATDYTGGFKTIF

SEQ ID NO: 225778 - protein, 14 aa, Homo sapiens
  CDR3 for beta chain variable domain of TCR clone 112889 (TRBV19, TRBJ2-5)
CASSMTGQQETQYF

SEQ ID NO: 225779 - protein, 11 aa, Homo sapiens
  CDR3 for alpha chain variable domain of TCR clone 112890 (TRAV12-3, TRAJ43)
CAMSVSNDMRF

SEQ ID NO: 225780 - protein, 12 aa, Homo sapiens
  CDR3 for beta chain variable domain of TCR clone 112890 (TRBV7-8, TRBJ2-7)
CASSLGDREQYF

SEQ ID NO: 225781 - protein, 11 aa, Homo sapiens
  CDR3 for alpha chain variable domain of TCR clone 112891 (TRAV21, TRAJ34)
CAHYNTDKLIF

SEQ ID NO: 225782 - protein, 16 aa, Homo sapiens
  CDR3 for beta chain variable domain of TCR clone 112891 (TRBV28, TRBJ1-5)
CASSFRGGYSNQPQHF

SEQ ID NO: 225783 - protein, 12 aa, Homo sapiens
  CDR3 for alpha chain variable domain of TCR clone 112892 (TRAV17, TRAJ20)
CATQANDYKFSF

SEQ ID NO: 225784 - protein, 12 aa, Homo sapiens
  CDR3 for beta chain variable domain of TCR clone 112892 (TRBV6-1, TRBJ1-1)
CASNSPTAEAFF

SEQ ID NO: 225785 - protein, 15 aa, Homo sapiens
  CDR3 for alpha chain variable domain of TCR clone 112893 (TRAV13-1, TRAJ57)
QVPPLSQGGSEKLVF

SEQ ID NO: 225786 - protein, 14 aa, Homo sapiens
  CDR3 for beta chain variable domain of TCR clone 112893 (TRBV15, TRBJ2-3)
CATRSGTSTDTQYF

SEQ ID NO: 225787 - protein, 18 aa, Homo sapiens
  CDR3 for alpha chain variable domain of TCR clone 112894 (TRAV21, TRAJ52)
CAVRPSPAGGTSYGKLTF

SEQ ID NO: 225788 - protein, 17 aa, Homo sapiens
  CDR3 for beta chain variable domain of TCR clone 112894 (TRBV4-1, TRBJ2-3)
CASSQGYVSGGTDTQYF

SEQ ID NO: 225789 - protein, 13 aa, Homo sapiens
  CDR3 for alpha chain variable domain of TCR clone 112895 (TRAV2, TRAJ24)
CAVPTDSWGKLQF

SEQ ID NO: 225790 - protein, 16 aa, Homo sapiens
  CDR3 for beta chain variable domain of TCR clone 112895 (TRBV5-4, TRBJ2-1)
CASSLVGSGQDNEQFF

SEQ ID NO: 225791 - protein, 16 aa, Homo sapiens
  CDR3 for alpha chain variable domain of TCR clone 112896 (TRAV3, TRAJ10)
CAVRDMRAGGGNKLTF

SEQ ID NO: 225792 - protein, 13 aa, Homo sapiens
  CDR3 for beta chain variable domain of TCR clone 112896 (TRBV6-1, TRBJ1-1)
CARSRQGNTEAFF

SEQ ID NO: 225793 - protein, 16 aa, Homo sapiens
  CDR3 for alpha chain variable domain of TCR clone 112897 (TRAV8-3, TRAJ44)
CAVCASNTGTASKLTF

SEQ ID NO: 225794 - protein, 15 aa, Homo sapiens
  CDR3 for beta chain variable domain of TCR clone 112897 (TRBV27, TRBJ1-5)
CASTFNRGSNQPQHF

SEQ ID NO: 225795 - protein, 16 aa, Homo sapiens
  CDR3 for alpha chain variable domain of TCR clone 112898 (TRAV22, TRAJ45)
CAVERGKRGGADGLTF

SEQ ID NO: 225796 - protein, 20 aa, Homo sapiens
  CDR3 for beta chain variable domain of TCR clone 112898 (TRBV7-8, TRBJ2-2)
CASSHLFPGPTIHITGELFF

SEQ ID NO: 225797 - protein, 13 aa, Homo sapiens
  CDR3 for alpha chain variable domain of TCR clone 112899 (TRAV1-2, TRAJ9)
CAALNTGGFKTIF

SEQ ID NO: 225798 - protein, 12 aa, Homo sapiens
  CDR3 for beta chain variable domain of TCR clone 112899 (TRBV19, TRBJ2-7)
CASTSGTYEQYF

SEQ ID NO: 225799 - protein, 14 aa, Homo sapiens
  CDR3 for alpha chain variable domain of TCR clone 112900 (TRAV8-3, TRAJ40)
CALHESYYLRSLQI

SEQ ID NO: 225800 - protein, 12 aa, Homo sapiens
  CDR3 for beta chain variable domain of TCR clone 112900 (TRBV7-3, TRBJ2-3)
CASSSLTDTQYF

SEQ ID NO: 225801 - protein, 16 aa, Homo sapiens
  CDR3 for alpha chain variable domain of TCR clone 112901 (TRAV3, TRAJ37)
CALRGKGSGNTGKLIF

SEQ ID NO: 225802 - protein, 15 aa, Homo sapiens
  CDR3 for beta chain variable domain of TCR clone 112901 (TRBV5-1, TRBJ2-7)
CASSLNGGPAREQYF

SEQ ID NO: 225803 - protein, 13 aa, Homo sapiens
  CDR3 for alpha chain variable domain of TCR clone 112902 (TRAV13-1, TRAJ39)
CSKYSNAGNMLTF

SEQ ID NO: 225804 - protein, 14 aa, Homo sapiens
  CDR3 for beta chain variable domain of TCR clone 112902 (TRBV6-5, TRBJ2-7)
CASSYDRGLREQYF

SEQ ID NO: 225805 - protein, 13 aa, Homo sapiens
  CDR3 for alpha chain variable domain of TCR clone 112903 (TRAV8-3, TRAJ28)
CAVGAVGSYQLTF

SEQ ID NO: 225806 - protein, 15 aa, Homo sapiens
  CDR3 for beta chain variable domain of TCR clone 112903 (TRBV7-9, TRBJ2-7)
CASSLALAEAYEQYF

SEQ ID NO: 225807 - protein, 15 aa, Homo sapiens
  CDR3 for alpha chain variable domain of TCR clone 112904 (TRAV21, TRAJ53)
CATLNSGGSNHKLTF

SEQ ID NO: 225808 - protein, 15 aa, Homo sapiens
  CDR3 for beta chain variable domain of TCR clone 112904 (TRBV18, TRBJ2-1)
CASSPPSASYNEQFF

SEQ ID NO: 225809 - protein, 17 aa, Homo sapiens
  CDR3 for alpha chain variable domain of TCR clone 112905 (TRAV3, TRAJ38)
CAVRDCLNAGNNRKLSW

SEQ ID NO: 225810 - protein, 15 aa, Homo sapiens
  CDR3 for beta chain variable domain of TCR clone 112905 (TRBV27, TRBJ2-1)
CASSNGGGSSNEQFF

SEQ ID NO: 225811 - protein, 13 aa, Homo sapiens
  CDR3 for alpha chain variable domain of TCR clone 112906 (TRAV13-2, TRAJ48)
CAEMDFGNEKLTF

SEQ ID NO: 225812 - protein, 13 aa, Homo sapiens
  CDR3 for beta chain variable domain of TCR clone 112906 (TRBV11-2, TRBJ2-5)
CASSRGPSETQYF

SEQ ID NO: 225813 - protein, 10 aa, Homo sapiens
  CDR3 for alpha chain variable domain of TCR clone 112907 (TRAV3, TRAJ32)
CAVREGIMVG

SEQ ID NO: 225814 - protein, 13 aa, Homo sapiens
  CDR3 for beta chain variable domain of TCR clone 112907 (TRBV2, TRBJ1-1)
CASSEGGNTEAFF

SEQ ID NO: 225815 - protein, 17 aa, Homo sapiens
  CDR3 for alpha chain variable domain of TCR clone 112908 (TRAV20, TRAJ42)
CAVQAWGYGGSQGNLIF

SEQ ID NO: 225816 - protein, 16 aa, Homo sapiens
  CDR3 for beta chain variable domain of TCR clone 112908 (TRBV29-1, TRBJ2-5)
CSVEGLAGDYQETQFF

SEQ ID NO: 225817 - protein, 11 aa, Homo sapiens
  CDR3 for alpha chain variable domain of TCR clone 112909 (TRAV27, TRAJ47)
SIVEYGNKLDF

SEQ ID NO: 225818 - protein, 18 aa, Homo sapiens
  CDR3 for beta chain variable domain of TCR clone 112909 (TRBV2, TRBJ2-1)
CASRGLAGGPRTYNEQFF

SEQ ID NO: 225819 - protein, 17 aa, Homo sapiens
  CDR3 for alpha chain variable domain of TCR clone 112910 (TRAV3, TRAJ42)
CAVRDRYYGGSQGNLIF

SEQ ID NO: 225820 - protein, 14 aa, Homo sapiens
  CDR3 for beta chain variable domain of TCR clone 112910 (TRBV19, TRBJ2-5)
CASSMTGQQETQYF

SEQ ID NO: 225821 - protein, 13 aa, Homo sapiens
  CDR3 for alpha chain variable domain of TCR clone 112911 (TRAV27, TRAJ6)
CAGGTRGSYIPTF

SEQ ID NO: 225822 - protein, 12 aa, Homo sapiens
  CDR3 for beta chain variable domain of TCR clone 112911 (TRBV7-8, TRBJ2-7)
CASSLGDREQYF

SEQ ID NO: 225823 - protein, 18 aa, Homo sapiens
  CDR3 for alpha chain variable domain of TCR clone 112912 (TRAV16, TRAJ45)
CAQASYPSSGGGADGLTF

SEQ ID NO: 225824 - protein, 12 aa, Homo sapiens
  CDR3 for beta chain variable domain of TCR clone 112912 (TRBV11-3, TRBJ2-4)
CSSSAGRVIQYF

SEQ ID NO: 225825 - protein, 14 aa, Homo sapiens
  CDR3 for alpha chain variable domain of TCR clone 112913 (TRAV26-1, TRAJ38)
CIADNAGNNHIQNP

SEQ ID NO: 225826 - protein, 12 aa, Homo sapiens
  CDR3 for beta chain variable domain of TCR clone 112913 (TRBV11-2, TRBJ2-2)
CASSLGGGELFF

SEQ ID NO: 225827 - protein, 13 aa, Homo sapiens
  CDR3 for alpha chain variable domain of TCR clone 112914 (TRAV13-1, TRAJ40)
CAARTSGTYKYIF

SEQ ID NO: 225828 - protein, 14 aa, Homo sapiens
  CDR3 for beta chain variable domain of TCR clone 112914 (TRBV7-2, TRBJ2-7)
CASSPKTSFYEQYF

SEQ ID NO: 225829 - protein, 17 aa, Homo sapiens
  CDR3 for alpha chain variable domain of TCR clone 112915 (TRAV3, TRAJ6)
CAVREGPRAGGSYIPTF

SEQ ID NO: 225830 - protein, 13 aa, Homo sapiens
  CDR3 for beta chain variable domain of TCR clone 112915 (TRBV4-1, TRBJ2-2)
CASSQENTGELFF

SEQ ID NO: 225831 - protein, 14 aa, Homo sapiens
  CDR3 for alpha chain variable domain of TCR clone 112916 (TRAV1-2, TRAJ16)
CAVNRFSDGQKLLF

SEQ ID NO: 225832 - protein, 17 aa, Homo sapiens
  CDR3 for beta chain variable domain of TCR clone 112916 (TRBV4-1, TRBJ2-3)
CASSQGYVSGGTDTQYF

SEQ ID NO: 225833 - protein, 13 aa, Homo sapiens
  CDR3 for alpha chain variable domain of TCR clone 112917 (TRAV21, TRAJ27)
CAARPGSAGKSTF

SEQ ID NO: 225834 - protein, 13 aa, Homo sapiens
  CDR3 for beta chain variable domain of TCR clone 112917 (TRBV18, TRBJ2-7)
CASQSGGGYEQYF

SEQ ID NO: 225835 - protein, 16 aa, Homo sapiens
  CDR3 for alpha chain variable domain of TCR clone 112918 (TRAV4, TRAJ9)
CLVGDPNRPGGFKTIF

SEQ ID NO: 225836 - protein, 16 aa, Homo sapiens
  CDR3 for beta chain variable domain of TCR clone 112918 (TRBV28, TRBJ1-4)
CASSPPYRGRSGKLFF

SEQ ID NO: 225837 - protein, 13 aa, Homo sapiens
  CDR3 for alpha chain variable domain of TCR clone 112919 (TRAV12-3, TRAJ33)
CAMSVNSNYQLIW

SEQ ID NO: 225838 - protein, 14 aa, Homo sapiens
  CDR3 for beta chain variable domain of TCR clone 112919 (TRBV6-6, TRBJ2-7)
CASSDSGAGYEQYF

SEQ ID NO: 225839 - protein, 12 aa, Homo sapiens
  CDR3 for alpha chain variable domain of TCR clone 112920 (TRAV26-1, TRAJ17)
CIVRSAGNKLTF

SEQ ID NO: 225840 - protein, 15 aa, Homo sapiens
  CDR3 for beta chain variable domain of TCR clone 112920 (TRBV7-6, TRBJ1-2)
CASSSGGRGGHGYTF

SEQ ID NO: 225841 - protein, 17 aa, Homo sapiens
  CDR3 for alpha chain variable domain of TCR clone 112921 (TRAV3, TRAJ38)
CAVRDCLNAGNNRKLIW

SEQ ID NO: 225842 - protein, 13 aa, Homo sapiens
  CDR3 for beta chain variable domain of TCR clone 112921 (TRBV7-2, TRBJ2-2)
CASSLAVTGELFF

SEQ ID NO: 225843 - protein, 13 aa, Homo sapiens
  CDR3 for alpha chain variable domain of TCR clone 112922 (TRAV13-1, TRAJ21)
CAASIYNFNKFYF

SEQ ID NO: 225844 - protein, 13 aa, Homo sapiens
  CDR3 for beta chain variable domain of TCR clone 112922 (TRBV12-5, TRBJ2-3)
CASGDRQSDTQYF

SEQ ID NO: 225845 - protein, 17 aa, Homo sapiens
  CDR3 for alpha chain variable domain of TCR clone 112923 (TRAV8-3, TRAJ52)
CCGCDLPGDYSYGKLTF

SEQ ID NO: 225846 - protein, 18 aa, Homo sapiens
  CDR3 for beta chain variable domain of TCR clone 112923 (TRBV11-2, TRBJ2-6)
CASSLNPFLGTGANDLTF

SEQ ID NO: 225847 - protein, 14 aa, Homo sapiens
  CDR3 for alpha chain variable domain of TCR clone 112924 (TRAV1-2, TRAJ16)
CAVNRFSDGQKMLF

SEQ ID NO: 225848 - protein, 18 aa, Homo sapiens
  CDR3 for beta chain variable domain of TCR clone 112924 (TRBV20-1, TRBJ2-6)
CSAETTPTHGSGANVLTF

SEQ ID NO: 225849 - protein, 15 aa, Homo sapiens
  CDR3 for alpha chain variable domain of TCR clone 112925 (TRAV4, TRAJ42)
CLVGGYGGSQGNPIF

SEQ ID NO: 225850 - protein, 16 aa, Homo sapiens
  CDR3 for beta chain variable domain of TCR clone 112925 (TRBV27, TRBJ1-1)
CASSTRTGGVGTEAFF

SEQ ID NO: 225851 - protein, 11 aa, Homo sapiens
  CDR3 for alpha chain variable domain of TCR clone 112926 (TRAV13-1, TRAJ39)
CASHAGNMLTF

SEQ ID NO: 225852 - protein, 15 aa, Homo sapiens
  CDR3 for beta chain variable domain of TCR clone 112926 (TRBV10-3, TRBJ2-3)
CAISLTSGGTDTQYF

SEQ ID NO: 225853 - protein, 14 aa, Homo sapiens
  CDR3 for alpha chain variable domain of TCR clone 112927 (TRAV1-2, TRAJ16)
CAVNRFSDGQKLVF

SEQ ID NO: 225854 - protein, 15 aa, Homo sapiens
  CDR3 for beta chain variable domain of TCR clone 112927 (TRBV9, TRBJ1-6)
CASSVAGTGDSPLHF

SEQ ID NO: 225855 - protein, 14 aa, Homo sapiens
  CDR3 for alpha chain variable domain of TCR clone 112928 (TRAV29/DV5, TRAJ44)
CAAFLVGTASKLTF

SEQ ID NO: 225856 - protein, 13 aa, Homo sapiens
  CDR3 for beta chain variable domain of TCR clone 112928 (TRBV10-2, TRBJ2-3)
CASSESGDHTQYF

SEQ ID NO: 225857 - protein, 12 aa, Homo sapiens
  CDR3 for alpha chain variable domain of TCR clone 112929 (TRAV8-3, TRAJ4)
PAFSVGYNKLIF

SEQ ID NO: 225858 - protein, 13 aa, Homo sapiens
  CDR3 for beta chain variable domain of TCR clone 112929 (TRBV20-1, TRBJ1-3)
CSAGAYSGNTIYF

SEQ ID NO: 225859 - protein, 14 aa, Homo sapiens
  CDR3 for alpha chain variable domain of TCR clone 112930 (TRAV1-2, TRAJ16)
CAVNRFSDGQKLLF

SEQ ID NO: 225860 - protein, 16 aa, Homo sapiens
  CDR3 for beta chain variable domain of TCR clone 112930 (TRBV12-5, TRBJ2-5)
CASGPRTSVNQETQYF

SEQ ID NO: 225861 - protein, 13 aa, Homo sapiens
  CDR3 for alpha chain variable domain of TCR clone 112931 (TRAV3, TRAJ20)
CAVRSLNDYKLSF

SEQ ID NO: 225862 - protein, 18 aa, Homo sapiens
  CDR3 for beta chain variable domain of TCR clone 112931 (TRBV23-1, TRBJ2-7)
CASSQYRRTDSTSSTSGR

SEQ ID NO: 225863 - protein, 15 aa, Homo sapiens
  CDR3 for alpha chain variable domain of TCR clone 112932 (TRAV3, TRAJ22)
CAVRDRGGSARQLTC

SEQ ID NO: 225864 - protein, 16 aa, Homo sapiens
  CDR3 for beta chain variable domain of TCR clone 112932 (TRBV5-4, TRBJ2-3)
CASQQPGAGGADTQYF

SEQ ID NO: 225865 - protein, 14 aa, Homo sapiens
  CDR3 for alpha chain variable domain of TCR clone 112933 (TRAV20, TRAJ10)
CAVRVEGGGNKLTF

SEQ ID NO: 225866 - protein, 18 aa, Homo sapiens
  CDR3 for beta chain variable domain of TCR clone 112933 (TRBV24-1, TRBJ2-1)
CATSDLMFLGRGVHESSS

SEQ ID NO: 225867 - protein, 19 aa, Homo sapiens
  CDR3 for alpha chain variable domain of TCR clone 112934 (TRAV3, TRAJ37)
CAVRDIVGGYPSNTGKLIF

SEQ ID NO: 225868 - protein, 14 aa, Homo sapiens
  CDR3 for beta chain variable domain of TCR clone 112934 (TRBV12-4, TRBJ1-1)
CASSLGTGGTEAFF

SEQ ID NO: 225869 - protein, 15 aa, Homo sapiens
  CDR3 for alpha chain variable domain of TCR clone 112935 (TRAV36/DV7, TRAJ53)
CAVEGSGGRNYKLTF

SEQ ID NO: 225870 - protein, 16 aa, Homo sapiens
  CDR3 for beta chain variable domain of TCR clone 112935 (TRBV27, TRBJ2-2)
CASSLSGFWVTGELFF

SEQ ID NO: 225871 - protein, 16 aa, Homo sapiens
  CDR3 for alpha chain variable domain of TCR clone 112936 (TRAV12-3, TRAJ53)
CAMIPGSGGSNHKLTF

SEQ ID NO: 225872 - protein, 11 aa, Homo sapiens
  CDR3 for beta chain variable domain of TCR clone 112936 (TRBV29-1, TRBJ2-5)
CSEDRTGTQYF

SEQ ID NO: 225873 - protein, 15 aa, Homo sapiens
  CDR3 for alpha chain variable domain of TCR clone 112937 (TRAV12-3, TRAJ6)
CAMSATTGGSYIPTF

SEQ ID NO: 225874 - protein, 15 aa, Homo sapiens
  CDR3 for beta chain variable domain of TCR clone 112937 (TRBV5-1, TRBJ2-1)
CASSPPRAPYNEQFF

SEQ ID NO: 225875 - protein, 11 aa, Homo sapiens
  CDR3 for alpha chain variable domain of TCR clone 112938 (TRAV26-1, TRAJ37)
CIVRVGRKLIF

SEQ ID NO: 225876 - protein, 14 aa, Homo sapiens
  CDR3 for beta chain variable domain of TCR clone 112938 (TRBV6-1, TRBJ1-3)
CASVQGGGGNTIYF

SEQ ID NO: 225877 - protein, 15 aa, Homo sapiens
  CDR3 for alpha chain variable domain of TCR clone 112939 (TRAV8-3, TRAJ45)
CASSYSGGGADGITF

SEQ ID NO: 225878 - protein, 16 aa, Homo sapiens
  CDR3 for beta chain variable domain of TCR clone 112939 (TRBV7-9, TRBJ2-2)
CASSGFGGANTGELFF

SEQ ID NO: 225879 - protein, 13 aa, Homo sapiens
  CDR3 for alpha chain variable domain of TCR clone 112940 (TRAV13-2, TRAJ49)
CAENTNTGNQFYF

SEQ ID NO: 225880 - protein, 14 aa, Homo sapiens
  CDR3 for beta chain variable domain of TCR clone 112940 (TRBV11-2, TRBJ1-2)
CASSLGTANYGYTF

SEQ ID NO: 225881 - protein, 13 aa, Homo sapiens
  CDR3 for alpha chain variable domain of TCR clone 112941 (TRAV27, TRAJ41)
CAGEGNSGYAVNF

SEQ ID NO: 225882 - protein, 14 aa, Homo sapiens
  CDR3 for beta chain variable domain of TCR clone 112941 (TRBV7-2, TRBJ1-1)
CASSFLTGTTEAFF

SEQ ID NO: 225883 - protein, 13 aa, Homo sapiens
  CDR3 for alpha chain variable domain of TCR clone 112942 (TRAV2, TRAJ40)
CAVVTSGTYKYIF

SEQ ID NO: 225884 - protein, 17 aa, Homo sapiens
  CDR3 for beta chain variable domain of TCR clone 112942 (TRBV7-3, TRBJ2-3)
CASSLMKRMRGADEQYF

SEQ ID NO: 225885 - protein, 10 aa, Homo sapiens
  CDR3 for alpha chain variable domain of TCR clone 112943 (TRAV2, TRAJ34)
CAVVNDKLIF

SEQ ID NO: 225886 - protein, 16 aa, Homo sapiens
  CDR3 for beta chain variable domain of TCR clone 112943 (TRBV20-1, TRBJ2-7)
CSARGSVVADIYEQYF

SEQ ID NO: 225887 - protein, 12 aa, Homo sapiens
  CDR3 for alpha chain variable domain of TCR clone 112944 (TRAV1-2, TRAJ33)
CAALDSNYQLIW

SEQ ID NO: 225888 - protein, 12 aa, Homo sapiens
  CDR3 for beta chain variable domain of TCR clone 112944 (TRBV11-2, TRBJ2-2)
CASSLGGGELFF

SEQ ID NO: 225889 - protein, 13 aa, Homo sapiens
  CDR3 for alpha chain variable domain of TCR clone 112945 (TRAV12-2, TRAJ20)
CAVYPSNDYKLSF

SEQ ID NO: 225890 - protein, 16 aa, Homo sapiens
  CDR3 for beta chain variable domain of TCR clone 112945 (TRBV18, TRBJ1-5)
CASSPSTGNSNQPQHF

SEQ ID NO: 225891 - protein, 14 aa, Homo sapiens
  CDR3 for alpha chain variable domain of TCR clone 112946 (TRAV8-3, TRAJ9)
CAVVYNTGGFKTIF

SEQ ID NO: 225892 - protein, 16 aa, Homo sapiens
  CDR3 for beta chain variable domain of TCR clone 112946 (TRBV12-5, TRBJ2-5)
CASGPRTSGNQETQYF

SEQ ID NO: 225893 - protein, 16 aa, Homo sapiens
  CDR3 for alpha chain variable domain of TCR clone 112947 (TRAV3, TRAJ10)
CAVRDMRAGGGNKLTF

SEQ ID NO: 225894 - protein, 17 aa, Homo sapiens
  CDR3 for beta chain variable domain of TCR clone 112947 (TRBV28, TRBJ2-5)
CAGSTPEGDALQETQYF

SEQ ID NO: 225895 - protein, 18 aa, Homo sapiens
  CDR3 for alpha chain variable domain of TCR clone 112948 (TRAV21, TRAJ52)
CAVRPSPAGGTSYGKLTF

SEQ ID NO: 225896 - protein, 16 aa, Homo sapiens
  CDR3 for beta chain variable domain of TCR clone 112948 (TRBV5-4, TRBJ2-5)
CAESPGLAGTQETQYF

SEQ ID NO: 225897 - protein, 17 aa, Homo sapiens
  CDR3 for alpha chain variable domain of TCR clone 112949 (TRAV26-1, TRAJ58)
CIVRVGAEEASGSRLTF

SEQ ID NO: 225898 - protein, 13 aa, Homo sapiens
  CDR3 for beta chain variable domain of TCR clone 112949 (TRBV12-5, TRBJ1-2)
CASGVRTGNGYTF

SEQ ID NO: 225899 - protein, 14 aa, Homo sapiens
  CDR3 for alpha chain variable domain of TCR clone 112950 (TRAV1-2, TRAJ16)
CAVNRSSDGQKLLF

SEQ ID NO: 225900 - protein, 13 aa, Homo sapiens
  CDR3 for beta chain variable domain of TCR clone 112950 (TRBV20-1, TRBJ1-6)
CSAPTGLGSPLHF

SEQ ID NO: 225901 - protein, 14 aa, Homo sapiens
  CDR3 for alpha chain variable domain of TCR clone 112951 (TRAV3, TRAJ21)
CALGRGSANFTLDL

SEQ ID NO: 225902 - protein, 14 aa, Homo sapiens
  CDR3 for beta chain variable domain of TCR clone 112951 (TRBV7-9, TRBJ2-4)
CASSLAMGGNIQYF

SEQ ID NO: 225903 - protein, 16 aa, Homo sapiens
  CDR3 for alpha chain variable domain of TCR clone 112952 (TRAV8-3, TRAJ8)
CAVPRDGNTGVQKLVF

SEQ ID NO: 225904 - protein, 14 aa, Homo sapiens
  CDR3 for beta chain variable domain of TCR clone 112952 (TRBV4-1, TRBJ2-2)
CASSQAVNTGELFF

SEQ ID NO: 225905 - protein, 14 aa, Homo sapiens
  CDR3 for alpha chain variable domain of TCR clone 112953 (TRAV13-1, TRAJ9)
CAASALTGGFKIIF

SEQ ID NO: 225906 - protein, 13 aa, Homo sapiens
  CDR3 for beta chain variable domain of TCR clone 112953 (TRBV20-1, TRBJ1-1)
CSAGTVGNTEAFF

SEQ ID NO: 225907 - protein, 16 aa, Homo sapiens
  CDR3 for alpha chain variable domain of TCR clone 112954 (TRAV26-1, TRAJ40)
CIVRGYPTSGTYQYIF

SEQ ID NO: 225908 - protein, 14 aa, Homo sapiens
  CDR3 for beta chain variable domain of TCR clone 112954 (TRBV5-1, TRBJ1-4)
CASSSGQGGEKLFF

SEQ ID NO: 225909 - protein, 11 aa, Homo sapiens
  CDR3 for alpha chain variable domain of TCR clone 112955 (TRAV12-2, TRAJ49)
CALQGGNQFYF

SEQ ID NO: 225910 - protein, 13 aa, Homo sapiens
  CDR3 for beta chain variable domain of TCR clone 112955 (TRBV4-1, TRBJ1-1)
CASSQLGTGETFF

SEQ ID NO: 225911 - protein, 13 aa, Homo sapiens
  CDR3 for alpha chain variable domain of TCR clone 112956 (TRAV1-2, TRAJ9)
CAALNTGGFKTIF

SEQ ID NO: 225912 - protein, 14 aa, Homo sapiens
  CDR3 for beta chain variable domain of TCR clone 112956 (TRBV9, TRBJ2-7)
CASSVGVGSYEQYF

SEQ ID NO: 225913 - protein, 15 aa, Homo sapiens
  CDR3 for alpha chain variable domain of TCR clone 112957 (TRAV2, TRAJ37)
RAVGDGSSNTGKLIF

SEQ ID NO: 225914 - protein, 13 aa, Homo sapiens
  CDR3 for beta chain variable domain of TCR clone 112957 (TRBV20-1, TRBJ2-7)
CSAQTGLSYEQYF

SEQ ID NO: 225915 - protein, 14 aa, Homo sapiens
  CDR3 for alpha chain variable domain of TCR clone 112958 (TRAV12-2, TRAJ17)
CAALFKAAGNKLTF

SEQ ID NO: 225916 - protein, 14 aa, Homo sapiens
  CDR3 for beta chain variable domain of TCR clone 112958 (TRBV25-1, TRBJ1-1)
CASTHLGGNTEAFF

SEQ ID NO: 225917 - protein, 12 aa, Homo sapiens
  CDR3 for alpha chain variable domain of TCR clone 112959 (TRAV12-1, TRAJ40)
CVVYSGTYTYIF

SEQ ID NO: 225918 - protein, 18 aa, Homo sapiens
  CDR3 for beta chain variable domain of TCR clone 112959 (TRBV11-2, TRBJ2-3)
CASSLGGAARGAPNTQYF

SEQ ID NO: 225919 - protein, 17 aa, Homo sapiens
  CDR3 for alpha chain variable domain of TCR clone 112960 (TRAV13-1, TRAJ52)
CAASSGAGGTSYGKLTF

SEQ ID NO: 225920 - protein, 16 aa, Homo sapiens
  CDR3 for beta chain variable domain of TCR clone 112960 (TRBV20-1, TRBJ1-4)
CSAPGQGLLTNEKLFF

SEQ ID NO: 225921 - protein, 14 aa, Homo sapiens
  CDR3 for alpha chain variable domain of TCR clone 112961 (TRAV4, TRAJ17)
CLVGDMAACNKLTF

SEQ ID NO: 225922 - protein, 14 aa, Homo sapiens
  CDR3 for beta chain variable domain of TCR clone 112961 (TRBV4-1, TRBJ2-7)
CASSPVAGGDEQYF

SEQ ID NO: 225923 - protein, 12 aa, Homo sapiens
  CDR3 for alpha chain variable domain of TCR clone 112962 (TRAV26-2, TRAJ48)
CILRTGNEKLTF

SEQ ID NO: 225924 - protein, 14 aa, Homo sapiens
  CDR3 for beta chain variable domain of TCR clone 112962 (TRBV28, TRBJ2-7)
CASSTLRGRFEQYF

SEQ ID NO: 225925 - protein, 11 aa, Homo sapiens
  CDR3 for alpha chain variable domain of TCR clone 112963 (TRAV2, TRAJ33)
CAVERNYQLIW

SEQ ID NO: 225926 - protein, 12 aa, Homo sapiens
  CDR3 for beta chain variable domain of TCR clone 112963 (TRBV11-2, TRBJ2-2)
CASSLGGGELFF

SEQ ID NO: 225927 - protein, 15 aa, Homo sapiens
  CDR3 for alpha chain variable domain of TCR clone 112964 (TRAV26-1, TRAJ29)
CIVRVEGSGNTPLVF

SEQ ID NO: 225928 - protein, 13 aa, Homo sapiens
  CDR3 for beta chain variable domain of TCR clone 112964 (TRBV5-1, TRBJ1-5)
CASSLAQDQPQHF

SEQ ID NO: 225929 - protein, 12 aa, Homo sapiens
  CDR3 for alpha chain variable domain of TCR clone 112965 (TRAV13-2, TRAJ23)
CAERHRGGKLIF

SEQ ID NO: 225930 - protein, 12 aa, Homo sapiens
  CDR3 for beta chain variable domain of TCR clone 112965 (TRBV7-8, TRBJ2-1)
CASSLGHNEQFF

SEQ ID NO: 225931 - protein, 17 aa, Homo sapiens
  CDR3 for alpha chain variable domain of TCR clone 112966 (TRAV3, TRAJ42)
CAVRDRDYGVSQGNLIF

SEQ ID NO: 225932 - protein, 14 aa, Homo sapiens
  CDR3 for beta chain variable domain of TCR clone 112966 (TRBV7-2, TRBJ2-5)
CASSPRGSSETQYF

SEQ ID NO: 225933 - protein, 14 aa, Homo sapiens
  CDR3 for alpha chain variable domain of TCR clone 112967 (TRAV23/DV6, TRAJ24)
CAASLRDSWGKLQF

SEQ ID NO: 225934 - protein, 16 aa, Homo sapiens
  CDR3 for beta chain variable domain of TCR clone 112967 (TRBV7-9, TRBJ2-6)
CASSLKGPLRANVLTF

SEQ ID NO: 225935 - protein, 11 aa, Homo sapiens
  CDR3 for alpha chain variable domain of TCR clone 112968 (TRAV21, TRAJ7)
CAAYGNNRLAF

SEQ ID NO: 225936 - protein, 14 aa, Homo sapiens
  CDR3 for beta chain variable domain of TCR clone 112968 (TRBV4-1, TRBJ2-7)
CASSRTGVAFEHYF

SEQ ID NO: 225937 - protein, 14 aa, Homo sapiens
  CDR3 for alpha chain variable domain of TCR clone 112969 (TRAV29/DV5, TRAJ36)
CAARRKTGANNLFF

SEQ ID NO: 225938 - protein, 15 aa, Homo sapiens
  CDR3 for beta chain variable domain of TCR clone 112969 (TRBV28, TRBJ1-3)
CASWGGHLSGNTIYF

SEQ ID NO: 225939 - protein, 14 aa, Homo sapiens
  CDR3 for alpha chain variable domain of TCR clone 112970 (TRAV27, TRAJ58)
CAGDGETSGSRLTF

SEQ ID NO: 225940 - protein, 13 aa, Homo sapiens
  CDR3 for beta chain variable domain of TCR clone 112970 (TRBV7-2, TRBJ2-2)
CASSLAVTGELFF

SEQ ID NO: 225941 - protein, 12 aa, Homo sapiens
  CDR3 for alpha chain variable domain of TCR clone 112971 (TRAV35, TRAJ49)
CAGWNTGNQFSF

SEQ ID NO: 225942 - protein, 16 aa, Homo sapiens
  CDR3 for beta chain variable domain of TCR clone 112971 (TRBV5-1, TRBJ2-2)
CASSLWDTTNTGELFF

SEQ ID NO: 225943 - protein, 13 aa, Homo sapiens
  CDR3 for alpha chain variable domain of TCR clone 112972 (TRAV12-2, TRAJ3)
CALQYSSASKIIF

SEQ ID NO: 225944 - protein, 11 aa, Homo sapiens
  CDR3 for beta chain variable domain of TCR clone 112972 (TRBV20-1, TRBJ2-3)
CSGTSSTTQYF

SEQ ID NO: 225945 - protein, 10 aa, Homo sapiens
  CDR3 for alpha chain variable domain of TCR clone 112973 (TRAV12-3, TRAJ49)
CAMNDDQFYC

SEQ ID NO: 225946 - protein, 13 aa, Homo sapiens
  CDR3 for beta chain variable domain of TCR clone 112973 (TRBV12-4, TRBJ1-1)
CASSPGTGFEAFF

SEQ ID NO: 225947 - protein, 14 aa, Homo sapiens
  CDR3 for alpha chain variable domain of TCR clone 112974 (TRAV8-4, TRAJ29)
CAVSSVEGNTPLVF

SEQ ID NO: 225948 - protein, 13 aa, Homo sapiens
  CDR3 for beta chain variable domain of TCR clone 112974 (TRBV12-4, TRBJ2-7)
CASSFQGRYEQYF

SEQ ID NO: 225949 - protein, 12 aa, Homo sapiens
  CDR3 for alpha chain variable domain of TCR clone 112975 (TRAV1-2, TRAJ33)
CAALDSNYQLIW

SEQ ID NO: 225950 - protein, 15 aa, Homo sapiens
  CDR3 for beta chain variable domain of TCR clone 112975 (TRBV12-4, TRBJ1-1)
CASSLAVSRGAEAFF

SEQ ID NO: 225951 - protein, 14 aa, Homo sapiens
  CDR3 for alpha chain variable domain of TCR clone 112976 (TRAV1-1, TRAJ28)
CAAPYGAGSYQLTF

SEQ ID NO: 225952 - protein, 15 aa, Homo sapiens
  CDR3 for beta chain variable domain of TCR clone 112976 (TRBV7-2, TRBJ1-2)
CASSLVSGGDYGYTF

SEQ ID NO: 225953 - protein, 11 aa, Homo sapiens
  CDR3 for alpha chain variable domain of TCR clone 112977 (TRAV2, TRAJ33)
CAVDSNYQLIW

SEQ ID NO: 225954 - protein, 14 aa, Homo sapiens
  CDR3 for beta chain variable domain of TCR clone 112977 (TRBV11-2, TRBJ2-3)
CASSRLDRTDTQYF

SEQ ID NO: 225955 - protein, 23 aa, Homo sapiens
  CDR3 for alpha chain variable domain of TCR clone 112978 (TRAV13-2, TRAJ20)
CSYSTLRLSCLLCADSNDYKLSF

SEQ ID NO: 225956 - protein, 12 aa, Homo sapiens
  CDR3 for beta chain variable domain of TCR clone 112978 (TRBV11-2, TRBJ2-2)
CASSLGGGELFF

SEQ ID NO: 225957 - protein, 12 aa, Homo sapiens
  CDR3 for alpha chain variable domain of TCR clone 112979 (TRAV13-1, TRAJ53)
AASGGSNDKLTF

SEQ ID NO: 225958 - protein, 15 aa, Homo sapiens
  CDR3 for beta chain variable domain of TCR clone 112979 (TRBV5-1, TRBJ2-1)
CASSPPRAPYNEQFF

SEQ ID NO: 225959 - protein, 16 aa, Homo sapiens
  CDR3 for alpha chain variable domain of TCR clone 112980 (TRAV3, TRAJ18)
CAVRDGRGSTLGRLYF

SEQ ID NO: 225960 - protein, 15 aa, Homo sapiens
  CDR3 for beta chain variable domain of TCR clone 112980 (TRBV7-9, TRBJ1-6)
CASSSPGRRNSPLHF

SEQ ID NO: 225961 - protein, 13 aa, Homo sapiens
  CDR3 for alpha chain variable domain of TCR clone 112981 (TRAV3, TRAJ21)
CAVGEPDFNKFYF

SEQ ID NO: 225962 - protein, 13 aa, Homo sapiens
  CDR3 for beta chain variable domain of TCR clone 112981 (TRBV9, TRBJ2-1)
CAGSPSGGNEQFF

SEQ ID NO: 225963 - protein, 11 aa, Homo sapiens
  CDR3 for alpha chain variable domain of TCR clone 112982 (TRAV1-2, TRAJ40)
CAVPGTSKYIF

SEQ ID NO: 225964 - protein, 13 aa, Homo sapiens
  CDR3 for beta chain variable domain of TCR clone 112982 (TRBV7-7, TRBJ2-5)
CASSRSGQETQYF

SEQ ID NO: 225965 - protein, 14 aa, Homo sapiens
  CDR3 for alpha chain variable domain of TCR clone 112983 (TRAV12-2, TRAJ52)
CGRAGGTSYGKLTF

SEQ ID NO: 225966 - protein, 14 aa, Homo sapiens
  CDR3 for beta chain variable domain of TCR clone 112983 (TRBV19, TRBJ1-2)
CASSVLGYNYGYTF

SEQ ID NO: 225967 - protein, 10 aa, Homo sapiens
  CDR3 for alpha chain variable domain of TCR clone 112984 (TRAV1-2, TRAJ31)
CVSEDARLMF

SEQ ID NO: 225968 - protein, 13 aa, Homo sapiens
  CDR3 for beta chain variable domain of TCR clone 112984 (TRBV4-2, TRBJ1-1)
CASSQAGNTEAVF

SEQ ID NO: 225969 - protein, 15 aa, Homo sapiens
  CDR3 for alpha chain variable domain of TCR clone 112985 (TRAV8-3, TRAJ27)
CAVGPSKTNAGKSTF

SEQ ID NO: 225970 - protein, 15 aa, Homo sapiens
  CDR3 for beta chain variable domain of TCR clone 112985 (TRBV7-2, TRBJ2-1)
CASSSGLARGNEQFF

SEQ ID NO: 225971 - protein, 12 aa, Homo sapiens
  CDR3 for alpha chain variable domain of TCR clone 112986 (TRAV12-3, TRAJ40)
CAMSSGTYKYIF

SEQ ID NO: 225972 - protein, 12 aa, Homo sapiens
  CDR3 for beta chain variable domain of TCR clone 112986 (TRBV12-4, TRBJ2-7)
CASSLGGYEQYF

SEQ ID NO: 225973 - protein, 15 aa, Homo sapiens
  CDR3 for alpha chain variable domain of TCR clone 112987 (TRAV20, TRAJ6)
CAVRLQSGGSYIPTS

SEQ ID NO: 225974 - protein, 14 aa, Homo sapiens
  CDR3 for beta chain variable domain of TCR clone 112987 (TRBV12-4, TRBJ2-7)
CASSASGGWYEQYF

SEQ ID NO: 225975 - protein, 12 aa, Homo sapiens
  CDR3 for alpha chain variable domain of TCR clone 112988 (TRAV26-1, TRAJ27)
CIVSTPWINTNA

SEQ ID NO: 225976 - protein, 16 aa, Homo sapiens
  CDR3 for beta chain variable domain of TCR clone 112988 (TRBV7-9, TRBJ2-1)
CASSLDPGLAIDEQFF

SEQ ID NO: 225977 - protein, 13 aa, Homo sapiens
  CDR3 for alpha chain variable domain of TCR clone 112989 (TRAV20, TRAJ37)
CAGCSSNTGKLIF

SEQ ID NO: 225978 - protein, 13 aa, Homo sapiens
  CDR3 for beta chain variable domain of TCR clone 112989 (TRBV9, TRBJ2-7)
CASSVAEYYEQYF

SEQ ID NO: 225979 - protein, 16 aa, Homo sapiens
  CDR3 for alpha chain variable domain of TCR clone 112990 (TRAV23/DV6, TRAJ10)
CAASIGTHGRRKQTQL

SEQ ID NO: 225980 - protein, 13 aa, Homo sapiens
  CDR3 for beta chain variable domain of TCR clone 112990 (TRBV11-1, TRBJ1-2)
CASVGSWGYGYTF

SEQ ID NO: 225981 - protein, 11 aa, Homo sapiens
  CDR3 for alpha chain variable domain of TCR clone 112991 (TRAV8-3, TRAJ49)
CAVNTGNQFYF

SEQ ID NO: 225982 - protein, 15 aa, Homo sapiens
  CDR3 for beta chain variable domain of TCR clone 112991 (TRBV11-3, TRBJ2-3)
CASLKDGREGDTQYF

SEQ ID NO: 225983 - protein, 13 aa, Homo sapiens
  CDR3 for alpha chain variable domain of TCR clone 112992 (TRAV2, TRAJ40)
CAVVTSGTYKYIF

SEQ ID NO: 225984 - protein, 14 aa, Homo sapiens
  CDR3 for beta chain variable domain of TCR clone 112992 (TRBV19, TRBJ2-1)
CASLTFVLGGEQFF

SEQ ID NO: 225985 - protein, 12 aa, Homo sapiens
  CDR3 for alpha chain variable domain of TCR clone 112993 (TRAV3, TRAJ20)
CAVRDPDYKLSF

SEQ ID NO: 225986 - protein, 13 aa, Homo sapiens
  CDR3 for beta chain variable domain of TCR clone 112993 (TRBV4-1, TRBJ2-1)
CASSQAGGDEQFF

SEQ ID NO: 225987 - protein, 14 aa, Homo sapiens
  CDR3 for alpha chain variable domain of TCR clone 112994 (TRAV21, TRAJ35)
CAVMPIGYGNVLHC

SEQ ID NO: 225988 - protein, 12 aa, Homo sapiens
  CDR3 for beta chain variable domain of TCR clone 112994 (TRBV7-9, TRBJ2-7)
CASSIKREEQYF

SEQ ID NO: 225989 - protein, 15 aa, Homo sapiens
  CDR3 for alpha chain variable domain of TCR clone 112995 (TRAV25, TRAJ53)
CAATGGGGSNYKLTF

SEQ ID NO: 225990 - protein, 15 aa, Homo sapiens
  CDR3 for beta chain variable domain of TCR clone 112995 (TRBV20-1, TRBJ2-7)
CSARVPAAYFYEQYF

SEQ ID NO: 225991 - protein, 15 aa, Homo sapiens
  CDR3 for alpha chain variable domain of TCR clone 112996 (TRAV12-1, TRAJ44)
CVADLPTGTASKLTF

SEQ ID NO: 225992 - protein, 14 aa, Homo sapiens
  CDR3 for beta chain variable domain of TCR clone 112996 (TRBV19, TRBJ2-1)
CASPTFVLSGEQFF

SEQ ID NO: 225993 - protein, 13 aa, Homo sapiens
  CDR3 for alpha chain variable domain of TCR clone 112997 (TRAV12-3, TRAJ13)
CAMSAGGYQKVTF

SEQ ID NO: 225994 - protein, 13 aa, Homo sapiens
  CDR3 for beta chain variable domain of TCR clone 112997 (TRBV20-1, TRBJ1-1)
CSAPPGGHTEAFF

SEQ ID NO: 225995 - protein, 13 aa, Homo sapiens
  CDR3 for alpha chain variable domain of TCR clone 112998 (TRAV26-1, TRAJ54)
CIVRVMGAQKLVF

SEQ ID NO: 225996 - protein, 15 aa, Homo sapiens
  CDR3 for beta chain variable domain of TCR clone 112998 (TRBV20-1, TRBJ2-1)
CSAQPGGGPYNEQFF

SEQ ID NO: 225997 - protein, 12 aa, Homo sapiens
  CDR3 for alpha chain variable domain of TCR clone 112999 (TRAV2, TRAJ33)
CAFMDSNYQLIW

SEQ ID NO: 225998 - protein, 16 aa, Homo sapiens
  CDR3 for beta chain variable domain of TCR clone 112999 (TRBV2, TRBJ2-7)
CARSEPWTGPSYEQYF

SEQ ID NO: 225999 - protein, 14 aa, Homo sapiens
  CDR3 for alpha chain variable domain of TCR clone 113000 (TRAV12-2, TRAJ13)
CAVKKTGGYQKVTF

SEQ ID NO: 226000 - protein, 13 aa, Homo sapiens
  CDR3 for beta chain variable domain of TCR clone 113000 (TRBV27, TRBJ2-1)
CASSNGEGPPMSS

SEQ ID NO: 226001 - protein, 12 aa, Homo sapiens
  CDR3 for alpha chain variable domain of TCR clone 113001 (TRAV1-2, TRAJ29)
CAVPSGNTPLVF

SEQ ID NO: 226002 - protein, 17 aa, Homo sapiens
  CDR3 for beta chain variable domain of TCR clone 113001 (TRBV20-1, TRBJ2-2)
CSASGSGQGGLTGELFF

SEQ ID NO: 226003 - protein, 14 aa, Homo sapiens
  CDR3 for alpha chain variable domain of TCR clone 113002 (TRAV38-1, TRAJ40)
CALRPTSGTYKYIF

SEQ ID NO: 226004 - protein, 20 aa, Homo sapiens
  CDR3 for beta chain variable domain of TCR clone 113002 (TRBV7-8, TRBJ2-2)
CASSHLFPGPTIHITGELFF

SEQ ID NO: 226005 - protein, 10 aa, Homo sapiens
  CDR3 for alpha chain variable domain of TCR clone 113003 (TRAV30, TRAJ48)
CGIGNEKLTF

SEQ ID NO: 226006 - protein, 14 aa, Homo sapiens
  CDR3 for beta chain variable domain of TCR clone 113003 (TRBV18, TRBJ2-5)
CASSPGVSQETQYF

SEQ ID NO: 226007 - protein, 14 aa, Homo sapiens
  CDR3 for alpha chain variable domain of TCR clone 113004 (TRAV26-1, TRAJ45)
RIEVTGGGADGLTF

SEQ ID NO: 226008 - protein, 19 aa, Homo sapiens
  CDR3 for beta chain variable domain of TCR clone 113004 (TRBV19, TRBJ2-2)
CASTRPGLAGGRVTGELFF

SEQ ID NO: 226009 - protein, 16 aa, Homo sapiens
  CDR3 for alpha chain variable domain of TCR clone 113005 (TRAV8-3, TRAJ13)
CAVGAYPSGGYQKVTF

SEQ ID NO: 226010 - protein, 13 aa, Homo sapiens
  CDR3 for beta chain variable domain of TCR clone 113005 (TRBV5-5, TRBJ1-2)
CASSFWRGEDYTF

SEQ ID NO: 226011 - protein, 14 aa, Homo sapiens
  CDR3 for alpha chain variable domain of TCR clone 113006 (TRAV17, TRAJ56)
CATVPTGANSKLTF

SEQ ID NO: 226012 - protein, 13 aa, Homo sapiens
  CDR3 for beta chain variable domain of TCR clone 113006 (TRBV12-4, TRBJ2-2)
CASSITGSGELFF

SEQ ID NO: 226013 - protein, 18 aa, Homo sapiens
  CDR3 for alpha chain variable domain of TCR clone 113007 (TRAV21, TRAJ53)
CAVKGGEKSGGSNYKLTF

SEQ ID NO: 226014 - protein, 13 aa, Homo sapiens
  CDR3 for beta chain variable domain of TCR clone 113007 (TRBV9, TRBJ2-1)
CASSPSGGSEQFF

SEQ ID NO: 226015 - protein, 14 aa, Homo sapiens
  CDR3 for alpha chain variable domain of TCR clone 113008 (TRAV1-2, TRAJ8)
CAVREDTGFEKLVF

SEQ ID NO: 226016 - protein, 16 aa, Homo sapiens
  CDR3 for beta chain variable domain of TCR clone 113008 (TRBV7-3, TRBJ2-2)
CASSLKRGTLSGELFF

SEQ ID NO: 226017 - protein, 18 aa, Homo sapiens
  CDR3 for alpha chain variable domain of TCR clone 113009 (TRAV21, TRAJ52)
CAVRPSPAGGTSYGKLTF

SEQ ID NO: 226018 - protein, 13 aa, Homo sapiens
  CDR3 for beta chain variable domain of TCR clone 113009 (TRBV7-3, TRBJ1-1)
CASSRDWGAEAFF

SEQ ID NO: 226019 - protein, 14 aa, Homo sapiens
  CDR3 for alpha chain variable domain of TCR clone 113010 (TRAV12-2, TRAJ17)
CAVLFKAAGNKLTF

SEQ ID NO: 226020 - protein, 14 aa, Homo sapiens
  CDR3 for beta chain variable domain of TCR clone 113010 (TRBV6-1, TRBJ2-6)
CASQQGAGANVLTF

SEQ ID NO: 226021 - protein, 13 aa, Homo sapiens
  CDR3 for alpha chain variable domain of TCR clone 113011 (TRAV12-3, TRAJ13)
CAMGTGGYQKVTF

SEQ ID NO: 226022 - protein, 14 aa, Homo sapiens
  CDR3 for beta chain variable domain of TCR clone 113011 (TRBV12-5, TRBJ2-5)
CASGSRTHQETQYF

SEQ ID NO: 226023 - protein, 13 aa, Homo sapiens
  CDR3 for alpha chain variable domain of TCR clone 113012 (TRAV8-1, TRAJ15)
CAVKNKAGTALIF

SEQ ID NO: 226024 - protein, 15 aa, Homo sapiens
  CDR3 for beta chain variable domain of TCR clone 113012 (TRBV7-3, TRBJ2-7)
CASSLTPTGYDEQYF

SEQ ID NO: 226025 - protein, 12 aa, Homo sapiens
  CDR3 for alpha chain variable domain of TCR clone 113013 (TRAV1-1, TRAJ8)
CAGGTGFQKLVF

SEQ ID NO: 226026 - protein, 13 aa, Homo sapiens
  CDR3 for beta chain variable domain of TCR clone 113013 (TRBV24-1, TRBJ2-2)
CATSDWSTGELFF

SEQ ID NO: 226027 - protein, 13 aa, Homo sapiens
  CDR3 for alpha chain variable domain of TCR clone 113014 (TRAV8-1, TRAJ30)
CAVIMNRDDKIIF

SEQ ID NO: 226028 - protein, 14 aa, Homo sapiens
  CDR3 for beta chain variable domain of TCR clone 113014 (TRBV12-4, TRBJ1-6)
CASRPDGYNSPLHF

SEQ ID NO: 226029 - protein, 18 aa, Homo sapiens
  CDR3 for alpha chain variable domain of TCR clone 113015 (TRAV29/DV5, TRAJ26)
CSVLLCSKRKPEGQNFVL

SEQ ID NO: 226030 - protein, 17 aa, Homo sapiens
  CDR3 for beta chain variable domain of TCR clone 113015 (TRBV20-1, TRBJ2-2)
CSASGSGQGGLTGELFF

SEQ ID NO: 226031 - protein, 18 aa, Homo sapiens
  CDR3 for alpha chain variable domain of TCR clone 113016 (TRAV21, TRAJ52)
CAVRPSPAGGTSYGKLTF

SEQ ID NO: 226032 - protein, 14 aa, Homo sapiens
  CDR3 for beta chain variable domain of TCR clone 113016 (TRBV4-1, TRBJ2-2)
CAGSQAVNTGELFF

SEQ ID NO: 226033 - protein, 18 aa, Homo sapiens
  CDR3 for alpha chain variable domain of TCR clone 113017 (TRAV8-6, TRAJ39)
CAVTPQGLIDNAGNVLTF

SEQ ID NO: 226034 - protein, 15 aa, Homo sapiens
  CDR3 for beta chain variable domain of TCR clone 113017 (TRBV9, TRBJ2-1)
CASSVGSGFYNEQFF

SEQ ID NO: 226035 - protein, 13 aa, Homo sapiens
  CDR3 for alpha chain variable domain of TCR clone 113018 (TRAV8-6, TRAJ16)
CAVSSPDGRKLLF

SEQ ID NO: 226036 - protein, 16 aa, Homo sapiens
  CDR3 for beta chain variable domain of TCR clone 113018 (TRBV5-7, TRBJ2-3)
CASSSLGGAITDTQYF

SEQ ID NO: 226037 - protein, 12 aa, Homo sapiens
  CDR3 for alpha chain variable domain of TCR clone 113019 (TRAV26-1, TRAJ43)
CIVRGNNSDMRF

SEQ ID NO: 226038 - protein, 13 aa, Homo sapiens
  CDR3 for beta chain variable domain of TCR clone 113019 (TRBV20-1, TRBJ2-3)
CSAIYPGADTQYF

SEQ ID NO: 226039 - protein, 13 aa, Homo sapiens
  CDR3 for alpha chain variable domain of TCR clone 113020 (TRAV29/DV5, TRAJ31)
CAARRNNNARLMF

SEQ ID NO: 226040 - protein, 16 aa, Homo sapiens
  CDR3 for beta chain variable domain of TCR clone 113020 (TRBV20-1, TRBJ1-4)
CSAPGQGLLTNEKLFF

SEQ ID NO: 226041 - protein, 13 aa, Homo sapiens
  CDR3 for alpha chain variable domain of TCR clone 113021 (TRAV1-2, TRAJ24)
CAVRADSWGKFQF

SEQ ID NO: 226042 - protein, 13 aa, Homo sapiens
  CDR3 for beta chain variable domain of TCR clone 113021 (TRBV10-3, TRBJ2-7)
CASKLAVNYEQYF

SEQ ID NO: 226043 - protein, 12 aa, Homo sapiens
  CDR3 for alpha chain variable domain of TCR clone 113022 (TRAV21, TRAJ33)
CAKMDSNYQLIW

SEQ ID NO: 226044 - protein, 15 aa, Homo sapiens
  CDR3 for beta chain variable domain of TCR clone 113022 (TRBV20-1, TRBJ2-7)
CSARKGLAESYEQYF

SEQ ID NO: 226045 - protein, 15 aa, Homo sapiens
  CDR3 for alpha chain variable domain of TCR clone 113023 (TRAV3, TRAJ22)
CAVRDRGGSARQLTF

SEQ ID NO: 226046 - protein, 11 aa, Homo sapiens
  CDR3 for beta chain variable domain of TCR clone 113023 (TRBV10-3, TRBJ2-1)
CAISDRGLQFF

SEQ ID NO: 226047 - protein, 14 aa, Homo sapiens
  CDR3 for alpha chain variable domain of TCR clone 113024 (TRAV1-2, TRAJ16)
CAVNRFSDGQKLLF

SEQ ID NO: 226048 - protein, 17 aa, Homo sapiens
  CDR3 for beta chain variable domain of TCR clone 113024 (TRBV25-1, TRBJ2-7)
CASSDARVVFSSYEQYF

SEQ ID NO: 226049 - protein, 14 aa, Homo sapiens
  CDR3 for alpha chain variable domain of TCR clone 113025 (TRAV8-3, TRAJ10)
CAVGNAGGGNKLTF

SEQ ID NO: 226050 - protein, 13 aa, Homo sapiens
  CDR3 for beta chain variable domain of TCR clone 113025 (TRBV7-8, TRBJ1-1)
CASSSDANTEAFF

SEQ ID NO: 226051 - protein, 12 aa, Homo sapiens
  CDR3 for alpha chain variable domain of TCR clone 113026 (TRAV13-2, TRAJ23)
CAERHRGGKLIF

SEQ ID NO: 226052 - protein, 13 aa, Homo sapiens
  CDR3 for beta chain variable domain of TCR clone 113026 (TRBV7-9, TRBJ1-2)
CASSLKQNYGYAF

SEQ ID NO: 226053 - protein, 14 aa, Homo sapiens
  CDR3 for alpha chain variable domain of TCR clone 113027 (TRAV17, TRAJ45)
FATASGGGADGLTF

SEQ ID NO: 226054 - protein, 15 aa, Homo sapiens
  CDR3 for beta chain variable domain of TCR clone 113027 (TRBV11-2, TRBJ2-1)
CASSRNRGLMYEQFF

SEQ ID NO: 226055 - protein, 13 aa, Homo sapiens
  CDR3 for alpha chain variable domain of TCR clone 113028 (TRAV1-2, TRAJ9)
CAALNTGGFKTIF

SEQ ID NO: 226056 - protein, 13 aa, Homo sapiens
  CDR3 for beta chain variable domain of TCR clone 113028 (TRBV13, TRBJ2-3)
CQQLWVPTDTQYF

SEQ ID NO: 226057 - protein, 17 aa, Homo sapiens
  CDR3 for alpha chain variable domain of TCR clone 113029 (TRAV13-1, TRAJ28)
CAASPPYSGAGSYQLTF

SEQ ID NO: 226058 - protein, 16 aa, Homo sapiens
  CDR3 for beta chain variable domain of TCR clone 113029 (TRBV7-2, TRBJ2-7)
CASSLEAGGPWYEQYF

SEQ ID NO: 226059 - protein, 13 aa, Homo sapiens
  CDR3 for alpha chain variable domain of TCR clone 113030 (TRAV35, TRAJ36)
CAGPRIGANNLFF

SEQ ID NO: 226060 - protein, 15 aa, Homo sapiens
  CDR3 for beta chain variable domain of TCR clone 113030 (TRBV28, TRBJ2-5)
CASSPPWSYQETQFF

SEQ ID NO: 226061 - protein, 15 aa, Homo sapiens
  CDR3 for alpha chain variable domain of TCR clone 113031 (TRAV1-1, TRAJ23)
CAVSEGQGRKAYLRT

SEQ ID NO: 226062 - protein, 14 aa, Homo sapiens
  CDR3 for beta chain variable domain of TCR clone 113031 (TRBV10-2, TRBJ2-1)
CASSEGTSEDEQFF

SEQ ID NO: 226063 - protein, 11 aa, Homo sapiens
  CDR3 for alpha chain variable domain of TCR clone 113032 (TRAV8-3, TRAJ49)
CAVNTGSQFYF

SEQ ID NO: 226064 - protein, 12 aa, Homo sapiens
  CDR3 for beta chain variable domain of TCR clone 113032 (TRBV11-2, TRBJ2-7)
CASSPPADEQYF

SEQ ID NO: 226065 - protein, 13 aa, Homo sapiens
  CDR3 for alpha chain variable domain of TCR clone 113033 (TRAV13-1, TRAJ21)
CAASIYNFTKFYF

SEQ ID NO: 226066 - protein, 13 aa, Homo sapiens
  CDR3 for beta chain variable domain of TCR clone 113033 (TRBV27, TRBJ1-4)
CASSLMGDEKLFF

SEQ ID NO: 226067 - protein, 14 aa, Homo sapiens
  CDR3 for alpha chain variable domain of TCR clone 113034 (TRAV38-1, TRAJ45)
CASHSGGGADGLTF

SEQ ID NO: 226068 - protein, 16 aa, Homo sapiens
  CDR3 for beta chain variable domain of TCR clone 113034 (TRBV7-9, TRBJ2-7)
CASSFGLAGPSYEQYF

SEQ ID NO: 226069 - protein, 13 aa, Homo sapiens
  CDR3 for alpha chain variable domain of TCR clone 113035 (TRAV39, TRAJ17)
CAAQFTAGNKLTF

SEQ ID NO: 226070 - protein, 14 aa, Homo sapiens
  CDR3 for beta chain variable domain of TCR clone 113035 (TRBV4-3, TRBJ1-1)
CASSQGWTPARAFF

SEQ ID NO: 226071 - protein, 14 aa, Homo sapiens
  CDR3 for alpha chain variable domain of TCR clone 113036 (TRAV17, TRAJ30)
CATVTMNRDDKIIF

SEQ ID NO: 226072 - protein, 15 aa, Homo sapiens
  CDR3 for beta chain variable domain of TCR clone 113036 (TRBV12-5, TRBJ2-2)
CASGFQGSGTGELFF

SEQ ID NO: 226073 - protein, 14 aa, Homo sapiens
  CDR3 for alpha chain variable domain of TCR clone 113037 (TRAV29/DV5, TRAJ20)
CAATIRSNDYKLSF

SEQ ID NO: 226074 - protein, 15 aa, Homo sapiens
  CDR3 for beta chain variable domain of TCR clone 113037 (TRBV7-9, TRBJ1-5)
CASSQGHQPNQPQHF

SEQ ID NO: 226075 - protein, 16 aa, Homo sapiens
  CDR3 for alpha chain variable domain of TCR clone 113038 (TRAV30, TRAJ24)
CGTEIVDADSWGKFQF

SEQ ID NO: 226076 - protein, 14 aa, Homo sapiens
  CDR3 for beta chain variable domain of TCR clone 113038 (TRBV7-2, TRBJ1-2)
CASSQTGSTCGYTF

SEQ ID NO: 226077 - protein, 13 aa, Homo sapiens
  CDR3 for alpha chain variable domain of TCR clone 113039 (TRAV12-3, TRAJ33)
CAMSLNSSYQLIW

SEQ ID NO: 226078 - protein, 13 aa, Homo sapiens
  CDR3 for beta chain variable domain of TCR clone 113039 (TRBV7-2, TRBJ2-2)
CASSLAVTGELFF

SEQ ID NO: 226079 - protein, 14 aa, Homo sapiens
  CDR3 for alpha chain variable domain of TCR clone 113040 (TRAV8-6, TRAJ49)
CAVSDPGTGNQSYF

SEQ ID NO: 226080 - protein, 16 aa, Homo sapiens
  CDR3 for beta chain variable domain of TCR clone 113040 (TRBV24-1, TRBJ2-1)
CATSGVAGANYNEQFF

SEQ ID NO: 226081 - protein, 13 aa, Homo sapiens
  CDR3 for alpha chain variable domain of TCR clone 113041 (TRAV13-1, TRAJ10)
CAALEGGGNKLTF

SEQ ID NO: 226082 - protein, 11 aa, Homo sapiens
  CDR3 for beta chain variable domain of TCR clone 113041 (TRBV6-3, TRBJ2-7)
CASSSSYEQYF

SEQ ID NO: 226083 - protein, 13 aa, Homo sapiens
  CDR3 for alpha chain variable domain of TCR clone 113042 (TRAV12-2, TRAJ4)
CAVRSGGYNKLIF

SEQ ID NO: 226084 - protein, 15 aa, Homo sapiens
  CDR3 for beta chain variable domain of TCR clone 113042 (TRBV10-3, TRBJ2-1)
CAISDVQDMAYEQFF

SEQ ID NO: 226085 - protein, 17 aa, Homo sapiens
  CDR3 for alpha chain variable domain of TCR clone 113043 (TRAV3, TRAJ6)
CAVRDGPRAGGSYIPTF

SEQ ID NO: 226086 - protein, 15 aa, Homo sapiens
  CDR3 for beta chain variable domain of TCR clone 113043 (TRBV5-1, TRBJ2-5)
CASSFKGGDQETQYF

SEQ ID NO: 226087 - protein, 13 aa, Homo sapiens
  CDR3 for alpha chain variable domain of TCR clone 113044 (TRAV21, TRAJ57)
CAVTQGGSEKLVF

SEQ ID NO: 226088 - protein, 19 aa, Homo sapiens
  CDR3 for beta chain variable domain of TCR clone 113044 (TRBV19, TRBJ2-5)
CASSIGQVTDFFLGETQYF

SEQ ID NO: 226089 - protein, 14 aa, Homo sapiens
  CDR3 for alpha chain variable domain of TCR clone 113045 (TRAV17, TRAJ6)
CATNPAGGSYIPTF

SEQ ID NO: 226090 - protein, 13 aa, Homo sapiens
  CDR3 for beta chain variable domain of TCR clone 113045 (TRBV7-9, TRBJ2-3)
CASSPGSTDTQYF

SEQ ID NO: 226091 - protein, 13 aa, Homo sapiens
  CDR3 for alpha chain variable domain of TCR clone 113046 (TRAV12-2, TRAJ10)
CAVPTGGGNKLTF

SEQ ID NO: 226092 - protein, 14 aa, Homo sapiens
  CDR3 for beta chain variable domain of TCR clone 113046 (TRBV25-1, TRBJ1-1)
CANTHLGGNTEAFF

SEQ ID NO: 226093 - protein, 13 aa, Homo sapiens
  CDR3 for alpha chain variable domain of TCR clone 113047 (TRAV20, TRAJ40)
CAVPFSGTYKYIF

SEQ ID NO: 226094 - protein, 13 aa, Homo sapiens
  CDR3 for beta chain variable domain of TCR clone 113047 (TRBV15, TRBJ2-5)
CATSQIGEETQYV

SEQ ID NO: 226095 - protein, 14 aa, Homo sapiens
  CDR3 for alpha chain variable domain of TCR clone 113048 (TRAV12-2, TRAJ9)
CAVNRYTGGFKTIF

SEQ ID NO: 226096 - protein, 16 aa, Homo sapiens
  CDR3 for beta chain variable domain of TCR clone 113048 (TRBV18, TRBJ1-4)
CASSPLVGDRAEKLFF

SEQ ID NO: 226097 - protein, 13 aa, Homo sapiens
  CDR3 for alpha chain variable domain of TCR clone 113049 (TRAV27, TRAJ6)
CEGGTRGSYIPTF

SEQ ID NO: 226098 - protein, 13 aa, Homo sapiens
  CDR3 for beta chain variable domain of TCR clone 113049 (TRBV4-1, TRBJ2-2)
CASSQENTGELFF

SEQ ID NO: 226099 - protein, 13 aa, Homo sapiens
  CDR3 for alpha chain variable domain of TCR clone 113050 (TRAV2, TRAJ29)
CAAQNSGNTPLVF

SEQ ID NO: 226100 - protein, 16 aa, Homo sapiens
  CDR3 for beta chain variable domain of TCR clone 113050 (TRBV12-4, TRBJ2-5)
CASSFFVRGRQETQYF

SEQ ID NO: 226101 - protein, 14 aa, Homo sapiens
  CDR3 for alpha chain variable domain of TCR clone 113051 (TRAV26-1, TRAJ38)
CNADNAGNNRKLIW

SEQ ID NO: 226102 - protein, 13 aa, Homo sapiens
  CDR3 for beta chain variable domain of TCR clone 113051 (TRBV20-1, TRBJ1-1)
CSARGGGNTEAFF

SEQ ID NO: 226103 - protein, 15 aa, Homo sapiens
  CDR3 for alpha chain variable domain of TCR clone 113052 (TRAV8-3, TRAJ27)
CAVGPSKTNAGKSSF

SEQ ID NO: 226104 - protein, 15 aa, Homo sapiens
  CDR3 for beta chain variable domain of TCR clone 113052 (TRBV7-2, TRBJ2-1)
CASSSGLAGGNEQFF

SEQ ID NO: 226105 - protein, 13 aa, Homo sapiens
  CDR3 for alpha chain variable domain of TCR clone 113053 (TRAV12-3, TRAJ33)
CAMSVNSNYQLIW

SEQ ID NO: 226106 - protein, 13 aa, Homo sapiens
  CDR3 for beta chain variable domain of TCR clone 113053 (TRBV4-1, TRBJ1-1)
CASSQLGTGEAFF

SEQ ID NO: 226107 - protein, 10 aa, Homo sapiens
  CDR3 for alpha chain variable domain of TCR clone 113054 (TRAV13-1, TRAJ7)
LIGGNNRLAF

SEQ ID NO: 226108 - protein, 16 aa, Homo sapiens
  CDR3 for beta chain variable domain of TCR clone 113054 (TRBV4-1, TRBJ1-2)
CASSQDAGQVLYGDTF

SEQ ID NO: 226109 - protein, 15 aa, Homo sapiens
  CDR3 for alpha chain variable domain of TCR clone 113055 (TRAV16, TRAJ58)
CALKRGNQWLWVDLW

SEQ ID NO: 226110 - protein, 17 aa, Homo sapiens
  CDR3 for beta chain variable domain of TCR clone 113055 (TRBV18, TRBJ2-1)
CASSKGLSGGADNEQFF

SEQ ID NO: 226111 - protein, 11 aa, Homo sapiens
  CDR3 for alpha chain variable domain of TCR clone 113056 (TRAV1-1, TRAJ23)
CAVRKGGKLIF

SEQ ID NO: 226112 - protein, 20 aa, Homo sapiens
  CDR3 for beta chain variable domain of TCR clone 113056 (TRBV7-8, TRBJ2-2)
CASSHLFPGPAIHITGELFF

SEQ ID NO: 226113 - protein, 14 aa, Homo sapiens
  CDR3 for alpha chain variable domain of TCR clone 113057 (TRAV17, TRAJ57)
CATDPQGGSEKLVL

SEQ ID NO: 226114 - protein, 17 aa, Homo sapiens
  CDR3 for beta chain variable domain of TCR clone 113057 (TRBV5-1, TRBJ2-2)
CASSLAGLSGGTGELFF

SEQ ID NO: 226115 - protein, 15 aa, Homo sapiens
  CDR3 for alpha chain variable domain of TCR clone 113058 (TRAV8-3, TRAJ6)
CAVGEDRGGSYIPTF

SEQ ID NO: 226116 - protein, 14 aa, Homo sapiens
  CDR3 for beta chain variable domain of TCR clone 113058 (TRBV27, TRBJ2-2)
CASLRSPPGGGLFF

SEQ ID NO: 226117 - protein, 14 aa, Homo sapiens
  CDR3 for alpha chain variable domain of TCR clone 113059 (TRAV1-2, TRAJ8)
CAVREDTGFQNLVF

SEQ ID NO: 226118 - protein, 15 aa, Homo sapiens
  CDR3 for beta chain variable domain of TCR clone 113059 (TRBV7-3, TRBJ2-2)
CASSETGQGTGELFF

SEQ ID NO: 226119 - protein, 14 aa, Homo sapiens
  CDR3 for alpha chain variable domain of TCR clone 113060 (TRAV4, TRAJ26)
CLVGDQGYGQNFVF

SEQ ID NO: 226120 - protein, 16 aa, Homo sapiens
  CDR3 for beta chain variable domain of TCR clone 113060 (TRBV2, TRBJ2-1)
CASSVGGSLSYNDQFF

SEQ ID NO: 226121 - protein, 16 aa, Homo sapiens
  CDR3 for alpha chain variable domain of TCR clone 113061 (TRAV12-1, TRAJ42)
CVVTPYYGGSQGNLIF

SEQ ID NO: 226122 - protein, 15 aa, Homo sapiens
  CDR3 for beta chain variable domain of TCR clone 113061 (TRBV4-3, TRBJ2-7)
CDSSQGGRGIYEQYF

SEQ ID NO: 226123 - protein, 14 aa, Homo sapiens
  CDR3 for alpha chain variable domain of TCR clone 113062 (TRAV4, TRAJ3)
CLVPPGSSASKIIF

SEQ ID NO: 226124 - protein, 12 aa, Homo sapiens
  CDR3 for beta chain variable domain of TCR clone 113062 (TRBV7-9, TRBJ2-7)
CASSLEGYEQYF

SEQ ID NO: 226125 - protein, 16 aa, Homo sapiens
  CDR3 for alpha chain variable domain of TCR clone 113063 (TRAV4, TRAJ8)
CLVGDSGNTGFQKLVF

SEQ ID NO: 226126 - protein, 15 aa, Homo sapiens
  CDR3 for beta chain variable domain of TCR clone 113063 (TRBV9, TRBJ1-6)
CASSVAGTGDSPLHF

SEQ ID NO: 226127 - protein, 12 aa, Homo sapiens
  CDR3 for alpha chain variable domain of TCR clone 113064 (TRAV29/DV5, TRAJ49)
CTATDTGNQFYF

SEQ ID NO: 226128 - protein, 12 aa, Homo sapiens
  CDR3 for beta chain variable domain of TCR clone 113064 (TRBV12-4, TRBJ2-7)
CASSLGGYEQYF

SEQ ID NO: 226129 - protein, 14 aa, Homo sapiens
  CDR3 for alpha chain variable domain of TCR clone 113065 (TRAV26-1, TRAJ38)
CIADNAGNNRKLLW

SEQ ID NO: 226130 - protein, 12 aa, Homo sapiens
  CDR3 for beta chain variable domain of TCR clone 113065 (TRBV29-1, TRBJ2-3)
CSVTGGADTQYF

SEQ ID NO: 226131 - protein, 12 aa, Homo sapiens
  CDR3 for alpha chain variable domain of TCR clone 113066 (TRAV12-3, TRAJ17)
CAMTLTGNKLTF

SEQ ID NO: 226132 - protein, 15 aa, Homo sapiens
  CDR3 for beta chain variable domain of TCR clone 113066 (TRBV20-1, TRBJ2-2)
CSAIPGHSNTGELFF

SEQ ID NO: 226133 - protein, 13 aa, Homo sapiens
  CDR3 for alpha chain variable domain of TCR clone 113067 (TRAV12-2, TRAJ34)
CAVRGHNTDKLIF

SEQ ID NO: 226134 - protein, 15 aa, Homo sapiens
  CDR3 for beta chain variable domain of TCR clone 113067 (TRBV28, TRBJ2-1)
CASRTGAGVIARQFF

SEQ ID NO: 226135 - protein, 18 aa, Homo sapiens
  CDR3 for alpha chain variable domain of TCR clone 113068 (TRAV26-2, TRAJ45)
CILRLWAYSGGGADGLTF

SEQ ID NO: 226136 - protein, 17 aa, Homo sapiens
  CDR3 for beta chain variable domain of TCR clone 113068 (TRBV28, TRBJ2-3)
CASSPTPAGGRVDTQYF

SEQ ID NO: 226137 - protein, 15 aa, Homo sapiens
  CDR3 for alpha chain variable domain of TCR clone 113069 (TRAV21, TRAJ53)
CATLNSGGSNYKLTF

SEQ ID NO: 226138 - protein, 12 aa, Homo sapiens
  CDR3 for beta chain variable domain of TCR clone 113069 (TRBV19, TRBJ1-5)
CASSIAQQPQHF

SEQ ID NO: 226139 - protein, 14 aa, Homo sapiens
  CDR3 for alpha chain variable domain of TCR clone 113070 (TRAV1-2, TRAJ16)
CAVNRFSYGQKLLF

SEQ ID NO: 226140 - protein, 16 aa, Homo sapiens
  CDR3 for beta chain variable domain of TCR clone 113070 (TRBV12-5, TRBJ2-5)
CASGPRTSGNQETQYF

SEQ ID NO: 226141 - protein, 13 aa, Homo sapiens
  CDR3 for alpha chain variable domain of TCR clone 113071 (TRAV8-6, TRAJ40)
CAVSVTVTYKYIF

SEQ ID NO: 226142 - protein, 15 aa, Homo sapiens
  CDR3 for beta chain variable domain of TCR clone 113071 (TRBV4-1, TRBJ2-3)
CASGRGQGIPDTQYF

SEQ ID NO: 226143 - protein, 16 aa, Homo sapiens
  CDR3 for alpha chain variable domain of TCR clone 113072 (TRAV3, TRAJ37)
CAVRPHGSGNTGKLIF

SEQ ID NO: 226144 - protein, 16 aa, Homo sapiens
  CDR3 for beta chain variable domain of TCR clone 113072 (TRBV4-3, TRBJ2-7)
CASSPRTSGRSYEQYF

SEQ ID NO: 226145 - protein, 10 aa, Homo sapiens
  CDR3 for alpha chain variable domain of TCR clone 113073 (TRAV36/DV7, TRAJ56)
CAVPAVELTF

SEQ ID NO: 226146 - protein, 13 aa, Homo sapiens
  CDR3 for beta chain variable domain of TCR clone 113073 (TRBV7-9, TRBJ2-7)
CASSFWSSYEQYF

SEQ ID NO: 226147 - protein, 13 aa, Homo sapiens
  CDR3 for alpha chain variable domain of TCR clone 113074 (TRAV27, TRAJ6)
CAGGTRGSYIPTF

SEQ ID NO: 226148 - protein, 13 aa, Homo sapiens
  CDR3 for beta chain variable domain of TCR clone 113074 (TRBV11-2, TRBJ2-5)
CASSFSSQETQYF

SEQ ID NO: 226149 - protein, 13 aa, Homo sapiens
  CDR3 for alpha chain variable domain of TCR clone 113075 (TRAV12-2, TRAJ23)
CAVMGNQGGKLIF

SEQ ID NO: 226150 - protein, 15 aa, Homo sapiens
  CDR3 for beta chain variable domain of TCR clone 113075 (TRBV7-2, TRBJ2-3)
CASSLAGAFIDTQYF

SEQ ID NO: 226151 - protein, 13 aa, Homo sapiens
  CDR3 for alpha chain variable domain of TCR clone 113076 (TRAV29/DV5, TRAJ31)
CAASRNTNARLMF

SEQ ID NO: 226152 - protein, 12 aa, Homo sapiens
  CDR3 for beta chain variable domain of TCR clone 113076 (TRBV14, TRBJ1-1)
CASSQLKGLAFF

SEQ ID NO: 226153 - protein, 14 aa, Homo sapiens
  CDR3 for alpha chain variable domain of TCR clone 113077 (TRAV8-4, TRAJ54)
CAVSEVLGAQKLVF

SEQ ID NO: 226154 - protein, 14 aa, Homo sapiens
  CDR3 for beta chain variable domain of TCR clone 113077 (TRBV7-9, TRBJ1-1)
CASSPRTGNTEAFF

SEQ ID NO: 226155 - protein, 12 aa, Homo sapiens
  CDR3 for alpha chain variable domain of TCR clone 113078 (TRAV12-1, TRAJ13)
CVVAGGYQKVTF

SEQ ID NO: 226156 - protein, 12 aa, Homo sapiens
  CDR3 for beta chain variable domain of TCR clone 113078 (TRBV12-4, TRBJ1-3)
CASSFSGNTIYF

SEQ ID NO: 226157 - protein, 14 aa, Homo sapiens
  CDR3 for alpha chain variable domain of TCR clone 113079 (TRAV35, TRAJ22)
CAGLRPGSARQLTF

SEQ ID NO: 226158 - protein, 12 aa, Homo sapiens
  CDR3 for beta chain variable domain of TCR clone 113079 (TRBV7-9, TRBJ1-4)
CASSTDREKLFF

SEQ ID NO: 226159 - protein, 14 aa, Homo sapiens
  CDR3 for alpha chain variable domain of TCR clone 113080 (TRAV2, TRAJ20)
CAVEDVVNDYKLSF

SEQ ID NO: 226160 - protein, 15 aa, Homo sapiens
  CDR3 for beta chain variable domain of TCR clone 113080 (TRBV7-3, TRBJ2-1)
CASSPGGGAYNEQFF

SEQ ID NO: 226161 - protein, 15 aa, Homo sapiens
  CDR3 for alpha chain variable domain of TCR clone 113081 (TRAV17, TRAJ10)
CATVLLTGGGNKLTF

SEQ ID NO: 226162 - protein, 13 aa, Homo sapiens
  CDR3 for beta chain variable domain of TCR clone 113081 (TRBV12-5, TRBJ2-3)
RASGDRQSDTQYF

SEQ ID NO: 226163 - protein, 14 aa, Homo sapiens
  CDR3 for alpha chain variable domain of TCR clone 113082 (TRAV8-3, TRAJ4)
CAVGASGGYNKLIF

SEQ ID NO: 226164 - protein, 16 aa, Homo sapiens
  CDR3 for beta chain variable domain of TCR clone 113082 (TRBV4-3, TRBJ2-2)
CASRHLQGSGTGELFF

SEQ ID NO: 226165 - protein, 15 aa, Homo sapiens
  CDR3 for alpha chain variable domain of TCR clone 113083 (TRAV12-1, TRAJ42)
CVVTRDGGSQGNFIF

SEQ ID NO: 226166 - protein, 14 aa, Homo sapiens
  CDR3 for beta chain variable domain of TCR clone 113083 (TRBV11-2, TRBJ2-3)
CASSLGGGANTQYF

SEQ ID NO: 226167 - protein, 12 aa, Homo sapiens
  CDR3 for alpha chain variable domain of TCR clone 113084 (TRAV21, TRAJ31)
CAVWGNNARLMF

SEQ ID NO: 226168 - protein, 15 aa, Homo sapiens
  CDR3 for beta chain variable domain of TCR clone 113084 (TRBV20-1, TRBJ2-7)
CSARDRVSGMDEQYF

SEQ ID NO: 226169 - protein, 15 aa, Homo sapiens
  CDR3 for alpha chain variable domain of TCR clone 113085 (TRAV8-2, TRAJ40)
CVVLGTTSGTYEYIF

SEQ ID NO: 226170 - protein, 13 aa, Homo sapiens
  CDR3 for beta chain variable domain of TCR clone 113085 (TRBV20-1, TRBJ1-2)
CSARDQGAYGYTF

SEQ ID NO: 226171 - protein, 12 aa, Homo sapiens
  CDR3 for alpha chain variable domain of TCR clone 113086 (TRAV21, TRAJ13)
PGPSGGYQKVTF

SEQ ID NO: 226172 - protein, 17 aa, Homo sapiens
  CDR3 for beta chain variable domain of TCR clone 113086 (TRBV7-9, TRBJ1-6)
CASSSPDVEIHPSTLGT

SEQ ID NO: 226173 - protein, 14 aa, Homo sapiens
  CDR3 for alpha chain variable domain of TCR clone 113087 (TRAV1-2, TRAJ16)
CAVNRFSDGQKLLF

SEQ ID NO: 226174 - protein, 14 aa, Homo sapiens
  CDR3 for beta chain variable domain of TCR clone 113087 (TRBV19, TRBJ2-1)
CASSKGFAENEQFF

SEQ ID NO: 226175 - protein, 13 aa, Homo sapiens
  CDR3 for alpha chain variable domain of TCR clone 113088 (TRAV8-3, TRAJ43)
CAVGPDNNNDMRF

SEQ ID NO: 226176 - protein, 15 aa, Homo sapiens
  CDR3 for beta chain variable domain of TCR clone 113088 (TRBV10-2, TRBJ2-6)
CASSEQGTGANVLTF

SEQ ID NO: 226177 - protein, 14 aa, Homo sapiens
  CDR3 for alpha chain variable domain of TCR clone 113089 (TRAV17, TRAJ31)
CATVLRNNNARLMF

SEQ ID NO: 226178 - protein, 14 aa, Homo sapiens
  CDR3 for beta chain variable domain of TCR clone 113089 (TRBV12-4, TRBJ2-5)
CSSSLWQKQETQYF

SEQ ID NO: 226179 - protein, 12 aa, Homo sapiens
  CDR3 for alpha chain variable domain of TCR clone 113090 (TRAV12-2, TRAJ47)
CALAEYGNKLVF

SEQ ID NO: 226180 - protein, 14 aa, Homo sapiens
  CDR3 for beta chain variable domain of TCR clone 113090 (TRBV20-1, TRBJ1-1)
CSAMGGTANTEAFF

SEQ ID NO: 226181 - protein, 16 aa, Homo sapiens
  CDR3 for alpha chain variable domain of TCR clone 113091 (TRAV12-2, TRAJ10)
CAVNRVLAGGGNKLTF

SEQ ID NO: 226182 - protein, 17 aa, Homo sapiens
  CDR3 for beta chain variable domain of TCR clone 113091 (TRBV11-2, TRBJ2-1)
CASSLYPPGVEYNEQFF

SEQ ID NO: 226183 - protein, 18 aa, Homo sapiens
  CDR3 for alpha chain variable domain of TCR clone 113092 (TRAV35, TRAJ28)
CAGHNYTLSGAGSYQLTF

SEQ ID NO: 226184 - protein, 12 aa, Homo sapiens
  CDR3 for beta chain variable domain of TCR clone 113092 (TRBV7-9, TRBJ1-1)
CASSLEGTEAFF

SEQ ID NO: 226185 - protein, 18 aa, Homo sapiens
  CDR3 for alpha chain variable domain of TCR clone 113093 (TRAV26-1, TRAJ23)
CIVRVGLEVWHQGGKLIF

SEQ ID NO: 226186 - protein, 16 aa, Homo sapiens
  CDR3 for beta chain variable domain of TCR clone 113093 (TRBV12-4, TRBJ2-5)
CASSFFVRGRQETQYF

SEQ ID NO: 226187 - protein, 11 aa, Homo sapiens
  CDR3 for alpha chain variable domain of TCR clone 113094 (TRAV2, TRAJ13)
CASGGYQKDTF

SEQ ID NO: 226188 - protein, 13 aa, Homo sapiens
  CDR3 for beta chain variable domain of TCR clone 113094 (TRBV20-1, TRBJ2-2)
CSASAAGTGELFF

SEQ ID NO: 226189 - protein, 12 aa, Homo sapiens
  CDR3 for alpha chain variable domain of TCR clone 113095 (TRAV10, TRAJ31)
CVVRAHRARLMF

SEQ ID NO: 226190 - protein, 16 aa, Homo sapiens
  CDR3 for beta chain variable domain of TCR clone 113095 (TRBV12-5, TRBJ2-5)
CASGPRTSGNQETQYF

SEQ ID NO: 226191 - protein, 15 aa, Homo sapiens
  CDR3 for alpha chain variable domain of TCR clone 113096 (TRAV26-1, TRAJ22)
CIVRVSFWFCKATDL

SEQ ID NO: 226192 - protein, 15 aa, Homo sapiens
  CDR3 for beta chain variable domain of TCR clone 113096 (TRBV7-2, TRBJ2-1)
CASSSGLAGGNEQFF

SEQ ID NO: 226193 - protein, 15 aa, Homo sapiens
  CDR3 for alpha chain variable domain of TCR clone 113097 (TRAV8-3, TRAJ11)
CAVGLLNSGYSTLTF

SEQ ID NO: 226194 - protein, 16 aa, Homo sapiens
  CDR3 for beta chain variable domain of TCR clone 113097 (TRBV7-9, TRBJ1-2)
CASGLGFSSGEDGYTF

SEQ ID NO: 226195 - protein, 13 aa, Homo sapiens
  CDR3 for alpha chain variable domain of TCR clone 113098 (TRAV21, TRAJ20)
CAVGLRADYKLSF

SEQ ID NO: 226196 - protein, 13 aa, Homo sapiens
  CDR3 for beta chain variable domain of TCR clone 113098 (TRBV6-1, TRBJ1-1)
CASSRQGNTGAFF

SEQ ID NO: 226197 - protein, 16 aa, Homo sapiens
  CDR3 for alpha chain variable domain of TCR clone 113099 (TRAV12-3, TRAJ53)
CAMSPGRGGSNYKLTF

SEQ ID NO: 226198 - protein, 14 aa, Homo sapiens
  CDR3 for beta chain variable domain of TCR clone 113099 (TRBV4-1, TRBJ2-7)
CASSPVAGGDEQYF

SEQ ID NO: 226199 - protein, 13 aa, Homo sapiens
  CDR3 for alpha chain variable domain of TCR clone 113100 (TRAV38-2/DV8, TRAJ34)
CAYRTWNTDKLLF

SEQ ID NO: 226200 - protein, 18 aa, Homo sapiens
  CDR3 for beta chain variable domain of TCR clone 113100 (TRBV6-6, TRBJ1-3)
CASSYSKWDSISGNTIYF

SEQ ID NO: 226201 - protein, 13 aa, Homo sapiens
  CDR3 for alpha chain variable domain of TCR clone 113101 (TRAV8-3, TRAJ28)
CAVGAVGSYQLTF

SEQ ID NO: 226202 - protein, 13 aa, Homo sapiens
  CDR3 for beta chain variable domain of TCR clone 113101 (TRBV19, TRBJ1-2)
CASSVAGQDGYTF

SEQ ID NO: 226203 - protein, 12 aa, Homo sapiens
  CDR3 for alpha chain variable domain of TCR clone 113102 (TRAV2, TRAJ31)
CAVEDNNARLMF

SEQ ID NO: 226204 - protein, 14 aa, Homo sapiens
  CDR3 for beta chain variable domain of TCR clone 113102 (TRBV7-7, TRBJ2-7)
CASSLGRGVGEQYF

SEQ ID NO: 226205 - protein, 14 aa, Homo sapiens
  CDR3 for alpha chain variable domain of TCR clone 113103 (TRAV2, TRAJ9)
CAVADRSGGFKTIF

SEQ ID NO: 226206 - protein, 18 aa, Homo sapiens
  CDR3 for beta chain variable domain of TCR clone 113103 (TRBV20-1, TRBJ2-5)
CSQTGDSGRLGGKETQYF

SEQ ID NO: 226207 - protein, 10 aa, Homo sapiens
  CDR3 for alpha chain variable domain of TCR clone 113104 (TRAV23/DV6, TRAJ57)
CAASSTLSQG

SEQ ID NO: 226208 - protein, 17 aa, Homo sapiens
  CDR3 for beta chain variable domain of TCR clone 113104 (TRBV15, TRBJ1-6)
CATSRDSFAGRNSPLHF

SEQ ID NO: 226209 - protein, 12 aa, Homo sapiens
  CDR3 for alpha chain variable domain of TCR clone 113105 (TRAV21, TRAJ39)
CAADNAGNMLTF

SEQ ID NO: 226210 - protein, 14 aa, Homo sapiens
  CDR3 for beta chain variable domain of TCR clone 113105 (TRBV7-2, TRBJ1-2)
CASSQTGSTYGYTF

SEQ ID NO: 226211 - protein, 12 aa, Homo sapiens
  CDR3 for alpha chain variable domain of TCR clone 113106 (TRAV17, TRAJ49)
CATVTTGNQFYF

SEQ ID NO: 226212 - protein, 18 aa, Homo sapiens
  CDR3 for beta chain variable domain of TCR clone 113106 (TRBV11-2, TRBJ2-6)
CASSLNPLLGTGANVLTF

SEQ ID NO: 226213 - protein, 13 aa, Homo sapiens
  CDR3 for alpha chain variable domain of TCR clone 113107 (TRAV30, TRAJ24)
CGTVTDSWGKLQF

SEQ ID NO: 226214 - protein, 14 aa, Homo sapiens
  CDR3 for beta chain variable domain of TCR clone 113107 (TRBV6-3, TRBJ2-2)
CASTHTPDTGELFF

SEQ ID NO: 226215 - protein, 15 aa, Homo sapiens
  CDR3 for alpha chain variable domain of TCR clone 113108 (TRAV23/DV6, TRAJ44)
CAASGGTGTASKLTF

SEQ ID NO: 226216 - protein, 16 aa, Homo sapiens
  CDR3 for beta chain variable domain of TCR clone 113108 (TRBV20-1, TRBJ2-3)
CSALAFDTEDPDTQYF

SEQ ID NO: 226217 - protein, 14 aa, Homo sapiens
  CDR3 for alpha chain variable domain of TCR clone 113109 (TRAV12-3, TRAJ49)
CAMSEPNTGNQFYF

SEQ ID NO: 226218 - protein, 13 aa, Homo sapiens
  CDR3 for beta chain variable domain of TCR clone 113109 (TRBV10-3, TRBJ2-7)
CASKLAVNYEQYF

SEQ ID NO: 226219 - protein, 13 aa, Homo sapiens
  CDR3 for alpha chain variable domain of TCR clone 113110 (TRAV1-2, TRAJ9)
CAALNTGGFETIF

SEQ ID NO: 226220 - protein, 16 aa, Homo sapiens
  CDR3 for beta chain variable domain of TCR clone 113110 (TRBV11-2, TRBJ2-1)
CASSPRLAGVYNEQFF

SEQ ID NO: 226221 - protein, 14 aa, Homo sapiens
  CDR3 for alpha chain variable domain of TCR clone 113111 (TRAV29/DV5, TRAJ36)
CAARRNTGANNLFF

SEQ ID NO: 226222 - protein, 13 aa, Homo sapiens
  CDR3 for beta chain variable domain of TCR clone 113111 (TRBV15, TRBJ1-2)
CATSMTANYGYTF

SEQ ID NO: 226223 - protein, 14 aa, Homo sapiens
  CDR3 for alpha chain variable domain of TCR clone 113112 (TRAV12-2, TRAJ17)
CAVLFKAAGNKLTF

SEQ ID NO: 226224 - protein, 15 aa, Homo sapiens
  CDR3 for beta chain variable domain of TCR clone 113112 (TRBV6-1, TRBJ2-5)
CASPRWGTEGQTQYF

SEQ ID NO: 226225 - protein, 13 aa, Homo sapiens
  CDR3 for alpha chain variable domain of TCR clone 113113 (TRAV21, TRAJ15)
CAVANQAGTALIF

SEQ ID NO: 226226 - protein, 14 aa, Homo sapiens
  CDR3 for beta chain variable domain of TCR clone 113113 (TRBV6-1, TRBJ1-3)
CASVQGGGGNTIYF

SEQ ID NO: 226227 - protein, 15 aa, Homo sapiens
  CDR3 for alpha chain variable domain of TCR clone 113114 (TRAV17, TRAJ6)
CATDIPSGGSYIPTF

SEQ ID NO: 226228 - protein, 16 aa, Homo sapiens
  CDR3 for beta chain variable domain of TCR clone 113114 (TRBV4-1, TRBJ2-7)
CASSQDPTGYSYEQYF

SEQ ID NO: 226229 - protein, 15 aa, Homo sapiens
  CDR3 for alpha chain variable domain of TCR clone 113115 (TRAV14/DV4, TRAJ26)
CAMREGQNYGQNFVF

SEQ ID NO: 226230 - protein, 14 aa, Homo sapiens
  CDR3 for beta chain variable domain of TCR clone 113115 (TRBV7-2, TRBJ2-7)
CASSPKTSFYEQYF

SEQ ID NO: 226231 - protein, 14 aa, Homo sapiens
  CDR3 for alpha chain variable domain of TCR clone 113116 (TRAV1-2, TRAJ8)
CAVREDTGFQKLVF

SEQ ID NO: 226232 - protein, 12 aa, Homo sapiens
  CDR3 for beta chain variable domain of TCR clone 113116 (TRBV11-3, TRBJ2-2)
CASSLPTGELFF

SEQ ID NO: 226233 - protein, 12 aa, Homo sapiens
  CDR3 for alpha chain variable domain of TCR clone 113117 (TRAV21, TRAJ11)
CAATSGYSTLTF

SEQ ID NO: 226234 - protein, 16 aa, Homo sapiens
  CDR3 for beta chain variable domain of TCR clone 113117 (TRBV4-2, TRBJ2-3)
CASSQELAGDTDTQYF

SEQ ID NO: 226235 - protein, 12 aa, Homo sapiens
  CDR3 for alpha chain variable domain of TCR clone 113118 (TRAV27, TRAJ35)
CAGADFGNVLPC

SEQ ID NO: 226236 - protein, 16 aa, Homo sapiens
  CDR3 for beta chain variable domain of TCR clone 113118 (TRBV6-1, TRBJ2-1)
CASILRQGSSYNEQFF

SEQ ID NO: 226237 - protein, 15 aa, Homo sapiens
  CDR3 for alpha chain variable domain of TCR clone 113119 (TRAV34, TRAJ38)
CGADFTPGNNRKLIW

SEQ ID NO: 226238 - protein, 14 aa, Homo sapiens
  CDR3 for beta chain variable domain of TCR clone 113119 (TRBV7-8, TRBJ1-2)
CASSPDSLSYGYTF

SEQ ID NO: 226239 - protein, 11 aa, Homo sapiens
  CDR3 for alpha chain variable domain of TCR clone 113120 (TRAV35, TRAJ30)
CTGERDDKIIF

SEQ ID NO: 226240 - protein, 14 aa, Homo sapiens
  CDR3 for beta chain variable domain of TCR clone 113120 (TRBV15, TRBJ2-5)
CATSGDRGQETQYF

SEQ ID NO: 226241 - protein, 11 aa, Homo sapiens
  CDR3 for alpha chain variable domain of TCR clone 113121 (TRAV2, TRAJ13)
CASGGYQKVTF

SEQ ID NO: 226242 - protein, 14 aa, Homo sapiens
  CDR3 for beta chain variable domain of TCR clone 113121 (TRBV18, TRBJ1-2)
RASSPDRVVYGYTF

SEQ ID NO: 226243 - protein, 12 aa, Homo sapiens
  CDR3 for alpha chain variable domain of TCR clone 113122 (TRAV26-1, TRAJ17)
CIVRSAGNKLTF

SEQ ID NO: 226244 - protein, 14 aa, Homo sapiens
  CDR3 for beta chain variable domain of TCR clone 113122 (TRBV4-2, TRBJ2-1)
CTSGLDRAYNEQFF

SEQ ID NO: 226245 - protein, 15 aa, Homo sapiens
  CDR3 for alpha chain variable domain of TCR clone 113123 (TRAV23/DV6, TRAJ18)
CAARYRGSTLGRLYF

SEQ ID NO: 226246 - protein, 13 aa, Homo sapiens
  CDR3 for beta chain variable domain of TCR clone 113123 (TRBV7-2, TRBJ2-7)
CARSSPSGSEQYF

SEQ ID NO: 226247 - protein, 15 aa, Homo sapiens
  CDR3 for alpha chain variable domain of TCR clone 113124 (TRAV8-4, TRAJ37)
CAVTYGSSNTGKPIF

SEQ ID NO: 226248 - protein, 13 aa, Homo sapiens
  CDR3 for beta chain variable domain of TCR clone 113124 (TRBV12-4, TRBJ2-5)
CASSLGGSRTQYF

SEQ ID NO: 226249 - protein, 14 aa, Homo sapiens
  CDR3 for alpha chain variable domain of TCR clone 113125 (TRAV12-2, TRAJ5)
CAVNRSTGRRALTF

SEQ ID NO: 226250 - protein, 15 aa, Homo sapiens
  CDR3 for beta chain variable domain of TCR clone 113125 (TRBV7-9, TRBJ2-7)
CASSPGGGLTYEQYF

SEQ ID NO: 226251 - protein, 16 aa, Homo sapiens
  CDR3 for alpha chain variable domain of TCR clone 113126 (TRAV3, TRAJ23)
CAVKIGIYNQVGKLIF

SEQ ID NO: 226252 - protein, 17 aa, Homo sapiens
  CDR3 for beta chain variable domain of TCR clone 113126 (TRBV10-3, TRBJ2-6)
CAISESTAPSGANVLTF

SEQ ID NO: 226253 - protein, 12 aa, Homo sapiens
  CDR3 for alpha chain variable domain of TCR clone 113127 (TRAV27, TRAJ41)
CAGSNSGYALNF

SEQ ID NO: 226254 - protein, 13 aa, Homo sapiens
  CDR3 for beta chain variable domain of TCR clone 113127 (TRBV12-4, TRBJ1-1)
CASSPGTGFEAFF

SEQ ID NO: 226255 - protein, 12 aa, Homo sapiens
  CDR3 for alpha chain variable domain of TCR clone 113128 (TRAV13-2, TRAJ8)
CAPWLGFQKLVF

SEQ ID NO: 226256 - protein, 14 aa, Homo sapiens
  CDR3 for beta chain variable domain of TCR clone 113128 (TRBV18, TRBJ1-5)
CASSRQQRNQPQHC

SEQ ID NO: 226257 - protein, 16 aa, Homo sapiens
  CDR3 for alpha chain variable domain of TCR clone 113129 (TRAV3, TRAJ37)
CPVRPHGSGNTGKLIF

SEQ ID NO: 226258 - protein, 16 aa, Homo sapiens
  CDR3 for beta chain variable domain of TCR clone 113129 (TRBV9, TRBJ1-2)
CASSVEEKVSPYGYTF

SEQ ID NO: 226259 - protein, 11 aa, Homo sapiens
  CDR3 for alpha chain variable domain of TCR clone 113130 (TRAV1-2, TRAJ20)
CAVSDDYKLSF

SEQ ID NO: 226260 - protein, 16 aa, Homo sapiens
  CDR3 for beta chain variable domain of TCR clone 113130 (TRBV29-1, TRBJ2-6)
CSVEDITYSGANVLTF

SEQ ID NO: 226261 - protein, 13 aa, Homo sapiens
  CDR3 for alpha chain variable domain of TCR clone 113131 (TRAV12-2, TRAJ37)
CAGGSGSTGKLVF

SEQ ID NO: 226262 - protein, 14 aa, Homo sapiens
  CDR3 for beta chain variable domain of TCR clone 113131 (TRBV6-1, TRBJ2-6)
CASQQGAGANVLTF

SEQ ID NO: 226263 - protein, 14 aa, Homo sapiens
  CDR3 for alpha chain variable domain of TCR clone 113132 (TRAV1-2, TRAJ16)
CAVNRFSDGQKLLY

SEQ ID NO: 226264 - protein, 15 aa, Homo sapiens
  CDR3 for beta chain variable domain of TCR clone 113132 (TRBV9, TRBJ1-6)
CASSVAGTGDSPLHF

SEQ ID NO: 226265 - protein, 13 aa, Homo sapiens
  CDR3 for alpha chain variable domain of TCR clone 113133 (TRAV8-6, TRAJ49)
CAVITNTGNQFYF

SEQ ID NO: 226266 - protein, 13 aa, Homo sapiens
  CDR3 for beta chain variable domain of TCR clone 113133 (TRBV18, TRBJ2-7)
CASQSGGGYEQYF

SEQ ID NO: 226267 - protein, 15 aa, Homo sapiens
  CDR3 for alpha chain variable domain of TCR clone 113134 (TRAV4, TRAJ39)
CLVGPNNNAGNMLTF

SEQ ID NO: 226268 - protein, 13 aa, Homo sapiens
  CDR3 for beta chain variable domain of TCR clone 113134 (TRBV11-2, TRBJ2-5)
CAGSSAGEETQYF

SEQ ID NO: 226269 - protein, 14 aa, Homo sapiens
  CDR3 for alpha chain variable domain of TCR clone 113135 (TRAV29/DV5, TRAJ32)
CAAAYGGATNTLIF

SEQ ID NO: 226270 - protein, 14 aa, Homo sapiens
  CDR3 for beta chain variable domain of TCR clone 113135 (TRBV20-1, TRBJ1-1)
CSAQTRIGGTEAFF

SEQ ID NO: 226271 - protein, 11 aa, Homo sapiens
  CDR3 for alpha chain variable domain of TCR clone 113136 (TRAV17, TRAJ9)
CATTGGFKTIF

SEQ ID NO: 226272 - protein, 14 aa, Homo sapiens
  CDR3 for beta chain variable domain of TCR clone 113136 (TRBV7-6, TRBJ2-3)
CASSLGTVTDTQYF

SEQ ID NO: 226273 - protein, 13 aa, Homo sapiens
  CDR3 for alpha chain variable domain of TCR clone 113137 (TRAV27, TRAJ53)
CAGQGGSNYKLTF

SEQ ID NO: 226274 - protein, 16 aa, Homo sapiens
  CDR3 for beta chain variable domain of TCR clone 113137 (TRBV12-5, TRBJ2-5)
CASGPRTSGNQETQYF

SEQ ID NO: 226275 - protein, 14 aa, Homo sapiens
  CDR3 for alpha chain variable domain of TCR clone 113138 (TRAV12-2, TRAJ13)
CAVKKTGGYQKVTF

SEQ ID NO: 226276 - protein, 15 aa, Homo sapiens
  CDR3 for beta chain variable domain of TCR clone 113138 (TRBV27, TRBJ1-5)
CASSLGTGFDQPQHF

SEQ ID NO: 226277 - protein, 13 aa, Homo sapiens
  CDR3 for alpha chain variable domain of TCR clone 113139 (TRAV12-2, TRAJ39)
CAVNDNAGNMLTF

SEQ ID NO: 226278 - protein, 13 aa, Homo sapiens
  CDR3 for beta chain variable domain of TCR clone 113139 (TRBV2, TRBJ1-5)
CATAGPGNQPQHF

SEQ ID NO: 226279 - protein, 14 aa, Homo sapiens
  CDR3 for alpha chain variable domain of TCR clone 113140 (TRAV1-1, TRAJ27)
CAVIYNTNAGKSTF

SEQ ID NO: 226280 - protein, 18 aa, Homo sapiens
  CDR3 for beta chain variable domain of TCR clone 113140 (TRBV15, TRBJ2-1)
CVPPPGCSGGPTTNEQFF

SEQ ID NO: 226281 - protein, 19 aa, Homo sapiens
  CDR3 for alpha chain variable domain of TCR clone 113141 (TRAV3, TRAJ6)
WAVRDRNPSRSGGSYIPTF

SEQ ID NO: 226282 - protein, 15 aa, Homo sapiens
  CDR3 for beta chain variable domain of TCR clone 113141 (TRBV18, TRBJ2-7)
CASSPTFMDSYEQYF

SEQ ID NO: 226283 - protein, 13 aa, Homo sapiens
  CDR3 for alpha chain variable domain of TCR clone 113142 (TRAV2, TRAJ15)
CAVASQAGTALIF

SEQ ID NO: 226284 - protein, 13 aa, Homo sapiens
  CDR3 for beta chain variable domain of TCR clone 113142 (TRBV2, TRBJ2-7)
CASSVGGSGEQYF

SEQ ID NO: 226285 - protein, 14 aa, Homo sapiens
  CDR3 for alpha chain variable domain of TCR clone 113143 (TRAV12-2, TRAJ5)
CAVNRSTGRRALTF

SEQ ID NO: 226286 - protein, 12 aa, Homo sapiens
  CDR3 for beta chain variable domain of TCR clone 113143 (TRBV19, TRBJ1-5)
CASGIAQQPQHF

SEQ ID NO: 226287 - protein, 13 aa, Homo sapiens
  CDR3 for alpha chain variable domain of TCR clone 113144 (TRAV35, TRAJ37)
FAGSSGNTGKLIF

SEQ ID NO: 226288 - protein, 16 aa, Homo sapiens
  CDR3 for beta chain variable domain of TCR clone 113144 (TRBV10-3, TRBJ2-1)
CAISLTSGNSYNEQFF

SEQ ID NO: 226289 - protein, 13 aa, Homo sapiens
  CDR3 for alpha chain variable domain of TCR clone 113145 (TRAV8-3, TRAJ28)
CAVGAVGSYQLTF

SEQ ID NO: 226290 - protein, 15 aa, Homo sapiens
  CDR3 for beta chain variable domain of TCR clone 113145 (TRBV7-9, TRBJ1-5)
CASSQGHQPTQPQHF

SEQ ID NO: 226291 - protein, 17 aa, Homo sapiens
  CDR3 for alpha chain variable domain of TCR clone 113146 (TRAV13-1, TRAJ31)
CAPRDRLMFGDGTQLVV

SEQ ID NO: 226292 - protein, 17 aa, Homo sapiens
  CDR3 for beta chain variable domain of TCR clone 113146 (TRBV11-2, TRBJ2-1)
CASSLYPPGVEYNEQFF

SEQ ID NO: 226293 - protein, 13 aa, Homo sapiens
  CDR3 for alpha chain variable domain of TCR clone 113147 (TRAV2, TRAJ40)
CAVVTSGTYKYIF

SEQ ID NO: 226294 - protein, 14 aa, Homo sapiens
  CDR3 for beta chain variable domain of TCR clone 113147 (TRBV13, TRBJ2-3)
CASSLGGPQRPQYF

SEQ ID NO: 226295 - protein, 13 aa, Homo sapiens
  CDR3 for alpha chain variable domain of TCR clone 113148 (TRAV21, TRAJ3)
CCEPYSSASKIIF

SEQ ID NO: 226296 - protein, 14 aa, Homo sapiens
  CDR3 for beta chain variable domain of TCR clone 113148 (TRBV19, TRBJ2-1)
CASPTFVLSGEQFF

SEQ ID NO: 226297 - protein, 17 aa, Homo sapiens
  CDR3 for alpha chain variable domain of TCR clone 113149 (TRAV4, TRAJ13)
CIVGVQGSSGGYQKVTF

SEQ ID NO: 226298 - protein, 18 aa, Homo sapiens
  CDR3 for beta chain variable domain of TCR clone 113149 (TRBV15, TRBJ2-3)
CATSRDGARSWETDTQYF

SEQ ID NO: 226299 - protein, 16 aa, Homo sapiens
  CDR3 for alpha chain variable domain of TCR clone 113150 (TRAV26-1, TRAJ37)
CIVRGDGSGNTGKLVF

SEQ ID NO: 226300 - protein, 17 aa, Homo sapiens
  CDR3 for beta chain variable domain of TCR clone 113150 (TRBV4-1, TRBJ2-7)
CASSRDPLGVRGGEQYF

SEQ ID NO: 226301 - protein, 12 aa, Homo sapiens
  CDR3 for alpha chain variable domain of TCR clone 113151 (TRAV3, TRAJ39)
CAVIEWSNMLTF

SEQ ID NO: 226302 - protein, 14 aa, Homo sapiens
  CDR3 for beta chain variable domain of TCR clone 113151 (TRBV7-8, TRBJ2-3)
CASSFPDGQDTQYC

SEQ ID NO: 226303 - protein, 13 aa, Homo sapiens
  CDR3 for alpha chain variable domain of TCR clone 113152 (TRAV17, TRAJ5)
CALRGTGRRALTF

SEQ ID NO: 226304 - protein, 13 aa, Homo sapiens
  CDR3 for beta chain variable domain of TCR clone 113152 (TRBV7-7, TRBJ2-3)
CASSLSRADTQYF

SEQ ID NO: 226305 - protein, 14 aa, Homo sapiens
  CDR3 for alpha chain variable domain of TCR clone 113153 (TRAV38-1, TRAJ45)
CASHSGGGADGLTF

SEQ ID NO: 226306 - protein, 17 aa, Homo sapiens
  CDR3 for beta chain variable domain of TCR clone 113153 (TRBV15, TRBJ1-4)
CATSRYGTGDPNEKLFF

SEQ ID NO: 226307 - protein, 13 aa, Homo sapiens
  CDR3 for alpha chain variable domain of TCR clone 113154 (TRAV2, TRAJ20)
CAVEDPSAYKLSF

SEQ ID NO: 226308 - protein, 16 aa, Homo sapiens
  CDR3 for beta chain variable domain of TCR clone 113154 (TRBV25-1, TRBJ2-7)
CASSELTGGGIYEQYF

SEQ ID NO: 226309 - protein, 12 aa, Homo sapiens
  CDR3 for alpha chain variable domain of TCR clone 113155 (TRAV13-1, TRAJ21)
SAAKEGFNKFYF

SEQ ID NO: 226310 - protein, 14 aa, Homo sapiens
  CDR3 for beta chain variable domain of TCR clone 113155 (TRBV25-1, TRBJ1-1)
CASTHLGGNTEAFF

SEQ ID NO: 226311 - protein, 12 aa, Homo sapiens
  CDR3 for alpha chain variable domain of TCR clone 113156 (TRAV12-3, TRAJ40)
CAMSSGTYKYIF

SEQ ID NO: 226312 - protein, 12 aa, Homo sapiens
  CDR3 for beta chain variable domain of TCR clone 113156 (TRBV7-9, TRBJ2-7)
CASSLEGYEQYF

SEQ ID NO: 226313 - protein, 14 aa, Homo sapiens
  CDR3 for alpha chain variable domain of TCR clone 113157 (TRAV8-3, TRAJ4)
CAVGASGGYSKLIF

SEQ ID NO: 226314 - protein, 17 aa, Homo sapiens
  CDR3 for beta chain variable domain of TCR clone 113157 (TRBV11-2, TRBJ2-1)
CASSLYPPGVEYNEQFF

SEQ ID NO: 226315 - protein, 12 aa, Homo sapiens
  CDR3 for alpha chain variable domain of TCR clone 113158 (TRAV13-1, TRAJ27)
CAAHTNAGKSTF

SEQ ID NO: 226316 - protein, 14 aa, Homo sapiens
  CDR3 for beta chain variable domain of TCR clone 113158 (TRBV19, TRBJ2-2)
CASSGQGIAGELFF

SEQ ID NO: 226317 - protein, 14 aa, Homo sapiens
  CDR3 for alpha chain variable domain of TCR clone 113159 (TRAV17, TRAJ16)
CVTADFSDGQKLLF

SEQ ID NO: 226318 - protein, 15 aa, Homo sapiens
  CDR3 for beta chain variable domain of TCR clone 113159 (TRBV18, TRBJ2-1)
CASSPPSASYNEQFF

SEQ ID NO: 226319 - protein, 17 aa, Homo sapiens
  CDR3 for alpha chain variable domain of TCR clone 113160 (TRAV38-2/DV8, TRAJ28)
CAFLTLYSGAGSYQLTL

SEQ ID NO: 226320 - protein, 22 aa, Homo sapiens
  CDR3 for beta chain variable domain of TCR clone 113160 (TRBV6-1, TRBJ1-3)
CASVQGGGWKHHIFWRGKLAHC

SEQ ID NO: 226321 - protein, 15 aa, Homo sapiens
  CDR3 for alpha chain variable domain of TCR clone 113161 (TRAV2, TRAJ22)
CAVPSRGCSARQLTF

SEQ ID NO: 226322 - protein, 11 aa, Homo sapiens
  CDR3 for beta chain variable domain of TCR clone 113161 (TRBV27, TRBJ2-3)
CASSLGDTQYF

SEQ ID NO: 226323 - protein, 14 aa, Homo sapiens
  CDR3 for alpha chain variable domain of TCR clone 113162 (TRAV26-1, TRAJ38)
CIADNAGNNRKLIW

SEQ ID NO: 226324 - protein, 14 aa, Homo sapiens
  CDR3 for beta chain variable domain of TCR clone 113162 (TRBV11-2, TRBJ2-7)
CASSLGAGAYEQYF

SEQ ID NO: 226325 - protein, 14 aa, Homo sapiens
  CDR3 for alpha chain variable domain of TCR clone 113163 (TRAV13-1, TRAJ40)
CAASMTSGTYKYVF

SEQ ID NO: 226326 - protein, 15 aa, Homo sapiens
  CDR3 for beta chain variable domain of TCR clone 113163 (TRBV7-3, TRBJ2-1)
CASSPTGGGEVEQFF

SEQ ID NO: 226327 - protein, 15 aa, Homo sapiens
  CDR3 for alpha chain variable domain of TCR clone 113164 (TRAV1-2, TRAJ9)
CAVRDDGTGGFKTIF

SEQ ID NO: 226328 - protein, 16 aa, Homo sapiens
  CDR3 for beta chain variable domain of TCR clone 113164 (TRBV7-2, TRBJ1-6)
CASSSFESSYNSPLHL

SEQ ID NO: 226329 - protein, 14 aa, Homo sapiens
  CDR3 for alpha chain variable domain of TCR clone 113165 (TRAV1-2, TRAJ16)
CAVNRFSDGQKLLF

SEQ ID NO: 226330 - protein, 15 aa, Homo sapiens
  CDR3 for beta chain variable domain of TCR clone 113165 (TRBV7-9, TRBJ1-4)
CASSARIGGNEKLFF

SEQ ID NO: 226331 - protein, 16 aa, Homo sapiens
  CDR3 for alpha chain variable domain of TCR clone 113166 (TRAV26-1, TRAJ53)
CIVRVAMGGSNYKLTF

SEQ ID NO: 226332 - protein, 12 aa, Homo sapiens
  CDR3 for beta chain variable domain of TCR clone 113166 (TRBV7-9, TRBJ1-5)
CASSPQRQPQHF

SEQ ID NO: 226333 - protein, 15 aa, Homo sapiens
  CDR3 for alpha chain variable domain of TCR clone 113167 (TRAV20, TRAJ6)
CAVRLQSGGSYIPTF

SEQ ID NO: 226334 - protein, 15 aa, Homo sapiens
  CDR3 for beta chain variable domain of TCR clone 113167 (TRBV6-3, TRBJ2-7)
CASSSPGTVFYEQYF

SEQ ID NO: 226335 - protein, 14 aa, Homo sapiens
  CDR3 for alpha chain variable domain of TCR clone 113168 (TRAV8-3, TRAJ4)
CAVGAAGGYNKLIF

SEQ ID NO: 226336 - protein, 15 aa, Homo sapiens
  CDR3 for beta chain variable domain of TCR clone 113168 (TRBV11-2, TRBJ2-1)
CASSLGTSGLNEQFF

SEQ ID NO: 226337 - protein, 17 aa, Homo sapiens
  CDR3 for alpha chain variable domain of TCR clone 113169 (TRAV13-1, TRAJ52)
CAASSGAGGTSYRKLTF

SEQ ID NO: 226338 - protein, 17 aa, Homo sapiens
  CDR3 for beta chain variable domain of TCR clone 113169 (TRBV11-2, TRBJ2-1)
CASSLYPPGVEYNEQFF

SEQ ID NO: 226339 - protein, 12 aa, Homo sapiens
  CDR3 for alpha chain variable domain of TCR clone 113170 (TRAV13-1, TRAJ49)
CAASPMGNQFYF

SEQ ID NO: 226340 - protein, 16 aa, Homo sapiens
  CDR3 for beta chain variable domain of TCR clone 113170 (TRBV12-5, TRBJ2-5)
CASGPRTSGNQETQYF

SEQ ID NO: 226341 - protein, 15 aa, Homo sapiens
  CDR3 for alpha chain variable domain of TCR clone 113171 (TRAV3, TRAJ22)
CAVRDRGGSARQLTF

SEQ ID NO: 226342 - protein, 16 aa, Homo sapiens
  CDR3 for beta chain variable domain of TCR clone 113171 (TRBV5-4, TRBJ2-3)
CASQQPGAGGADTQYC

SEQ ID NO: 226343 - protein, 16 aa, Homo sapiens
  CDR3 for alpha chain variable domain of TCR clone 113172 (TRAV1-1, TRAJ28)
CAVRDDSGAGSYQLTF

SEQ ID NO: 226344 - protein, 12 aa, Homo sapiens
  CDR3 for beta chain variable domain of TCR clone 113172 (TRBV11-2, TRBJ2-5)
CASSVDTQTQYF

SEQ ID NO: 226345 - protein, 13 aa, Homo sapiens
  CDR3 for alpha chain variable domain of TCR clone 113173 (TRAV16, TRAJ29)
CALSRRGNTPLVF

SEQ ID NO: 226346 - protein, 15 aa, Homo sapiens
  CDR3 for beta chain variable domain of TCR clone 113173 (TRBV4-1, TRBJ2-3)
CASSQGQGIPDTQYF

SEQ ID NO: 226347 - protein, 16 aa, Homo sapiens
  CDR3 for alpha chain variable domain of TCR clone 113174 (TRAV30, TRAJ24)
CGTEIVDADSWGKFQL

SEQ ID NO: 226348 - protein, 14 aa, Homo sapiens
  CDR3 for beta chain variable domain of TCR clone 113174 (TRBV20-1, TRBJ1-1)
CSAQTRIGGTEAFF

SEQ ID NO: 226349 - protein, 14 aa, Homo sapiens
  CDR3 for alpha chain variable domain of TCR clone 113175 (TRAV12-3, TRAJ10)
SHLPLTGGGNKLTF

SEQ ID NO: 226350 - protein, 16 aa, Homo sapiens
  CDR3 for beta chain variable domain of TCR clone 113175 (TRBV24-1, TRBJ2-3)
CATSDRRQDLTDTQYF

SEQ ID NO: 226351 - protein, 22 aa, Homo sapiens
  CDR3 for alpha chain variable domain of TCR clone 113176 (TRAV3, TRAJ38)
CAVRDCLNAGNNHIQNPVPAVY

SEQ ID NO: 226352 - protein, 19 aa, Homo sapiens
  CDR3 for beta chain variable domain of TCR clone 113176 (TRBV7-2, TRBJ2-3)
CASSFLSRNWGGGTDTQYF

SEQ ID NO: 226353 - protein, 13 aa, Homo sapiens
  CDR3 for alpha chain variable domain of TCR clone 113177 (TRAV1-2, TRAJ9)
CAALNTGGFKTIF

SEQ ID NO: 226354 - protein, 13 aa, Homo sapiens
  CDR3 for beta chain variable domain of TCR clone 113177 (TRBV19, TRBJ1-2)
CAISVPGQYGYTF

SEQ ID NO: 226355 - protein, 14 aa, Homo sapiens
  CDR3 for alpha chain variable domain of TCR clone 113178 (TRAV26-1, TRAJ17)
CIVRSSVSGNKLTF

SEQ ID NO: 226356 - protein, 12 aa, Homo sapiens
  CDR3 for beta chain variable domain of TCR clone 113178 (TRBV5-1, TRBJ2-3)
CASSLAADTQYF

SEQ ID NO: 226357 - protein, 11 aa, Homo sapiens
  CDR3 for alpha chain variable domain of TCR clone 113179 (TRAV2, TRAJ33)
CAVDSNYQFIW

SEQ ID NO: 226358 - protein, 14 aa, Homo sapiens
  CDR3 for beta chain variable domain of TCR clone 113179 (TRBV11-2, TRBJ2-3)
CASSRLARTDTQYF

SEQ ID NO: 226359 - protein, 14 aa, Homo sapiens
  CDR3 for alpha chain variable domain of TCR clone 113180 (TRAV1-2, TRAJ16)
CAVNRFSDGQKLLF

SEQ ID NO: 226360 - protein, 12 aa, Homo sapiens
  CDR3 for beta chain variable domain of TCR clone 113180 (TRBV5-1, TRBJ2-5)
CASSLGLETQYF

SEQ ID NO: 226361 - protein, 13 aa, Homo sapiens
  CDR3 for alpha chain variable domain of TCR clone 113181 (TRAV26-1, TRAJ29)
CIVRRSGNTPLVF

SEQ ID NO: 226362 - protein, 16 aa, Homo sapiens
  CDR3 for beta chain variable domain of TCR clone 113181 (TRBV7-3, TRBJ2-1)
CASSLEGYRSYNEQFF

SEQ ID NO: 226363 - protein, 16 aa, Homo sapiens
  CDR3 for alpha chain variable domain of TCR clone 113182 (TRAV3, TRAJ6)
CAVRDGMRRRKLHTYI

SEQ ID NO: 226364 - protein, 15 aa, Homo sapiens
  CDR3 for beta chain variable domain of TCR clone 113182 (TRBV5-1, TRBJ2-7)
CASSLGDFTTYEQYF

SEQ ID NO: 226365 - protein, 15 aa, Homo sapiens
  CDR3 for alpha chain variable domain of TCR clone 113183 (TRAV19, TRAJ9)
CALSEARTGGFKTIF

SEQ ID NO: 226366 - protein, 14 aa, Homo sapiens
  CDR3 for beta chain variable domain of TCR clone 113183 (TRBV19, TRBJ2-1)
CASPTFVLSGEQFF

SEQ ID NO: 226367 - protein, 14 aa, Homo sapiens
  CDR3 for alpha chain variable domain of TCR clone 113184 (TRAV35, TRAJ33)
CWPRGRDSNYKLIW

SEQ ID NO: 226368 - protein, 11 aa, Homo sapiens
  CDR3 for beta chain variable domain of TCR clone 113184 (TRBV10-3, TRBJ2-7)
CAISEGLEQYF

SEQ ID NO: 226369 - protein, 16 aa, Homo sapiens
  CDR3 for alpha chain variable domain of TCR clone 113185 (TRAV30, TRAJ24)
CGTEIVDADSWGKFQF

SEQ ID NO: 226370 - protein, 14 aa, Homo sapiens
  CDR3 for beta chain variable domain of TCR clone 113185 (TRBV6-1, TRBJ2-1)
CATFTSGQNNEQFF

SEQ ID NO: 226371 - protein, 11 aa, Homo sapiens
  CDR3 for alpha chain variable domain of TCR clone 113186 (TRAV12-3, TRAJ27)
CAMANAGKSTF

SEQ ID NO: 226372 - protein, 12 aa, Homo sapiens
  CDR3 for beta chain variable domain of TCR clone 113186 (TRBV7-8, TRBJ2-7)
CASSLGDREQYF

SEQ ID NO: 226373 - protein, 16 aa, Homo sapiens
  CDR3 for alpha chain variable domain of TCR clone 113187 (TRAV23/DV6, )
CADIQNPDPAVYQLRD

SEQ ID NO: 226374 - protein, 13 aa, Homo sapiens
  CDR3 for beta chain variable domain of TCR clone 113187 (TRBV28, TRBJ2-7)
CASRASGVYEQYF

SEQ ID NO: 226375 - protein, 15 aa, Homo sapiens
  CDR3 for alpha chain variable domain of TCR clone 113188 (TRAV8-3, TRAJ11)
CAVGLLNSGYSTLTF

SEQ ID NO: 226376 - protein, 18 aa, Homo sapiens
  CDR3 for beta chain variable domain of TCR clone 113188 (TRBV7-9, TRBJ1-2)
CASSLGFSSGEDGYTLVR

SEQ ID NO: 226377 - protein, 14 aa, Homo sapiens
  CDR3 for alpha chain variable domain of TCR clone 113189 (TRAV9-2, TRAJ39)
CALYIYNAVNMLTF

SEQ ID NO: 226378 - protein, 16 aa, Homo sapiens
  CDR3 for beta chain variable domain of TCR clone 113189 (TRBV20-1, TRBJ1-4)
CSAPGQGLLTNEKLFF

SEQ ID NO: 226379 - protein, 18 aa, Homo sapiens
  CDR3 for alpha chain variable domain of TCR clone 113190 (TRAV12-3, TRAJ52)
CAMSVGGAGGTSYGKLTF

SEQ ID NO: 226380 - protein, 13 aa, Homo sapiens
  CDR3 for beta chain variable domain of TCR clone 113190 (TRBV19, TRBJ1-2)
CASSVPGQGGYTF

SEQ ID NO: 226381 - protein, 16 aa, Homo sapiens
  CDR3 for alpha chain variable domain of TCR clone 113191 (TRAV12-3, TRAJ53)
CAMSPGSGGSNYKLTF

SEQ ID NO: 226382 - protein, 13 aa, Homo sapiens
  CDR3 for beta chain variable domain of TCR clone 113191 (TRBV12-4, TRBJ2-7)
CASSPTETYEQYF

SEQ ID NO: 226383 - protein, 14 aa, Homo sapiens
  CDR3 for alpha chain variable domain of TCR clone 113192 (TRAV1-2, TRAJ6)
CAVSLSGGSYIPTF

SEQ ID NO: 226384 - protein, 15 aa, Homo sapiens
  CDR3 for beta chain variable domain of TCR clone 113192 (TRBV28, TRBJ2-7)
CASSPVGRGFYEQYF

SEQ ID NO: 226385 - protein, 14 aa, Homo sapiens
  CDR3 for alpha chain variable domain of TCR clone 113193 (TRAV8-3, TRAJ35)
CAVVPQGFGIVLHC

SEQ ID NO: 226386 - protein, 15 aa, Homo sapiens
  CDR3 for beta chain variable domain of TCR clone 113193 (TRBV6-1, TRBJ2-2)
CASSAGQGYTGELFF

SEQ ID NO: 226387 - protein, 14 aa, Homo sapiens
  CDR3 for alpha chain variable domain of TCR clone 113194 (TRAV29/DV5, TRAJ36)
CAARRKTGANNLFF

SEQ ID NO: 226388 - protein, 14 aa, Homo sapiens
  CDR3 for beta chain variable domain of TCR clone 113194 (TRBV12-5, TRBJ2-5)
CASGSRTHQETPYF

SEQ ID NO: 226389 - protein, 16 aa, Homo sapiens
  CDR3 for alpha chain variable domain of TCR clone 113195 (TRAV3, TRAJ37)
CAVRGKGSGNTGKLIF

SEQ ID NO: 226390 - protein, 16 aa, Homo sapiens
  CDR3 for beta chain variable domain of TCR clone 113195 (TRBV12-5, TRBJ2-5)
CASDPRTSGSQETQYF

SEQ ID NO: 226391 - protein, 18 aa, Homo sapiens
  CDR3 for alpha chain variable domain of TCR clone 113196 (TRAV29/DV5, TRAJ52)
CAAGFRGAGGTSYGKLTF

SEQ ID NO: 226392 - protein, 14 aa, Homo sapiens
  CDR3 for beta chain variable domain of TCR clone 113196 (TRBV19, TRBJ2-1)
CASSRLASINEQFF

SEQ ID NO: 226393 - protein, 13 aa, Homo sapiens
  CDR3 for alpha chain variable domain of TCR clone 113197 (TRAV29/DV5, TRAJ44)
CAASTGTASKLTF

SEQ ID NO: 226394 - protein, 18 aa, Homo sapiens
  CDR3 for beta chain variable domain of TCR clone 113197 (TRBV11-2, TRBJ2-3)
CASSLGGASRGAPNTQYF

SEQ ID NO: 226395 - protein, 14 aa, Homo sapiens
  CDR3 for alpha chain variable domain of TCR clone 113198 (TRAV1-2, TRAJ13)
CAVLNSGGYQKVTF

SEQ ID NO: 226396 - protein, 14 aa, Homo sapiens
  CDR3 for beta chain variable domain of TCR clone 113198 (TRBV12-4, TRBJ1-1)
CASSLNDMSTEAFF

SEQ ID NO: 226397 - protein, 17 aa, Homo sapiens
  CDR3 for alpha chain variable domain of TCR clone 113199 (TRAV8-6, TRAJ58)
CAVSSWVGETSGSRLTF

SEQ ID NO: 226398 - protein, 14 aa, Homo sapiens
  CDR3 for beta chain variable domain of TCR clone 113199 (TRBV4-2, TRBJ2-1)
CASGLDRAYNELFF

SEQ ID NO: 226399 - protein, 12 aa, Homo sapiens
  CDR3 for alpha chain variable domain of TCR clone 113200 (TRAV8-3, TRAJ26)
CAGDNYGQNFVF

SEQ ID NO: 226400 - protein, 15 aa, Homo sapiens
  CDR3 for beta chain variable domain of TCR clone 113200 (TRBV9, TRBJ2-1)
CASSLAGSSYNAQFF

SEQ ID NO: 226401 - protein, 16 aa, Homo sapiens
  CDR3 for alpha chain variable domain of TCR clone 113201 (TRAV30, TRAJ24)
CGTEIVDSDSWGKFQF

SEQ ID NO: 226402 - protein, 18 aa, Homo sapiens
  CDR3 for beta chain variable domain of TCR clone 113201 (TRBV3-1, TRBJ1-2)
CASSQDVIGWNGDYGYTF

SEQ ID NO: 226403 - protein, 15 aa, Homo sapiens
  CDR3 for alpha chain variable domain of TCR clone 113202 (TRAV13-2, TRAJ24)
CAENSATDSWGKLQF

SEQ ID NO: 226404 - protein, 13 aa, Homo sapiens
  CDR3 for beta chain variable domain of TCR clone 113202 (TRBV12-4, TRBJ1-2)
CASSLRQGKGYTF

SEQ ID NO: 226405 - protein, 13 aa, Homo sapiens
  CDR3 for alpha chain variable domain of TCR clone 113203 (TRAV30, TRAJ24)
CGTVTDSWGKLQF

SEQ ID NO: 226406 - protein, 12 aa, Homo sapiens
  CDR3 for beta chain variable domain of TCR clone 113203 (TRBV7-3, TRBJ2-2)
CASSLKRGDLVR

SEQ ID NO: 226407 - protein, 16 aa, Homo sapiens
  CDR3 for alpha chain variable domain of TCR clone 113204 (TRAV13-1, TRAJ48)
CAASIFGNFGNEKLTF

SEQ ID NO: 226408 - protein, 13 aa, Homo sapiens
  CDR3 for beta chain variable domain of TCR clone 113204 (TRBV28, TRBJ1-1)
CASSKQGWTEAFF

SEQ ID NO: 226409 - protein, 13 aa, Homo sapiens
  CDR3 for alpha chain variable domain of TCR clone 113205 (TRAV17, TRAJ9)
CATDYTGGFKTIF

SEQ ID NO: 226410 - protein, 16 aa, Homo sapiens
  CDR3 for beta chain variable domain of TCR clone 113205 (TRBV7-7, TRBJ2-1)
CASSLAIGTSYNEQFF

SEQ ID NO: 226411 - protein, 13 aa, Homo sapiens
  CDR3 for alpha chain variable domain of TCR clone 113206 (TRAV26-1, TRAJ33)
CIVRVEGNYQLIW

SEQ ID NO: 226412 - protein, 12 aa, Homo sapiens
  CDR3 for beta chain variable domain of TCR clone 113206 (TRBV7-2, TRBJ2-3)
CASGSSTDTQYF

SEQ ID NO: 226413 - protein, 13 aa, Homo sapiens
  CDR3 for alpha chain variable domain of TCR clone 113207 (TRAV2, TRAJ40)
CAVVTSGTYKYIF

SEQ ID NO: 226414 - protein, 18 aa, Homo sapiens
  CDR3 for beta chain variable domain of TCR clone 113207 (TRBV7-2, TRBJ2-2)
CASSLASRGAGGPGELFF

SEQ ID NO: 226415 - protein, 16 aa, Homo sapiens
  CDR3 for alpha chain variable domain of TCR clone 113208 (TRAV30, TRAJ24)
CGPEIVDADSWGKFQF

SEQ ID NO: 226416 - protein, 12 aa, Homo sapiens
  CDR3 for beta chain variable domain of TCR clone 113208 (TRBV11-2, TRBJ2-1)
CASSPGNNEQFF

SEQ ID NO: 226417 - protein, 12 aa, Homo sapiens
  CDR3 for alpha chain variable domain of TCR clone 113209 (TRAV35, TRAJ28)
GVEGAGSYQLTF

SEQ ID NO: 226418 - protein, 12 aa, Homo sapiens
  CDR3 for beta chain variable domain of TCR clone 113209 (TRBV11-2, TRBJ2-1)
CASSPGNNEQFF

SEQ ID NO: 226419 - protein, 14 aa, Homo sapiens
  CDR3 for alpha chain variable domain of TCR clone 113210 (TRAV12-1, TRAJ17)
CVVNYKAAGNKLTF

SEQ ID NO: 226420 - protein, 12 aa, Homo sapiens
  CDR3 for beta chain variable domain of TCR clone 113210 (TRBV11-2, TRBJ2-2)
CASSLPTGELFF

SEQ ID NO: 226421 - protein, 14 aa, Homo sapiens
  CDR3 for alpha chain variable domain of TCR clone 113211 (TRAV13-2, TRAJ17)
CAENSKAAGNKLTF

SEQ ID NO: 226422 - protein, 14 aa, Homo sapiens
  CDR3 for beta chain variable domain of TCR clone 113211 (TRBV19, TRBJ2-1)
CASPTFVLSGEQFC

SEQ ID NO: 226423 - protein, 12 aa, Homo sapiens
  CDR3 for alpha chain variable domain of TCR clone 113212 (TRAV12-2, TRAJ10)
WGVTGGGNKLTF

SEQ ID NO: 226424 - protein, 12 aa, Homo sapiens
  CDR3 for beta chain variable domain of TCR clone 113212 (TRBV12-4, TRBJ2-7)
CASSLGGYEQYF

SEQ ID NO: 226425 - protein, 11 aa, Homo sapiens
  CDR3 for alpha chain variable domain of TCR clone 113213 (TRAV27, TRAJ37)
CAGTPGGKLIF

SEQ ID NO: 226426 - protein, 14 aa, Homo sapiens
  CDR3 for beta chain variable domain of TCR clone 113213 (TRBV4-2, TRBJ2-1)
CASGLDRAYNEQFF

SEQ ID NO: 226427 - protein, 14 aa, Homo sapiens
  CDR3 for alpha chain variable domain of TCR clone 113214 (TRAV8-4, TRAJ48)
CAVSETFGNETLTF

SEQ ID NO: 226428 - protein, 14 aa, Homo sapiens
  CDR3 for beta chain variable domain of TCR clone 113214 (TRBV13, TRBJ2-7)
CASSLKGASYEQYF

SEQ ID NO: 226429 - protein, 14 aa, Homo sapiens
  CDR3 for alpha chain variable domain of TCR clone 113215 (TRAV8-6, TRAJ37)
CAVRSRSNTGKLIF

SEQ ID NO: 226430 - protein, 14 aa, Homo sapiens
  CDR3 for beta chain variable domain of TCR clone 113215 (TRBV7-2, TRBJ2-7)
CASSPKTSFYEQYF

SEQ ID NO: 226431 - protein, 12 aa, Homo sapiens
  CDR3 for alpha chain variable domain of TCR clone 113216 (TRAV12-3, TRAJ17)
CAMTLTGNKLTF

SEQ ID NO: 226432 - protein, 20 aa, Homo sapiens
  CDR3 for beta chain variable domain of TCR clone 113216 (TRBV7-8, TRBJ2-2)
CASSHLFPGPTIQITGELFF

SEQ ID NO: 226433 - protein, 16 aa, Homo sapiens
  CDR3 for alpha chain variable domain of TCR clone 113217 (TRAV14/DV4, TRAJ21)
CAMREGPENNFNKFYF

SEQ ID NO: 226434 - protein, 17 aa, Homo sapiens
  CDR3 for beta chain variable domain of TCR clone 113217 (TRBV20-1, TRBJ2-1)
CSASSSGLAGSYNEQFF

SEQ ID NO: 226435 - protein, 14 aa, Homo sapiens
  CDR3 for alpha chain variable domain of TCR clone 113218 (TRAV16, TRAJ31)
CALVAAWRQCQTHV

SEQ ID NO: 226436 - protein, 16 aa, Homo sapiens
  CDR3 for beta chain variable domain of TCR clone 113218 (TRBV28, TRBJ2-7)
CASSLFFETGGPEQYF

SEQ ID NO: 226437 - protein, 14 aa, Homo sapiens
  CDR3 for alpha chain variable domain of TCR clone 113219 (TRAV21, TRAJ35)
CAVMPIGFGNVLHC

SEQ ID NO: 226438 - protein, 12 aa, Homo sapiens
  CDR3 for beta chain variable domain of TCR clone 113219 (TRBV7-9, TRBJ2-7)
CASSNKREEQYF

SEQ ID NO: 226439 - protein, 15 aa, Homo sapiens
  CDR3 for alpha chain variable domain of TCR clone 113220 (TRAV12-3, TRAJ6)
CAMSATSGGSYIPTF

SEQ ID NO: 226440 - protein, 15 aa, Homo sapiens
  CDR3 for beta chain variable domain of TCR clone 113220 (TRBV5-1, TRBJ2-3)
CASSSTSGSTDTQYF

SEQ ID NO: 226441 - protein, 12 aa, Homo sapiens
  CDR3 for alpha chain variable domain of TCR clone 113221 (TRAV20, TRAJ49)
CAVRGPSNQFYF

SEQ ID NO: 226442 - protein, 15 aa, Homo sapiens
  CDR3 for beta chain variable domain of TCR clone 113221 (TRBV5-1, TRBJ2-5)
CASSRLGTVQETQYF

SEQ ID NO: 226443 - protein, 13 aa, Homo sapiens
  CDR3 for alpha chain variable domain of TCR clone 113222 (TRAV12-2, TRAJ3)
CAAPYSSASKTIF

SEQ ID NO: 226444 - protein, 18 aa, Homo sapiens
  CDR3 for beta chain variable domain of TCR clone 113222 (TRBV4-1, TRBJ1-5)
CASSQDPPGAGGNQPQHF

SEQ ID NO: 226445 - protein, 14 aa, Homo sapiens
  CDR3 for alpha chain variable domain of TCR clone 113223 (TRAV1-1, TRAJ27)
CAVIYNTNAGKSTF

SEQ ID NO: 226446 - protein, 15 aa, Homo sapiens
  CDR3 for beta chain variable domain of TCR clone 113223 (TRBV28, TRBJ2-4)
CAAGSGTLLMGIQYF

SEQ ID NO: 226447 - protein, 15 aa, Homo sapiens
  CDR3 for alpha chain variable domain of TCR clone 113224 (TRAV27, TRAJ50)
CAGVGRGTSYDKVIC

SEQ ID NO: 226448 - protein, 14 aa, Homo sapiens
  CDR3 for beta chain variable domain of TCR clone 113224 (TRBV7-2, TRBJ1-1)
CASSFYDLNTEAFF

SEQ ID NO: 226449 - protein, 13 aa, Homo sapiens
  CDR3 for alpha chain variable domain of TCR clone 113225 (TRAV16, TRAJ22)
SATLAGSARQLTF

SEQ ID NO: 226450 - protein, 18 aa, Homo sapiens
  CDR3 for beta chain variable domain of TCR clone 113225 (TRBV7-2, TRBJ2-3)
CASSLETSRGRKADTQYF

SEQ ID NO: 226451 - protein, 15 aa, Homo sapiens
  CDR3 for alpha chain variable domain of TCR clone 113226 (TRAV17, TRAJ23)
CATDAEDNQGGKLIF

SEQ ID NO: 226452 - protein, 16 aa, Homo sapiens
  CDR3 for beta chain variable domain of TCR clone 113226 (TRBV19, TRBJ2-5)
VSDRLPIFFLGETQYF

SEQ ID NO: 226453 - protein, 14 aa, Homo sapiens
  CDR3 for alpha chain variable domain of TCR clone 113227 (TRAV1-2, TRAJ16)
CAVNRFSDGQKLLF

SEQ ID NO: 226454 - protein, 13 aa, Homo sapiens
  CDR3 for beta chain variable domain of TCR clone 113227 (TRBV7-9, TRBJ1-2)
CASSLKQSYGYTF

SEQ ID NO: 226455 - protein, 13 aa, Homo sapiens
  CDR3 for alpha chain variable domain of TCR clone 113228 (TRAV21, TRAJ20)
CAVGVFADYKLSF

SEQ ID NO: 226456 - protein, 13 aa, Homo sapiens
  CDR3 for beta chain variable domain of TCR clone 113228 (TRBV19, TRBJ1-2)
CASSVPGQDGYTF

SEQ ID NO: 226457 - protein, 15 aa, Homo sapiens
  CDR3 for alpha chain variable domain of TCR clone 113229 (TRAV2, TRAJ20)
CAVDLRGSNDYKLSL

SEQ ID NO: 226458 - protein, 13 aa, Homo sapiens
  CDR3 for beta chain variable domain of TCR clone 113229 (TRBV2, TRBJ2-7)
CANGLAGDYEQYF

SEQ ID NO: 226459 - protein, 13 aa, Homo sapiens
  CDR3 for alpha chain variable domain of TCR clone 113230 (TRAV13-1, TRAJ53)
CAASKGSNYKLTF

SEQ ID NO: 226460 - protein, 14 aa, Homo sapiens
  CDR3 for beta chain variable domain of TCR clone 113230 (TRBV7-3, TRBJ2-7)
CASSLKADSYEQYF

SEQ ID NO: 226461 - protein, 15 aa, Homo sapiens
  CDR3 for alpha chain variable domain of TCR clone 113231 (TRAV8-1, TRAJ34)
CAVNSRTYNTDKLIF

SEQ ID NO: 226462 - protein, 14 aa, Homo sapiens
  CDR3 for beta chain variable domain of TCR clone 113231 (TRBV4-1, TRBJ2-2)
CASSQAVNTGELFF

SEQ ID NO: 226463 - protein, 15 aa, Homo sapiens
  CDR3 for alpha chain variable domain of TCR clone 113232 (TRAV8-3, TRAJ23)
CAVGDRYNLGGKLIF

SEQ ID NO: 226464 - protein, 22 aa, Homo sapiens
  CDR3 for beta chain variable domain of TCR clone 113232 (TRBV29-1, TRBJ2-5)
TVSNMSPEDSSIYLCSAGTQYF

SEQ ID NO: 226465 - protein, 13 aa, Homo sapiens
  CDR3 for alpha chain variable domain of TCR clone 113233 (TRAV25, TRAJ26)
CAGMDNYGQNFVF

SEQ ID NO: 226466 - protein, 14 aa, Homo sapiens
  CDR3 for beta chain variable domain of TCR clone 113233 (TRBV5-1, TRBJ2-7)
CASSRGESLYEQYF

SEQ ID NO: 226467 - protein, 15 aa, Homo sapiens
  CDR3 for alpha chain variable domain of TCR clone 113234 (TRAV17, TRAJ57)
CATDPSQGGSEKLVF

SEQ ID NO: 226468 - protein, 14 aa, Homo sapiens
  CDR3 for beta chain variable domain of TCR clone 113234 (TRBV12-5, TRBJ2-5)
CASGSRTHQETQYF

SEQ ID NO: 226469 - protein, 17 aa, Homo sapiens
  CDR3 for alpha chain variable domain of TCR clone 113235 (TRAV23/DV6, TRAJ57)
CAASSTLFQGGSEKLVF

SEQ ID NO: 226470 - protein, 14 aa, Homo sapiens
  CDR3 for beta chain variable domain of TCR clone 113235 (TRBV25-1, TRBJ1-1)
CASTHLGGNTEAFF

SEQ ID NO: 226471 - protein, 18 aa, Homo sapiens
  CDR3 for alpha chain variable domain of TCR clone 113236 (TRAV13-1, TRAJ52)
CAAKNPNAGGTSYGKLTF

SEQ ID NO: 226472 - protein, 18 aa, Homo sapiens
  CDR3 for beta chain variable domain of TCR clone 113236 (TRBV4-1, TRBJ1-4)
CASSPRTGGARTNEKLFF

SEQ ID NO: 226473 - protein, 16 aa, Homo sapiens
  CDR3 for alpha chain variable domain of TCR clone 113237 (TRAV30, TRAJ24)
CSTEIVDADSWGKFQF

SEQ ID NO: 226474 - protein, 15 aa, Homo sapiens
  CDR3 for beta chain variable domain of TCR clone 113237 (TRBV5-1, TRBJ1-1)
CASSSTTGTNTEAFF

SEQ ID NO: 226475 - protein, 12 aa, Homo sapiens
  CDR3 for alpha chain variable domain of TCR clone 113238 (TRAV13-1, TRAJ20)
CAASMGDYKLSF

SEQ ID NO: 226476 - protein, 15 aa, Homo sapiens
  CDR3 for beta chain variable domain of TCR clone 113238 (TRBV11-3, TRBJ2-3)
CASNGGLDSTDTQYL

SEQ ID NO: 226477 - protein, 17 aa, Homo sapiens
  CDR3 for alpha chain variable domain of TCR clone 113239 (TRAV27, TRAJ26)
CAGARAPLDNYGQSFVF

SEQ ID NO: 226478 - protein, 15 aa, Homo sapiens
  CDR3 for beta chain variable domain of TCR clone 113239 (TRBV11-2, TRBJ2-5)
CASSPRSGGLETQYF

SEQ ID NO: 226479 - protein, 16 aa, Homo sapiens
  CDR3 for alpha chain variable domain of TCR clone 113240 (TRAV12-3, TRAJ53)
CAMSPGRGGSNYNLTF

SEQ ID NO: 226480 - protein, 11 aa, Homo sapiens
  CDR3 for beta chain variable domain of TCR clone 113240 (TRBV29-1, TRBJ2-5)
CSEDRTGTQYF

SEQ ID NO: 226481 - protein, 13 aa, Homo sapiens
  CDR3 for alpha chain variable domain of TCR clone 113241 (TRAV2, TRAJ15)
CAVASQAGTALIF

SEQ ID NO: 226482 - protein, 12 aa, Homo sapiens
  CDR3 for beta chain variable domain of TCR clone 113241 (TRBV7-9, TRBJ2-7)
CASSIKREEQYF

SEQ ID NO: 226483 - protein, 12 aa, Homo sapiens
  CDR3 for alpha chain variable domain of TCR clone 113242 (TRAV35, TRAJ30)
CAGLNRDDKIIF

SEQ ID NO: 226484 - protein, 15 aa, Homo sapiens
  CDR3 for beta chain variable domain of TCR clone 113242 (TRBV18, TRBJ2-3)
CASSPLAGETETQYF

SEQ ID NO: 226485 - protein, 14 aa, Homo sapiens
  CDR3 for alpha chain variable domain of TCR clone 113243 (TRAV12-3, TRAJ10)
SHLPRTGGGNKLTF

SEQ ID NO: 226486 - protein, 14 aa, Homo sapiens
  CDR3 for beta chain variable domain of TCR clone 113243 (TRBV6-1, TRBJ1-3)
CASVQGGGGNTIYF

SEQ ID NO: 226487 - protein, 13 aa, Homo sapiens
  CDR3 for alpha chain variable domain of TCR clone 113244 (TRAV8-1, TRAJ15)
CAVKNQAGTALIF

SEQ ID NO: 226488 - protein, 15 aa, Homo sapiens
  CDR3 for beta chain variable domain of TCR clone 113244 (TRBV7-3, TRBJ2-7)
CGSSLTPTGYDEQYF

SEQ ID NO: 226489 - protein, 16 aa, Homo sapiens
  CDR3 for alpha chain variable domain of TCR clone 113245 (TRAV8-3, TRAJ52)
CAVQPAGVTSYGKLTF

SEQ ID NO: 226490 - protein, 15 aa, Homo sapiens
  CDR3 for beta chain variable domain of TCR clone 113245 (TRBV11-2, TRBJ2-7)
CASSLAGGVATEQYF

SEQ ID NO: 226491 - protein, 13 aa, Homo sapiens
  CDR3 for alpha chain variable domain of TCR clone 113246 (TRAV8-3, TRAJ43)
CAVGPDNNNDMRF

SEQ ID NO: 226492 - protein, 12 aa, Homo sapiens
  CDR3 for beta chain variable domain of TCR clone 113246 (TRBV7-2, TRBJ1-6)
CASSLSISPLHF

SEQ ID NO: 226493 - protein, 11 aa, Homo sapiens
  CDR3 for alpha chain variable domain of TCR clone 113247 (TRAV12-1, TRAJ30)
CVVNGQDKIIF

SEQ ID NO: 226494 - protein, 12 aa, Homo sapiens
  CDR3 for beta chain variable domain of TCR clone 113247 (TRBV27, TRBJ2-2)
CASKLFIGELFF

SEQ ID NO: 226495 - protein, 14 aa, Homo sapiens
  CDR3 for alpha chain variable domain of TCR clone 113248 (TRAV13-2, TRAJ5)
CAENMDTGRRALTF

SEQ ID NO: 226496 - protein, 14 aa, Homo sapiens
  CDR3 for beta chain variable domain of TCR clone 113248 (TRBV18, TRBJ2-7)
CASSPRGGAYEQYF

SEQ ID NO: 226497 - protein, 12 aa, Homo sapiens
  CDR3 for alpha chain variable domain of TCR clone 113249 (TRAV12-3, TRAJ21)
CAMFNNFNKFYF

SEQ ID NO: 226498 - protein, 13 aa, Homo sapiens
  CDR3 for beta chain variable domain of TCR clone 113249 (TRBV7-3, TRBJ1-1)
CASSQDWGAEAFF

SEQ ID NO: 226499 - protein, 15 aa, Homo sapiens
  CDR3 for alpha chain variable domain of TCR clone 113250 (TRAV8-3, TRAJ45)
CASSYSGGGADGPTF

SEQ ID NO: 226500 - protein, 15 aa, Homo sapiens
  CDR3 for beta chain variable domain of TCR clone 113250 (TRBV27, TRBJ2-1)
CASSNGGGSSNEQFF

SEQ ID NO: 226501 - protein, 13 aa, Homo sapiens
  CDR3 for alpha chain variable domain of TCR clone 113251 (TRAV2, TRAJ36)
CAVDQTGANNLFF

SEQ ID NO: 226502 - protein, 12 aa, Homo sapiens
  CDR3 for beta chain variable domain of TCR clone 113251 (TRBV19, TRBJ1-1)
CASMNRYTESFF

SEQ ID NO: 226503 - protein, 16 aa, Homo sapiens
  CDR3 for alpha chain variable domain of TCR clone 113252 (TRAV30, TRAJ24)
CGTEIVDADSSGKFQF

SEQ ID NO: 226504 - protein, 12 aa, Homo sapiens
  CDR3 for beta chain variable domain of TCR clone 113252 (TRBV11-2, TRBJ2-2)
CASSLGGGELFF

SEQ ID NO: 226505 - protein, 14 aa, Homo sapiens
  CDR3 for alpha chain variable domain of TCR clone 113253 (TRAV13-1, TRAJ20)
CAARPGSNDYKLSF

SEQ ID NO: 226506 - protein, 14 aa, Homo sapiens
  CDR3 for beta chain variable domain of TCR clone 113253 (TRBV4-1, TRBJ2-2)
CASSQAVNTGELFF

SEQ ID NO: 226507 - protein, 15 aa, Homo sapiens
  CDR3 for alpha chain variable domain of TCR clone 113254 (TRAV8-4, TRAJ10)
CAVSDGPGGGNKRTF

SEQ ID NO: 226508 - protein, 13 aa, Homo sapiens
  CDR3 for beta chain variable domain of TCR clone 113254 (TRBV28, TRBJ1-3)
CASSFLGSGTIYF

SEQ ID NO: 226509 - protein, 14 aa, Homo sapiens
  CDR3 for alpha chain variable domain of TCR clone 113255 (TRAV8-3, TRAJ4)
CAVGAAGGYNKLIF

SEQ ID NO: 226510 - protein, 15 aa, Homo sapiens
  CDR3 for beta chain variable domain of TCR clone 113255 (TRBV6-5, TRBJ2-1)
YASSYDAGAGNEQFF

SEQ ID NO: 226511 - protein, 18 aa, Homo sapiens
  CDR3 for alpha chain variable domain of TCR clone 113256 (TRAV21, TRAJ52)
CAVRPSPAGGTSDGKLTF

SEQ ID NO: 226512 - protein, 13 aa, Homo sapiens
  CDR3 for beta chain variable domain of TCR clone 113256 (TRBV29-1, TRBJ2-2)
CSVYREDTGELFF

SEQ ID NO: 226513 - protein, 14 aa, Homo sapiens
  CDR3 for alpha chain variable domain of TCR clone 113257 (TRAV13-1, TRAJ36)
CAASINTGAKNLFF

SEQ ID NO: 226514 - protein, 18 aa, Homo sapiens
  CDR3 for beta chain variable domain of TCR clone 113257 (TRBV20-1, TRBJ2-3)
CSARDPWGQGLSTDTQYF

SEQ ID NO: 226515 - protein, 13 aa, Homo sapiens
  CDR3 for alpha chain variable domain of TCR clone 113258 (TRAV27, TRAJ43)
CAGAGNNNNDMSF

SEQ ID NO: 226516 - protein, 14 aa, Homo sapiens
  CDR3 for beta chain variable domain of TCR clone 113258 (TRBV7-2, TRBJ2-7)
CASRSQGAAYEQYF

SEQ ID NO: 226517 - protein, 13 aa, Homo sapiens
  CDR3 for alpha chain variable domain of TCR clone 113259 (TRAV6, TRAJ16)
CALDDSDGQKLLF

SEQ ID NO: 226518 - protein, 15 aa, Homo sapiens
  CDR3 for beta chain variable domain of TCR clone 113259 (TRBV20-1, TRBJ2-7)
CSARDRVSGMDEQYF

SEQ ID NO: 226519 - protein, 11 aa, Homo sapiens
  CDR3 for alpha chain variable domain of TCR clone 113260 (TRAV2, TRAJ13)
CASGGYQKVTF

SEQ ID NO: 226520 - protein, 15 aa, Homo sapiens
  CDR3 for beta chain variable domain of TCR clone 113260 (TRBV7-9, TRBJ1-1)
CASSLLEQGGTEAFF

SEQ ID NO: 226521 - protein, 14 aa, Homo sapiens
  CDR3 for alpha chain variable domain of TCR clone 113261 (TRAV1-2, TRAJ16)
CAVNWFSDGQKLLF

SEQ ID NO: 226522 - protein, 15 aa, Homo sapiens
  CDR3 for beta chain variable domain of TCR clone 113261 (TRBV11-2, TRBJ2-2)
CASSSDRVNAGELFF

SEQ ID NO: 226523 - protein, 15 aa, Homo sapiens
  CDR3 for alpha chain variable domain of TCR clone 113262 (TRAV8-3, TRAJ23)
CAVGDRYNQGGKLIF

SEQ ID NO: 226524 - protein, 22 aa, Homo sapiens
  CDR3 for beta chain variable domain of TCR clone 113262 (TRBV29-1, TRBJ2-5)
TVSNMSHEDSSIYLCSAGTQYF

SEQ ID NO: 226525 - protein, 16 aa, Homo sapiens
  CDR3 for alpha chain variable domain of TCR clone 113263 (TRAV20, TRAJ10)
CAVLRGLTGGGNKLTC

SEQ ID NO: 226526 - protein, 14 aa, Homo sapiens
  CDR3 for beta chain variable domain of TCR clone 113263 (TRBV19, TRBJ1-5)
CASRAPDSFLSQHF

SEQ ID NO: 226527 - protein, 11 aa, Homo sapiens
  CDR3 for alpha chain variable domain of TCR clone 113264 (TRAV3, TRAJ21)
CAVGNFNKFYF

SEQ ID NO: 226528 - protein, 12 aa, Homo sapiens
  CDR3 for beta chain variable domain of TCR clone 113264 (TRBV20-1, TRBJ1-2)
CSASREDYGYTF

SEQ ID NO: 226529 - protein, 14 aa, Homo sapiens
  CDR3 for alpha chain variable domain of TCR clone 113265 (TRAV12-2, TRAJ17)
CAVLFKAAGNKLTF

SEQ ID NO: 226530 - protein, 17 aa, Homo sapiens
  CDR3 for beta chain variable domain of TCR clone 113265 (TRBV19, TRBJ1-1)
CASSIAGRGLMNTEAFF

SEQ ID NO: 226531 - protein, 13 aa, Homo sapiens
  CDR3 for alpha chain variable domain of TCR clone 113266 (TRAV13-1, TRAJ9)
CAARITGGFKTIF

SEQ ID NO: 226532 - protein, 13 aa, Homo sapiens
  CDR3 for beta chain variable domain of TCR clone 113266 (TRBV7-9, TRBJ2-3)
CASSPGSTDTQYF

SEQ ID NO: 226533 - protein, 14 aa, Homo sapiens
  CDR3 for alpha chain variable domain of TCR clone 113267 (TRAV8-6, TRAJ30)
CAVRPVNRDDKIIF

SEQ ID NO: 226534 - protein, 17 aa, Homo sapiens
  CDR3 for beta chain variable domain of TCR clone 113267 (TRBV7-8, TRBJ2-6)
CASSAGTGGAGANGLTF

SEQ ID NO: 226535 - protein, 15 aa, Homo sapiens
  CDR3 for alpha chain variable domain of TCR clone 113268 (TRAV8-6, TRAJ6)
CAVSGESGGGYIPTF

SEQ ID NO: 226536 - protein, 14 aa, Homo sapiens
  CDR3 for beta chain variable domain of TCR clone 113268 (TRBV7-9, TRBJ2-1)
CASSSMVGFGEQFF

SEQ ID NO: 226537 - protein, 14 aa, Homo sapiens
  CDR3 for alpha chain variable domain of TCR clone 113269 (TRAV8-6, TRAJ6)
CAVSSSGGSYIPTF

SEQ ID NO: 226538 - protein, 12 aa, Homo sapiens
  CDR3 for beta chain variable domain of TCR clone 113269 (TRBV11-2, TRBJ2-2)
CASSLGGGELFF

SEQ ID NO: 226539 - protein, 14 aa, Homo sapiens
  CDR3 for alpha chain variable domain of TCR clone 113270 (TRAV12-2, TRAJ40)
CAVKIHSGTYKYIF

SEQ ID NO: 226540 - protein, 13 aa, Homo sapiens
  CDR3 for beta chain variable domain of TCR clone 113270 (TRBV7-9, TRBJ1-2)
CASSLKQNYGYTF

SEQ ID NO: 226541 - protein, 15 aa, Homo sapiens
  CDR3 for alpha chain variable domain of TCR clone 113271 (TRAV26-1, TRAJ15)
CIVRAANQAGTALIF

SEQ ID NO: 226542 - protein, 15 aa, Homo sapiens
  CDR3 for beta chain variable domain of TCR clone 113271 (TRBV7-2, TRBJ1-2)
CASSPRAGWNYGYTF

SEQ ID NO: 226543 - protein, 16 aa, Homo sapiens
  CDR3 for alpha chain variable domain of TCR clone 113272 (TRAV30, TRAJ24)
CGTEIVDADSWGKFQF

SEQ ID NO: 226544 - protein, 15 aa, Homo sapiens
  CDR3 for beta chain variable domain of TCR clone 113272 (TRBV19, TRBJ1-2)
CASNDGTGKDYGYTF

SEQ ID NO: 226545 - protein, 13 aa, Homo sapiens
  CDR3 for alpha chain variable domain of TCR clone 113273 (TRAV20, TRAJ21)
FAVEGYNFNKFYF

SEQ ID NO: 226546 - protein, 14 aa, Homo sapiens
  CDR3 for beta chain variable domain of TCR clone 113273 (TRBV3-1, TRBJ2-5)
CASSQGPDQETQYF

SEQ ID NO: 226547 - protein, 14 aa, Homo sapiens
  CDR3 for alpha chain variable domain of TCR clone 113274 (TRAV13-2, TRAJ22)
CADGNLGSARQLTF

SEQ ID NO: 226548 - protein, 15 aa, Homo sapiens
  CDR3 for beta chain variable domain of TCR clone 113274 (TRBV6-3, TRBJ2-7)
CASSSPGTVFYEQYF

SEQ ID NO: 226549 - protein, 15 aa, Homo sapiens
  CDR3 for alpha chain variable domain of TCR clone 113275 (TRAV3, TRAJ22)
CAVRDRGGSARQLTF

SEQ ID NO: 226550 - protein, 13 aa, Homo sapiens
  CDR3 for beta chain variable domain of TCR clone 113275 (TRBV2, TRBJ1-5)
CATAGPGNQHQHF

SEQ ID NO: 226551 - protein, 13 aa, Homo sapiens
  CDR3 for alpha chain variable domain of TCR clone 113276 (TRAV8-6, TRAJ49)
CAVSGQTGNQFYF

SEQ ID NO: 226552 - protein, 13 aa, Homo sapiens
  CDR3 for beta chain variable domain of TCR clone 113276 (TRBV10-2, TRBJ2-7)
CASSAESPHEQYF

SEQ ID NO: 226553 - protein, 14 aa, Homo sapiens
  CDR3 for alpha chain variable domain of TCR clone 113277 (TRAV29/DV5, TRAJ5)
CAASGDTGRRALTF

SEQ ID NO: 226554 - protein, 13 aa, Homo sapiens
  CDR3 for beta chain variable domain of TCR clone 113277 (TRBV19, TRBJ2-2)
CASSIWSTGELFF

SEQ ID NO: 226555 - protein, 12 aa, Homo sapiens
  CDR3 for alpha chain variable domain of TCR clone 113278 (TRAV2, TRAJ10)
CASTGGGNKLTF

SEQ ID NO: 226556 - protein, 15 aa, Homo sapiens
  CDR3 for beta chain variable domain of TCR clone 113278 (TRBV28, TRBJ1-1)
CASTSTRGLNTEAFF

SEQ ID NO: 226557 - protein, 12 aa, Homo sapiens
  CDR3 for alpha chain variable domain of TCR clone 113279 (TRAV12-3, TRAJ5)
CAMDTGRRELTF

SEQ ID NO: 226558 - protein, 13 aa, Homo sapiens
  CDR3 for beta chain variable domain of TCR clone 113279 (TRBV7-7, TRBJ2-2)
CASSLTSAGELFF

SEQ ID NO: 226559 - protein, 14 aa, Homo sapiens
  CDR3 for alpha chain variable domain of TCR clone 113280 (TRAV12-2, TRAJ45)
CAIPERGGADGLTF

SEQ ID NO: 226560 - protein, 14 aa, Homo sapiens
  CDR3 for beta chain variable domain of TCR clone 113280 (TRBV18, TRBJ1-5)
CASSPGNSNQPQHF

SEQ ID NO: 226561 - protein, 10 aa, Homo sapiens
  CDR3 for alpha chain variable domain of TCR clone 113281 (TRAV13-1, TRAJ43)
CAASKNDMRF

SEQ ID NO: 226562 - protein, 14 aa, Homo sapiens
  CDR3 for beta chain variable domain of TCR clone 113281 (TRBV7-8, TRBJ2-5)
CASSATGGQETQYF

SEQ ID NO: 226563 - protein, 12 aa, Homo sapiens
  CDR3 for alpha chain variable domain of TCR clone 113282 (TRAV16, TRAJ56)
CAPTGANSKLTF

SEQ ID NO: 226564 - protein, 17 aa, Homo sapiens
  CDR3 for beta chain variable domain of TCR clone 113282 (TRBV27, TRBJ2-6)
RASSLTGFASGANVLTF

SEQ ID NO: 226565 - protein, 14 aa, Homo sapiens
  CDR3 for alpha chain variable domain of TCR clone 113283 (TRAV17, TRAJ32)
CATDPGGATNKLIF

SEQ ID NO: 226566 - protein, 14 aa, Homo sapiens
  CDR3 for beta chain variable domain of TCR clone 113283 (TRBV2, TRBJ1-5)
CASSENRGGQPQQF

SEQ ID NO: 226567 - protein, 14 aa, Homo sapiens
  CDR3 for alpha chain variable domain of TCR clone 113284 (TRAV9-2, TRAJ39)
CALYIYNAGTMLTF

SEQ ID NO: 226568 - protein, 13 aa, Homo sapiens
  CDR3 for beta chain variable domain of TCR clone 113284 (TRBV12-4, TRBJ1-3)
CASSLASGNTIYF

SEQ ID NO: 226569 - protein, 13 aa, Homo sapiens
  CDR3 for alpha chain variable domain of TCR clone 113285 (TRAV8-6, TRAJ21)
CAVSPSSLTKFYF

SEQ ID NO: 226570 - protein, 14 aa, Homo sapiens
  CDR3 for beta chain variable domain of TCR clone 113285 (TRBV7-9, TRBJ2-5)
CASSLDTAQETQYF

SEQ ID NO: 226571 - protein, 14 aa, Homo sapiens
  CDR3 for alpha chain variable domain of TCR clone 113286 (TRAV12-2, TRAJ13)
CAVKKTGGYQKVTF

SEQ ID NO: 226572 - protein, 14 aa, Homo sapiens
  CDR3 for beta chain variable domain of TCR clone 113286 (TRBV11-1, TRBJ2-7)
CASSFRQGSYEQYF

SEQ ID NO: 226573 - protein, 13 aa, Homo sapiens
  CDR3 for alpha chain variable domain of TCR clone 113287 (TRAV3, TRAJ20)
CAVRDTPSYKLSF

SEQ ID NO: 226574 - protein, 16 aa, Homo sapiens
  CDR3 for beta chain variable domain of TCR clone 113287 (TRBV20-1, TRBJ2-7)
CSARAPGLALSYEQYF

SEQ ID NO: 226575 - protein, 16 aa, Homo sapiens
  CDR3 for alpha chain variable domain of TCR clone 113288 (TRAV30, TRAJ24)
CGTEIVDADSWGKFQF

SEQ ID NO: 226576 - protein, 15 aa, Homo sapiens
  CDR3 for beta chain variable domain of TCR clone 113288 (TRBV5-7, TRBJ1-5)
CASSYGKLWDQPQHF

SEQ ID NO: 226577 - protein, 16 aa, Homo sapiens
  CDR3 for alpha chain variable domain of TCR clone 113289 (TRAV16, TRAJ52)
CVLSAAGGTSYGKLTF

SEQ ID NO: 226578 - protein, 12 aa, Homo sapiens
  CDR3 for beta chain variable domain of TCR clone 113289 (TRBV12-4, TRBJ1-3)
CASSFSGNTIYF

SEQ ID NO: 226579 - protein, 13 aa, Homo sapiens
  CDR3 for alpha chain variable domain of TCR clone 113290 (TRAV25, TRAJ40)
CAGRTGGGNKLTF

SEQ ID NO: 226580 - protein, 15 aa, Homo sapiens
  CDR3 for beta chain variable domain of TCR clone 113290 (TRBV19, TRBJ2-1)
CASSSPGVPLDEQFF

SEQ ID NO: 226581 - protein, 14 aa, Homo sapiens
  CDR3 for alpha chain variable domain of TCR clone 113291 (TRAV13-1, TRAJ44)
CAAKATGTASKLTF

SEQ ID NO: 226582 - protein, 15 aa, Homo sapiens
  CDR3 for beta chain variable domain of TCR clone 113291 (TRBV19, TRBJ2-1)
CASIKGREPYNEQFF

SEQ ID NO: 226583 - protein, 16 aa, Homo sapiens
  CDR3 for alpha chain variable domain of TCR clone 113292 (TRAV3, TRAJ10)
CAVIDMRAGGGNKLTF

SEQ ID NO: 226584 - protein, 15 aa, Homo sapiens
  CDR3 for beta chain variable domain of TCR clone 113292 (TRBV6-3, TRBJ2-7)
CASSSPGTVFYEQYF

SEQ ID NO: 226585 - protein, 14 aa, Homo sapiens
  CDR3 for alpha chain variable domain of TCR clone 113293 (TRAV13-1, TRAJ31)
CAESSRPNNARLMF

SEQ ID NO: 226586 - protein, 15 aa, Homo sapiens
  CDR3 for beta chain variable domain of TCR clone 113293 (TRBV4-2, TRBJ2-4)
CASSPLGAAKNIQYF

SEQ ID NO: 226587 - protein, 13 aa, Homo sapiens
  CDR3 for alpha chain variable domain of TCR clone 113294 (TRAV20, TRAJ21)
CAVEGYNFNKFYF

SEQ ID NO: 226588 - protein, 12 aa, Homo sapiens
  CDR3 for beta chain variable domain of TCR clone 113294 (TRBV12-4, TRBJ2-1)
CASSPGRNEQFF

SEQ ID NO: 226589 - protein, 13 aa, Homo sapiens
  CDR3 for alpha chain variable domain of TCR clone 113295 (TRAV27, TRAJ57)
CRSAQGGSETLVF

SEQ ID NO: 226590 - protein, 11 aa, Homo sapiens
  CDR3 for beta chain variable domain of TCR clone 113295 (TRBV11-2, TRBJ1-1)
CASSINTEAFF

SEQ ID NO: 226591 - protein, 16 aa, Homo sapiens
  CDR3 for alpha chain variable domain of TCR clone 113296 (TRAV3, TRAJ10)
CVVRDMRAGGGNKLTF

SEQ ID NO: 226592 - protein, 14 aa, Homo sapiens
  CDR3 for beta chain variable domain of TCR clone 113296 (TRBV25-1, TRBJ1-1)
CASTHLGGNTEAFF

SEQ ID NO: 226593 - protein, 11 aa, Homo sapiens
  CDR3 for alpha chain variable domain of TCR clone 113297 (TRAV1-2, TRAJ11)
CAVRGYSTLTF

SEQ ID NO: 226594 - protein, 15 aa, Homo sapiens
  CDR3 for beta chain variable domain of TCR clone 113297 (TRBV10-2, TRBJ2-6)
CASSEQGTGANVLTF

SEQ ID NO: 226595 - protein, 16 aa, Homo sapiens
  CDR3 for alpha chain variable domain of TCR clone 113298 (TRAV26-2, TRAJ48)
CILRPPFNFGNGKLTF

SEQ ID NO: 226596 - protein, 15 aa, Homo sapiens
  CDR3 for beta chain variable domain of TCR clone 113298 (TRBV20-1, TRBJ2-3)
CSARVEGTYTDTQYF

SEQ ID NO: 226597 - protein, 23 aa, Homo sapiens
  CDR3 for alpha chain variable domain of TCR clone 113299 (TRAV26-1, TRAJ38)
CIADNAGNNHIQNPDPAVYQLQD

SEQ ID NO: 226598 - protein, 13 aa, Homo sapiens
  CDR3 for beta chain variable domain of TCR clone 113299 (TRBV20-1, TRBJ1-1)
CSARGGGNTEAFF

SEQ ID NO: 226599 - protein, 13 aa, Homo sapiens
  CDR3 for alpha chain variable domain of TCR clone 113300 (TRAV12-1, TRAJ34)
CVVTGHNTDKLIF

SEQ ID NO: 226600 - protein, 13 aa, Homo sapiens
  CDR3 for beta chain variable domain of TCR clone 113300 (TRBV28, TRBJ2-7)
CASKAGGVYEQYF

SEQ ID NO: 226601 - protein, 12 aa, Homo sapiens
  CDR3 for alpha chain variable domain of TCR clone 113301 (TRAV1-2, TRAJ9)
CAGYTGGFKTMF

SEQ ID NO: 226602 - protein, 15 aa, Homo sapiens
  CDR3 for beta chain variable domain of TCR clone 113301 (TRBV11-2, TRBJ2-1)
CASSPAGQSLNEQFF

SEQ ID NO: 226603 - protein, 15 aa, Homo sapiens
  CDR3 for alpha chain variable domain of TCR clone 113302 (TRAV13-1, TRAJ45)
CAASGSGGGADGRTF

SEQ ID NO: 226604 - protein, 14 aa, Homo sapiens
  CDR3 for beta chain variable domain of TCR clone 113302 (TRBV12-4, TRBJ1-2)
CASSFVGTAYGYTF

SEQ ID NO: 226605 - protein, 11 aa, Homo sapiens
  CDR3 for alpha chain variable domain of TCR clone 113303 (TRAV2, TRAJ33)
CAVESNYQLIW

SEQ ID NO: 226606 - protein, 15 aa, Homo sapiens
  CDR3 for beta chain variable domain of TCR clone 113303 (TRBV2, TRBJ2-1)
CASSEEREGDNEQFF

SEQ ID NO: 226607 - protein, 13 aa, Homo sapiens
  CDR3 for alpha chain variable domain of TCR clone 113304 (TRAV12-1, TRAJ39)
CVVPQRAGNMLTF

SEQ ID NO: 226608 - protein, 13 aa, Homo sapiens
  CDR3 for beta chain variable domain of TCR clone 113304 (TRBV10-3, TRBJ2-7)
CASKLAVNYEQYF

SEQ ID NO: 226609 - protein, 15 aa, Homo sapiens
  CDR3 for alpha chain variable domain of TCR clone 113305 (TRAV3, TRAJ22)
CAVRDRGGSARQRTF

SEQ ID NO: 226610 - protein, 17 aa, Homo sapiens
  CDR3 for beta chain variable domain of TCR clone 113305 (TRBV28, TRBJ2-5)
CASSTPEGDALQETQYF

SEQ ID NO: 226611 - protein, 17 aa, Homo sapiens
  CDR3 for alpha chain variable domain of TCR clone 113306 (TRAV26-1, TRAJ53)
CIVRVDDRGGSNYKLTF

SEQ ID NO: 226612 - protein, 15 aa, Homo sapiens
  CDR3 for beta chain variable domain of TCR clone 113306 (TRBV20-1, TRBJ1-2)
CSARDPLRQGYGYTF

SEQ ID NO: 226613 - protein, 13 aa, Homo sapiens
  CDR3 for alpha chain variable domain of TCR clone 113307 (TRAV29/DV5, TRAJ31)
CAASRNNNARLMF

SEQ ID NO: 226614 - protein, 13 aa, Homo sapiens
  CDR3 for beta chain variable domain of TCR clone 113307 (TRBV14, TRBJ2-7)
CASSQDRRYEQYF

SEQ ID NO: 226615 - protein, 11 aa, Homo sapiens
  CDR3 for alpha chain variable domain of TCR clone 113308 (TRAV1-1, TRAJ23)
CAVRQGGKLIF

SEQ ID NO: 226616 - protein, 20 aa, Homo sapiens
  CDR3 for beta chain variable domain of TCR clone 113308 (TRBV7-8, TRBJ2-2)
CARSHLFPGPTIHLTGELFF

SEQ ID NO: 226617 - protein, 11 aa, Homo sapiens
  CDR3 for alpha chain variable domain of TCR clone 113309 (TRAV3, TRAJ18)
CAVRDGRGSTL

SEQ ID NO: 226618 - protein, 15 aa, Homo sapiens
  CDR3 for beta chain variable domain of TCR clone 113309 (TRBV7-9, TRBJ1-6)
CASSSPGRGNSPLHF

SEQ ID NO: 226619 - protein, 12 aa, Homo sapiens
  CDR3 for alpha chain variable domain of TCR clone 113310 (TRAV38-1, TRAJ47)
CAFETYGNKLVF

SEQ ID NO: 226620 - protein, 14 aa, Homo sapiens
  CDR3 for beta chain variable domain of TCR clone 113310 (TRBV5-5, TRBJ1-5)
CASSGQGVDQPQHF

SEQ ID NO: 226621 - protein, 14 aa, Homo sapiens
  CDR3 for alpha chain variable domain of TCR clone 113311 (TRAV8-4, TRAJ48)
CAVSETFGNEKLTF

SEQ ID NO: 226622 - protein, 14 aa, Homo sapiens
  CDR3 for beta chain variable domain of TCR clone 113311 (TRBV13, TRBJ2-7)
CASSLKGASYGQYF

SEQ ID NO: 226623 - protein, 13 aa, Homo sapiens
  CDR3 for alpha chain variable domain of TCR clone 113312 (TRAV21, TRAJ15)
CAVANQAGTALIF

SEQ ID NO: 226624 - protein, 15 aa, Homo sapiens
  CDR3 for beta chain variable domain of TCR clone 113312 (TRBV2, TRBJ2-7)
CASSEGLARSYEQYF

SEQ ID NO: 226625 - protein, 13 aa, Homo sapiens
  CDR3 for alpha chain variable domain of TCR clone 113313 (TRAV2, TRAJ13)
CAVESGGYQKVTF

SEQ ID NO: 226626 - protein, 15 aa, Homo sapiens
  CDR3 for beta chain variable domain of TCR clone 113313 (TRBV28, TRBJ2-1)
CASSIIAGGRSEQFF

SEQ ID NO: 226627 - protein, 10 aa, Homo sapiens
  CDR3 for alpha chain variable domain of TCR clone 113314 (TRAV13-1, TRAJ52)
CAASKRSAVV

SEQ ID NO: 226628 - protein, 13 aa, Homo sapiens
  CDR3 for beta chain variable domain of TCR clone 113314 (TRBV12-4, TRBJ1-2)
CASSLRQGKGYTF

SEQ ID NO: 226629 - protein, 13 aa, Homo sapiens
  CDR3 for alpha chain variable domain of TCR clone 113315 (TRAV13-1, TRAJ11)
CAAVLAGYSTLTF

SEQ ID NO: 226630 - protein, 17 aa, Homo sapiens
  CDR3 for beta chain variable domain of TCR clone 113315 (TRBV25-1, TRBJ2-7)
CASSDARVAFSSYEQYF

SEQ ID NO: 226631 - protein, 14 aa, Homo sapiens
  CDR3 for alpha chain variable domain of TCR clone 113316 (TRAV13-1, TRAJ24)
CAASRTDSCGKLQF

SEQ ID NO: 226632 - protein, 15 aa, Homo sapiens
  CDR3 for beta chain variable domain of TCR clone 113316 (TRBV7-9, TRBJ1-5)
CASSQGHQPNQPQHF

SEQ ID NO: 226633 - protein, 13 aa, Homo sapiens
  CDR3 for alpha chain variable domain of TCR clone 113317 (TRAV21, TRAJ27)
CAARPGNAGESTF

SEQ ID NO: 226634 - protein, 13 aa, Homo sapiens
  CDR3 for beta chain variable domain of TCR clone 113317 (TRBV13, TRBJ2-1)
CASILGGRGEQFF

SEQ ID NO: 226635 - protein, 10 aa, Homo sapiens
  CDR3 for alpha chain variable domain of TCR clone 113318 (TRAV1-2, TRAJ31)
CVSEDARLMV

SEQ ID NO: 226636 - protein, 14 aa, Homo sapiens
  CDR3 for beta chain variable domain of TCR clone 113318 (TRBV19, TRBJ2-1)
CASPTFVLSGEQFF

SEQ ID NO: 226637 - protein, 13 aa, Homo sapiens
  CDR3 for alpha chain variable domain of TCR clone 113319 (TRAV12-3, TRAJ13)
CAMTSGGYEKVTF

SEQ ID NO: 226638 - protein, 13 aa, Homo sapiens
  CDR3 for beta chain variable domain of TCR clone 113319 (TRBV20-1, TRBJ2-2)
CSALSGGAGELFF

SEQ ID NO: 226639 - protein, 11 aa, Homo sapiens
  CDR3 for alpha chain variable domain of TCR clone 113320 (TRAV21, TRAJ41)
CAVRSGYALNF

SEQ ID NO: 226640 - protein, 13 aa, Homo sapiens
  CDR3 for beta chain variable domain of TCR clone 113320 (TRBV7-9, TRBJ1-2)
CASSLKQNYAYTF

SEQ ID NO: 226641 - protein, 12 aa, Homo sapiens
  CDR3 for alpha chain variable domain of TCR clone 113321 (TRAV12-2, TRAJ9)
CAVNTGGFKTIF

SEQ ID NO: 226642 - protein, 15 aa, Homo sapiens
  CDR3 for beta chain variable domain of TCR clone 113321 (TRBV20-1, TRBJ2-7)
CSARDRVSGMDEQYF

SEQ ID NO: 226643 - protein, 16 aa, Homo sapiens
  CDR3 for alpha chain variable domain of TCR clone 113322 (TRAV30, TRAJ24)
CGTEIVDADSWGKFQF

SEQ ID NO: 226644 - protein, 14 aa, Homo sapiens
  CDR3 for beta chain variable domain of TCR clone 113322 (TRBV7-2, TRBJ2-7)
CASSPKTSFYEQHF

SEQ ID NO: 226645 - protein, 10 aa, Homo sapiens
  CDR3 for alpha chain variable domain of TCR clone 113323 (TRAV1-2, TRAJ23)
CAGQGGKLIV

SEQ ID NO: 226646 - protein, 16 aa, Homo sapiens
  CDR3 for beta chain variable domain of TCR clone 113323 (TRBV11-2, TRBJ1-1)
CASSLRQGGEHSKAFF

SEQ ID NO: 226647 - protein, 15 aa, Homo sapiens
  CDR3 for alpha chain variable domain of TCR clone 113324 (TRAV8-2, TRAJ44)
GAAEYFDGTASKLTF

SEQ ID NO: 226648 - protein, 14 aa, Homo sapiens
  CDR3 for beta chain variable domain of TCR clone 113324 (TRBV7-8, TRBJ2-3)
CASSLDRGTDTQYF

SEQ ID NO: 226649 - protein, 13 aa, Homo sapiens
  CDR3 for alpha chain variable domain of TCR clone 113325 (TRAV1-1, TRAJ9)
CAAKNTGGFKTIF

SEQ ID NO: 226650 - protein, 14 aa, Homo sapiens
  CDR3 for beta chain variable domain of TCR clone 113325 (TRBV7-3, TRBJ1-1)
CASSLKGGNTEAFF

SEQ ID NO: 226651 - protein, 14 aa, Homo sapiens
  CDR3 for alpha chain variable domain of TCR clone 113326 (TRAV12-3, TRAJ42)
CAMNYGGSQGNLIF

SEQ ID NO: 226652 - protein, 14 aa, Homo sapiens
  CDR3 for beta chain variable domain of TCR clone 113326 (TRBV15, TRBJ2-7)
CATSRVARGYEQYF

SEQ ID NO: 226653 - protein, 16 aa, Homo sapiens
  CDR3 for alpha chain variable domain of TCR clone 113327 (TRAV26-1, TRAJ48)
CIVRVGANFGNEKLTF

SEQ ID NO: 226654 - protein, 13 aa, Homo sapiens
  CDR3 for beta chain variable domain of TCR clone 113327 (TRBV7-3, TRBJ1-1)
CASSQDWGAEAFF

SEQ ID NO: 226655 - protein, 16 aa, Homo sapiens
  CDR3 for alpha chain variable domain of TCR clone 113328 (TRAV3, TRAJ37)
CAVRVRGSGNTGNLIF

SEQ ID NO: 226656 - protein, 11 aa, Homo sapiens
  CDR3 for beta chain variable domain of TCR clone 113328 (TRBV11-2, TRBJ2-2)
CASSLPGELFF

SEQ ID NO: 226657 - protein, 13 aa, Homo sapiens
  CDR3 for alpha chain variable domain of TCR clone 113329 (TRAV21, TRAJ57)
CAVTQGGSEKLVF

SEQ ID NO: 226658 - protein, 15 aa, Homo sapiens
  CDR3 for beta chain variable domain of TCR clone 113329 (TRBV6-3, TRBJ2-7)
CASSSPGTVFYEQYF

SEQ ID NO: 226659 - protein, 14 aa, Homo sapiens
  CDR3 for alpha chain variable domain of TCR clone 113330 (TRAV12-2, TRAJ53)
CAVKGGVSNYKLTF

SEQ ID NO: 226660 - protein, 16 aa, Homo sapiens
  CDR3 for beta chain variable domain of TCR clone 113330 (TRBV20-1, TRBJ1-2)
CSASMGQGVANYGYTF

SEQ ID NO: 226661 - protein, 10 aa, Homo sapiens
  CDR3 for alpha chain variable domain of TCR clone 113331 (TRAV25, TRAJ21)
CLYNFNKFYF

SEQ ID NO: 226662 - protein, 16 aa, Homo sapiens
  CDR3 for beta chain variable domain of TCR clone 113331 (TRBV20-1, TRBJ1-4)
CSAPGQGLLTNEKLFF

SEQ ID NO: 226663 - protein, 14 aa, Homo sapiens
  CDR3 for alpha chain variable domain of TCR clone 113332 (TRAV13-2, TRAJ10)
CAENITGGGDKLTF

SEQ ID NO: 226664 - protein, 15 aa, Homo sapiens
  CDR3 for beta chain variable domain of TCR clone 113332 (TRBV7-2, TRBJ2-7)
CASSLGGAKSGEQYF

SEQ ID NO: 226665 - protein, 14 aa, Homo sapiens
  CDR3 for alpha chain variable domain of TCR clone 113333 (TRAV16, TRAJ42)
CALLAGGSQGNLIF

SEQ ID NO: 226666 - protein, 13 aa, Homo sapiens
  CDR3 for beta chain variable domain of TCR clone 113333 (TRBV7-9, TRBJ1-2)
CASSLEQNYGYTF

SEQ ID NO: 226667 - protein, 16 aa, Homo sapiens
  CDR3 for alpha chain variable domain of TCR clone 113334 (TRAV35, TRAJ42)
GRMERYYGGSQGNLIF

SEQ ID NO: 226668 - protein, 15 aa, Homo sapiens
  CDR3 for beta chain variable domain of TCR clone 113334 (TRBV6-1, TRBJ2-7)
CARSDWDKPNYEQYF

SEQ ID NO: 226669 - protein, 15 aa, Homo sapiens
  CDR3 for alpha chain variable domain of TCR clone 113335 (TRAV29/DV5, TRAJ29)
CAASERSSGNTPLVF

SEQ ID NO: 226670 - protein, 13 aa, Homo sapiens
  CDR3 for beta chain variable domain of TCR clone 113335 (TRBV11-2, TRBJ2-5)
CASSSTGEETQYF

SEQ ID NO: 226671 - protein, 14 aa, Homo sapiens
  CDR3 for alpha chain variable domain of TCR clone 113336 (TRAV2, TRAJ9)
CAVEDRSGGFKTIF

SEQ ID NO: 226672 - protein, 15 aa, Homo sapiens
  CDR3 for beta chain variable domain of TCR clone 113336 (TRBV7-2, TRBJ2-1)
CASTHGTGIYNEQFF

SEQ ID NO: 226673 - protein, 14 aa, Homo sapiens
  CDR3 for alpha chain variable domain of TCR clone 113337 (TRAV3, TRAJ8)
CAVSLNTGFQKIVF

SEQ ID NO: 226674 - protein, 14 aa, Homo sapiens
  CDR3 for beta chain variable domain of TCR clone 113337 (TRBV6-6, TRBJ1-5)
CASVDSGFNQPQHF

SEQ ID NO: 226675 - protein, 13 aa, Homo sapiens
  CDR3 for alpha chain variable domain of TCR clone 113338 (TRAV16, TRAJ30)
CALAQNRDDKIIF

SEQ ID NO: 226676 - protein, 14 aa, Homo sapiens
  CDR3 for beta chain variable domain of TCR clone 113338 (TRBV19, TRBJ2-1)
CASPTFVLSGEQFF

SEQ ID NO: 226677 - protein, 15 aa, Homo sapiens
  CDR3 for alpha chain variable domain of TCR clone 113339 (TRAV3, TRAJ22)
CAVRDRGGSARRLTF

SEQ ID NO: 226678 - protein, 16 aa, Homo sapiens
  CDR3 for beta chain variable domain of TCR clone 113339 (TRBV11-2, TRBJ2-1)
CASARGSYSHHNEQFF

SEQ ID NO: 226679 - protein, 13 aa, Homo sapiens
  CDR3 for alpha chain variable domain of TCR clone 113340 (TRAV12-3, TRAJ9)
CAMRNTGGFKTIF

SEQ ID NO: 226680 - protein, 14 aa, Homo sapiens
  CDR3 for beta chain variable domain of TCR clone 113340 (TRBV7-9, TRBJ2-2)
CASSLVQDTGELFF

SEQ ID NO: 226681 - protein, 14 aa, Homo sapiens
  CDR3 for alpha chain variable domain of TCR clone 113341 (TRAV13-1, TRAJ35)
CAASKGGFGNVLHC

SEQ ID NO: 226682 - protein, 15 aa, Homo sapiens
  CDR3 for beta chain variable domain of TCR clone 113341 (TRBV7-2, TRBJ1-2)
CASSLVSGGDYGYTF

SEQ ID NO: 226683 - protein, 14 aa, Homo sapiens
  CDR3 for alpha chain variable domain of TCR clone 113342 (TRAV1-1, TRAJ27)
CAVIYNTNAGKSTF

SEQ ID NO: 226684 - protein, 16 aa, Homo sapiens
  CDR3 for beta chain variable domain of TCR clone 113342 (TRBV11-2, TRBJ2-5)
CASSGQGYSPQETQYF

SEQ ID NO: 226685 - protein, 15 aa, Homo sapiens
  CDR3 for alpha chain variable domain of TCR clone 113343 (TRAV12-1, TRAJ15)
CVVTRANQAGTAMIF

SEQ ID NO: 226686 - protein, 14 aa, Homo sapiens
  CDR3 for beta chain variable domain of TCR clone 113343 (TRBV5-1, TRBJ1-1)
CASSLVSINTEAFF

SEQ ID NO: 226687 - protein, 14 aa, Homo sapiens
  CDR3 for alpha chain variable domain of TCR clone 113344 (TRAV13-1, TRAJ9)
CAASALTGGFKTVF

SEQ ID NO: 226688 - protein, 13 aa, Homo sapiens
  CDR3 for beta chain variable domain of TCR clone 113344 (TRBV20-1, TRBJ1-1)
CSAGTVGNTEAFF

SEQ ID NO: 226689 - protein, 13 aa, Homo sapiens
  CDR3 for alpha chain variable domain of TCR clone 113345 (TRAV12-1, TRAJ11)
CVVNRAGYSTLTF

SEQ ID NO: 226690 - protein, 14 aa, Homo sapiens
  CDR3 for beta chain variable domain of TCR clone 113345 (TRBV25-1, TRBJ1-1)
CASTHLGGNTEAFF

SEQ ID NO: 226691 - protein, 13 aa, Homo sapiens
  CDR3 for alpha chain variable domain of TCR clone 113346 (TRAV17, TRAJ26)
CATVDNYGQNFVF

SEQ ID NO: 226692 - protein, 14 aa, Homo sapiens
  CDR3 for beta chain variable domain of TCR clone 113346 (TRBV12-4, TRBJ1-6)
CASNLQGKGSPLHF

SEQ ID NO: 226693 - protein, 16 aa, Homo sapiens
  CDR3 for alpha chain variable domain of TCR clone 113347 (TRAV3, TRAJ18)
CAVRDGRVSTLGRLYF

SEQ ID NO: 226694 - protein, 15 aa, Homo sapiens
  CDR3 for beta chain variable domain of TCR clone 113347 (TRBV7-9, TRBJ1-6)
CASSSPGRGNSPLHF

SEQ ID NO: 226695 - protein, 14 aa, Homo sapiens
  CDR3 for alpha chain variable domain of TCR clone 113348 (TRAV1-2, TRAJ16)
CAVNRFSDGQKLLF

SEQ ID NO: 226696 - protein, 13 aa, Homo sapiens
  CDR3 for beta chain variable domain of TCR clone 113348 (TRBV4-1, TRBJ2-1)
RASSQAGGDEQFF

SEQ ID NO: 226697 - protein, 14 aa, Homo sapiens
  CDR3 for alpha chain variable domain of TCR clone 113349 (TRAV13-1, TRAJ23)
CAASRRGRGGKLIF

SEQ ID NO: 226698 - protein, 15 aa, Homo sapiens
  CDR3 for beta chain variable domain of TCR clone 113349 (TRBV7-2, TRBJ2-1)
CASSLVAGRYNEQFF

SEQ ID NO: 226699 - protein, 20 aa, Homo sapiens
  CDR3 for alpha chain variable domain of TCR clone 113350 (TRAV34, )
CLYQYKPYNVFDDVQFMVRF

SEQ ID NO: 226700 - protein, 16 aa, Homo sapiens
  CDR3 for beta chain variable domain of TCR clone 113350 (TRBV12-5, TRBJ2-5)
CASGPRTSGNQETQYF

SEQ ID NO: 226701 - protein, 16 aa, Homo sapiens
  CDR3 for alpha chain variable domain of TCR clone 113351 (TRAV12-3, TRAJ53)
CAMSPGSGGSNYKLTF

SEQ ID NO: 226702 - protein, 18 aa, Homo sapiens
  CDR3 for beta chain variable domain of TCR clone 113351 (TRBV12-4, TRBJ2-2)
CASSLVAGTRGRTGELFF

SEQ ID NO: 226703 - protein, 16 aa, Homo sapiens
  CDR3 for alpha chain variable domain of TCR clone 113352 (TRAV21, TRAJ37)
CAVRPRGSSNTGKLIF

SEQ ID NO: 226704 - protein, 14 aa, Homo sapiens
  CDR3 for beta chain variable domain of TCR clone 113352 (TRBV5-1, TRBJ2-1)
CASSWSGSYNEQFF

SEQ ID NO: 226705 - protein, 17 aa, Homo sapiens
  CDR3 for alpha chain variable domain of TCR clone 113353 (TRAV14/DV4, TRAJ4)
CAMREASGRGGYNKLIF

SEQ ID NO: 226706 - protein, 13 aa, Homo sapiens
  CDR3 for beta chain variable domain of TCR clone 113353 (TRBV7-2, TRBJ2-2)
CASSSVRAGELFF

SEQ ID NO: 226707 - protein, 11 aa, Homo sapiens
  CDR3 for alpha chain variable domain of TCR clone 113354 (TRAV1-2, TRAJ31)
CAVKNNARLMF

SEQ ID NO: 226708 - protein, 13 aa, Homo sapiens
  CDR3 for beta chain variable domain of TCR clone 113354 (TRBV7-9, TRBJ1-2)
CASSLKQNYGYTF

SEQ ID NO: 226709 - protein, 13 aa, Homo sapiens
  CDR3 for alpha chain variable domain of TCR clone 113355 (TRAV14/DV4, TRAJ16)
CAMREGSGQKRLF

SEQ ID NO: 226710 - protein, 15 aa, Homo sapiens
  CDR3 for beta chain variable domain of TCR clone 113355 (TRBV7-9, TRBJ2-7)
CASSLDLDRGYEQYF

SEQ ID NO: 226711 - protein, 16 aa, Homo sapiens
  CDR3 for alpha chain variable domain of TCR clone 113356 (TRAV30, TRAJ24)
CGTGIVDADSWGKFQF

SEQ ID NO: 226712 - protein, 14 aa, Homo sapiens
  CDR3 for beta chain variable domain of TCR clone 113356 (TRBV12-5, TRBJ2-5)
CASGSRTHQETQCF

SEQ ID NO: 226713 - protein, 14 aa, Homo sapiens
  CDR3 for alpha chain variable domain of TCR clone 113357 (TRAV12-3, TRAJ9)
CAMSPNTGGFKTIF

SEQ ID NO: 226714 - protein, 13 aa, Homo sapiens
  CDR3 for beta chain variable domain of TCR clone 113357 (TRBV28, TRBJ2-7)
CASTPGLAGEQYF

SEQ ID NO: 226715 - protein, 14 aa, Homo sapiens
  CDR3 for alpha chain variable domain of TCR clone 113358 (TRAV16, TRAJ15)
CALSFNQAGTALIF

SEQ ID NO: 226716 - protein, 13 aa, Homo sapiens
  CDR3 for beta chain variable domain of TCR clone 113358 (TRBV10-3, TRBJ1-2)
CAINADLNYGYTF

SEQ ID NO: 226717 - protein, 11 aa, Homo sapiens
  CDR3 for alpha chain variable domain of TCR clone 113359 (TRAV1-2, TRAJ20)
CAVSNDYKLSF

SEQ ID NO: 226718 - protein, 17 aa, Homo sapiens
  CDR3 for beta chain variable domain of TCR clone 113359 (TRBV7-8, TRBJ2-6)
CASSAGTGGAGANDLTF

SEQ ID NO: 226719 - protein, 14 aa, Homo sapiens
  CDR3 for alpha chain variable domain of TCR clone 113360 (TRAV38-1, TRAJ29)
CAFITPSGNTPLVF

SEQ ID NO: 226720 - protein, 14 aa, Homo sapiens
  CDR3 for beta chain variable domain of TCR clone 113360 (TRBV4-2, TRBJ2-1)
CASGLDRAYNEQFF

SEQ ID NO: 226721 - protein, 15 aa, Homo sapiens
  CDR3 for alpha chain variable domain of TCR clone 113361 (TRAV12-1, TRAJ10)
CVVNKLTGGGNKPTF

SEQ ID NO: 226722 - protein, 17 aa, Homo sapiens
  CDR3 for beta chain variable domain of TCR clone 113361 (TRBV5-1, TRBJ1-6)
CASSPSLQGSDNSPLHF

SEQ ID NO: 226723 - protein, 15 aa, Homo sapiens
  CDR3 for alpha chain variable domain of TCR clone 113362 (TRAV14/DV4, TRAJ12)
CAMREERDSSYKLIF

SEQ ID NO: 226724 - protein, 16 aa, Homo sapiens
  CDR3 for beta chain variable domain of TCR clone 113362 (TRBV11-2, TRBJ1-2)
CTSSLDRGGNNYGYTF

SEQ ID NO: 226725 - protein, 15 aa, Homo sapiens
  CDR3 for alpha chain variable domain of TCR clone 113363 (TRAV34, TRAJ38)
CGADSTPGNNRKLIW

SEQ ID NO: 226726 - protein, 12 aa, Homo sapiens
  CDR3 for beta chain variable domain of TCR clone 113363 (TRBV7-9, TRBJ2-7)
CATRTDAYEQYF

SEQ ID NO: 226727 - protein, 15 aa, Homo sapiens
  CDR3 for alpha chain variable domain of TCR clone 113364 (TRAV8-3, TRAJ15)
CAVGAPNQAGTALLF

SEQ ID NO: 226728 - protein, 14 aa, Homo sapiens
  CDR3 for beta chain variable domain of TCR clone 113364 (TRBV20-1, TRBJ2-1)
CSPDDEASYNEQFF

SEQ ID NO: 226729 - protein, 15 aa, Homo sapiens
  CDR3 for alpha chain variable domain of TCR clone 113365 (TRAV21, TRAJ27)
CAARPGNAGKSTLGM

SEQ ID NO: 226730 - protein, 14 aa, Homo sapiens
  CDR3 for beta chain variable domain of TCR clone 113365 (TRBV7-6, TRBJ2-3)
CASSLGTVTDTQYF

SEQ ID NO: 226731 - protein, 13 aa, Homo sapiens
  CDR3 for alpha chain variable domain of TCR clone 113366 (TRAV2, TRAJ10)
CTVETGGGNKLTF

SEQ ID NO: 226732 - protein, 14 aa, Homo sapiens
  CDR3 for beta chain variable domain of TCR clone 113366 (TRBV20-1, TRBJ2-3)
CSAGGRRGTDTQYF

SEQ ID NO: 226733 - protein, 16 aa, Homo sapiens
  CDR3 for alpha chain variable domain of TCR clone 113367 (TRAV30, TRAJ24)
CGTEIVDADSWGKFQF

SEQ ID NO: 226734 - protein, 13 aa, Homo sapiens
  CDR3 for beta chain variable domain of TCR clone 113367 (TRBV12-4, TRBJ1-5)
CASSPDRAQPQHF

SEQ ID NO: 226735 - protein, 15 aa, Homo sapiens
  CDR3 for alpha chain variable domain of TCR clone 113368 (TRAV35, TRAJ40)
CAGVPGASGTYKYIF

SEQ ID NO: 226736 - protein, 12 aa, Homo sapiens
  CDR3 for beta chain variable domain of TCR clone 113368 (TRBV7-8, TRBJ2-7)
CASSLGDREQYF

SEQ ID NO: 226737 - protein, 13 aa, Homo sapiens
  CDR3 for alpha chain variable domain of TCR clone 113369 (TRAV21, TRAJ27)
CAARPGNAGKSTF

SEQ ID NO: 226738 - protein, 14 aa, Homo sapiens
  CDR3 for beta chain variable domain of TCR clone 113369 (TRBV6-1, TRBJ2-6)
CASQQGAGANVLTF

SEQ ID NO: 226739 - protein, 13 aa, Homo sapiens
  CDR3 for alpha chain variable domain of TCR clone 113370 (TRAV14/DV4, TRAJ20)
CAMRESNDYKLSF

SEQ ID NO: 226740 - protein, 15 aa, Homo sapiens
  CDR3 for beta chain variable domain of TCR clone 113370 (TRBV7-9, TRBJ1-1)
CACSRPGTANTEAFF

SEQ ID NO: 226741 - protein, 15 aa, Homo sapiens
  CDR3 for alpha chain variable domain of TCR clone 113371 (TRAV26-2, TRAJ39)
CSLRGNNNAGNMLTF

SEQ ID NO: 226742 - protein, 13 aa, Homo sapiens
  CDR3 for beta chain variable domain of TCR clone 113371 (TRBV5-1, TRBJ2-4)
CASSLEGGMNQYF

SEQ ID NO: 226743 - protein, 13 aa, Homo sapiens
  CDR3 for alpha chain variable domain of TCR clone 113372 (TRAV8-6, TRAJ49)
CAIITNTGNQFYF

SEQ ID NO: 226744 - protein, 13 aa, Homo sapiens
  CDR3 for beta chain variable domain of TCR clone 113372 (TRBV7-9, TRBJ1-2)
CASSLKQNYGYTF

SEQ ID NO: 226745 - protein, 14 aa, Homo sapiens
  CDR3 for alpha chain variable domain of TCR clone 113373 (TRAV17, TRAJ57)
CATDPPGGSEKLVF

SEQ ID NO: 226746 - protein, 16 aa, Homo sapiens
  CDR3 for beta chain variable domain of TCR clone 113373 (TRBV20-1, TRBJ1-4)
CSAPGQGLLTNEKLFF

SEQ ID NO: 226747 - protein, 13 aa, Homo sapiens
  CDR3 for alpha chain variable domain of TCR clone 113374 (TRAV27, TRAJ6)
CAGGTRGSYIPTL

SEQ ID NO: 226748 - protein, 14 aa, Homo sapiens
  CDR3 for beta chain variable domain of TCR clone 113374 (TRBV6-3, TRBJ1-1)
CASSYQRRDTEAFF

SEQ ID NO: 226749 - protein, 11 aa, Homo sapiens
  CDR3 for alpha chain variable domain of TCR clone 113375 (TRAV35, TRAJ34)
CWARNTDKLIF

SEQ ID NO: 226750 - protein, 14 aa, Homo sapiens
  CDR3 for beta chain variable domain of TCR clone 113375 (TRBV5-1, TRBJ2-7)
CASSRGGSLYEQYF

SEQ ID NO: 226751 - protein, 13 aa, Homo sapiens
  CDR3 for alpha chain variable domain of TCR clone 113376 (TRAV3, TRAJ21)
CAVREPDFNKFYF

SEQ ID NO: 226752 - protein, 19 aa, Homo sapiens
  CDR3 for beta chain variable domain of TCR clone 113376 (TRBV25-1, TRBJ2-2)
CAILVYRVDRGRKTGELFF

SEQ ID NO: 226753 - protein, 13 aa, Homo sapiens
  CDR3 for alpha chain variable domain of TCR clone 113377 (TRAV12-1, TRAJ7)
CVVNMRGNNRLAF

SEQ ID NO: 226754 - protein, 16 aa, Homo sapiens
  CDR3 for beta chain variable domain of TCR clone 113377 (TRBV13, TRBJ2-2)
CASSPRTGEHTGELFF

SEQ ID NO: 226755 - protein, 15 aa, Homo sapiens
  CDR3 for alpha chain variable domain of TCR clone 113378 (TRAV12-3, TRAJ6)
CAMSATTGGSYIPTF

SEQ ID NO: 226756 - protein, 15 aa, Homo sapiens
  CDR3 for beta chain variable domain of TCR clone 113378 (TRBV18, TRBJ2-1)
CASLPDRGRDNEQFF

SEQ ID NO: 226757 - protein, 17 aa, Homo sapiens
  CDR3 for alpha chain variable domain of TCR clone 113379 (TRAV3, TRAJ42)
CAVRDGDYGGSQGNLIF

SEQ ID NO: 226758 - protein, 14 aa, Homo sapiens
  CDR3 for beta chain variable domain of TCR clone 113379 (TRBV19, TRBJ2-5)
CASSMTGQQETQYF

SEQ ID NO: 226759 - protein, 12 aa, Homo sapiens
  CDR3 for alpha chain variable domain of TCR clone 113380 (TRAV12-3, TRAJ17)
CAMTLTGNKLTF

SEQ ID NO: 226760 - protein, 14 aa, Homo sapiens
  CDR3 for beta chain variable domain of TCR clone 113380 (TRBV19, TRBJ2-3)
CASSRLGTTDTQYL

SEQ ID NO: 226761 - protein, 11 aa, Homo sapiens
  CDR3 for alpha chain variable domain of TCR clone 113381 (TRAV13-1, TRAJ6)
CATLGSYIPTF

SEQ ID NO: 226762 - protein, 12 aa, Homo sapiens
  CDR3 for beta chain variable domain of TCR clone 113381 (TRBV11-2, TRBJ2-1)
CASSPGDNEQFF

SEQ ID NO: 226763 - protein, 14 aa, Homo sapiens
  CDR3 for alpha chain variable domain of TCR clone 113382 (TRAV2, TRAJ9)
CAVEDRGGGFKTIF

SEQ ID NO: 226764 - protein, 16 aa, Homo sapiens
  CDR3 for beta chain variable domain of TCR clone 113382 (TRBV7-3, TRBJ2-1)
CASSLEGYRSYNEQFF

SEQ ID NO: 226765 - protein, 12 aa, Homo sapiens
  CDR3 for alpha chain variable domain of TCR clone 113383 (TRAV12-3, TRAJ42)
CAPGGSQGNFIF

SEQ ID NO: 226766 - protein, 13 aa, Homo sapiens
  CDR3 for beta chain variable domain of TCR clone 113383 (TRBV5-7, TRBJ2-6)
CASTSSGANVLTF

SEQ ID NO: 226767 - protein, 13 aa, Homo sapiens
  CDR3 for alpha chain variable domain of TCR clone 113384 (TRAV20, TRAJ57)
CAGPQGGSEKLVF

SEQ ID NO: 226768 - protein, 12 aa, Homo sapiens
  CDR3 for beta chain variable domain of TCR clone 113384 (TRBV7-9, TRBJ2-7)
CASSIKREEQYF

SEQ ID NO: 226769 - protein, 15 aa, Homo sapiens
  CDR3 for alpha chain variable domain of TCR clone 113385 (TRAV8-3, TRAJ40)
CAAPSLGSGTYKYIF

SEQ ID NO: 226770 - protein, 16 aa, Homo sapiens
  CDR3 for beta chain variable domain of TCR clone 113385 (TRBV7-3, TRBJ2-3)
CASSLSGYLPEDTQYF

SEQ ID NO: 226771 - protein, 16 aa, Homo sapiens
  CDR3 for alpha chain variable domain of TCR clone 113386 (TRAV1-2, TRAJ10)
CAVRGVLTGGGNKLTF

SEQ ID NO: 226772 - protein, 14 aa, Homo sapiens
  CDR3 for beta chain variable domain of TCR clone 113386 (TRBV15, TRBJ2-3)
CATRSGTSTDTQYF

SEQ ID NO: 226773 - protein, 13 aa, Homo sapiens
  CDR3 for alpha chain variable domain of TCR clone 113387 (TRAV26-2, TRAJ43)
CILRAVNNNDMRF

SEQ ID NO: 226774 - protein, 13 aa, Homo sapiens
  CDR3 for beta chain variable domain of TCR clone 113387 (TRBV4-2, TRBJ1-1)
CASSQAGNTEAFF

SEQ ID NO: 226775 - protein, 19 aa, Homo sapiens
  CDR3 for alpha chain variable domain of TCR clone 113388 (TRAV26-1, TRAJ28)
CIVRVAHAYSGAGSYQLTF

SEQ ID NO: 226776 - protein, 14 aa, Homo sapiens
  CDR3 for beta chain variable domain of TCR clone 113388 (TRBV11-2, TRBJ2-3)
CASSRLARTDTQYF

SEQ ID NO: 226777 - protein, 13 aa, Homo sapiens
  CDR3 for alpha chain variable domain of TCR clone 113389 (TRAV12-2, TRAJ20)
CAVYPSNDYKLSF

SEQ ID NO: 226778 - protein, 14 aa, Homo sapiens
  CDR3 for beta chain variable domain of TCR clone 113389 (TRBV7-2, TRBJ1-1)
CASSFLTGTTEAFF

SEQ ID NO: 226779 - protein, 13 aa, Homo sapiens
  CDR3 for alpha chain variable domain of TCR clone 113390 (TRAV12-2, TRAJ39)
CAVNNNAGNMLTF

SEQ ID NO: 226780 - protein, 15 aa, Homo sapiens
  CDR3 for beta chain variable domain of TCR clone 113390 (TRBV5-1, TRBJ2-7)
CASSLNGGPAREQYF

SEQ ID NO: 226781 - protein, 15 aa, Homo sapiens
  CDR3 for alpha chain variable domain of TCR clone 113391 (TRAV8-3, TRAJ11)
CAVGLVNSGYSTLTF

SEQ ID NO: 226782 - protein, 16 aa, Homo sapiens
  CDR3 for beta chain variable domain of TCR clone 113391 (TRBV7-9, TRBJ1-2)
CASSLGFSSGEDGYTF

SEQ ID NO: 226783 - protein, 14 aa, Homo sapiens
  CDR3 for alpha chain variable domain of TCR clone 113392 (TRAV12-3, TRAJ33)
CAMSEEDSNYQLIW

SEQ ID NO: 226784 - protein, 17 aa, Homo sapiens
  CDR3 for beta chain variable domain of TCR clone 113392 (TRBV11-1, TRBJ2-7)
CASSLLDGGDSAYEQYF

SEQ ID NO: 226785 - protein, 13 aa, Homo sapiens
  CDR3 for alpha chain variable domain of TCR clone 113393 (TRAV35, TRAJ42)
CAGFPGSQVNLIF

SEQ ID NO: 226786 - protein, 13 aa, Homo sapiens
  CDR3 for beta chain variable domain of TCR clone 113393 (TRBV29-1, TRBJ2-1)
CSVEGGRVNEQFF

SEQ ID NO: 226787 - protein, 13 aa, Homo sapiens
  CDR3 for alpha chain variable domain of TCR clone 113394 (TRAV27, TRAJ49)
CAPRPYTGNQFYF

SEQ ID NO: 226788 - protein, 13 aa, Homo sapiens
  CDR3 for beta chain variable domain of TCR clone 113394 (TRBV20-1, TRBJ1-1)
CSAPLGGGTEAFF

SEQ ID NO: 226789 - protein, 15 aa, Homo sapiens
  CDR3 for alpha chain variable domain of TCR clone 113395 (TRAV4, TRAJ23)
CCVLLPRGPGGKLIF

SEQ ID NO: 226790 - protein, 15 aa, Homo sapiens
  CDR3 for beta chain variable domain of TCR clone 113395 (TRBV7-2, TRBJ2-1)
CASSFQADEYNEQFF

SEQ ID NO: 226791 - protein, 14 aa, Homo sapiens
  CDR3 for alpha chain variable domain of TCR clone 113396 (TRAV1-2, TRAJ8)
CAVREETGFQKLVF

SEQ ID NO: 226792 - protein, 15 aa, Homo sapiens
  CDR3 for beta chain variable domain of TCR clone 113396 (TRBV7-3, TRBJ2-2)
CASSETGQGTGELFF

SEQ ID NO: 226793 - protein, 13 aa, Homo sapiens
  CDR3 for alpha chain variable domain of TCR clone 113397 (TRAV27, TRAJ6)
CAGGTRGSYIPTF

SEQ ID NO: 226794 - protein, 14 aa, Homo sapiens
  CDR3 for beta chain variable domain of TCR clone 113397 (TRBV7-8, TRBJ2-7)
CASSPGLADYEQYF

SEQ ID NO: 226795 - protein, 15 aa, Homo sapiens
  CDR3 for alpha chain variable domain of TCR clone 113398 (TRAV3, TRAJ13)
CAVRVYSGGYQKVTF

SEQ ID NO: 226796 - protein, 12 aa, Homo sapiens
  CDR3 for beta chain variable domain of TCR clone 113398 (TRBV11-2, TRBJ2-2)
CASSLGGGELFF

SEQ ID NO: 226797 - protein, 15 aa, Homo sapiens
  CDR3 for alpha chain variable domain of TCR clone 113399 (TRAV2, TRAJ9)
CAVAALNTGGFKNIF

SEQ ID NO: 226798 - protein, 14 aa, Homo sapiens
  CDR3 for beta chain variable domain of TCR clone 113399 (TRBV7-8, TRBJ2-5)
CASSATGGQETQYF

SEQ ID NO: 226799 - protein, 13 aa, Homo sapiens
  CDR3 for alpha chain variable domain of TCR clone 113400 (TRAV21, TRAJ37)
CAVSSGNTGKLIF

SEQ ID NO: 226800 - protein, 12 aa, Homo sapiens
  CDR3 for beta chain variable domain of TCR clone 113400 (TRBV29-1, TRBJ2-3)
CSVTGGADTQYF

SEQ ID NO: 226801 - protein, 13 aa, Homo sapiens
  CDR3 for alpha chain variable domain of TCR clone 113401 (TRAV24, TRAJ42)
CAFSTGSQGNLIF

SEQ ID NO: 226802 - protein, 12 aa, Homo sapiens
  CDR3 for beta chain variable domain of TCR clone 113401 (TRBV11-2, TRBJ2-1)
CASSPGNNEQFF

SEQ ID NO: 226803 - protein, 14 aa, Homo sapiens
  CDR3 for alpha chain variable domain of TCR clone 113402 (TRAV8-4, TRAJ8)
CAVSEDTGFQKLVF

SEQ ID NO: 226804 - protein, 16 aa, Homo sapiens
  CDR3 for beta chain variable domain of TCR clone 113402 (TRBV7-3, TRBJ2-2)
CASSLKRGTLSGELFF

SEQ ID NO: 226805 - protein, 14 aa, Homo sapiens
  CDR3 for alpha chain variable domain of TCR clone 113403 (TRAV35, TRAJ10)
CAGILTGGGNKLTF

SEQ ID NO: 226806 - protein, 13 aa, Homo sapiens
  CDR3 for beta chain variable domain of TCR clone 113403 (TRBV27, TRBJ1-1)
CASSLSIGAEAFF

SEQ ID NO: 226807 - protein, 12 aa, Homo sapiens
  CDR3 for alpha chain variable domain of TCR clone 113404 (TRAV13-1, TRAJ17)
CAARTAGNKLTF

SEQ ID NO: 226808 - protein, 15 aa, Homo sapiens
  CDR3 for beta chain variable domain of TCR clone 113404 (TRBV7-6, TRBJ1-1)
CASSPRGGANTEAFF

SEQ ID NO: 226809 - protein, 14 aa, Homo sapiens
  CDR3 for alpha chain variable domain of TCR clone 113405 (TRAV29/DV5, TRAJ49)
CAASLSNTGNQFYF

SEQ ID NO: 226810 - protein, 13 aa, Homo sapiens
  CDR3 for beta chain variable domain of TCR clone 113405 (TRBV7-3, TRBJ1-1)
CASSQDWGAEASF

SEQ ID NO: 226811 - protein, 16 aa, Homo sapiens
  CDR3 for alpha chain variable domain of TCR clone 113406 (TRAV12-1, TRAJ22)
CVVNTISSGSARQLTF

SEQ ID NO: 226812 - protein, 13 aa, Homo sapiens
  CDR3 for beta chain variable domain of TCR clone 113406 (TRBV19, TRBJ2-1)
CAGNGGVFSEQFF

SEQ ID NO: 226813 - protein, 14 aa, Homo sapiens
  CDR3 for alpha chain variable domain of TCR clone 113407 (TRAV9-2, TRAJ9)
CALSDPTGGFKTIL

SEQ ID NO: 226814 - protein, 14 aa, Homo sapiens
  CDR3 for beta chain variable domain of TCR clone 113407 (TRBV20-1, TRBJ2-4)
CSARDRGQGGIQYF

SEQ ID NO: 226815 - protein, 13 aa, Homo sapiens
  CDR3 for alpha chain variable domain of TCR clone 113408 (TRAV12-3, TRAJ7)
CAMSASGNNRLAF

SEQ ID NO: 226816 - protein, 14 aa, Homo sapiens
  CDR3 for beta chain variable domain of TCR clone 113408 (TRBV7-9, TRBJ2-5)
CASSLDTAQETQYF

SEQ ID NO: 226817 - protein, 13 aa, Homo sapiens
  CDR3 for alpha chain variable domain of TCR clone 113409 (TRAV3, TRAJ41)
CAVSSNSGYALHF

SEQ ID NO: 226818 - protein, 14 aa, Homo sapiens
  CDR3 for beta chain variable domain of TCR clone 113409 (TRBV7-2, TRBJ2-7)
CASSPKTSFYEQYF

SEQ ID NO: 226819 - protein, 13 aa, Homo sapiens
  CDR3 for alpha chain variable domain of TCR clone 113410 (TRAV13-2, TRAJ48)
CAEMDFGNEKLTF

SEQ ID NO: 226820 - protein, 13 aa, Homo sapiens
  CDR3 for beta chain variable domain of TCR clone 113410 (TRBV28, TRBJ1-2)
CAGRDRGNYGYTF

SEQ ID NO: 226821 - protein, 13 aa, Homo sapiens
  CDR3 for alpha chain variable domain of TCR clone 113411 (TRAV8-3, TRAJ43)
CAVVPYNNNDMRF

SEQ ID NO: 226822 - protein, 16 aa, Homo sapiens
  CDR3 for beta chain variable domain of TCR clone 113411 (TRBV6-5, TRBJ2-1)
CASSYSLSGGYNEQFF

SEQ ID NO: 226823 - protein, 13 aa, Homo sapiens
  CDR3 for alpha chain variable domain of TCR clone 113412 (TRAV8-6, TRAJ21)
CAVSPSSLNKFYF

SEQ ID NO: 226824 - protein, 12 aa, Homo sapiens
  CDR3 for beta chain variable domain of TCR clone 113412 (TRBV11-2, TRBJ2-2)
CASSLGGGELFF

SEQ ID NO: 226825 - protein, 14 aa, Homo sapiens
  CDR3 for alpha chain variable domain of TCR clone 113413 (TRAV13-2, TRAJ11)
CAETGNSGYSNLTF

SEQ ID NO: 226826 - protein, 16 aa, Homo sapiens
  CDR3 for beta chain variable domain of TCR clone 113413 (TRBV10-3, TRBJ2-1)
CAISGVGDGGGGEQFF

SEQ ID NO: 226827 - protein, 13 aa, Homo sapiens
  CDR3 for alpha chain variable domain of TCR clone 113414 (TRAV26-1, TRAJ48)
CIVRVVGDERLTF

SEQ ID NO: 226828 - protein, 19 aa, Homo sapiens
  CDR3 for beta chain variable domain of TCR clone 113414 (TRBV11-3, TRBJ2-2)
CASSTRPGAKTTNTGELFF

SEQ ID NO: 226829 - protein, 10 aa, Homo sapiens
  CDR3 for alpha chain variable domain of TCR clone 113415 (TRAV20, TRAJ49)
CALGGNQFYF

SEQ ID NO: 226830 - protein, 14 aa, Homo sapiens
  CDR3 for beta chain variable domain of TCR clone 113415 (TRBV20-1, TRBJ2-5)
CSAHRQGLWETQYF

SEQ ID NO: 226831 - protein, 12 aa, Homo sapiens
  CDR3 for alpha chain variable domain of TCR clone 113416 (TRAV13-1, TRAJ48)
CAANFGNEKLTF

SEQ ID NO: 226832 - protein, 18 aa, Homo sapiens
  CDR3 for beta chain variable domain of TCR clone 113416 (TRBV7-9, TRBJ2-7)
CASSLTTSGSRTWYEQYF

SEQ ID NO: 226833 - protein, 16 aa, Homo sapiens
  CDR3 for alpha chain variable domain of TCR clone 113417 (TRAV30, TRAJ24)
CGTEIVDADSWGKFKF

SEQ ID NO: 226834 - protein, 13 aa, Homo sapiens
  CDR3 for beta chain variable domain of TCR clone 113417 (TRBV20-1, TRBJ1-1)
CSAPPGGHTEAFF

SEQ ID NO: 226835 - protein, 14 aa, Homo sapiens
  CDR3 for alpha chain variable domain of TCR clone 113418 (TRAV1-2, TRAJ8)
CAVREDTGFKKLVF

SEQ ID NO: 226836 - protein, 16 aa, Homo sapiens
  CDR3 for beta chain variable domain of TCR clone 113418 (TRBV7-6, TRBJ2-6)
CASSLPGLSGANVLTF

SEQ ID NO: 226837 - protein, 11 aa, Homo sapiens
  CDR3 for alpha chain variable domain of TCR clone 113419 (TRAV26-1, TRAJ37)
CIVRVGRKLIF

SEQ ID NO: 226838 - protein, 14 aa, Homo sapiens
  CDR3 for beta chain variable domain of TCR clone 113419 (TRBV7-2, TRBJ2-7)
CASSVPPGQGPQYF

SEQ ID NO: 226839 - protein, 16 aa, Homo sapiens
  CDR3 for alpha chain variable domain of TCR clone 113420 (TRAV1-1, TRAJ45)
CAVRAHSGGGADGLTF

SEQ ID NO: 226840 - protein, 13 aa, Homo sapiens
  CDR3 for beta chain variable domain of TCR clone 113420 (TRBV20-1, TRBJ1-2)
CSARGTADYGYTF

SEQ ID NO: 226841 - protein, 16 aa, Homo sapiens
  CDR3 for alpha chain variable domain of TCR clone 113421 (TRAV3, TRAJ37)
CAVRPHGSGTTGKLIF

SEQ ID NO: 226842 - protein, 14 aa, Homo sapiens
  CDR3 for beta chain variable domain of TCR clone 113421 (TRBV20-1, TRBJ2-1)
CSARGGSSYNEQFF

SEQ ID NO: 226843 - protein, 14 aa, Homo sapiens
  CDR3 for alpha chain variable domain of TCR clone 113422 (TRAV1-2, TRAJ8)
CAVREDTGFQKLVF

SEQ ID NO: 226844 - protein, 16 aa, Homo sapiens
  CDR3 for beta chain variable domain of TCR clone 113422 (TRBV7-2, TRBJ2-1)
CASSLVAGAGYNEQFF

SEQ ID NO: 226845 - protein, 13 aa, Homo sapiens
  CDR3 for alpha chain variable domain of TCR clone 113423 (TRAV8-6, TRAJ16)
RAVSSPDGQKLLF

SEQ ID NO: 226846 - protein, 16 aa, Homo sapiens
  CDR3 for beta chain variable domain of TCR clone 113423 (TRBV5-7, TRBJ2-3)
CASSSLGGAITDTQYF

SEQ ID NO: 226847 - protein, 12 aa, Homo sapiens
  CDR3 for alpha chain variable domain of TCR clone 113424 (TRAV12-3, TRAJ29)
CAAREGNTPLVL

SEQ ID NO: 226848 - protein, 17 aa, Homo sapiens
  CDR3 for beta chain variable domain of TCR clone 113424 (TRBV18, TRBJ2-1)
CASSPLAAGAGDNEQFF

SEQ ID NO: 226849 - protein, 18 aa, Homo sapiens
  CDR3 for alpha chain variable domain of TCR clone 113425 (TRAV29/DV5, TRAJ52)
CAAGFRGAGGTSYGKLTF

SEQ ID NO: 226850 - protein, 12 aa, Homo sapiens
  CDR3 for beta chain variable domain of TCR clone 113425 (TRBV11-2, TRBJ2-2)
CASSLGGGELFF

SEQ ID NO: 226851 - protein, 21 aa, Homo sapiens
  CDR3 for alpha chain variable domain of TCR clone 113426 (TRAV35, TRAJ52)
CWAGYADGPNAGGTSYGQLTF

SEQ ID NO: 226852 - protein, 12 aa, Homo sapiens
  CDR3 for beta chain variable domain of TCR clone 113426 (TRBV5-1, TRBJ2-7)
CASSFRGYEQYF

SEQ ID NO: 226853 - protein, 15 aa, Homo sapiens
  CDR3 for alpha chain variable domain of TCR clone 113427 (TRAV13-1, TRAJ44)
CAASRGGGTASKLAF

SEQ ID NO: 226854 - protein, 14 aa, Homo sapiens
  CDR3 for beta chain variable domain of TCR clone 113427 (TRBV7-2, TRBJ2-5)
CASSPRGSSETQYF

SEQ ID NO: 226855 - protein, 13 aa, Homo sapiens
  CDR3 for alpha chain variable domain of TCR clone 113428 (TRAV12-3, TRAJ33)
CAMSVNSNYQLIW

SEQ ID NO: 226856 - protein, 13 aa, Homo sapiens
  CDR3 for beta chain variable domain of TCR clone 113428 (TRBV7-2, TRBJ2-2)
CASSLAVTGELYF

SEQ ID NO: 226857 - protein, 16 aa, Homo sapiens
  CDR3 for alpha chain variable domain of TCR clone 113429 (TRAV14/DV4, TRAJ54)
CAMREGRIQGAQKLVF

SEQ ID NO: 226858 - protein, 15 aa, Homo sapiens
  CDR3 for beta chain variable domain of TCR clone 113429 (TRBV7-9, TRBJ1-4)
CASSRAGGFNEKLFF

SEQ ID NO: 226859 - protein, 14 aa, Homo sapiens
  CDR3 for alpha chain variable domain of TCR clone 113430 (TRAV26-1, TRAJ38)
CIADNAGNNRKLLW

SEQ ID NO: 226860 - protein, 13 aa, Homo sapiens
  CDR3 for beta chain variable domain of TCR clone 113430 (TRBV20-1, TRBJ1-1)
CGARGGGNTEAFF

SEQ ID NO: 226861 - protein, 12 aa, Homo sapiens
  CDR3 for alpha chain variable domain of TCR clone 113431 (TRAV2, TRAJ34)
CAVERNTDKLIF

SEQ ID NO: 226862 - protein, 14 aa, Homo sapiens
  CDR3 for beta chain variable domain of TCR clone 113431 (TRBV7-9, TRBJ2-1)
CASSDSSGYNEQFF

SEQ ID NO: 226863 - protein, 18 aa, Homo sapiens
  CDR3 for alpha chain variable domain of TCR clone 113432 (TRAV13-1, TRAJ52)
CAAKNPNAGGTSYGKLTF

SEQ ID NO: 226864 - protein, 14 aa, Homo sapiens
  CDR3 for beta chain variable domain of TCR clone 113432 (TRBV7-2, TRBJ2-1)
CASSLQALVNEQFF

SEQ ID NO: 226865 - protein, 14 aa, Homo sapiens
  CDR3 for alpha chain variable domain of TCR clone 113433 (TRAV1-2, TRAJ8)
CAVREDTGFQKLVF

SEQ ID NO: 226866 - protein, 17 aa, Homo sapiens
  CDR3 for beta chain variable domain of TCR clone 113433 (TRBV28, TRBJ2-3)
CASSPTPAGGRVDTQYF

SEQ ID NO: 226867 - protein, 17 aa, Homo sapiens
  CDR3 for alpha chain variable domain of TCR clone 113434 (TRAV3, TRAJ42)
CAVRDRDYGGSQGNLIF

SEQ ID NO: 226868 - protein, 14 aa, Homo sapiens
  CDR3 for beta chain variable domain of TCR clone 113434 (TRBV7-2, TRBJ2-5)
RASSPRGSSETQYF

SEQ ID NO: 226869 - protein, 13 aa, Homo sapiens
  CDR3 for alpha chain variable domain of TCR clone 113435 (TRAV1-2, TRAJ20)
CAVRDGNDYKLSF

SEQ ID NO: 226870 - protein, 16 aa, Homo sapiens
  CDR3 for beta chain variable domain of TCR clone 113435 (TRBV28, TRBJ2-6)
CASSNRRGSGANVLTF

SEQ ID NO: 226871 - protein, 14 aa, Homo sapiens
  CDR3 for alpha chain variable domain of TCR clone 113436 (TRAV23/DV6, TRAJ4)
CAANISGGYNKLIF

SEQ ID NO: 226872 - protein, 11 aa, Homo sapiens
  CDR3 for beta chain variable domain of TCR clone 113436 (TRBV7-9, TRBJ2-3)
CASSPTDTQYF

SEQ ID NO: 226873 - protein, 13 aa, Homo sapiens
  CDR3 for alpha chain variable domain of TCR clone 113437 (TRAV1-2, TRAJ9)
CAALNTGGFKTIF

SEQ ID NO: 226874 - protein, 15 aa, Homo sapiens
  CDR3 for beta chain variable domain of TCR clone 113437 (TRBV28, TRBJ2-5)
CASSSGRTIQETQYF

SEQ ID NO: 226875 - protein, 11 aa, Homo sapiens
  CDR3 for alpha chain variable domain of TCR clone 113438 (TRAV12-2, TRAJ31)
CAVTRWARLMF

SEQ ID NO: 226876 - protein, 15 aa, Homo sapiens
  CDR3 for beta chain variable domain of TCR clone 113438 (TRBV19, TRBJ2-7)
FASSIGGGLVNEQYF

SEQ ID NO: 226877 - protein, 10 aa, Homo sapiens
  CDR3 for alpha chain variable domain of TCR clone 113439 (TRAV26-1, TRAJ22)
CIVSLNFFWF

SEQ ID NO: 226878 - protein, 12 aa, Homo sapiens
  CDR3 for beta chain variable domain of TCR clone 113439 (TRBV11-2, TRBJ2-1)
CASSPGNNEQFF

SEQ ID NO: 226879 - protein, 14 aa, Homo sapiens
  CDR3 for alpha chain variable domain of TCR clone 113440 (TRAV13-1, TRAJ35)
CAASKGGFGNVLHC

SEQ ID NO: 226880 - protein, 12 aa, Homo sapiens
  CDR3 for beta chain variable domain of TCR clone 113440 (TRBV6-3, TRBJ2-7)
CASSLTPYEQYF

SEQ ID NO: 226881 - protein, 14 aa, Homo sapiens
  CDR3 for alpha chain variable domain of TCR clone 113441 (TRAV12-2, TRAJ40)
CAVKIPSGTYKYIF

SEQ ID NO: 226882 - protein, 20 aa, Homo sapiens
  CDR3 for beta chain variable domain of TCR clone 113441 (TRBV28, TRBJ2-1)
CASTPIGRSPGTAGGNEQFF

SEQ ID NO: 226883 - protein, 16 aa, Homo sapiens
  CDR3 for alpha chain variable domain of TCR clone 113442 (TRAV3, TRAJ10)
CAVRDMRAGGGNKLTF

SEQ ID NO: 226884 - protein, 19 aa, Homo sapiens
  CDR3 for beta chain variable domain of TCR clone 113442 (TRBV6-3, TRBJ1-2)
YASSYSKGRTGPPNYGYTF

SEQ ID NO: 226885 - protein, 16 aa, Homo sapiens
  CDR3 for alpha chain variable domain of TCR clone 113443 (TRAV12-2, TRAJ50)
CAVGTATKTSHDKVIF

SEQ ID NO: 226886 - protein, 12 aa, Homo sapiens
  CDR3 for beta chain variable domain of TCR clone 113443 (TRBV12-4, TRBJ1-5)
CASSLGRQPQHF

SEQ ID NO: 226887 - protein, 14 aa, Homo sapiens
  CDR3 for alpha chain variable domain of TCR clone 113444 (TRAV9-2, TRAJ39)
CALYIYNAGNMLTF

SEQ ID NO: 226888 - protein, 12 aa, Homo sapiens
  CDR3 for beta chain variable domain of TCR clone 113444 (TRBV12-4, TRBJ1-3)
CASSFSGNTIYF

SEQ ID NO: 226889 - protein, 12 aa, Homo sapiens
  CDR3 for alpha chain variable domain of TCR clone 113445 (TRAV8-3, TRAJ20)
CAVGANDYKLSF

SEQ ID NO: 226890 - protein, 15 aa, Homo sapiens
  CDR3 for beta chain variable domain of TCR clone 113445 (TRBV7-9, TRBJ1-6)
CASSSPGRGNSPLHF

SEQ ID NO: 226891 - protein, 23 aa, Homo sapiens
  CDR3 for alpha chain variable domain of TCR clone 113446 (TRAV26-1, TRAJ38)
CIADNAGNNHIQNPYPAVYQLRD

SEQ ID NO: 226892 - protein, 17 aa, Homo sapiens
  CDR3 for beta chain variable domain of TCR clone 113446 (TRBV11-2, TRBJ2-6)
CASSQRDIFSGANVLTF

SEQ ID NO: 226893 - protein, 14 aa, Homo sapiens
  CDR3 for alpha chain variable domain of TCR clone 113447 (TRAV8-4, TRAJ48)
CAVSETFGNEKLTF

SEQ ID NO: 226894 - protein, 13 aa, Homo sapiens
  CDR3 for beta chain variable domain of TCR clone 113447 (TRBV12-4, TRBJ2-7)
CASSPTETYEQYF

SEQ ID NO: 226895 - protein, 14 aa, Homo sapiens
  CDR3 for alpha chain variable domain of TCR clone 113448 (TRAV12-3, TRAJ10)
SHLPLTGGGNKLTF

SEQ ID NO: 226896 - protein, 16 aa, Homo sapiens
  CDR3 for beta chain variable domain of TCR clone 113448 (TRBV20-1, TRBJ2-7)
CSATPGQGVLDHEQYF

SEQ ID NO: 226897 - protein, 15 aa, Homo sapiens
  CDR3 for alpha chain variable domain of TCR clone 113449 (TRAV17, TRAJ57)
CATGPSQGGSEKLVF

SEQ ID NO: 226898 - protein, 18 aa, Homo sapiens
  CDR3 for beta chain variable domain of TCR clone 113449 (TRBV7-9, TRBJ2-7)
CASSITTSGSRTWYEQYF

SEQ ID NO: 226899 - protein, 14 aa, Homo sapiens
  CDR3 for alpha chain variable domain of TCR clone 113450 (TRAV27, TRAJ23)
CAVLSYNQGGKLIF

SEQ ID NO: 226900 - protein, 15 aa, Homo sapiens
  CDR3 for beta chain variable domain of TCR clone 113450 (TRBV19, TRBJ2-2)
CASSLNRGVTGELFF

SEQ ID NO: 226901 - protein, 16 aa, Homo sapiens
  CDR3 for alpha chain variable domain of TCR clone 113451 (TRAV3, TRAJ21)
CAVRDIERGNFNKFYF

SEQ ID NO: 226902 - protein, 13 aa, Homo sapiens
  CDR3 for beta chain variable domain of TCR clone 113451 (TRBV12-4, TRBJ2-7)
CASSLTTGYEQYF

SEQ ID NO: 226903 - protein, 15 aa, Homo sapiens
  CDR3 for alpha chain variable domain of TCR clone 113452 (TRAV12-1, TRAJ44)
CVVFVNTGTASKLTF

SEQ ID NO: 226904 - protein, 18 aa, Homo sapiens
  CDR3 for beta chain variable domain of TCR clone 113452 (TRBV11-2, TRBJ2-3)
CASSLGGASRGAPNTQYF

SEQ ID NO: 226905 - protein, 11 aa, Homo sapiens
  CDR3 for alpha chain variable domain of TCR clone 113453 (TRAV16, TRAJ33)
CALHSNCQLIW

SEQ ID NO: 226906 - protein, 15 aa, Homo sapiens
  CDR3 for beta chain variable domain of TCR clone 113453 (TRBV4-1, TRBJ2-7)
CASSQQGQGFDEQYF

SEQ ID NO: 226907 - protein, 14 aa, Homo sapiens
  CDR3 for alpha chain variable domain of TCR clone 113454 (TRAV13-1, TRAJ44)
CAAKATGTASKLTF

SEQ ID NO: 226908 - protein, 13 aa, Homo sapiens
  CDR3 for beta chain variable domain of TCR clone 113454 (TRBV5-5, TRBJ1-2)
CASSFWRGEGYTF

SEQ ID NO: 226909 - protein, 14 aa, Homo sapiens
  CDR3 for alpha chain variable domain of TCR clone 113455 (TRAV1-2, TRAJ16)
CAVRGVSDGQKLLF

SEQ ID NO: 226910 - protein, 16 aa, Homo sapiens
  CDR3 for beta chain variable domain of TCR clone 113455 (TRBV20-1, TRBJ2-1)
CSARDHLAGGRGEQFF

SEQ ID NO: 226911 - protein, 16 aa, Homo sapiens
  CDR3 for alpha chain variable domain of TCR clone 113456 (TRAV12-3, TRAJ53)
CAMSVGSGGSNYKLTF

SEQ ID NO: 226912 - protein, 14 aa, Homo sapiens
  CDR3 for beta chain variable domain of TCR clone 113456 (TRBV5-1, TRBJ2-7)
CASSRGESLYEQYF

SEQ ID NO: 226913 - protein, 14 aa, Homo sapiens
  CDR3 for alpha chain variable domain of TCR clone 113457 (TRAV27, TRAJ52)
CAGAGGTSYGKLTF

SEQ ID NO: 226914 - protein, 16 aa, Homo sapiens
  CDR3 for beta chain variable domain of TCR clone 113457 (TRBV4-2, TRBJ1-1)
CASSQADPPGNTEAFF

SEQ ID NO: 226915 - protein, 13 aa, Homo sapiens
  CDR3 for alpha chain variable domain of TCR clone 113458 (TRAV3, TRAJ21)
CAVREPDFNKFYF

SEQ ID NO: 226916 - protein, 12 aa, Homo sapiens
  CDR3 for beta chain variable domain of TCR clone 113458 (TRBV9, TRBJ2-1)
CQQSLCGNEQFF

SEQ ID NO: 226917 - protein, 13 aa, Homo sapiens
  CDR3 for alpha chain variable domain of TCR clone 113459 (TRAV13-1, TRAJ53)
QAVSGGSNYKLTF

SEQ ID NO: 226918 - protein, 15 aa, Homo sapiens
  CDR3 for beta chain variable domain of TCR clone 113459 (TRBV5-1, TRBJ2-1)
CASSPPRAPYNEQFF

SEQ ID NO: 226919 - protein, 13 aa, Homo sapiens
  CDR3 for alpha chain variable domain of TCR clone 113460 (TRAV13-2, TRAJ48)
CAEMDFGNEKLTF

SEQ ID NO: 226920 - protein, 13 aa, Homo sapiens
  CDR3 for beta chain variable domain of TCR clone 113460 (TRBV18, TRBJ1-1)
CASSGGRNTEAFF

SEQ ID NO: 226921 - protein, 19 aa, Homo sapiens
  CDR3 for alpha chain variable domain of TCR clone 113461 (TRAV26-1, TRAJ52)
CIVRAHRNAGGTIYGKLTF

SEQ ID NO: 226922 - protein, 15 aa, Homo sapiens
  CDR3 for beta chain variable domain of TCR clone 113461 (TRBV12-4, TRBJ2-5)
CASSPPTGLQETQYF

SEQ ID NO: 226923 - protein, 14 aa, Homo sapiens
  CDR3 for alpha chain variable domain of TCR clone 113462 (TRAV8-3, TRAJ4)
CAVGASGGYNKLIF

SEQ ID NO: 226924 - protein, 12 aa, Homo sapiens
  CDR3 for beta chain variable domain of TCR clone 113462 (TRBV12-4, TRBJ2-7)
CASSLGGYEQYF

SEQ ID NO: 226925 - protein, 15 aa, Homo sapiens
  CDR3 for alpha chain variable domain of TCR clone 113463 (TRAV12-2, TRAJ26)
CAVNSHSNYGQNFVF

SEQ ID NO: 226926 - protein, 13 aa, Homo sapiens
  CDR3 for beta chain variable domain of TCR clone 113463 (TRBV7-3, TRBJ1-1)
CASSQDWGAEAFF

SEQ ID NO: 226927 - protein, 17 aa, Homo sapiens
  CDR3 for alpha chain variable domain of TCR clone 113464 (TRAV36/DV7, TRAJ52)
CAVAQRAGGTSYGKLTF

SEQ ID NO: 226928 - protein, 15 aa, Homo sapiens
  CDR3 for beta chain variable domain of TCR clone 113464 (TRBV19, TRBJ1-2)
CASSVGQVLNYGYTF

SEQ ID NO: 226929 - protein, 14 aa, Homo sapiens
  CDR3 for alpha chain variable domain of TCR clone 113465 (TRAV3, TRAJ21)
CAVESQANFNKFYF

SEQ ID NO: 226930 - protein, 12 aa, Homo sapiens
  CDR3 for beta chain variable domain of TCR clone 113465 (TRBV6-3, TRBJ2-7)
CASSVTPYEQYF

SEQ ID NO: 226931 - protein, 14 aa, Homo sapiens
  CDR3 for alpha chain variable domain of TCR clone 113466 (TRAV35, TRAJ42)
CAGRYGGSQGNLIF

SEQ ID NO: 226932 - protein, 15 aa, Homo sapiens
  CDR3 for beta chain variable domain of TCR clone 113466 (TRBV7-9, TRBJ2-1)
CASSLGWGSANEQFF

SEQ ID NO: 226933 - protein, 14 aa, Homo sapiens
  CDR3 for alpha chain variable domain of TCR clone 113467 (TRAV1-2, TRAJ16)
CAVNGFSDGQKLLF

SEQ ID NO: 226934 - protein, 14 aa, Homo sapiens
  CDR3 for beta chain variable domain of TCR clone 113467 (TRBV25-1, TRBJ1-1)
CASTHLGGNTEAFF

SEQ ID NO: 226935 - protein, 16 aa, Homo sapiens
  CDR3 for alpha chain variable domain of TCR clone 113468 (TRAV21, TRAJ52)
CAVTNAGVTSYGKLTF

SEQ ID NO: 226936 - protein, 17 aa, Homo sapiens
  CDR3 for beta chain variable domain of TCR clone 113468 (TRBV28, TRBJ2-5)
CASSRQGGLAGAETQYF

SEQ ID NO: 226937 - protein, 22 aa, Homo sapiens
  CDR3 for alpha chain variable domain of TCR clone 113469 (TRAV27, TRAJ38)
CAARRNAGNNHIQDPDPAVYQL

SEQ ID NO: 226938 - protein, 13 aa, Homo sapiens
  CDR3 for beta chain variable domain of TCR clone 113469 (TRBV12-5, TRBJ2-3)
CASGDRQSDTQYF

SEQ ID NO: 226939 - protein, 12 aa, Homo sapiens
  CDR3 for alpha chain variable domain of TCR clone 113470 (TRAV13-1, TRAJ21)
CAAKEGFNKFYF

SEQ ID NO: 226940 - protein, 14 aa, Homo sapiens
  CDR3 for beta chain variable domain of TCR clone 113470 (TRBV5-4, TRBJ1-1)
CASSFDSRRDEAFF

SEQ ID NO: 226941 - protein, 14 aa, Homo sapiens
  CDR3 for alpha chain variable domain of TCR clone 113471 (TRAV17, TRAJ57)
CATDPQGGSEKLVF

SEQ ID NO: 226942 - protein, 18 aa, Homo sapiens
  CDR3 for beta chain variable domain of TCR clone 113471 (TRBV20-1, TRBJ2-6)
CSAETTPTHGSGANVLTF

SEQ ID NO: 226943 - protein, 12 aa, Homo sapiens
  CDR3 for alpha chain variable domain of TCR clone 113472 (TRAV21, TRAJ42)
CAVGGSQGNLIF

SEQ ID NO: 226944 - protein, 19 aa, Homo sapiens
  CDR3 for beta chain variable domain of TCR clone 113472 (TRBV5-1, TRBJ2-3)
CASSLTRSAADWSTDTQYF

SEQ ID NO: 226945 - protein, 11 aa, Homo sapiens
  CDR3 for alpha chain variable domain of TCR clone 113473 (TRAV13-1, TRAJ39)
CASHAGNMLTF

SEQ ID NO: 226946 - protein, 14 aa, Homo sapiens
  CDR3 for beta chain variable domain of TCR clone 113473 (TRBV20-1, TRBJ2-5)
CSALVPGYQETQYF

SEQ ID NO: 226947 - protein, 15 aa, Homo sapiens
  CDR3 for alpha chain variable domain of TCR clone 113474 (TRAV29/DV5, TRAJ24)
CAASGATDSWGKFQF

SEQ ID NO: 226948 - protein, 15 aa, Homo sapiens
  CDR3 for beta chain variable domain of TCR clone 113474 (TRBV7-2, TRBJ1-2)
CASSLVSGGDYGYTF

SEQ ID NO: 226949 - protein, 13 aa, Homo sapiens
  CDR3 for alpha chain variable domain of TCR clone 113475 (TRAV17, TRAJ26)
CATVDNYGQNFVF

SEQ ID NO: 226950 - protein, 14 aa, Homo sapiens
  CDR3 for beta chain variable domain of TCR clone 113475 (TRBV12-5, TRBJ2-5)
CASGSRTHQETQYF

SEQ ID NO: 226951 - protein, 14 aa, Homo sapiens
  CDR3 for alpha chain variable domain of TCR clone 113476 (TRAV8-3, TRAJ21)
CAVGLNPRSDNFYF

SEQ ID NO: 226952 - protein, 16 aa, Homo sapiens
  CDR3 for beta chain variable domain of TCR clone 113476 (TRBV7-9, TRBJ2-7)
CASSSPSANTVNEQYF

SEQ ID NO: 226953 - protein, 15 aa, Homo sapiens
  CDR3 for alpha chain variable domain of TCR clone 113477 (TRAV27, TRAJ38)
CAGRFNAGNNRKLIW

SEQ ID NO: 226954 - protein, 14 aa, Homo sapiens
  CDR3 for beta chain variable domain of TCR clone 113477 (TRBV12-5, TRBJ2-5)
CASGSRTHQETQYF

SEQ ID NO: 226955 - protein, 14 aa, Homo sapiens
  CDR3 for alpha chain variable domain of TCR clone 113478 (TRAV26-1, TRAJ26)
CIVRATFLGQNFVV

SEQ ID NO: 226956 - protein, 16 aa, Homo sapiens
  CDR3 for beta chain variable domain of TCR clone 113478 (TRBV12-4, TRBJ2-7)
CASRSTGTGPSYEQYF

SEQ ID NO: 226957 - protein, 16 aa, Homo sapiens
  CDR3 for alpha chain variable domain of TCR clone 113479 (TRAV16, TRAJ37)
CSKWPDGSSNTGKLIF

SEQ ID NO: 226958 - protein, 13 aa, Homo sapiens
  CDR3 for beta chain variable domain of TCR clone 113479 (TRBV7-2, TRBJ2-2)
RASSLAVTGELFF

SEQ ID NO: 226959 - protein, 12 aa, Homo sapiens
  CDR3 for alpha chain variable domain of TCR clone 113480 (TRAV17, TRAJ57)
FATDGGSEKLVF

SEQ ID NO: 226960 - protein, 13 aa, Homo sapiens
  CDR3 for beta chain variable domain of TCR clone 113480 (TRBV7-9, TRBJ2-7)
CASSFAGAYEQYF

SEQ ID NO: 226961 - protein, 12 aa, Homo sapiens
  CDR3 for alpha chain variable domain of TCR clone 113481 (TRAV21, TRAJ24)
CAVMDSWRKLQF

SEQ ID NO: 226962 - protein, 16 aa, Homo sapiens
  CDR3 for beta chain variable domain of TCR clone 113481 (TRBV13, TRBJ2-2)
CASSEVFGANTGELFF

SEQ ID NO: 226963 - protein, 16 aa, Homo sapiens
  CDR3 for alpha chain variable domain of TCR clone 113482 (TRAV30, TRAJ24)
CGTEIVDADSWGKSQF

SEQ ID NO: 226964 - protein, 13 aa, Homo sapiens
  CDR3 for beta chain variable domain of TCR clone 113482 (TRBV4-1, TRBJ2-2)
CASSQENTGELFF

SEQ ID NO: 226965 - protein, 14 aa, Homo sapiens
  CDR3 for alpha chain variable domain of TCR clone 113483 (TRAV17, TRAJ12)
CATDEKDSSYKLIF

SEQ ID NO: 226966 - protein, 16 aa, Homo sapiens
  CDR3 for beta chain variable domain of TCR clone 113483 (TRBV11-2, TRBJ2-1)
RASSPRLAGVYNEQFF

SEQ ID NO: 226967 - protein, 16 aa, Homo sapiens
  CDR3 for alpha chain variable domain of TCR clone 113484 (TRAV30, TRAJ24)
CGTEIGDADSWGKFQF

SEQ ID NO: 226968 - protein, 12 aa, Homo sapiens
  CDR3 for beta chain variable domain of TCR clone 113484 (TRBV11-2, TRBJ2-1)
CASSPGNNEQFF

SEQ ID NO: 226969 - protein, 13 aa, Homo sapiens
  CDR3 for alpha chain variable domain of TCR clone 113485 (TRAV1-2, TRAJ9)
CAALNTGGFKTIF

SEQ ID NO: 226970 - protein, 13 aa, Homo sapiens
  CDR3 for beta chain variable domain of TCR clone 113485 (TRBV7-2, TRBJ2-7)
CASSSPSGSEQYF

SEQ ID NO: 226971 - protein, 13 aa, Homo sapiens
  CDR3 for alpha chain variable domain of TCR clone 113486 (TRAV13-1, TRAJ6)
CAASRGGRYIPTF

SEQ ID NO: 226972 - protein, 15 aa, Homo sapiens
  CDR3 for beta chain variable domain of TCR clone 113486 (TRBV25-1, TRBJ2-5)
CASSDTGTHQETQYF

SEQ ID NO: 226973 - protein, 13 aa, Homo sapiens
  CDR3 for alpha chain variable domain of TCR clone 113487 (TRAV12-1, TRAJ29)
CVVNGPGNTPLVF

SEQ ID NO: 226974 - protein, 13 aa, Homo sapiens
  CDR3 for beta chain variable domain of TCR clone 113487 (TRBV4-2, TRBJ2-5)
CASSRGQQETQYF

SEQ ID NO: 226975 - protein, 17 aa, Homo sapiens
  CDR3 for alpha chain variable domain of TCR clone 113488 (TRAV12-2, TRAJ6)
CAPQGPPRAGGSYIPTF

SEQ ID NO: 226976 - protein, 14 aa, Homo sapiens
  CDR3 for beta chain variable domain of TCR clone 113488 (TRBV7-9, TRBJ2-2)
CASSLVQDTGELFF

SEQ ID NO: 226977 - protein, 14 aa, Homo sapiens
  CDR3 for alpha chain variable domain of TCR clone 113489 (TRAV20, TRAJ20)
CAVRRGYNDYQLSF

SEQ ID NO: 226978 - protein, 13 aa, Homo sapiens
  CDR3 for beta chain variable domain of TCR clone 113489 (TRBV19, TRBJ2-5)
CASSETAPETQYF

SEQ ID NO: 226979 - protein, 11 aa, Homo sapiens
  CDR3 for alpha chain variable domain of TCR clone 113490 (TRAV3, TRAJ21)
CAVGNFNKFYF

SEQ ID NO: 226980 - protein, 15 aa, Homo sapiens
  CDR3 for beta chain variable domain of TCR clone 113490 (TRBV5-7, TRBJ1-5)
CASSYGKLWDQPQHF

SEQ ID NO: 226981 - protein, 12 aa, Homo sapiens
  CDR3 for alpha chain variable domain of TCR clone 113491 (TRAV12-1, TRAJ40)
CVVYSGTYKYIF

SEQ ID NO: 226982 - protein, 18 aa, Homo sapiens
  CDR3 for beta chain variable domain of TCR clone 113491 (TRBV11-3, TRBJ2-3)
CSSSLGGASRGAPNTQYF

SEQ ID NO: 226983 - protein, 15 aa, Homo sapiens
  CDR3 for alpha chain variable domain of TCR clone 113492 (TRAV3, TRAJ9)
CAVRARDTGGFKTIF

SEQ ID NO: 226984 - protein, 17 aa, Homo sapiens
  CDR3 for beta chain variable domain of TCR clone 113492 (TRBV7-3, TRBJ2-3)
CASSLMKRMRGADTQYF

SEQ ID NO: 226985 - protein, 14 aa, Homo sapiens
  CDR3 for alpha chain variable domain of TCR clone 113493 (TRAV3, TRAJ28)
CAVRRGAWSYQLTF

SEQ ID NO: 226986 - protein, 16 aa, Homo sapiens
  CDR3 for beta chain variable domain of TCR clone 113493 (TRBV4-1, TRBJ2-7)
CASSQEWTSGPLEQYF

SEQ ID NO: 226987 - protein, 13 aa, Homo sapiens
  CDR3 for alpha chain variable domain of TCR clone 113494 (TRAV3, TRAJ27)
CAVRPLGAGKSTF

SEQ ID NO: 226988 - protein, 17 aa, Homo sapiens
  CDR3 for beta chain variable domain of TCR clone 113494 (TRBV7-8, TRBJ2-6)
CASSAGTGGAGANVLTF

SEQ ID NO: 226989 - protein, 13 aa, Homo sapiens
  CDR3 for alpha chain variable domain of TCR clone 113495 (TRAV13-1, TRAJ39)
CSKYSNAGNMLTF

SEQ ID NO: 226990 - protein, 16 aa, Homo sapiens
  CDR3 for beta chain variable domain of TCR clone 113495 (TRBV15, TRBJ1-2)
CATSRGPRTGGGGYTF

SEQ ID NO: 226991 - protein, 14 aa, Homo sapiens
  CDR3 for alpha chain variable domain of TCR clone 113496 (TRAV1-2, TRAJ16)
CAVNRFSDGQKLLF

SEQ ID NO: 226992 - protein, 15 aa, Homo sapiens
  CDR3 for beta chain variable domain of TCR clone 113496 (TRBV2, TRBJ2-1)
CASSEEREEDNEQFF

SEQ ID NO: 226993 - protein, 11 aa, Homo sapiens
  CDR3 for alpha chain variable domain of TCR clone 113497 (TRAV2, TRAJ13)
CASGGYQKVTF

SEQ ID NO: 226994 - protein, 16 aa, Homo sapiens
  CDR3 for beta chain variable domain of TCR clone 113497 (TRBV19, TRBJ2-1)
CASSKAGPSSCNEQFF

SEQ ID NO: 226995 - protein, 16 aa, Homo sapiens
  CDR3 for alpha chain variable domain of TCR clone 113498 (TRAV8-3, TRAJ13)
CAVGAYPSGGYQKVTF

SEQ ID NO: 226996 - protein, 15 aa, Homo sapiens
  CDR3 for beta chain variable domain of TCR clone 113498 (TRBV19, TRBJ1-5)
CASSIVWADTQPQHF

SEQ ID NO: 226997 - protein, 14 aa, Homo sapiens
  CDR3 for alpha chain variable domain of TCR clone 113499 (TRAV9-2, TRAJ39)
CALYIYNAGNMLTF

SEQ ID NO: 226998 - protein, 15 aa, Homo sapiens
  CDR3 for beta chain variable domain of TCR clone 113499 (TRBV4-1, TRBJ2-2)
CASSQLGAAKGELFF

SEQ ID NO: 226999 - protein, 15 aa, Homo sapiens
  CDR3 for alpha chain variable domain of TCR clone 113500 (TRAV3, TRAJ29)
CAVRSPLSGNTPLVF

SEQ ID NO: 227000 - protein, 15 aa, Homo sapiens
  CDR3 for beta chain variable domain of TCR clone 113500 (TRBV28, TRBJ1-1)
CASRIKGGLNTEAFF

SEQ ID NO: 227001 - protein, 23 aa, Homo sapiens
  CDR3 for alpha chain variable domain of TCR clone 113501 (TRAV26-1, TRAJ38)
CIADNAGNNHIQNPDPAVYQLRD

SEQ ID NO: 227002 - protein, 13 aa, Homo sapiens
  CDR3 for beta chain variable domain of TCR clone 113501 (TRBV20-1, TRBJ1-1)
CSARGGGNTKAFF

SEQ ID NO: 227003 - protein, 15 aa, Homo sapiens
  CDR3 for alpha chain variable domain of TCR clone 113502 (TRAV12-1, TRAJ44)
CVVFVNTGTASKLTF

SEQ ID NO: 227004 - protein, 13 aa, Homo sapiens
  CDR3 for beta chain variable domain of TCR clone 113502 (TRBV2, TRBJ1-1)
CASSVSGYTEAFF

SEQ ID NO: 227005 - protein, 14 aa, Homo sapiens
  CDR3 for alpha chain variable domain of TCR clone 113503 (TRAV12-2, TRAJ44)
CAVNPAGTASKLTF

SEQ ID NO: 227006 - protein, 14 aa, Homo sapiens
  CDR3 for beta chain variable domain of TCR clone 113503 (TRBV7-2, TRBJ2-7)
CASRSQGAAYEQYF

SEQ ID NO: 227007 - protein, 15 aa, Homo sapiens
  CDR3 for alpha chain variable domain of TCR clone 113504 (TRAV17, TRAJ56)
CATDANTGANSKLTF

SEQ ID NO: 227008 - protein, 16 aa, Homo sapiens
  CDR3 for beta chain variable domain of TCR clone 113504 (TRBV7-3, TRBJ2-2)
CASSLKRGTVSGELFF

SEQ ID NO: 227009 - protein, 14 aa, Homo sapiens
  CDR3 for alpha chain variable domain of TCR clone 113505 (TRAV1-2, TRAJ16)
CAVNRFSDGQRLLF

SEQ ID NO: 227010 - protein, 11 aa, Homo sapiens
  CDR3 for beta chain variable domain of TCR clone 113505 (TRBV7-8, TRBJ2-7)
CASSLSLEQYF

SEQ ID NO: 227011 - protein, 17 aa, Homo sapiens
  CDR3 for alpha chain variable domain of TCR clone 113506 (TRAV3, TRAJ38)
CAVRDCLNAGNNRKLIW

SEQ ID NO: 227012 - protein, 14 aa, Homo sapiens
  CDR3 for beta chain variable domain of TCR clone 113506 (TRBV20-1, TRBJ1-5)
CSARDGGSGQPQHF

SEQ ID NO: 227013 - protein, 15 aa, Homo sapiens
  CDR3 for alpha chain variable domain of TCR clone 113507 (TRAV21, TRAJ40)
CAVRPQTSGTYKYIF

SEQ ID NO: 227014 - protein, 13 aa, Homo sapiens
  CDR3 for beta chain variable domain of TCR clone 113507 (TRBV12-4, TRBJ1-1)
CASSPGTGFEAFF

SEQ ID NO: 227015 - protein, 14 aa, Homo sapiens
  CDR3 for alpha chain variable domain of TCR clone 113508 (TRAV8-2, TRAJ45)
CVVSAGGGADGLTF

SEQ ID NO: 227016 - protein, 11 aa, Homo sapiens
  CDR3 for beta chain variable domain of TCR clone 113508 (TRBV12-4, TRBJ2-1)
CQQLVRVEQFF

SEQ ID NO: 227017 - protein, 15 aa, Homo sapiens
  CDR3 for alpha chain variable domain of TCR clone 113509 (TRAV8-3, TRAJ27)
CAVCPSKTNAGKSTF

SEQ ID NO: 227018 - protein, 14 aa, Homo sapiens
  CDR3 for beta chain variable domain of TCR clone 113509 (TRBV11-2, TRBJ2-3)
CASSRLARTDTQYF

SEQ ID NO: 227019 - protein, 17 aa, Homo sapiens
  CDR3 for alpha chain variable domain of TCR clone 113510 (TRAV13-1, TRAJ52)
CAASSGAGGTSYGKLTF

SEQ ID NO: 227020 - protein, 13 aa, Homo sapiens
  CDR3 for beta chain variable domain of TCR clone 113510 (TRBV14, TRBJ2-7)
CASSQDRRYEQYF

SEQ ID NO: 227021 - protein, 12 aa, Homo sapiens
  CDR3 for alpha chain variable domain of TCR clone 113511 (TRAV35, TRAJ49)
CAGWNTGNQFYF

SEQ ID NO: 227022 - protein, 15 aa, Homo sapiens
  CDR3 for beta chain variable domain of TCR clone 113511 (TRBV20-1, TRBJ2-7)
CSARDRVSGMDEQYF

SEQ ID NO: 227023 - protein, 15 aa, Homo sapiens
  CDR3 for alpha chain variable domain of TCR clone 113512 (TRAV8-2, TRAJ16)
CVVSDGFPDGQKLLF

SEQ ID NO: 227024 - protein, 14 aa, Homo sapiens
  CDR3 for beta chain variable domain of TCR clone 113512 (TRBV7-3, TRBJ1-1)
CASSLGTGYTEAFF

SEQ ID NO: 227025 - protein, 15 aa, Homo sapiens
  CDR3 for alpha chain variable domain of TCR clone 113513 (TRAV17, TRAJ23)
CATDAEDNQGGKLIF

SEQ ID NO: 227026 - protein, 12 aa, Homo sapiens
  CDR3 for beta chain variable domain of TCR clone 113513 (TRBV2, TRBJ2-1)
CAKREGYNKQFF

SEQ ID NO: 227027 - protein, 15 aa, Homo sapiens
  CDR3 for alpha chain variable domain of TCR clone 113514 (TRAV30, TRAJ13)
CGTQGVTGGYLKVTF

SEQ ID NO: 227028 - protein, 17 aa, Homo sapiens
  CDR3 for beta chain variable domain of TCR clone 113514 (TRBV20-1, TRBJ2-2)
CSARVKRTHVRSGELFF

SEQ ID NO: 227029 - protein, 11 aa, Homo sapiens
  CDR3 for alpha chain variable domain of TCR clone 113515 (TRAV27, TRAJ47)
SIVEYGNKLVF

SEQ ID NO: 227030 - protein, 13 aa, Homo sapiens
  CDR3 for beta chain variable domain of TCR clone 113515 (TRBV7-3, TRBJ1-1)
CASSQDWGAEAFF

SEQ ID NO: 227031 - protein, 11 aa, Homo sapiens
  CDR3 for alpha chain variable domain of TCR clone 113516 (TRAV21, TRAJ33)
GAVLSNYQLIW

SEQ ID NO: 227032 - protein, 15 aa, Homo sapiens
  CDR3 for beta chain variable domain of TCR clone 113516 (TRBV11-2, TRBJ2-7)
CASSLMVGGSYEQYF

SEQ ID NO: 227033 - protein, 15 aa, Homo sapiens
  CDR3 for alpha chain variable domain of TCR clone 113517 (TRAV3, TRAJ22)
CDVRDRGGSARQLTF

SEQ ID NO: 227034 - protein, 20 aa, Homo sapiens
  CDR3 for beta chain variable domain of TCR clone 113517 (TRBV11-2, TRBJ1-6)
CASSLVFATGGSVHPSTLGT

SEQ ID NO: 227035 - protein, 12 aa, Homo sapiens
  CDR3 for alpha chain variable domain of TCR clone 113518 (TRAV13-2, TRAJ23)
CAERHRGGKLIF

SEQ ID NO: 227036 - protein, 12 aa, Homo sapiens
  CDR3 for beta chain variable domain of TCR clone 113518 (TRBV18, TRBJ2-7)
CASSLDSYEQYF

SEQ ID NO: 227037 - protein, 14 aa, Homo sapiens
  CDR3 for alpha chain variable domain of TCR clone 113519 (TRAV13-2, TRAJ15)
CAENPNQAGTALIF

SEQ ID NO: 227038 - protein, 16 aa, Homo sapiens
  CDR3 for beta chain variable domain of TCR clone 113519 (TRBV12-4, TRBJ1-2)
YASSPTATGKTRGYTF

SEQ ID NO: 227039 - protein, 11 aa, Homo sapiens
  CDR3 for alpha chain variable domain of TCR clone 113520 (TRAV3, TRAJ17)
CTEAAGNKLTF

SEQ ID NO: 227040 - protein, 15 aa, Homo sapiens
  CDR3 for beta chain variable domain of TCR clone 113520 (TRBV12-4, TRBJ2-7)
CASSLGSGGPYEQYF

SEQ ID NO: 227041 - protein, 12 aa, Homo sapiens
  CDR3 for alpha chain variable domain of TCR clone 113521 (TRAV12-3, TRAJ17)
CAMTLTGNKLIF

SEQ ID NO: 227042 - protein, 15 aa, Homo sapiens
  CDR3 for beta chain variable domain of TCR clone 113521 (TRBV19, TRBJ2-1)
CASSILGEGRNEQFF

SEQ ID NO: 227043 - protein, 13 aa, Homo sapiens
  CDR3 for alpha chain variable domain of TCR clone 113522 (TRAV26-1, TRAJ34)
CIVRPWITDKPIF

SEQ ID NO: 227044 - protein, 14 aa, Homo sapiens
  CDR3 for beta chain variable domain of TCR clone 113522 (TRBV12-4, TRBJ1-4)
CASSRQGANEKLFF

SEQ ID NO: 227045 - protein, 11 aa, Homo sapiens
  CDR3 for alpha chain variable domain of TCR clone 113523 (TRAV13-1, TRAJ49)
CACVGGNQFYF

SEQ ID NO: 227046 - protein, 16 aa, Homo sapiens
  CDR3 for beta chain variable domain of TCR clone 113523 (TRBV11-2, TRBJ2-2)
CASSLRTGNLIGERFF

SEQ ID NO: 227047 - protein, 21 aa, Homo sapiens
  CDR3 for alpha chain variable domain of TCR clone 113524 (TRAV36/DV7, TRAJ39)
TATQTGDSAIYLPNAGNMLTF

SEQ ID NO: 227048 - protein, 13 aa, Homo sapiens
  CDR3 for beta chain variable domain of TCR clone 113524 (TRBV7-2, TRBJ2-2)
CASSLAVTGELFF

SEQ ID NO: 227049 - protein, 14 aa, Homo sapiens
  CDR3 for alpha chain variable domain of TCR clone 113525 (TRAV12-2, TRAJ44)
CAVNKAGTASKLTF

SEQ ID NO: 227050 - protein, 12 aa, Homo sapiens
  CDR3 for beta chain variable domain of TCR clone 113525 (TRBV28, TRBJ2-7)
CASSFSSYEQYF

SEQ ID NO: 227051 - protein, 11 aa, Homo sapiens
  CDR3 for alpha chain variable domain of TCR clone 113526 (TRAV23/DV6, TRAJ44)
CAAPTPGKLTF

SEQ ID NO: 227052 - protein, 16 aa, Homo sapiens
  CDR3 for beta chain variable domain of TCR clone 113526 (TRBV2, TRBJ2-3)
CASSTSVEGVTDTQYF

SEQ ID NO: 227053 - protein, 23 aa, Homo sapiens
  CDR3 for alpha chain variable domain of TCR clone 113527 (TRAV26-1, TRAJ38)
CIADNAGNNHIQNPDPAVYQLRD

SEQ ID NO: 227054 - protein, 14 aa, Homo sapiens
  CDR3 for beta chain variable domain of TCR clone 113527 (TRBV7-7, TRBJ2-2)
CATRQDSDTGELFF

SEQ ID NO: 227055 - protein, 14 aa, Homo sapiens
  CDR3 for alpha chain variable domain of TCR clone 113528 (TRAV12-2, TRAJ44)
CAVNPPGTASKLTF

SEQ ID NO: 227056 - protein, 13 aa, Homo sapiens
  CDR3 for beta chain variable domain of TCR clone 113528 (TRBV20-1, TRBJ1-6)
CSAPLGVGSPLHF

SEQ ID NO: 227057 - protein, 15 aa, Homo sapiens
  CDR3 for alpha chain variable domain of TCR clone 113529 (TRAV23/DV6, TRAJ18)
RAASFRGSTLGRLYF

SEQ ID NO: 227058 - protein, 13 aa, Homo sapiens
  CDR3 for beta chain variable domain of TCR clone 113529 (TRBV28, TRBJ2-7)
CAILDRAGGEQYF

SEQ ID NO: 227059 - protein, 12 aa, Homo sapiens
  CDR3 for alpha chain variable domain of TCR clone 113530 (TRAV8-3, TRAJ26)
CAGDKYGQNFVF

SEQ ID NO: 227060 - protein, 12 aa, Homo sapiens
  CDR3 for beta chain variable domain of TCR clone 113530 (TRBV11-2, TRBJ2-1)
CASSPGNNEQFF

SEQ ID NO: 227061 - protein, 15 aa, Homo sapiens
  CDR3 for alpha chain variable domain of TCR clone 113531 (TRAV12-2, TRAJ53)
CAVNGGGGSNHKLTF

SEQ ID NO: 227062 - protein, 12 aa, Homo sapiens
  CDR3 for beta chain variable domain of TCR clone 113531 (TRBV7-6, TRBJ2-5)
CASSLSQETQYF

SEQ ID NO: 227063 - protein, 12 aa, Homo sapiens
  CDR3 for alpha chain variable domain of TCR clone 113532 (TRAV8-3, TRAJ41)
CAVALSGYAPNF

SEQ ID NO: 227064 - protein, 18 aa, Homo sapiens
  CDR3 for beta chain variable domain of TCR clone 113532 (TRBV20-1, TRBJ2-6)
CSAETTPTHGSGANVLTF

SEQ ID NO: 227065 - protein, 14 aa, Homo sapiens
  CDR3 for alpha chain variable domain of TCR clone 113533 (TRAV34, TRAJ44)
CGADGTGTASKLTF

SEQ ID NO: 227066 - protein, 17 aa, Homo sapiens
  CDR3 for beta chain variable domain of TCR clone 113533 (TRBV11-2, TRBJ2-1)
CASSLCPPGVEYNEQFF

SEQ ID NO: 227067 - protein, 16 aa, Homo sapiens
  CDR3 for alpha chain variable domain of TCR clone 113534 (TRAV30, TRAJ24)
CGTEIVDADSWGKFQF

SEQ ID NO: 227068 - protein, 12 aa, Homo sapiens
  CDR3 for beta chain variable domain of TCR clone 113534 (TRBV11-2, TRBJ2-2)
CASRLGGGELFF

SEQ ID NO: 227069 - protein, 13 aa, Homo sapiens
  CDR3 for alpha chain variable domain of TCR clone 113535 (TRAV12-2, TRAJ18)
CAVRGSTLGRLYF

SEQ ID NO: 227070 - protein, 18 aa, Homo sapiens
  CDR3 for beta chain variable domain of TCR clone 113535 (TRBV27, TRBJ2-3)
CASSSSGTSGRGTDTQYF

SEQ ID NO: 227071 - protein, 16 aa, Homo sapiens
  CDR3 for alpha chain variable domain of TCR clone 113536 (TRAV3, TRAJ37)
CSVRGKGSGNTGKLIF

SEQ ID NO: 227072 - protein, 16 aa, Homo sapiens
  CDR3 for beta chain variable domain of TCR clone 113536 (TRBV12-4, TRBJ1-5)
CASSRPVGGSNQPQHF

SEQ ID NO: 227073 - protein, 14 aa, Homo sapiens
  CDR3 for alpha chain variable domain of TCR clone 113537 (TRAV1-1, TRAJ27)
CAVIYNTNAGKSTF

SEQ ID NO: 227074 - protein, 15 aa, Homo sapiens
  CDR3 for beta chain variable domain of TCR clone 113537 (TRBV7-2, TRBJ2-1)
CASSSGLAGGNEQVF

SEQ ID NO: 227075 - protein, 12 aa, Homo sapiens
  CDR3 for alpha chain variable domain of TCR clone 113538 (TRAV3, TRAJ20)
CAVGDGDYKLSF

SEQ ID NO: 227076 - protein, 17 aa, Homo sapiens
  CDR3 for beta chain variable domain of TCR clone 113538 (TRBV15, TRBJ1-2)
CATSGREIDVVNYGYTF

SEQ ID NO: 227077 - protein, 16 aa, Homo sapiens
  CDR3 for alpha chain variable domain of TCR clone 113539 (TRAV3, TRAJ5)
CAVRNLMDTGRRAITF

SEQ ID NO: 227078 - protein, 16 aa, Homo sapiens
  CDR3 for beta chain variable domain of TCR clone 113539 (TRBV4-2, TRBJ2-7)
CASSQEGLANSYEQYF

SEQ ID NO: 227079 - protein, 17 aa, Homo sapiens
  CDR3 for alpha chain variable domain of TCR clone 113540 (TRAV4, TRAJ42)
CLVGVLNYGGSQGNPIF

SEQ ID NO: 227080 - protein, 12 aa, Homo sapiens
  CDR3 for beta chain variable domain of TCR clone 113540 (TRBV20-1, TRBJ2-1)
CSAQYAYNEQFF

SEQ ID NO: 227081 - protein, 16 aa, Homo sapiens
  CDR3 for alpha chain variable domain of TCR clone 113541 (TRAV30, TRAJ24)
CGTEIVDADSWGKFQF

SEQ ID NO: 227082 - protein, 17 aa, Homo sapiens
  CDR3 for beta chain variable domain of TCR clone 113541 (TRBV18, TRBJ1-5)
CASSPTMGQGTNQPQHF

SEQ ID NO: 227083 - protein, 11 aa, Homo sapiens
  CDR3 for alpha chain variable domain of TCR clone 113542 (TRAV13-2, TRAJ36)
CTETGANNLFF

SEQ ID NO: 227084 - protein, 13 aa, Homo sapiens
  CDR3 for beta chain variable domain of TCR clone 113542 (TRBV7-9, TRBJ2-4)
CATEGLAGNIQYF

SEQ ID NO: 227085 - protein, 12 aa, Homo sapiens
  CDR3 for alpha chain variable domain of TCR clone 113543 (TRAV2, TRAJ10)
CASTGGGNKLTF

SEQ ID NO: 227086 - protein, 14 aa, Homo sapiens
  CDR3 for beta chain variable domain of TCR clone 113543 (TRBV7-2, TRBJ2-2)
CASRGQGAAGERFF

SEQ ID NO: 227087 - protein, 12 aa, Homo sapiens
  CDR3 for alpha chain variable domain of TCR clone 113544 (TRAV3, TRAJ27)
CAVGDGAGKSTF

SEQ ID NO: 227088 - protein, 16 aa, Homo sapiens
  CDR3 for beta chain variable domain of TCR clone 113544 (TRBV7-3, TRBJ2-2)
CASSLKRGTLSGELFF

SEQ ID NO: 227089 - protein, 16 aa, Homo sapiens
  CDR3 for alpha chain variable domain of TCR clone 113545 (TRAV30, TRAJ24)
CGTEIVDADSWGNSSL

SEQ ID NO: 227090 - protein, 16 aa, Homo sapiens
  CDR3 for beta chain variable domain of TCR clone 113545 (TRBV19, TRBJ2-1)
CASSSKGTRSYNEQFF

SEQ ID NO: 227091 - protein, 17 aa, Homo sapiens
  CDR3 for alpha chain variable domain of TCR clone 113546 (TRAV29/DV5, TRAJ21)
CAASNKFYFGSGTKLNV

SEQ ID NO: 227092 - protein, 13 aa, Homo sapiens
  CDR3 for beta chain variable domain of TCR clone 113546 (TRBV7-9, TRBJ1-2)
CASSLKQNYGYTF

SEQ ID NO: 227093 - protein, 20 aa, Homo sapiens
  CDR3 for alpha chain variable domain of TCR clone 113547 (TRAV12-1, TRAJ18)
CVPRTDIGPDRGSTLGRLYF

SEQ ID NO: 227094 - protein, 18 aa, Homo sapiens
  CDR3 for beta chain variable domain of TCR clone 113547 (TRBV4-1, TRBJ2-2)
HQQQKEASGRPNTGELFF

SEQ ID NO: 227095 - protein, 12 aa, Homo sapiens
  CDR3 for alpha chain variable domain of TCR clone 113548 (TRAV4, TRAJ26)
CLMGDYGQNFVF

SEQ ID NO: 227096 - protein, 16 aa, Homo sapiens
  CDR3 for beta chain variable domain of TCR clone 113548 (TRBV7-2, TRBJ1-2)
CASSSNQDRRGHGYTF

SEQ ID NO: 227097 - protein, 14 aa, Homo sapiens
  CDR3 for alpha chain variable domain of TCR clone 113549 (TRAV35, TRAJ33)
CWPRGMDSNYQLIW

SEQ ID NO: 227098 - protein, 11 aa, Homo sapiens
  CDR3 for beta chain variable domain of TCR clone 113549 (TRBV10-3, TRBJ2-7)
CAISEGLEQYF

SEQ ID NO: 227099 - protein, 18 aa, Homo sapiens
  CDR3 for alpha chain variable domain of TCR clone 113550 (TRAV21, TRAJ52)
CAVRPSPAGGTSYGKLTF

SEQ ID NO: 227100 - protein, 12 aa, Homo sapiens
  CDR3 for beta chain variable domain of TCR clone 113550 (TRBV7-8, TRBJ1-1)
CASSSLGGEAFF

SEQ ID NO: 227101 - protein, 13 aa, Homo sapiens
  CDR3 for alpha chain variable domain of TCR clone 113551 (TRAV21, TRAJ57)
CAVTQGGSEKLVF

SEQ ID NO: 227102 - protein, 17 aa, Homo sapiens
  CDR3 for beta chain variable domain of TCR clone 113551 (TRBV7-8, TRBJ2-6)
CASSAGTGGAGANVLTF

SEQ ID NO: 227103 - protein, 12 aa, Homo sapiens
  CDR3 for alpha chain variable domain of TCR clone 113552 (TRAV3, TRAJ27)
CAVRAGAGKSTF

SEQ ID NO: 227104 - protein, 13 aa, Homo sapiens
  CDR3 for beta chain variable domain of TCR clone 113552 (TRBV10-3, TRBJ1-2)
CAINADLNYGYTF

SEQ ID NO: 227105 - protein, 15 aa, Homo sapiens
  CDR3 for alpha chain variable domain of TCR clone 113553 (TRAV2, TRAJ15)
CAVEDREQAGTARIF

SEQ ID NO: 227106 - protein, 13 aa, Homo sapiens
  CDR3 for beta chain variable domain of TCR clone 113553 (TRBV10-2, TRBJ2-7)
CASGTSGGYEQYF

SEQ ID NO: 227107 - protein, 14 aa, Homo sapiens
  CDR3 for alpha chain variable domain of TCR clone 113554 (TRAV17, TRAJ56)
CATVPAGANSKLTF

SEQ ID NO: 227108 - protein, 14 aa, Homo sapiens
  CDR3 for beta chain variable domain of TCR clone 113554 (TRBV12-5, TRBJ2-5)
CASGSRTHQETQYF

SEQ ID NO: 227109 - protein, 17 aa, Homo sapiens
  CDR3 for alpha chain variable domain of TCR clone 113555 (TRAV8-3, TRAJ50)
CAVGAVDTETSYDEVIF

SEQ ID NO: 227110 - protein, 13 aa, Homo sapiens
  CDR3 for beta chain variable domain of TCR clone 113555 (TRBV7-9, TRBJ2-2)
CASSSAGTGELFF

SEQ ID NO: 227111 - protein, 14 aa, Homo sapiens
  CDR3 for alpha chain variable domain of TCR clone 113556 (TRAV12-3, TRAJ22)
CAMSLFGSARQLTF

SEQ ID NO: 227112 - protein, 15 aa, Homo sapiens
  CDR3 for beta chain variable domain of TCR clone 113556 (TRBV7-2, TRBJ1-2)
CASSLVSGGDYGYTF

SEQ ID NO: 227113 - protein, 15 aa, Homo sapiens
  CDR3 for alpha chain variable domain of TCR clone 113557 (TRAV35, TRAJ52)
CAELAGGTSYGKLTF

SEQ ID NO: 227114 - protein, 14 aa, Homo sapiens
  CDR3 for beta chain variable domain of TCR clone 113557 (TRBV25-1, TRBJ1-1)
CASTHLGGNTEAFF

SEQ ID NO: 227115 - protein, 12 aa, Homo sapiens
  CDR3 for alpha chain variable domain of TCR clone 113558 (TRAV3, TRAJ43)
CAVRYPNNDMRF

SEQ ID NO: 227116 - protein, 15 aa, Homo sapiens
  CDR3 for beta chain variable domain of TCR clone 113558 (TRBV27, TRBJ1-5)
CASSLGTGFDQPQHF

SEQ ID NO: 227117 - protein, 14 aa, Homo sapiens
  CDR3 for alpha chain variable domain of TCR clone 113559 (TRAV12-3, TRAJ5)
CAMSTYTGRRALTF

SEQ ID NO: 227118 - protein, 13 aa, Homo sapiens
  CDR3 for beta chain variable domain of TCR clone 113559 (TRBV28, TRBJ2-3)
GASSTGGGDTQYF

SEQ ID NO: 227119 - protein, 13 aa, Homo sapiens
  CDR3 for alpha chain variable domain of TCR clone 113560 (TRAV21, TRAJ57)
CAVTQGGSEKLVF

SEQ ID NO: 227120 - protein, 14 aa, Homo sapiens
  CDR3 for beta chain variable domain of TCR clone 113560 (TRBV7-9, TRBJ2-1)
CASSPRDSLYEQFF

SEQ ID NO: 227121 - protein, 15 aa, Homo sapiens
  CDR3 for alpha chain variable domain of TCR clone 113561 (TRAV25, TRAJ52)
CAGRPGGTSYGKLTF

SEQ ID NO: 227122 - protein, 13 aa, Homo sapiens
  CDR3 for beta chain variable domain of TCR clone 113561 (TRBV12-4, TRBJ1-5)
CASSPDRAQPQHF

SEQ ID NO: 227123 - protein, 21 aa, Homo sapiens
  CDR3 for alpha chain variable domain of TCR clone 113562 (TRAV8-3, TRAJ10)
CAVGHTHGWRKQTHLWDRHSA

SEQ ID NO: 227124 - protein, 10 aa, Homo sapiens
  CDR3 for beta chain variable domain of TCR clone 113562 (TRBV20-1, TRBJ2-5)
CSARFETQYF

SEQ ID NO: 227125 - protein, 15 aa, Homo sapiens
  CDR3 for alpha chain variable domain of TCR clone 113563 (TRAV2, TRAJ9)
CAVEDRGTGGFKTIF

SEQ ID NO: 227126 - protein, 16 aa, Homo sapiens
  CDR3 for beta chain variable domain of TCR clone 113563 (TRBV10-3, TRBJ2-1)
CAISGVGDGGGGEQFF

SEQ ID NO: 227127 - protein, 14 aa, Homo sapiens
  CDR3 for alpha chain variable domain of TCR clone 113564 (TRAV35, TRAJ13)
CAGRSTGGYQKVTF

SEQ ID NO: 227128 - protein, 14 aa, Homo sapiens
  CDR3 for beta chain variable domain of TCR clone 113564 (TRBV19, TRBJ2-2)
CASSMVGLSGELFF

SEQ ID NO: 227129 - protein, 13 aa, Homo sapiens
  CDR3 for alpha chain variable domain of TCR clone 113565 (TRAV12-3, TRAJ47)
CAMKKEYGNKLVF

SEQ ID NO: 227130 - protein, 14 aa, Homo sapiens
  CDR3 for beta chain variable domain of TCR clone 113565 (TRBV19, TRBJ2-1)
CASPTFVLSGEQFF

SEQ ID NO: 227131 - protein, 14 aa, Homo sapiens
  CDR3 for alpha chain variable domain of TCR clone 113566 (TRAV1-2, TRAJ16)
CAVNRFSDGQKLLF

SEQ ID NO: 227132 - protein, 13 aa, Homo sapiens
  CDR3 for beta chain variable domain of TCR clone 113566 (TRBV4-1, TRBJ2-3)
CASSQPPTDTQYF

SEQ ID NO: 227133 - protein, 14 aa, Homo sapiens
  CDR3 for alpha chain variable domain of TCR clone 113567 (TRAV12-2, TRAJ13)
CAVKKTGGYQKVTF

SEQ ID NO: 227134 - protein, 15 aa, Homo sapiens
  CDR3 for beta chain variable domain of TCR clone 113567 (TRBV15, TRBJ1-1)
CATSLQGGRNTEAFF

SEQ ID NO: 227135 - protein, 15 aa, Homo sapiens
  CDR3 for alpha chain variable domain of TCR clone 113568 (TRAV12-1, TRAJ44)
CVVDEYTGTASKLPF

SEQ ID NO: 227136 - protein, 14 aa, Homo sapiens
  CDR3 for beta chain variable domain of TCR clone 113568 (TRBV5-1, TRBJ1-2)
CASSLEPVNYGYTF

SEQ ID NO: 227137 - protein, 12 aa, Homo sapiens
  CDR3 for alpha chain variable domain of TCR clone 113569 (TRAV13-1, TRAJ53)
AASGGSNYKLTF

SEQ ID NO: 227138 - protein, 13 aa, Homo sapiens
  CDR3 for beta chain variable domain of TCR clone 113569 (TRBV7-3, TRBJ1-1)
CASSQDWGAEAFF

SEQ ID NO: 227139 - protein, 17 aa, Homo sapiens
  CDR3 for alpha chain variable domain of TCR clone 113570 (TRAV12-2, TRAJ22)
CAVNRIPFSGSARQLTF

SEQ ID NO: 227140 - protein, 13 aa, Homo sapiens
  CDR3 for beta chain variable domain of TCR clone 113570 (TRBV11-3, TRBJ1-1)
CASSSNRDTEALF

SEQ ID NO: 227141 - protein, 15 aa, Homo sapiens
  CDR3 for alpha chain variable domain of TCR clone 113571 (TRAV25, TRAJ53)
CPTSNSGGSNYKLTF

SEQ ID NO: 227142 - protein, 14 aa, Homo sapiens
  CDR3 for beta chain variable domain of TCR clone 113571 (TRBV11-2, TRBJ2-3)
YASSRLARTDTQYF

SEQ ID NO: 227143 - protein, 15 aa, Homo sapiens
  CDR3 for alpha chain variable domain of TCR clone 113572 (TRAV26-1, TRAJ28)
CIVRVAGAGSYQLTF

SEQ ID NO: 227144 - protein, 19 aa, Homo sapiens
  CDR3 for beta chain variable domain of TCR clone 113572 (TRBV7-3, TRBJ2-7)
CASSFTGVAGGWPSYEQYF

SEQ ID NO: 227145 - protein, 14 aa, Homo sapiens
  CDR3 for alpha chain variable domain of TCR clone 113573 (TRAV8-3, TRAJ9)
CAVVYNTGGFKTIF

SEQ ID NO: 227146 - protein, 14 aa, Homo sapiens
  CDR3 for beta chain variable domain of TCR clone 113573 (TRBV7-3, TRBJ2-2)
CASSSGGYTGGLFF

SEQ ID NO: 227147 - protein, 12 aa, Homo sapiens
  CDR3 for alpha chain variable domain of TCR clone 113574 (TRAV12-3, TRAJ17)
CAMTLTGNKLTF

SEQ ID NO: 227148 - protein, 16 aa, Homo sapiens
  CDR3 for beta chain variable domain of TCR clone 113574 (TRBV10-2, TRBJ1-5)
CASSVRDRASNQPQHF

SEQ ID NO: 227149 - protein, 13 aa, Homo sapiens
  CDR3 for alpha chain variable domain of TCR clone 113575 (TRAV3, TRAJ21)
CAVREPDCNKFYF

SEQ ID NO: 227150 - protein, 17 aa, Homo sapiens
  CDR3 for beta chain variable domain of TCR clone 113575 (TRBV7-8, TRBJ2-6)
CASSAGTGGAGANVLTF

SEQ ID NO: 227151 - protein, 18 aa, Homo sapiens
  CDR3 for alpha chain variable domain of TCR clone 113576 (TRAV21, TRAJ52)
CAVRPSPAGGTSYGKLTF

SEQ ID NO: 227152 - protein, 16 aa, Homo sapiens
  CDR3 for beta chain variable domain of TCR clone 113576 (TRBV9, TRBJ2-7)
CASSAGPDRSPYEQYF

SEQ ID NO: 227153 - protein, 15 aa, Homo sapiens
  CDR3 for alpha chain variable domain of TCR clone 113577 (TRAV3, TRAJ22)
CAVRDRGGSARQLTF

SEQ ID NO: 227154 - protein, 12 aa, Homo sapiens
  CDR3 for beta chain variable domain of TCR clone 113577 (TRBV12-5, TRBJ2-5)
CASGQGVETQYF

SEQ ID NO: 227155 - protein, 13 aa, Homo sapiens
  CDR3 for alpha chain variable domain of TCR clone 113578 (TRAV20, TRAJ37)
CAGCSSNTGKLIF

SEQ ID NO: 227156 - protein, 13 aa, Homo sapiens
  CDR3 for beta chain variable domain of TCR clone 113578 (TRBV12-4, TRBJ2-7)
CASSPTETYEQYF

SEQ ID NO: 227157 - protein, 14 aa, Homo sapiens
  CDR3 for alpha chain variable domain of TCR clone 113579 (TRAV12-2, TRAJ13)
CAVKKTGGYQKVTF

SEQ ID NO: 227158 - protein, 16 aa, Homo sapiens
  CDR3 for beta chain variable domain of TCR clone 113579 (TRBV20-1, TRBJ1-2)
CSASMGQGVANYGYAF

SEQ ID NO: 227159 - protein, 14 aa, Homo sapiens
  CDR3 for alpha chain variable domain of TCR clone 113580 (TRAV1-2, TRAJ17)
CALRRGAAGNKLTF

SEQ ID NO: 227160 - protein, 14 aa, Homo sapiens
  CDR3 for beta chain variable domain of TCR clone 113580 (TRBV7-2, TRBJ2-7)
CASRSQGAAYEQYF

SEQ ID NO: 227161 - protein, 14 aa, Homo sapiens
  CDR3 for alpha chain variable domain of TCR clone 113581 (TRAV27, TRAJ12)
CAGARLDSSYKLIF

SEQ ID NO: 227162 - protein, 18 aa, Homo sapiens
  CDR3 for beta chain variable domain of TCR clone 113581 (TRBV10-3, TRBJ2-7)
CAISESGRPSGGRVEQYF

SEQ ID NO: 227163 - protein, 19 aa, Homo sapiens
  CDR3 for alpha chain variable domain of TCR clone 113582 (TRAV27, TRAJ53)
ASTSVQSRNSGGSNYKLTF

SEQ ID NO: 227164 - protein, 14 aa, Homo sapiens
  CDR3 for beta chain variable domain of TCR clone 113582 (TRBV6-1, TRBJ1-3)
CASVQGGGGNTIYF

SEQ ID NO: 227165 - protein, 12 aa, Homo sapiens
  CDR3 for alpha chain variable domain of TCR clone 113583 (TRAV1-1, TRAJ39)
CAVPVVGNMLTF

SEQ ID NO: 227166 - protein, 15 aa, Homo sapiens
  CDR3 for beta chain variable domain of TCR clone 113583 (TRBV7-2, TRBJ2-1)
CASSSGLAGGNEQFF

SEQ ID NO: 227167 - protein, 19 aa, Homo sapiens
  CDR3 for alpha chain variable domain of TCR clone 113584 (TRAV3, TRAJ6)
CAVRDRNPSRSGGSYIPTF

SEQ ID NO: 227168 - protein, 15 aa, Homo sapiens
  CDR3 for beta chain variable domain of TCR clone 113584 (TRBV18, TRBJ2-7)
CASPPTFMDSYEQYF

SEQ ID NO: 227169 - protein, 17 aa, Homo sapiens
  CDR3 for alpha chain variable domain of TCR clone 113585 (TRAV8-6, TRAJ58)
CAVSSWVGETSGSRLTF

SEQ ID NO: 227170 - protein, 14 aa, Homo sapiens
  CDR3 for beta chain variable domain of TCR clone 113585 (TRBV4-2, TRBJ2-1)
CASGLDRAYNERFF

SEQ ID NO: 227171 - protein, 15 aa, Homo sapiens
  CDR3 for alpha chain variable domain of TCR clone 113586 (TRAV3, TRAJ3)
CAVRDGHSSASKIIF

SEQ ID NO: 227172 - protein, 14 aa, Homo sapiens
  CDR3 for beta chain variable domain of TCR clone 113586 (TRBV28, TRBJ1-4)
CACSFGTFDEKLFF

SEQ ID NO: 227173 - protein, 15 aa, Homo sapiens
  CDR3 for alpha chain variable domain of TCR clone 113587 (TRAV26-1, TRAJ29)
CIVRVEGSGNTPLVF

SEQ ID NO: 227174 - protein, 14 aa, Homo sapiens
  CDR3 for beta chain variable domain of TCR clone 113587 (TRBV19, TRBJ2-1)
CASSMGSGATEQFF

SEQ ID NO: 227175 - protein, 14 aa, Homo sapiens
  CDR3 for alpha chain variable domain of TCR clone 113588 (TRAV17, TRAJ16)
CATADFSNGQKLLF

SEQ ID NO: 227176 - protein, 15 aa, Homo sapiens
  CDR3 for beta chain variable domain of TCR clone 113588 (TRBV18, TRBJ2-1)
CASSPPSASYNEQFF

SEQ ID NO: 227177 - protein, 16 aa, Homo sapiens
  CDR3 for alpha chain variable domain of TCR clone 113589 (TRAV30, TRAJ24)
CGTEIVDADSWGKFQV

SEQ ID NO: 227178 - protein, 15 aa, Homo sapiens
  CDR3 for beta chain variable domain of TCR clone 113589 (TRBV9, TRBJ2-1)
CASSLAGSSYNEQFF

SEQ ID NO: 227179 - protein, 14 aa, Homo sapiens
  CDR3 for alpha chain variable domain of TCR clone 113590 (TRAV2, TRAJ37)
CAVDFTSNTGKLIF

SEQ ID NO: 227180 - protein, 13 aa, Homo sapiens
  CDR3 for beta chain variable domain of TCR clone 113590 (TRBV7-6, TRBJ1-2)
CASSLVADYGYTF

SEQ ID NO: 227181 - protein, 16 aa, Homo sapiens
  CDR3 for alpha chain variable domain of TCR clone 113591 (TRAV8-3, TRAJ42)
CAVGEGNGGSQGNLIF

SEQ ID NO: 227182 - protein, 15 aa, Homo sapiens
  CDR3 for beta chain variable domain of TCR clone 113591 (TRBV2, TRBJ2-1)
CASSELAGSYNEQFF

SEQ ID NO: 227183 - protein, 14 aa, Homo sapiens
  CDR3 for alpha chain variable domain of TCR clone 113592 (TRAV20, TRAJ32)
CCGRYGGATNKLIF

SEQ ID NO: 227184 - protein, 18 aa, Homo sapiens
  CDR3 for beta chain variable domain of TCR clone 113592 (TRBV11-2, TRBJ2-3)
CASSLGGASRGAPNTQYF

SEQ ID NO: 227185 - protein, 18 aa, Homo sapiens
  CDR3 for alpha chain variable domain of TCR clone 113593 (TRAV12-3, TRAJ10)
SPVIQPPTSDGRRNKLTF

SEQ ID NO: 227186 - protein, 13 aa, Homo sapiens
  CDR3 for beta chain variable domain of TCR clone 113593 (TRBV10-3, TRBJ2-7)
CASKLAVNYEQYF

SEQ ID NO: 227187 - protein, 15 aa, Homo sapiens
  CDR3 for alpha chain variable domain of TCR clone 113594 (TRAV25, TRAJ52)
CAGRPGGTCYGKLTF

SEQ ID NO: 227188 - protein, 12 aa, Homo sapiens
  CDR3 for beta chain variable domain of TCR clone 113594 (TRBV7-8, TRBJ2-7)
CASSLGDREQYF

SEQ ID NO: 227189 - protein, 13 aa, Homo sapiens
  CDR3 for alpha chain variable domain of TCR clone 113595 (TRAV12-3, TRAJ13)
CAMSSGGHQKVTF

SEQ ID NO: 227190 - protein, 17 aa, Homo sapiens
  CDR3 for beta chain variable domain of TCR clone 113595 (TRBV19, TRBJ1-5)
CASSRDRILSRFQPQHF

SEQ ID NO: 227191 - protein, 14 aa, Homo sapiens
  CDR3 for alpha chain variable domain of TCR clone 113596 (TRAV9-2, TRAJ39)
CALYIYNAGNMLTF

SEQ ID NO: 227192 - protein, 16 aa, Homo sapiens
  CDR3 for beta chain variable domain of TCR clone 113596 (TRBV6-5, TRBJ2-1)
CASSETLAGHYNEQFF

SEQ ID NO: 227193 - protein, 23 aa, Homo sapiens
  CDR3 for alpha chain variable domain of TCR clone 113597 (TRAV1-1, TRAJ4)
LLQELQMKDSASYFCALYNKLIF

SEQ ID NO: 227194 - protein, 15 aa, Homo sapiens
  CDR3 for beta chain variable domain of TCR clone 113597 (TRBV11-2, TRBJ2-1)
CASSKNRGLIYEQFF

SEQ ID NO: 227195 - protein, 15 aa, Homo sapiens
  CDR3 for alpha chain variable domain of TCR clone 113598 (TRAV27, TRAJ38)
CAARRNAGNNRKLIW

SEQ ID NO: 227196 - protein, 16 aa, Homo sapiens
  CDR3 for beta chain variable domain of TCR clone 113598 (TRBV5-1, TRBJ2-3)
CASSSIGAGSTDTQYF

SEQ ID NO: 227197 - protein, 15 aa, Homo sapiens
  CDR3 for alpha chain variable domain of TCR clone 113599 (TRAV26-1, TRAJ48)
CIARWSWFGNEKLTF

SEQ ID NO: 227198 - protein, 12 aa, Homo sapiens
  CDR3 for beta chain variable domain of TCR clone 113599 (TRBV19, TRBJ2-5)
CASCISEETQYF

SEQ ID NO: 227199 - protein, 12 aa, Homo sapiens
  CDR3 for alpha chain variable domain of TCR clone 113600 (TRAV1-1, TRAJ39)
CAVPVVGNMLTF

SEQ ID NO: 227200 - protein, 15 aa, Homo sapiens
  CDR3 for beta chain variable domain of TCR clone 113600 (TRBV19, TRBJ1-6)
CASNTQGAVGSPLHF

SEQ ID NO: 227201 - protein, 15 aa, Homo sapiens
  CDR3 for alpha chain variable domain of TCR clone 113601 (TRAV29/DV5, TRAJ24)
CAASGATDSWGKFQF

SEQ ID NO: 227202 - protein, 10 aa, Homo sapiens
  CDR3 for beta chain variable domain of TCR clone 113601 (TRBV28, TRBJ1-2)
CASSQFGYTF

SEQ ID NO: 227203 - protein, 16 aa, Homo sapiens
  CDR3 for alpha chain variable domain of TCR clone 113602 (TRAV12-3, TRAJ53)
CATSPGRGGSNYKLTF

SEQ ID NO: 227204 - protein, 11 aa, Homo sapiens
  CDR3 for beta chain variable domain of TCR clone 113602 (TRBV29-1, TRBJ2-5)
CSEDRTGTQYF

SEQ ID NO: 227205 - protein, 15 aa, Homo sapiens
  CDR3 for alpha chain variable domain of TCR clone 113603 (TRAV2, TRAJ9)
CAVAALNTGGFKTIF

SEQ ID NO: 227206 - protein, 14 aa, Homo sapiens
  CDR3 for beta chain variable domain of TCR clone 113603 (TRBV19, TRBJ2-1)
CASPTFVLSGEQFF

SEQ ID NO: 227207 - protein, 10 aa, Homo sapiens
  CDR3 for alpha chain variable domain of TCR clone 113604 (TRAV21, TRAJ31)
CAVDNARLMF

SEQ ID NO: 227208 - protein, 13 aa, Homo sapiens
  CDR3 for beta chain variable domain of TCR clone 113604 (TRBV4-1, TRBJ1-1)
CASIRKMNTEAFF

SEQ ID NO: 227209 - protein, 13 aa, Homo sapiens
  CDR3 for alpha chain variable domain of TCR clone 113605 (TRAV8-6, TRAJ49)
CAVITNTGNQFYF

SEQ ID NO: 227210 - protein, 17 aa, Homo sapiens
  CDR3 for beta chain variable domain of TCR clone 113605 (TRBV4-2, TRBJ1-1)
CASTQFGGGSGNTEAFF

SEQ ID NO: 227211 - protein, 14 aa, Homo sapiens
  CDR3 for alpha chain variable domain of TCR clone 113606 (TRAV16, TRAJ15)
CALSFNQAGTALIL

SEQ ID NO: 227212 - protein, 16 aa, Homo sapiens
  CDR3 for beta chain variable domain of TCR clone 113606 (TRBV9, TRBJ2-7)
CASSAGPDRSPYEQYF

SEQ ID NO: 227213 - protein, 17 aa, Homo sapiens
  CDR3 for alpha chain variable domain of TCR clone 113607 (TRAV36/DV7, TRAJ52)
CAVAQRAGGTSYGRLTF

SEQ ID NO: 227214 - protein, 15 aa, Homo sapiens
  CDR3 for beta chain variable domain of TCR clone 113607 (TRBV28, TRBJ2-1)
CASSIIAGGRSEQFF

SEQ ID NO: 227215 - protein, 13 aa, Homo sapiens
  CDR3 for alpha chain variable domain of TCR clone 113608 (TRAV12-1, TRAJ21)
CVVTLYNFNKFYF

SEQ ID NO: 227216 - protein, 20 aa, Homo sapiens
  CDR3 for beta chain variable domain of TCR clone 113608 (TRBV7-8, TRBJ2-1)
SASSLAHRLAGVRSYNEQFF

SEQ ID NO: 227217 - protein, 14 aa, Homo sapiens
  CDR3 for alpha chain variable domain of TCR clone 113609 (TRAV26-1, TRAJ49)
CIVRLTNTGNQFYF

SEQ ID NO: 227218 - protein, 13 aa, Homo sapiens
  CDR3 for beta chain variable domain of TCR clone 113609 (TRBV4-1, TRBJ2-7)
CVSSQGQAYEQYF

SEQ ID NO: 227219 - protein, 17 aa, Homo sapiens
  CDR3 for alpha chain variable domain of TCR clone 113610 (TRAV2, TRAJ23)
CCLLLCWERGLGGKLIF

SEQ ID NO: 227220 - protein, 15 aa, Homo sapiens
  CDR3 for beta chain variable domain of TCR clone 113610 (TRBV5-1, TRBJ2-7)
CASSLMTSGSNEQYF

SEQ ID NO: 227221 - protein, 15 aa, Homo sapiens
  CDR3 for alpha chain variable domain of TCR clone 113611 (TRAV29/DV5, TRAJ22)
CAVRDRGGSARQLTF

SEQ ID NO: 227222 - protein, 16 aa, Homo sapiens
  CDR3 for beta chain variable domain of TCR clone 113611 (TRBV5-4, TRBJ2-3)
CASQQPGAGGADTQYF

SEQ ID NO: 227223 - protein, 15 aa, Homo sapiens
  CDR3 for alpha chain variable domain of TCR clone 113612 (TRAV17, TRAJ57)
CATGPSQGGSEKLVF

SEQ ID NO: 227224 - protein, 16 aa, Homo sapiens
  CDR3 for beta chain variable domain of TCR clone 113612 (TRBV12-4, TRBJ1-5)
CASSRPVGGSTQPQHF

SEQ ID NO: 227225 - protein, 11 aa, Homo sapiens
  CDR3 for alpha chain variable domain of TCR clone 113613 (TRAV26-1, TRAJ27)
CIDPDAGKSTF

SEQ ID NO: 227226 - protein, 18 aa, Homo sapiens
  CDR3 for beta chain variable domain of TCR clone 113613 (TRBV7-9, TRBJ2-6)
CASSFPGAGISGANVLTF

SEQ ID NO: 227227 - protein, 14 aa, Homo sapiens
  CDR3 for alpha chain variable domain of TCR clone 113614 (TRAV12-2, TRAJ17)
CAVLFKGAGNKLTF

SEQ ID NO: 227228 - protein, 17 aa, Homo sapiens
  CDR3 for beta chain variable domain of TCR clone 113614 (TRBV20-1, TRBJ2-2)
CSASGSGQGGLTGELFF

SEQ ID NO: 227229 - protein, 12 aa, Homo sapiens
  CDR3 for alpha chain variable domain of TCR clone 113615 (TRAV16, TRAJ22)
CALEVSARQLTF

SEQ ID NO: 227230 - protein, 14 aa, Homo sapiens
  CDR3 for beta chain variable domain of TCR clone 113615 (TRBV11-2, TRBJ2-3)
CASNSIASTDTQYF

SEQ ID NO: 227231 - protein, 13 aa, Homo sapiens
  CDR3 for alpha chain variable domain of TCR clone 113616 (TRAV27, TRAJ45)
CRSSGGGADGLTF

SEQ ID NO: 227232 - protein, 14 aa, Homo sapiens
  CDR3 for beta chain variable domain of TCR clone 113616 (TRBV7-9, TRBJ2-1)
RASSSMVGFGEQFF

SEQ ID NO: 227233 - protein, 15 aa, Homo sapiens
  CDR3 for alpha chain variable domain of TCR clone 113617 (TRAV25, TRAJ52)
CAGTSGGTSYGKMTF

SEQ ID NO: 227234 - protein, 13 aa, Homo sapiens
  CDR3 for beta chain variable domain of TCR clone 113617 (TRBV6-5, TRBJ2-5)
CASSPQGGETQYF

SEQ ID NO: 227235 - protein, 14 aa, Homo sapiens
  CDR3 for alpha chain variable domain of TCR clone 113618 (TRAV8-3, TRAJ4)
CAVGAAGGYNKLIF

SEQ ID NO: 227236 - protein, 13 aa, Homo sapiens
  CDR3 for beta chain variable domain of TCR clone 113618 (TRBV7-2, TRBJ2-2)
CASSLAVTGELFF

SEQ ID NO: 227237 - protein, 15 aa, Homo sapiens
  CDR3 for alpha chain variable domain of TCR clone 113619 (TRAV8-3, TRAJ27)
CAVGPSKTNAGKSTF

SEQ ID NO: 227238 - protein, 14 aa, Homo sapiens
  CDR3 for beta chain variable domain of TCR clone 113619 (TRBV7-9, TRBJ1-1)
CASTPLQSYTEAFF

SEQ ID NO: 227239 - protein, 13 aa, Homo sapiens
  CDR3 for alpha chain variable domain of TCR clone 113620 (TRAV29/DV5, TRAJ31)
CAASRNNNARLMF

SEQ ID NO: 227240 - protein, 12 aa, Homo sapiens
  CDR3 for beta chain variable domain of TCR clone 113620 (TRBV14, TRBJ1-1)
CASSRLKGLAFF

SEQ ID NO: 227241 - protein, 14 aa, Homo sapiens
  CDR3 for alpha chain variable domain of TCR clone 113621 (TRAV8-6, TRAJ12)
CAVKAADSSYKLIF

SEQ ID NO: 227242 - protein, 16 aa, Homo sapiens
  CDR3 for beta chain variable domain of TCR clone 113621 (TRBV4-1, TRBJ2-3)
CASSQSTSGAEDTQYF

SEQ ID NO: 227243 - protein, 18 aa, Homo sapiens
  CDR3 for alpha chain variable domain of TCR clone 113622 (TRAV26-1, TRAJ52)
CIVRVEGAGGTSYGKLTF

SEQ ID NO: 227244 - protein, 13 aa, Homo sapiens
  CDR3 for beta chain variable domain of TCR clone 113622 (TRBV7-3, TRBJ1-1)
CASSQDWGAEAFF

SEQ ID NO: 227245 - protein, 17 aa, Homo sapiens
  CDR3 for alpha chain variable domain of TCR clone 113623 (TRAV3, TRAJ42)
CAVRDRDYGGSKGNLIF

SEQ ID NO: 227246 - protein, 12 aa, Homo sapiens
  CDR3 for beta chain variable domain of TCR clone 113623 (TRBV29-1, TRBJ2-2)
CSVDKYTGELFF

SEQ ID NO: 227247 - protein, 17 aa, Homo sapiens
  CDR3 for alpha chain variable domain of TCR clone 113624 (TRAV38-1, TRAJ45)
GAFMRSHSGGGADGLTF

SEQ ID NO: 227248 - protein, 15 aa, Homo sapiens
  CDR3 for beta chain variable domain of TCR clone 113624 (TRBV7-2, TRBJ2-3)
CASSLVVRGPDTQYF

SEQ ID NO: 227249 - protein, 13 aa, Homo sapiens
  CDR3 for alpha chain variable domain of TCR clone 113625 (TRAV21, TRAJ33)
CAVAGDSNYQLIW

SEQ ID NO: 227250 - protein, 13 aa, Homo sapiens
  CDR3 for beta chain variable domain of TCR clone 113625 (TRBV10-3, TRBJ2-7)
CASKLAVNYEKYF

SEQ ID NO: 227251 - protein, 18 aa, Homo sapiens
  CDR3 for alpha chain variable domain of TCR clone 113626 (TRAV17, TRAJ28)
CATDPPRGSGAGSYQLTF

SEQ ID NO: 227252 - protein, 14 aa, Homo sapiens
  CDR3 for beta chain variable domain of TCR clone 113626 (TRBV13, TRBJ2-5)
CASSLDYPQEAQYF

SEQ ID NO: 227253 - protein, 17 aa, Homo sapiens
  CDR3 for alpha chain variable domain of TCR clone 113627 (TRAV13-1, TRAJ5)
CGNPSLSRDTGRRALTF

SEQ ID NO: 227254 - protein, 17 aa, Homo sapiens
  CDR3 for beta chain variable domain of TCR clone 113627 (TRBV24-1, TRBJ2-1)
CATSDVSTSGTYNEQFF

SEQ ID NO: 227255 - protein, 14 aa, Homo sapiens
  CDR3 for alpha chain variable domain of TCR clone 113628 (TRAV23/DV6, TRAJ17)
CAARGRAAGNKLTF

SEQ ID NO: 227256 - protein, 13 aa, Homo sapiens
  CDR3 for beta chain variable domain of TCR clone 113628 (TRBV7-6, TRBJ1-2)
CASSLVADYGYTS

SEQ ID NO: 227257 - protein, 12 aa, Homo sapiens
  CDR3 for alpha chain variable domain of TCR clone 113629 (TRAV13-2, TRAJ23)
CAERHRGGKLIF

SEQ ID NO: 227258 - protein, 16 aa, Homo sapiens
  CDR3 for beta chain variable domain of TCR clone 113629 (TRBV7-9, TRBJ1-2)
CASSLGFSSGEDGYAF

SEQ ID NO: 227259 - protein, 17 aa, Homo sapiens
  CDR3 for alpha chain variable domain of TCR clone 113630 (TRAV4, TRAJ20)
CTTASWVKGNNEYKLSF

SEQ ID NO: 227260 - protein, 17 aa, Homo sapiens
  CDR3 for beta chain variable domain of TCR clone 113630 (TRBV11-2, TRBJ2-1)
CASSLYPPGVEYNEQFF

SEQ ID NO: 227261 - protein, 15 aa, Homo sapiens
  CDR3 for alpha chain variable domain of TCR clone 113631 (TRAV8-4, TRAJ11)
CAVSRALSGYSNLTF

SEQ ID NO: 227262 - protein, 13 aa, Homo sapiens
  CDR3 for beta chain variable domain of TCR clone 113631 (TRBV10-3, TRBJ2-7)
CASKLAVNYEQYF

SEQ ID NO: 227263 - protein, 15 aa, Homo sapiens
  CDR3 for alpha chain variable domain of TCR clone 113632 (TRAV16, TRAJ12)
CSKWPLRDSSYKLIF

SEQ ID NO: 227264 - protein, 13 aa, Homo sapiens
  CDR3 for beta chain variable domain of TCR clone 113632 (TRBV4-2, TRBJ1-1)
CAGSQAGNTEAFF

SEQ ID NO: 227265 - protein, 15 aa, Homo sapiens
  CDR3 for alpha chain variable domain of TCR clone 113633 (TRAV4, TRAJ27)
CLVGDEGTNAGKSTF

SEQ ID NO: 227266 - protein, 16 aa, Homo sapiens
  CDR3 for beta chain variable domain of TCR clone 113633 (TRBV19, TRBJ2-3)
CASSPGAASRTDTQYF

SEQ ID NO: 227267 - protein, 11 aa, Homo sapiens
  CDR3 for alpha chain variable domain of TCR clone 113634 (TRAV2, TRAJ33)
CAIDSNYQLIW

SEQ ID NO: 227268 - protein, 15 aa, Homo sapiens
  CDR3 for beta chain variable domain of TCR clone 113634 (TRBV19, TRBJ1-2)
CASSVGQVLNYGYTF

SEQ ID NO: 227269 - protein, 13 aa, Homo sapiens
  CDR3 for alpha chain variable domain of TCR clone 113635 (TRAV13-2, TRAJ13)
CAERPGGYQKVTF

SEQ ID NO: 227270 - protein, 17 aa, Homo sapiens
  CDR3 for beta chain variable domain of TCR clone 113635 (TRBV7-8, TRBJ2-6)
CASRAGTGGAGANVLTF

SEQ ID NO: 227271 - protein, 14 aa, Homo sapiens
  CDR3 for alpha chain variable domain of TCR clone 113636 (TRAV12-3, TRAJ57)
CAMSAGGGSEKLVF

SEQ ID NO: 227272 - protein, 14 aa, Homo sapiens
  CDR3 for beta chain variable domain of TCR clone 113636 (TRBV7-8, TRBJ2-7)
CASSPRDRVYEQYF

SEQ ID NO: 227273 - protein, 14 aa, Homo sapiens
  CDR3 for alpha chain variable domain of TCR clone 113637 (TRAV8-4, TRAJ4)
CAVSPSGGYNKLIF

SEQ ID NO: 227274 - protein, 15 aa, Homo sapiens
  CDR3 for beta chain variable domain of TCR clone 113637 (TRBV7-8, TRBJ2-3)
CASSLSADSGSAQYF

SEQ ID NO: 227275 - protein, 15 aa, Homo sapiens
  CDR3 for alpha chain variable domain of TCR clone 113638 (TRAV17, TRAJ57)
CATGPSQGGSEKLVF

SEQ ID NO: 227276 - protein, 19 aa, Homo sapiens
  CDR3 for beta chain variable domain of TCR clone 113638 (TRBV7-2, TRBJ2-3)
CASSFLSRNWGGGTDTQYF

SEQ ID NO: 227277 - protein, 11 aa, Homo sapiens
  CDR3 for alpha chain variable domain of TCR clone 113639 (TRAV17, TRAJ9)
CATTGGFKTIF

SEQ ID NO: 227278 - protein, 15 aa, Homo sapiens
  CDR3 for beta chain variable domain of TCR clone 113639 (TRBV20-1, TRBJ2-6)
CSAYGQVSGANVLTF

SEQ ID NO: 227279 - protein, 14 aa, Homo sapiens
  CDR3 for alpha chain variable domain of TCR clone 113640 (TRAV9-2, TRAJ6)
CALSDPGGSYIPTF

SEQ ID NO: 227280 - protein, 16 aa, Homo sapiens
  CDR3 for beta chain variable domain of TCR clone 113640 (TRBV20-1, TRBJ1-2)
CSASMGQGVANYGYTF

SEQ ID NO: 227281 - protein, 16 aa, Homo sapiens
  CDR3 for alpha chain variable domain of TCR clone 113641 (TRAV30, TRAJ24)
CGTEIVDADSWGKFQF

SEQ ID NO: 227282 - protein, 14 aa, Homo sapiens
  CDR3 for beta chain variable domain of TCR clone 113641 (TRBV18, TRBJ2-1)
CASSPQGRFNEQFF

SEQ ID NO: 227283 - protein, 14 aa, Homo sapiens
  CDR3 for alpha chain variable domain of TCR clone 113642 (TRAV1-2, TRAJ8)
CAVREDTGFQKFVF

SEQ ID NO: 227284 - protein, 15 aa, Homo sapiens
  CDR3 for beta chain variable domain of TCR clone 113642 (TRBV20-1, TRBJ2-7)
CSARDRVSGMDEQYF

SEQ ID NO: 227285 - protein, 11 aa, Homo sapiens
  CDR3 for alpha chain variable domain of TCR clone 113643 (TRAV21, TRAJ34)
CAHYNTDKLIF

SEQ ID NO: 227286 - protein, 14 aa, Homo sapiens
  CDR3 for beta chain variable domain of TCR clone 113643 (TRBV7-8, TRBJ2-3)
CASSLEAGTDTQYF

SEQ ID NO: 227287 - protein, 13 aa, Homo sapiens
  CDR3 for alpha chain variable domain of TCR clone 113644 (TRAV21, TRAJ57)
CAVTQGGSEKLVF

SEQ ID NO: 227288 - protein, 18 aa, Homo sapiens
  CDR3 for beta chain variable domain of TCR clone 113644 (TRBV7-9, TRBJ2-7)
CASSLTTSGSRTWYEQYF

SEQ ID NO: 227289 - protein, 15 aa, Homo sapiens
  CDR3 for alpha chain variable domain of TCR clone 113645 (TRAV3, TRAJ20)
CAVRDIKLSDYKLSF

SEQ ID NO: 227290 - protein, 15 aa, Homo sapiens
  CDR3 for beta chain variable domain of TCR clone 113645 (TRBV7-9, TRBJ1-6)
CASSSPGRGISPLHF

SEQ ID NO: 227291 - protein, 16 aa, Homo sapiens
  CDR3 for alpha chain variable domain of TCR clone 113646 (TRAV3, TRAJ37)
CAVRPHGSGNTGKLIF

SEQ ID NO: 227292 - protein, 14 aa, Homo sapiens
  CDR3 for beta chain variable domain of TCR clone 113646 (TRBV13, TRBJ2-5)
CASSLGRGQETQYF

SEQ ID NO: 227293 - protein, 14 aa, Homo sapiens
  CDR3 for alpha chain variable domain of TCR clone 113647 (TRAV23/DV6, TRAJ22)
CADISSGSARQLTF

SEQ ID NO: 227294 - protein, 16 aa, Homo sapiens
  CDR3 for beta chain variable domain of TCR clone 113647 (TRBV20-1, TRBJ1-4)
CSAPGQGLLTNEKLFF

SEQ ID NO: 227295 - protein, 11 aa, Homo sapiens
  CDR3 for alpha chain variable domain of TCR clone 113648 (TRAV12-1, TRAJ26)
FVVAYGQNFVF

SEQ ID NO: 227296 - protein, 15 aa, Homo sapiens
  CDR3 for beta chain variable domain of TCR clone 113648 (TRBV12-4, TRBJ2-5)
CASSGTGQAQETQYF

SEQ ID NO: 227297 - protein, 12 aa, Homo sapiens
  CDR3 for alpha chain variable domain of TCR clone 113649 (TRAV12-3, TRAJ17)
CAITLTGNKLTF

SEQ ID NO: 227298 - protein, 17 aa, Homo sapiens
  CDR3 for beta chain variable domain of TCR clone 113649 (TRBV7-3, TRBJ2-3)
CASSLMKRMRGADTQYF

SEQ ID NO: 227299 - protein, 14 aa, Homo sapiens
  CDR3 for alpha chain variable domain of TCR clone 113650 (TRAV1-2, TRAJ16)
CAVNRFSDGQKLLF

SEQ ID NO: 227300 - protein, 11 aa, Homo sapiens
  CDR3 for beta chain variable domain of TCR clone 113650 (TRBV20-1, TRBJ2-5)
CSADRAETQYF

SEQ ID NO: 227301 - protein, 17 aa, Homo sapiens
  CDR3 for alpha chain variable domain of TCR clone 113651 (TRAV36/DV7, TRAJ52)
CAVAQRAGGTSYGKLTF

SEQ ID NO: 227302 - protein, 17 aa, Homo sapiens
  CDR3 for beta chain variable domain of TCR clone 113651 (TRBV7-3, TRBJ2-3)
CASSLMKRMRGADTQYF

SEQ ID NO: 227303 - protein, 13 aa, Homo sapiens
  CDR3 for alpha chain variable domain of TCR clone 113652 (TRAV12-1, TRAJ6)
CVVFPGGSYIPTF

SEQ ID NO: 227304 - protein, 13 aa, Homo sapiens
  CDR3 for beta chain variable domain of TCR clone 113652 (TRBV7-9, TRBJ1-2)
CASSLKQNYGDTF

SEQ ID NO: 227305 - protein, 15 aa, Homo sapiens
  CDR3 for alpha chain variable domain of TCR clone 113653 (TRAV14/DV4, TRAJ10)
CAMRELTGGGNKLTF

SEQ ID NO: 227306 - protein, 14 aa, Homo sapiens
  CDR3 for beta chain variable domain of TCR clone 113653 (TRBV12-4, TRBJ1-1)
CASSFSQMNTEAFF

SEQ ID NO: 227307 - protein, 14 aa, Homo sapiens
  CDR3 for alpha chain variable domain of TCR clone 113654 (TRAV20, TRAJ22)
CAVAFGGSARQLTF

SEQ ID NO: 227308 - protein, 15 aa, Homo sapiens
  CDR3 for beta chain variable domain of TCR clone 113654 (TRBV7-2, TRBJ1-1)
CASSFAGDRDTEAFF

SEQ ID NO: 227309 - protein, 10 aa, Homo sapiens
  CDR3 for alpha chain variable domain of TCR clone 113655 (TRAV2, TRAJ15)
RGQAGTALIF

SEQ ID NO: 227310 - protein, 13 aa, Homo sapiens
  CDR3 for beta chain variable domain of TCR clone 113655 (TRBV27, TRBJ2-1)
CASRTRGVGEQFF

SEQ ID NO: 227311 - protein, 15 aa, Homo sapiens
  CDR3 for alpha chain variable domain of TCR clone 113656 (TRAV2, TRAJ21)
CAVDFTTSTNFTLDL

SEQ ID NO: 227312 - protein, 18 aa, Homo sapiens
  CDR3 for beta chain variable domain of TCR clone 113656 (TRBV11-2, TRBJ2-3)
CASSLGGASRGAPNTQYF

SEQ ID NO: 227313 - protein, 13 aa, Homo sapiens
  CDR3 for alpha chain variable domain of TCR clone 113657 (TRAV3, TRAJ27)
CAVRPLGAGKSSF

SEQ ID NO: 227314 - protein, 13 aa, Homo sapiens
  CDR3 for beta chain variable domain of TCR clone 113657 (TRBV7-9, TRBJ2-3)
CASSPGSTDTQYF

SEQ ID NO: 227315 - protein, 14 aa, Homo sapiens
  CDR3 for alpha chain variable domain of TCR clone 113658 (TRAV20, TRAJ33)
CAVLTRDSNYQLIW

SEQ ID NO: 227316 - protein, 17 aa, Homo sapiens
  CDR3 for beta chain variable domain of TCR clone 113658 (TRBV7-2, TRBJ2-7)
CASSFETSGSTSSTSGR

SEQ ID NO: 227317 - protein, 15 aa, Homo sapiens
  CDR3 for alpha chain variable domain of TCR clone 113659 (TRAV8-3, TRAJ21)
CAVGALPPRGYKFYF

SEQ ID NO: 227318 - protein, 14 aa, Homo sapiens
  CDR3 for beta chain variable domain of TCR clone 113659 (TRBV4-2, TRBJ2-1)
CASGLDRAYNEQFF

SEQ ID NO: 227319 - protein, 13 aa, Homo sapiens
  CDR3 for alpha chain variable domain of TCR clone 113660 (TRAV35, TRAJ48)
CAGHAFGNEKLTF

SEQ ID NO: 227320 - protein, 15 aa, Homo sapiens
  CDR3 for beta chain variable domain of TCR clone 113660 (TRBV27, TRBJ2-7)
CASSPQREGQREQYF

SEQ ID NO: 227321 - protein, 14 aa, Homo sapiens
  CDR3 for alpha chain variable domain of TCR clone 113661 (TRAV8-6, TRAJ48)
CAVRTNFGNEKLTF

SEQ ID NO: 227322 - protein, 14 aa, Homo sapiens
  CDR3 for beta chain variable domain of TCR clone 113661 (TRBV25-1, TRBJ1-1)
CASTHLGGNTEAFF

SEQ ID NO: 227323 - protein, 12 aa, Homo sapiens
  CDR3 for alpha chain variable domain of TCR clone 113662 (TRAV8-4, TRAJ31)
CAVSDSNARLMF

SEQ ID NO: 227324 - protein, 14 aa, Homo sapiens
  CDR3 for beta chain variable domain of TCR clone 113662 (TRBV7-8, TRBJ2-3)
CASSLEAGTDTQYF

SEQ ID NO: 227325 - protein, 13 aa, Homo sapiens
  CDR3 for alpha chain variable domain of TCR clone 113663 (TRAV1-2, TRAJ9)
CAALNTGGFKTIF

SEQ ID NO: 227326 - protein, 13 aa, Homo sapiens
  CDR3 for beta chain variable domain of TCR clone 113663 (TRBV7-9, TRBJ1-2)
CASGLKQNYGYTF

SEQ ID NO: 227327 - protein, 18 aa, Homo sapiens
  CDR3 for alpha chain variable domain of TCR clone 113664 (TRAV29/DV5, TRAJ52)
CAAGFRGAGGTSYGKLTV

SEQ ID NO: 227328 - protein, 16 aa, Homo sapiens
  CDR3 for beta chain variable domain of TCR clone 113664 (TRBV7-3, TRBJ2-2)
CASSLKRGTLSGELFF

SEQ ID NO: 227329 - protein, 16 aa, Homo sapiens
  CDR3 for alpha chain variable domain of TCR clone 113665 (TRAV30, TRAJ24)
CGTEIVDADSWGKFPF

SEQ ID NO: 227330 - protein, 15 aa, Homo sapiens
  CDR3 for beta chain variable domain of TCR clone 113665 (TRBV18, TRBJ2-1)
CASLPDRGRDNEQFF

SEQ ID NO: 227331 - protein, 14 aa, Homo sapiens
  CDR3 for alpha chain variable domain of TCR clone 113666 (TRAV12-2, TRAJ5)
CAVNRSTGRRALTF

SEQ ID NO: 227332 - protein, 12 aa, Homo sapiens
  CDR3 for beta chain variable domain of TCR clone 113666 (TRBV19, TRBJ1-5)
CASSIVQQPQHF

SEQ ID NO: 227333 - protein, 15 aa, Homo sapiens
  CDR3 for alpha chain variable domain of TCR clone 113667 (TRAV26-1, TRAJ23)
CIVRVAGYQGGKLIF

SEQ ID NO: 227334 - protein, 18 aa, Homo sapiens
  CDR3 for beta chain variable domain of TCR clone 113667 (TRBV28, TRBJ2-1)
CASSSTIGRANSYNEQFF

SEQ ID NO: 227335 - protein, 11 aa, Homo sapiens
  CDR3 for alpha chain variable domain of TCR clone 113668 (TRAV13-1, TRAJ39)
CASHAGNMLTF

SEQ ID NO: 227336 - protein, 17 aa, Homo sapiens
  CDR3 for beta chain variable domain of TCR clone 113668 (TRBV13, TRBJ2-3)
CASSLSRVAGGRNTQYF

SEQ ID NO: 227337 - protein, 17 aa, Homo sapiens
  CDR3 for alpha chain variable domain of TCR clone 113669 (TRAV9-2, TRAJ28)
CAMREVSSGAGSYQLTF

SEQ ID NO: 227338 - protein, 15 aa, Homo sapiens
  CDR3 for beta chain variable domain of TCR clone 113669 (TRBV11-2, TRBJ1-6)
CASTLRETGNSPLHF

SEQ ID NO: 227339 - protein, 13 aa, Homo sapiens
  CDR3 for alpha chain variable domain of TCR clone 113670 (TRAV30, TRAJ24)
CGTVTDSWGKLQF

SEQ ID NO: 227340 - protein, 14 aa, Homo sapiens
  CDR3 for beta chain variable domain of TCR clone 113670 (TRBV6-1, TRBJ1-3)
CASVQGGGGNTIYF

SEQ ID NO: 227341 - protein, 15 aa, Homo sapiens
  CDR3 for alpha chain variable domain of TCR clone 113671 (TRAV2, TRAJ44)
CAVVAYTGTASKLTF

SEQ ID NO: 227342 - protein, 17 aa, Homo sapiens
  CDR3 for beta chain variable domain of TCR clone 113671 (TRBV12-4, TRBJ2-1)
CASSPGLAGGRINEQFF

SEQ ID NO: 227343 - protein, 14 aa, Homo sapiens
  CDR3 for alpha chain variable domain of TCR clone 113672 (TRAV13-1, TRAJ35)
CAASKGGFGNVLHC

SEQ ID NO: 227344 - protein, 15 aa, Homo sapiens
  CDR3 for beta chain variable domain of TCR clone 113672 (TRBV7-3, TRBJ1-1)
CASSQDWGAEASLDK

SEQ ID NO: 227345 - protein, 16 aa, Homo sapiens
  CDR3 for alpha chain variable domain of TCR clone 113673 (TRAV38-1, TRAJ32)
CAFMPFLGGATNKLIF

SEQ ID NO: 227346 - protein, 13 aa, Homo sapiens
  CDR3 for beta chain variable domain of TCR clone 113673 (TRBV7-9, TRBJ1-2)
CASSLKQNYGYTF

SEQ ID NO: 227347 - protein, 13 aa, Homo sapiens
  CDR3 for alpha chain variable domain of TCR clone 113674 (TRAV20, TRAJ48)
CAVQGVGNEKLTF

SEQ ID NO: 227348 - protein, 19 aa, Homo sapiens
  CDR3 for beta chain variable domain of TCR clone 113674 (TRBV2, TRBJ2-2)
CASSQPGLAGGGDTGELFF

SEQ ID NO: 227349 - protein, 16 aa, Homo sapiens
  CDR3 for alpha chain variable domain of TCR clone 113675 (TRAV16, TRAJ21)
CACGWATTSTNFTLDL

SEQ ID NO: 227350 - protein, 15 aa, Homo sapiens
  CDR3 for beta chain variable domain of TCR clone 113675 (TRBV19, TRBJ2-1)
CAGSIQATSYNEQFF

SEQ ID NO: 227351 - protein, 12 aa, Homo sapiens
  CDR3 for alpha chain variable domain of TCR clone 113676 (TRAV21, TRAJ3)
CCFYSSASKIIF

SEQ ID NO: 227352 - protein, 16 aa, Homo sapiens
  CDR3 for beta chain variable domain of TCR clone 113676 (TRBV19, TRBJ2-1)
CASSKAGPSSYSEQFF

SEQ ID NO: 227353 - protein, 17 aa, Homo sapiens
  CDR3 for alpha chain variable domain of TCR clone 113677 (TRAV3, TRAJ42)
CAVRERDYGGSQGNLIF

SEQ ID NO: 227354 - protein, 15 aa, Homo sapiens
  CDR3 for beta chain variable domain of TCR clone 113677 (TRBV2, TRBJ2-7)
CASSEGLARSYEQYF

SEQ ID NO: 227355 - protein, 14 aa, Homo sapiens
  CDR3 for alpha chain variable domain of TCR clone 113678 (TRAV9-2, TRAJ39)
CALYIYNAGNMLTF

SEQ ID NO: 227356 - protein, 14 aa, Homo sapiens
  CDR3 for beta chain variable domain of TCR clone 113678 (TRBV27, TRBJ2-1)
CASSFGREANEQFF

SEQ ID NO: 227357 - protein, 14 aa, Homo sapiens
  CDR3 for alpha chain variable domain of TCR clone 113679 (TRAV1-2, TRAJ8)
CAGREDTGFQRLVF

SEQ ID NO: 227358 - protein, 15 aa, Homo sapiens
  CDR3 for beta chain variable domain of TCR clone 113679 (TRBV6-3, TRBJ2-7)
CASSSPGTVFYEQYF

SEQ ID NO: 227359 - protein, 15 aa, Homo sapiens
  CDR3 for alpha chain variable domain of TCR clone 113680 (TRAV8-3, TRAJ44)
CAVGAGAGTASKRTF

SEQ ID NO: 227360 - protein, 12 aa, Homo sapiens
  CDR3 for beta chain variable domain of TCR clone 113680 (TRBV7-8, TRBJ2-4)
CASSLGGNIQYF

SEQ ID NO: 227361 - protein, 12 aa, Homo sapiens
  CDR3 for alpha chain variable domain of TCR clone 113681 (TRAV17, TRAJ31)
CATEQGNARLMF

SEQ ID NO: 227362 - protein, 13 aa, Homo sapiens
  CDR3 for beta chain variable domain of TCR clone 113681 (TRBV7-9, TRBJ2-3)
CASSPGSTDTQYF

SEQ ID NO: 227363 - protein, 14 aa, Homo sapiens
  CDR3 for alpha chain variable domain of TCR clone 113682 (TRAV4, TRAJ26)
FLVGPHNYGQNFVF

SEQ ID NO: 227364 - protein, 17 aa, Homo sapiens
  CDR3 for beta chain variable domain of TCR clone 113682 (TRBV24-1, TRBJ2-1)
CATSDVSTSGTYNEQFF

SEQ ID NO: 227365 - protein, 16 aa, Homo sapiens
  CDR3 for alpha chain variable domain of TCR clone 113683 (TRAV14/DV4, TRAJ53)
CAMREGGGGSNYKLTF

SEQ ID NO: 227366 - protein, 15 aa, Homo sapiens
  CDR3 for beta chain variable domain of TCR clone 113683 (TRBV10-3, TRBJ2-3)
CAISLTSGGTDTQYF

SEQ ID NO: 227367 - protein, 14 aa, Homo sapiens
  CDR3 for alpha chain variable domain of TCR clone 113684 (TRAV1-2, TRAJ16)
FAVNRFSDGQKLLF

SEQ ID NO: 227368 - protein, 15 aa, Homo sapiens
  CDR3 for beta chain variable domain of TCR clone 113684 (TRBV12-4, TRBJ2-5)
CASSPPTGLQETQYF

SEQ ID NO: 227369 - protein, 14 aa, Homo sapiens
  CDR3 for alpha chain variable domain of TCR clone 113685 (TRAV12-2, TRAJ6)
CASKWGGGSYIPTF

SEQ ID NO: 227370 - protein, 13 aa, Homo sapiens
  CDR3 for beta chain variable domain of TCR clone 113685 (TRBV27, TRBJ2-7)
CVSSLTTGYEQYF

SEQ ID NO: 227371 - protein, 14 aa, Homo sapiens
  CDR3 for alpha chain variable domain of TCR clone 113686 (TRAV8-4, TRAJ48)
CAVSETFGNEKLTF

SEQ ID NO: 227372 - protein, 14 aa, Homo sapiens
  CDR3 for beta chain variable domain of TCR clone 113686 (TRBV13, TRBJ2-7)
CAGSLKGASYEQYF

SEQ ID NO: 227373 - protein, 14 aa, Homo sapiens
  CDR3 for alpha chain variable domain of TCR clone 113687 (TRAV17, TRAJ35)
CATDRPGFGNVLHC

SEQ ID NO: 227374 - protein, 19 aa, Homo sapiens
  CDR3 for beta chain variable domain of TCR clone 113687 (TRBV11-3, TRBJ2-2)
FASSTRPGAKTTNTGELFF

SEQ ID NO: 227375 - protein, 14 aa, Homo sapiens
  CDR3 for alpha chain variable domain of TCR clone 113688 (TRAV1-2, TRAJ8)
CAVREDTGFQKLVL

SEQ ID NO: 227376 - protein, 14 aa, Homo sapiens
  CDR3 for beta chain variable domain of TCR clone 113688 (TRBV25-1, TRBJ1-1)
CSSTHLGGNTEAFF

SEQ ID NO: 227377 - protein, 14 aa, Homo sapiens
  CDR3 for alpha chain variable domain of TCR clone 113689 (TRAV1-2, TRAJ15)
CAVRDRQAGTALIF

SEQ ID NO: 227378 - protein, 17 aa, Homo sapiens
  CDR3 for beta chain variable domain of TCR clone 113689 (TRBV5-5, TRBJ1-2)
CASSLGSLDGQSEGYIF

SEQ ID NO: 227379 - protein, 13 aa, Homo sapiens
  CDR3 for alpha chain variable domain of TCR clone 113690 (TRAV17, TRAJ15)
CATDARAGTALIF

SEQ ID NO: 227380 - protein, 15 aa, Homo sapiens
  CDR3 for beta chain variable domain of TCR clone 113690 (TRBV20-1, TRBJ2-7)
CSARDRVAGMDEQYF

SEQ ID NO: 227381 - protein, 16 aa, Homo sapiens
  CDR3 for alpha chain variable domain of TCR clone 113691 (TRAV1-2, TRAJ10)
CAVRGVLTGGGNKLTF

SEQ ID NO: 227382 - protein, 13 aa, Homo sapiens
  CDR3 for beta chain variable domain of TCR clone 113691 (TRBV20-1, TRBJ1-2)
CSASTERIYGYTF

SEQ ID NO: 227383 - protein, 15 aa, Homo sapiens
  CDR3 for alpha chain variable domain of TCR clone 113692 (TRAV3, TRAJ17)
CAVRDTGAAGNKLTF

SEQ ID NO: 227384 - protein, 14 aa, Homo sapiens
  CDR3 for beta chain variable domain of TCR clone 113692 (TRBV6-3, TRBJ1-1)
CASSKLLPGAEAFF

SEQ ID NO: 227385 - protein, 16 aa, Homo sapiens
  CDR3 for alpha chain variable domain of TCR clone 113693 (TRAV4, TRAJ5)
CLVGPDHGHGQESTYF

SEQ ID NO: 227386 - protein, 13 aa, Homo sapiens
  CDR3 for beta chain variable domain of TCR clone 113693 (TRBV4-3, TRBJ1-2)
CASSLSASGGYTF

SEQ ID NO: 227387 - protein, 14 aa, Homo sapiens
  CDR3 for alpha chain variable domain of TCR clone 113694 (TRAV8-4, TRAJ40)
CAVIPTSGTYKYIF

SEQ ID NO: 227388 - protein, 14 aa, Homo sapiens
  CDR3 for beta chain variable domain of TCR clone 113694 (TRBV7-2, TRBJ1-6)
CASSLQGANSPLHF

SEQ ID NO: 227389 - protein, 17 aa, Homo sapiens
  CDR3 for alpha chain variable domain of TCR clone 113695 (TRAV3, TRAJ6)
CAVRDGPRAGGSYIPTF

SEQ ID NO: 227390 - protein, 20 aa, Homo sapiens
  CDR3 for beta chain variable domain of TCR clone 113695 (TRBV28, TRBJ2-1)
CASTPIGRSPGLAGGNVQFF

SEQ ID NO: 227391 - protein, 16 aa, Homo sapiens
  CDR3 for alpha chain variable domain of TCR clone 113696 (TRAV3, TRAJ10)
CAVRDMRAGGGNKLTF

SEQ ID NO: 227392 - protein, 19 aa, Homo sapiens
  CDR3 for beta chain variable domain of TCR clone 113696 (TRBV18, TRBJ1-3)
CASSPLSRTGMSSGNTIYF

SEQ ID NO: 227393 - protein, 13 aa, Homo sapiens
  CDR3 for alpha chain variable domain of TCR clone 113697 (TRAV20, TRAJ37)
CAGCCSNTGKLIF

SEQ ID NO: 227394 - protein, 11 aa, Homo sapiens
  CDR3 for beta chain variable domain of TCR clone 113697 (TRBV12-4, TRBJ2-3)
CASTATDTQYF

SEQ ID NO: 227395 - protein, 14 aa, Homo sapiens
  CDR3 for alpha chain variable domain of TCR clone 113698 (TRAV12-3, TRAJ10)
SHLPLTGGGNKLTF

SEQ ID NO: 227396 - protein, 13 aa, Homo sapiens
  CDR3 for beta chain variable domain of TCR clone 113698 (TRBV2, TRBJ1-4)
CASSERAGEKLFF

SEQ ID NO: 227397 - protein, 14 aa, Homo sapiens
  CDR3 for alpha chain variable domain of TCR clone 113699 (TRAV12-2, TRAJ13)
CAVKKTGGYQKVTF

SEQ ID NO: 227398 - protein, 14 aa, Homo sapiens
  CDR3 for beta chain variable domain of TCR clone 113699 (TRBV18, TRBJ2-3)
CASSPRTSTDTQYF

SEQ ID NO: 227399 - protein, 16 aa, Homo sapiens
  CDR3 for alpha chain variable domain of TCR clone 113700 (TRAV8-3, TRAJ13)
CAVGAYPSGGYQKVTF

SEQ ID NO: 227400 - protein, 16 aa, Homo sapiens
  CDR3 for beta chain variable domain of TCR clone 113700 (TRBV4-3, TRBJ2-2)
CASSHLQGSGTGELFF

SEQ ID NO: 227401 - protein, 12 aa, Homo sapiens
  CDR3 for alpha chain variable domain of TCR clone 113701 (TRAV1-1, TRAJ9)
CAVDTGGFKNIF

SEQ ID NO: 227402 - protein, 14 aa, Homo sapiens
  CDR3 for beta chain variable domain of TCR clone 113701 (TRBV7-8, TRBJ2-5)
CASSATGGQETQYF

SEQ ID NO: 227403 - protein, 16 aa, Homo sapiens
  CDR3 for alpha chain variable domain of TCR clone 113702 (TRAV30, TRAJ24)
CGTEIVDADSWGKFQF

SEQ ID NO: 227404 - protein, 14 aa, Homo sapiens
  CDR3 for beta chain variable domain of TCR clone 113702 (TRBV9, TRBJ2-7)
CVSSVGVGSYEQYF

SEQ ID NO: 227405 - protein, 13 aa, Homo sapiens
  CDR3 for alpha chain variable domain of TCR clone 113703 (TRAV20, TRAJ37)
CAGCSSNTGKLIF

SEQ ID NO: 227406 - protein, 15 aa, Homo sapiens
  CDR3 for beta chain variable domain of TCR clone 113703 (TRBV7-3, TRBJ2-1)
CASSQRGGALIEQFF

SEQ ID NO: 227407 - protein, 14 aa, Homo sapiens
  CDR3 for alpha chain variable domain of TCR clone 113704 (TRAV27, TRAJ38)
CAGDRAGNNRKLIW

SEQ ID NO: 227408 - protein, 12 aa, Homo sapiens
  CDR3 for beta chain variable domain of TCR clone 113704 (TRBV11-2, TRBJ2-2)
CASSLGGGELFF

SEQ ID NO: 227409 - protein, 15 aa, Homo sapiens
  CDR3 for alpha chain variable domain of TCR clone 113705 (TRAV12-1, TRAJ9)
CVVSFGDTGGFKTIF

SEQ ID NO: 227410 - protein, 19 aa, Homo sapiens
  CDR3 for beta chain variable domain of TCR clone 113705 (TRBV25-1, TRBJ2-2)
CDILVYRVDRGRKTGELFF

SEQ ID NO: 227411 - protein, 16 aa, Homo sapiens
  CDR3 for alpha chain variable domain of TCR clone 113706 (TRAV27, TRAJ53)
CAAPEGSGGSNYKLTF

SEQ ID NO: 227412 - protein, 13 aa, Homo sapiens
  CDR3 for beta chain variable domain of TCR clone 113706 (TRBV7-9, TRBJ1-2)
CASSLKQNYGYTF

SEQ ID NO: 227413 - protein, 12 aa, Homo sapiens
  CDR3 for alpha chain variable domain of TCR clone 113707 (TRAV13-1, TRAJ49)
CAASPMSNQFYF

SEQ ID NO: 227414 - protein, 13 aa, Homo sapiens
  CDR3 for beta chain variable domain of TCR clone 113707 (TRBV20-1, TRBJ2-2)
CSASAAGTGELFF

SEQ ID NO: 227415 - protein, 14 aa, Homo sapiens
  CDR3 for alpha chain variable domain of TCR clone 113708 (TRAV23/DV6, TRAJ57)
CAASNQGGSEKLVC

SEQ ID NO: 227416 - protein, 13 aa, Homo sapiens
  CDR3 for beta chain variable domain of TCR clone 113708 (TRBV11-2, TRBJ2-7)
CASSSYPSYEQYF

SEQ ID NO: 227417 - protein, 17 aa, Homo sapiens
  CDR3 for alpha chain variable domain of TCR clone 113709 (TRAV13-1, TRAJ52)
CAAGRNAGGTSYGKPTF

SEQ ID NO: 227418 - protein, 13 aa, Homo sapiens
  CDR3 for beta chain variable domain of TCR clone 113709 (TRBV7-2, TRBJ1-1)
CASNLKGAKVAFF

SEQ ID NO: 227419 - protein, 11 aa, Homo sapiens
  CDR3 for alpha chain variable domain of TCR clone 113710 (TRAV3, TRAJ21)
CAVGNFNKFYF

SEQ ID NO: 227420 - protein, 13 aa, Homo sapiens
  CDR3 for beta chain variable domain of TCR clone 113710 (TRBV12-5, TRBJ2-3)
CANGDRQSDTQYF

SEQ ID NO: 227421 - protein, 12 aa, Homo sapiens
  CDR3 for alpha chain variable domain of TCR clone 113711 (TRAV13-1, TRAJ21)
CAAKEGFNKFYF

SEQ ID NO: 227422 - protein, 13 aa, Homo sapiens
  CDR3 for beta chain variable domain of TCR clone 113711 (TRBV11-2, TRBJ2-5)
CASSSTGEETQYF

SEQ ID NO: 227423 - protein, 14 aa, Homo sapiens
  CDR3 for alpha chain variable domain of TCR clone 113712 (TRAV12-2, TRAJ13)
CAGKKTGGYQKVTF

SEQ ID NO: 227424 - protein, 12 aa, Homo sapiens
  CDR3 for beta chain variable domain of TCR clone 113712 (TRBV12-4, TRBJ1-2)
CASSFIWLHLRF

SEQ ID NO: 227425 - protein, 14 aa, Homo sapiens
  CDR3 for alpha chain variable domain of TCR clone 113713 (TRAV12-1, TRAJ12)
CVVNDRDSSYKLIF

SEQ ID NO: 227426 - protein, 13 aa, Homo sapiens
  CDR3 for beta chain variable domain of TCR clone 113713 (TRBV20-1, TRBJ1-1)
CSARAGGNTEAFF

SEQ ID NO: 227427 - protein, 12 aa, Homo sapiens
  CDR3 for alpha chain variable domain of TCR clone 113714 (TRAV13-2, TRAJ23)
FAERHRGGKLIF

SEQ ID NO: 227428 - protein, 14 aa, Homo sapiens
  CDR3 for beta chain variable domain of TCR clone 113714 (TRBV5-1, TRBJ1-2)
CASSPQGANYGYTF

SEQ ID NO: 227429 - protein, 15 aa, Homo sapiens
  CDR3 for alpha chain variable domain of TCR clone 113715 (TRAV8-3, TRAJ27)
CAVGPSKTNAGKSTF

SEQ ID NO: 227430 - protein, 11 aa, Homo sapiens
  CDR3 for beta chain variable domain of TCR clone 113715 (TRBV10-1, TRBJ2-3)
CASSDSDTQYF

SEQ ID NO: 227431 - protein, 14 aa, Homo sapiens
  CDR3 for alpha chain variable domain of TCR clone 113716 (TRAV3, TRAJ37)
CAVKESGNTGKLIF

SEQ ID NO: 227432 - protein, 16 aa, Homo sapiens
  CDR3 for beta chain variable domain of TCR clone 113716 (TRBV20-1, TRBJ1-4)
CSAPGQGLLTNEKLFF

SEQ ID NO: 227433 - protein, 16 aa, Homo sapiens
  CDR3 for alpha chain variable domain of TCR clone 113717 (TRAV16, TRAJ52)
CALSGVGGTSYGKLTF

SEQ ID NO: 227434 - protein, 14 aa, Homo sapiens
  CDR3 for beta chain variable domain of TCR clone 113717 (TRBV6-1, TRBJ1-3)
CASVQGGGGNTIYF

SEQ ID NO: 227435 - protein, 23 aa, Homo sapiens
  CDR3 for alpha chain variable domain of TCR clone 113718 (TRAV12-2, TRAJ36)
SLLIRDSQPSDSATLERANNLFF

SEQ ID NO: 227436 - protein, 16 aa, Homo sapiens
  CDR3 for beta chain variable domain of TCR clone 113718 (TRBV29-1, TRBJ2-7)
CSVEDAEDGTAYEQYF

SEQ ID NO: 227437 - protein, 19 aa, Homo sapiens
  CDR3 for alpha chain variable domain of TCR clone 113719 (TRAV8-4, TRAJ3)
CAVTGENLVQQCCQDNLWI

SEQ ID NO: 227438 - protein, 16 aa, Homo sapiens
  CDR3 for beta chain variable domain of TCR clone 113719 (TRBV4-2, TRBJ1-1)
CASSQAGFGMNTEAFF

SEQ ID NO: 227439 - protein, 14 aa, Homo sapiens
  CDR3 for alpha chain variable domain of TCR clone 113720 (TRAV12-1, TRAJ10)
CVVNSAGGGNKLTL

SEQ ID NO: 227440 - protein, 14 aa, Homo sapiens
  CDR3 for beta chain variable domain of TCR clone 113720 (TRBV12-4, TRBJ1-1)
CASSLGTGGTEAFF

SEQ ID NO: 227441 - protein, 13 aa, Homo sapiens
  CDR3 for alpha chain variable domain of TCR clone 113721 (TRAV39, TRAJ17)
CAAQFTAGNKLTF

SEQ ID NO: 227442 - protein, 14 aa, Homo sapiens
  CDR3 for beta chain variable domain of TCR clone 113721 (TRBV11-2, TRBJ2-5)
CASSRTGGIETQYF

SEQ ID NO: 227443 - protein, 13 aa, Homo sapiens
  CDR3 for alpha chain variable domain of TCR clone 113722 (TRAV2, TRAJ40)
CAVVTSGTYKYIF

SEQ ID NO: 227444 - protein, 16 aa, Homo sapiens
  CDR3 for beta chain variable domain of TCR clone 113722 (TRBV7-9, TRBJ1-3)
CASSLGAVSSGNTIYF

SEQ ID NO: 227445 - protein, 14 aa, Homo sapiens
  CDR3 for alpha chain variable domain of TCR clone 113723 (TRAV1-2, TRAJ16)
CAVNRFSEGQKLLF

SEQ ID NO: 227446 - protein, 14 aa, Homo sapiens
  CDR3 for beta chain variable domain of TCR clone 113723 (TRBV19, TRBJ2-1)
CASPTFVLSGEQFF

SEQ ID NO: 227447 - protein, 16 aa, Homo sapiens
  CDR3 for alpha chain variable domain of TCR clone 113724 (TRAV16, TRAJ52)
CALSAAGGTSYGKLTF

SEQ ID NO: 227448 - protein, 15 aa, Homo sapiens
  CDR3 for beta chain variable domain of TCR clone 113724 (TRBV7-3, TRBJ2-1)
CASSPTGGGEVEQFF

SEQ ID NO: 227449 - protein, 12 aa, Homo sapiens
  CDR3 for alpha chain variable domain of TCR clone 113725 (TRAV27, TRAJ35)
CAGADFGNVLHG

SEQ ID NO: 227450 - protein, 15 aa, Homo sapiens
  CDR3 for beta chain variable domain of TCR clone 113725 (TRBV20-1, TRBJ2-7)
CSARDRVSGMDEQYF

SEQ ID NO: 227451 - protein, 14 aa, Homo sapiens
  CDR3 for alpha chain variable domain of TCR clone 113726 (TRAV3, TRAJ34)
CTVRAPGNTDKLIF

SEQ ID NO: 227452 - protein, 17 aa, Homo sapiens
  CDR3 for beta chain variable domain of TCR clone 113726 (TRBV20-1, TRBJ2-7)
CSAAPGLARGISYEQYF

SEQ ID NO: 227453 - protein, 17 aa, Homo sapiens
  CDR3 for alpha chain variable domain of TCR clone 113727 (TRAV3, TRAJ38)
CAVRDCLNAGNNRKLIW

SEQ ID NO: 227454 - protein, 13 aa, Homo sapiens
  CDR3 for beta chain variable domain of TCR clone 113727 (TRBV6-1, TRBJ1-1)
CASSRQGNTEAFF

SEQ ID NO: 227455 - protein, 16 aa, Homo sapiens
  CDR3 for alpha chain variable domain of TCR clone 113728 (TRAV13-1, TRAJ48)
CAASIFVNFGNEKLTF

SEQ ID NO: 227456 - protein, 12 aa, Homo sapiens
  CDR3 for beta chain variable domain of TCR clone 113728 (TRBV14, TRBJ2-4)
CASSNLKSIQYF

SEQ ID NO: 227457 - protein, 14 aa, Homo sapiens
  CDR3 for alpha chain variable domain of TCR clone 113729 (TRAV13-1, TRAJ44)
CAAKATGTARKLTF

SEQ ID NO: 227458 - protein, 13 aa, Homo sapiens
  CDR3 for beta chain variable domain of TCR clone 113729 (TRBV5-5, TRBJ1-2)
CASSFWRGEDYTF

SEQ ID NO: 227459 - protein, 15 aa, Homo sapiens
  CDR3 for alpha chain variable domain of TCR clone 113730 (TRAV25, TRAJ52)
CAGRPGGTSYGKLTF

SEQ ID NO: 227460 - protein, 14 aa, Homo sapiens
  CDR3 for beta chain variable domain of TCR clone 113730 (TRBV11-3, TRBJ2-5)
CASSLGGHAETQYF

SEQ ID NO: 227461 - protein, 13 aa, Homo sapiens
  CDR3 for alpha chain variable domain of TCR clone 113731 (TRAV8-3, TRAJ20)
CAVGRPNDYKLSF

SEQ ID NO: 227462 - protein, 14 aa, Homo sapiens
  CDR3 for beta chain variable domain of TCR clone 113731 (TRBV12-5, TRBJ2-5)
CASVSRTHQETQYF

SEQ ID NO: 227463 - protein, 14 aa, Homo sapiens
  CDR3 for alpha chain variable domain of TCR clone 113732 (TRAV13-1, TRAJ12)
CAASYMDGSYKLIF

SEQ ID NO: 227464 - protein, 13 aa, Homo sapiens
  CDR3 for beta chain variable domain of TCR clone 113732 (TRBV2, TRBJ2-5)
CASSDGIQETQYF

SEQ ID NO: 227465 - protein, 12 aa, Homo sapiens
  CDR3 for alpha chain variable domain of TCR clone 113733 (TRAV2, TRAJ34)
CAAERNTDKLIF

SEQ ID NO: 227466 - protein, 14 aa, Homo sapiens
  CDR3 for beta chain variable domain of TCR clone 113733 (TRBV7-9, TRBJ2-1)
CASSDNSGYNEQFF

SEQ ID NO: 227467 - protein, 14 aa, Homo sapiens
  CDR3 for alpha chain variable domain of TCR clone 113734 (TRAV12-1, TRAJ9)
CVLNIITGGFKTIF

SEQ ID NO: 227468 - protein, 17 aa, Homo sapiens
  CDR3 for beta chain variable domain of TCR clone 113734 (TRBV9, TRBJ2-1)
CASSVEPTGMARDEQFF

SEQ ID NO: 227469 - protein, 13 aa, Homo sapiens
  CDR3 for alpha chain variable domain of TCR clone 113735 (TRAV12-2, TRAJ4)
CAGLSGGYNKLIF

SEQ ID NO: 227470 - protein, 14 aa, Homo sapiens
  CDR3 for beta chain variable domain of TCR clone 113735 (TRBV24-1, TRBJ1-1)
CATSIPRGDTEAFF

SEQ ID NO: 227471 - protein, 12 aa, Homo sapiens
  CDR3 for alpha chain variable domain of TCR clone 113736 (TRAV30, TRAJ43)
SGTEERGNDMRF

SEQ ID NO: 227472 - protein, 13 aa, Homo sapiens
  CDR3 for beta chain variable domain of TCR clone 113736 (TRBV27, TRBJ2-7)
CASSFSQGYEQYF

SEQ ID NO: 227473 - protein, 15 aa, Homo sapiens
  CDR3 for alpha chain variable domain of TCR clone 113737 (TRAV3, TRAJ47)
CAVRDIGEYGNKLVC

SEQ ID NO: 227474 - protein, 14 aa, Homo sapiens
  CDR3 for beta chain variable domain of TCR clone 113737 (TRBV13, TRBJ2-5)
CASSLERVGETQYF

SEQ ID NO: 227475 - protein, 14 aa, Homo sapiens
  CDR3 for alpha chain variable domain of TCR clone 113738 (TRAV1-2, TRAJ16)
CAVNRFSDGQKLLF

SEQ ID NO: 227476 - protein, 13 aa, Homo sapiens
  CDR3 for beta chain variable domain of TCR clone 113738 (TRBV19, TRBJ1-2)
CASSVHGQDGYTL

SEQ ID NO: 227477 - protein, 10 aa, Homo sapiens
  CDR3 for alpha chain variable domain of TCR clone 113739 (TRAV1-2, TRAJ31)
CVSDDARLMF

SEQ ID NO: 227478 - protein, 14 aa, Homo sapiens
  CDR3 for beta chain variable domain of TCR clone 113739 (TRBV19, TRBJ2-1)
CASPTFVLSGEQFF

SEQ ID NO: 227479 - protein, 15 aa, Homo sapiens
  CDR3 for alpha chain variable domain of TCR clone 113740 (TRAV26-1, TRAJ40)
CIVRAVPSGTYKHIF

SEQ ID NO: 227480 - protein, 14 aa, Homo sapiens
  CDR3 for beta chain variable domain of TCR clone 113740 (TRBV19, TRBJ2-1)
CASKDPGLANEQFF

SEQ ID NO: 227481 - protein, 15 aa, Homo sapiens
  CDR3 for alpha chain variable domain of TCR clone 113741 (TRAV4, TRAJ36)
CLVGDRQNGANNLFF

SEQ ID NO: 227482 - protein, 15 aa, Homo sapiens
  CDR3 for beta chain variable domain of TCR clone 113741 (TRBV7-6, TRBJ2-1)
CASSSLAGEGNEQFF

SEQ ID NO: 227483 - protein, 15 aa, Homo sapiens
  CDR3 for alpha chain variable domain of TCR clone 113742 (TRAV21, TRAJ40)
CTVGPQTSGTYKYIF

SEQ ID NO: 227484 - protein, 13 aa, Homo sapiens
  CDR3 for beta chain variable domain of TCR clone 113742 (TRBV7-2, TRBJ2-2)
CASSSVRAGELFF

SEQ ID NO: 227485 - protein, 12 aa, Homo sapiens
  CDR3 for alpha chain variable domain of TCR clone 113743 (TRAV12-3, TRAJ17)
CAMTLTCNKLTF

SEQ ID NO: 227486 - protein, 15 aa, Homo sapiens
  CDR3 for beta chain variable domain of TCR clone 113743 (TRBV20-1, TRBJ2-7)
CSARDRVSGVDEQYF

SEQ ID NO: 227487 - protein, 17 aa, Homo sapiens
  CDR3 for alpha chain variable domain of TCR clone 113744 (TRAV13-1, )
CAANIQNPDHAVYQLRD

SEQ ID NO: 227488 - protein, 14 aa, Homo sapiens
  CDR3 for beta chain variable domain of TCR clone 113744 (TRBV19, TRBJ2-7)
CASSIGPNSYEQYF

SEQ ID NO: 227489 - protein, 12 aa, Homo sapiens
  CDR3 for alpha chain variable domain of TCR clone 113745 (TRAV26-1, TRAJ13)
CIVSRGYQKVTF

SEQ ID NO: 227490 - protein, 15 aa, Homo sapiens
  CDR3 for beta chain variable domain of TCR clone 113745 (TRBV12-4, TRBJ2-5)
CASSPPTGLQETQYF

SEQ ID NO: 227491 - protein, 11 aa, Homo sapiens
  CDR3 for alpha chain variable domain of TCR clone 113746 (TRAV2, TRAJ13)
CASGGYQKVTF

SEQ ID NO: 227492 - protein, 14 aa, Homo sapiens
  CDR3 for beta chain variable domain of TCR clone 113746 (TRBV20-1, TRBJ2-7)
CSAWTALSSYEQYF

SEQ ID NO: 227493 - protein, 18 aa, Homo sapiens
  CDR3 for alpha chain variable domain of TCR clone 113747 (TRAV8-4, TRAJ52)
CAVTRANAGGTSYGTLTF

SEQ ID NO: 227494 - protein, 14 aa, Homo sapiens
  CDR3 for beta chain variable domain of TCR clone 113747 (TRBV19, TRBJ2-7)
CASTVQGRPYEQYF

SEQ ID NO: 227495 - protein, 14 aa, Homo sapiens
  CDR3 for alpha chain variable domain of TCR clone 113748 (TRAV12-2, TRAJ32)
CAVDDGGATNKLIF

SEQ ID NO: 227496 - protein, 13 aa, Homo sapiens
  CDR3 for beta chain variable domain of TCR clone 113748 (TRBV20-1, TRBJ1-1)
CSARGGGNTEAFF

SEQ ID NO: 227497 - protein, 14 aa, Homo sapiens
  CDR3 for alpha chain variable domain of TCR clone 113749 (TRAV12-1, TRAJ17)
CVVNYKAAGNKLTF

SEQ ID NO: 227498 - protein, 15 aa, Homo sapiens
  CDR3 for beta chain variable domain of TCR clone 113749 (TRBV7-8, TRBJ2-1)
CASTHGTGIYNEQFF

SEQ ID NO: 227499 - protein, 14 aa, Homo sapiens
  CDR3 for alpha chain variable domain of TCR clone 113750 (TRAV3, TRAJ9)
CAVRLNTGGFKTIF

SEQ ID NO: 227500 - protein, 16 aa, Homo sapiens
  CDR3 for beta chain variable domain of TCR clone 113750 (TRBV12-5, TRBJ2-5)
CASGTRTSGNQETQYF

SEQ ID NO: 227501 - protein, 14 aa, Homo sapiens
  CDR3 for alpha chain variable domain of TCR clone 113751 (TRAV12-2, TRAJ17)
CAVLFKAAGNKLTF

SEQ ID NO: 227502 - protein, 18 aa, Homo sapiens
  CDR3 for beta chain variable domain of TCR clone 113751 (TRBV7-9, TRBJ2-7)
CASSLTTSGSRTWYEQYF

SEQ ID NO: 227503 - protein, 16 aa, Homo sapiens
  CDR3 for alpha chain variable domain of TCR clone 113752 (TRAV26-1, TRAJ40)
CIVRGYPTSGTYKYFF

SEQ ID NO: 227504 - protein, 14 aa, Homo sapiens
  CDR3 for beta chain variable domain of TCR clone 113752 (TRBV5-1, TRBJ1-4)
CASSSGQGGEKLFF

SEQ ID NO: 227505 - protein, 16 aa, Homo sapiens
  CDR3 for alpha chain variable domain of TCR clone 113753 (TRAV30, TRAJ24)
CGTEIVDADSWGKFQF

SEQ ID NO: 227506 - protein, 17 aa, Homo sapiens
  CDR3 for beta chain variable domain of TCR clone 113753 (TRBV7-2, TRBJ1-4)
CASSFKAGPTTNEKLFF

SEQ ID NO: 227507 - protein, 12 aa, Homo sapiens
  CDR3 for alpha chain variable domain of TCR clone 113754 (TRAV13-1, TRAJ48)
CAANFGNEKLTF

SEQ ID NO: 227508 - protein, 14 aa, Homo sapiens
  CDR3 for beta chain variable domain of TCR clone 113754 (TRBV7-8, TRBJ2-3)
CASSLEAGTDTQYF

SEQ ID NO: 227509 - protein, 13 aa, Homo sapiens
  CDR3 for alpha chain variable domain of TCR clone 113755 (TRAV38-2/DV8, TRAJ34)
CAYRNYNTDKLIF

SEQ ID NO: 227510 - protein, 15 aa, Homo sapiens
  CDR3 for beta chain variable domain of TCR clone 113755 (TRBV10-2, TRBJ2-6)
CASSEQGTGANVLTF

SEQ ID NO: 227511 - protein, 14 aa, Homo sapiens
  CDR3 for alpha chain variable domain of TCR clone 113756 (TRAV4, TRAJ9)
CLVGSGTGGFKTIL

SEQ ID NO: 227512 - protein, 15 aa, Homo sapiens
  CDR3 for beta chain variable domain of TCR clone 113756 (TRBV7-2, TRBJ2-1)
CASSLASGRVNEQFF

SEQ ID NO: 227513 - protein, 14 aa, Homo sapiens
  CDR3 for alpha chain variable domain of TCR clone 113757 (TRAV23/DV6, TRAJ11)
CAASLESGYRTLTF

SEQ ID NO: 227514 - protein, 13 aa, Homo sapiens
  CDR3 for beta chain variable domain of TCR clone 113757 (TRBV4-1, TRBJ2-5)
CASSLTRGETQYF

SEQ ID NO: 227515 - protein, 10 aa, Homo sapiens
  CDR3 for alpha chain variable domain of TCR clone 113758 (TRAV9-2, TRAJ34)
CALSDDKLIF

SEQ ID NO: 227516 - protein, 19 aa, Homo sapiens
  CDR3 for beta chain variable domain of TCR clone 113758 (TRBV7-2, TRBJ1-5)
CASSLGHGTRSYSNQPQHF

SEQ ID NO: 227517 - protein, 12 aa, Homo sapiens
  CDR3 for alpha chain variable domain of TCR clone 113759 (TRAV1-1, TRAJ23)
CAVTNQGGKLIF

SEQ ID NO: 227518 - protein, 15 aa, Homo sapiens
  CDR3 for beta chain variable domain of TCR clone 113759 (TRBV5-1, TRBJ2-3)
CASSVTSGSTDTQYF

SEQ ID NO: 227519 - protein, 13 aa, Homo sapiens
  CDR3 for alpha chain variable domain of TCR clone 113760 (TRAV36/DV7, TRAJ49)
CALEANTGNQFYF

SEQ ID NO: 227520 - protein, 14 aa, Homo sapiens
  CDR3 for beta chain variable domain of TCR clone 113760 (TRBV20-1, TRBJ2-5)
CSASSGRAAETQYF

SEQ ID NO: 227521 - protein, 12 aa, Homo sapiens
  CDR3 for alpha chain variable domain of TCR clone 113761 (TRAV12-2, TRAJ45)
RAVTGGADGLTF

SEQ ID NO: 227522 - protein, 14 aa, Homo sapiens
  CDR3 for beta chain variable domain of TCR clone 113761 (TRBV5-5, TRBJ2-7)
CASSLGQGTYEQYF

SEQ ID NO: 227523 - protein, 10 aa, Homo sapiens
  CDR3 for alpha chain variable domain of TCR clone 113762 (TRAV36/DV7, TRAJ56)
CAGPAVELTF

SEQ ID NO: 227524 - protein, 13 aa, Homo sapiens
  CDR3 for beta chain variable domain of TCR clone 113762 (TRBV7-9, TRBJ2-7)
CASSFWSYYEQYF

SEQ ID NO: 227525 - protein, 13 aa, Homo sapiens
  CDR3 for alpha chain variable domain of TCR clone 113763 (TRAV1-2, TRAJ12)
RAVSMDSSYKLIF

SEQ ID NO: 227526 - protein, 15 aa, Homo sapiens
  CDR3 for beta chain variable domain of TCR clone 113763 (TRBV27, TRBJ2-5)
CASSLIPSGGETQYF

SEQ ID NO: 227527 - protein, 18 aa, Homo sapiens
  CDR3 for alpha chain variable domain of TCR clone 113764 (TRAV13-1, TRAJ52)
CAARKRSAGGTSYGKMTF

SEQ ID NO: 227528 - protein, 13 aa, Homo sapiens
  CDR3 for beta chain variable domain of TCR clone 113764 (TRBV12-4, TRBJ1-2)
CASSLRQGKGYTF

SEQ ID NO: 227529 - protein, 16 aa, Homo sapiens
  CDR3 for alpha chain variable domain of TCR clone 113765 (TRAV17, TRAJ52)
CATDPMGGTNYGKLTF

SEQ ID NO: 227530 - protein, 16 aa, Homo sapiens
  CDR3 for beta chain variable domain of TCR clone 113765 (TRBV6-6, TRBJ2-3)
CASSYLKATSTDTQYF

SEQ ID NO: 227531 - protein, 16 aa, Homo sapiens
  CDR3 for alpha chain variable domain of TCR clone 113766 (TRAV3, TRAJ37)
CAVRPHGSGNTGKLIF

SEQ ID NO: 227532 - protein, 16 aa, Homo sapiens
  CDR3 for beta chain variable domain of TCR clone 113766 (TRBV9, TRBJ1-2)
CASIVEEKVSPYGYTF

SEQ ID NO: 227533 - protein, 16 aa, Homo sapiens
  CDR3 for alpha chain variable domain of TCR clone 113767 (TRAV30, TRAJ24)
CGTEIVDADSWGKFQF

SEQ ID NO: 227534 - protein, 13 aa, Homo sapiens
  CDR3 for beta chain variable domain of TCR clone 113767 (TRBV7-9, TRBJ2-7)
CASSAGLQYEQYF

SEQ ID NO: 227535 - protein, 17 aa, Homo sapiens
  CDR3 for alpha chain variable domain of TCR clone 113768 (TRAV3, TRAJ28)
CAVSEAYSGAGSYQLTF

SEQ ID NO: 227536 - protein, 18 aa, Homo sapiens
  CDR3 for beta chain variable domain of TCR clone 113768 (TRBV27, TRBJ2-1)
CASGNRAVGVGSKNEQFF

SEQ ID NO: 227537 - protein, 15 aa, Homo sapiens
  CDR3 for alpha chain variable domain of TCR clone 113769 (TRAV13-2, TRAJ23)
CAERGFYNQGGKIIF

SEQ ID NO: 227538 - protein, 14 aa, Homo sapiens
  CDR3 for beta chain variable domain of TCR clone 113769 (TRBV4-1, TRBJ2-3)
CASSQDWSTDTQYF

SEQ ID NO: 227539 - protein, 12 aa, Homo sapiens
  CDR3 for alpha chain variable domain of TCR clone 113770 (TRAV25, TRAJ11)
CAGASGYSTLTF

SEQ ID NO: 227540 - protein, 14 aa, Homo sapiens
  CDR3 for beta chain variable domain of TCR clone 113770 (TRBV5-8, TRBJ2-3)
CASSLGQGTDTQYL

SEQ ID NO: 227541 - protein, 15 aa, Homo sapiens
  CDR3 for alpha chain variable domain of TCR clone 113771 (TRAV12-1, TRAJ44)
CVVDEYTGTASKLTF

SEQ ID NO: 227542 - protein, 14 aa, Homo sapiens
  CDR3 for beta chain variable domain of TCR clone 113771 (TRBV11-2, TRBJ2-2)
CASSFTPGDGELFF

SEQ ID NO: 227543 - protein, 12 aa, Homo sapiens
  CDR3 for alpha chain variable domain of TCR clone 113772 (TRAV27, TRAJ9)
CAGESGGFKTIF

SEQ ID NO: 227544 - protein, 18 aa, Homo sapiens
  CDR3 for beta chain variable domain of TCR clone 113772 (TRBV10-2, TRBJ2-2)
GISAPAVHRQADAGELFF

SEQ ID NO: 227545 - protein, 11 aa, Homo sapiens
  CDR3 for alpha chain variable domain of TCR clone 113773 (TRAV1-1, TRAJ23)
CAVRQGGKLIF

SEQ ID NO: 227546 - protein, 20 aa, Homo sapiens
  CDR3 for beta chain variable domain of TCR clone 113773 (TRBV7-8, TRBJ2-2)
CASSHLFPGPTIHITGELIF

SEQ ID NO: 227547 - protein, 11 aa, Homo sapiens
  CDR3 for alpha chain variable domain of TCR clone 113774 (TRAV1-1, TRAJ3)
CAVRSASKIIL

SEQ ID NO: 227548 - protein, 14 aa, Homo sapiens
  CDR3 for beta chain variable domain of TCR clone 113774 (TRBV2, TRBJ1-6)
CALSPSDPRSPLHF

SEQ ID NO: 227549 - protein, 14 aa, Homo sapiens
  CDR3 for alpha chain variable domain of TCR clone 113775 (TRAV12-3, TRAJ10)
SHLPLTGGGNKLTF

SEQ ID NO: 227550 - protein, 15 aa, Homo sapiens
  CDR3 for beta chain variable domain of TCR clone 113775 (TRBV10-3, TRBJ2-1)
CAIRNGTSGHNEQFF

SEQ ID NO: 227551 - protein, 13 aa, Homo sapiens
  CDR3 for alpha chain variable domain of TCR clone 113776 (TRAV30, TRAJ24)
CGTVTDSWGKLQS

SEQ ID NO: 227552 - protein, 15 aa, Homo sapiens
  CDR3 for beta chain variable domain of TCR clone 113776 (TRBV4-1, TRBJ2-1)
CASSQDPGNYNEQFF

SEQ ID NO: 227553 - protein, 17 aa, Homo sapiens
  CDR3 for alpha chain variable domain of TCR clone 113777 (TRAV26-1, TRAJ53)
CIVRVDDSGGSNYKLTC

SEQ ID NO: 227554 - protein, 15 aa, Homo sapiens
  CDR3 for beta chain variable domain of TCR clone 113777 (TRBV20-1, TRBJ2-7)
CSARVPAAYFYEQYF

SEQ ID NO: 227555 - protein, 12 aa, Homo sapiens
  CDR3 for alpha chain variable domain of TCR clone 113778 (TRAV2, TRAJ26)
CAGSPGRLWSEF

SEQ ID NO: 227556 - protein, 13 aa, Homo sapiens
  CDR3 for beta chain variable domain of TCR clone 113778 (TRBV7-9, TRBJ1-2)
CASSLKQNYGHTF

SEQ ID NO: 227557 - protein, 14 aa, Homo sapiens
  CDR3 for alpha chain variable domain of TCR clone 113779 (TRAV12-2, TRAJ13)
CAVKKIGGYQKVTF

SEQ ID NO: 227558 - protein, 12 aa, Homo sapiens
  CDR3 for beta chain variable domain of TCR clone 113779 (TRBV29-1, TRBJ1-1)
CSESDGNTEAFF

SEQ ID NO: 227559 - protein, 13 aa, Homo sapiens
  CDR3 for alpha chain variable domain of TCR clone 113780 (TRAV8-3, TRAJ36)
CAVGATGANNLFF

SEQ ID NO: 227560 - protein, 15 aa, Homo sapiens
  CDR3 for beta chain variable domain of TCR clone 113780 (TRBV7-2, TRBJ1-2)
CSSSPRAGWNYGYTF

SEQ ID NO: 227561 - protein, 13 aa, Homo sapiens
  CDR3 for alpha chain variable domain of TCR clone 113781 (TRAV21, TRAJ27)
CAARPGNAGKSTF

SEQ ID NO: 227562 - protein, 15 aa, Homo sapiens
  CDR3 for beta chain variable domain of TCR clone 113781 (TRBV18, TRBJ2-1)
CASSPPSASYNEQFF

SEQ ID NO: 227563 - protein, 15 aa, Homo sapiens
  CDR3 for alpha chain variable domain of TCR clone 113782 (TRAV3, TRAJ22)
CAVRDRGGSARQLTF

SEQ ID NO: 227564 - protein, 13 aa, Homo sapiens
  CDR3 for beta chain variable domain of TCR clone 113782 (TRBV12-4, TRBJ1-2)
CASSLRQGKGYTV

SEQ ID NO: 227565 - protein, 11 aa, Homo sapiens
  CDR3 for alpha chain variable domain of TCR clone 113783 (TRAV1-2, TRAJ31)
CAVKNNARLMF

SEQ ID NO: 227566 - protein, 11 aa, Homo sapiens
  CDR3 for beta chain variable domain of TCR clone 113783 (TRBV11-3, TRBJ2-1)
CASSLGNEQFF

SEQ ID NO: 227567 - protein, 15 aa, Homo sapiens
  CDR3 for alpha chain variable domain of TCR clone 113784 (TRAV21, TRAJ34)
CAVRGPAYNTDELIF

SEQ ID NO: 227568 - protein, 17 aa, Homo sapiens
  CDR3 for beta chain variable domain of TCR clone 113784 (TRBV7-7, TRBJ1-1)
CASIGDRPNLGVTEAFF

SEQ ID NO: 227569 - protein, 14 aa, Homo sapiens
  CDR3 for alpha chain variable domain of TCR clone 113785 (TRAV2, TRAJ9)
CAAEDRSGGFKTIF

SEQ ID NO: 227570 - protein, 14 aa, Homo sapiens
  CDR3 for beta chain variable domain of TCR clone 113785 (TRBV7-8, TRBJ2-3)
CASSFPDGQDTQYF

SEQ ID NO: 227571 - protein, 14 aa, Homo sapiens
  CDR3 for alpha chain variable domain of TCR clone 113786 (TRAV16, TRAJ37)
CALDIPGNTGKLIF

SEQ ID NO: 227572 - protein, 14 aa, Homo sapiens
  CDR3 for beta chain variable domain of TCR clone 113786 (TRBV7-6, TRBJ2-7)
CASSFRQGADEQYF

SEQ ID NO: 227573 - protein, 14 aa, Homo sapiens
  CDR3 for alpha chain variable domain of TCR clone 113787 (TRAV8-1, TRAJ23)
CAVGTYNQGGKLIF

SEQ ID NO: 227574 - protein, 16 aa, Homo sapiens
  CDR3 for beta chain variable domain of TCR clone 113787 (TRBV18, TRBJ1-5)
WASSPSTGNSNQPQHF

SEQ ID NO: 227575 - protein, 14 aa, Homo sapiens
  CDR3 for alpha chain variable domain of TCR clone 113788 (TRAV3, TRAJ37)
CAVKESGKTGKLIF

SEQ ID NO: 227576 - protein, 14 aa, Homo sapiens
  CDR3 for beta chain variable domain of TCR clone 113788 (TRBV2, TRBJ1-5)
CASSENRGGQPQHF

SEQ ID NO: 227577 - protein, 20 aa, Homo sapiens
  CDR3 for alpha chain variable domain of TCR clone 113789 (TRAV12-1, TRAJ42)
SSVIQPPTSVKGGSQGNLIF

SEQ ID NO: 227578 - protein, 18 aa, Homo sapiens
  CDR3 for beta chain variable domain of TCR clone 113789 (TRBV11-2, TRBJ2-3)
CASSLGGASRGAPNKQYF

SEQ ID NO: 227579 - protein, 11 aa, Homo sapiens
  CDR3 for alpha chain variable domain of TCR clone 113790 (TRAV35, TRAJ30)
CAPGGDDKITF

SEQ ID NO: 227580 - protein, 13 aa, Homo sapiens
  CDR3 for beta chain variable domain of TCR clone 113790 (TRBV7-6, TRBJ2-1)
CQQLGGGADEQFF

SEQ ID NO: 227581 - protein, 13 aa, Homo sapiens
  CDR3 for alpha chain variable domain of TCR clone 113791 (TRAV12-3, TRAJ33)
CAMSVNSNYQLIW

SEQ ID NO: 227582 - protein, 18 aa, Homo sapiens
  CDR3 for beta chain variable domain of TCR clone 113791 (TRBV12-4, TRBJ2-2)
CASSLVAGTRGRTGELFF

SEQ ID NO: 227583 - protein, 14 aa, Homo sapiens
  CDR3 for alpha chain variable domain of TCR clone 113792 (TRAV26-1, TRAJ39)
CIDRGSRAGNMLTF

SEQ ID NO: 227584 - protein, 15 aa, Homo sapiens
  CDR3 for beta chain variable domain of TCR clone 113792 (TRBV7-9, TRBJ1-5)
CASSQGHQPNQPQHF

SEQ ID NO: 227585 - protein, 14 aa, Homo sapiens
  CDR3 for alpha chain variable domain of TCR clone 113793 (TRAV13-1, TRAJ44)
CASKATGTASKLTF

SEQ ID NO: 227586 - protein, 14 aa, Homo sapiens
  CDR3 for beta chain variable domain of TCR clone 113793 (TRBV19, TRBJ2-2)
CASSTLHRSGELFF

SEQ ID NO: 227587 - protein, 12 aa, Homo sapiens
  CDR3 for alpha chain variable domain of TCR clone 113794 (TRAV1-1, TRAJ39)
CAVPVVGNMLTF

SEQ ID NO: 227588 - protein, 14 aa, Homo sapiens
  CDR3 for beta chain variable domain of TCR clone 113794 (TRBV7-8, TRBJ2-3)
CASSLEAGTDTQYF

SEQ ID NO: 227589 - protein, 13 aa, Homo sapiens
  CDR3 for alpha chain variable domain of TCR clone 113795 (TRAV23/DV6, TRAJ22)
CACGAGSARQLTF

SEQ ID NO: 227590 - protein, 15 aa, Homo sapiens
  CDR3 for beta chain variable domain of TCR clone 113795 (TRBV20-1, TRBJ1-1)
CSASRGVTGNTEAFF

SEQ ID NO: 227591 - protein, 14 aa, Homo sapiens
  CDR3 for alpha chain variable domain of TCR clone 113796 (TRAV13-1, TRAJ35)
CAASKGGFGNVLHC

SEQ ID NO: 227592 - protein, 19 aa, Homo sapiens
  CDR3 for beta chain variable domain of TCR clone 113796 (TRBV25-1, TRBJ2-2)
CAILVYRVDRGRKTGELFF

SEQ ID NO: 227593 - protein, 14 aa, Homo sapiens
  CDR3 for alpha chain variable domain of TCR clone 113797 (TRAV26-1, TRAJ44)
CIVSNTGTASKLTF

SEQ ID NO: 227594 - protein, 11 aa, Homo sapiens
  CDR3 for beta chain variable domain of TCR clone 113797 (TRBV19, TRBJ2-7)
CASSILGEQYV

SEQ ID NO: 227595 - protein, 14 aa, Homo sapiens
  CDR3 for alpha chain variable domain of TCR clone 113798 (TRAV8-2, TRAJ4)
CDVSPSGGYNKLIF

SEQ ID NO: 227596 - protein, 15 aa, Homo sapiens
  CDR3 for beta chain variable domain of TCR clone 113798 (TRBV4-1, TRBJ1-4)
CASSDTGGTNEKLFF

SEQ ID NO: 227597 - protein, 13 aa, Homo sapiens
  CDR3 for alpha chain variable domain of TCR clone 113799 (TRAV21, TRAJ27)
CAARPGNAGKSTF

SEQ ID NO: 227598 - protein, 17 aa, Homo sapiens
  CDR3 for beta chain variable domain of TCR clone 113799 (TRBV4-3, TRBJ1-1)
CASSQDLGPFMNTEAFF

SEQ ID NO: 227599 - protein, 13 aa, Homo sapiens
  CDR3 for alpha chain variable domain of TCR clone 113800 (TRAV23/DV6, TRAJ58)
CAARGTSGSRLTF

SEQ ID NO: 227600 - protein, 14 aa, Homo sapiens
  CDR3 for beta chain variable domain of TCR clone 113800 (TRBV4-2, TRBJ2-1)
CASGLDRAYNEQFF

SEQ ID NO: 227601 - protein, 11 aa, Homo sapiens
  CDR3 for alpha chain variable domain of TCR clone 113801 (TRAV35, TRAJ30)
CAPGGDDKIIF

SEQ ID NO: 227602 - protein, 14 aa, Homo sapiens
  CDR3 for beta chain variable domain of TCR clone 113801 (TRBV11-2, TRBJ2-5)
CASSRTGGIETQYF

SEQ ID NO: 227603 - protein, 14 aa, Homo sapiens
  CDR3 for alpha chain variable domain of TCR clone 113802 (TRAV23/DV6, TRAJ11)
CAASLESGYSTLTF

SEQ ID NO: 227604 - protein, 15 aa, Homo sapiens
  CDR3 for beta chain variable domain of TCR clone 113802 (TRBV28, TRBJ2-7)
CASSSPGTEPYEQYF

SEQ ID NO: 227605 - protein, 13 aa, Homo sapiens
  CDR3 for alpha chain variable domain of TCR clone 113803 (TRAV8-3, TRAJ48)
CAVVPFGNEKLTF

SEQ ID NO: 227606 - protein, 19 aa, Homo sapiens
  CDR3 for beta chain variable domain of TCR clone 113803 (TRBV25-1, TRBJ2-2)
CAILVYRVDRGRKTGELSF

SEQ ID NO: 227607 - protein, 16 aa, Homo sapiens
  CDR3 for alpha chain variable domain of TCR clone 113804 (TRAV38-1, TRAJ37)
CAFKGDGSSNTGKLIV

SEQ ID NO: 227608 - protein, 13 aa, Homo sapiens
  CDR3 for beta chain variable domain of TCR clone 113804 (TRBV12-4, TRBJ2-5)
CASSLFRRETQYF

SEQ ID NO: 227609 - protein, 13 aa, Homo sapiens
  CDR3 for alpha chain variable domain of TCR clone 113805 (TRAV21, TRAJ56)
CAVRTGANSKLTF

SEQ ID NO: 227610 - protein, 15 aa, Homo sapiens
  CDR3 for beta chain variable domain of TCR clone 113805 (TRBV7-9, TRBJ1-1)
CASSHRGTVNTEDFF

SEQ ID NO: 227611 - protein, 15 aa, Homo sapiens
  CDR3 for alpha chain variable domain of TCR clone 113806 (TRAV12-1, TRAJ42)
CVVARDGGSQGNLIF

SEQ ID NO: 227612 - protein, 14 aa, Homo sapiens
  CDR3 for beta chain variable domain of TCR clone 113806 (TRBV11-2, TRBJ2-3)
CASSLGGGANTQYF

SEQ ID NO: 227613 - protein, 12 aa, Homo sapiens
  CDR3 for alpha chain variable domain of TCR clone 113807 (TRAV29/DV5, TRAJ49)
CAATDTGNQFYF

SEQ ID NO: 227614 - protein, 19 aa, Homo sapiens
  CDR3 for beta chain variable domain of TCR clone 113807 (TRBV25-1, TRBJ2-2)
WAILVYRVDRGRKTGELFF

SEQ ID NO: 227615 - protein, 14 aa, Homo sapiens
  CDR3 for alpha chain variable domain of TCR clone 113808 (TRAV1-2, TRAJ8)
CAVREDTGFQKLVL

SEQ ID NO: 227616 - protein, 12 aa, Homo sapiens
  CDR3 for beta chain variable domain of TCR clone 113808 (TRBV29-1, TRBJ2-3)
CSVTGGADTQYF

SEQ ID NO: 227617 - protein, 14 aa, Homo sapiens
  CDR3 for alpha chain variable domain of TCR clone 113809 (TRAV2, TRAJ9)
CAVEDRSGGFKTIV

SEQ ID NO: 227618 - protein, 14 aa, Homo sapiens
  CDR3 for beta chain variable domain of TCR clone 113809 (TRBV7-3, TRBJ2-1)
CASSLAGGTNEQFF

SEQ ID NO: 227619 - protein, 14 aa, Homo sapiens
  CDR3 for alpha chain variable domain of TCR clone 113810 (TRAV12-1, TRAJ17)
CVVNYKAAGNTLTF

SEQ ID NO: 227620 - protein, 16 aa, Homo sapiens
  CDR3 for beta chain variable domain of TCR clone 113810 (TRBV12-4, TRBJ1-5)
CASSRPVGGSNQHQHF

SEQ ID NO: 227621 - protein, 13 aa, Homo sapiens
  CDR3 for alpha chain variable domain of TCR clone 113811 (TRAV13-1, TRAJ39)
CSKYSNAGNILTF

SEQ ID NO: 227622 - protein, 16 aa, Homo sapiens
  CDR3 for beta chain variable domain of TCR clone 113811 (TRBV20-1, TRBJ1-4)
CSAPGQGLLTNEKLFF

SEQ ID NO: 227623 - protein, 13 aa, Homo sapiens
  CDR3 for alpha chain variable domain of TCR clone 113812 (TRAV21, TRAJ20)
CAVGLRVHYKLSF

SEQ ID NO: 227624 - protein, 13 aa, Homo sapiens
  CDR3 for beta chain variable domain of TCR clone 113812 (TRBV6-1, TRBJ1-1)
CASSRQGNTEAFF

SEQ ID NO: 227625 - protein, 15 aa, Homo sapiens
  CDR3 for alpha chain variable domain of TCR clone 113813 (TRAV3, TRAJ13)
CAVRVYSGGYQKVTF

SEQ ID NO: 227626 - protein, 15 aa, Homo sapiens
  CDR3 for beta chain variable domain of TCR clone 113813 (TRBV7-3, TRBJ2-1)
CASSPTGGGEVEQFF

SEQ ID NO: 227627 - protein, 14 aa, Homo sapiens
  CDR3 for alpha chain variable domain of TCR clone 113814 (TRAV27, TRAJ23)
CAGAFDNQGGKLIF

SEQ ID NO: 227628 - protein, 16 aa, Homo sapiens
  CDR3 for beta chain variable domain of TCR clone 113814 (TRBV7-8, TRBJ2-7)
CASSLGGTSGSYEQYF

SEQ ID NO: 227629 - protein, 14 aa, Homo sapiens
  CDR3 for alpha chain variable domain of TCR clone 113815 (TRAV2, TRAJ9)
CAVEDRSGGFKTIF

SEQ ID NO: 227630 - protein, 13 aa, Homo sapiens
  CDR3 for beta chain variable domain of TCR clone 113815 (TRBV10-3, TRBJ2-1)
CAISEFSGREQFF

SEQ ID NO: 227631 - protein, 21 aa, Homo sapiens
  CDR3 for alpha chain variable domain of TCR clone 113816 (TRAV36/DV7, TRAJ39)
TATQTGDSAIYLPNAGNMLTF

SEQ ID NO: 227632 - protein, 14 aa, Homo sapiens
  CDR3 for beta chain variable domain of TCR clone 113816 (TRBV20-1, TRBJ2-5)
CSARDGRAGETQYF

SEQ ID NO: 227633 - protein, 11 aa, Homo sapiens
  CDR3 for alpha chain variable domain of TCR clone 113817 (TRAV12-2, TRAJ30)
CAVGRDDKIIF

SEQ ID NO: 227634 - protein, 17 aa, Homo sapiens
  CDR3 for beta chain variable domain of TCR clone 113817 (TRBV7-8, TRBJ2-6)
CASSAGTGGAGANVLTF

SEQ ID NO: 227635 - protein, 15 aa, Homo sapiens
  CDR3 for alpha chain variable domain of TCR clone 113818 (TRAV12-2, TRAJ3)
CAVNIWYSSASKIIF

SEQ ID NO: 227636 - protein, 13 aa, Homo sapiens
  CDR3 for beta chain variable domain of TCR clone 113818 (TRBV27, TRBJ1-1)
CASSLSIGADAFF

SEQ ID NO: 227637 - protein, 13 aa, Homo sapiens
  CDR3 for alpha chain variable domain of TCR clone 113819 (TRAV38-1, TRAJ42)
CARWGGSQGNLIF

SEQ ID NO: 227638 - protein, 14 aa, Homo sapiens
  CDR3 for beta chain variable domain of TCR clone 113819 (TRBV20-1, TRBJ2-1)
CSARRLAEANEQFF

SEQ ID NO: 227639 - protein, 12 aa, Homo sapiens
  CDR3 for alpha chain variable domain of TCR clone 113820 (TRAV8-3, TRAJ26)
CAGDNYGQNFVF

SEQ ID NO: 227640 - protein, 15 aa, Homo sapiens
  CDR3 for beta chain variable domain of TCR clone 113820 (TRBV4-1, TRBJ2-5)
CASSQWDLYQETQYF

SEQ ID NO: 227641 - protein, 12 aa, Homo sapiens
  CDR3 for alpha chain variable domain of TCR clone 113821 (TRAV12-3, TRAJ40)
CAMSSGTYKYIF

SEQ ID NO: 227642 - protein, 16 aa, Homo sapiens
  CDR3 for beta chain variable domain of TCR clone 113821 (TRBV11-1, TRBJ2-2)
CASSAEGLKNTGELFF

SEQ ID NO: 227643 - protein, 16 aa, Homo sapiens
  CDR3 for alpha chain variable domain of TCR clone 113822 (TRAV20, TRAJ22)
CAVQASSSGSARQMTF

SEQ ID NO: 227644 - protein, 13 aa, Homo sapiens
  CDR3 for beta chain variable domain of TCR clone 113822 (TRBV7-2, TRBJ2-5)
CASSQTSVETQYF

SEQ ID NO: 227645 - protein, 14 aa, Homo sapiens
  CDR3 for alpha chain variable domain of TCR clone 113823 (TRAV38-1, TRAJ43)
CAFMKHNNNNDMRF

SEQ ID NO: 227646 - protein, 17 aa, Homo sapiens
  CDR3 for beta chain variable domain of TCR clone 113823 (TRBV7-7, TRBJ1-4)
CASSLVGQGASNDKLFF

SEQ ID NO: 227647 - protein, 16 aa, Homo sapiens
  CDR3 for alpha chain variable domain of TCR clone 113824 (TRAV3, TRAJ23)
CAVKIRIYNQGGKLIF

SEQ ID NO: 227648 - protein, 17 aa, Homo sapiens
  CDR3 for beta chain variable domain of TCR clone 113824 (TRBV10-3, TRBJ2-6)
CAISESTAPSGANVLTF

SEQ ID NO: 227649 - protein, 13 aa, Homo sapiens
  CDR3 for alpha chain variable domain of TCR clone 113825 (TRAV39, TRAJ58)
CAGQETSGSRLTF

SEQ ID NO: 227650 - protein, 13 aa, Homo sapiens
  CDR3 for beta chain variable domain of TCR clone 113825 (TRBV15, TRBJ2-7)
CATSTTGHYEQYF

SEQ ID NO: 227651 - protein, 14 aa, Homo sapiens
  CDR3 for alpha chain variable domain of TCR clone 113826 (TRAV25, TRAJ27)
CAGPETPMQANQPL

SEQ ID NO: 227652 - protein, 16 aa, Homo sapiens
  CDR3 for beta chain variable domain of TCR clone 113826 (TRBV4-1, TRBJ2-6)
CASSQDGGPGANVLTF

SEQ ID NO: 227653 - protein, 14 aa, Homo sapiens
  CDR3 for alpha chain variable domain of TCR clone 113827 (TRAV8-4, TRAJ16)
CAVSPVGRWPEAAL

SEQ ID NO: 227654 - protein, 15 aa, Homo sapiens
  CDR3 for beta chain variable domain of TCR clone 113827 (TRBV7-3, TRBJ1-6)
CASSLGRGAGSPLHL

SEQ ID NO: 227655 - protein, 15 aa, Homo sapiens
  CDR3 for alpha chain variable domain of TCR clone 113828 (TRAV25, TRAJ52)
CAGRPGGTSDGELTF

SEQ ID NO: 227656 - protein, 17 aa, Homo sapiens
  CDR3 for beta chain variable domain of TCR clone 113828 (TRBV7-8, TRBJ2-6)
CASSAGTGGAGANVLTF

SEQ ID NO: 227657 - protein, 14 aa, Homo sapiens
  CDR3 for alpha chain variable domain of TCR clone 113829 (TRAV12-1, TRAJ17)
CAVNYKAAGNKLTF

SEQ ID NO: 227658 - protein, 17 aa, Homo sapiens
  CDR3 for beta chain variable domain of TCR clone 113829 (TRBV11-2, TRBJ2-1)
CASSLYPPGVEYNEQFF

SEQ ID NO: 227659 - protein, 17 aa, Homo sapiens
  CDR3 for alpha chain variable domain of TCR clone 113830 (TRAV4, TRAJ18)
CLVGERSVGSTLGRLYF

SEQ ID NO: 227660 - protein, 18 aa, Homo sapiens
  CDR3 for beta chain variable domain of TCR clone 113830 (TRBV11-2, TRBJ2-3)
CASSLGGVSRGAPNTQYF

SEQ ID NO: 227661 - protein, 13 aa, Homo sapiens
  CDR3 for alpha chain variable domain of TCR clone 113831 (TRAV1-2, TRAJ9)
CAALNTGGFKTIF

SEQ ID NO: 227662 - protein, 16 aa, Homo sapiens
  CDR3 for beta chain variable domain of TCR clone 113831 (TRBV7-8, TRBJ2-4)
CASSAERTLAKNIQYF

SEQ ID NO: 227663 - protein, 14 aa, Homo sapiens
  CDR3 for alpha chain variable domain of TCR clone 113832 (TRAV9-2, TRAJ39)
CALYIYNAGNILTF

SEQ ID NO: 227664 - protein, 14 aa, Homo sapiens
  CDR3 for beta chain variable domain of TCR clone 113832 (TRBV6-1, TRBJ1-3)
CASVQGGGGNTIYF

SEQ ID NO: 227665 - protein, 14 aa, Homo sapiens
  CDR3 for alpha chain variable domain of TCR clone 113833 (TRAV26-1, TRAJ38)
CIADNAGNNRKLIL

SEQ ID NO: 227666 - protein, 15 aa, Homo sapiens
  CDR3 for beta chain variable domain of TCR clone 113833 (TRBV9, TRBJ2-1)
CASSLAGSSYNEQFF

SEQ ID NO: 227667 - protein, 16 aa, Homo sapiens
  CDR3 for alpha chain variable domain of TCR clone 113834 (TRAV17, TRAJ28)
CATASVSGAGSYQLTF

SEQ ID NO: 227668 - protein, 14 aa, Homo sapiens
  CDR3 for beta chain variable domain of TCR clone 113834 (TRBV19, TRBJ1-1)
CASTGHRLNTEAFF

SEQ ID NO: 227669 - protein, 13 aa, Homo sapiens
  CDR3 for alpha chain variable domain of TCR clone 113835 (TRAV8-3, TRAJ5)
CAVGPRGRRALTF

SEQ ID NO: 227670 - protein, 14 aa, Homo sapiens
  CDR3 for beta chain variable domain of TCR clone 113835 (TRBV2, TRBJ2-7)
CASSLTSGGYEQYF

SEQ ID NO: 227671 - protein, 14 aa, Homo sapiens
  CDR3 for alpha chain variable domain of TCR clone 113836 (TRAV26-1, TRAJ38)
CIADNAGNNRKLIL

SEQ ID NO: 227672 - protein, 12 aa, Homo sapiens
  CDR3 for beta chain variable domain of TCR clone 113836 (TRBV29-1, TRBJ2-3)
CSVTGGADTQYF

SEQ ID NO: 227673 - protein, 15 aa, Homo sapiens
  CDR3 for alpha chain variable domain of TCR clone 113837 (TRAV25, TRAJ52)
CAGRPGGTSYGELTF

SEQ ID NO: 227674 - protein, 12 aa, Homo sapiens
  CDR3 for beta chain variable domain of TCR clone 113837 (TRBV11-2, TRBJ2-2)
CASSLGGGELFF

SEQ ID NO: 227675 - protein, 22 aa, Homo sapiens
  CDR3 for alpha chain variable domain of TCR clone 113838 (TRAV2, TRAJ38)
CAVEDFPNAGNNHIQNPDPAVY

SEQ ID NO: 227676 - protein, 15 aa, Homo sapiens
  CDR3 for beta chain variable domain of TCR clone 113838 (TRBV5-1, TRBJ2-2)
CASSTFNINTGELFF

SEQ ID NO: 227677 - protein, 13 aa, Homo sapiens
  CDR3 for alpha chain variable domain of TCR clone 113839 (TRAV23/DV6, TRAJ34)
CAAIENNTDKLIF

SEQ ID NO: 227678 - protein, 18 aa, Homo sapiens
  CDR3 for beta chain variable domain of TCR clone 113839 (TRBV20-1, TRBJ2-6)
CSAGTTPTHGSGANVLTF

SEQ ID NO: 227679 - protein, 16 aa, Homo sapiens
  CDR3 for alpha chain variable domain of TCR clone 113840 (TRAV16, TRAJ4)
CALSRMFSGGYNKLIF

SEQ ID NO: 227680 - protein, 16 aa, Homo sapiens
  CDR3 for beta chain variable domain of TCR clone 113840 (TRBV19, TRBJ2-1)
CASDLGRLSSYNEQFF

SEQ ID NO: 227681 - protein, 12 aa, Homo sapiens
  CDR3 for alpha chain variable domain of TCR clone 113841 (TRAV23/DV6, TRAJ30)
CAASKGDDKIIF

SEQ ID NO: 227682 - protein, 15 aa, Homo sapiens
  CDR3 for beta chain variable domain of TCR clone 113841 (TRBV20-1, TRBJ2-7)
CSARDRVSGMDEEYF

SEQ ID NO: 227683 - protein, 14 aa, Homo sapiens
  CDR3 for alpha chain variable domain of TCR clone 113842 (TRAV1-2, TRAJ8)
CAVREDTGFQQLVF

SEQ ID NO: 227684 - protein, 15 aa, Homo sapiens
  CDR3 for beta chain variable domain of TCR clone 113842 (TRBV7-9, TRBJ1-5)
CASSQGHQPNQPQHF

SEQ ID NO: 227685 - protein, 14 aa, Homo sapiens
  CDR3 for alpha chain variable domain of TCR clone 113843 (TRAV8-3, TRAJ4)
CAVGASGGYNKLIF

SEQ ID NO: 227686 - protein, 16 aa, Homo sapiens
  CDR3 for beta chain variable domain of TCR clone 113843 (TRBV4-3, TRBJ2-2)
CASSHLQGSGTGELFV

SEQ ID NO: 227687 - protein, 14 aa, Homo sapiens
  CDR3 for alpha chain variable domain of TCR clone 113844 (TRAV8-3, TRAJ4)
CAVGASGGYNKLIF

SEQ ID NO: 227688 - protein, 13 aa, Homo sapiens
  CDR3 for beta chain variable domain of TCR clone 113844 (TRBV20-1, TRBJ1-3)
CSARVQGRDTIYF

SEQ ID NO: 227689 - protein, 15 aa, Homo sapiens
  CDR3 for alpha chain variable domain of TCR clone 113845 (TRAV12-3, TRAJ49)
CAMAVTPNTGNQFYS

SEQ ID NO: 227690 - protein, 18 aa, Homo sapiens
  CDR3 for beta chain variable domain of TCR clone 113845 (TRBV4-1, TRBJ1-5)
CASSQDPRGQGLNQPQHF

SEQ ID NO: 227691 - protein, 11 aa, Homo sapiens
  CDR3 for alpha chain variable domain of TCR clone 113846 (TRAV12-2, TRAJ30)
CAVGRDDKIIF

SEQ ID NO: 227692 - protein, 15 aa, Homo sapiens
  CDR3 for beta chain variable domain of TCR clone 113846 (TRBV20-1, TRBJ2-7)
CSARDRVSGMDEQYF

SEQ ID NO: 227693 - protein, 14 aa, Homo sapiens
  CDR3 for alpha chain variable domain of TCR clone 113847 (TRAV1-2, TRAJ16)
CAVNRFSDGQKLLF

SEQ ID NO: 227694 - protein, 15 aa, Homo sapiens
  CDR3 for beta chain variable domain of TCR clone 113847 (TRBV7-9, TRBJ1-6)
CASSSPGRGNSPLNF

SEQ ID NO: 227695 - protein, 15 aa, Homo sapiens
  CDR3 for alpha chain variable domain of TCR clone 113848 (TRAV21, TRAJ52)
CAVRGGGTSYGKLTF

SEQ ID NO: 227696 - protein, 15 aa, Homo sapiens
  CDR3 for beta chain variable domain of TCR clone 113848 (TRBV18, TRBJ1-5)
CASSPPDRSNQPQHF

SEQ ID NO: 227697 - protein, 15 aa, Homo sapiens
  CDR3 for alpha chain variable domain of TCR clone 113849 (TRAV26-1, TRAJ44)
CIVRANTGTASKLTF

SEQ ID NO: 227698 - protein, 16 aa, Homo sapiens
  CDR3 for beta chain variable domain of TCR clone 113849 (TRBV7-7, TRBJ2-1)
CASSLASGTSYNEQFF

SEQ ID NO: 227699 - protein, 15 aa, Homo sapiens
  CDR3 for alpha chain variable domain of TCR clone 113850 (TRAV21, TRAJ53)
CATLNSGGSNDKLTF

SEQ ID NO: 227700 - protein, 15 aa, Homo sapiens
  CDR3 for beta chain variable domain of TCR clone 113850 (TRBV7-6, TRBJ1-5)
CASSQSSGINQPQHF

SEQ ID NO: 227701 - protein, 15 aa, Homo sapiens
  CDR3 for alpha chain variable domain of TCR clone 113851 (TRAV13-1, TRAJ17)
CAARIERAAGNKLTF

SEQ ID NO: 227702 - protein, 15 aa, Homo sapiens
  CDR3 for beta chain variable domain of TCR clone 113851 (TRBV6-1, TRBJ2-3)
CASSERGGITDTQYF

SEQ ID NO: 227703 - protein, 12 aa, Homo sapiens
  CDR3 for alpha chain variable domain of TCR clone 113852 (TRAV1-2, TRAJ24)
CAVGGSWGKVQF

SEQ ID NO: 227704 - protein, 15 aa, Homo sapiens
  CDR3 for beta chain variable domain of TCR clone 113852 (TRBV6-1, TRBJ2-7)
CASSEGVGNPYEQYF

SEQ ID NO: 227705 - protein, 13 aa, Homo sapiens
  CDR3 for alpha chain variable domain of TCR clone 113853 (TRAV6, TRAJ16)
CALDDSDGQKLLF

SEQ ID NO: 227706 - protein, 13 aa, Homo sapiens
  CDR3 for beta chain variable domain of TCR clone 113853 (TRBV20-1, TRBJ1-1)
CSARVGGNTEAFF

SEQ ID NO: 227707 - protein, 14 aa, Homo sapiens
  CDR3 for alpha chain variable domain of TCR clone 113854 (TRAV24, TRAJ16)
CAFPPFSDVQKLLF

SEQ ID NO: 227708 - protein, 12 aa, Homo sapiens
  CDR3 for beta chain variable domain of TCR clone 113854 (TRBV19, TRBJ1-1)
CASTSGGGEAFF

SEQ ID NO: 227709 - protein, 21 aa, Homo sapiens
  CDR3 for alpha chain variable domain of TCR clone 113855 (TRAV1-1, TRAJ6)
CLLFLRCERLERTGGSYIPTF

SEQ ID NO: 227710 - protein, 13 aa, Homo sapiens
  CDR3 for beta chain variable domain of TCR clone 113855 (TRBV10-2, TRBJ2-7)
CASGASGGYEQYF

SEQ ID NO: 227711 - protein, 16 aa, Homo sapiens
  CDR3 for alpha chain variable domain of TCR clone 113856 (TRAV8-3, TRAJ8)
CAVPRDGNTGFHKLVF

SEQ ID NO: 227712 - protein, 14 aa, Homo sapiens
  CDR3 for beta chain variable domain of TCR clone 113856 (TRBV4-1, TRBJ2-2)
CASSQAVNTGELFF

SEQ ID NO: 227713 - protein, 10 aa, Homo sapiens
  CDR3 for alpha chain variable domain of TCR clone 113857 (TRAV12-3, TRAJ49)
CAMNDDQFYF

SEQ ID NO: 227714 - protein, 13 aa, Homo sapiens
  CDR3 for beta chain variable domain of TCR clone 113857 (TRBV4-1, TRBJ2-2)
CASSQENTGELFF

SEQ ID NO: 227715 - protein, 12 aa, Homo sapiens
  CDR3 for alpha chain variable domain of TCR clone 113858 (TRAV9-2, TRAJ26)
CALRGYGQKFVF

SEQ ID NO: 227716 - protein, 12 aa, Homo sapiens
  CDR3 for beta chain variable domain of TCR clone 113858 (TRBV29-1, TRBJ2-3)
CSVTGGADTQYF

SEQ ID NO: 227717 - protein, 15 aa, Homo sapiens
  CDR3 for alpha chain variable domain of TCR clone 113859 (TRAV8-4, TRAJ6)
CAVSAPSGGSYIPTF

SEQ ID NO: 227718 - protein, 14 aa, Homo sapiens
  CDR3 for beta chain variable domain of TCR clone 113859 (TRBV19, TRBJ2-1)
CASPTFVLSGEQFF

SEQ ID NO: 227719 - protein, 14 aa, Homo sapiens
  CDR3 for alpha chain variable domain of TCR clone 113860 (TRAV13-1, TRAJ12)
CAASYMDSSYKLIF

SEQ ID NO: 227720 - protein, 13 aa, Homo sapiens
  CDR3 for beta chain variable domain of TCR clone 113860 (TRBV2, TRBJ2-5)
CASSDGTQETQYF

SEQ ID NO: 227721 - protein, 16 aa, Homo sapiens
  CDR3 for alpha chain variable domain of TCR clone 113861 (TRAV3, TRAJ18)
CAVRDGRGSTLGRLYF

SEQ ID NO: 227722 - protein, 12 aa, Homo sapiens
  CDR3 for beta chain variable domain of TCR clone 113861 (TRBV11-2, TRBJ2-5)
CASSLVGETQYF

SEQ ID NO: 227723 - protein, 15 aa, Homo sapiens
  CDR3 for alpha chain variable domain of TCR clone 113862 (TRAV12-1, TRAJ6)
CVVNCPLRRKLHTYI

SEQ ID NO: 227724 - protein, 13 aa, Homo sapiens
  CDR3 for beta chain variable domain of TCR clone 113862 (TRBV7-8, TRBJ2-7)
CASSLTGGREQYF

SEQ ID NO: 227725 - protein, 15 aa, Homo sapiens
  CDR3 for alpha chain variable domain of TCR clone 113863 (TRAV21, TRAJ24)
CAARSSTDSWGKLQF

SEQ ID NO: 227726 - protein, 13 aa, Homo sapiens
  CDR3 for beta chain variable domain of TCR clone 113863 (TRBV11-2, TRBJ2-5)
FASSSTGEETQYF

SEQ ID NO: 227727 - protein, 13 aa, Homo sapiens
  CDR3 for alpha chain variable domain of TCR clone 113864 (TRAV35, TRAJ44)
CAELSGTASKLTF

SEQ ID NO: 227728 - protein, 17 aa, Homo sapiens
  CDR3 for beta chain variable domain of TCR clone 113864 (TRBV7-8, TRBJ1-2)
CASSLRPLQGHLYGYTF

SEQ ID NO: 227729 - protein, 16 aa, Homo sapiens
  CDR3 for alpha chain variable domain of TCR clone 113865 (TRAV16, TRAJ4)
CALSRTFSGGYNKLIF

SEQ ID NO: 227730 - protein, 14 aa, Homo sapiens
  CDR3 for beta chain variable domain of TCR clone 113865 (TRBV4-1, TRBJ2-2)
CASSQAVNTGELFF

SEQ ID NO: 227731 - protein, 13 aa, Homo sapiens
  CDR3 for alpha chain variable domain of TCR clone 113866 (TRAV13-2, TRAJ48)
CAEMDFGNKKLTF

SEQ ID NO: 227732 - protein, 15 aa, Homo sapiens
  CDR3 for beta chain variable domain of TCR clone 113866 (TRBV7-9, TRBJ1-6)
CASSSPGRGNSPLHF

SEQ ID NO: 227733 - protein, 12 aa, Homo sapiens
  CDR3 for alpha chain variable domain of TCR clone 113867 (TRAV2, TRAJ31)
CAVEDNNARLMF

SEQ ID NO: 227734 - protein, 15 aa, Homo sapiens
  CDR3 for beta chain variable domain of TCR clone 113867 (TRBV7-3, TRBJ2-1)
CASSPTGGGEVEQFF

SEQ ID NO: 227735 - protein, 14 aa, Homo sapiens
  CDR3 for alpha chain variable domain of TCR clone 113868 (TRAV12-2, TRAJ17)
CAVLFRAAGNKLTF

SEQ ID NO: 227736 - protein, 20 aa, Homo sapiens
  CDR3 for beta chain variable domain of TCR clone 113868 (TRBV19, TRBJ2-1)
CASSISRTVTSTRLNNEQFF

SEQ ID NO: 227737 - protein, 13 aa, Homo sapiens
  CDR3 for alpha chain variable domain of TCR clone 113869 (TRAV3, TRAJ21)
CAVREPDFNKFYF

SEQ ID NO: 227738 - protein, 12 aa, Homo sapiens
  CDR3 for beta chain variable domain of TCR clone 113869 (TRBV28, TRBJ2-6)
CAIQAGANVLTF

SEQ ID NO: 227739 - protein, 18 aa, Homo sapiens
  CDR3 for alpha chain variable domain of TCR clone 113870 (TRAV26-2, TRAJ54)
CILRDVEVGIQGAQKLVF

SEQ ID NO: 227740 - protein, 16 aa, Homo sapiens
  CDR3 for beta chain variable domain of TCR clone 113870 (TRBV6-1, TRBJ2-5)
CAGSETLDRGTETQYF

SEQ ID NO: 227741 - protein, 12 aa, Homo sapiens
  CDR3 for alpha chain variable domain of TCR clone 113871 (TRAV20, TRAJ54)
CAVQEGAQRLVF

SEQ ID NO: 227742 - protein, 17 aa, Homo sapiens
  CDR3 for beta chain variable domain of TCR clone 113871 (TRBV13, TRBJ2-3)
CASSLSRVAGGRNTQYF

SEQ ID NO: 227743 - protein, 14 aa, Homo sapiens
  CDR3 for alpha chain variable domain of TCR clone 113872 (TRAV17, TRAJ54)
CATDANQGAQKLVF

SEQ ID NO: 227744 - protein, 15 aa, Homo sapiens
  CDR3 for beta chain variable domain of TCR clone 113872 (TRBV6-3, TRBJ2-7)
CASSSPGTVFYEQYF

SEQ ID NO: 227745 - protein, 14 aa, Homo sapiens
  CDR3 for alpha chain variable domain of TCR clone 113873 (TRAV17, TRAJ31)
CATVLRNNNARLMF

SEQ ID NO: 227746 - protein, 14 aa, Homo sapiens
  CDR3 for beta chain variable domain of TCR clone 113873 (TRBV12-4, TRBJ2-5)
CASSLWQKQETQYC

SEQ ID NO: 227747 - protein, 14 aa, Homo sapiens
  CDR3 for alpha chain variable domain of TCR clone 113874 (TRAV12-2, TRAJ13)
CAVKKTGGYQKVTF

SEQ ID NO: 227748 - protein, 15 aa, Homo sapiens
  CDR3 for beta chain variable domain of TCR clone 113874 (TRBV27, TRBJ2-1)
CASSNGGGPSSEQFF

SEQ ID NO: 227749 - protein, 13 aa, Homo sapiens
  CDR3 for alpha chain variable domain of TCR clone 113875 (TRAV21, TRAJ57)
CAVTQGGSEKLVF

SEQ ID NO: 227750 - protein, 16 aa, Homo sapiens
  CDR3 for beta chain variable domain of TCR clone 113875 (TRBV6-1, TRBJ2-5)
CASSETLDRGAETQYF

SEQ ID NO: 227751 - protein, 11 aa, Homo sapiens
  CDR3 for alpha chain variable domain of TCR clone 113876 (TRAV3, TRAJ21)
CAVGNFNKFYF

SEQ ID NO: 227752 - protein, 15 aa, Homo sapiens
  CDR3 for beta chain variable domain of TCR clone 113876 (TRBV5-1, TRBJ2-1)
CPSSLVANSYNEQFF

SEQ ID NO: 227753 - protein, 15 aa, Homo sapiens
  CDR3 for alpha chain variable domain of TCR clone 113877 (TRAV3, TRAJ9)
CAVRARNTGGFKTIF

SEQ ID NO: 227754 - protein, 12 aa, Homo sapiens
  CDR3 for beta chain variable domain of TCR clone 113877 (TRBV11-2, TRBJ2-7)
CASSVPTYEQYF

SEQ ID NO: 227755 - protein, 14 aa, Homo sapiens
  CDR3 for alpha chain variable domain of TCR clone 113878 (TRAV1-2, TRAJ16)
CAVNRFSDGQKLLF

SEQ ID NO: 227756 - protein, 12 aa, Homo sapiens
  CDR3 for beta chain variable domain of TCR clone 113878 (TRBV7-6, TRBJ2-7)
CACSLADSEQYF

SEQ ID NO: 227757 - protein, 14 aa, Homo sapiens
  CDR3 for alpha chain variable domain of TCR clone 113879 (TRAV17, TRAJ35)
CATDRPGFGNVLHC

SEQ ID NO: 227758 - protein, 17 aa, Homo sapiens
  CDR3 for beta chain variable domain of TCR clone 113879 (TRBV19, TRBJ2-7)
CASSISFYDSYPYEQYF

SEQ ID NO: 227759 - protein, 14 aa, Homo sapiens
  CDR3 for alpha chain variable domain of TCR clone 113880 (TRAV23/DV6, TRAJ8)
CAASKATGFQKLVF

SEQ ID NO: 227760 - protein, 13 aa, Homo sapiens
  CDR3 for beta chain variable domain of TCR clone 113880 (TRBV4-2, TRBJ1-1)
CASSQAGNTEAFF

SEQ ID NO: 227761 - protein, 17 aa, Homo sapiens
  CDR3 for alpha chain variable domain of TCR clone 113881 (TRAV19, TRAJ28)
CALSEASSGAGSYQLTF

SEQ ID NO: 227762 - protein, 14 aa, Homo sapiens
  CDR3 for beta chain variable domain of TCR clone 113881 (TRBV12-4, TRBJ1-1)
CASSLGTGGTEAFF

SEQ ID NO: 227763 - protein, 14 aa, Homo sapiens
  CDR3 for alpha chain variable domain of TCR clone 113882 (TRAV9-2, TRAJ6)
CALRDPGGSYIPTF

SEQ ID NO: 227764 - protein, 16 aa, Homo sapiens
  CDR3 for beta chain variable domain of TCR clone 113882 (TRBV19, TRBJ2-2)
CASRSPGTGATGELFF

SEQ ID NO: 227765 - protein, 16 aa, Homo sapiens
  CDR3 for alpha chain variable domain of TCR clone 113883 (TRAV1-1, TRAJ31)
CLLLLRCEANNARLMF

SEQ ID NO: 227766 - protein, 13 aa, Homo sapiens
  CDR3 for beta chain variable domain of TCR clone 113883 (TRBV19, TRBJ1-2)
CASSVPGQDGYTF

SEQ ID NO: 227767 - protein, 14 aa, Homo sapiens
  CDR3 for alpha chain variable domain of TCR clone 113884 (TRAV12-2, TRAJ13)
CAVKKTGGYQKVTF

SEQ ID NO: 227768 - protein, 12 aa, Homo sapiens
  CDR3 for beta chain variable domain of TCR clone 113884 (TRBV11-2, TRBJ2-2)
CASSLRGGELFF

SEQ ID NO: 227769 - protein, 16 aa, Homo sapiens
  CDR3 for alpha chain variable domain of TCR clone 113885 (TRAV30, TRAJ24)
CGTEIVDADSWGKFQF

SEQ ID NO: 227770 - protein, 14 aa, Homo sapiens
  CDR3 for beta chain variable domain of TCR clone 113885 (TRBV19, TRBJ2-2)
CASSTGQGAGELFF

SEQ ID NO: 227771 - protein, 13 aa, Homo sapiens
  CDR3 for alpha chain variable domain of TCR clone 113886 (TRAV27, TRAJ56)
CAGKPGANSKLTF

SEQ ID NO: 227772 - protein, 18 aa, Homo sapiens
  CDR3 for beta chain variable domain of TCR clone 113886 (TRBV11-2, TRBJ2-3)
CASSLGGASRGDPNTQYF

SEQ ID NO: 227773 - protein, 10 aa, Homo sapiens
  CDR3 for alpha chain variable domain of TCR clone 113887 (TRAV8-4, TRAJ43)
CAVSADDMRF

SEQ ID NO: 227774 - protein, 15 aa, Homo sapiens
  CDR3 for beta chain variable domain of TCR clone 113887 (TRBV5-1, TRBJ2-3)
CASSVTSGSTDTQYC

SEQ ID NO: 227775 - protein, 16 aa, Homo sapiens
  CDR3 for alpha chain variable domain of TCR clone 113888 (TRAV16, TRAJ52)
CSLRGVGGTSYGKLTF

SEQ ID NO: 227776 - protein, 14 aa, Homo sapiens
  CDR3 for beta chain variable domain of TCR clone 113888 (TRBV19, TRBJ1-2)
CASSLQGQAYGYTF

SEQ ID NO: 227777 - protein, 19 aa, Homo sapiens
  CDR3 for alpha chain variable domain of TCR clone 113889 (TRAV26-1, TRAJ28)
CIVRVAHAYSGAGSYQLTF

SEQ ID NO: 227778 - protein, 16 aa, Homo sapiens
  CDR3 for beta chain variable domain of TCR clone 113889 (TRBV12-4, TRBJ1-5)
CASRQPVEGSNQPQHF

SEQ ID NO: 227779 - protein, 12 aa, Homo sapiens
  CDR3 for alpha chain variable domain of TCR clone 113890 (TRAV21, TRAJ11)
CAATSGYSTLTF

SEQ ID NO: 227780 - protein, 14 aa, Homo sapiens
  CDR3 for beta chain variable domain of TCR clone 113890 (TRBV20-1, TRBJ2-7)
CSAPELGGVGEQYF

SEQ ID NO: 227781 - protein, 17 aa, Homo sapiens
  CDR3 for alpha chain variable domain of TCR clone 113891 (TRAV3, TRAJ6)
CAVRDGPRAGGSYIPTF

SEQ ID NO: 227782 - protein, 11 aa, Homo sapiens
  CDR3 for beta chain variable domain of TCR clone 113891 (TRBV18, TRBJ2-5)
CASSPRETQYF

SEQ ID NO: 227783 - protein, 14 aa, Homo sapiens
  CDR3 for alpha chain variable domain of TCR clone 113892 (TRAV13-2, TRAJ11)
CAETGNSGYSTLTF

SEQ ID NO: 227784 - protein, 13 aa, Homo sapiens
  CDR3 for beta chain variable domain of TCR clone 113892 (TRBV12-4, TRBJ1-1)
CASSPGTGFEAFF

SEQ ID NO: 227785 - protein, 14 aa, Homo sapiens
  CDR3 for alpha chain variable domain of TCR clone 113893 (TRAV3, TRAJ28)
CAVRRGAGSYQLTF

SEQ ID NO: 227786 - protein, 16 aa, Homo sapiens
  CDR3 for beta chain variable domain of TCR clone 113893 (TRBV4-1, TRBJ2-7)
CASSQEWTSGPHEQYF

SEQ ID NO: 227787 - protein, 15 aa, Homo sapiens
  CDR3 for alpha chain variable domain of TCR clone 113894 (TRAV8-4, TRAJ3)
CAVTGENLVQQCFQD

SEQ ID NO: 227788 - protein, 16 aa, Homo sapiens
  CDR3 for beta chain variable domain of TCR clone 113894 (TRBV4-2, TRBJ1-1)
CASSQAGFGINTEAFF

SEQ ID NO: 227789 - protein, 13 aa, Homo sapiens
  CDR3 for alpha chain variable domain of TCR clone 113895 (TRAV3, TRAJ27)
CAVRPLGAGKSTF

SEQ ID NO: 227790 - protein, 14 aa, Homo sapiens
  CDR3 for beta chain variable domain of TCR clone 113895 (TRBV7-9, TRBJ2-1)
CASSSMVGFGEQFF

SEQ ID NO: 227791 - protein, 13 aa, Homo sapiens
  CDR3 for alpha chain variable domain of TCR clone 113896 (TRAV35, TRAJ48)
CAGHEFGNEKLTF

SEQ ID NO: 227792 - protein, 15 aa, Homo sapiens
  CDR3 for beta chain variable domain of TCR clone 113896 (TRBV27, TRBJ2-7)
CARSPQREGQREQYF

SEQ ID NO: 227793 - protein, 15 aa, Homo sapiens
  CDR3 for alpha chain variable domain of TCR clone 113897 (TRAV38-1, TRAJ57)
CAFMDSQGGSEKLVF

SEQ ID NO: 227794 - protein, 15 aa, Homo sapiens
  CDR3 for beta chain variable domain of TCR clone 113897 (TRBV11-3, TRBJ2-3)
CASLKDGREGDTQYF

SEQ ID NO: 227795 - protein, 11 aa, Homo sapiens
  CDR3 for alpha chain variable domain of TCR clone 113898 (TRAV2, TRAJ13)
CASGGYHKVTF

SEQ ID NO: 227796 - protein, 15 aa, Homo sapiens
  CDR3 for beta chain variable domain of TCR clone 113898 (TRBV7-9, TRBJ1-6)
CASSSPGRGNSPLHF

SEQ ID NO: 227797 - protein, 15 aa, Homo sapiens
  CDR3 for alpha chain variable domain of TCR clone 113899 (TRAV35, TRAJ20)
CAGQLVGSNDYKLSF

SEQ ID NO: 227798 - protein, 15 aa, Homo sapiens
  CDR3 for beta chain variable domain of TCR clone 113899 (TRBV20-1, TRBJ2-7)
CSARDRVSGMDEQYF

SEQ ID NO: 227799 - protein, 15 aa, Homo sapiens
  CDR3 for alpha chain variable domain of TCR clone 113900 (TRAV8-3, TRAJ11)
CAVGLLNSGYSTLTF

SEQ ID NO: 227800 - protein, 13 aa, Homo sapiens
  CDR3 for beta chain variable domain of TCR clone 113900 (TRBV2, TRBJ1-1)
CASNLLRNTEAFF

SEQ ID NO: 227801 - protein, 14 aa, Homo sapiens
  CDR3 for alpha chain variable domain of TCR clone 113901 (TRAV9-2, TRAJ39)
CALYIYNAGNMLTF

SEQ ID NO: 227802 - protein, 15 aa, Homo sapiens
  CDR3 for beta chain variable domain of TCR clone 113901 (TRBV5-1, TRBJ2-7)
CASSLNGGPAREQYF

SEQ ID NO: 227803 - protein, 14 aa, Homo sapiens
  CDR3 for alpha chain variable domain of TCR clone 113902 (TRAV17, TRAJ33)
CATDARRSNYQLIW

SEQ ID NO: 227804 - protein, 14 aa, Homo sapiens
  CDR3 for beta chain variable domain of TCR clone 113902 (TRBV25-1, TRBJ1-4)
CASSGGGQPDKLFF

SEQ ID NO: 227805 - protein, 15 aa, Homo sapiens
  CDR3 for alpha chain variable domain of TCR clone 113903 (TRAV38-1, TRAJ37)
CAFIFGSGNTGKLIF

SEQ ID NO: 227806 - protein, 12 aa, Homo sapiens
  CDR3 for beta chain variable domain of TCR clone 113903 (TRBV29-1, TRBJ2-3)
CSVTGGADTQYF

SEQ ID NO: 227807 - protein, 13 aa, Homo sapiens
  CDR3 for alpha chain variable domain of TCR clone 113904 (TRAV12-2, TRAJ4)
CAVRSGGDNKLIF

SEQ ID NO: 227808 - protein, 15 aa, Homo sapiens
  CDR3 for beta chain variable domain of TCR clone 113904 (TRBV10-3, TRBJ2-1)
CAISDVQDRAYEQFF

SEQ ID NO: 227809 - protein, 13 aa, Homo sapiens
  CDR3 for alpha chain variable domain of TCR clone 113905 (TRAV9-2, TRAJ53)
CALSGGSNYKLTF

SEQ ID NO: 227810 - protein, 17 aa, Homo sapiens
  CDR3 for beta chain variable domain of TCR clone 113905 (TRBV11-2, TRBJ2-1)
CASSLYHPGVEYNEQFF

SEQ ID NO: 227811 - protein, 17 aa, Homo sapiens
  CDR3 for alpha chain variable domain of TCR clone 113906 (TRAV3, TRAJ6)
FAVRDGPRAGGSYIPTF

SEQ ID NO: 227812 - protein, 12 aa, Homo sapiens
  CDR3 for beta chain variable domain of TCR clone 113906 (TRBV11-2, TRBJ2-1)
CASSPGNNEQFF

SEQ ID NO: 227813 - protein, 14 aa, Homo sapiens
  CDR3 for alpha chain variable domain of TCR clone 113907 (TRAV26-1, TRAJ52)
CIPAGGTSYRKLTF

SEQ ID NO: 227814 - protein, 16 aa, Homo sapiens
  CDR3 for beta chain variable domain of TCR clone 113907 (TRBV19, TRBJ2-2)
CASTIGARAGAGELFF

SEQ ID NO: 227815 - protein, 13 aa, Homo sapiens
  CDR3 for alpha chain variable domain of TCR clone 113908 (TRAV12-1, TRAJ6)
CVVFPGGSYIPTF

SEQ ID NO: 227816 - protein, 15 aa, Homo sapiens
  CDR3 for beta chain variable domain of TCR clone 113908 (TRBV20-1, TRBJ2-7)
CSARDRVSGMDEQYF

SEQ ID NO: 227817 - protein, 13 aa, Homo sapiens
  CDR3 for alpha chain variable domain of TCR clone 113909 (TRAV8-3, TRAJ43)
CAVGSDNNNDMRF

SEQ ID NO: 227818 - protein, 14 aa, Homo sapiens
  CDR3 for beta chain variable domain of TCR clone 113909 (TRBV19, TRBJ2-1)
CASPTFVLSGEQFF

SEQ ID NO: 227819 - protein, 15 aa, Homo sapiens
  CDR3 for alpha chain variable domain of TCR clone 113910 (TRAV2, TRAJ24)
CAVVRLKNSWGKLQF

SEQ ID NO: 227820 - protein, 16 aa, Homo sapiens
  CDR3 for beta chain variable domain of TCR clone 113910 (TRBV7-7, TRBJ2-3)
CASSRGTSGSTDTQYF

SEQ ID NO: 227821 - protein, 17 aa, Homo sapiens
  CDR3 for alpha chain variable domain of TCR clone 113911 (TRAV3, TRAJ6)
CAVRDGPRAGGSYIPTF

SEQ ID NO: 227822 - protein, 18 aa, Homo sapiens
  CDR3 for beta chain variable domain of TCR clone 113911 (TRBV7-9, TRBJ2-7)
CASSLTTSGSRTWYEQYF

SEQ ID NO: 227823 - protein, 12 aa, Homo sapiens
  CDR3 for alpha chain variable domain of TCR clone 113912 (TRAV12-3, TRAJ17)
CAMTLTGNKLTF

SEQ ID NO: 227824 - protein, 13 aa, Homo sapiens
  CDR3 for beta chain variable domain of TCR clone 113912 (TRBV19, TRBJ2-2)
CASGIWSTGELFF

SEQ ID NO: 227825 - protein, 16 aa, Homo sapiens
  CDR3 for alpha chain variable domain of TCR clone 113913 (TRAV1-2, TRAJ16)
CAVNRFQMARSCSLQG

SEQ ID NO: 227826 - protein, 13 aa, Homo sapiens
  CDR3 for beta chain variable domain of TCR clone 113913 (TRBV19, TRBJ2-7)
CASSTSGSYEQYF

SEQ ID NO: 227827 - protein, 14 aa, Homo sapiens
  CDR3 for alpha chain variable domain of TCR clone 113914 (TRAV21, TRAJ35)
CAVMPIGFGNVLHC

SEQ ID NO: 227828 - protein, 15 aa, Homo sapiens
  CDR3 for beta chain variable domain of TCR clone 113914 (TRBV12-4, TRBJ2-5)
CASSGTGQAQETQYF

SEQ ID NO: 227829 - protein, 14 aa, Homo sapiens
  CDR3 for alpha chain variable domain of TCR clone 113915 (TRAV27, TRAJ22)
CAGLPSGSARQLTF

SEQ ID NO: 227830 - protein, 15 aa, Homo sapiens
  CDR3 for beta chain variable domain of TCR clone 113915 (TRBV7-2, TRBJ2-1)
CASSSGLAGGNEQFF

SEQ ID NO: 227831 - protein, 12 aa, Homo sapiens
  CDR3 for alpha chain variable domain of TCR clone 113916 (TRAV9-2, TRAJ26)
CALRGYGQNFVF

SEQ ID NO: 227832 - protein, 16 aa, Homo sapiens
  CDR3 for beta chain variable domain of TCR clone 113916 (TRBV12-5, TRBJ2-5)
CASGPRTSGNQETQYF

SEQ ID NO: 227833 - protein, 13 aa, Homo sapiens
  CDR3 for alpha chain variable domain of TCR clone 113917 (TRAV23/DV6, TRAJ22)
CAPYSGSARQLTF

SEQ ID NO: 227834 - protein, 16 aa, Homo sapiens
  CDR3 for beta chain variable domain of TCR clone 113917 (TRBV4-2, TRBJ1-1)
CASSPSPGRAAPEAFF

SEQ ID NO: 227835 - protein, 14 aa, Homo sapiens
  CDR3 for alpha chain variable domain of TCR clone 113918 (TRAV12-2, TRAJ17)
CAVLFEAAGNKLTF

SEQ ID NO: 227836 - protein, 14 aa, Homo sapiens
  CDR3 for beta chain variable domain of TCR clone 113918 (TRBV7-3, TRBJ1-1)
CASSLKGGNTEAFF

SEQ ID NO: 227837 - protein, 15 aa, Homo sapiens
  CDR3 for alpha chain variable domain of TCR clone 113919 (TRAV21, TRAJ45)
CAVSYSGGGADGLTF

SEQ ID NO: 227838 - protein, 13 aa, Homo sapiens
  CDR3 for beta chain variable domain of TCR clone 113919 (TRBV20-1, TRBJ2-5)
CSSATELQETQYF

SEQ ID NO: 227839 - protein, 13 aa, Homo sapiens
  CDR3 for alpha chain variable domain of TCR clone 113920 (TRAV12-1, TRAJ31)
CVVNMNNNARLMF

SEQ ID NO: 227840 - protein, 15 aa, Homo sapiens
  CDR3 for beta chain variable domain of TCR clone 113920 (TRBV7-9, TRBJ2-1)
CASSLGWGRANEQFF

SEQ ID NO: 227841 - protein, 12 aa, Homo sapiens
  CDR3 for alpha chain variable domain of TCR clone 113921 (TRAV13-1, TRAJ49)
CAASVWGNQFYF

SEQ ID NO: 227842 - protein, 14 aa, Homo sapiens
  CDR3 for beta chain variable domain of TCR clone 113921 (TRBV12-4, TRBJ1-1)
CASSLDGLNTEAFF

SEQ ID NO: 227843 - protein, 11 aa, Homo sapiens
  CDR3 for alpha chain variable domain of TCR clone 113922 (TRAV12-3, TRAJ17)
CMTLTGNKLTF

SEQ ID NO: 227844 - protein, 15 aa, Homo sapiens
  CDR3 for beta chain variable domain of TCR clone 113922 (TRBV6-6, TRBJ2-5)
CASSPGGGLEETQYF

SEQ ID NO: 227845 - protein, 12 aa, Homo sapiens
  CDR3 for alpha chain variable domain of TCR clone 113923 (TRAV2, TRAJ31)
CAVEDNNARLMF

SEQ ID NO: 227846 - protein, 12 aa, Homo sapiens
  CDR3 for beta chain variable domain of TCR clone 113923 (TRBV7-9, TRBJ2-7)
CASSFGSYEQYF

SEQ ID NO: 227847 - protein, 15 aa, Homo sapiens
  CDR3 for alpha chain variable domain of TCR clone 113924 (TRAV23/DV6, TRAJ30)
CAASSQESRDDKIIF

SEQ ID NO: 227848 - protein, 13 aa, Homo sapiens
  CDR3 for beta chain variable domain of TCR clone 113924 (TRBV4-2, TRBJ1-1)
CASSQAGNTEAFF

SEQ ID NO: 227849 - protein, 14 aa, Homo sapiens
  CDR3 for alpha chain variable domain of TCR clone 113925 (TRAV26-1, TRAJ39)
CIVRGSRGGNMLTF

SEQ ID NO: 227850 - protein, 15 aa, Homo sapiens
  CDR3 for beta chain variable domain of TCR clone 113925 (TRBV7-9, TRBJ1-5)
CASSQGHQPNQPQHF

SEQ ID NO: 227851 - protein, 14 aa, Homo sapiens
  CDR3 for alpha chain variable domain of TCR clone 113926 (TRAV12-1, TRAJ4)
CVVPLKSGYNKLIF

SEQ ID NO: 227852 - protein, 13 aa, Homo sapiens
  CDR3 for beta chain variable domain of TCR clone 113926 (TRBV27, TRBJ2-7)
CASGRGGAYEQYF

SEQ ID NO: 227853 - protein, 18 aa, Homo sapiens
  CDR3 for alpha chain variable domain of TCR clone 113927 (TRAV21, TRAJ52)
CAVRPSPAGGTSYGKLTF

SEQ ID NO: 227854 - protein, 13 aa, Homo sapiens
  CDR3 for beta chain variable domain of TCR clone 113927 (TRBV2, TRBJ1-1)
CARNPTGGFHAFF

SEQ ID NO: 227855 - protein, 17 aa, Homo sapiens
  CDR3 for alpha chain variable domain of TCR clone 113928 (TRAV3, TRAJ28)
CAVREAYSGAGSYQLTF

SEQ ID NO: 227856 - protein, 13 aa, Homo sapiens
  CDR3 for beta chain variable domain of TCR clone 113928 (TRBV11-2, TRBJ1-6)
CASSLAGVSPLHF

SEQ ID NO: 227857 - protein, 17 aa, Homo sapiens
  CDR3 for alpha chain variable domain of TCR clone 113929 (TRAV38-1, TRAJ28)
CAFMKPTSGAGSYQLTF

SEQ ID NO: 227858 - protein, 15 aa, Homo sapiens
  CDR3 for beta chain variable domain of TCR clone 113929 (TRBV18, TRBJ1-5)
CASSPSDRSNQPQHF

SEQ ID NO: 227859 - protein, 13 aa, Homo sapiens
  CDR3 for alpha chain variable domain of TCR clone 113930 (TRAV2, TRAJ24)
CAVSTDSWGKLQV

SEQ ID NO: 227860 - protein, 14 aa, Homo sapiens
  CDR3 for beta chain variable domain of TCR clone 113930 (TRBV13, TRBJ2-5)
CASSLGTAQETQYF

SEQ ID NO: 227861 - protein, 13 aa, Homo sapiens
  CDR3 for alpha chain variable domain of TCR clone 113931 (TRAV12-2, TRAJ36)
CAVIATGANNLFF

SEQ ID NO: 227862 - protein, 15 aa, Homo sapiens
  CDR3 for beta chain variable domain of TCR clone 113931 (TRBV20-1, TRBJ2-7)
CSARDRVSGMDEQYF

SEQ ID NO: 227863 - protein, 13 aa, Homo sapiens
  CDR3 for alpha chain variable domain of TCR clone 113932 (TRAV8-3, TRAJ36)
CAVGATGANNLFF

SEQ ID NO: 227864 - protein, 15 aa, Homo sapiens
  CDR3 for beta chain variable domain of TCR clone 113932 (TRBV7-2, TRBJ1-2)
CASSPRAGWNYGDIF

SEQ ID NO: 227865 - protein, 15 aa, Homo sapiens
  CDR3 for alpha chain variable domain of TCR clone 113933 (TRAV21, TRAJ53)
CATLKSGGSNYKLTF

SEQ ID NO: 227866 - protein, 16 aa, Homo sapiens
  CDR3 for beta chain variable domain of TCR clone 113933 (TRBV9, TRBJ2-1)
CASSVGGGGNYNEQFF

SEQ ID NO: 227867 - protein, 12 aa, Homo sapiens
  CDR3 for alpha chain variable domain of TCR clone 113934 (TRAV1-2, TRAJ33)
CAALDSNYQLIW

SEQ ID NO: 227868 - protein, 16 aa, Homo sapiens
  CDR3 for beta chain variable domain of TCR clone 113934 (TRBV6-4, TRBJ1-2)
CASSEAVGDPNYGYSF

SEQ ID NO: 227869 - protein, 13 aa, Homo sapiens
  CDR3 for alpha chain variable domain of TCR clone 113935 (TRAV12-3, TRAJ9)
CAMRNTGGFKTIF

SEQ ID NO: 227870 - protein, 13 aa, Homo sapiens
  CDR3 for beta chain variable domain of TCR clone 113935 (TRBV27, TRBJ1-1)
CASSLSIGAEAFF

SEQ ID NO: 227871 - protein, 13 aa, Homo sapiens
  CDR3 for alpha chain variable domain of TCR clone 113936 (TRAV12-1, TRAJ29)
CVVVVSGNTPLVF

SEQ ID NO: 227872 - protein, 17 aa, Homo sapiens
  CDR3 for beta chain variable domain of TCR clone 113936 (TRBV13, TRBJ2-3)
CASSLSRVAGGRNTQYF

SEQ ID NO: 227873 - protein, 14 aa, Homo sapiens
  CDR3 for alpha chain variable domain of TCR clone 113937 (TRAV12-2, TRAJ44)
CAVNPAGTASKLTF

SEQ ID NO: 227874 - protein, 19 aa, Homo sapiens
  CDR3 for beta chain variable domain of TCR clone 113937 (TRBV25-1, TRBJ2-2)
CAILVYRVDRGRKTGELFF

SEQ ID NO: 227875 - protein, 12 aa, Homo sapiens
  CDR3 for alpha chain variable domain of TCR clone 113938 (TRAV12-1, TRAJ40)
CVVYSGTYKYIF

SEQ ID NO: 227876 - protein, 18 aa, Homo sapiens
  CDR3 for beta chain variable domain of TCR clone 113938 (TRBV11-2, TRBJ2-3)
CASSLGGASRAAPNTQYF

SEQ ID NO: 227877 - protein, 14 aa, Homo sapiens
  CDR3 for alpha chain variable domain of TCR clone 113939 (TRAV8-6, TRAJ41)
CAVSDPNSGYALNF

SEQ ID NO: 227878 - protein, 11 aa, Homo sapiens
  CDR3 for beta chain variable domain of TCR clone 113939 (TRBV24-1, TRBJ2-5)
CATSIGETQYF

SEQ ID NO: 227879 - protein, 14 aa, Homo sapiens
  CDR3 for alpha chain variable domain of TCR clone 113940 (TRAV1-2, TRAJ8)
CAAREDTGFQKLVF

SEQ ID NO: 227880 - protein, 13 aa, Homo sapiens
  CDR3 for beta chain variable domain of TCR clone 113940 (TRBV6-4, TRBJ2-3)
CAGSVSWADTQYF

SEQ ID NO: 227881 - protein, 17 aa, Homo sapiens
  CDR3 for alpha chain variable domain of TCR clone 113941 (TRAV27, TRAJ18)
CEGLHRGRGSTLGRLYF

SEQ ID NO: 227882 - protein, 14 aa, Homo sapiens
  CDR3 for beta chain variable domain of TCR clone 113941 (TRBV20-1, TRBJ1-5)
CSARGRGSNQPQHF

SEQ ID NO: 227883 - protein, 11 aa, Homo sapiens
  CDR3 for alpha chain variable domain of TCR clone 113942 (TRAV2, TRAJ33)
CAVESNYQLMW

SEQ ID NO: 227884 - protein, 15 aa, Homo sapiens
  CDR3 for beta chain variable domain of TCR clone 113942 (TRBV19, TRBJ1-1)
CASTSGQIQNTEAFF

SEQ ID NO: 227885 - protein, 13 aa, Homo sapiens
  CDR3 for alpha chain variable domain of TCR clone 113943 (TRAV12-3, TRAJ40)
CAMSDSGTYKYIF

SEQ ID NO: 227886 - protein, 14 aa, Homo sapiens
  CDR3 for beta chain variable domain of TCR clone 113943 (TRBV7-2, TRBJ1-5)
CASSTQGSGQPQHF

SEQ ID NO: 227887 - protein, 13 aa, Homo sapiens
  CDR3 for alpha chain variable domain of TCR clone 113944 (TRAV29/DV5, TRAJ31)
CAASRNTNARLMF

SEQ ID NO: 227888 - protein, 12 aa, Homo sapiens
  CDR3 for beta chain variable domain of TCR clone 113944 (TRBV14, TRBJ2-5)
CASSQLKETQYF

SEQ ID NO: 227889 - protein, 14 aa, Homo sapiens
  CDR3 for alpha chain variable domain of TCR clone 113945 (TRAV2, TRAJ9)
CAVEDRSGGFKTIF

SEQ ID NO: 227890 - protein, 14 aa, Homo sapiens
  CDR3 for beta chain variable domain of TCR clone 113945 (TRBV7-9, TRBJ2-2)
CASSLVQDTGELFF

SEQ ID NO: 227891 - protein, 21 aa, Homo sapiens
  CDR3 for alpha chain variable domain of TCR clone 113946 (TRAV25, TRAJ47)
TATQTTDVGNYFWEYGNKLVF

SEQ ID NO: 227892 - protein, 16 aa, Homo sapiens
  CDR3 for beta chain variable domain of TCR clone 113946 (TRBV6-6, TRBJ2-1)
CASSWGGQGPYNEQFF

SEQ ID NO: 227893 - protein, 15 aa, Homo sapiens
  CDR3 for alpha chain variable domain of TCR clone 113947 (TRAV26-1, TRAJ44)
CIVRANTGTACKLTF

SEQ ID NO: 227894 - protein, 16 aa, Homo sapiens
  CDR3 for beta chain variable domain of TCR clone 113947 (TRBV7-7, TRBJ2-1)
CASSLASGTSYNEQFF

SEQ ID NO: 227895 - protein, 16 aa, Homo sapiens
  CDR3 for alpha chain variable domain of TCR clone 113948 (TRAV16, TRAJ4)
CALSRMFSGGYNKLIF

SEQ ID NO: 227896 - protein, 16 aa, Homo sapiens
  CDR3 for beta chain variable domain of TCR clone 113948 (TRBV24-1, TRBJ2-3)
YATSDPGTGATDTQYF

SEQ ID NO: 227897 - protein, 13 aa, Homo sapiens
  CDR3 for alpha chain variable domain of TCR clone 113949 (TRAV12-1, TRAJ29)
CVVVVSGNTPLVF

SEQ ID NO: 227898 - protein, 13 aa, Homo sapiens
  CDR3 for beta chain variable domain of TCR clone 113949 (TRBV7-8, TRBJ2-7)
CASSFAGFYEQYF

SEQ ID NO: 227899 - protein, 17 aa, Homo sapiens
  CDR3 for alpha chain variable domain of TCR clone 113950 (TRAV3, TRAJ6)
CAVRDGPRAGGSYIPTF

SEQ ID NO: 227900 - protein, 12 aa, Homo sapiens
  CDR3 for beta chain variable domain of TCR clone 113950 (TRBV2, TRBJ2-1)
CAYGPPGNEQFF

SEQ ID NO: 227901 - protein, 15 aa, Homo sapiens
  CDR3 for alpha chain variable domain of TCR clone 113951 (TRAV29/DV5, TRAJ24)
CAASGATDSWGKFQF

SEQ ID NO: 227902 - protein, 12 aa, Homo sapiens
  CDR3 for beta chain variable domain of TCR clone 113951 (TRBV11-2, TRBJ2-2)
CASSRPTGELFF

SEQ ID NO: 227903 - protein, 13 aa, Homo sapiens
  CDR3 for alpha chain variable domain of TCR clone 113952 (TRAV35, TRAJ42)
CAGFPGSQGNLIF

SEQ ID NO: 227904 - protein, 14 aa, Homo sapiens
  CDR3 for beta chain variable domain of TCR clone 113952 (TRBV4-1, TRBJ2-2)
CASSHAVNTGELFF

SEQ ID NO: 227905 - protein, 14 aa, Homo sapiens
  CDR3 for alpha chain variable domain of TCR clone 113953 (TRAV2, TRAJ9)
CAVEDRRGGFKTIF

SEQ ID NO: 227906 - protein, 15 aa, Homo sapiens
  CDR3 for beta chain variable domain of TCR clone 113953 (TRBV19, TRBJ2-1)
CASSSPGVPLDEQFF

SEQ ID NO: 227907 - protein, 12 aa, Homo sapiens
  CDR3 for alpha chain variable domain of TCR clone 113954 (TRAV25, TRAJ47)
CAGQGYGNKLVF

SEQ ID NO: 227908 - protein, 12 aa, Homo sapiens
  CDR3 for beta chain variable domain of TCR clone 113954 (TRBV7-8, TRBJ2-5)
CASSLRAETQYF

SEQ ID NO: 227909 - protein, 16 aa, Homo sapiens
  CDR3 for alpha chain variable domain of TCR clone 113955 (TRAV30, TRAJ24)
CGTEIVDADSWGKFQF

SEQ ID NO: 227910 - protein, 14 aa, Homo sapiens
  CDR3 for beta chain variable domain of TCR clone 113955 (TRBV7-9, TRBJ1-2)
CASSRQGANYGYTF

SEQ ID NO: 227911 - protein, 12 aa, Homo sapiens
  CDR3 for alpha chain variable domain of TCR clone 113956 (TRAV3, TRAJ20)
CAVRDPDYKLSF

SEQ ID NO: 227912 - protein, 11 aa, Homo sapiens
  CDR3 for beta chain variable domain of TCR clone 113956 (TRBV12-4, TRBJ2-3)
CASTATDTQYF

SEQ ID NO: 227913 - protein, 13 aa, Homo sapiens
  CDR3 for alpha chain variable domain of TCR clone 113957 (TRAV3, TRAJ34)
CAVRDYNTDKLIF

SEQ ID NO: 227914 - protein, 14 aa, Homo sapiens
  CDR3 for beta chain variable domain of TCR clone 113957 (TRBV7-2, TRBJ2-7)
CASSPKTSFYEQYF

SEQ ID NO: 227915 - protein, 14 aa, Homo sapiens
  CDR3 for alpha chain variable domain of TCR clone 113958 (TRAV1-1, TRAJ27)
CAVIYNTNAGQSTF

SEQ ID NO: 227916 - protein, 15 aa, Homo sapiens
  CDR3 for beta chain variable domain of TCR clone 113958 (TRBV7-2, TRBJ2-1)
CASSSGLAGGNEQFF

SEQ ID NO: 227917 - protein, 15 aa, Homo sapiens
  CDR3 for alpha chain variable domain of TCR clone 113959 (TRAV4, TRAJ39)
CLVGPNNNAGNMLTF

SEQ ID NO: 227918 - protein, 14 aa, Homo sapiens
  CDR3 for beta chain variable domain of TCR clone 113959 (TRBV19, TRBJ2-7)
CASNFRDTFTGMYF

SEQ ID NO: 227919 - protein, 10 aa, Homo sapiens
  CDR3 for alpha chain variable domain of TCR clone 113960 (TRAV30, TRAJ48)
CGIGNEKLTF

SEQ ID NO: 227920 - protein, 13 aa, Homo sapiens
  CDR3 for beta chain variable domain of TCR clone 113960 (TRBV27, TRBJ1-1)
CASSLSIGAEAFF

SEQ ID NO: 227921 - protein, 14 aa, Homo sapiens
  CDR3 for alpha chain variable domain of TCR clone 113961 (TRAV12-2, TRAJ45)
CAVYSGGGADGLTF

SEQ ID NO: 227922 - protein, 13 aa, Homo sapiens
  CDR3 for beta chain variable domain of TCR clone 113961 (TRBV12-4, TRBJ1-2)
CASSLRQGKGYTF

SEQ ID NO: 227923 - protein, 14 aa, Homo sapiens
  CDR3 for alpha chain variable domain of TCR clone 113962 (TRAV8-3, TRAJ40)
CAVGASSGTYKYIF

SEQ ID NO: 227924 - protein, 11 aa, Homo sapiens
  CDR3 for beta chain variable domain of TCR clone 113962 (TRBV12-4, TRBJ2-3)
CASTATDTQYF

SEQ ID NO: 227925 - protein, 15 aa, Homo sapiens
  CDR3 for alpha chain variable domain of TCR clone 113963 (TRAV2, TRAJ9)
CAVEDRGTGGFKTIF

SEQ ID NO: 227926 - protein, 12 aa, Homo sapiens
  CDR3 for beta chain variable domain of TCR clone 113963 (TRBV11-2, TRBJ2-1)
CASSPGNNEQFF

SEQ ID NO: 227927 - protein, 11 aa, Homo sapiens
  CDR3 for alpha chain variable domain of TCR clone 113964 (TRAV3, TRAJ21)
CAVGHFNNFYF

SEQ ID NO: 227928 - protein, 16 aa, Homo sapiens
  CDR3 for beta chain variable domain of TCR clone 113964 (TRBV19, TRBJ2-1)
CASSKAGPSSYNEQFF

SEQ ID NO: 227929 - protein, 18 aa, Homo sapiens
  CDR3 for alpha chain variable domain of TCR clone 113965 (TRAV26-1, TRAJ22)
CIVRVALISSGSARQLTF

SEQ ID NO: 227930 - protein, 13 aa, Homo sapiens
  CDR3 for beta chain variable domain of TCR clone 113965 (TRBV13, TRBJ2-5)
CASSPEVGETQFF

SEQ ID NO: 227931 - protein, 16 aa, Homo sapiens
  CDR3 for alpha chain variable domain of TCR clone 113966 (TRAV30, TRAJ24)
CGTEIVDADSWGKFQF

SEQ ID NO: 227932 - protein, 20 aa, Homo sapiens
  CDR3 for beta chain variable domain of TCR clone 113966 (TRBV6-1, TRBJ2-1)
CASSSSSAASGGAGYNEQFF

SEQ ID NO: 227933 - protein, 14 aa, Homo sapiens
  CDR3 for alpha chain variable domain of TCR clone 113967 (TRAV8-1, TRAJ13)
CAVKRSGGYQKVTF

SEQ ID NO: 227934 - protein, 13 aa, Homo sapiens
  CDR3 for beta chain variable domain of TCR clone 113967 (TRBV4-2, TRBJ1-1)
CASSQAGNTEAFF

SEQ ID NO: 227935 - protein, 13 aa, Homo sapiens
  CDR3 for alpha chain variable domain of TCR clone 113968 (TRAV1-2, TRAJ9)
CAVLNTGGFKTIF

SEQ ID NO: 227936 - protein, 14 aa, Homo sapiens
  CDR3 for beta chain variable domain of TCR clone 113968 (TRBV20-1, TRBJ2-3)
CSARGVTSTDTQYF

SEQ ID NO: 227937 - protein, 16 aa, Homo sapiens
  CDR3 for alpha chain variable domain of TCR clone 113969 (TRAV8-3, TRAJ13)
CAVGAYPSGGYQKVTF

SEQ ID NO: 227938 - protein, 15 aa, Homo sapiens
  CDR3 for beta chain variable domain of TCR clone 113969 (TRBV19, TRBJ1-5)
CASSVVWADNQPQHF

SEQ ID NO: 227939 - protein, 15 aa, Homo sapiens
  CDR3 for alpha chain variable domain of TCR clone 113970 (TRAV2, TRAJ9)
CAVEDRGTGGFKTIF

SEQ ID NO: 227940 - protein, 15 aa, Homo sapiens
  CDR3 for beta chain variable domain of TCR clone 113970 (TRBV7-9, TRBJ2-5)
CASSFKAGREETQYF

SEQ ID NO: 227941 - protein, 14 aa, Homo sapiens
  CDR3 for alpha chain variable domain of TCR clone 113971 (TRAV35, TRAJ33)
CAGSSQDSNYQLIW

SEQ ID NO: 227942 - protein, 16 aa, Homo sapiens
  CDR3 for beta chain variable domain of TCR clone 113971 (TRBV7-8, TRBJ2-6)
CASRVGDSSGANVLTF

SEQ ID NO: 227943 - protein, 14 aa, Homo sapiens
  CDR3 for alpha chain variable domain of TCR clone 113972 (TRAV20, TRAJ37)
CAVQSSSNTGKLIF

SEQ ID NO: 227944 - protein, 16 aa, Homo sapiens
  CDR3 for beta chain variable domain of TCR clone 113972 (TRBV7-6, TRBJ1-6)
CASSSLPAGEYSPLHF

SEQ ID NO: 227945 - protein, 14 aa, Homo sapiens
  CDR3 for alpha chain variable domain of TCR clone 113973 (TRAV12-3, TRAJ22)
CAMSLFGSARQLTF

SEQ ID NO: 227946 - protein, 15 aa, Homo sapiens
  CDR3 for beta chain variable domain of TCR clone 113973 (TRBV7-3, TRBJ2-1)
CASSPTGGGEVEQFF

SEQ ID NO: 227947 - protein, 10 aa, Homo sapiens
  CDR3 for alpha chain variable domain of TCR clone 113974 (TRAV1-2, TRAJ31)
CVSEDARLMF

SEQ ID NO: 227948 - protein, 14 aa, Homo sapiens
  CDR3 for beta chain variable domain of TCR clone 113974 (TRBV7-2, TRBJ2-7)
CASSPKTSFYEQYF

SEQ ID NO: 227949 - protein, 16 aa, Homo sapiens
  CDR3 for alpha chain variable domain of TCR clone 113975 (TRAV30, TRAJ24)
CGTEIVDADSWGKFQF

SEQ ID NO: 227950 - protein, 15 aa, Homo sapiens
  CDR3 for beta chain variable domain of TCR clone 113975 (TRBV6-1, TRBJ1-1)
CASSDDRRLSPEAFF

SEQ ID NO: 227951 - protein, 15 aa, Homo sapiens
  CDR3 for alpha chain variable domain of TCR clone 113976 (TRAV8-3, TRAJ45)
CASSYSGGGADGRTF

SEQ ID NO: 227952 - protein, 18 aa, Homo sapiens
  CDR3 for beta chain variable domain of TCR clone 113976 (TRBV18, TRBJ1-3)
CASSPRGGAGPSGNTIYF

SEQ ID NO: 227953 - protein, 11 aa, Homo sapiens
  CDR3 for alpha chain variable domain of TCR clone 113977 (TRAV2, TRAJ33)
CAVESNYQLIW

SEQ ID NO: 227954 - protein, 13 aa, Homo sapiens
  CDR3 for beta chain variable domain of TCR clone 113977 (TRBV11-2, TRBJ1-3)
CASSPTGGNTIYF

SEQ ID NO: 227955 - protein, 13 aa, Homo sapiens
  CDR3 for alpha chain variable domain of TCR clone 113978 (TRAV25, TRAJ30)
CAGRVDRDDKIIF

SEQ ID NO: 227956 - protein, 17 aa, Homo sapiens
  CDR3 for beta chain variable domain of TCR clone 113978 (TRBV7-9, TRBJ2-6)
CASSFGAGDSGANVLTF

SEQ ID NO: 227957 - protein, 16 aa, Homo sapiens
  CDR3 for alpha chain variable domain of TCR clone 113979 (TRAV4, TRAJ5)
CLVGPDHGHGQESTYF

SEQ ID NO: 227958 - protein, 18 aa, Homo sapiens
  CDR3 for beta chain variable domain of TCR clone 113979 (TRBV27, TRBJ2-1)
CASGNRAVGVGSKNEQFF

SEQ ID NO: 227959 - protein, 13 aa, Homo sapiens
  CDR3 for alpha chain variable domain of TCR clone 113980 (TRAV1-1, TRAJ31)
CASYLNNNARLMF

SEQ ID NO: 227960 - protein, 13 aa, Homo sapiens
  CDR3 for beta chain variable domain of TCR clone 113980 (TRBV15, TRBJ1-6)
CAASGGLNSPLHF

SEQ ID NO: 227961 - protein, 15 aa, Homo sapiens
  CDR3 for alpha chain variable domain of TCR clone 113981 (TRAV27, TRAJ38)
CAARRNAGNNRKLIG

SEQ ID NO: 227962 - protein, 13 aa, Homo sapiens
  CDR3 for beta chain variable domain of TCR clone 113981 (TRBV12-5, TRBJ2-3)
CASGDRQSDTQYF

SEQ ID NO: 227963 - protein, 14 aa, Homo sapiens
  CDR3 for alpha chain variable domain of TCR clone 113982 (TRAV12-2, TRAJ6)
CASKWGGGSYIPTF

SEQ ID NO: 227964 - protein, 13 aa, Homo sapiens
  CDR3 for beta chain variable domain of TCR clone 113982 (TRBV2, TRBJ1-1)
CVSSEGGNTEAFF

SEQ ID NO: 227965 - protein, 14 aa, Homo sapiens
  CDR3 for alpha chain variable domain of TCR clone 113983 (TRAV12-1, TRAJ17)
CVVNYKAAGNKLTF

SEQ ID NO: 227966 - protein, 14 aa, Homo sapiens
  CDR3 for beta chain variable domain of TCR clone 113983 (TRBV20-1, TRBJ2-7)
CSAKTGTGGYEQYF

SEQ ID NO: 227967 - protein, 11 aa, Homo sapiens
  CDR3 for alpha chain variable domain of TCR clone 113984 (TRAV25, TRAJ47)
CAGPYGNKLVF

SEQ ID NO: 227968 - protein, 14 aa, Homo sapiens
  CDR3 for beta chain variable domain of TCR clone 113984 (TRBV10-3, TRBJ2-2)
CAASSRVNTGELFF

SEQ ID NO: 227969 - protein, 16 aa, Homo sapiens
  CDR3 for alpha chain variable domain of TCR clone 113985 (TRAV3, TRAJ10)
CAVRDMRAGGGNKLTF

SEQ ID NO: 227970 - protein, 15 aa, Homo sapiens
  CDR3 for beta chain variable domain of TCR clone 113985 (TRBV7-9, TRBJ2-7)
CASSPGGGLTYEQYF

SEQ ID NO: 227971 - protein, 15 aa, Homo sapiens
  CDR3 for alpha chain variable domain of TCR clone 113986 (TRAV25, TRAJ52)
CAGRPGGTSYGKLTF

SEQ ID NO: 227972 - protein, 17 aa, Homo sapiens
  CDR3 for beta chain variable domain of TCR clone 113986 (TRBV7-8, TRBJ2-6)
CASSAGTGSAGANVLTF

SEQ ID NO: 227973 - protein, 17 aa, Homo sapiens
  CDR3 for alpha chain variable domain of TCR clone 113987 (TRAV3, TRAJ6)
CAVRDGPRAGGSYIPTF

SEQ ID NO: 227974 - protein, 12 aa, Homo sapiens
  CDR3 for beta chain variable domain of TCR clone 113987 (TRBV7-2, TRBJ2-7)
CASSLAGYEQYF

SEQ ID NO: 227975 - protein, 13 aa, Homo sapiens
  CDR3 for alpha chain variable domain of TCR clone 113988 (TRAV1-2, TRAJ9)
CAVLNTGGFKTIF

SEQ ID NO: 227976 - protein, 14 aa, Homo sapiens
  CDR3 for beta chain variable domain of TCR clone 113988 (TRBV13, TRBJ2-5)
CASSLDYPQETQYF

SEQ ID NO: 227977 - protein, 11 aa, Homo sapiens
  CDR3 for alpha chain variable domain of TCR clone 113989 (TRAV2, TRAJ13)
CASGGYQKVTF

SEQ ID NO: 227978 - protein, 13 aa, Homo sapiens
  CDR3 for beta chain variable domain of TCR clone 113989 (TRBV10-3, TRBJ2-7)
CAIRAGGPHEQYF

SEQ ID NO: 227979 - protein, 13 aa, Homo sapiens
  CDR3 for alpha chain variable domain of TCR clone 113990 (TRAV6, TRAJ12)
CSEVLDSSYKLIF

SEQ ID NO: 227980 - protein, 18 aa, Homo sapiens
  CDR3 for beta chain variable domain of TCR clone 113990 (TRBV11-2, TRBJ2-3)
CASSLGGASRGAPNTQYF

SEQ ID NO: 227981 - protein, 13 aa, Homo sapiens
  CDR3 for alpha chain variable domain of TCR clone 113991 (TRAV25, TRAJ30)
CAGRVDRDDKIIF

SEQ ID NO: 227982 - protein, 17 aa, Homo sapiens
  CDR3 for beta chain variable domain of TCR clone 113991 (TRBV7-9, TRBJ2-6)
CASSFGAGYYGANVLTF

SEQ ID NO: 227983 - protein, 13 aa, Homo sapiens
  CDR3 for alpha chain variable domain of TCR clone 113992 (TRAV2, TRAJ40)
CAVVTSGTYKYIF

SEQ ID NO: 227984 - protein, 14 aa, Homo sapiens
  CDR3 for beta chain variable domain of TCR clone 113992 (TRBV11-3, TRBJ2-3)
CASSLAASTDTQYF

SEQ ID NO: 227985 - protein, 18 aa, Homo sapiens
  CDR3 for alpha chain variable domain of TCR clone 113993 (TRAV21, TRAJ52)
CAVRPSPAGGTSYGKLTF

SEQ ID NO: 227986 - protein, 14 aa, Homo sapiens
  CDR3 for beta chain variable domain of TCR clone 113993 (TRBV9, TRBJ2-7)
CASSVGVGSYEQYF

SEQ ID NO: 227987 - protein, 15 aa, Homo sapiens
  CDR3 for alpha chain variable domain of TCR clone 113994 (TRAV8-6, TRAJ28)
CAVRPLRAGSYQLTF

SEQ ID NO: 227988 - protein, 16 aa, Homo sapiens
  CDR3 for beta chain variable domain of TCR clone 113994 (TRBV7-3, TRBJ2-2)
CASSLKRGILSGELFF

SEQ ID NO: 227989 - protein, 12 aa, Homo sapiens
  CDR3 for alpha chain variable domain of TCR clone 113995 (TRAV12-1, TRAJ34)
CVVAGATDKLIF

SEQ ID NO: 227990 - protein, 12 aa, Homo sapiens
  CDR3 for beta chain variable domain of TCR clone 113995 (TRBV12-4, TRBJ2-1)
CASSPGRNEQFF

SEQ ID NO: 227991 - protein, 15 aa, Homo sapiens
  CDR3 for alpha chain variable domain of TCR clone 113996 (TRAV26-1, TRAJ29)
CIVRVEGSGNTPLVF

SEQ ID NO: 227992 - protein, 14 aa, Homo sapiens
  CDR3 for beta chain variable domain of TCR clone 113996 (TRBV2, TRBJ2-3)
CASSEGQNTDTQYF

SEQ ID NO: 227993 - protein, 14 aa, Homo sapiens
  CDR3 for alpha chain variable domain of TCR clone 113997 (TRAV12-1, TRAJ3)
CGAARYSSPSKIIF

SEQ ID NO: 227994 - protein, 15 aa, Homo sapiens
  CDR3 for beta chain variable domain of TCR clone 113997 (TRBV7-2, TRBJ2-6)
CASSREGSGANVLTF

SEQ ID NO: 227995 - protein, 14 aa, Homo sapiens
  CDR3 for alpha chain variable domain of TCR clone 113998 (TRAV8-4, TRAJ34)
CAVSDPGDTDKLIL

SEQ ID NO: 227996 - protein, 13 aa, Homo sapiens
  CDR3 for beta chain variable domain of TCR clone 113998 (TRBV7-9, TRBJ2-5)
CASLSPGQETQYF

SEQ ID NO: 227997 - protein, 15 aa, Homo sapiens
  CDR3 for alpha chain variable domain of TCR clone 113999 (TRAV38-1, TRAJ37)
CAFIFGSGNTGKLIF

SEQ ID NO: 227998 - protein, 12 aa, Homo sapiens
  CDR3 for beta chain variable domain of TCR clone 113999 (TRBV7-9, TRBJ2-7)
CASSLEGDEQYF

SEQ ID NO: 227999 - protein, 12 aa, Homo sapiens
  CDR3 for alpha chain variable domain of TCR clone 114000 (TRAV29/DV5, TRAJ34)
CAASGNTDKLIF

SEQ ID NO: 228000 - protein, 14 aa, Homo sapiens
  CDR3 for beta chain variable domain of TCR clone 114000 (TRBV5-5, TRBJ1-5)
CASSGQGVDQPQHF

SEQ ID NO: 228001 - protein, 12 aa, Homo sapiens
  CDR3 for alpha chain variable domain of TCR clone 114001 (TRAV27, TRAJ36)
ASTRAGANNLFF

SEQ ID NO: 228002 - protein, 13 aa, Homo sapiens
  CDR3 for beta chain variable domain of TCR clone 114001 (TRBV7-9, TRBJ2-3)
CASSPGSTDTQYF

SEQ ID NO: 228003 - protein, 10 aa, Homo sapiens
  CDR3 for alpha chain variable domain of TCR clone 114002 (TRAV8-2, TRAJ29)
RTGGNTPLVF

SEQ ID NO: 228004 - protein, 13 aa, Homo sapiens
  CDR3 for beta chain variable domain of TCR clone 114002 (TRBV20-1, TRBJ1-1)
CSARGGGNTEAFF

SEQ ID NO: 228005 - protein, 12 aa, Homo sapiens
  CDR3 for alpha chain variable domain of TCR clone 114003 (TRAV17, TRAJ6)
CATGGGSYIPTF

SEQ ID NO: 228006 - protein, 16 aa, Homo sapiens
  CDR3 for beta chain variable domain of TCR clone 114003 (TRBV5-1, TRBJ2-3)
CASSLGLAVYTDTQYF

SEQ ID NO: 228007 - protein, 14 aa, Homo sapiens
  CDR3 for alpha chain variable domain of TCR clone 114004 (TRAV3, TRAJ33)
CAVRDMDSNYQLIW

SEQ ID NO: 228008 - protein, 14 aa, Homo sapiens
  CDR3 for beta chain variable domain of TCR clone 114004 (TRBV7-2, TRBJ2-7)
CASSPKTSFYEQYF

SEQ ID NO: 228009 - protein, 12 aa, Homo sapiens
  CDR3 for alpha chain variable domain of TCR clone 114005 (TRAV8-3, TRAJ26)
CAGDNYGQNFVF

SEQ ID NO: 228010 - protein, 15 aa, Homo sapiens
  CDR3 for beta chain variable domain of TCR clone 114005 (TRBV9, TRBJ2-1)
CASSLAGSSYNDQFF

SEQ ID NO: 228011 - protein, 13 aa, Homo sapiens
  CDR3 for alpha chain variable domain of TCR clone 114006 (TRAV8-3, TRAJ4)
WVFYSGGYNKLIF

SEQ ID NO: 228012 - protein, 16 aa, Homo sapiens
  CDR3 for beta chain variable domain of TCR clone 114006 (TRBV18, TRBJ1-4)
CASSPLVGDRAEKLFF

SEQ ID NO: 228013 - protein, 12 aa, Homo sapiens
  CDR3 for alpha chain variable domain of TCR clone 114007 (TRAV12-1, TRAJ23)
CVVNNQGGKLIF

SEQ ID NO: 228014 - protein, 16 aa, Homo sapiens
  CDR3 for beta chain variable domain of TCR clone 114007 (TRBV18, TRBJ1-5)
CASSPRTGGGNQPQHF

SEQ ID NO: 228015 - protein, 12 aa, Homo sapiens
  CDR3 for alpha chain variable domain of TCR clone 114008 (TRAV30, TRAJ43)
CGTEERGNDIRF

SEQ ID NO: 228016 - protein, 13 aa, Homo sapiens
  CDR3 for beta chain variable domain of TCR clone 114008 (TRBV12-4, TRBJ1-2)
CASSSGSKDGYTF

SEQ ID NO: 228017 - protein, 15 aa, Homo sapiens
  CDR3 for alpha chain variable domain of TCR clone 114009 (TRAV39, TRAJ32)
CAVDMEGGATNQLIF

SEQ ID NO: 228018 - protein, 17 aa, Homo sapiens
  CDR3 for beta chain variable domain of TCR clone 114009 (TRBV7-2, TRBJ1-4)
CASSFKAGPTTNEKLFF

SEQ ID NO: 228019 - protein, 12 aa, Homo sapiens
  CDR3 for alpha chain variable domain of TCR clone 114010 (TRAV12-2, TRAJ44)
CADTGTASKLTF

SEQ ID NO: 228020 - protein, 17 aa, Homo sapiens
  CDR3 for beta chain variable domain of TCR clone 114010 (TRBV20-1, TRBJ1-1)
CSASGTGGSYGNTGAFF

SEQ ID NO: 228021 - protein, 16 aa, Homo sapiens
  CDR3 for alpha chain variable domain of TCR clone 114011 (TRAV12-1, TRAJ48)
CVVNMRDNFGNEKLTF

SEQ ID NO: 228022 - protein, 16 aa, Homo sapiens
  CDR3 for beta chain variable domain of TCR clone 114011 (TRBV7-6, TRBJ2-1)
CASSSVVAGNYNEQFF

SEQ ID NO: 228023 - protein, 14 aa, Homo sapiens
  CDR3 for alpha chain variable domain of TCR clone 114012 (TRAV35, TRAJ13)
CAGRSPGGYQTVTF

SEQ ID NO: 228024 - protein, 14 aa, Homo sapiens
  CDR3 for beta chain variable domain of TCR clone 114012 (TRBV19, TRBJ2-2)
CASSMVGLSGELFF

SEQ ID NO: 228025 - protein, 16 aa, Homo sapiens
  CDR3 for alpha chain variable domain of TCR clone 114013 (TRAV8-3, TRAJ18)
CAVGARRGSTLGRLYF

SEQ ID NO: 228026 - protein, 12 aa, Homo sapiens
  CDR3 for beta chain variable domain of TCR clone 114013 (TRBV12-5, TRBJ2-5)
CASGQGVETQYF

SEQ ID NO: 228027 - protein, 18 aa, Homo sapiens
  CDR3 for alpha chain variable domain of TCR clone 114014 (TRAV21, TRAJ52)
CAVRPSPAGGTSYGKLTF

SEQ ID NO: 228028 - protein, 12 aa, Homo sapiens
  CDR3 for beta chain variable domain of TCR clone 114014 (TRBV28, TRBJ2-1)
CASSVQINEQFF

SEQ ID NO: 228029 - protein, 14 aa, Homo sapiens
  CDR3 for alpha chain variable domain of TCR clone 114015 (TRAV9-2, TRAJ39)
CALYIYNAGNMLTF

SEQ ID NO: 228030 - protein, 14 aa, Homo sapiens
  CDR3 for beta chain variable domain of TCR clone 114015 (TRBV11-2, TRBJ2-7)
CASSLGAGAYEQYF

SEQ ID NO: 228031 - protein, 16 aa, Homo sapiens
  CDR3 for alpha chain variable domain of TCR clone 114016 (TRAV12-2, TRAJ52)
CRLANAGGTSYGKLTF

SEQ ID NO: 228032 - protein, 14 aa, Homo sapiens
  CDR3 for beta chain variable domain of TCR clone 114016 (TRBV12-4, TRBJ1-1)
CASSSARGYTEAFF

SEQ ID NO: 228033 - protein, 14 aa, Homo sapiens
  CDR3 for alpha chain variable domain of TCR clone 114017 (TRAV17, TRAJ22)
CATRPSGSARQLTF

SEQ ID NO: 228034 - protein, 15 aa, Homo sapiens
  CDR3 for beta chain variable domain of TCR clone 114017 (TRBV4-1, TRBJ2-5)
CASSQWDLYQETQYF

SEQ ID NO: 228035 - protein, 12 aa, Homo sapiens
  CDR3 for alpha chain variable domain of TCR clone 114018 (TRAV1-1, TRAJ39)
CAVPVVGNMLTF

SEQ ID NO: 228036 - protein, 14 aa, Homo sapiens
  CDR3 for beta chain variable domain of TCR clone 114018 (TRBV18, TRBJ1-1)
CASSQGQGNTGAFF

SEQ ID NO: 228037 - protein, 11 aa, Homo sapiens
  CDR3 for alpha chain variable domain of TCR clone 114019 (TRAV23/DV6, TRAJ27)
CAASKPMQANQ

SEQ ID NO: 228038 - protein, 14 aa, Homo sapiens
  CDR3 for beta chain variable domain of TCR clone 114019 (TRBV5-4, TRBJ1-1)
CASSLDSRRDEAFF

SEQ ID NO: 228039 - protein, 17 aa, Homo sapiens
  CDR3 for alpha chain variable domain of TCR clone 114020 (TRAV3, TRAJ6)
CSVSDGPRAGGSYIPTF

SEQ ID NO: 228040 - protein, 14 aa, Homo sapiens
  CDR3 for beta chain variable domain of TCR clone 114020 (TRBV7-2, TRBJ2-7)
CASSPKTSFYEQYF

SEQ ID NO: 228041 - protein, 11 aa, Homo sapiens
  CDR3 for alpha chain variable domain of TCR clone 114021 (TRAV3, TRAJ21)
CAVGNFNKFYF

SEQ ID NO: 228042 - protein, 13 aa, Homo sapiens
  CDR3 for beta chain variable domain of TCR clone 114021 (TRBV12-4, TRBJ1-2)
CASSSGLTVISTF

SEQ ID NO: 228043 - protein, 15 aa, Homo sapiens
  CDR3 for alpha chain variable domain of TCR clone 114022 (TRAV23/DV6, TRAJ28)
CAALLAYSGAGSYQL

SEQ ID NO: 228044 - protein, 15 aa, Homo sapiens
  CDR3 for beta chain variable domain of TCR clone 114022 (TRBV7-2, TRBJ2-1)
YASSLVAGRYNEQFF

SEQ ID NO: 228045 - protein, 15 aa, Homo sapiens
  CDR3 for alpha chain variable domain of TCR clone 114023 (TRAV26-1, TRAJ29)
WIVRVEGSGNTPLVF

SEQ ID NO: 228046 - protein, 15 aa, Homo sapiens
  CDR3 for beta chain variable domain of TCR clone 114023 (TRBV7-9, TRBJ1-5)
CASSQGHQPNQPQHF

SEQ ID NO: 228047 - protein, 15 aa, Homo sapiens
  CDR3 for alpha chain variable domain of TCR clone 114024 (TRAV8-3, TRAJ11)
CAVGLLNSGYSTLTF

SEQ ID NO: 228048 - protein, 13 aa, Homo sapiens
  CDR3 for beta chain variable domain of TCR clone 114024 (TRBV4-1, TRBJ2-7)
CASSQGQAYEQYF

SEQ ID NO: 228049 - protein, 15 aa, Homo sapiens
  CDR3 for alpha chain variable domain of TCR clone 114025 (TRAV21, TRAJ53)
CATLNSGGSSYKLTF

SEQ ID NO: 228050 - protein, 13 aa, Homo sapiens
  CDR3 for beta chain variable domain of TCR clone 114025 (TRBV7-9, TRBJ2-3)
CASSPGSTDTQYF

SEQ ID NO: 228051 - protein, 16 aa, Homo sapiens
  CDR3 for alpha chain variable domain of TCR clone 114026 (TRAV12-3, TRAJ53)
CAMSPGSGGSNYKLTF

SEQ ID NO: 228052 - protein, 12 aa, Homo sapiens
  CDR3 for beta chain variable domain of TCR clone 114026 (TRBV6-3, TRBJ2-3)
CASGDWTDTQYF

SEQ ID NO: 228053 - protein, 13 aa, Homo sapiens
  CDR3 for alpha chain variable domain of TCR clone 114027 (TRAV1-2, TRAJ12)
CAVSMDSSYKLFF

SEQ ID NO: 228054 - protein, 15 aa, Homo sapiens
  CDR3 for beta chain variable domain of TCR clone 114027 (TRBV27, TRBJ2-5)
CASSLIPSGGETQYF

SEQ ID NO: 228055 - protein, 14 aa, Homo sapiens
  CDR3 for alpha chain variable domain of TCR clone 114028 (TRAV12-3, TRAJ10)
SHLPLTGGGDKLTF

SEQ ID NO: 228056 - protein, 13 aa, Homo sapiens
  CDR3 for beta chain variable domain of TCR clone 114028 (TRBV2, TRBJ1-6)
CADSGSYNSPLHF

SEQ ID NO: 228057 - protein, 17 aa, Homo sapiens
  CDR3 for alpha chain variable domain of TCR clone 114029 (TRAV2, TRAJ36)
CAVEDRGNWGKQPILWD

SEQ ID NO: 228058 - protein, 14 aa, Homo sapiens
  CDR3 for beta chain variable domain of TCR clone 114029 (TRBV7-9, TRBJ2-5)
CASSLDTAQETQYF

SEQ ID NO: 228059 - protein, 12 aa, Homo sapiens
  CDR3 for alpha chain variable domain of TCR clone 114030 (TRAV16, TRAJ10)
CSRTGGGNKLTF

SEQ ID NO: 228060 - protein, 15 aa, Homo sapiens
  CDR3 for beta chain variable domain of TCR clone 114030 (TRBV11-2, TRBJ2-2)
CASRGLAANTGELFF

SEQ ID NO: 228061 - protein, 13 aa, Homo sapiens
  CDR3 for alpha chain variable domain of TCR clone 114031 (TRAV20, TRAJ54)
CAVQAGGAQKLVF

SEQ ID NO: 228062 - protein, 16 aa, Homo sapiens
  CDR3 for beta chain variable domain of TCR clone 114031 (TRBV20-1, TRBJ2-7)
CSAKTGTGATSSTSGR

SEQ ID NO: 228063 - protein, 16 aa, Homo sapiens
  CDR3 for alpha chain variable domain of TCR clone 114032 (TRAV26-1, TRAJ37)
CIVRGDVSGNTGKLIF

SEQ ID NO: 228064 - protein, 17 aa, Homo sapiens
  CDR3 for beta chain variable domain of TCR clone 114032 (TRBV4-1, TRBJ2-7)
CASSRDPLGVRGGEQYF

SEQ ID NO: 228065 - protein, 13 aa, Homo sapiens
  CDR3 for alpha chain variable domain of TCR clone 114033 (TRAV21, TRAJ57)
CAVTQGGSEKLVF

SEQ ID NO: 228066 - protein, 16 aa, Homo sapiens
  CDR3 for beta chain variable domain of TCR clone 114033 (TRBV29-1, TRBJ2-7)
CSVEDAEDGTAYELYF

SEQ ID NO: 228067 - protein, 14 aa, Homo sapiens
  CDR3 for alpha chain variable domain of TCR clone 114034 (TRAV12-2, TRAJ17)
CAVLFKAAGNKLTF

SEQ ID NO: 228068 - protein, 17 aa, Homo sapiens
  CDR3 for beta chain variable domain of TCR clone 114034 (TRBV20-1, TRBJ2-2)
CSASGSGQGGLTGELFY

SEQ ID NO: 228069 - protein, 14 aa, Homo sapiens
  CDR3 for alpha chain variable domain of TCR clone 114035 (TRAV8-6, TRAJ54)
CAVSDFQGAQKLVF

SEQ ID NO: 228070 - protein, 14 aa, Homo sapiens
  CDR3 for beta chain variable domain of TCR clone 114035 (TRBV18, TRBJ2-7)
RASSPRGGAYEQYF

SEQ ID NO: 228071 - protein, 14 aa, Homo sapiens
  CDR3 for alpha chain variable domain of TCR clone 114036 (TRAV36/DV7, TRAJ44)
CCGANTGTASKLTF

SEQ ID NO: 228072 - protein, 14 aa, Homo sapiens
  CDR3 for beta chain variable domain of TCR clone 114036 (TRBV19, TRBJ2-1)
CASPTFVLSGEQFF

SEQ ID NO: 228073 - protein, 13 aa, Homo sapiens
  CDR3 for alpha chain variable domain of TCR clone 114037 (TRAV3, TRAJ15)
CAVRDQAGTALIF

SEQ ID NO: 228074 - protein, 17 aa, Homo sapiens
  CDR3 for beta chain variable domain of TCR clone 114037 (TRBV11-2, TRBJ2-1)
CASSLYPPGVEYNEQFF

SEQ ID NO: 228075 - protein, 13 aa, Homo sapiens
  CDR3 for alpha chain variable domain of TCR clone 114038 (TRAV12-3, TRAJ7)
CAMSASGNNRLAF

SEQ ID NO: 228076 - protein, 15 aa, Homo sapiens
  CDR3 for beta chain variable domain of TCR clone 114038 (TRBV7-2, TRBJ2-7)
CASSLKGALTYEQYF

SEQ ID NO: 228077 - protein, 11 aa, Homo sapiens
  CDR3 for alpha chain variable domain of TCR clone 114039 (TRAV12-3, TRAJ27)
CAMANAGKSTF

SEQ ID NO: 228078 - protein, 18 aa, Homo sapiens
  CDR3 for beta chain variable domain of TCR clone 114039 (TRBV7-6, TRBJ2-1)
CASSPRTSGMSSYNEQFF

SEQ ID NO: 228079 - protein, 15 aa, Homo sapiens
  CDR3 for alpha chain variable domain of TCR clone 114040 (TRAV12-3, TRAJ47)
CAMSALVEYGNKLVF

SEQ ID NO: 228080 - protein, 17 aa, Homo sapiens
  CDR3 for beta chain variable domain of TCR clone 114040 (TRBV13, TRBJ2-3)
CASSLSRVAGGRNTQYF

SEQ ID NO: 228081 - protein, 15 aa, Homo sapiens
  CDR3 for alpha chain variable domain of TCR clone 114041 (TRAV3, TRAJ20)
CAVRDIKLSDYKLSF

SEQ ID NO: 228082 - protein, 15 aa, Homo sapiens
  CDR3 for beta chain variable domain of TCR clone 114041 (TRBV7-9, TRBJ1-6)
CASSSPGRGNLPLHF

SEQ ID NO: 228083 - protein, 16 aa, Homo sapiens
  CDR3 for alpha chain variable domain of TCR clone 114042 (TRAV4, TRAJ22)
CLVGDLYSGSARQLTV

SEQ ID NO: 228084 - protein, 16 aa, Homo sapiens
  CDR3 for beta chain variable domain of TCR clone 114042 (TRBV7-9, TRBJ2-1)
CASSDVAGGSYNEQFF

SEQ ID NO: 228085 - protein, 16 aa, Homo sapiens
  CDR3 for alpha chain variable domain of TCR clone 114043 (TRAV1-1, TRAJ29)
CAVRSTRKSGNTPLVF

SEQ ID NO: 228086 - protein, 15 aa, Homo sapiens
  CDR3 for beta chain variable domain of TCR clone 114043 (TRBV29-1, TRBJ2-1)
CSVGRHALFYNEQFF

SEQ ID NO: 228087 - protein, 17 aa, Homo sapiens
  CDR3 for alpha chain variable domain of TCR clone 114044 (TRAV2, TRAJ36)
CAVEDRGNWGKQPLLWD

SEQ ID NO: 228088 - protein, 16 aa, Homo sapiens
  CDR3 for beta chain variable domain of TCR clone 114044 (TRBV7-8, TRBJ2-4)
CASSAERTLAKNIQYF

SEQ ID NO: 228089 - protein, 17 aa, Homo sapiens
  CDR3 for alpha chain variable domain of TCR clone 114045 (TRAV36/DV7, TRAJ52)
CAVAQRAGGTSYGKLTF

SEQ ID NO: 228090 - protein, 15 aa, Homo sapiens
  CDR3 for beta chain variable domain of TCR clone 114045 (TRBV6-5, TRBJ1-2)
CASRYSQAFNYGYTF

SEQ ID NO: 228091 - protein, 15 aa, Homo sapiens
  CDR3 for alpha chain variable domain of TCR clone 114046 (TRAV3, TRAJ5)
CAVRDRKAGRRALTF

SEQ ID NO: 228092 - protein, 15 aa, Homo sapiens
  CDR3 for beta chain variable domain of TCR clone 114046 (TRBV7-8, TRBJ2-1)
CASSLADSLYNEQFF

SEQ ID NO: 228093 - protein, 12 aa, Homo sapiens
  CDR3 for alpha chain variable domain of TCR clone 114047 (TRAV12-2, TRAJ10)
WGVTGGGNKLTF

SEQ ID NO: 228094 - protein, 14 aa, Homo sapiens
  CDR3 for beta chain variable domain of TCR clone 114047 (TRBV13, TRBJ2-7)
CASSLKGASYEQYF

SEQ ID NO: 228095 - protein, 14 aa, Homo sapiens
  CDR3 for alpha chain variable domain of TCR clone 114048 (TRAV12-1, TRAJ43)
CVVNGRSNNNDMLF

SEQ ID NO: 228096 - protein, 13 aa, Homo sapiens
  CDR3 for beta chain variable domain of TCR clone 114048 (TRBV10-3, TRBJ2-7)
CASKLAVNYEQYF

SEQ ID NO: 228097 - protein, 16 aa, Homo sapiens
  CDR3 for alpha chain variable domain of TCR clone 114049 (TRAV8-3, TRAJ10)
CAVGPILTVGGNKLTF

SEQ ID NO: 228098 - protein, 16 aa, Homo sapiens
  CDR3 for beta chain variable domain of TCR clone 114049 (TRBV7-2, TRBJ2-5)
CASSSKWLSGQETQYF

SEQ ID NO: 228099 - protein, 13 aa, Homo sapiens
  CDR3 for alpha chain variable domain of TCR clone 114050 (TRAV1-1, TRAJ31)
CASYLNNNARLMF

SEQ ID NO: 228100 - protein, 14 aa, Homo sapiens
  CDR3 for beta chain variable domain of TCR clone 114050 (TRBV4-1, TRBJ2-5)
CASSRRGSGETQYF

SEQ ID NO: 228101 - protein, 11 aa, Homo sapiens
  CDR3 for alpha chain variable domain of TCR clone 114051 (TRAV1-1, TRAJ16)
CAAGDGQKPLF

SEQ ID NO: 228102 - protein, 15 aa, Homo sapiens
  CDR3 for beta chain variable domain of TCR clone 114051 (TRBV28, TRBJ1-2)
CASIPQGSDDYGYTF

SEQ ID NO: 228103 - protein, 11 aa, Homo sapiens
  CDR3 for alpha chain variable domain of TCR clone 114052 (TRAV3, TRAJ17)
PRGAAGNTLTF

SEQ ID NO: 228104 - protein, 12 aa, Homo sapiens
  CDR3 for beta chain variable domain of TCR clone 114052 (TRBV11-2, TRBJ2-2)
CASSLGGGELFF

SEQ ID NO: 228105 - protein, 12 aa, Homo sapiens
  CDR3 for alpha chain variable domain of TCR clone 114053 (TRAV3, TRAJ43)
CAVRYPNNDMRF

SEQ ID NO: 228106 - protein, 13 aa, Homo sapiens
  CDR3 for beta chain variable domain of TCR clone 114053 (TRBV19, TRBJ1-2)
CASSVPGQDGYTF

SEQ ID NO: 228107 - protein, 16 aa, Homo sapiens
  CDR3 for alpha chain variable domain of TCR clone 114054 (TRAV12-2, TRAJ36)
CGTNNLFSGTGTRLTV

SEQ ID NO: 228108 - protein, 14 aa, Homo sapiens
  CDR3 for beta chain variable domain of TCR clone 114054 (TRBV7-2, TRBJ2-1)
CASSLSRVDNEQFF

SEQ ID NO: 228109 - protein, 15 aa, Homo sapiens
  CDR3 for alpha chain variable domain of TCR clone 114055 (TRAV12-1, TRAJ5)
CVVNMLETGRRALTF

SEQ ID NO: 228110 - protein, 14 aa, Homo sapiens
  CDR3 for beta chain variable domain of TCR clone 114055 (TRBV7-2, TRBJ2-7)
CASCPKTSFYEQYF

SEQ ID NO: 228111 - protein, 14 aa, Homo sapiens
  CDR3 for alpha chain variable domain of TCR clone 114056 (TRAV12-2, TRAJ13)
CAVKKTGGYQKVTF

SEQ ID NO: 228112 - protein, 18 aa, Homo sapiens
  CDR3 for beta chain variable domain of TCR clone 114056 (TRBV12-5, TRBJ2-7)
CASGSQGAPTSSTSGRAT

SEQ ID NO: 228113 - protein, 13 aa, Homo sapiens
  CDR3 for alpha chain variable domain of TCR clone 114057 (TRAV13-1, TRAJ39)
CAASIWAGNMLTF

SEQ ID NO: 228114 - protein, 15 aa, Homo sapiens
  CDR3 for beta chain variable domain of TCR clone 114057 (TRBV12-4, TRBJ2-7)
CASSRGLAGTYEQYF

SEQ ID NO: 228115 - protein, 14 aa, Homo sapiens
  CDR3 for alpha chain variable domain of TCR clone 114058 (TRAV35, TRAJ13)
CAGSPSGGYQKVTF

SEQ ID NO: 228116 - protein, 13 aa, Homo sapiens
  CDR3 for beta chain variable domain of TCR clone 114058 (TRBV5-1, TRBJ1-2)
CASSIDRPEGYTF

SEQ ID NO: 228117 - protein, 12 aa, Homo sapiens
  CDR3 for alpha chain variable domain of TCR clone 114059 (TRAV21, TRAJ3)
CCFYSSASKLIF

SEQ ID NO: 228118 - protein, 16 aa, Homo sapiens
  CDR3 for beta chain variable domain of TCR clone 114059 (TRBV19, TRBJ2-1)
CASSKAGPSSYNEQFF

SEQ ID NO: 228119 - protein, 15 aa, Homo sapiens
  CDR3 for alpha chain variable domain of TCR clone 114060 (TRAV25, TRAJ41)
CAGPWNSNSGYALNF

SEQ ID NO: 228120 - protein, 13 aa, Homo sapiens
  CDR3 for beta chain variable domain of TCR clone 114060 (TRBV15, TRBJ1-1)
CASSRGIQARAFF

SEQ ID NO: 228121 - protein, 12 aa, Homo sapiens
  CDR3 for alpha chain variable domain of TCR clone 114061 (TRAV4, TRAJ21)
CLVGDNFNKFYF

SEQ ID NO: 228122 - protein, 17 aa, Homo sapiens
  CDR3 for beta chain variable domain of TCR clone 114061 (TRBV3-1, TRBJ2-7)
CASSKDLTGLSSYEQYF

SEQ ID NO: 228123 - protein, 11 aa, Homo sapiens
  CDR3 for alpha chain variable domain of TCR clone 114062 (TRAV2, TRAJ33)
CAVDSNYQLIW

SEQ ID NO: 228124 - protein, 16 aa, Homo sapiens
  CDR3 for beta chain variable domain of TCR clone 114062 (TRBV2, TRBJ2-3)
CASSTSVEGVTDTQYF

SEQ ID NO: 228125 - protein, 13 aa, Homo sapiens
  CDR3 for alpha chain variable domain of TCR clone 114063 (TRAV16, TRAJ11)
CVLTQSGYSTLTF

SEQ ID NO: 228126 - protein, 14 aa, Homo sapiens
  CDR3 for beta chain variable domain of TCR clone 114063 (TRBV19, TRBJ2-7)
CASSTTRSSYEQYF

SEQ ID NO: 228127 - protein, 14 aa, Homo sapiens
  CDR3 for alpha chain variable domain of TCR clone 114064 (TRAV12-3, TRAJ10)
SHLPLTGGGNKLIF

SEQ ID NO: 228128 - protein, 13 aa, Homo sapiens
  CDR3 for beta chain variable domain of TCR clone 114064 (TRBV7-9, TRBJ2-3)
CASSPGSTDTQYF

SEQ ID NO: 228129 - protein, 15 aa, Homo sapiens
  CDR3 for alpha chain variable domain of TCR clone 114065 (TRAV25, TRAJ52)
CAGRPGGTSYGKLTF

SEQ ID NO: 228130 - protein, 17 aa, Homo sapiens
  CDR3 for beta chain variable domain of TCR clone 114065 (TRBV7-8, TRBJ2-6)
CASSAGTGGAGANVLTF

SEQ ID NO: 228131 - protein, 12 aa, Homo sapiens
  CDR3 for alpha chain variable domain of TCR clone 114066 (TRAV8-3, TRAJ27)
CAVGAEAGKSTF

SEQ ID NO: 228132 - protein, 13 aa, Homo sapiens
  CDR3 for beta chain variable domain of TCR clone 114066 (TRBV2, TRBJ1-5)
CATAGPGNQPQHF

SEQ ID NO: 228133 - protein, 17 aa, Homo sapiens
  CDR3 for alpha chain variable domain of TCR clone 114067 (TRAV16, TRAJ58)
CITVLSNVETSGSRLTF

SEQ ID NO: 228134 - protein, 17 aa, Homo sapiens
  CDR3 for beta chain variable domain of TCR clone 114067 (TRBV18, TRBJ2-1)
CASSKGLSGGADNEQFF

SEQ ID NO: 228135 - protein, 14 aa, Homo sapiens
  CDR3 for alpha chain variable domain of TCR clone 114068 (TRAV13-1, TRAJ48)
RAASRSFGNEKLTF

SEQ ID NO: 228136 - protein, 12 aa, Homo sapiens
  CDR3 for beta chain variable domain of TCR clone 114068 (TRBV6-6, TRBJ2-5)
CASNRQSGTQYF

SEQ ID NO: 228137 - protein, 15 aa, Homo sapiens
  CDR3 for alpha chain variable domain of TCR clone 114069 (TRAV13-1, TRAJ32)
CEASIYGGATNKLIF

SEQ ID NO: 228138 - protein, 12 aa, Homo sapiens
  CDR3 for beta chain variable domain of TCR clone 114069 (TRBV7-6, TRBJ2-3)
CASSTGTDTQYF

SEQ ID NO: 228139 - protein, 12 aa, Homo sapiens
  CDR3 for alpha chain variable domain of TCR clone 114070 (TRAV12-3, TRAJ17)
CAMTLTGNKLTF

SEQ ID NO: 228140 - protein, 14 aa, Homo sapiens
  CDR3 for beta chain variable domain of TCR clone 114070 (TRBV20-1, TRBJ2-4)
CSASGRVGENIQYF

SEQ ID NO: 228141 - protein, 14 aa, Homo sapiens
  CDR3 for alpha chain variable domain of TCR clone 114071 (TRAV12-2, TRAJ13)
CAVKKTWGYQKVTF

SEQ ID NO: 228142 - protein, 15 aa, Homo sapiens
  CDR3 for beta chain variable domain of TCR clone 114071 (TRBV12-4, TRBJ2-5)
CASSPPTGLQETQYF

SEQ ID NO: 228143 - protein, 13 aa, Homo sapiens
  CDR3 for alpha chain variable domain of TCR clone 114072 (TRAV2, TRAJ40)
CAVVTSGTYKYIF

SEQ ID NO: 228144 - protein, 14 aa, Homo sapiens
  CDR3 for beta chain variable domain of TCR clone 114072 (TRBV7-8, TRBJ2-7)
CASSPRDRVYEQYF

SEQ ID NO: 228145 - protein, 12 aa, Homo sapiens
  CDR3 for alpha chain variable domain of TCR clone 114073 (TRAV3, TRAJ43)
CAVRDPNNDMRF

SEQ ID NO: 228146 - protein, 15 aa, Homo sapiens
  CDR3 for beta chain variable domain of TCR clone 114073 (TRBV27, TRBJ1-5)
CASSLGTGFDQPQHF

SEQ ID NO: 228147 - protein, 13 aa, Homo sapiens
  CDR3 for alpha chain variable domain of TCR clone 114074 (TRAV13-2, TRAJ48)
CAEMDFGNEKLTL

SEQ ID NO: 228148 - protein, 16 aa, Homo sapiens
  CDR3 for beta chain variable domain of TCR clone 114074 (TRBV27, TRBJ2-2)
CASSFRGLVRTGELFF

SEQ ID NO: 228149 - protein, 14 aa, Homo sapiens
  CDR3 for alpha chain variable domain of TCR clone 114075 (TRAV2, TRAJ9)
CAVEDRSGGFKPIF

SEQ ID NO: 228150 - protein, 13 aa, Homo sapiens
  CDR3 for beta chain variable domain of TCR clone 114075 (TRBV19, TRBJ1-2)
CASSVPGQDGYTF

SEQ ID NO: 228151 - protein, 13 aa, Homo sapiens
  CDR3 for alpha chain variable domain of TCR clone 114076 (TRAV2, TRAJ40)
CSAVTSGTYKYIF

SEQ ID NO: 228152 - protein, 14 aa, Homo sapiens
  CDR3 for beta chain variable domain of TCR clone 114076 (TRBV19, TRBJ2-1)
CASPTFVLSGEQFF

SEQ ID NO: 228153 - protein, 13 aa, Homo sapiens
  CDR3 for alpha chain variable domain of TCR clone 114077 (TRAV5, TRAJ30)
CAEISNRDDKIIF

SEQ ID NO: 228154 - protein, 14 aa, Homo sapiens
  CDR3 for beta chain variable domain of TCR clone 114077 (TRBV4-1, TRBJ2-2)
CASSQAVNTGELFF

SEQ ID NO: 228155 - protein, 11 aa, Homo sapiens
  CDR3 for alpha chain variable domain of TCR clone 114078 (TRAV1-2, TRAJ11)
CAVRGYSTLTF

SEQ ID NO: 228156 - protein, 13 aa, Homo sapiens
  CDR3 for beta chain variable domain of TCR clone 114078 (TRBV12-5, TRBJ2-3)
CASGDRQSDTQYF

SEQ ID NO: 228157 - protein, 12 aa, Homo sapiens
  CDR3 for alpha chain variable domain of TCR clone 114079 (TRAV12-3, TRAJ17)
CAMTLTGNKPTF

SEQ ID NO: 228158 - protein, 13 aa, Homo sapiens
  CDR3 for beta chain variable domain of TCR clone 114079 (TRBV12-4, TRBJ1-1)
CASSPGTGFEAFF

SEQ ID NO: 228159 - protein, 14 aa, Homo sapiens
  CDR3 for alpha chain variable domain of TCR clone 114080 (TRAV13-1, TRAJ20)
CAARPGSNDYKLSF

SEQ ID NO: 228160 - protein, 13 aa, Homo sapiens
  CDR3 for beta chain variable domain of TCR clone 114080 (TRBV20-1, TRBJ1-1)
CSAPPGGHTQAFF

SEQ ID NO: 228161 - protein, 14 aa, Homo sapiens
  CDR3 for alpha chain variable domain of TCR clone 114081 (TRAV20, TRAJ56)
CAVQFGGANSKLTF

SEQ ID NO: 228162 - protein, 15 aa, Homo sapiens
  CDR3 for beta chain variable domain of TCR clone 114081 (TRBV2, TRBJ2-1)
CASSEEREGDNEQFF

SEQ ID NO: 228163 - protein, 14 aa, Homo sapiens
  CDR3 for alpha chain variable domain of TCR clone 114082 (TRAV1-2, TRAJ16)
CAVNRFSDGQKLLF

SEQ ID NO: 228164 - protein, 17 aa, Homo sapiens
  CDR3 for beta chain variable domain of TCR clone 114082 (TRBV7-9, TRBJ2-7)
CASSFDGSRGGAYEQYF

SEQ ID NO: 228165 - protein, 12 aa, Homo sapiens
  CDR3 for alpha chain variable domain of TCR clone 114083 (TRAV8-3, TRAJ4)
PAFSGGYTKLIF

SEQ ID NO: 228166 - protein, 13 aa, Homo sapiens
  CDR3 for beta chain variable domain of TCR clone 114083 (TRBV20-1, TRBJ1-3)
CSAGAYSGNTIYF

SEQ ID NO: 228167 - protein, 12 aa, Homo sapiens
  CDR3 for alpha chain variable domain of TCR clone 114084 (TRAV36/DV7, TRAJ54)
CAVVRGAQKLVF

SEQ ID NO: 228168 - protein, 15 aa, Homo sapiens
  CDR3 for beta chain variable domain of TCR clone 114084 (TRBV28, TRBJ1-1)
CASTSTRGLNTEAFF

SEQ ID NO: 228169 - protein, 13 aa, Homo sapiens
  CDR3 for alpha chain variable domain of TCR clone 114085 (TRAV3, TRAJ21)
CAVREPDFNKSYF

SEQ ID NO: 228170 - protein, 15 aa, Homo sapiens
  CDR3 for beta chain variable domain of TCR clone 114085 (TRBV2, TRBJ2-1)
CASSELAGGYNEQFF

SEQ ID NO: 228171 - protein, 16 aa, Homo sapiens
  CDR3 for alpha chain variable domain of TCR clone 114086 (TRAV26-1, TRAJ36)
CIVRVPDQTGANNLFF

SEQ ID NO: 228172 - protein, 14 aa, Homo sapiens
  CDR3 for beta chain variable domain of TCR clone 114086 (TRBV7-2, TRBJ2-5)
CASSPRGSSETQYF

SEQ ID NO: 228173 - protein, 13 aa, Homo sapiens
  CDR3 for alpha chain variable domain of TCR clone 114087 (TRAV16, TRAJ34)
CALSGRNTDKLIF

SEQ ID NO: 228174 - protein, 15 aa, Homo sapiens
  CDR3 for beta chain variable domain of TCR clone 114087 (TRBV7-9, TRBJ2-3)
CASSQDRGITDTQYF

SEQ ID NO: 228175 - protein, 14 aa, Homo sapiens
  CDR3 for alpha chain variable domain of TCR clone 114088 (TRAV17, TRAJ37)
CATDGSSNTGNLIF

SEQ ID NO: 228176 - protein, 13 aa, Homo sapiens
  CDR3 for beta chain variable domain of TCR clone 114088 (TRBV11-2, TRBJ2-1)
CASSLDLVNEQFF

SEQ ID NO: 228177 - protein, 13 aa, Homo sapiens
  CDR3 for alpha chain variable domain of TCR clone 114089 (TRAV13-2, TRAJ13)
CAERPGGYQKVTF

SEQ ID NO: 228178 - protein, 15 aa, Homo sapiens
  CDR3 for beta chain variable domain of TCR clone 114089 (TRBV11-1, TRBJ2-7)
CASSLNYGASYEQYF

SEQ ID NO: 228179 - protein, 19 aa, Homo sapiens
  CDR3 for alpha chain variable domain of TCR clone 114090 (TRAV17, TRAJ40)
TASRAADTASYFCASKYVF

SEQ ID NO: 228180 - protein, 17 aa, Homo sapiens
  CDR3 for beta chain variable domain of TCR clone 114090 (TRBV11-2, TRBJ2-4)
CASSFLALGGAGDIQYF

SEQ ID NO: 228181 - protein, 12 aa, Homo sapiens
  CDR3 for alpha chain variable domain of TCR clone 114091 (TRAV13-1, TRAJ11)
CAGPSGYSNLTF

SEQ ID NO: 228182 - protein, 13 aa, Homo sapiens
  CDR3 for beta chain variable domain of TCR clone 114091 (TRBV12-4, TRBJ2-1)
CASSLSPSNEQFF

SEQ ID NO: 228183 - protein, 14 aa, Homo sapiens
  CDR3 for alpha chain variable domain of TCR clone 114092 (TRAV12-3, TRAJ42)
CAMNYGGSQGNLIF

SEQ ID NO: 228184 - protein, 15 aa, Homo sapiens
  CDR3 for beta chain variable domain of TCR clone 114092 (TRBV5-7, TRBJ1-5)
CASSYGKLWYQPQHF

SEQ ID NO: 228185 - protein, 12 aa, Homo sapiens
  CDR3 for alpha chain variable domain of TCR clone 114093 (TRAV3, TRAJ7)
CAELLWEQQTRF

SEQ ID NO: 228186 - protein, 13 aa, Homo sapiens
  CDR3 for beta chain variable domain of TCR clone 114093 (TRBV7-3, TRBJ2-5)
CASSFRGGETQYF

SEQ ID NO: 228187 - protein, 18 aa, Homo sapiens
  CDR3 for alpha chain variable domain of TCR clone 114094 (TRAV21, TRAJ52)
CAVMPSPAGGTGYGKLTF

SEQ ID NO: 228188 - protein, 17 aa, Homo sapiens
  CDR3 for beta chain variable domain of TCR clone 114094 (TRBV13, TRBJ2-3)
CASSLSRVAGGRNTQYF

SEQ ID NO: 228189 - protein, 14 aa, Homo sapiens
  CDR3 for alpha chain variable domain of TCR clone 114095 (TRAV1-2, TRAJ16)
CDVNRFSDGQKLLF

SEQ ID NO: 228190 - protein, 17 aa, Homo sapiens
  CDR3 for beta chain variable domain of TCR clone 114095 (TRBV7-8, TRBJ2-6)
CASSAGTGGAGANVLTF

SEQ ID NO: 228191 - protein, 14 aa, Homo sapiens
  CDR3 for alpha chain variable domain of TCR clone 114096 (TRAV16, TRAJ33)
CALSAMDSNYQLIW

SEQ ID NO: 228192 - protein, 15 aa, Homo sapiens
  CDR3 for beta chain variable domain of TCR clone 114096 (TRBV19, TRBJ2-1)
CASSIVRGEGREQFF

SEQ ID NO: 228193 - protein, 14 aa, Homo sapiens
  CDR3 for alpha chain variable domain of TCR clone 114097 (TRAV16, TRAJ39)
CALSKNNAGNMLTF

SEQ ID NO: 228194 - protein, 14 aa, Homo sapiens
  CDR3 for beta chain variable domain of TCR clone 114097 (TRBV7-6, TRBJ2-3)
CASSLGTVTDTQYF

SEQ ID NO: 228195 - protein, 12 aa, Homo sapiens
  CDR3 for alpha chain variable domain of TCR clone 114098 (TRAV27, TRAJ13)
CAGAGGYQKVTF

SEQ ID NO: 228196 - protein, 11 aa, Homo sapiens
  CDR3 for beta chain variable domain of TCR clone 114098 (TRBV11-2, TRBJ2-2)
CASSLPGELFF

SEQ ID NO: 228197 - protein, 13 aa, Homo sapiens
  CDR3 for alpha chain variable domain of TCR clone 114099 (TRAV3, TRAJ15)
CAVRDQAGTALIF

SEQ ID NO: 228198 - protein, 15 aa, Homo sapiens
  CDR3 for beta chain variable domain of TCR clone 114099 (TRBV28, TRBJ2-5)
CASSPGQGSIETQYF

SEQ ID NO: 228199 - protein, 15 aa, Homo sapiens
  CDR3 for alpha chain variable domain of TCR clone 114100 (TRAV4, TRAJ39)
CLVGPNNNAGNMLTF

SEQ ID NO: 228200 - protein, 13 aa, Homo sapiens
  CDR3 for beta chain variable domain of TCR clone 114100 (TRBV11-2, TRBJ2-7)
CASSSTGEETQYF

SEQ ID NO: 228201 - protein, 12 aa, Homo sapiens
  CDR3 for alpha chain variable domain of TCR clone 114101 (TRAV1-1, TRAJ8)
CVGGTGFQKLVF

SEQ ID NO: 228202 - protein, 13 aa, Homo sapiens
  CDR3 for beta chain variable domain of TCR clone 114101 (TRBV20-1, TRBJ1-1)
CSARGGGNTEAFF

SEQ ID NO: 228203 - protein, 10 aa, Homo sapiens
  CDR3 for alpha chain variable domain of TCR clone 114102 (TRAV12-3, TRAJ49)
CTMNDDQFYF

SEQ ID NO: 228204 - protein, 13 aa, Homo sapiens
  CDR3 for beta chain variable domain of TCR clone 114102 (TRBV12-4, TRBJ1-1)
CASSPGTGFEAFF

SEQ ID NO: 228205 - protein, 17 aa, Homo sapiens
  CDR3 for alpha chain variable domain of TCR clone 114103 (TRAV26-1, TRAJ37)
CIVRVITVSSNTGKLIF

SEQ ID NO: 228206 - protein, 14 aa, Homo sapiens
  CDR3 for beta chain variable domain of TCR clone 114103 (TRBV11-2, TRBJ2-1)
CASTTGQGNNEQSF

SEQ ID NO: 228207 - protein, 15 aa, Homo sapiens
  CDR3 for alpha chain variable domain of TCR clone 114104 (TRAV26-1, TRAJ17)
CIVRVVKAAGNKLPF

SEQ ID NO: 228208 - protein, 16 aa, Homo sapiens
  CDR3 for beta chain variable domain of TCR clone 114104 (TRBV7-9, TRBJ2-1)
CASSLVSGPSYNEQFF

SEQ ID NO: 228209 - protein, 14 aa, Homo sapiens
  CDR3 for alpha chain variable domain of TCR clone 114105 (TRAV13-1, TRAJ35)
CAASKGGFGNVLHC

SEQ ID NO: 228210 - protein, 13 aa, Homo sapiens
  CDR3 for beta chain variable domain of TCR clone 114105 (TRBV7-3, TRBJ1-1)
CASSQDWGAEAFP

SEQ ID NO: 228211 - protein, 14 aa, Homo sapiens
  CDR3 for alpha chain variable domain of TCR clone 114106 (TRAV26-1, TRAJ38)
CIADNAGNNRKLIW

SEQ ID NO: 228212 - protein, 15 aa, Homo sapiens
  CDR3 for beta chain variable domain of TCR clone 114106 (TRBV7-2, TRBJ2-7)
CASSWGQGAIYEQYF

SEQ ID NO: 228213 - protein, 13 aa, Homo sapiens
  CDR3 for alpha chain variable domain of TCR clone 114107 (TRAV13-2, TRAJ13)
CAERPGGYQKVTF

SEQ ID NO: 228214 - protein, 15 aa, Homo sapiens
  CDR3 for beta chain variable domain of TCR clone 114107 (TRBV11-3, TRBJ2-1)
CASSLGDSSHNEQFF

SEQ ID NO: 228215 - protein, 15 aa, Homo sapiens
  CDR3 for alpha chain variable domain of TCR clone 114108 (TRAV34, TRAJ38)
CGADFTPGNNRKLIW

SEQ ID NO: 228216 - protein, 13 aa, Homo sapiens
  CDR3 for beta chain variable domain of TCR clone 114108 (TRBV7-8, TRBJ2-7)
CASSLTGGREQYF

SEQ ID NO: 228217 - protein, 15 aa, Homo sapiens
  CDR3 for alpha chain variable domain of TCR clone 114109 (TRAV3, TRAJ22)
CAVRDRGGSARPLTF

SEQ ID NO: 228218 - protein, 15 aa, Homo sapiens
  CDR3 for beta chain variable domain of TCR clone 114109 (TRBV27, TRBJ2-1)
CASSNGGGSSNEQFF

SEQ ID NO: 228219 - protein, 14 aa, Homo sapiens
  CDR3 for alpha chain variable domain of TCR clone 114110 (TRAV23/DV6, TRAJ57)
CAASNQGGSEKLVF

SEQ ID NO: 228220 - protein, 13 aa, Homo sapiens
  CDR3 for beta chain variable domain of TCR clone 114110 (TRBV11-2, TRBJ2-7)
CDSSSYPSYEQYF

SEQ ID NO: 228221 - protein, 14 aa, Homo sapiens
  CDR3 for alpha chain variable domain of TCR clone 114111 (TRAV2, TRAJ3)
CAVPPYSSASKIIF

SEQ ID NO: 228222 - protein, 17 aa, Homo sapiens
  CDR3 for beta chain variable domain of TCR clone 114111 (TRBV6-6, TRBJ2-5)
CASSYPLAGGPQETQYF

SEQ ID NO: 228223 - protein, 15 aa, Homo sapiens
  CDR3 for alpha chain variable domain of TCR clone 114112 (TRAV12-2, TRAJ53)
CAVNGVGGSNYKLTF

SEQ ID NO: 228224 - protein, 13 aa, Homo sapiens
  CDR3 for beta chain variable domain of TCR clone 114112 (TRBV3-1, TRBJ1-1)
CASSPGVITEAFF

SEQ ID NO: 228225 - protein, 12 aa, Homo sapiens
  CDR3 for alpha chain variable domain of TCR clone 114113 (TRAV8-2, TRAJ39)
LVNNNAGNMLTF

SEQ ID NO: 228226 - protein, 16 aa, Homo sapiens
  CDR3 for beta chain variable domain of TCR clone 114113 (TRBV12-4, TRBJ1-5)
CASSRPVGGSNQPQHF

SEQ ID NO: 228227 - protein, 12 aa, Homo sapiens
  CDR3 for alpha chain variable domain of TCR clone 114114 (TRAV12-3, TRAJ17)
CAMTLTGNKLTF

SEQ ID NO: 228228 - protein, 17 aa, Homo sapiens
  CDR3 for beta chain variable domain of TCR clone 114114 (TRBV9, TRBJ1-6)
CASSVAGTGDSPSTLGT

SEQ ID NO: 228229 - protein, 14 aa, Homo sapiens
  CDR3 for alpha chain variable domain of TCR clone 114115 (TRAV8-4, TRAJ13)
CAVTLSGGFQKVTF

SEQ ID NO: 228230 - protein, 14 aa, Homo sapiens
  CDR3 for beta chain variable domain of TCR clone 114115 (TRBV7-2, TRBJ1-2)
CASSQTGSTYGYTF

SEQ ID NO: 228231 - protein, 13 aa, Homo sapiens
  CDR3 for alpha chain variable domain of TCR clone 114116 (TRAV1-2, TRAJ9)
CAASNTGGFKTIF

SEQ ID NO: 228232 - protein, 13 aa, Homo sapiens
  CDR3 for beta chain variable domain of TCR clone 114116 (TRBV12-4, TRBJ1-1)
CASSPGTGFEAFF

SEQ ID NO: 228233 - protein, 16 aa, Homo sapiens
  CDR3 for alpha chain variable domain of TCR clone 114117 (TRAV4, TRAJ22)
CLVGDLYSSSARQLTF

SEQ ID NO: 228234 - protein, 12 aa, Homo sapiens
  CDR3 for beta chain variable domain of TCR clone 114117 (TRBV11-2, TRBJ2-2)
CASSLGGGELFF

SEQ ID NO: 228235 - protein, 22 aa, Homo sapiens
  CDR3 for alpha chain variable domain of TCR clone 114118 (TRAV12-2, TRAJ53)
SPMIQPPTSVPPILSSNYKLTF

SEQ ID NO: 228236 - protein, 13 aa, Homo sapiens
  CDR3 for beta chain variable domain of TCR clone 114118 (TRBV7-7, TRBJ2-3)
CASSLSRADTQYF

SEQ ID NO: 228237 - protein, 15 aa, Homo sapiens
  CDR3 for alpha chain variable domain of TCR clone 114119 (TRAV23/DV6, TRAJ18)
CAARYRGSTLGRLYF

SEQ ID NO: 228238 - protein, 14 aa, Homo sapiens
  CDR3 for beta chain variable domain of TCR clone 114119 (TRBV6-5, TRBJ2-2)
CASTEGQETGELFF

SEQ ID NO: 228239 - protein, 17 aa, Homo sapiens
  CDR3 for alpha chain variable domain of TCR clone 114120 (TRAV26-1, TRAJ53)
CIVRVDDSGCSNYKLTF

SEQ ID NO: 228240 - protein, 15 aa, Homo sapiens
  CDR3 for beta chain variable domain of TCR clone 114120 (TRBV20-1, TRBJ2-7)
CSARVPAAYFYEQYF

SEQ ID NO: 228241 - protein, 18 aa, Homo sapiens
  CDR3 for alpha chain variable domain of TCR clone 114121 (TRAV29/DV5, TRAJ52)
CAAGFRGAGGTSYGKLTF

SEQ ID NO: 228242 - protein, 17 aa, Homo sapiens
  CDR3 for beta chain variable domain of TCR clone 114121 (TRBV11-2, TRBJ2-1)
CASSLYPPGVEYNEQFF

SEQ ID NO: 228243 - protein, 14 aa, Homo sapiens
  CDR3 for alpha chain variable domain of TCR clone 114122 (TRAV1-2, TRAJ16)
CAVNRFSDGQKLLF

SEQ ID NO: 228244 - protein, 16 aa, Homo sapiens
  CDR3 for beta chain variable domain of TCR clone 114122 (TRBV11-2, TRBJ1-2)
CASSLDTGSADYGYTF

SEQ ID NO: 228245 - protein, 14 aa, Homo sapiens
  CDR3 for alpha chain variable domain of TCR clone 114123 (TRAV2, TRAJ20)
CAVEAVVNDYKLSF

SEQ ID NO: 228246 - protein, 13 aa, Homo sapiens
  CDR3 for beta chain variable domain of TCR clone 114123 (TRBV19, TRBJ2-7)
CASRKAGGSEQYF

SEQ ID NO: 228247 - protein, 14 aa, Homo sapiens
  CDR3 for alpha chain variable domain of TCR clone 114124 (TRAV12-2, TRAJ40)
CAVKIPSGTYKYIF

SEQ ID NO: 228248 - protein, 18 aa, Homo sapiens
  CDR3 for beta chain variable domain of TCR clone 114124 (TRBV7-9, TRBJ2-7)
CASSLTTSGSRTWYEQYF

SEQ ID NO: 228249 - protein, 15 aa, Homo sapiens
  CDR3 for alpha chain variable domain of TCR clone 114125 (TRAV2, TRAJ15)
CAVEDREQAGTALIF

SEQ ID NO: 228250 - protein, 13 aa, Homo sapiens
  CDR3 for beta chain variable domain of TCR clone 114125 (TRBV10-2, TRBJ2-3)
CASSEAGDHTQYF

SEQ ID NO: 228251 - protein, 15 aa, Homo sapiens
  CDR3 for alpha chain variable domain of TCR clone 114126 (TRAV3, TRAJ4)
CAVRDGTGGYNKLIF

SEQ ID NO: 228252 - protein, 13 aa, Homo sapiens
  CDR3 for beta chain variable domain of TCR clone 114126 (TRBV12-5, TRBJ1-2)
CASGVRAGNGYTF

SEQ ID NO: 228253 - protein, 11 aa, Homo sapiens
  CDR3 for alpha chain variable domain of TCR clone 114127 (TRAV4, TRAJ31)
CLVGDNARLMF

SEQ ID NO: 228254 - protein, 16 aa, Homo sapiens
  CDR3 for beta chain variable domain of TCR clone 114127 (TRBV7-2, TRBJ2-5)
CASSSKWLSGRETQYF

SEQ ID NO: 228255 - protein, 14 aa, Homo sapiens
  CDR3 for alpha chain variable domain of TCR clone 114128 (TRAV13-1, TRAJ3)
CAAEGYSSASKIVF

SEQ ID NO: 228256 - protein, 14 aa, Homo sapiens
  CDR3 for beta chain variable domain of TCR clone 114128 (TRBV19, TRBJ2-5)
CASSSSGIQETQYF

SEQ ID NO: 228257 - protein, 15 aa, Homo sapiens
  CDR3 for alpha chain variable domain of TCR clone 114129 (TRAV12-1, TRAJ9)
CVVSFGDTGGFKTIF

SEQ ID NO: 228258 - protein, 15 aa, Homo sapiens
  CDR3 for beta chain variable domain of TCR clone 114129 (TRBV7-8, TRBJ2-1)
CASSLAGGLYNEQFF

SEQ ID NO: 228259 - protein, 12 aa, Homo sapiens
  CDR3 for alpha chain variable domain of TCR clone 114130 (TRAV12-3, TRAJ17)
CAMTLTGNKLTF

SEQ ID NO: 228260 - protein, 15 aa, Homo sapiens
  CDR3 for beta chain variable domain of TCR clone 114130 (TRBV20-1, TRBJ2-1)
CSARFSAGGLNEQFF

SEQ ID NO: 228261 - protein, 12 aa, Homo sapiens
  CDR3 for alpha chain variable domain of TCR clone 114131 (TRAV21, TRAJ31)
CVLAGNNARLMF

SEQ ID NO: 228262 - protein, 16 aa, Homo sapiens
  CDR3 for beta chain variable domain of TCR clone 114131 (TRBV27, TRBJ2-5)
CASSFGPVGTKETQYF

SEQ ID NO: 228263 - protein, 16 aa, Homo sapiens
  CDR3 for alpha chain variable domain of TCR clone 114132 (TRAV12-1, TRAJ12)
CVGNTLLMDSSYKLIF

SEQ ID NO: 228264 - protein, 13 aa, Homo sapiens
  CDR3 for beta chain variable domain of TCR clone 114132 (TRBV11-2, TRBJ2-1)
CASSSEAYNEQFF

SEQ ID NO: 228265 - protein, 15 aa, Homo sapiens
  CDR3 for alpha chain variable domain of TCR clone 114133 (TRAV17, TRAJ10)
CATVLLTGGGNKRTF

SEQ ID NO: 228266 - protein, 16 aa, Homo sapiens
  CDR3 for beta chain variable domain of TCR clone 114133 (TRBV7-9, TRBJ2-3)
CASSPWREVGTDTQYF

SEQ ID NO: 228267 - protein, 16 aa, Homo sapiens
  CDR3 for alpha chain variable domain of TCR clone 114134 (TRAV3, TRAJ37)
CAVRGKGSGHTGKLIF

SEQ ID NO: 228268 - protein, 15 aa, Homo sapiens
  CDR3 for beta chain variable domain of TCR clone 114134 (TRBV7-9, TRBJ1-6)
CASSSPGRGNSPLHF

SEQ ID NO: 228269 - protein, 13 aa, Homo sapiens
  CDR3 for alpha chain variable domain of TCR clone 114135 (TRAV21, TRAJ27)
CAARPGNAGKSTF

SEQ ID NO: 228270 - protein, 14 aa, Homo sapiens
  CDR3 for beta chain variable domain of TCR clone 114135 (TRBV7-2, TRBJ2-2)
CASRGQGAAGELFF

SEQ ID NO: 228271 - protein, 13 aa, Homo sapiens
  CDR3 for alpha chain variable domain of TCR clone 114136 (TRAV17, TRAJ9)
CATDYTGGFKTIF

SEQ ID NO: 228272 - protein, 14 aa, Homo sapiens
  CDR3 for beta chain variable domain of TCR clone 114136 (TRBV19, TRBJ2-5)
CASSMTGQQETHYF

SEQ ID NO: 228273 - protein, 14 aa, Homo sapiens
  CDR3 for alpha chain variable domain of TCR clone 114137 (TRAV13-1, TRAJ44)
CAAKATGTASKLTF

SEQ ID NO: 228274 - protein, 16 aa, Homo sapiens
  CDR3 for beta chain variable domain of TCR clone 114137 (TRBV4-1, TRBJ2-7)
CASSQEWTSGPLEQYF

SEQ ID NO: 228275 - protein, 14 aa, Homo sapiens
  CDR3 for alpha chain variable domain of TCR clone 114138 (TRAV8-6, TRAJ43)
CAVSDRVGNNDMRF

SEQ ID NO: 228276 - protein, 12 aa, Homo sapiens
  CDR3 for beta chain variable domain of TCR clone 114138 (TRBV11-2, TRBJ2-1)
CASSPGNNEQFF

SEQ ID NO: 228277 - protein, 13 aa, Homo sapiens
  CDR3 for alpha chain variable domain of TCR clone 114139 (TRAV12-3, TRAJ13)
CAMSSGGYQKVTF

SEQ ID NO: 228278 - protein, 13 aa, Homo sapiens
  CDR3 for beta chain variable domain of TCR clone 114139 (TRBV20-1, TRBJ1-1)
CSAPPGVHTEAFF

SEQ ID NO: 228279 - protein, 14 aa, Homo sapiens
  CDR3 for alpha chain variable domain of TCR clone 114140 (TRAV2, TRAJ9)
CAVEDRSGGFTTIF

SEQ ID NO: 228280 - protein, 15 aa, Homo sapiens
  CDR3 for beta chain variable domain of TCR clone 114140 (TRBV11-3, TRBJ2-3)
CASSAGTVVTNTQYF

SEQ ID NO: 228281 - protein, 12 aa, Homo sapiens
  CDR3 for alpha chain variable domain of TCR clone 114141 (TRAV26-2, TRAJ21)
CILKGNSNKFYF

SEQ ID NO: 228282 - protein, 14 aa, Homo sapiens
  CDR3 for beta chain variable domain of TCR clone 114141 (TRBV7-9, TRBJ1-1)
CASTPLQSYTEAFF

SEQ ID NO: 228283 - protein, 11 aa, Homo sapiens
  CDR3 for alpha chain variable domain of TCR clone 114142 (TRAV3, TRAJ21)
CAVGNFNKFYF

SEQ ID NO: 228284 - protein, 16 aa, Homo sapiens
  CDR3 for beta chain variable domain of TCR clone 114142 (TRBV12-4, TRBJ1-5)
CASRQPVEGSNQPQHF

SEQ ID NO: 228285 - protein, 15 aa, Homo sapiens
  CDR3 for alpha chain variable domain of TCR clone 114143 (TRAV3, TRAJ5)
CAVRDRKTGRRALTF

SEQ ID NO: 228286 - protein, 15 aa, Homo sapiens
  CDR3 for beta chain variable domain of TCR clone 114143 (TRBV4-3, TRBJ2-7)
CASSQDLGSSYEQYF

SEQ ID NO: 228287 - protein, 16 aa, Homo sapiens
  CDR3 for alpha chain variable domain of TCR clone 114144 (TRAV12-2, TRAJ10)
CAVNRVLTGGGNKLTF

SEQ ID NO: 228288 - protein, 12 aa, Homo sapiens
  CDR3 for beta chain variable domain of TCR clone 114144 (TRBV28, TRBJ2-7)
CASSLSSYEQYF

SEQ ID NO: 228289 - protein, 15 aa, Homo sapiens
  CDR3 for alpha chain variable domain of TCR clone 114145 (TRAV17, TRAJ22)
CATVAPSGSAKQLTF

SEQ ID NO: 228290 - protein, 16 aa, Homo sapiens
  CDR3 for beta chain variable domain of TCR clone 114145 (TRBV10-3, TRBJ2-7)
CAISADFADRPYEQYF

SEQ ID NO: 228291 - protein, 15 aa, Homo sapiens
  CDR3 for alpha chain variable domain of TCR clone 114146 (TRAV35, TRAJ40)
CAGQLWDSGTYKYIF

SEQ ID NO: 228292 - protein, 12 aa, Homo sapiens
  CDR3 for beta chain variable domain of TCR clone 114146 (TRBV7-8, TRBJ2-7)
CASSSAGYEQYF

SEQ ID NO: 228293 - protein, 13 aa, Homo sapiens
  CDR3 for alpha chain variable domain of TCR clone 114147 (TRAV8-3, TRAJ44)
CAVVPGTASKLTF

SEQ ID NO: 228294 - protein, 12 aa, Homo sapiens
  CDR3 for beta chain variable domain of TCR clone 114147 (TRBV7-8, TRBJ2-7)
CASSLGDREQYV

SEQ ID NO: 228295 - protein, 21 aa, Homo sapiens
  CDR3 for alpha chain variable domain of TCR clone 114148 (TRAV17, TRAJ57)
TASRAADTASYFCANPEKLVF

SEQ ID NO: 228296 - protein, 16 aa, Homo sapiens
  CDR3 for beta chain variable domain of TCR clone 114148 (TRBV11-2, TRBJ2-3)
CASSFQGRGTLDTQYF

SEQ ID NO: 228297 - protein, 14 aa, Homo sapiens
  CDR3 for alpha chain variable domain of TCR clone 114149 (TRAV4, TRAJ26)
CLVGPHNYGQNFVF

SEQ ID NO: 228298 - protein, 17 aa, Homo sapiens
  CDR3 for beta chain variable domain of TCR clone 114149 (TRBV24-1, TRBJ2-1)
CATSDVSTSGTYNEQFC

SEQ ID NO: 228299 - protein, 13 aa, Homo sapiens
  CDR3 for alpha chain variable domain of TCR clone 114150 (TRAV12-1, TRAJ43)
CVLSHHNNNDMRF

SEQ ID NO: 228300 - protein, 14 aa, Homo sapiens
  CDR3 for beta chain variable domain of TCR clone 114150 (TRBV5-5, TRBJ2-2)
CASSLLGDTGELFF

SEQ ID NO: 228301 - protein, 18 aa, Homo sapiens
  CDR3 for alpha chain variable domain of TCR clone 114151 (TRAV17, TRAJ45)
CATSLDLYSGGGADGLTF

SEQ ID NO: 228302 - protein, 14 aa, Homo sapiens
  CDR3 for beta chain variable domain of TCR clone 114151 (TRBV7-2, TRBJ2-7)
CASSPKTSFYEQYF

SEQ ID NO: 228303 - protein, 12 aa, Homo sapiens
  CDR3 for alpha chain variable domain of TCR clone 114152 (TRAV12-2, TRAJ42)
CAVGGSQGNLIL

SEQ ID NO: 228304 - protein, 16 aa, Homo sapiens
  CDR3 for beta chain variable domain of TCR clone 114152 (TRBV7-3, TRBJ2-2)
CASSLKRGTLSGELFF

SEQ ID NO: 228305 - protein, 11 aa, Homo sapiens
  CDR3 for alpha chain variable domain of TCR clone 114153 (TRAV21, TRAJ34)
CAVTNTDKLIF

SEQ ID NO: 228306 - protein, 14 aa, Homo sapiens
  CDR3 for beta chain variable domain of TCR clone 114153 (TRBV4-1, TRBJ1-5)
CASSQGPVNQPQHF

SEQ ID NO: 228307 - protein, 13 aa, Homo sapiens
  CDR3 for alpha chain variable domain of TCR clone 114154 (TRAV12-3, TRAJ43)
WAMIRPNNNDMRF

SEQ ID NO: 228308 - protein, 12 aa, Homo sapiens
  CDR3 for beta chain variable domain of TCR clone 114154 (TRBV11-2, TRBJ2-5)
CASSLGQETQYF

SEQ ID NO: 228309 - protein, 10 aa, Homo sapiens
  CDR3 for alpha chain variable domain of TCR clone 114155 (TRAV1-2, TRAJ31)
CAFFDARLMF

SEQ ID NO: 228310 - protein, 15 aa, Homo sapiens
  CDR3 for beta chain variable domain of TCR clone 114155 (TRBV6-3, TRBJ2-2)
CASSFLATLTGELFF

SEQ ID NO: 228311 - protein, 14 aa, Homo sapiens
  CDR3 for alpha chain variable domain of TCR clone 114156 (TRAV12-1, TRAJ9)
CVVNRRTGGFKTIF

SEQ ID NO: 228312 - protein, 13 aa, Homo sapiens
  CDR3 for beta chain variable domain of TCR clone 114156 (TRBV7-9, TRBJ1-2)
CASSLKQNYGYTF

SEQ ID NO: 228313 - protein, 11 aa, Homo sapiens
  CDR3 for alpha chain variable domain of TCR clone 114157 (TRAV39, TRAJ49)
CAVDISTQCYF

SEQ ID NO: 228314 - protein, 11 aa, Homo sapiens
  CDR3 for beta chain variable domain of TCR clone 114157 (TRBV7-8, TRBJ2-7)
CASSLSLEQYF

SEQ ID NO: 228315 - protein, 14 aa, Homo sapiens
  CDR3 for alpha chain variable domain of TCR clone 114158 (TRAV9-2, TRAJ39)
CALYIYNAGNMLTF

SEQ ID NO: 228316 - protein, 12 aa, Homo sapiens
  CDR3 for beta chain variable domain of TCR clone 114158 (TRBV28, TRBJ1-2)
CASLTLAEGYTF

SEQ ID NO: 228317 - protein, 15 aa, Homo sapiens
  CDR3 for alpha chain variable domain of TCR clone 114159 (TRAV16, TRAJ4)
CALEDPSGGYNKRIF

SEQ ID NO: 228318 - protein, 13 aa, Homo sapiens
  CDR3 for beta chain variable domain of TCR clone 114159 (TRBV7-3, TRBJ2-7)
CASSQAGGYEQYF

SEQ ID NO: 228319 - protein, 15 aa, Homo sapiens
  CDR3 for alpha chain variable domain of TCR clone 114160 (TRAV8-6, TRAJ10)
CAVSDQAGGGNKLTF

SEQ ID NO: 228320 - protein, 15 aa, Homo sapiens
  CDR3 for beta chain variable domain of TCR clone 114160 (TRBV3-1, TRBJ2-5)
CASSANLGGQETQYF

SEQ ID NO: 228321 - protein, 14 aa, Homo sapiens
  CDR3 for alpha chain variable domain of TCR clone 114161 (TRAV12-2, TRAJ24)
CAVTPADSWGKLQF

SEQ ID NO: 228322 - protein, 16 aa, Homo sapiens
  CDR3 for beta chain variable domain of TCR clone 114161 (TRBV6-4, TRBJ2-3)
APSEGGRAWGADTQYF

SEQ ID NO: 228323 - protein, 12 aa, Homo sapiens
  CDR3 for alpha chain variable domain of TCR clone 114162 (TRAV16, TRAJ10)
CPRTGGGNKLTF

SEQ ID NO: 228324 - protein, 12 aa, Homo sapiens
  CDR3 for beta chain variable domain of TCR clone 114162 (TRBV11-3, TRBJ1-1)
CASSHRQGEAFF

SEQ ID NO: 228325 - protein, 22 aa, Homo sapiens
  CDR3 for alpha chain variable domain of TCR clone 114163 (TRAV27, TRAJ38)
CAARRNAGNNHIQNPDPPVYQL

SEQ ID NO: 228326 - protein, 13 aa, Homo sapiens
  CDR3 for beta chain variable domain of TCR clone 114163 (TRBV12-5, TRBJ2-3)
CASGDRQSDTQYF

SEQ ID NO: 228327 - protein, 12 aa, Homo sapiens
  CDR3 for alpha chain variable domain of TCR clone 114164 (TRAV26-1, TRAJ13)
CIVSRGYQKVTF

SEQ ID NO: 228328 - protein, 16 aa, Homo sapiens
  CDR3 for beta chain variable domain of TCR clone 114164 (TRBV27, TRBJ2-1)
CASSLSKGVGLDEQFF

SEQ ID NO: 228329 - protein, 17 aa, Homo sapiens
  CDR3 for alpha chain variable domain of TCR clone 114165 (TRAV8-2, TRAJ17)
CVVSDRRFKAAGNKLTF

SEQ ID NO: 228330 - protein, 18 aa, Homo sapiens
  CDR3 for beta chain variable domain of TCR clone 114165 (TRBV7-9, TRBJ2-7)
CAGSLTTSGSRTWYEQYF

SEQ ID NO: 228331 - protein, 14 aa, Homo sapiens
  CDR3 for alpha chain variable domain of TCR clone 114166 (TRAV8-4, TRAJ5)
CAVSTDTGRRALTF

SEQ ID NO: 228332 - protein, 15 aa, Homo sapiens
  CDR3 for beta chain variable domain of TCR clone 114166 (TRBV28, TRBJ2-1)
CASSIIAGGRSEQFF

SEQ ID NO: 228333 - protein, 12 aa, Homo sapiens
  CDR3 for alpha chain variable domain of TCR clone 114167 (TRAV16, TRAJ26)
CALRSYGQNFVF

SEQ ID NO: 228334 - protein, 15 aa, Homo sapiens
  CDR3 for beta chain variable domain of TCR clone 114167 (TRBV20-1, TRBJ2-7)
CSARDRVSGMDEQYF

SEQ ID NO: 228335 - protein, 16 aa, Homo sapiens
  CDR3 for alpha chain variable domain of TCR clone 114168 (TRAV38-1, TRAJ32)
CAFMKGGGGAKNKLIF

SEQ ID NO: 228336 - protein, 13 aa, Homo sapiens
  CDR3 for beta chain variable domain of TCR clone 114168 (TRBV20-1, TRBJ2-5)
CSAREAFQETQYF

SEQ ID NO: 228337 - protein, 16 aa, Homo sapiens
  CDR3 for alpha chain variable domain of TCR clone 114169 (TRAV12-3, TRAJ53)
CAMSPGSGGSNYKLTF

SEQ ID NO: 228338 - protein, 16 aa, Homo sapiens
  CDR3 for beta chain variable domain of TCR clone 114169 (TRBV9, TRBJ2-1)
CASSVGGGGNYNEQFF

SEQ ID NO: 228339 - protein, 18 aa, Homo sapiens
  CDR3 for alpha chain variable domain of TCR clone 114170 (TRAV21, TRAJ52)
CAVRPSPAGGISYGKLTF

SEQ ID NO: 228340 - protein, 13 aa, Homo sapiens
  CDR3 for beta chain variable domain of TCR clone 114170 (TRBV20-1, TRBJ1-1)
CSARVGGNTEAFF

SEQ ID NO: 228341 - protein, 13 aa, Homo sapiens
  CDR3 for alpha chain variable domain of TCR clone 114171 (TRAV2, TRAJ15)
CAVASQAGTALIF

SEQ ID NO: 228342 - protein, 15 aa, Homo sapiens
  CDR3 for beta chain variable domain of TCR clone 114171 (TRBV20-1, TRBJ2-7)
CSARDRVSGMDEHYF

SEQ ID NO: 228343 - protein, 16 aa, Homo sapiens
  CDR3 for alpha chain variable domain of TCR clone 114172 (TRAV23/DV6, TRAJ9)
CAASIGGNTGGFKNIF

SEQ ID NO: 228344 - protein, 13 aa, Homo sapiens
  CDR3 for beta chain variable domain of TCR clone 114172 (TRBV7-9, TRBJ1-2)
CASSLKQNYGYTF

SEQ ID NO: 228345 - protein, 14 aa, Homo sapiens
  CDR3 for alpha chain variable domain of TCR clone 114173 (TRAV29/DV5, TRAJ36)
CAARRKTGANNLFF

SEQ ID NO: 228346 - protein, 13 aa, Homo sapiens
  CDR3 for beta chain variable domain of TCR clone 114173 (TRBV25-1, TRBJ2-5)
CASSPGGVETQYF

SEQ ID NO: 228347 - protein, 15 aa, Homo sapiens
  CDR3 for alpha chain variable domain of TCR clone 114174 (TRAV13-1, TRAJ32)
CAASIYGGATNKLIF

SEQ ID NO: 228348 - protein, 12 aa, Homo sapiens
  CDR3 for beta chain variable domain of TCR clone 114174 (TRBV7-6, TRBJ2-3)
CASRTGTDTQYF

SEQ ID NO: 228349 - protein, 16 aa, Homo sapiens
  CDR3 for alpha chain variable domain of TCR clone 114175 (TRAV1-2, TRAJ10)
CAVRGVLTGGGNKLTF

SEQ ID NO: 228350 - protein, 15 aa, Homo sapiens
  CDR3 for beta chain variable domain of TCR clone 114175 (TRBV7-6, TRBJ2-1)
CASSPGQGPYNEQFF

SEQ ID NO: 228351 - protein, 15 aa, Homo sapiens
  CDR3 for alpha chain variable domain of TCR clone 114176 (TRAV13-1, TRAJ57)
CTASNTQGGSEKLVF

SEQ ID NO: 228352 - protein, 16 aa, Homo sapiens
  CDR3 for beta chain variable domain of TCR clone 114176 (TRBV19, TRBJ2-1)
CASSKAGPSSYNEQFF

SEQ ID NO: 228353 - protein, 14 aa, Homo sapiens
  CDR3 for alpha chain variable domain of TCR clone 114177 (TRAV26-1, TRAJ38)
CIADNAGNNRKLIW

SEQ ID NO: 228354 - protein, 17 aa, Homo sapiens
  CDR3 for beta chain variable domain of TCR clone 114177 (TRBV7-9, TRBJ2-3)
CASSPTVAGDLTETQYF

SEQ ID NO: 228355 - protein, 11 aa, Homo sapiens
  CDR3 for alpha chain variable domain of TCR clone 114178 (TRAV21, TRAJ34)
CAVTNTDKLIF

SEQ ID NO: 228356 - protein, 13 aa, Homo sapiens
  CDR3 for beta chain variable domain of TCR clone 114178 (TRBV7-2, TRBJ2-4)
CASSREHANIQYF

SEQ ID NO: 228357 - protein, 16 aa, Homo sapiens
  CDR3 for alpha chain variable domain of TCR clone 114179 (TRAV3, TRAJ37)
CAVRPHGSGNSGKLIF

SEQ ID NO: 228358 - protein, 16 aa, Homo sapiens
  CDR3 for beta chain variable domain of TCR clone 114179 (TRBV9, TRBJ1-2)
CASSVEEKVSPYGYTF

SEQ ID NO: 228359 - protein, 13 aa, Homo sapiens
  CDR3 for alpha chain variable domain of TCR clone 114180 (TRAV1-1, TRAJ23)
CAVVANQGGKLIF

SEQ ID NO: 228360 - protein, 15 aa, Homo sapiens
  CDR3 for beta chain variable domain of TCR clone 114180 (TRBV7-2, TRBJ2-1)
CASSFDPGRRNEQFF

SEQ ID NO: 228361 - protein, 13 aa, Homo sapiens
  CDR3 for alpha chain variable domain of TCR clone 114181 (TRAV3, TRAJ21)
CAVREPDFNKFYF

SEQ ID NO: 228362 - protein, 14 aa, Homo sapiens
  CDR3 for beta chain variable domain of TCR clone 114181 (TRBV7-2, TRBJ1-6)
CASSLQGANSPLHF

SEQ ID NO: 228363 - protein, 13 aa, Homo sapiens
  CDR3 for alpha chain variable domain of TCR clone 114182 (TRAV35, TRAJ21)
CAGQLSNFNKFYL

SEQ ID NO: 228364 - protein, 16 aa, Homo sapiens
  CDR3 for beta chain variable domain of TCR clone 114182 (TRBV4-3, TRBJ2-2)
CASSHLQGSGTGELFF

SEQ ID NO: 228365 - protein, 15 aa, Homo sapiens
  CDR3 for alpha chain variable domain of TCR clone 114183 (TRAV13-1, TRAJ44)
FAASRNTGTASKLTF

SEQ ID NO: 228366 - protein, 14 aa, Homo sapiens
  CDR3 for beta chain variable domain of TCR clone 114183 (TRBV11-2, TRBJ1-2)
CASSLYRGNYGYTF

SEQ ID NO: 228367 - protein, 14 aa, Homo sapiens
  CDR3 for alpha chain variable domain of TCR clone 114184 (TRAV12-3, TRAJ33)
CAMSAGDSNYQLIW

SEQ ID NO: 228368 - protein, 13 aa, Homo sapiens
  CDR3 for beta chain variable domain of TCR clone 114184 (TRBV7-9, TRBJ1-2)
CASSLKQNYGYTF

SEQ ID NO: 228369 - protein, 17 aa, Homo sapiens
  CDR3 for alpha chain variable domain of TCR clone 114185 (TRAV3, TRAJ42)
CAVRDRDYGGSQGNLIF

SEQ ID NO: 228370 - protein, 15 aa, Homo sapiens
  CDR3 for beta chain variable domain of TCR clone 114185 (TRBV6-6, TRBJ2-7)
GASSYSYGGSYEQYF

SEQ ID NO: 228371 - protein, 14 aa, Homo sapiens
  CDR3 for alpha chain variable domain of TCR clone 114186 (TRAV8-3, TRAJ4)
CAVGAAGGYNKLIF

SEQ ID NO: 228372 - protein, 15 aa, Homo sapiens
  CDR3 for beta chain variable domain of TCR clone 114186 (TRBV12-4, TRBJ2-1)
CASSGSGGTLGEQFF

SEQ ID NO: 228373 - protein, 16 aa, Homo sapiens
  CDR3 for alpha chain variable domain of TCR clone 114187 (TRAV12-2, TRAJ6)
CAAPLAGSGGSYIPTF

SEQ ID NO: 228374 - protein, 10 aa, Homo sapiens
  CDR3 for beta chain variable domain of TCR clone 114187 (TRBV28, TRBJ1-2)
CASSSDRAVC

SEQ ID NO: 228375 - protein, 15 aa, Homo sapiens
  CDR3 for alpha chain variable domain of TCR clone 114188 (TRAV27, TRAJ50)
CAGVGRGTSYDKVIF

SEQ ID NO: 228376 - protein, 17 aa, Homo sapiens
  CDR3 for beta chain variable domain of TCR clone 114188 (TRBV4-1, TRBJ2-3)
CASSQDPAGGPLDTQYF

SEQ ID NO: 228377 - protein, 16 aa, Homo sapiens
  CDR3 for alpha chain variable domain of TCR clone 114189 (TRAV3, TRAJ37)
CAVRPHGSGNTGKLIS

SEQ ID NO: 228378 - protein, 14 aa, Homo sapiens
  CDR3 for beta chain variable domain of TCR clone 114189 (TRBV18, TRBJ2-5)
CASSPGVSQETQYF

SEQ ID NO: 228379 - protein, 12 aa, Homo sapiens
  CDR3 for alpha chain variable domain of TCR clone 114190 (TRAV8-3, TRAJ41)
CAVALAGYALNF

SEQ ID NO: 228380 - protein, 16 aa, Homo sapiens
  CDR3 for beta chain variable domain of TCR clone 114190 (TRBV27, TRBJ2-7)
CASSSERRDSAYEQYF

SEQ ID NO: 228381 - protein, 16 aa, Homo sapiens
  CDR3 for alpha chain variable domain of TCR clone 114191 (TRAV30, TRAJ24)
CGTEIVYADSWGEFQF

SEQ ID NO: 228382 - protein, 14 aa, Homo sapiens
  CDR3 for beta chain variable domain of TCR clone 114191 (TRBV12-5, TRBJ2-5)
CASGSRTHQETQYF

SEQ ID NO: 228383 - protein, 10 aa, Homo sapiens
  CDR3 for alpha chain variable domain of TCR clone 114192 (TRAV8-3, TRAJ43)
CAVALADMRL

SEQ ID NO: 228384 - protein, 14 aa, Homo sapiens
  CDR3 for beta chain variable domain of TCR clone 114192 (TRBV4-2, TRBJ2-1)
CASGLDRAYNEQFF

SEQ ID NO: 228385 - protein, 19 aa, Homo sapiens
  CDR3 for alpha chain variable domain of TCR clone 114193 (TRAV21, TRAJ45)
CAVEAPRWDQEEVLTDSPF

SEQ ID NO: 228386 - protein, 12 aa, Homo sapiens
  CDR3 for beta chain variable domain of TCR clone 114193 (TRBV29-1, TRBJ1-3)
CSTRDSGNTIYF

SEQ ID NO: 228387 - protein, 18 aa, Homo sapiens
  CDR3 for alpha chain variable domain of TCR clone 114194 (TRAV21, TRAJ52)
CAVRPSPAGGTSYGKLTF

SEQ ID NO: 228388 - protein, 13 aa, Homo sapiens
  CDR3 for beta chain variable domain of TCR clone 114194 (TRBV7-3, TRBJ2-5)
CASSFRGGETQYF

SEQ ID NO: 228389 - protein, 13 aa, Homo sapiens
  CDR3 for alpha chain variable domain of TCR clone 114195 (TRAV3, TRAJ21)
CAGREPDFNKFYF

SEQ ID NO: 228390 - protein, 17 aa, Homo sapiens
  CDR3 for beta chain variable domain of TCR clone 114195 (TRBV7-8, TRBJ2-6)
CASSAGTGGAGANVLTF

SEQ ID NO: 228391 - protein, 15 aa, Homo sapiens
  CDR3 for alpha chain variable domain of TCR clone 114196 (TRAV5, TRAJ33)
CAEAPAMDSNYQLIW

SEQ ID NO: 228392 - protein, 18 aa, Homo sapiens
  CDR3 for beta chain variable domain of TCR clone 114196 (TRBV11-2, TRBJ2-3)
CASSLGGASRGAPNTQYF

SEQ ID NO: 228393 - protein, 15 aa, Homo sapiens
  CDR3 for alpha chain variable domain of TCR clone 114197 (TRAV3, TRAJ13)
CDVRDIAGGYQKVTF

SEQ ID NO: 228394 - protein, 13 aa, Homo sapiens
  CDR3 for beta chain variable domain of TCR clone 114197 (TRBV2, TRBJ2-2)
CASSKKNTGELFF

SEQ ID NO: 228395 - protein, 13 aa, Homo sapiens
  CDR3 for alpha chain variable domain of TCR clone 114198 (TRAV13-1, TRAJ39)
CAASIRAGNMLTF

SEQ ID NO: 228396 - protein, 13 aa, Homo sapiens
  CDR3 for beta chain variable domain of TCR clone 114198 (TRBV11-2, TRBJ1-3)
CASSLEPVNTIYF

SEQ ID NO: 228397 - protein, 10 aa, Homo sapiens
  CDR3 for alpha chain variable domain of TCR clone 114199 (TRAV26-1, TRAJ40)
CIAGTYKYIF

SEQ ID NO: 228398 - protein, 12 aa, Homo sapiens
  CDR3 for beta chain variable domain of TCR clone 114199 (TRBV11-2, TRBJ2-4)
CASSSASGSEYF

SEQ ID NO: 228399 - protein, 15 aa, Homo sapiens
  CDR3 for alpha chain variable domain of TCR clone 114200 (TRAV30, TRAJ32)
CGTGILGGATNKLIF

SEQ ID NO: 228400 - protein, 13 aa, Homo sapiens
  CDR3 for beta chain variable domain of TCR clone 114200 (TRBV6-3, TRBJ2-7)
CASSFSGGYEQYF

SEQ ID NO: 228401 - protein, 17 aa, Homo sapiens
  CDR3 for alpha chain variable domain of TCR clone 114201 (TRAV38-2/DV8, TRAJ38)
CAYRSARGAGNNRKLIW

SEQ ID NO: 228402 - protein, 15 aa, Homo sapiens
  CDR3 for beta chain variable domain of TCR clone 114201 (TRBV7-9, TRBJ1-6)
CASSSPGRGNSPLHF

SEQ ID NO: 228403 - protein, 17 aa, Homo sapiens
  CDR3 for alpha chain variable domain of TCR clone 114202 (TRAV12-3, TRAJ6)
CAMSARGGAGGSYISTF

SEQ ID NO: 228404 - protein, 12 aa, Homo sapiens
  CDR3 for beta chain variable domain of TCR clone 114202 (TRBV12-4, TRBJ2-3)
CASSTLPDTQYF

SEQ ID NO: 228405 - protein, 13 aa, Homo sapiens
  CDR3 for alpha chain variable domain of TCR clone 114203 (TRAV12-3, TRAJ35)
CAMAIGFGNVLHC

SEQ ID NO: 228406 - protein, 15 aa, Homo sapiens
  CDR3 for beta chain variable domain of TCR clone 114203 (TRBV20-1, TRBJ2-1)
CSARGSRTYYNEQFF

SEQ ID NO: 228407 - protein, 12 aa, Homo sapiens
  CDR3 for alpha chain variable domain of TCR clone 114204 (TRAV27, TRAJ33)
CAGDGSNYQLIW

SEQ ID NO: 228408 - protein, 14 aa, Homo sapiens
  CDR3 for beta chain variable domain of TCR clone 114204 (TRBV19, TRBJ2-1)
CASPTFVLSGEQFF

SEQ ID NO: 228409 - protein, 18 aa, Homo sapiens
  CDR3 for alpha chain variable domain of TCR clone 114205 (TRAV21, TRAJ52)
CAVRPSPAGGTSYGKLTF

SEQ ID NO: 228410 - protein, 14 aa, Homo sapiens
  CDR3 for beta chain variable domain of TCR clone 114205 (TRBV7-6, TRBJ2-7)
CASSFRQGADEQYF

SEQ ID NO: 228411 - protein, 12 aa, Homo sapiens
  CDR3 for alpha chain variable domain of TCR clone 114206 (TRAV30, TRAJ43)
CGTEERGNDMRF

SEQ ID NO: 228412 - protein, 19 aa, Homo sapiens
  CDR3 for beta chain variable domain of TCR clone 114206 (TRBV25-1, TRBJ2-2)
CAILVYRVDRGRKTGELFF

SEQ ID NO: 228413 - protein, 11 aa, Homo sapiens
  CDR3 for alpha chain variable domain of TCR clone 114207 (TRAV8-3, TRAJ20)
CAVAQENKLSF

SEQ ID NO: 228414 - protein, 16 aa, Homo sapiens
  CDR3 for beta chain variable domain of TCR clone 114207 (TRBV12-5, TRBJ2-5)
CASGPRTSGNQETQYF

SEQ ID NO: 228415 - protein, 14 aa, Homo sapiens
  CDR3 for alpha chain variable domain of TCR clone 114208 (TRAV23/DV6, TRAJ4)
CAANLSGGYNTLIF

SEQ ID NO: 228416 - protein, 17 aa, Homo sapiens
  CDR3 for beta chain variable domain of TCR clone 114208 (TRBV4-1, TRBJ1-3)
CASSPQRGIRFGNTIYF

SEQ ID NO: 228417 - protein, 14 aa, Homo sapiens
  CDR3 for alpha chain variable domain of TCR clone 114209 (TRAV14/DV4, TRAJ26)
CAMREGTYGQNFVF

SEQ ID NO: 228418 - protein, 16 aa, Homo sapiens
  CDR3 for beta chain variable domain of TCR clone 114209 (TRBV9, TRBJ1-2)
CASSVEEKVAPYGYTF

SEQ ID NO: 228419 - protein, 15 aa, Homo sapiens
  CDR3 for alpha chain variable domain of TCR clone 114210 (TRAV21, TRAJ13)
CAVRPTSGGYQKVTF

SEQ ID NO: 228420 - protein, 18 aa, Homo sapiens
  CDR3 for beta chain variable domain of TCR clone 114210 (TRBV11-3, TRBJ2-1)
CASSSYPGGRDSYNEQFF

SEQ ID NO: 228421 - protein, 13 aa, Homo sapiens
  CDR3 for alpha chain variable domain of TCR clone 114211 (TRAV17, TRAJ22)
CAHHSGSARQLAF

SEQ ID NO: 228422 - protein, 16 aa, Homo sapiens
  CDR3 for beta chain variable domain of TCR clone 114211 (TRBV4-1, TRBJ1-2)
CASSQDAGQVLYGYTF

SEQ ID NO: 228423 - protein, 11 aa, Homo sapiens
  CDR3 for alpha chain variable domain of TCR clone 114212 (TRAV17, TRAJ9)
CATTGGFKTIF

SEQ ID NO: 228424 - protein, 17 aa, Homo sapiens
  CDR3 for beta chain variable domain of TCR clone 114212 (TRBV7-9, TRBJ2-1)
CASSLVASYPSYNEQFF

SEQ ID NO: 228425 - protein, 16 aa, Homo sapiens
  CDR3 for alpha chain variable domain of TCR clone 114213 (TRAV3, TRAJ37)
CAVRPHGSGNTGKLIF

SEQ ID NO: 228426 - protein, 14 aa, Homo sapiens
  CDR3 for beta chain variable domain of TCR clone 114213 (TRBV25-1, TRBJ1-1)
CAGTHLGGNTEAFF

SEQ ID NO: 228427 - protein, 15 aa, Homo sapiens
  CDR3 for alpha chain variable domain of TCR clone 114214 (TRAV8-2, TRAJ40)
CVVLGTTSGTYKYIF

SEQ ID NO: 228428 - protein, 13 aa, Homo sapiens
  CDR3 for beta chain variable domain of TCR clone 114214 (TRBV7-2, TRBJ2-1)
CASSSQTSGEQFF

SEQ ID NO: 228429 - protein, 19 aa, Homo sapiens
  CDR3 for alpha chain variable domain of TCR clone 114215 (TRAV12-3, TRAJ30)
CAMSAGTRSSLEKGHDFIF

SEQ ID NO: 228430 - protein, 18 aa, Homo sapiens
  CDR3 for beta chain variable domain of TCR clone 114215 (TRBV3-1, TRBJ1-2)
CASSQDVIGWNGDYGYTF

SEQ ID NO: 228431 - protein, 14 aa, Homo sapiens
  CDR3 for alpha chain variable domain of TCR clone 114216 (TRAV1-2, TRAJ16)
CAVNRFSDGQKLLF

SEQ ID NO: 228432 - protein, 16 aa, Homo sapiens
  CDR3 for beta chain variable domain of TCR clone 114216 (TRBV19, TRBJ2-7)
CASSMDRGRSSSTSGR

SEQ ID NO: 228433 - protein, 15 aa, Homo sapiens
  CDR3 for alpha chain variable domain of TCR clone 114217 (TRAV21, TRAJ53)
CATLNSGGSNYKLTF

SEQ ID NO: 228434 - protein, 13 aa, Homo sapiens
  CDR3 for beta chain variable domain of TCR clone 114217 (TRBV7-6, TRBJ1-3)
CASSSQQGNTIYF

SEQ ID NO: 228435 - protein, 13 aa, Homo sapiens
  CDR3 for alpha chain variable domain of TCR clone 114218 (TRAV13-1, TRAJ4)
CAASIGGYNKLIF

SEQ ID NO: 228436 - protein, 16 aa, Homo sapiens
  CDR3 for beta chain variable domain of TCR clone 114218 (TRBV20-1, TRBJ2-1)
CSATGLAGSYSDEQFF

SEQ ID NO: 228437 - protein, 14 aa, Homo sapiens
  CDR3 for alpha chain variable domain of TCR clone 114219 (TRAV12-2, TRAJ45)
CAVNIGGGADGLTF

SEQ ID NO: 228438 - protein, 14 aa, Homo sapiens
  CDR3 for beta chain variable domain of TCR clone 114219 (TRBV6-1, TRBJ1-3)
CASVQGGGGNTIYF

SEQ ID NO: 228439 - protein, 23 aa, Homo sapiens
  CDR3 for alpha chain variable domain of TCR clone 114220 (TRAV8-3, TRAJ6)
CAVVPHQEEATYLHLEEEPALLF

SEQ ID NO: 228440 - protein, 14 aa, Homo sapiens
  CDR3 for beta chain variable domain of TCR clone 114220 (TRBV4-1, TRBJ2-2)
CASSHAVNTGELFF

SEQ ID NO: 228441 - protein, 15 aa, Homo sapiens
  CDR3 for alpha chain variable domain of TCR clone 114221 (TRAV9-2, TRAJ39)
CALSDRNNAGNMLTF

SEQ ID NO: 228442 - protein, 15 aa, Homo sapiens
  CDR3 for beta chain variable domain of TCR clone 114221 (TRBV10-3, TRBJ2-2)
CAISPGRTNTGELFL

SEQ ID NO: 228443 - protein, 12 aa, Homo sapiens
  CDR3 for alpha chain variable domain of TCR clone 114222 (TRAV12-3, TRAJ17)
CAMTLTGNKLTF

SEQ ID NO: 228444 - protein, 15 aa, Homo sapiens
  CDR3 for beta chain variable domain of TCR clone 114222 (TRBV20-1, TRBJ2-7)
CSARDRVAGKDEQYF

SEQ ID NO: 228445 - protein, 14 aa, Homo sapiens
  CDR3 for alpha chain variable domain of TCR clone 114223 (TRAV16, TRAJ33)
CALSAMDSNYQLIL

SEQ ID NO: 228446 - protein, 17 aa, Homo sapiens
  CDR3 for beta chain variable domain of TCR clone 114223 (TRBV25-1, TRBJ2-7)
CASSDARVVFSSYEQYF

SEQ ID NO: 228447 - protein, 18 aa, Homo sapiens
  CDR3 for alpha chain variable domain of TCR clone 114224 (TRAV12-3, TRAJ52)
CAMSVGGAGGTSYGKLTF

SEQ ID NO: 228448 - protein, 15 aa, Homo sapiens
  CDR3 for beta chain variable domain of TCR clone 114224 (TRBV28, TRBJ2-1)
CASSLSGQGFDEQFF

SEQ ID NO: 228449 - protein, 21 aa, Homo sapiens
  CDR3 for alpha chain variable domain of TCR clone 114225 (TRAV12-1, TRAJ32)
SSVIQPPTSMNYGGATNKLIF

SEQ ID NO: 228450 - protein, 15 aa, Homo sapiens
  CDR3 for beta chain variable domain of TCR clone 114225 (TRBV7-9, TRBJ2-2)
CASGPLDTFPGELFL

SEQ ID NO: 228451 - protein, 14 aa, Homo sapiens
  CDR3 for alpha chain variable domain of TCR clone 114226 (TRAV14/DV4, TRAJ54)
CAIREAPGAQKLVF

SEQ ID NO: 228452 - protein, 15 aa, Homo sapiens
  CDR3 for beta chain variable domain of TCR clone 114226 (TRBV5-1, TRBJ2-7)
CASSLNGGPAREQYF

SEQ ID NO: 228453 - protein, 19 aa, Homo sapiens
  CDR3 for alpha chain variable domain of TCR clone 114227 (TRAV26-1, TRAJ28)
CIVRVAHAYSGAGSYQLTF

SEQ ID NO: 228454 - protein, 12 aa, Homo sapiens
  CDR3 for beta chain variable domain of TCR clone 114227 (TRBV11-2, TRBJ2-1)
CASSPGNNEQFF

SEQ ID NO: 228455 - protein, 12 aa, Homo sapiens
  CDR3 for alpha chain variable domain of TCR clone 114228 (TRAV12-3, TRAJ5)
CAMDTGRRALTF

SEQ ID NO: 228456 - protein, 13 aa, Homo sapiens
  CDR3 for beta chain variable domain of TCR clone 114228 (TRBV7-7, TRBJ2-2)
RASSLTSAGELFF

SEQ ID NO: 228457 - protein, 12 aa, Homo sapiens
  CDR3 for alpha chain variable domain of TCR clone 114229 (TRAV27, TRAJ42)
CAGGGSQGNLIF

SEQ ID NO: 228458 - protein, 14 aa, Homo sapiens
  CDR3 for beta chain variable domain of TCR clone 114229 (TRBV7-8, TRBJ2-7)
CASSVGQGAYEQYF

SEQ ID NO: 228459 - protein, 13 aa, Homo sapiens
  CDR3 for alpha chain variable domain of TCR clone 114230 (TRAV3, TRAJ27)
CAVRPLGAGKSTF

SEQ ID NO: 228460 - protein, 13 aa, Homo sapiens
  CDR3 for beta chain variable domain of TCR clone 114230 (TRBV7-9, TRBJ2-3)
CDSSPGSTDTQYF

SEQ ID NO: 228461 - protein, 13 aa, Homo sapiens
  CDR3 for alpha chain variable domain of TCR clone 114231 (TRAV8-6, TRAJ34)
CAVSDQGTDKLIF

SEQ ID NO: 228462 - protein, 14 aa, Homo sapiens
  CDR3 for beta chain variable domain of TCR clone 114231 (TRBV12-4, TRBJ1-1)
CASTWTGHDTEASF

SEQ ID NO: 228463 - protein, 18 aa, Homo sapiens
  CDR3 for alpha chain variable domain of TCR clone 114232 (TRAV12-2, )
CAVEDIQNPDPAVYQLRD

SEQ ID NO: 228464 - protein, 16 aa, Homo sapiens
  CDR3 for beta chain variable domain of TCR clone 114232 (TRBV4-2, TRBJ1-1)
CASSQAGFGMNTEAFF

SEQ ID NO: 228465 - protein, 11 aa, Homo sapiens
  CDR3 for alpha chain variable domain of TCR clone 114233 (TRAV23/DV6, TRAJ58)
CAARLLRGETS

SEQ ID NO: 228466 - protein, 14 aa, Homo sapiens
  CDR3 for beta chain variable domain of TCR clone 114233 (TRBV4-1, TRBJ2-7)
CASSPVAGGDEQYF

SEQ ID NO: 228467 - protein, 14 aa, Homo sapiens
  CDR3 for alpha chain variable domain of TCR clone 114234 (TRAV13-1, TRAJ44)
CAAKATGTASKLTF

SEQ ID NO: 228468 - protein, 12 aa, Homo sapiens
  CDR3 for beta chain variable domain of TCR clone 114234 (TRBV11-2, TRBJ2-4)
CASSSASGSEYF

SEQ ID NO: 228469 - protein, 13 aa, Homo sapiens
  CDR3 for alpha chain variable domain of TCR clone 114235 (TRAV12-1, TRAJ38)
CVVNAGNNRKLIW

SEQ ID NO: 228470 - protein, 13 aa, Homo sapiens
  CDR3 for beta chain variable domain of TCR clone 114235 (TRBV7-2, TRBJ1-4)
CASSLAGLEKLFF

SEQ ID NO: 228471 - protein, 14 aa, Homo sapiens
  CDR3 for alpha chain variable domain of TCR clone 114236 (TRAV8-4, TRAJ40)
CAVIPTSGTYKSIF

SEQ ID NO: 228472 - protein, 15 aa, Homo sapiens
  CDR3 for beta chain variable domain of TCR clone 114236 (TRBV7-2, TRBJ2-1)
CASTSASGDYNEQFF

SEQ ID NO: 228473 - protein, 14 aa, Homo sapiens
  CDR3 for alpha chain variable domain of TCR clone 114237 (TRAV8-4, TRAJ13)
CAVTLSGGYQKVTF

SEQ ID NO: 228474 - protein, 16 aa, Homo sapiens
  CDR3 for beta chain variable domain of TCR clone 114237 (TRBV7-3, TRBJ2-2)
CASSLKRGTLSGELFF

SEQ ID NO: 228475 - protein, 13 aa, Homo sapiens
  CDR3 for alpha chain variable domain of TCR clone 114238 (TRAV14/DV4, TRAJ20)
FAMRESNDYKLSF

SEQ ID NO: 228476 - protein, 15 aa, Homo sapiens
  CDR3 for beta chain variable domain of TCR clone 114238 (TRBV7-9, TRBJ1-1)
CASSRPGTANTEAFF

SEQ ID NO: 228477 - protein, 12 aa, Homo sapiens
  CDR3 for alpha chain variable domain of TCR clone 114239 (TRAV8-3, TRAJ26)
CAGANYGQNFVF

SEQ ID NO: 228478 - protein, 13 aa, Homo sapiens
  CDR3 for beta chain variable domain of TCR clone 114239 (TRBV20-1, TRBJ2-5)
CSARGDYQETQYF

SEQ ID NO: 228479 - protein, 13 aa, Homo sapiens
  CDR3 for alpha chain variable domain of TCR clone 114240 (TRAV12-2, TRAJ22)
CAVKWGSARQLTF

SEQ ID NO: 228480 - protein, 14 aa, Homo sapiens
  CDR3 for beta chain variable domain of TCR clone 114240 (TRBV11-3, TRBJ2-2)
CASSRDTSTGELFF

SEQ ID NO: 228481 - protein, 15 aa, Homo sapiens
  CDR3 for alpha chain variable domain of TCR clone 114241 (TRAV3, TRAJ5)
CAVRDRKTGRRALTF

SEQ ID NO: 228482 - protein, 15 aa, Homo sapiens
  CDR3 for beta chain variable domain of TCR clone 114241 (TRBV7-8, TRBJ2-1)
CASSLADSLYNEQVF

SEQ ID NO: 228483 - protein, 13 aa, Homo sapiens
  CDR3 for alpha chain variable domain of TCR clone 114242 (TRAV20, TRAJ21)
CAVEGYNFNKFYF

SEQ ID NO: 228484 - protein, 14 aa, Homo sapiens
  CDR3 for beta chain variable domain of TCR clone 114242 (TRBV3-1, TRBJ2-5)
CASSQGPDQETQYC

SEQ ID NO: 228485 - protein, 15 aa, Homo sapiens
  CDR3 for alpha chain variable domain of TCR clone 114243 (TRAV17, TRAJ52)
CGTEAGGTSYGKLTF

SEQ ID NO: 228486 - protein, 14 aa, Homo sapiens
  CDR3 for beta chain variable domain of TCR clone 114243 (TRBV28, TRBJ1-5)
CASSLGVLVKPQHF

SEQ ID NO: 228487 - protein, 20 aa, Homo sapiens
  CDR3 for alpha chain variable domain of TCR clone 114244 (TRAV12-1, TRAJ42)
SLVIQPPTSVKGGSQGNLIF

SEQ ID NO: 228488 - protein, 18 aa, Homo sapiens
  CDR3 for beta chain variable domain of TCR clone 114244 (TRBV11-2, TRBJ2-3)
CASSLGGASRGAPNTQYF

SEQ ID NO: 228489 - protein, 15 aa, Homo sapiens
  CDR3 for alpha chain variable domain of TCR clone 114245 (TRAV26-1, TRAJ11)
CIVRASNSGYSTLTF

SEQ ID NO: 228490 - protein, 14 aa, Homo sapiens
  CDR3 for beta chain variable domain of TCR clone 114245 (TRBV18, TRBJ2-7)
CASSPRGGAYEQYF

SEQ ID NO: 228491 - protein, 11 aa, Homo sapiens
  CDR3 for alpha chain variable domain of TCR clone 114246 (TRAV21, TRAJ41)
CAVRSGHALNF

SEQ ID NO: 228492 - protein, 13 aa, Homo sapiens
  CDR3 for beta chain variable domain of TCR clone 114246 (TRBV7-9, TRBJ1-2)
CASSLKQNYGYTF

SEQ ID NO: 228493 - protein, 11 aa, Homo sapiens
  CDR3 for alpha chain variable domain of TCR clone 114247 (TRAV2, TRAJ13)
CASGGYQKVTL

SEQ ID NO: 228494 - protein, 13 aa, Homo sapiens
  CDR3 for beta chain variable domain of TCR clone 114247 (TRBV24-1, TRBJ2-3)
CATSTGGTDTQYF

SEQ ID NO: 228495 - protein, 14 aa, Homo sapiens
  CDR3 for alpha chain variable domain of TCR clone 114248 (TRAV8-4, TRAJ13)
CAVTLSGGYQKVTF

SEQ ID NO: 228496 - protein, 14 aa, Homo sapiens
  CDR3 for beta chain variable domain of TCR clone 114248 (TRBV7-2, TRBJ1-2)
CASSQTGSTYGYPF

SEQ ID NO: 228497 - protein, 12 aa, Homo sapiens
  CDR3 for alpha chain variable domain of TCR clone 114249 (TRAV12-3, TRAJ29)
CAAREGNTPLVF

SEQ ID NO: 228498 - protein, 17 aa, Homo sapiens
  CDR3 for beta chain variable domain of TCR clone 114249 (TRBV18, TRBJ2-1)
CASSLLAAGAGDNEQFF

SEQ ID NO: 228499 - protein, 15 aa, Homo sapiens
  CDR3 for alpha chain variable domain of TCR clone 114250 (TRAV3, TRAJ3)
CAVRDRDSSASKIIF

SEQ ID NO: 228500 - protein, 18 aa, Homo sapiens
  CDR3 for beta chain variable domain of TCR clone 114250 (TRBV25-1, TRBJ1-2)
GASSGLQNGQGLIFGYTF

SEQ ID NO: 228501 - protein, 13 aa, Homo sapiens
  CDR3 for alpha chain variable domain of TCR clone 114251 (TRAV12-2, TRAJ53)
CAGVGGSNYKLTF

SEQ ID NO: 228502 - protein, 16 aa, Homo sapiens
  CDR3 for beta chain variable domain of TCR clone 114251 (TRBV12-4, TRBJ2-3)
CASSFGTGGISDTQYF

SEQ ID NO: 228503 - protein, 16 aa, Homo sapiens
  CDR3 for alpha chain variable domain of TCR clone 114252 (TRAV8-6, TRAJ28)
CAVTSKPGAGSYQLTF

SEQ ID NO: 228504 - protein, 14 aa, Homo sapiens
  CDR3 for beta chain variable domain of TCR clone 114252 (TRBV12-5, TRBJ2-5)
CASGSRTHQETQYF

SEQ ID NO: 228505 - protein, 14 aa, Homo sapiens
  CDR3 for alpha chain variable domain of TCR clone 114253 (TRAV16, TRAJ32)
CALKSGGATNKLIF

SEQ ID NO: 228506 - protein, 17 aa, Homo sapiens
  CDR3 for beta chain variable domain of TCR clone 114253 (TRBV20-1, TRBJ2-1)
CSASSSGPAGSYNEQFF

SEQ ID NO: 228507 - protein, 12 aa, Homo sapiens
  CDR3 for alpha chain variable domain of TCR clone 114254 (TRAV12-2, TRAJ45)
CAVTGSADGLTF

SEQ ID NO: 228508 - protein, 14 aa, Homo sapiens
  CDR3 for beta chain variable domain of TCR clone 114254 (TRBV5-5, TRBJ2-7)
CASSLGQGTYEQYF

SEQ ID NO: 228509 - protein, 14 aa, Homo sapiens
  CDR3 for alpha chain variable domain of TCR clone 114255 (TRAV8-1, TRAJ5)
CAVRTDTGRRALPF

SEQ ID NO: 228510 - protein, 14 aa, Homo sapiens
  CDR3 for beta chain variable domain of TCR clone 114255 (TRBV7-8, TRBJ2-3)
CASSFPDGQDTQYF

SEQ ID NO: 228511 - protein, 14 aa, Homo sapiens
  CDR3 for alpha chain variable domain of TCR clone 114256 (TRAV12-2, TRAJ13)
CAVKKTGGYQKVTF

SEQ ID NO: 228512 - protein, 15 aa, Homo sapiens
  CDR3 for beta chain variable domain of TCR clone 114256 (TRBV27, TRBJ2-1)
CASSNGGGSSSEQSF

SEQ ID NO: 228513 - protein, 14 aa, Homo sapiens
  CDR3 for alpha chain variable domain of TCR clone 114257 (TRAV8-3, TRAJ54)
CAVSEVLGAQKLVF

SEQ ID NO: 228514 - protein, 13 aa, Homo sapiens
  CDR3 for beta chain variable domain of TCR clone 114257 (TRBV27, TRBJ2-7)
CASSFVSSYEQYF

SEQ ID NO: 228515 - protein, 17 aa, Homo sapiens
  CDR3 for alpha chain variable domain of TCR clone 114258 (TRAV2, TRAJ36)
CAVEDRGNWCKQPLLWD

SEQ ID NO: 228516 - protein, 14 aa, Homo sapiens
  CDR3 for beta chain variable domain of TCR clone 114258 (TRBV7-9, TRBJ2-5)
CASSLDTAQETQYF

SEQ ID NO: 228517 - protein, 13 aa, Homo sapiens
  CDR3 for alpha chain variable domain of TCR clone 114259 (TRAV12-2, TRAJ11)
CAVPNSGYSTLTF

SEQ ID NO: 228518 - protein, 17 aa, Homo sapiens
  CDR3 for beta chain variable domain of TCR clone 114259 (TRBV3-1, TRBJ2-2)
CASSQFRDKVDTGELFF

SEQ ID NO: 228519 - protein, 15 aa, Homo sapiens
  CDR3 for alpha chain variable domain of TCR clone 114260 (TRAV3, TRAJ24)
CAVRDKMTAGGNCRL

SEQ ID NO: 228520 - protein, 14 aa, Homo sapiens
  CDR3 for beta chain variable domain of TCR clone 114260 (TRBV7-2, TRBJ2-3)
RASSQTGSSYTQYF

SEQ ID NO: 228521 - protein, 18 aa, Homo sapiens
  CDR3 for alpha chain variable domain of TCR clone 114261 (TRAV9-2, TRAJ52)
CALSRHNAGGTSYGKLTF

SEQ ID NO: 228522 - protein, 14 aa, Homo sapiens
  CDR3 for beta chain variable domain of TCR clone 114261 (TRBV19, TRBJ2-1)
CASPTFVLSGEQFF

SEQ ID NO: 228523 - protein, 17 aa, Homo sapiens
  CDR3 for alpha chain variable domain of TCR clone 114262 (TRAV3, TRAJ38)
CAVRDCLNAGNNRKLIW

SEQ ID NO: 228524 - protein, 14 aa, Homo sapiens
  CDR3 for beta chain variable domain of TCR clone 114262 (TRBV5-5, TRBJ1-5)
CASSGQGVDQPQHC

SEQ ID NO: 228525 - protein, 12 aa, Homo sapiens
  CDR3 for alpha chain variable domain of TCR clone 114263 (TRAV20, TRAJ54)
CAVQEGAQKLVF

SEQ ID NO: 228526 - protein, 17 aa, Homo sapiens
  CDR3 for beta chain variable domain of TCR clone 114263 (TRBV13, TRBJ2-3)
CASSLSRVAGRRNTQYF

SEQ ID NO: 228527 - protein, 15 aa, Homo sapiens
  CDR3 for alpha chain variable domain of TCR clone 114264 (TRAV8-3, TRAJ41)
CAVGSNSNSGYALNF

SEQ ID NO: 228528 - protein, 16 aa, Homo sapiens
  CDR3 for beta chain variable domain of TCR clone 114264 (TRBV25-1, TRBJ2-1)
CQQCVRTGAGVYEQFF

SEQ ID NO: 228529 - protein, 15 aa, Homo sapiens
  CDR3 for alpha chain variable domain of TCR clone 114265 (TRAV21, TRAJ38)
CVVRQDAGNNRKLIW

SEQ ID NO: 228530 - protein, 16 aa, Homo sapiens
  CDR3 for beta chain variable domain of TCR clone 114265 (TRBV4-2, TRBJ1-1)
CASRPLDGGGDTEAFF

SEQ ID NO: 228531 - protein, 20 aa, Homo sapiens
  CDR3 for alpha chain variable domain of TCR clone 114266 (TRAV25, TRAJ21)
TATQTTDVGTYPLSFNKFYF

SEQ ID NO: 228532 - protein, 16 aa, Homo sapiens
  CDR3 for beta chain variable domain of TCR clone 114266 (TRBV19, TRBJ2-1)
CASSIETGSPYNEQFF

SEQ ID NO: 228533 - protein, 16 aa, Homo sapiens
  CDR3 for alpha chain variable domain of TCR clone 114267 (TRAV3, TRAJ37)
WAVRGKGSGNTGKLIF

SEQ ID NO: 228534 - protein, 13 aa, Homo sapiens
  CDR3 for beta chain variable domain of TCR clone 114267 (TRBV14, TRBJ2-7)
CASSQDRRYEQYF

SEQ ID NO: 228535 - protein, 13 aa, Homo sapiens
  CDR3 for alpha chain variable domain of TCR clone 114268 (TRAV26-1, TRAJ30)
CIVNMNRDDKIIF

SEQ ID NO: 228536 - protein, 16 aa, Homo sapiens
  CDR3 for beta chain variable domain of TCR clone 114268 (TRBV16, TRBJ2-7)
CDSSRPAGGSSYEQYF

SEQ ID NO: 228537 - protein, 15 aa, Homo sapiens
  CDR3 for alpha chain variable domain of TCR clone 114269 (TRAV3, TRAJ9)
CAVRDSNTGGFKTIF

SEQ ID NO: 228538 - protein, 16 aa, Homo sapiens
  CDR3 for beta chain variable domain of TCR clone 114269 (TRBV15, TRBJ2-5)
CATSPTPGQGMETQYF

SEQ ID NO: 228539 - protein, 11 aa, Homo sapiens
  CDR3 for alpha chain variable domain of TCR clone 114270 (TRAV12-1, TRAJ21)
CVVINFNKFYF

SEQ ID NO: 228540 - protein, 14 aa, Homo sapiens
  CDR3 for beta chain variable domain of TCR clone 114270 (TRBV15, TRBJ1-5)
CATSREQSNQPQHF

SEQ ID NO: 228541 - protein, 13 aa, Homo sapiens
  CDR3 for alpha chain variable domain of TCR clone 114271 (TRAV26-2, TRAJ37)
CIRGSRNTGKLIF

SEQ ID NO: 228542 - protein, 16 aa, Homo sapiens
  CDR3 for beta chain variable domain of TCR clone 114271 (TRBV7-2, TRBJ2-5)
CASSPGGARRGETQYF

SEQ ID NO: 228543 - protein, 13 aa, Homo sapiens
  CDR3 for alpha chain variable domain of TCR clone 114272 (TRAV16, TRAJ11)
CALTQSGYSTITF

SEQ ID NO: 228544 - protein, 14 aa, Homo sapiens
  CDR3 for beta chain variable domain of TCR clone 114272 (TRBV19, TRBJ2-7)
CASSTTRSSYEQYF

SEQ ID NO: 228545 - protein, 15 aa, Homo sapiens
  CDR3 for alpha chain variable domain of TCR clone 114273 (TRAV16, TRAJ48)
CALFISNFGNEKLTF

SEQ ID NO: 228546 - protein, 15 aa, Homo sapiens
  CDR3 for beta chain variable domain of TCR clone 114273 (TRBV10-3, TRBJ2-1)
CAISDVQDRAYEQFF

SEQ ID NO: 228547 - protein, 14 aa, Homo sapiens
  CDR3 for alpha chain variable domain of TCR clone 114274 (TRAV14/DV4, TRAJ15)
CAMRRDQAGTALIF

SEQ ID NO: 228548 - protein, 12 aa, Homo sapiens
  CDR3 for beta chain variable domain of TCR clone 114274 (TRBV4-1, TRBJ2-3)
CASSQGTDTQYF

SEQ ID NO: 228549 - protein, 14 aa, Homo sapiens
  CDR3 for alpha chain variable domain of TCR clone 114275 (TRAV12-3, TRAJ10)
SHLPLTGGGNKLTF

SEQ ID NO: 228550 - protein, 15 aa, Homo sapiens
  CDR3 for beta chain variable domain of TCR clone 114275 (TRBV7-2, TRBJ1-2)
CASSLAPDRGLGYTF

SEQ ID NO: 228551 - protein, 13 aa, Homo sapiens
  CDR3 for alpha chain variable domain of TCR clone 114276 (TRAV8-3, TRAJ48)
YAVVPFGNEKLTF

SEQ ID NO: 228552 - protein, 15 aa, Homo sapiens
  CDR3 for beta chain variable domain of TCR clone 114276 (TRBV11-2, TRBJ2-1)
CASSSPSTRYNEQFF

SEQ ID NO: 228553 - protein, 17 aa, Homo sapiens
  CDR3 for alpha chain variable domain of TCR clone 114277 (TRAV3, TRAJ42)
CAVRDRDYGGSQGNLIF

SEQ ID NO: 228554 - protein, 15 aa, Homo sapiens
  CDR3 for beta chain variable domain of TCR clone 114277 (TRBV5-5, TRBJ1-6)
CASSLVIVGNSPLHF

SEQ ID NO: 228555 - protein, 16 aa, Homo sapiens
  CDR3 for alpha chain variable domain of TCR clone 114278 (TRAV20, TRAJ28)
CAVRDPSGAGSYQLTF

SEQ ID NO: 228556 - protein, 16 aa, Homo sapiens
  CDR3 for beta chain variable domain of TCR clone 114278 (TRBV13, TRBJ2-2)
CASSPRTGEHTGELFF

SEQ ID NO: 228557 - protein, 12 aa, Homo sapiens
  CDR3 for alpha chain variable domain of TCR clone 114279 (TRAV12-3, TRAJ17)
CAMTLTGNKLTL

SEQ ID NO: 228558 - protein, 13 aa, Homo sapiens
  CDR3 for beta chain variable domain of TCR clone 114279 (TRBV7-3, TRBJ1-1)
CASSQDWGAEAFF

SEQ ID NO: 228559 - protein, 16 aa, Homo sapiens
  CDR3 for alpha chain variable domain of TCR clone 114280 (TRAV30, TRAJ24)
CGTEIVDADSWGRFQF

SEQ ID NO: 228560 - protein, 17 aa, Homo sapiens
  CDR3 for beta chain variable domain of TCR clone 114280 (TRBV20-1, TRBJ2-2)
CSASGSGQGGLTGELFF

SEQ ID NO: 228561 - protein, 13 aa, Homo sapiens
  CDR3 for alpha chain variable domain of TCR clone 114281 (TRAV17, TRAJ5)
CATMDTGRRALTF

SEQ ID NO: 228562 - protein, 15 aa, Homo sapiens
  CDR3 for beta chain variable domain of TCR clone 114281 (TRBV20-1, TRBJ2-5)
CSATRTSGSVETQYF

SEQ ID NO: 228563 - protein, 14 aa, Homo sapiens
  CDR3 for alpha chain variable domain of TCR clone 114282 (TRAV1-2, TRAJ16)
CAVNRFSDGQKLLF

SEQ ID NO: 228564 - protein, 12 aa, Homo sapiens
  CDR3 for beta chain variable domain of TCR clone 114282 (TRBV19, TRBJ1-1)
CASSIGTEEAFF

SEQ ID NO: 228565 - protein, 12 aa, Homo sapiens
  CDR3 for alpha chain variable domain of TCR clone 114283 (TRAV8-3, TRAJ20)
CAVGGGDYKLIF

SEQ ID NO: 228566 - protein, 14 aa, Homo sapiens
  CDR3 for beta chain variable domain of TCR clone 114283 (TRBV5-1, TRBJ2-7)
CASSRGESLYEQYF

SEQ ID NO: 228567 - protein, 16 aa, Homo sapiens
  CDR3 for alpha chain variable domain of TCR clone 114284 (TRAV3, TRAJ10)
CAVRDMRAGGGNKLTF

SEQ ID NO: 228568 - protein, 15 aa, Homo sapiens
  CDR3 for beta chain variable domain of TCR clone 114284 (TRBV11-2, TRBJ1-6)
CASTGFGTAVSPLHV

SEQ ID NO: 228569 - protein, 12 aa, Homo sapiens
  CDR3 for alpha chain variable domain of TCR clone 114285 (TRAV27, TRAJ9)
CAGESGGVKTIF

SEQ ID NO: 228570 - protein, 18 aa, Homo sapiens
  CDR3 for beta chain variable domain of TCR clone 114285 (TRBV10-2, TRBJ2-2)
CISAPAVHRQADAGELFF

SEQ ID NO: 228571 - protein, 15 aa, Homo sapiens
  CDR3 for alpha chain variable domain of TCR clone 114286 (TRAV8-3, TRAJ11)
CAVGLLNSGYSTLTF

SEQ ID NO: 228572 - protein, 18 aa, Homo sapiens
  CDR3 for beta chain variable domain of TCR clone 114286 (TRBV4-1, TRBJ1-5)
CASSQDPRGQGLNQPQHF

SEQ ID NO: 228573 - protein, 13 aa, Homo sapiens
  CDR3 for alpha chain variable domain of TCR clone 114287 (TRAV8-2, TRAJ49)
CVVTPHTGNQFYF

SEQ ID NO: 228574 - protein, 15 aa, Homo sapiens
  CDR3 for beta chain variable domain of TCR clone 114287 (TRBV11-2, TRBJ2-1)
CASSLTSGGYNEQFF

SEQ ID NO: 228575 - protein, 20 aa, Homo sapiens
  CDR3 for alpha chain variable domain of TCR clone 114288 (TRAV3, TRAJ7)
CAVREEEREQQTRFWEVEPS

SEQ ID NO: 228576 - protein, 12 aa, Homo sapiens
  CDR3 for beta chain variable domain of TCR clone 114288 (TRBV7-8, TRBJ2-7)
CASSLGDREQYF

SEQ ID NO: 228577 - protein, 11 aa, Homo sapiens
  CDR3 for alpha chain variable domain of TCR clone 114289 (TRAV30, TRAJ24)
WMLTAGGKFQF

SEQ ID NO: 228578 - protein, 12 aa, Homo sapiens
  CDR3 for beta chain variable domain of TCR clone 114289 (TRBV11-2, TRBJ2-1)
CASSPGNNEQFF

SEQ ID NO: 228579 - protein, 15 aa, Homo sapiens
  CDR3 for alpha chain variable domain of TCR clone 114290 (TRAV29/DV5, TRAJ24)
CAASGATDSWGKFQF

SEQ ID NO: 228580 - protein, 12 aa, Homo sapiens
  CDR3 for beta chain variable domain of TCR clone 114290 (TRBV11-2, TRBJ2-2)
CASSLTTGELFF

SEQ ID NO: 228581 - protein, 12 aa, Homo sapiens
  CDR3 for alpha chain variable domain of TCR clone 114291 (TRAV8-6, TRAJ4)
CAVSDHPNKLIF

SEQ ID NO: 228582 - protein, 16 aa, Homo sapiens
  CDR3 for beta chain variable domain of TCR clone 114291 (TRBV7-3, TRBJ2-2)
CASSLKRGTLSGELFF

SEQ ID NO: 228583 - protein, 14 aa, Homo sapiens
  CDR3 for alpha chain variable domain of TCR clone 114292 (TRAV23/DV6, TRAJ27)
CAASKSTNAGKSTF

SEQ ID NO: 228584 - protein, 14 aa, Homo sapiens
  CDR3 for beta chain variable domain of TCR clone 114292 (TRBV18, TRBJ2-7)
CASSPRGGAYEQYF

SEQ ID NO: 228585 - protein, 15 aa, Homo sapiens
  CDR3 for alpha chain variable domain of TCR clone 114293 (TRAV13-1, TRAJ32)
CAASIYGGATNKPIF

SEQ ID NO: 228586 - protein, 14 aa, Homo sapiens
  CDR3 for beta chain variable domain of TCR clone 114293 (TRBV7-9, TRBJ2-1)
CASSLASGSNEQFF

SEQ ID NO: 228587 - protein, 11 aa, Homo sapiens
  CDR3 for alpha chain variable domain of TCR clone 114294 (TRAV1-2, TRAJ20)
CAVANDYKLSF

SEQ ID NO: 228588 - protein, 16 aa, Homo sapiens
  CDR3 for beta chain variable domain of TCR clone 114294 (TRBV4-3, TRBJ1-6)
CASSQDPGVYNSTLHF

SEQ ID NO: 228589 - protein, 11 aa, Homo sapiens
  CDR3 for alpha chain variable domain of TCR clone 114295 (TRAV4, TRAJ28)
NSGAGRYQLTF

SEQ ID NO: 228590 - protein, 13 aa, Homo sapiens
  CDR3 for beta chain variable domain of TCR clone 114295 (TRBV12-4, TRBJ2-6)
CASSGTGANVLTF

SEQ ID NO: 228591 - protein, 14 aa, Homo sapiens
  CDR3 for alpha chain variable domain of TCR clone 114296 (TRAV26-1, TRAJ34)
CIVRVAYSTDKLIF

SEQ ID NO: 228592 - protein, 13 aa, Homo sapiens
  CDR3 for beta chain variable domain of TCR clone 114296 (TRBV7-3, TRBJ2-1)
CASSLDSYNEQFF

SEQ ID NO: 228593 - protein, 14 aa, Homo sapiens
  CDR3 for alpha chain variable domain of TCR clone 114297 (TRAV13-1, TRAJ40)
CAASMTSGTYKYIF

SEQ ID NO: 228594 - protein, 15 aa, Homo sapiens
  CDR3 for beta chain variable domain of TCR clone 114297 (TRBV7-3, TRBJ2-1)
CASSPTGGGEVDQFF

SEQ ID NO: 228595 - protein, 13 aa, Homo sapiens
  CDR3 for alpha chain variable domain of TCR clone 114298 (TRAV27, TRAJ49)
CAPRPYTGNQFYF

SEQ ID NO: 228596 - protein, 16 aa, Homo sapiens
  CDR3 for beta chain variable domain of TCR clone 114298 (TRBV7-3, TRBJ2-2)
CASSLKRGTLSGELFF

SEQ ID NO: 228597 - protein, 11 aa, Homo sapiens
  CDR3 for alpha chain variable domain of TCR clone 114299 (TRAV2, TRAJ33)
CAVDSNYQLIW

SEQ ID NO: 228598 - protein, 12 aa, Homo sapiens
  CDR3 for beta chain variable domain of TCR clone 114299 (TRBV29-1, TRBJ2-3)
CSVTGGADTQYF

SEQ ID NO: 228599 - protein, 16 aa, Homo sapiens
  CDR3 for alpha chain variable domain of TCR clone 114300 (TRAV30, TRAJ24)
CGTEIVDAGSWGKFPF

SEQ ID NO: 228600 - protein, 14 aa, Homo sapiens
  CDR3 for beta chain variable domain of TCR clone 114300 (TRBV12-5, TRBJ2-5)
CASGSRTHQETQYF

SEQ ID NO: 228601 - protein, 13 aa, Homo sapiens
  CDR3 for alpha chain variable domain of TCR clone 114301 (TRAV2, TRAJ26)
CAVVRNYGQNFVF

SEQ ID NO: 228602 - protein, 15 aa, Homo sapiens
  CDR3 for beta chain variable domain of TCR clone 114301 (TRBV27, TRBJ2-1)
CASSNGGGSSNEQFF

SEQ ID NO: 228603 - protein, 13 aa, Homo sapiens
  CDR3 for alpha chain variable domain of TCR clone 114302 (TRAV13-1, TRAJ5)
CAASDTGRRALTF

SEQ ID NO: 228604 - protein, 17 aa, Homo sapiens
  CDR3 for beta chain variable domain of TCR clone 114302 (TRBV7-3, TRBJ2-3)
CASSLMKRMRGADTQYF

SEQ ID NO: 228605 - protein, 13 aa, Homo sapiens
  CDR3 for alpha chain variable domain of TCR clone 114303 (TRAV1-2, TRAJ31)
CAVRPNNNAILMF

SEQ ID NO: 228606 - protein, 14 aa, Homo sapiens
  CDR3 for beta chain variable domain of TCR clone 114303 (TRBV11-2, TRBJ2-1)
CASSLSGPYNEQFF

SEQ ID NO: 228607 - protein, 16 aa, Homo sapiens
  CDR3 for alpha chain variable domain of TCR clone 114304 (TRAV12-2, TRAJ10)
CAVNRVLTGGGNKLTF

SEQ ID NO: 228608 - protein, 14 aa, Homo sapiens
  CDR3 for beta chain variable domain of TCR clone 114304 (TRBV5-5, TRBJ2-2)
CASSLLGDTGELFF

SEQ ID NO: 228609 - protein, 15 aa, Homo sapiens
  CDR3 for alpha chain variable domain of TCR clone 114305 (TRAV38-1, TRAJ57)
CAFMDSQGGSEKLVF

SEQ ID NO: 228610 - protein, 16 aa, Homo sapiens
  CDR3 for beta chain variable domain of TCR clone 114305 (TRBV10-3, TRBJ2-1)
CAIPGGGRGDYNEQFF

SEQ ID NO: 228611 - protein, 12 aa, Homo sapiens
  CDR3 for alpha chain variable domain of TCR clone 114306 (TRAV12-3, TRAJ17)
CAMTLTGNKLTF

SEQ ID NO: 228612 - protein, 18 aa, Homo sapiens
  CDR3 for beta chain variable domain of TCR clone 114306 (TRBV12-4, TRBJ2-4)
CASSRTGAVDVAKNIQYF

SEQ ID NO: 228613 - protein, 10 aa, Homo sapiens
  CDR3 for alpha chain variable domain of TCR clone 114307 (TRAV21, TRAJ34)
CAADTGKLIF

SEQ ID NO: 228614 - protein, 16 aa, Homo sapiens
  CDR3 for beta chain variable domain of TCR clone 114307 (TRBV6-5, TRBJ2-2)
CASSHVSRAQPGELFF

SEQ ID NO: 228615 - protein, 14 aa, Homo sapiens
  CDR3 for alpha chain variable domain of TCR clone 114308 (TRAV2, TRAJ9)
CAVEDRSGGLKTIF

SEQ ID NO: 228616 - protein, 15 aa, Homo sapiens
  CDR3 for beta chain variable domain of TCR clone 114308 (TRBV27, TRBJ1-6)
CASSFDRGLGSPLHF

SEQ ID NO: 228617 - protein, 11 aa, Homo sapiens
  CDR3 for alpha chain variable domain of TCR clone 114309 (TRAV17, TRAJ43)
CATPRSNDMCF

SEQ ID NO: 228618 - protein, 15 aa, Homo sapiens
  CDR3 for beta chain variable domain of TCR clone 114309 (TRBV11-2, TRBJ2-1)
CASSLGTSGLNEQFF

SEQ ID NO: 228619 - protein, 14 aa, Homo sapiens
  CDR3 for alpha chain variable domain of TCR clone 114310 (TRAV1-2, TRAJ16)
CAVNRFSDGQKLLF

SEQ ID NO: 228620 - protein, 13 aa, Homo sapiens
  CDR3 for beta chain variable domain of TCR clone 114310 (TRBV4-1, TRBJ2-5)
CASSLTRGETQYF

SEQ ID NO: 228621 - protein, 11 aa, Homo sapiens
  CDR3 for alpha chain variable domain of TCR clone 114311 (TRAV12-2, TRAJ31)
CAILNNARLTF

SEQ ID NO: 228622 - protein, 13 aa, Homo sapiens
  CDR3 for beta chain variable domain of TCR clone 114311 (TRBV20-1, TRBJ1-1)
CSARLGQGTEAFF

SEQ ID NO: 228623 - protein, 15 aa, Homo sapiens
  CDR3 for alpha chain variable domain of TCR clone 114312 (TRAV12-2, TRAJ53)
CAVNGGGGSNYKLTF

SEQ ID NO: 228624 - protein, 15 aa, Homo sapiens
  CDR3 for beta chain variable domain of TCR clone 114312 (TRBV2, TRBJ2-7)
CASSEGLARSYEQYF

SEQ ID NO: 228625 - protein, 16 aa, Homo sapiens
  CDR3 for alpha chain variable domain of TCR clone 114313 (TRAV3, TRAJ37)
RAVRGKGSGNTGKLIF

SEQ ID NO: 228626 - protein, 13 aa, Homo sapiens
  CDR3 for beta chain variable domain of TCR clone 114313 (TRBV4-2, TRBJ1-1)
CASSQAGNTEAFF

SEQ ID NO: 228627 - protein, 13 aa, Homo sapiens
  CDR3 for alpha chain variable domain of TCR clone 114314 (TRAV16, TRAJ29)
RALWRRGNTPLVF

SEQ ID NO: 228628 - protein, 15 aa, Homo sapiens
  CDR3 for beta chain variable domain of TCR clone 114314 (TRBV4-1, TRBJ2-3)
CASSRGQGIPDTQYF

SEQ ID NO: 228629 - protein, 12 aa, Homo sapiens
  CDR3 for alpha chain variable domain of TCR clone 114315 (TRAV13-1, TRAJ53)
AASEGSNYKLTF

SEQ ID NO: 228630 - protein, 12 aa, Homo sapiens
  CDR3 for beta chain variable domain of TCR clone 114315 (TRBV18, TRBJ1-4)
CASSPSREKLFF

SEQ ID NO: 228631 - protein, 15 aa, Homo sapiens
  CDR3 for alpha chain variable domain of TCR clone 114316 (TRAV26-1, TRAJ29)
CIVRVEGSGNTPLVF

SEQ ID NO: 228632 - protein, 13 aa, Homo sapiens
  CDR3 for beta chain variable domain of TCR clone 114316 (TRBV18, TRBJ1-1)
CASSGGRNTEAFF

SEQ ID NO: 228633 - protein, 20 aa, Homo sapiens
  CDR3 for alpha chain variable domain of TCR clone 114317 (TRAV12-3, TRAJ41)
SLFIRDSQPSDPATPEALNF

SEQ ID NO: 228634 - protein, 15 aa, Homo sapiens
  CDR3 for beta chain variable domain of TCR clone 114317 (TRBV5-1, TRBJ2-7)
CASSLDLTSSYEQYF

SEQ ID NO: 228635 - protein, 11 aa, Homo sapiens
  CDR3 for alpha chain variable domain of TCR clone 114318 (TRAV23/DV6, TRAJ58)
CAARLLRGETS

SEQ ID NO: 228636 - protein, 15 aa, Homo sapiens
  CDR3 for beta chain variable domain of TCR clone 114318 (TRBV2, TRBJ2-1)
CASSELAGSYNEQFF

SEQ ID NO: 228637 - protein, 17 aa, Homo sapiens
  CDR3 for alpha chain variable domain of TCR clone 114319 (TRAV13-1, TRAJ28)
CAASPPYSGAGSYQLTF

SEQ ID NO: 228638 - protein, 19 aa, Homo sapiens
  CDR3 for beta chain variable domain of TCR clone 114319 (TRBV25-1, TRBJ2-2)
CAILVYRVDRGRKTGELSF

SEQ ID NO: 228639 - protein, 13 aa, Homo sapiens
  CDR3 for alpha chain variable domain of TCR clone 114320 (TRAV36/DV7, TRAJ37)
CAGFSSNTGKLIF

SEQ ID NO: 228640 - protein, 15 aa, Homo sapiens
  CDR3 for beta chain variable domain of TCR clone 114320 (TRBV5-1, TRBJ2-2)
CASSSQGGNTGELFF

SEQ ID NO: 228641 - protein, 11 aa, Homo sapiens
  CDR3 for alpha chain variable domain of TCR clone 114321 (TRAV12-1, TRAJ34)
CVVNKGRELIF

SEQ ID NO: 228642 - protein, 12 aa, Homo sapiens
  CDR3 for beta chain variable domain of TCR clone 114321 (TRBV2, TRBJ2-1)
CAYVPPGNEQFF

SEQ ID NO: 228643 - protein, 16 aa, Homo sapiens
  CDR3 for alpha chain variable domain of TCR clone 114322 (TRAV30, TRAJ24)
CGTEIVDADSWGKFQF

SEQ ID NO: 228644 - protein, 15 aa, Homo sapiens
  CDR3 for beta chain variable domain of TCR clone 114322 (TRBV12-4, TRBJ2-2)
CASSPNDSGAGELFF

SEQ ID NO: 228645 - protein, 16 aa, Homo sapiens
  CDR3 for alpha chain variable domain of TCR clone 114323 (TRAV30, TRAJ24)
CGTEIVGADSWGKFKF

SEQ ID NO: 228646 - protein, 14 aa, Homo sapiens
  CDR3 for beta chain variable domain of TCR clone 114323 (TRBV12-5, TRBJ2-5)
CASGSRTHQETQYF

SEQ ID NO: 228647 - protein, 16 aa, Homo sapiens
  CDR3 for alpha chain variable domain of TCR clone 114324 (TRAV12-2, TRAJ56)
CAVRRVDTGANSKLTL

SEQ ID NO: 228648 - protein, 11 aa, Homo sapiens
  CDR3 for beta chain variable domain of TCR clone 114324 (TRBV3-1, TRBJ2-7)
CASSQVREQYF

SEQ ID NO: 228649 - protein, 13 aa, Homo sapiens
  CDR3 for alpha chain variable domain of TCR clone 114325 (TRAV27, TRAJ41)
CAGEGNSGYALNF

SEQ ID NO: 228650 - protein, 14 aa, Homo sapiens
  CDR3 for beta chain variable domain of TCR clone 114325 (TRBV7-2, TRBJ1-1)
CASSFLTGTTVAFF

SEQ ID NO: 228651 - protein, 12 aa, Homo sapiens
  CDR3 for alpha chain variable domain of TCR clone 114326 (TRAV20, TRAJ37)
CWVSSNTGKLIF

SEQ ID NO: 228652 - protein, 11 aa, Homo sapiens
  CDR3 for beta chain variable domain of TCR clone 114326 (TRBV12-4, TRBJ2-3)
CASTATDTQYF

SEQ ID NO: 228653 - protein, 17 aa, Homo sapiens
  CDR3 for alpha chain variable domain of TCR clone 114327 (TRAV3, TRAJ6)
CAVRDGPRAGGSYIPTF

SEQ ID NO: 228654 - protein, 14 aa, Homo sapiens
  CDR3 for beta chain variable domain of TCR clone 114327 (TRBV7-8, TRBJ2-3)
CASSFKSSTDTQYF

SEQ ID NO: 228655 - protein, 16 aa, Homo sapiens
  CDR3 for alpha chain variable domain of TCR clone 114328 (TRAV3, TRAJ10)
CAVRDMRAGGGNKLTF

SEQ ID NO: 228656 - protein, 19 aa, Homo sapiens
  CDR3 for beta chain variable domain of TCR clone 114328 (TRBV6-3, TRBJ1-2)
CASSYSRGRTGPPNYGYTF

SEQ ID NO: 228657 - protein, 13 aa, Homo sapiens
  CDR3 for alpha chain variable domain of TCR clone 114329 (TRAV17, TRAJ20)
CATDAVGDYKLSF

SEQ ID NO: 228658 - protein, 15 aa, Homo sapiens
  CDR3 for beta chain variable domain of TCR clone 114329 (TRBV9, TRBJ1-3)
CASSARAGGGNIIYF

SEQ ID NO: 228659 - protein, 17 aa, Homo sapiens
  CDR3 for alpha chain variable domain of TCR clone 114330 (TRAV3, TRAJ6)
CAVIRRTDTGGSYIPTF

SEQ ID NO: 228660 - protein, 18 aa, Homo sapiens
  CDR3 for beta chain variable domain of TCR clone 114330 (TRBV7-2, TRBJ2-3)
CASSLETSRGRKADTQYF

SEQ ID NO: 228661 - protein, 16 aa, Homo sapiens
  CDR3 for alpha chain variable domain of TCR clone 114331 (TRAV30, TRAJ24)
CGTETVDADSWGKFQF

SEQ ID NO: 228662 - protein, 13 aa, Homo sapiens
  CDR3 for beta chain variable domain of TCR clone 114331 (TRBV10-3, TRBJ2-7)
CASKLAVNYEQYF

SEQ ID NO: 228663 - protein, 18 aa, Homo sapiens
  CDR3 for alpha chain variable domain of TCR clone 114332 (TRAV21, TRAJ52)
CAVRPFPAGGTSYGKLTF

SEQ ID NO: 228664 - protein, 13 aa, Homo sapiens
  CDR3 for beta chain variable domain of TCR clone 114332 (TRBV2, TRBJ1-5)
CATAGPGNQPQHF

SEQ ID NO: 228665 - protein, 14 aa, Homo sapiens
  CDR3 for alpha chain variable domain of TCR clone 114333 (TRAV21, TRAJ12)
CAVRNGDSSCKLIF

SEQ ID NO: 228666 - protein, 14 aa, Homo sapiens
  CDR3 for beta chain variable domain of TCR clone 114333 (TRBV7-6, TRBJ2-7)
CASSLTGTGNEQYF

SEQ ID NO: 228667 - protein, 11 aa, Homo sapiens
  CDR3 for alpha chain variable domain of TCR clone 114334 (TRAV39, TRAJ49)
CAVDLSTQFYF

SEQ ID NO: 228668 - protein, 11 aa, Homo sapiens
  CDR3 for beta chain variable domain of TCR clone 114334 (TRBV7-8, TRBJ2-7)
CASSLSLEQYF

SEQ ID NO: 228669 - protein, 10 aa, Homo sapiens
  CDR3 for alpha chain variable domain of TCR clone 114335 (TRAV21, TRAJ34)
CAADTDKLIF

SEQ ID NO: 228670 - protein, 15 aa, Homo sapiens
  CDR3 for beta chain variable domain of TCR clone 114335 (TRBV10-2, TRBJ2-6)
CASSEQGTGANVLTF

SEQ ID NO: 228671 - protein, 15 aa, Homo sapiens
  CDR3 for alpha chain variable domain of TCR clone 114336 (TRAV2, TRAJ15)
CAVEDREQAGTALIF

SEQ ID NO: 228672 - protein, 13 aa, Homo sapiens
  CDR3 for beta chain variable domain of TCR clone 114336 (TRBV10-2, TRBJ2-7)
FASGTSGGYEQYF

SEQ ID NO: 228673 - protein, 12 aa, Homo sapiens
  CDR3 for alpha chain variable domain of TCR clone 114337 (TRAV3, TRAJ20)
CAVRDPDYKLSF

SEQ ID NO: 228674 - protein, 12 aa, Homo sapiens
  CDR3 for beta chain variable domain of TCR clone 114337 (TRBV10-3, TRBJ2-2)
CAIRENTGELFF

SEQ ID NO: 228675 - protein, 15 aa, Homo sapiens
  CDR3 for alpha chain variable domain of TCR clone 114338 (TRAV23/DV6, TRAJ45)
CAASARGGGADGLTF

SEQ ID NO: 228676 - protein, 14 aa, Homo sapiens
  CDR3 for beta chain variable domain of TCR clone 114338 (TRBV2, TRBJ2-1)
CASSEALIHNEQFF

SEQ ID NO: 228677 - protein, 15 aa, Homo sapiens
  CDR3 for alpha chain variable domain of TCR clone 114339 (TRAV26-1, TRAJ39)
CIVRVARNAGNMLTF

SEQ ID NO: 228678 - protein, 15 aa, Homo sapiens
  CDR3 for beta chain variable domain of TCR clone 114339 (TRBV7-9, TRBJ1-6)
CASSSPGRGNSPLHF

SEQ ID NO: 228679 - protein, 15 aa, Homo sapiens
  CDR3 for alpha chain variable domain of TCR clone 114340 (TRAV21, TRAJ53)
CATLNSGGSNYKLTF

SEQ ID NO: 228680 - protein, 12 aa, Homo sapiens
  CDR3 for beta chain variable domain of TCR clone 114340 (TRBV12-4, TRBJ2-7)
CASSLGGYEQYF

SEQ ID NO: 228681 - protein, 12 aa, Homo sapiens
  CDR3 for alpha chain variable domain of TCR clone 114341 (TRAV12-1, TRAJ40)
CVVYSGAYKYIF

SEQ ID NO: 228682 - protein, 14 aa, Homo sapiens
  CDR3 for beta chain variable domain of TCR clone 114341 (TRBV7-9, TRBJ2-5)
CDSSLDTAQETQHF

SEQ ID NO: 228683 - protein, 16 aa, Homo sapiens
  CDR3 for alpha chain variable domain of TCR clone 114342 (TRAV30, TRAJ24)
CGTEIVDADSWGKFQF

SEQ ID NO: 228684 - protein, 14 aa, Homo sapiens
  CDR3 for beta chain variable domain of TCR clone 114342 (TRBV10-2, TRBJ1-5)
CASSSTGRNQPQHF

SEQ ID NO: 228685 - protein, 14 aa, Homo sapiens
  CDR3 for alpha chain variable domain of TCR clone 114343 (TRAV12-2, TRAJ13)
CAWKKTGGYQKVTF

SEQ ID NO: 228686 - protein, 15 aa, Homo sapiens
  CDR3 for beta chain variable domain of TCR clone 114343 (TRBV27, TRBJ2-1)
CASSNGGGSSNEQFF

SEQ ID NO: 228687 - protein, 11 aa, Homo sapiens
  CDR3 for alpha chain variable domain of TCR clone 114344 (TRAV8-3, TRAJ49)
CAVNTGNQFYF

SEQ ID NO: 228688 - protein, 15 aa, Homo sapiens
  CDR3 for beta chain variable domain of TCR clone 114344 (TRBV9, TRBJ1-6)
CASSVAGTGDSPLHF

SEQ ID NO: 228689 - protein, 14 aa, Homo sapiens
  CDR3 for alpha chain variable domain of TCR clone 114345 (TRAV29/DV5, TRAJ36)
CAARRKTGANNLFF

SEQ ID NO: 228690 - protein, 17 aa, Homo sapiens
  CDR3 for beta chain variable domain of TCR clone 114345 (TRBV7-9, TRBJ2-3)
CASSPTVAGDLTDTQYF

SEQ ID NO: 228691 - protein, 12 aa, Homo sapiens
  CDR3 for alpha chain variable domain of TCR clone 114346 (TRAV12-3, TRAJ17)
CAMTLTGNKLTF

SEQ ID NO: 228692 - protein, 13 aa, Homo sapiens
  CDR3 for beta chain variable domain of TCR clone 114346 (TRBV6-1, TRBJ1-2)
CASSDSPSYGYTF

SEQ ID NO: 228693 - protein, 11 aa, Homo sapiens
  CDR3 for alpha chain variable domain of TCR clone 114347 (TRAV17, TRAJ21)
CATGNFNKFYF

SEQ ID NO: 228694 - protein, 16 aa, Homo sapiens
  CDR3 for beta chain variable domain of TCR clone 114347 (TRBV2, TRBJ2-1)
CASGASPRDWQAEQFF

SEQ ID NO: 228695 - protein, 14 aa, Homo sapiens
  CDR3 for alpha chain variable domain of TCR clone 114348 (TRAV17, TRAJ57)
CATDPQGGSEKLVF

SEQ ID NO: 228696 - protein, 16 aa, Homo sapiens
  CDR3 for beta chain variable domain of TCR clone 114348 (TRBV13, TRBJ2-2)
CAGSPRTGEHTGELFF

SEQ ID NO: 228697 - protein, 11 aa, Homo sapiens
  CDR3 for alpha chain variable domain of TCR clone 114349 (TRAV3, TRAJ21)
CAVGNFNKFYF

SEQ ID NO: 228698 - protein, 15 aa, Homo sapiens
  CDR3 for beta chain variable domain of TCR clone 114349 (TRBV15, TRBJ2-2)
CATSGTGGRVGELFF

SEQ ID NO: 228699 - protein, 11 aa, Homo sapiens
  CDR3 for alpha chain variable domain of TCR clone 114350 (TRAV16, TRAJ49)
CALRSGNQFYF

SEQ ID NO: 228700 - protein, 16 aa, Homo sapiens
  CDR3 for beta chain variable domain of TCR clone 114350 (TRBV20-1, TRBJ1-5)
CSASDVGGGWIQPQHF

SEQ ID NO: 228701 - protein, 16 aa, Homo sapiens
  CDR3 for alpha chain variable domain of TCR clone 114351 (TRAV17, TRAJ52)
CATDPMGGTSYGKLTF

SEQ ID NO: 228702 - protein, 16 aa, Homo sapiens
  CDR3 for beta chain variable domain of TCR clone 114351 (TRBV7-7, TRBJ2-1)
CASSLASGTSYNEQFF

SEQ ID NO: 228703 - protein, 11 aa, Homo sapiens
  CDR3 for alpha chain variable domain of TCR clone 114352 (TRAV1-2, TRAJ40)
CAVPGTYKYIF

SEQ ID NO: 228704 - protein, 15 aa, Homo sapiens
  CDR3 for beta chain variable domain of TCR clone 114352 (TRBV5-7, TRBJ1-5)
CANSYGKLWDQPQHF

SEQ ID NO: 228705 - protein, 11 aa, Homo sapiens
  CDR3 for alpha chain variable domain of TCR clone 114353 (TRAV2, TRAJ21)
CAVFNFNKFYF

SEQ ID NO: 228706 - protein, 13 aa, Homo sapiens
  CDR3 for beta chain variable domain of TCR clone 114353 (TRBV3-1, TRBJ1-1)
CASSLGVITEAFF

SEQ ID NO: 228707 - protein, 15 aa, Homo sapiens
  CDR3 for alpha chain variable domain of TCR clone 114354 (TRAV38-2/DV8, TRAJ48)
CAYRSGGFGNEKLTF

SEQ ID NO: 228708 - protein, 16 aa, Homo sapiens
  CDR3 for beta chain variable domain of TCR clone 114354 (TRBV28, TRBJ2-7)
CSSSPWVATGDLSQYF

SEQ ID NO: 228709 - protein, 13 aa, Homo sapiens
  CDR3 for alpha chain variable domain of TCR clone 114355 (TRAV1-1, TRAJ9)
CAAKNTGGFKTIF

SEQ ID NO: 228710 - protein, 17 aa, Homo sapiens
  CDR3 for beta chain variable domain of TCR clone 114355 (TRBV20-1, TRBJ2-3)
CSARDGWNAKERDTLYF

SEQ ID NO: 228711 - protein, 15 aa, Homo sapiens
  CDR3 for alpha chain variable domain of TCR clone 114356 (TRAV27, TRAJ38)
CAGRFNAGNNRKLIW

SEQ ID NO: 228712 - protein, 12 aa, Homo sapiens
  CDR3 for beta chain variable domain of TCR clone 114356 (TRBV7-2, TRBJ2-3)
CASSLEQGIQYF

SEQ ID NO: 228713 - protein, 13 aa, Homo sapiens
  CDR3 for alpha chain variable domain of TCR clone 114357 (TRAV36/DV7, TRAJ49)
CAGDSNTGNQFYF

SEQ ID NO: 228714 - protein, 12 aa, Homo sapiens
  CDR3 for beta chain variable domain of TCR clone 114357 (TRBV11-2, TRBJ2-2)
CASSLGGVELFF

SEQ ID NO: 228715 - protein, 13 aa, Homo sapiens
  CDR3 for alpha chain variable domain of TCR clone 114358 (TRAV3, TRAJ33)
CAVRDRSNYQLIW

SEQ ID NO: 228716 - protein, 16 aa, Homo sapiens
  CDR3 for beta chain variable domain of TCR clone 114358 (TRBV4-2, TRBJ2-7)
CASSQDRGKSSYEQYF

SEQ ID NO: 228717 - protein, 13 aa, Homo sapiens
  CDR3 for alpha chain variable domain of TCR clone 114359 (TRAV26-1, TRAJ30)
CIVRVESNDKIIF

SEQ ID NO: 228718 - protein, 17 aa, Homo sapiens
  CDR3 for beta chain variable domain of TCR clone 114359 (TRBV13, TRBJ2-3)
CARSLSRVAGGRNTQYF

SEQ ID NO: 228719 - protein, 14 aa, Homo sapiens
  CDR3 for alpha chain variable domain of TCR clone 114360 (TRAV16, TRAJ39)
CALSKNNAGDMLTF

SEQ ID NO: 228720 - protein, 16 aa, Homo sapiens
  CDR3 for beta chain variable domain of TCR clone 114360 (TRBV6-6, TRBJ2-1)
CASSYSFSGSYNEQFF

SEQ ID NO: 228721 - protein, 13 aa, Homo sapiens
  CDR3 for alpha chain variable domain of TCR clone 114361 (TRAV12-3, TRAJ33)
CAMSVNSNYQLIW

SEQ ID NO: 228722 - protein, 13 aa, Homo sapiens
  CDR3 for beta chain variable domain of TCR clone 114361 (TRBV7-2, TRBJ2-2)
CASSLSVTGELFF

SEQ ID NO: 228723 - protein, 14 aa, Homo sapiens
  CDR3 for alpha chain variable domain of TCR clone 114362 (TRAV1-2, TRAJ8)
CAVREDTGFQKLVF

SEQ ID NO: 228724 - protein, 14 aa, Homo sapiens
  CDR3 for beta chain variable domain of TCR clone 114362 (TRBV20-1, TRBJ2-5)
CSAHRQGLWETQYF

SEQ ID NO: 228725 - protein, 12 aa, Homo sapiens
  CDR3 for alpha chain variable domain of TCR clone 114363 (TRAV27, TRAJ35)
CAGADFGNVLHC

SEQ ID NO: 228726 - protein, 16 aa, Homo sapiens
  CDR3 for beta chain variable domain of TCR clone 114363 (TRBV6-1, TRBJ2-1)
CASILRQGSSYNAQFF

SEQ ID NO: 228727 - protein, 13 aa, Homo sapiens
  CDR3 for alpha chain variable domain of TCR clone 114364 (TRAV38-2/DV8, TRAJ53)
CASGGVSNYKLTF

SEQ ID NO: 228728 - protein, 16 aa, Homo sapiens
  CDR3 for beta chain variable domain of TCR clone 114364 (TRBV28, TRBJ1-5)
CASRFRGAVQNQPQHF

SEQ ID NO: 228729 - protein, 14 aa, Homo sapiens
  CDR3 for alpha chain variable domain of TCR clone 114365 (TRAV12-1, TRAJ17)
CVVNYKAAGNKLTF

SEQ ID NO: 228730 - protein, 16 aa, Homo sapiens
  CDR3 for beta chain variable domain of TCR clone 114365 (TRBV7-3, TRBJ2-3)
CASSPTGYQSTDTQYF

SEQ ID NO: 228731 - protein, 12 aa, Homo sapiens
  CDR3 for alpha chain variable domain of TCR clone 114366 (TRAV27, TRAJ33)
CAGDGSNYQLIW

SEQ ID NO: 228732 - protein, 15 aa, Homo sapiens
  CDR3 for beta chain variable domain of TCR clone 114366 (TRBV5-1, TRBJ2-3)
CASSVTSGSTDTQYF

SEQ ID NO: 228733 - protein, 16 aa, Homo sapiens
  CDR3 for alpha chain variable domain of TCR clone 114367 (TRAV26-1, TRAJ23)
CIVRVERYNQGGKLIF

SEQ ID NO: 228734 - protein, 15 aa, Homo sapiens
  CDR3 for beta chain variable domain of TCR clone 114367 (TRBV18, TRBJ2-7)
CASSPRGGKVYEQYF

SEQ ID NO: 228735 - protein, 16 aa, Homo sapiens
  CDR3 for alpha chain variable domain of TCR clone 114368 (TRAV30, TRAJ24)
CGTEIVDADSWGKFQF

SEQ ID NO: 228736 - protein, 14 aa, Homo sapiens
  CDR3 for beta chain variable domain of TCR clone 114368 (TRBV7-2, TRBJ2-5)
CASSPRGSSETQYF

SEQ ID NO: 228737 - protein, 14 aa, Homo sapiens
  CDR3 for alpha chain variable domain of TCR clone 114369 (TRAV1-2, TRAJ16)
CAVNRFSDGEKLLF

SEQ ID NO: 228738 - protein, 12 aa, Homo sapiens
  CDR3 for beta chain variable domain of TCR clone 114369 (TRBV7-9, TRBJ2-7)
CASSLEGYEQYF

SEQ ID NO: 228739 - protein, 14 aa, Homo sapiens
  CDR3 for alpha chain variable domain of TCR clone 114370 (TRAV13-1, TRAJ40)
CAARSTSGTSKYIF

SEQ ID NO: 228740 - protein, 15 aa, Homo sapiens
  CDR3 for beta chain variable domain of TCR clone 114370 (TRBV18, TRBJ1-5)
CASSETGGNNQPQHF

SEQ ID NO: 228741 - protein, 14 aa, Homo sapiens
  CDR3 for alpha chain variable domain of TCR clone 114371 (TRAV35, TRAJ22)
CAGLRPGSARQLTF

SEQ ID NO: 228742 - protein, 19 aa, Homo sapiens
  CDR3 for beta chain variable domain of TCR clone 114371 (TRBV12-4, TRBJ2-5)
CASSPPTGLQETVLRARHA

SEQ ID NO: 228743 - protein, 11 aa, Homo sapiens
  CDR3 for alpha chain variable domain of TCR clone 114372 (TRAV2, TRAJ33)
CAVDSNYQLIW

SEQ ID NO: 228744 - protein, 16 aa, Homo sapiens
  CDR3 for beta chain variable domain of TCR clone 114372 (TRBV7-6, TRBJ2-1)
CASSAPGPSSYNEQFF

SEQ ID NO: 228745 - protein, 12 aa, Homo sapiens
  CDR3 for alpha chain variable domain of TCR clone 114373 (TRAV12-3, TRAJ17)
CAMTLTGNKLTF

SEQ ID NO: 228746 - protein, 13 aa, Homo sapiens
  CDR3 for beta chain variable domain of TCR clone 114373 (TRBV4-2, TRBJ2-2)
CASEDRGTGELFF

SEQ ID NO: 228747 - protein, 12 aa, Homo sapiens
  CDR3 for alpha chain variable domain of TCR clone 114374 (TRAV27, TRAJ13)
CAGVRGYRKVTF

SEQ ID NO: 228748 - protein, 16 aa, Homo sapiens
  CDR3 for beta chain variable domain of TCR clone 114374 (TRBV28, TRBJ2-1)
CASSSSYSGSLNEQFF

SEQ ID NO: 228749 - protein, 14 aa, Homo sapiens
  CDR3 for alpha chain variable domain of TCR clone 114375 (TRAV17, TRAJ22)
CAKSPSGSARQLTF

SEQ ID NO: 228750 - protein, 15 aa, Homo sapiens
  CDR3 for beta chain variable domain of TCR clone 114375 (TRBV4-1, TRBJ2-5)
CASSQWDLYQETQYF

SEQ ID NO: 228751 - protein, 15 aa, Homo sapiens
  CDR3 for alpha chain variable domain of TCR clone 114376 (TRAV23/DV6, TRAJ30)
CAASSQESRDDKIIL

SEQ ID NO: 228752 - protein, 17 aa, Homo sapiens
  CDR3 for beta chain variable domain of TCR clone 114376 (TRBV4-3, TRBJ2-1)
CASSQFSSGRASGEQFF

SEQ ID NO: 228753 - protein, 11 aa, Homo sapiens
  CDR3 for alpha chain variable domain of TCR clone 114377 (TRAV29/DV5, TRAJ47)
CAATYGNKLVF

SEQ ID NO: 228754 - protein, 14 aa, Homo sapiens
  CDR3 for beta chain variable domain of TCR clone 114377 (TRBV6-1, TRBJ1-3)
CASVQGGGGNTIYF

SEQ ID NO: 228755 - protein, 13 aa, Homo sapiens
  CDR3 for alpha chain variable domain of TCR clone 114378 (TRAV17, TRAJ22)
CAHHSGSARQLTF

SEQ ID NO: 228756 - protein, 16 aa, Homo sapiens
  CDR3 for beta chain variable domain of TCR clone 114378 (TRBV4-1, TRBJ1-2)
CASSQDVGQVLYGYTF

SEQ ID NO: 228757 - protein, 13 aa, Homo sapiens
  CDR3 for alpha chain variable domain of TCR clone 114379 (TRAV16, TRAJ28)
CAPTGAGSYQLTL

SEQ ID NO: 228758 - protein, 16 aa, Homo sapiens
  CDR3 for beta chain variable domain of TCR clone 114379 (TRBV28, TRBJ1-5)
CASSLTGQGWNQPQHF

SEQ ID NO: 228759 - protein, 14 aa, Homo sapiens
  CDR3 for alpha chain variable domain of TCR clone 114380 (TRAV12-2, TRAJ13)
CAVKKTGGYQKVTF

SEQ ID NO: 228760 - protein, 13 aa, Homo sapiens
  CDR3 for beta chain variable domain of TCR clone 114380 (TRBV7-7, TRBJ1-1)
CASSLGANTEAFF

SEQ ID NO: 228761 - protein, 17 aa, Homo sapiens
  CDR3 for alpha chain variable domain of TCR clone 114381 (TRAV36/DV7, TRAJ52)
CAVAQRAGGTSYGKLTF

SEQ ID NO: 228762 - protein, 13 aa, Homo sapiens
  CDR3 for beta chain variable domain of TCR clone 114381 (TRBV18, TRBJ2-3)
CASSTGRTDTQYF

SEQ ID NO: 228763 - protein, 13 aa, Homo sapiens
  CDR3 for alpha chain variable domain of TCR clone 114382 (TRAV2, TRAJ15)
CAVASQAGTALIF

SEQ ID NO: 228764 - protein, 16 aa, Homo sapiens
  CDR3 for beta chain variable domain of TCR clone 114382 (TRBV11-2, TRBJ2-7)
CASSPTTGGVSYEQYF

SEQ ID NO: 228765 - protein, 14 aa, Homo sapiens
  CDR3 for alpha chain variable domain of TCR clone 114383 (TRAV1-2, TRAJ8)
CAVREDTGFQRLVF

SEQ ID NO: 228766 - protein, 15 aa, Homo sapiens
  CDR3 for beta chain variable domain of TCR clone 114383 (TRBV9, TRBJ1-6)
CASSVAGTGDSPLHF

SEQ ID NO: 228767 - protein, 16 aa, Homo sapiens
  CDR3 for alpha chain variable domain of TCR clone 114384 (TRAV3, TRAJ37)
CAVRGKGSGNTGKLIF

SEQ ID NO: 228768 - protein, 16 aa, Homo sapiens
  CDR3 for beta chain variable domain of TCR clone 114384 (TRBV27, TRBJ1-1)
CASSSRGRTGYTEAFF

SEQ ID NO: 228769 - protein, 13 aa, Homo sapiens
  CDR3 for alpha chain variable domain of TCR clone 114385 (TRAV13-1, TRAJ33)
CAASRAGNYQLIR

SEQ ID NO: 228770 - protein, 15 aa, Homo sapiens
  CDR3 for beta chain variable domain of TCR clone 114385 (TRBV2, TRBJ2-7)
EDSAMYFCASSEQYF

SEQ ID NO: 228771 - protein, 14 aa, Homo sapiens
  CDR3 for alpha chain variable domain of TCR clone 114386 (TRAV1-2, TRAJ33)
CAVRAPDSNYQLIW

SEQ ID NO: 228772 - protein, 14 aa, Homo sapiens
  CDR3 for beta chain variable domain of TCR clone 114386 (TRBV11-3, TRBJ1-6)
CASSFSGGESPLHF

SEQ ID NO: 228773 - protein, 10 aa, Homo sapiens
  CDR3 for alpha chain variable domain of TCR clone 114387 (TRAV1-2, TRAJ31)
RVSEDARLMF

SEQ ID NO: 228774 - protein, 14 aa, Homo sapiens
  CDR3 for beta chain variable domain of TCR clone 114387 (TRBV19, TRBJ2-1)
CASPTFVLSGEQFF

SEQ ID NO: 228775 - protein, 14 aa, Homo sapiens
  CDR3 for alpha chain variable domain of TCR clone 114388 (TRAV12-2, TRAJ24)
CAVTPADNWGKLQF

SEQ ID NO: 228776 - protein, 12 aa, Homo sapiens
  CDR3 for beta chain variable domain of TCR clone 114388 (TRBV3-1, TRBJ2-1)
CASSQGSSGQFF

SEQ ID NO: 228777 - protein, 14 aa, Homo sapiens
  CDR3 for alpha chain variable domain of TCR clone 114389 (TRAV35, TRAJ42)
CSGRYGGSQGNLIF

SEQ ID NO: 228778 - protein, 15 aa, Homo sapiens
  CDR3 for beta chain variable domain of TCR clone 114389 (TRBV7-9, TRBJ2-1)
CASSLGWGRANEQFF

SEQ ID NO: 228779 - protein, 14 aa, Homo sapiens
  CDR3 for alpha chain variable domain of TCR clone 114390 (TRAV1-2, TRAJ16)
CAVNRFSDGKKLLF

SEQ ID NO: 228780 - protein, 14 aa, Homo sapiens
  CDR3 for beta chain variable domain of TCR clone 114390 (TRBV19, TRBJ2-2)
CASSTLHRSGELFF

SEQ ID NO: 228781 - protein, 12 aa, Homo sapiens
  CDR3 for alpha chain variable domain of TCR clone 114391 (TRAV27, TRAJ37)
CADSGNTGKLIF

SEQ ID NO: 228782 - protein, 13 aa, Homo sapiens
  CDR3 for beta chain variable domain of TCR clone 114391 (TRBV7-9, TRBJ1-2)
CASSLKQNYGYTF

SEQ ID NO: 228783 - protein, 16 aa, Homo sapiens
  CDR3 for alpha chain variable domain of TCR clone 114392 (TRAV3, TRAJ37)
CAVRPHGSCNTGKLIF

SEQ ID NO: 228784 - protein, 15 aa, Homo sapiens
  CDR3 for beta chain variable domain of TCR clone 114392 (TRBV20-1, TRBJ2-7)
CSARDRVSGMDEQYF

SEQ ID NO: 228785 - protein, 13 aa, Homo sapiens
  CDR3 for alpha chain variable domain of TCR clone 114393 (TRAV20, TRAJ37)
CAGCSSNTGKLIF

SEQ ID NO: 228786 - protein, 14 aa, Homo sapiens
  CDR3 for beta chain variable domain of TCR clone 114393 (TRBV20-1, TRBJ2-5)
CSARDGRAGETQYV

SEQ ID NO: 228787 - protein, 14 aa, Homo sapiens
  CDR3 for alpha chain variable domain of TCR clone 114394 (TRAV12-2, TRAJ17)
CAVNIKAAGNKLTF

SEQ ID NO: 228788 - protein, 13 aa, Homo sapiens
  CDR3 for beta chain variable domain of TCR clone 114394 (TRBV7-8, TRBJ2-7)
CASSVTGGREQYF

SEQ ID NO: 228789 - protein, 16 aa, Homo sapiens
  CDR3 for alpha chain variable domain of TCR clone 114395 (TRAV12-2, TRAJ10)
CAVDRVLTGGGNKLTF

SEQ ID NO: 228790 - protein, 14 aa, Homo sapiens
  CDR3 for beta chain variable domain of TCR clone 114395 (TRBV9, TRBJ2-1)
CASSVALAVNEQFF

SEQ ID NO: 228791 - protein, 14 aa, Homo sapiens
  CDR3 for alpha chain variable domain of TCR clone 114396 (TRAV12-2, TRAJ17)
CAVLFKAAGNKLTF

SEQ ID NO: 228792 - protein, 13 aa, Homo sapiens
  CDR3 for beta chain variable domain of TCR clone 114396 (TRBV19, TRBJ1-2)
CASSQGQVYGDTF

SEQ ID NO: 228793 - protein, 13 aa, Homo sapiens
  CDR3 for alpha chain variable domain of TCR clone 114397 (TRAV27, TRAJ41)
CAGEGNSGYALNF

SEQ ID NO: 228794 - protein, 14 aa, Homo sapiens
  CDR3 for beta chain variable domain of TCR clone 114397 (TRBV12-4, TRBJ2-7)
CASGASGGWYEQYF

SEQ ID NO: 228795 - protein, 13 aa, Homo sapiens
  CDR3 for alpha chain variable domain of TCR clone 114398 (TRAV21, TRAJ57)
CAVTQGGSEKLVF

SEQ ID NO: 228796 - protein, 14 aa, Homo sapiens
  CDR3 for beta chain variable domain of TCR clone 114398 (TRBV7-6, TRBJ2-3)
CASSLGTVTDTQYF

SEQ ID NO: 228797 - protein, 11 aa, Homo sapiens
  CDR3 for alpha chain variable domain of TCR clone 114399 (TRAV35, TRAJ30)
CAGPGDDKLIF

SEQ ID NO: 228798 - protein, 14 aa, Homo sapiens
  CDR3 for beta chain variable domain of TCR clone 114399 (TRBV7-6, TRBJ1-6)
CASSQAGGGSPLHF

SEQ ID NO: 228799 - protein, 16 aa, Homo sapiens
  CDR3 for alpha chain variable domain of TCR clone 114400 (TRAV8-4, TRAJ18)
CAVTANGGSTLGRLYF

SEQ ID NO: 228800 - protein, 14 aa, Homo sapiens
  CDR3 for beta chain variable domain of TCR clone 114400 (TRBV12-4, TRBJ1-2)
CASSSAGHIYGCTF

SEQ ID NO: 228801 - protein, 14 aa, Homo sapiens
  CDR3 for alpha chain variable domain of TCR clone 114401 (TRAV35, TRAJ33)
CAGSSQDSNYQLIW

SEQ ID NO: 228802 - protein, 15 aa, Homo sapiens
  CDR3 for beta chain variable domain of TCR clone 114401 (TRBV5-1, TRBJ1-4)
FAPVAWKDGNEKLFF

SEQ ID NO: 228803 - protein, 15 aa, Homo sapiens
  CDR3 for alpha chain variable domain of TCR clone 114402 (TRAV17, TRAJ13)
CATVPNSGGYQKVTF

SEQ ID NO: 228804 - protein, 18 aa, Homo sapiens
  CDR3 for beta chain variable domain of TCR clone 114402 (TRBV7-9, TRBJ2-7)
CASSLTTSGSRTWYEQYF

SEQ ID NO: 228805 - protein, 17 aa, Homo sapiens
  CDR3 for alpha chain variable domain of TCR clone 114403 (TRAV3, TRAJ6)
CAVRDGPRAGGSYIPTS

SEQ ID NO: 228806 - protein, 14 aa, Homo sapiens
  CDR3 for beta chain variable domain of TCR clone 114403 (TRBV7-2, TRBJ2-7)
CASSPKSSFYEQYF

SEQ ID NO: 228807 - protein, 14 aa, Homo sapiens
  CDR3 for alpha chain variable domain of TCR clone 114404 (TRAV8-3, TRAJ4)
CAVGASGGYNKLIF

SEQ ID NO: 228808 - protein, 13 aa, Homo sapiens
  CDR3 for beta chain variable domain of TCR clone 114404 (TRBV18, TRBJ2-5)
CAGSLQGQETQYF

SEQ ID NO: 228809 - protein, 14 aa, Homo sapiens
  CDR3 for alpha chain variable domain of TCR clone 114405 (TRAV17, TRAJ57)
CATDPQGGAEKLVL

SEQ ID NO: 228810 - protein, 18 aa, Homo sapiens
  CDR3 for beta chain variable domain of TCR clone 114405 (TRBV6-6, TRBJ1-3)
CASSYSKWDSISGNTIYF

SEQ ID NO: 228811 - protein, 16 aa, Homo sapiens
  CDR3 for alpha chain variable domain of TCR clone 114406 (TRAV23/DV6, TRAJ9)
CAASIGGNTGGFKTIF

SEQ ID NO: 228812 - protein, 15 aa, Homo sapiens
  CDR3 for beta chain variable domain of TCR clone 114406 (TRBV7-2, TRBJ2-2)
CASKRPGQNTGELFF

SEQ ID NO: 228813 - protein, 13 aa, Homo sapiens
  CDR3 for alpha chain variable domain of TCR clone 114407 (TRAV12-3, TRAJ33)
CAMSVNGNYQLIW

SEQ ID NO: 228814 - protein, 13 aa, Homo sapiens
  CDR3 for beta chain variable domain of TCR clone 114407 (TRBV4-1, TRBJ2-2)
CASSQENTGELFF

SEQ ID NO: 228815 - protein, 16 aa, Homo sapiens
  CDR3 for alpha chain variable domain of TCR clone 114408 (TRAV20, TRAJ28)
CAVRDPSGAGSYQLTF

SEQ ID NO: 228816 - protein, 15 aa, Homo sapiens
  CDR3 for beta chain variable domain of TCR clone 114408 (TRBV15, TRBJ1-1)
CATSLQGGRNTEAFF

SEQ ID NO: 228817 - protein, 17 aa, Homo sapiens
  CDR3 for alpha chain variable domain of TCR clone 114409 (TRAV13-1, TRAJ52)
CAASSGAGGTSYGKLTF

SEQ ID NO: 228818 - protein, 15 aa, Homo sapiens
  CDR3 for beta chain variable domain of TCR clone 114409 (TRBV12-4, TRBJ2-5)
CASSPPTGLQETQYF

SEQ ID NO: 228819 - protein, 15 aa, Homo sapiens
  CDR3 for alpha chain variable domain of TCR clone 114410 (TRAV26-2, TRAJ13)
SILRDLSGGYQKVTF

SEQ ID NO: 228820 - protein, 11 aa, Homo sapiens
  CDR3 for beta chain variable domain of TCR clone 114410 (TRBV7-9, TRBJ2-5)
CASSLSATQYF

SEQ ID NO: 228821 - protein, 14 aa, Homo sapiens
  CDR3 for alpha chain variable domain of TCR clone 114411 (TRAV16, TRAJ33)
CALSAMDSNYQLIW

SEQ ID NO: 228822 - protein, 14 aa, Homo sapiens
  CDR3 for beta chain variable domain of TCR clone 114411 (TRBV28, TRBJ2-7)
CASSLLRISYEQYF

SEQ ID NO: 228823 - protein, 12 aa, Homo sapiens
  CDR3 for alpha chain variable domain of TCR clone 114412 (TRAV12-3, TRAJ17)
CAMTLTGNKLTF

SEQ ID NO: 228824 - protein, 15 aa, Homo sapiens
  CDR3 for beta chain variable domain of TCR clone 114412 (TRBV20-1, TRBJ2-7)
CSASDQVSGMDEQYF

SEQ ID NO: 228825 - protein, 12 aa, Homo sapiens
  CDR3 for alpha chain variable domain of TCR clone 114413 (TRAV8-3, TRAJ20)
CAVGANDYKLSL

SEQ ID NO: 228826 - protein, 16 aa, Homo sapiens
  CDR3 for beta chain variable domain of TCR clone 114413 (TRBV19, TRBJ2-2)
CASRSPGTGATGELFF

SEQ ID NO: 228827 - protein, 10 aa, Homo sapiens
  CDR3 for alpha chain variable domain of TCR clone 114414 (TRAV1-2, TRAJ23)
CAGQGGKLIF

SEQ ID NO: 228828 - protein, 14 aa, Homo sapiens
  CDR3 for beta chain variable domain of TCR clone 114414 (TRBV6-1, TRBJ1-3)
CASVQWGGGNTIYF

SEQ ID NO: 228829 - protein, 13 aa, Homo sapiens
  CDR3 for alpha chain variable domain of TCR clone 114415 (TRAV12-1, TRAJ40)
CVVNSSGTYKYII

SEQ ID NO: 228830 - protein, 14 aa, Homo sapiens
  CDR3 for beta chain variable domain of TCR clone 114415 (TRBV2, TRBJ1-6)
CASEVSSYNSPLHF

SEQ ID NO: 228831 - protein, 12 aa, Homo sapiens
  CDR3 for alpha chain variable domain of TCR clone 114416 (TRAV27, TRAJ13)
CAGVRGYQKVTL

SEQ ID NO: 228832 - protein, 11 aa, Homo sapiens
  CDR3 for beta chain variable domain of TCR clone 114416 (TRBV6-1, TRBJ2-5)
RASTGVETQYF

SEQ ID NO: 228833 - protein, 15 aa, Homo sapiens
  CDR3 for alpha chain variable domain of TCR clone 114417 (TRAV21, TRAJ53)
CATLNSGGSNYKLTF

SEQ ID NO: 228834 - protein, 14 aa, Homo sapiens
  CDR3 for beta chain variable domain of TCR clone 114417 (TRBV15, TRBJ1-2)
CATRRASVNYGYTF

SEQ ID NO: 228835 - protein, 12 aa, Homo sapiens
  CDR3 for alpha chain variable domain of TCR clone 114418 (TRAV14/DV4, TRAJ9)
CAMNPGCFKTIF

SEQ ID NO: 228836 - protein, 16 aa, Homo sapiens
  CDR3 for beta chain variable domain of TCR clone 114418 (TRBV28, TRBJ2-5)
CASSFSPAGGWETQYF

SEQ ID NO: 228837 - protein, 14 aa, Homo sapiens
  CDR3 for alpha chain variable domain of TCR clone 114419 (TRAV17, TRAJ6)
CATDASGGSYIPTF

SEQ ID NO: 228838 - protein, 13 aa, Homo sapiens
  CDR3 for beta chain variable domain of TCR clone 114419 (TRBV7-9, TRBJ1-2)
CASSLKQNYGYTF

SEQ ID NO: 228839 - protein, 17 aa, Homo sapiens
  CDR3 for alpha chain variable domain of TCR clone 114420 (TRAV8-6, TRAJ58)
CAVSSWAGETSGSRLTF

SEQ ID NO: 228840 - protein, 14 aa, Homo sapiens
  CDR3 for beta chain variable domain of TCR clone 114420 (TRBV4-2, TRBJ2-1)
CASGLDRAYNEQFF

SEQ ID NO: 228841 - protein, 16 aa, Homo sapiens
  CDR3 for alpha chain variable domain of TCR clone 114421 (TRAV13-2, TRAJ53)
RAENANSGGSNYKLTF

SEQ ID NO: 228842 - protein, 19 aa, Homo sapiens
  CDR3 for beta chain variable domain of TCR clone 114421 (TRBV28, TRBJ2-7)
CASSYSGTSRLGWVYEQYF

SEQ ID NO: 228843 - protein, 16 aa, Homo sapiens
  CDR3 for alpha chain variable domain of TCR clone 114422 (TRAV3, TRAJ10)
CAVRDMRAGGGNKLTF

SEQ ID NO: 228844 - protein, 16 aa, Homo sapiens
  CDR3 for beta chain variable domain of TCR clone 114422 (TRBV11-2, TRBJ2-4)
CASSQEGRGGLDIQYF

SEQ ID NO: 228845 - protein, 12 aa, Homo sapiens
  CDR3 for alpha chain variable domain of TCR clone 114423 (TRAV6, TRAJ34)
CALHRGTDKLIF

SEQ ID NO: 228846 - protein, 16 aa, Homo sapiens
  CDR3 for beta chain variable domain of TCR clone 114423 (TRBV19, TRBJ2-1)
CASSKAGPSSYNEQFF

SEQ ID NO: 228847 - protein, 16 aa, Homo sapiens
  CDR3 for alpha chain variable domain of TCR clone 114424 (TRAV12-3, TRAJ53)
CAMSAGSGGSNYKLTF

SEQ ID NO: 228848 - protein, 13 aa, Homo sapiens
  CDR3 for beta chain variable domain of TCR clone 114424 (TRBV29-1, TRBJ2-3)
CCVGPRGTDTQYF

SEQ ID NO: 228849 - protein, 16 aa, Homo sapiens
  CDR3 for alpha chain variable domain of TCR clone 114425 (TRAV4, TRAJ5)
CLVRPDHGHGQESTYF

SEQ ID NO: 228850 - protein, 15 aa, Homo sapiens
  CDR3 for beta chain variable domain of TCR clone 114425 (TRBV27, TRBJ2-5)
CASSLIPSGGETQYF

SEQ ID NO: 228851 - protein, 16 aa, Homo sapiens
  CDR3 for alpha chain variable domain of TCR clone 114426 (TRAV23/DV6, TRAJ9)
CAASIGGNTGGFKTIF

SEQ ID NO: 228852 - protein, 14 aa, Homo sapiens
  CDR3 for beta chain variable domain of TCR clone 114426 (TRBV9, TRBJ2-7)
CSSSVGVGSYEQYF

SEQ ID NO: 228853 - protein, 14 aa, Homo sapiens
  CDR3 for alpha chain variable domain of TCR clone 114427 (TRAV1-2, TRAJ16)
CAVNRFSDVQKLLF

SEQ ID NO: 228854 - protein, 15 aa, Homo sapiens
  CDR3 for beta chain variable domain of TCR clone 114427 (TRBV7-2, TRBJ2-7)
CASSLKGALTYEQYF

SEQ ID NO: 228855 - protein, 16 aa, Homo sapiens
  CDR3 for alpha chain variable domain of TCR clone 114428 (TRAV21, TRAJ37)
CAVRTAGSSNTGTLIF

SEQ ID NO: 228856 - protein, 13 aa, Homo sapiens
  CDR3 for beta chain variable domain of TCR clone 114428 (TRBV7-9, TRBJ2-5)
YASLPSGRETQYF

SEQ ID NO: 228857 - protein, 15 aa, Homo sapiens
  CDR3 for alpha chain variable domain of TCR clone 114429 (TRAV25, TRAJ53)
CPTSNSGGSIYKLTF

SEQ ID NO: 228858 - protein, 14 aa, Homo sapiens
  CDR3 for beta chain variable domain of TCR clone 114429 (TRBV11-2, TRBJ2-3)
CASSRLARTDTQYF

SEQ ID NO: 228859 - protein, 16 aa, Homo sapiens
  CDR3 for alpha chain variable domain of TCR clone 114430 (TRAV8-3, TRAJ8)
CAVTRDGNTGFQKLVF

SEQ ID NO: 228860 - protein, 14 aa, Homo sapiens
  CDR3 for beta chain variable domain of TCR clone 114430 (TRBV28, TRBJ1-1)
CASSESGRGTEAFF

SEQ ID NO: 228861 - protein, 15 aa, Homo sapiens
  CDR3 for alpha chain variable domain of TCR clone 114431 (TRAV25, TRAJ52)
CAGTSGGTSYGKLTF

SEQ ID NO: 228862 - protein, 13 aa, Homo sapiens
  CDR3 for beta chain variable domain of TCR clone 114431 (TRBV4-1, TRBJ2-1)
CASSQAGGDEQFF

SEQ ID NO: 228863 - protein, 17 aa, Homo sapiens
  CDR3 for alpha chain variable domain of TCR clone 114432 (TRAV38-1, TRAJ45)
CAFMKHYMGGGADGLTF

SEQ ID NO: 228864 - protein, 16 aa, Homo sapiens
  CDR3 for beta chain variable domain of TCR clone 114432 (TRBV19, TRBJ2-1)
CASSKAGPSSYNEQFF

SEQ ID NO: 228865 - protein, 12 aa, Homo sapiens
  CDR3 for alpha chain variable domain of TCR clone 114433 (TRAV8-3, TRAJ20)
CAVDFNDYKLSF

SEQ ID NO: 228866 - protein, 13 aa, Homo sapiens
  CDR3 for beta chain variable domain of TCR clone 114433 (TRBV4-2, TRBJ1-1)
CASSQAGNTEAFF

SEQ ID NO: 228867 - protein, 15 aa, Homo sapiens
  CDR3 for alpha chain variable domain of TCR clone 114434 (TRAV27, TRAJ38)
CAARRNAGNNRKLIW

SEQ ID NO: 228868 - protein, 15 aa, Homo sapiens
  CDR3 for beta chain variable domain of TCR clone 114434 (TRBV7-9, TRBJ1-4)
CASSARTGGNEKLFF

SEQ ID NO: 228869 - protein, 14 aa, Homo sapiens
  CDR3 for alpha chain variable domain of TCR clone 114435 (TRAV2, TRAJ29)
CAVESYSGNTPLVF

SEQ ID NO: 228870 - protein, 16 aa, Homo sapiens
  CDR3 for beta chain variable domain of TCR clone 114435 (TRBV7-3, TRBJ2-1)
CASSLEGYRSYNEQFF

SEQ ID NO: 228871 - protein, 12 aa, Homo sapiens
  CDR3 for alpha chain variable domain of TCR clone 114436 (TRAV12-2, TRAJ31)
CAVNTPDARLMF

SEQ ID NO: 228872 - protein, 13 aa, Homo sapiens
  CDR3 for beta chain variable domain of TCR clone 114436 (TRBV28, TRBJ2-1)
CASRSGGLNEQFF

SEQ ID NO: 228873 - protein, 13 aa, Homo sapiens
  CDR3 for alpha chain variable domain of TCR clone 114437 (TRAV8-6, TRAJ49)
CAVITNTGNQFHF

SEQ ID NO: 228874 - protein, 14 aa, Homo sapiens
  CDR3 for beta chain variable domain of TCR clone 114437 (TRBV5-1, TRBJ2-7)
CASSRGESLYEQYF

SEQ ID NO: 228875 - protein, 12 aa, Homo sapiens
  CDR3 for alpha chain variable domain of TCR clone 114438 (TRAV2, TRAJ9)
CAVGAGGFKTIF

SEQ ID NO: 228876 - protein, 15 aa, Homo sapiens
  CDR3 for beta chain variable domain of TCR clone 114438 (TRBV5-5, TRBJ2-7)
CASSLAAPLSYEQYF

SEQ ID NO: 228877 - protein, 16 aa, Homo sapiens
  CDR3 for alpha chain variable domain of TCR clone 114439 (TRAV3, TRAJ21)
CAVRDIERGNFNKFYF

SEQ ID NO: 228878 - protein, 12 aa, Homo sapiens
  CDR3 for beta chain variable domain of TCR clone 114439 (TRBV7-8, TRBJ2-7)
CASSLGDREQYF

SEQ ID NO: 228879 - protein, 15 aa, Homo sapiens
  CDR3 for alpha chain variable domain of TCR clone 114440 (TRAV26-1, TRAJ29)
CIVRVEGSGNTPLVF

SEQ ID NO: 228880 - protein, 13 aa, Homo sapiens
  CDR3 for beta chain variable domain of TCR clone 114440 (TRBV7-9, TRBJ2-3)
CASSPGSTDTQYF

SEQ ID NO: 228881 - protein, 16 aa, Homo sapiens
  CDR3 for alpha chain variable domain of TCR clone 114441 (TRAV17, TRAJ28)
CACGSYSGAGSYQLTF

SEQ ID NO: 228882 - protein, 17 aa, Homo sapiens
  CDR3 for beta chain variable domain of TCR clone 114441 (TRBV9, TRBJ2-1)
CASSPRLGLVGYNEQFF

SEQ ID NO: 228883 - protein, 13 aa, Homo sapiens
  CDR3 for alpha chain variable domain of TCR clone 114442 (TRAV27, TRAJ45)
CRSSGGGADGLTF

SEQ ID NO: 228884 - protein, 15 aa, Homo sapiens
  CDR3 for beta chain variable domain of TCR clone 114442 (TRBV7-3, TRBJ2-1)
CASSPTGGGEVEQFF

SEQ ID NO: 228885 - protein, 11 aa, Homo sapiens
  CDR3 for alpha chain variable domain of TCR clone 114443 (TRAV3, TRAJ21)
CAVGNFNKFYF

SEQ ID NO: 228886 - protein, 16 aa, Homo sapiens
  CDR3 for beta chain variable domain of TCR clone 114443 (TRBV19, TRBJ2-1)
CASSRAGSSSYNEQFF

SEQ ID NO: 228887 - protein, 14 aa, Homo sapiens
  CDR3 for alpha chain variable domain of TCR clone 114444 (TRAV34, TRAJ44)
CGADGTGTASKLTL

SEQ ID NO: 228888 - protein, 16 aa, Homo sapiens
  CDR3 for beta chain variable domain of TCR clone 114444 (TRBV28, TRBJ2-6)
CASSNRRGSGANVLTF

SEQ ID NO: 228889 - protein, 21 aa, Homo sapiens
  CDR3 for alpha chain variable domain of TCR clone 114445 (TRAV1-2, TRAJ37)
CLLPLCCERFHGSGNTGKLIF

SEQ ID NO: 228890 - protein, 14 aa, Homo sapiens
  CDR3 for beta chain variable domain of TCR clone 114445 (TRBV7-6, TRBJ2-3)
CASSLGTVTDTQYF

SEQ ID NO: 228891 - protein, 19 aa, Homo sapiens
  CDR3 for alpha chain variable domain of TCR clone 114446 (TRAV8-3, TRAJ40)
LSTSVLWVRSTSGTYKYIF

SEQ ID NO: 228892 - protein, 15 aa, Homo sapiens
  CDR3 for beta chain variable domain of TCR clone 114446 (TRBV6-1, TRBJ2-3)
CASSERGGITDTQYF

SEQ ID NO: 228893 - protein, 14 aa, Homo sapiens
  CDR3 for alpha chain variable domain of TCR clone 114447 (TRAV1-2, TRAJ16)
CAVNRFSDGQKLLF

SEQ ID NO: 228894 - protein, 16 aa, Homo sapiens
  CDR3 for beta chain variable domain of TCR clone 114447 (TRBV4-2, TRBJ1-1)
CASSPSPGRAAPEAFF

SEQ ID NO: 228895 - protein, 14 aa, Homo sapiens
  CDR3 for alpha chain variable domain of TCR clone 114448 (TRAV12-3, TRAJ10)
SHLPLTGGGNKLTF

SEQ ID NO: 228896 - protein, 14 aa, Homo sapiens
  CDR3 for beta chain variable domain of TCR clone 114448 (TRBV19, TRBJ2-1)
CASPTFVLSGEQFV

SEQ ID NO: 228897 - protein, 12 aa, Homo sapiens
  CDR3 for alpha chain variable domain of TCR clone 114449 (TRAV1-1, TRAJ8)
CAGGTGFQELVF

SEQ ID NO: 228898 - protein, 13 aa, Homo sapiens
  CDR3 for beta chain variable domain of TCR clone 114449 (TRBV19, TRBJ1-2)
CASSQGQVYGYTF

SEQ ID NO: 228899 - protein, 18 aa, Homo sapiens
  CDR3 for alpha chain variable domain of TCR clone 114450 (TRAV12-3, TRAJ52)
CAMIRTNAGGTSYGKLTF

SEQ ID NO: 228900 - protein, 17 aa, Homo sapiens
  CDR3 for beta chain variable domain of TCR clone 114450 (TRBV7-3, TRBJ2-3)
CASSLMKRMRGADTQYF

SEQ ID NO: 228901 - protein, 12 aa, Homo sapiens
  CDR3 for alpha chain variable domain of TCR clone 114451 (TRAV30, TRAJ43)
CGTEERGNDMRF

SEQ ID NO: 228902 - protein, 11 aa, Homo sapiens
  CDR3 for beta chain variable domain of TCR clone 114451 (TRBV29-1, TRBJ2-5)
CSVDRTGTQYF

SEQ ID NO: 228903 - protein, 12 aa, Homo sapiens
  CDR3 for alpha chain variable domain of TCR clone 114452 (TRAV13-2, TRAJ23)
CAERHRGGKLIF

SEQ ID NO: 228904 - protein, 14 aa, Homo sapiens
  CDR3 for beta chain variable domain of TCR clone 114452 (TRBV7-2, TRBJ2-3)
CASSQTGSSYTQYF

SEQ ID NO: 228905 - protein, 17 aa, Homo sapiens
  CDR3 for alpha chain variable domain of TCR clone 114453 (TRAV23/DV6, TRAJ57)
CAASSTLSQGGSEKLVF

SEQ ID NO: 228906 - protein, 13 aa, Homo sapiens
  CDR3 for beta chain variable domain of TCR clone 114453 (TRBV10-3, TRBJ2-7)
CASKLAVNYEQYF

SEQ ID NO: 228907 - protein, 11 aa, Homo sapiens
  CDR3 for alpha chain variable domain of TCR clone 114454 (TRAV13-1, TRAJ39)
CASHAGNMLTF

SEQ ID NO: 228908 - protein, 18 aa, Homo sapiens
  CDR3 for beta chain variable domain of TCR clone 114454 (TRBV24-1, TRBJ2-1)
CATSDLMFLGRGVHEQFF

SEQ ID NO: 228909 - protein, 14 aa, Homo sapiens
  CDR3 for alpha chain variable domain of TCR clone 114455 (TRAV21, TRAJ52)
CGRAGGTSYGKLTF

SEQ ID NO: 228910 - protein, 14 aa, Homo sapiens
  CDR3 for beta chain variable domain of TCR clone 114455 (TRBV19, TRBJ1-2)
CASSVLGYNYSYTF

SEQ ID NO: 228911 - protein, 13 aa, Homo sapiens
  CDR3 for alpha chain variable domain of TCR clone 114456 (TRAV8-3, TRAJ21)
CAVGAYNCNKFYF

SEQ ID NO: 228912 - protein, 16 aa, Homo sapiens
  CDR3 for beta chain variable domain of TCR clone 114456 (TRBV19, TRBJ2-1)
CASSMGGGSSYNEQFF

SEQ ID NO: 228913 - protein, 23 aa, Homo sapiens
  CDR3 for alpha chain variable domain of TCR clone 114457 (TRAV8-3, )
CAVVTTRIPDIQNPDPAVYQLRD

SEQ ID NO: 228914 - protein, 14 aa, Homo sapiens
  CDR3 for beta chain variable domain of TCR clone 114457 (TRBV11-2, TRBJ2-7)
CASSPSTTPYEQYF

SEQ ID NO: 228915 - protein, 13 aa, Homo sapiens
  CDR3 for alpha chain variable domain of TCR clone 114458 (TRAV35, TRAJ42)
CAGFPGSQGNLIF

SEQ ID NO: 228916 - protein, 11 aa, Homo sapiens
  CDR3 for beta chain variable domain of TCR clone 114458 (TRBV19, TRBJ2-2)
CASRYSGELFF

SEQ ID NO: 228917 - protein, 15 aa, Homo sapiens
  CDR3 for alpha chain variable domain of TCR clone 114459 (TRAV12-1, TRAJ44)
CVVDTPQGTASKLTF

SEQ ID NO: 228918 - protein, 20 aa, Homo sapiens
  CDR3 for beta chain variable domain of TCR clone 114459 (TRBV7-8, TRBJ2-2)
CASSHLFPGPTIHITGELFF

SEQ ID NO: 228919 - protein, 12 aa, Homo sapiens
  CDR3 for alpha chain variable domain of TCR clone 114460 (TRAV12-3, TRAJ20)
CAMVRGDYKLSF

SEQ ID NO: 228920 - protein, 17 aa, Homo sapiens
  CDR3 for beta chain variable domain of TCR clone 114460 (TRBV28, TRBJ2-5)
CASSTTEGDALQETQYF

SEQ ID NO: 228921 - protein, 16 aa, Homo sapiens
  CDR3 for alpha chain variable domain of TCR clone 114461 (TRAV30, TRAJ24)
CGTEIVDADSWGKFQF

SEQ ID NO: 228922 - protein, 16 aa, Homo sapiens
  CDR3 for beta chain variable domain of TCR clone 114461 (TRBV6-1, TRBJ2-1)
CASILRQGSSYNEQLF

SEQ ID NO: 228923 - protein, 17 aa, Homo sapiens
  CDR3 for alpha chain variable domain of TCR clone 114462 (TRAV13-1, TRAJ52)
CAAGRNAGGTSYGKLTF

SEQ ID NO: 228924 - protein, 13 aa, Homo sapiens
  CDR3 for beta chain variable domain of TCR clone 114462 (TRBV7-2, TRBJ1-1)
CANNLKGAKVAFF

SEQ ID NO: 228925 - protein, 15 aa, Homo sapiens
  CDR3 for alpha chain variable domain of TCR clone 114463 (TRAV12-1, TRAJ44)
CVVYTPQGTASKLTF

SEQ ID NO: 228926 - protein, 14 aa, Homo sapiens
  CDR3 for beta chain variable domain of TCR clone 114463 (TRBV7-9, TRBJ2-1)
CASSPRDSLYEQFF

SEQ ID NO: 228927 - protein, 12 aa, Homo sapiens
  CDR3 for alpha chain variable domain of TCR clone 114464 (TRAV41, TRAJ58)
CAVETSGSRLTF

SEQ ID NO: 228928 - protein, 15 aa, Homo sapiens
  CDR3 for beta chain variable domain of TCR clone 114464 (TRBV29-1, TRBJ2-6)
CSVGDRGSGANVLTV

SEQ ID NO: 228929 - protein, 15 aa, Homo sapiens
  CDR3 for alpha chain variable domain of TCR clone 114465 (TRAV25, TRAJ53)
CAATGGGGSNDKLTF

SEQ ID NO: 228930 - protein, 19 aa, Homo sapiens
  CDR3 for beta chain variable domain of TCR clone 114465 (TRBV7-2, TRBJ2-3)
CASSFLSRNWGGGTDTQYF

SEQ ID NO: 228931 - protein, 16 aa, Homo sapiens
  CDR3 for alpha chain variable domain of TCR clone 114466 (TRAV30, TRAJ24)
CGTEIVDADSWGKFHF

SEQ ID NO: 228932 - protein, 14 aa, Homo sapiens
  CDR3 for beta chain variable domain of TCR clone 114466 (TRBV19, TRBJ2-1)
CASSRLASINEQFF

SEQ ID NO: 228933 - protein, 17 aa, Homo sapiens
  CDR3 for alpha chain variable domain of TCR clone 114467 (TRAV21, TRAJ52)
CCEASPAGGTSYGKLTF

SEQ ID NO: 228934 - protein, 17 aa, Homo sapiens
  CDR3 for beta chain variable domain of TCR clone 114467 (TRBV13, TRBJ2-3)
CASSLSRVAGGRNTQYF

SEQ ID NO: 228935 - protein, 12 aa, Homo sapiens
  CDR3 for alpha chain variable domain of TCR clone 114468 (TRAV13-1, TRAJ27)
CAAHTNAGKSTF

SEQ ID NO: 228936 - protein, 15 aa, Homo sapiens
  CDR3 for beta chain variable domain of TCR clone 114468 (TRBV7-9, TRBJ1-6)
CASSSPGRGNSPLLF

SEQ ID NO: 228937 - protein, 13 aa, Homo sapiens
  CDR3 for alpha chain variable domain of TCR clone 114469 (TRAV35, TRAJ33)
CAGQLYGVYRLIW

SEQ ID NO: 228938 - protein, 14 aa, Homo sapiens
  CDR3 for beta chain variable domain of TCR clone 114469 (TRBV7-2, TRBJ1-1)
CASSLGGAGTEAFF

SEQ ID NO: 228939 - protein, 16 aa, Homo sapiens
  CDR3 for alpha chain variable domain of TCR clone 114470 (TRAV12-3, TRAJ53)
CAMSPGSGGSNYNMTF

SEQ ID NO: 228940 - protein, 11 aa, Homo sapiens
  CDR3 for beta chain variable domain of TCR clone 114470 (TRBV29-1, TRBJ2-5)
CSEDRTGTQYF

SEQ ID NO: 228941 - protein, 11 aa, Homo sapiens
  CDR3 for alpha chain variable domain of TCR clone 114471 (TRAV8-4, TRAJ20)
CAVTNVLTTTS

SEQ ID NO: 228942 - protein, 12 aa, Homo sapiens
  CDR3 for beta chain variable domain of TCR clone 114471 (TRBV11-2, TRBJ2-2)
CASSLGGGELFF

SEQ ID NO: 228943 - protein, 15 aa, Homo sapiens
  CDR3 for alpha chain variable domain of TCR clone 114472 (TRAV13-1, TRAJ6)
CAAIHPSGGSYIPAF

SEQ ID NO: 228944 - protein, 14 aa, Homo sapiens
  CDR3 for beta chain variable domain of TCR clone 114472 (TRBV7-9, TRBJ2-2)
CASGLAINTGELFF

SEQ ID NO: 228945 - protein, 15 aa, Homo sapiens
  CDR3 for alpha chain variable domain of TCR clone 114473 (TRAV12-2, TRAJ32)
CAVNHYGGATNKPIF

SEQ ID NO: 228946 - protein, 14 aa, Homo sapiens
  CDR3 for beta chain variable domain of TCR clone 114473 (TRBV27, TRBJ2-1)
CASSFGREANEQFF

SEQ ID NO: 228947 - protein, 11 aa, Homo sapiens
  CDR3 for alpha chain variable domain of TCR clone 114474 (TRAV23/DV6, TRAJ48)
CAPRWGEKLTF

SEQ ID NO: 228948 - protein, 14 aa, Homo sapiens
  CDR3 for beta chain variable domain of TCR clone 114474 (TRBV29-1, TRBJ1-3)
CSVADGVVGNTIYF

SEQ ID NO: 228949 - protein, 12 aa, Homo sapiens
  CDR3 for alpha chain variable domain of TCR clone 114475 (TRAV12-3, TRAJ17)
CAMTLTGNKLTF

SEQ ID NO: 228950 - protein, 16 aa, Homo sapiens
  CDR3 for beta chain variable domain of TCR clone 114475 (TRBV6-1, TRBJ1-3)
CASAQGGVETPYILER

SEQ ID NO: 228951 - protein, 13 aa, Homo sapiens
  CDR3 for alpha chain variable domain of TCR clone 114476 (TRAV13-1, TRAJ12)
CSKYMGSSYKLIF

SEQ ID NO: 228952 - protein, 15 aa, Homo sapiens
  CDR3 for beta chain variable domain of TCR clone 114476 (TRBV20-1, TRBJ1-5)
CSATSDRGLGQPQHF

SEQ ID NO: 228953 - protein, 11 aa, Homo sapiens
  CDR3 for alpha chain variable domain of TCR clone 114477 (TRAV3, TRAJ17)
PRGAAGNKLTF

SEQ ID NO: 228954 - protein, 18 aa, Homo sapiens
  CDR3 for beta chain variable domain of TCR clone 114477 (TRBV15, TRBJ2-3)
CATSRDGARSWDTDTQYF

SEQ ID NO: 228955 - protein, 21 aa, Homo sapiens
  CDR3 for alpha chain variable domain of TCR clone 114478 (TRAV1-2, TRAJ37)
CLLPLCCERFHGSGNTGKLIF

SEQ ID NO: 228956 - protein, 14 aa, Homo sapiens
  CDR3 for beta chain variable domain of TCR clone 114478 (TRBV2, TRBJ2-5)
CASSGVLAQETQYF

SEQ ID NO: 228957 - protein, 13 aa, Homo sapiens
  CDR3 for alpha chain variable domain of TCR clone 114479 (TRAV12-2, TRAJ15)
CAVFNQAGTALIF

SEQ ID NO: 228958 - protein, 17 aa, Homo sapiens
  CDR3 for beta chain variable domain of TCR clone 114479 (TRBV7-8, TRBJ1-5)
CASSRGGALISPSILVM

SEQ ID NO: 228959 - protein, 13 aa, Homo sapiens
  CDR3 for alpha chain variable domain of TCR clone 114480 (TRAV8-1, TRAJ13)
CAVSKGGYQKVTF

SEQ ID NO: 228960 - protein, 14 aa, Homo sapiens
  CDR3 for beta chain variable domain of TCR clone 114480 (TRBV11-2, TRBJ2-5)
CASSRTGGIETQYF

SEQ ID NO: 228961 - protein, 13 aa, Homo sapiens
  CDR3 for alpha chain variable domain of TCR clone 114481 (TRAV8-3, TRAJ4)
WVFYSVGYNKLIF

SEQ ID NO: 228962 - protein, 16 aa, Homo sapiens
  CDR3 for beta chain variable domain of TCR clone 114481 (TRBV7-8, TRBJ2-3)
CASSTEGQRETDTQYF

SEQ ID NO: 228963 - protein, 12 aa, Homo sapiens
  CDR3 for alpha chain variable domain of TCR clone 114482 (TRAV12-3, TRAJ17)
CAMTLTGNKLTF

SEQ ID NO: 228964 - protein, 16 aa, Homo sapiens
  CDR3 for beta chain variable domain of TCR clone 114482 (TRBV3-1, TRBJ1-2)
CASSQGQGVQRDGYTF

SEQ ID NO: 228965 - protein, 14 aa, Homo sapiens
  CDR3 for alpha chain variable domain of TCR clone 114483 (TRAV1-2, TRAJ16)
CAVNRLSDGRKLLF

SEQ ID NO: 228966 - protein, 13 aa, Homo sapiens
  CDR3 for beta chain variable domain of TCR clone 114483 (TRBV20-1, TRBJ2-1)
CSAHGSSYNEQFF

SEQ ID NO: 228967 - protein, 18 aa, Homo sapiens
  CDR3 for alpha chain variable domain of TCR clone 114484 (TRAV13-1, TRAJ52)
CAASKRSAGGTSYGKLTF

SEQ ID NO: 228968 - protein, 14 aa, Homo sapiens
  CDR3 for beta chain variable domain of TCR clone 114484 (TRBV7-2, TRBJ2-7)
CASRSQGAAYEQYF

SEQ ID NO: 228969 - protein, 13 aa, Homo sapiens
  CDR3 for alpha chain variable domain of TCR clone 114485 (TRAV21, TRAJ27)
CAARPGHAGKSTF

SEQ ID NO: 228970 - protein, 14 aa, Homo sapiens
  CDR3 for beta chain variable domain of TCR clone 114485 (TRBV7-9, TRBJ2-5)
CASSLDTAQETQYF

SEQ ID NO: 228971 - protein, 14 aa, Homo sapiens
  CDR3 for alpha chain variable domain of TCR clone 114486 (TRAV1-2, TRAJ16)
CAVNRFSDGQKLLF

SEQ ID NO: 228972 - protein, 14 aa, Homo sapiens
  CDR3 for beta chain variable domain of TCR clone 114486 (TRBV18, TRBJ2-7)
CASSQRGGAYEQYF

SEQ ID NO: 228973 - protein, 16 aa, Homo sapiens
  CDR3 for alpha chain variable domain of TCR clone 114487 (TRAV3, TRAJ3)
CAVRDRAKSSASKIIF

SEQ ID NO: 228974 - protein, 13 aa, Homo sapiens
  CDR3 for beta chain variable domain of TCR clone 114487 (TRBV10-3, TRBJ2-7)
CASKLAVNYEHYF

SEQ ID NO: 228975 - protein, 13 aa, Homo sapiens
  CDR3 for alpha chain variable domain of TCR clone 114488 (TRAV1-1, TRAJ9)
CAAKNTGGFKTIF

SEQ ID NO: 228976 - protein, 14 aa, Homo sapiens
  CDR3 for beta chain variable domain of TCR clone 114488 (TRBV12-5, TRBJ2-5)
CASGSRTHQEAQYF

SEQ ID NO: 228977 - protein, 11 aa, Homo sapiens
  CDR3 for alpha chain variable domain of TCR clone 114489 (TRAV3, TRAJ17)
CAEAAGNKLTF

SEQ ID NO: 228978 - protein, 18 aa, Homo sapiens
  CDR3 for beta chain variable domain of TCR clone 114489 (TRBV20-1, TRBJ2-2)
AASTSAVLALRRTGELFF

SEQ ID NO: 228979 - protein, 14 aa, Homo sapiens
  CDR3 for alpha chain variable domain of TCR clone 114490 (TRAV12-2, TRAJ11)
YAVRKNSGYSTLTF

SEQ ID NO: 228980 - protein, 14 aa, Homo sapiens
  CDR3 for beta chain variable domain of TCR clone 114490 (TRBV7-2, TRBJ2-5)
CAGWQERFRETQYF

SEQ ID NO: 228981 - protein, 17 aa, Homo sapiens
  CDR3 for alpha chain variable domain of TCR clone 114491 (TRAV3, TRAJ12)
CAVRDGGRMDSSFKLIF

SEQ ID NO: 228982 - protein, 14 aa, Homo sapiens
  CDR3 for beta chain variable domain of TCR clone 114491 (TRBV7-9, TRBJ1-2)
CASSRQGANYGYTF

SEQ ID NO: 228983 - protein, 17 aa, Homo sapiens
  CDR3 for alpha chain variable domain of TCR clone 114492 (TRAV3, TRAJ42)
CAVRDRDYGGGQGNLIF

SEQ ID NO: 228984 - protein, 14 aa, Homo sapiens
  CDR3 for beta chain variable domain of TCR clone 114492 (TRBV7-2, TRBJ2-5)
CASSPRGSSETQYF

SEQ ID NO: 228985 - protein, 15 aa, Homo sapiens
  CDR3 for alpha chain variable domain of TCR clone 114493 (TRAV23/DV6, TRAJ18)
CAARYRGSTLGRLYF

SEQ ID NO: 228986 - protein, 14 aa, Homo sapiens
  CDR3 for beta chain variable domain of TCR clone 114493 (TRBV7-2, TRBJ2-7)
CASSPKTSFYEQYF

SEQ ID NO: 228987 - protein, 16 aa, Homo sapiens
  CDR3 for alpha chain variable domain of TCR clone 114494 (TRAV38-1, TRAJ32)
CAFMKGGGGATNKPLF

SEQ ID NO: 228988 - protein, 13 aa, Homo sapiens
  CDR3 for beta chain variable domain of TCR clone 114494 (TRBV20-1, TRBJ2-5)
CSAREAFQETQYF

SEQ ID NO: 228989 - protein, 17 aa, Homo sapiens
  CDR3 for alpha chain variable domain of TCR clone 114495 (TRAV3, TRAJ28)
CAVREAYSGAGSYQLTF

SEQ ID NO: 228990 - protein, 18 aa, Homo sapiens
  CDR3 for beta chain variable domain of TCR clone 114495 (TRBV27, TRBJ2-1)
CASGNRAVGVGGKNEQFF

SEQ ID NO: 228991 - protein, 15 aa, Homo sapiens
  CDR3 for alpha chain variable domain of TCR clone 114496 (TRAV3, TRAJ47)
CAVRDIGEYGNKLVF

SEQ ID NO: 228992 - protein, 14 aa, Homo sapiens
  CDR3 for beta chain variable domain of TCR clone 114496 (TRBV13, TRBJ2-5)
CACSLERVGETQYF

SEQ ID NO: 228993 - protein, 12 aa, Homo sapiens
  CDR3 for alpha chain variable domain of TCR clone 114497 (TRAV12-3, TRAJ17)
CAMTLTGNKLTF

SEQ ID NO: 228994 - protein, 20 aa, Homo sapiens
  CDR3 for beta chain variable domain of TCR clone 114497 (TRBV7-8, TRBJ2-2)
CASSHLFPGPTIHITGELLF

SEQ ID NO: 228995 - protein, 13 aa, Homo sapiens
  CDR3 for alpha chain variable domain of TCR clone 114498 (TRAV29/DV5, TRAJ47)
CAASEEYGNKLVF

SEQ ID NO: 228996 - protein, 13 aa, Homo sapiens
  CDR3 for beta chain variable domain of TCR clone 114498 (TRBV7-7, TRBJ2-2)
CASSLTSAGELFF

SEQ ID NO: 228997 - protein, 12 aa, Homo sapiens
  CDR3 for alpha chain variable domain of TCR clone 114499 (TRAV8-3, TRAJ20)
CAVGANDYKLSF

SEQ ID NO: 228998 - protein, 16 aa, Homo sapiens
  CDR3 for beta chain variable domain of TCR clone 114499 (TRBV19, TRBJ2-2)
CASRSPGTGATGQLFF

SEQ ID NO: 228999 - protein, 13 aa, Homo sapiens
  CDR3 for alpha chain variable domain of TCR clone 114500 (TRAV16, TRAJ22)
SAMLAGSARQLTF

SEQ ID NO: 229000 - protein, 18 aa, Homo sapiens
  CDR3 for beta chain variable domain of TCR clone 114500 (TRBV7-2, TRBJ2-3)
CASSLETSRGRKADTHYF

SEQ ID NO: 229001 - protein, 14 aa, Homo sapiens
  CDR3 for alpha chain variable domain of TCR clone 114501 (TRAV13-1, TRAJ4)
CAATLPSGYNKLIF

SEQ ID NO: 229002 - protein, 14 aa, Homo sapiens
  CDR3 for beta chain variable domain of TCR clone 114501 (TRBV19, TRBJ2-1)
CASPTFVLGGEQFF

SEQ ID NO: 229003 - protein, 13 aa, Homo sapiens
  CDR3 for alpha chain variable domain of TCR clone 114502 (TRAV35, TRAJ36)
CAGPRIGANNLFF

SEQ ID NO: 229004 - protein, 15 aa, Homo sapiens
  CDR3 for beta chain variable domain of TCR clone 114502 (TRBV9, TRBJ1-6)
CASSVAGTGDSPLHF

SEQ ID NO: 229005 - protein, 13 aa, Homo sapiens
  CDR3 for alpha chain variable domain of TCR clone 114503 (TRAV8-1, TRAJ34)
CAVRPYNTDNLIF

SEQ ID NO: 229006 - protein, 15 aa, Homo sapiens
  CDR3 for beta chain variable domain of TCR clone 114503 (TRBV7-9, TRBJ1-3)
CASSLRSGSGNTIYF

SEQ ID NO: 229007 - protein, 13 aa, Homo sapiens
  CDR3 for alpha chain variable domain of TCR clone 114504 (TRAV12-3, TRAJ13)
CAMGTGGYPKVTF

SEQ ID NO: 229008 - protein, 14 aa, Homo sapiens
  CDR3 for beta chain variable domain of TCR clone 114504 (TRBV7-2, TRBJ2-5)
CASSTGGELKTQYF

SEQ ID NO: 229009 - protein, 14 aa, Homo sapiens
  CDR3 for alpha chain variable domain of TCR clone 114505 (TRAV20, TRAJ42)
CAVQAGGSQGNLIF

SEQ ID NO: 229010 - protein, 16 aa, Homo sapiens
  CDR3 for beta chain variable domain of TCR clone 114505 (TRBV7-9, TRBJ1-2)
CASSLGFSSGEDGYTF

SEQ ID NO: 229011 - protein, 17 aa, Homo sapiens
  CDR3 for alpha chain variable domain of TCR clone 114506 (TRAV27, TRAJ26)
CAGARAPLDNYGQNFVF

SEQ ID NO: 229012 - protein, 15 aa, Homo sapiens
  CDR3 for beta chain variable domain of TCR clone 114506 (TRBV11-2, TRBJ2-5)
CASRPRSGGLETQYF

SEQ ID NO: 229013 - protein, 21 aa, Homo sapiens
  CDR3 for alpha chain variable domain of TCR clone 114507 (TRAV25, TRAJ53)
TATQTTDVGTGSGGSNYKLTF

SEQ ID NO: 229014 - protein, 12 aa, Homo sapiens
  CDR3 for beta chain variable domain of TCR clone 114507 (TRBV9, TRBJ2-2)
CASSVVNGELFF

SEQ ID NO: 229015 - protein, 17 aa, Homo sapiens
  CDR3 for alpha chain variable domain of TCR clone 114508 (TRAV4, TRAJ18)
CLVGERSVGSTLGRLYF

SEQ ID NO: 229016 - protein, 14 aa, Homo sapiens
  CDR3 for beta chain variable domain of TCR clone 114508 (TRBV10-2, TRBJ1-5)
CASSSTGRNQPQHF

SEQ ID NO: 229017 - protein, 13 aa, Homo sapiens
  CDR3 for alpha chain variable domain of TCR clone 114509 (TRAV27, TRAJ37)
CAGGPSNTGKLIF

SEQ ID NO: 229018 - protein, 15 aa, Homo sapiens
  CDR3 for beta chain variable domain of TCR clone 114509 (TRBV9, TRBJ1-6)
CASSVAGTGDSPLHF

SEQ ID NO: 229019 - protein, 14 aa, Homo sapiens
  CDR3 for alpha chain variable domain of TCR clone 114510 (TRAV2, TRAJ37)
CAVDFTSNTGKLIF

SEQ ID NO: 229020 - protein, 13 aa, Homo sapiens
  CDR3 for beta chain variable domain of TCR clone 114510 (TRBV15, TRBJ1-6)
CATSEGLNSPLHF

SEQ ID NO: 229021 - protein, 14 aa, Homo sapiens
  CDR3 for alpha chain variable domain of TCR clone 114511 (TRAV2, TRAJ9)
CAVEDRSGGFETIF

SEQ ID NO: 229022 - protein, 15 aa, Homo sapiens
  CDR3 for beta chain variable domain of TCR clone 114511 (TRBV12-4, TRBJ2-5)
CASSLSGAFQETQYF

SEQ ID NO: 229023 - protein, 13 aa, Homo sapiens
  CDR3 for alpha chain variable domain of TCR clone 114512 (TRAV29/DV5, TRAJ31)
CAASRNNNARLMF

SEQ ID NO: 229024 - protein, 14 aa, Homo sapiens
  CDR3 for beta chain variable domain of TCR clone 114512 (TRBV7-2, TRBJ1-1)
CASSFLTGTTEAFF

SEQ ID NO: 229025 - protein, 10 aa, Homo sapiens
  CDR3 for alpha chain variable domain of TCR clone 114513 (TRAV17, TRAJ36)
CATVAGNLFF

SEQ ID NO: 229026 - protein, 15 aa, Homo sapiens
  CDR3 for beta chain variable domain of TCR clone 114513 (TRBV27, TRBJ2-5)
CASSLIPSGEETQYF

SEQ ID NO: 229027 - protein, 13 aa, Homo sapiens
  CDR3 for alpha chain variable domain of TCR clone 114514 (TRAV27, TRAJ45)
CRSSGGGADGLTF

SEQ ID NO: 229028 - protein, 15 aa, Homo sapiens
  CDR3 for beta chain variable domain of TCR clone 114514 (TRBV12-4, TRBJ2-5)
CSSSPPTGLQETQYF

SEQ ID NO: 229029 - protein, 16 aa, Homo sapiens
  CDR3 for alpha chain variable domain of TCR clone 114515 (TRAV17, TRAJ52)
CATSNAGGTSYGKLTF

SEQ ID NO: 229030 - protein, 14 aa, Homo sapiens
  CDR3 for beta chain variable domain of TCR clone 114515 (TRBV6-5, TRBJ2-7)
CASSLFPGGYEQYF

SEQ ID NO: 229031 - protein, 13 aa, Homo sapiens
  CDR3 for alpha chain variable domain of TCR clone 114516 (TRAV12-2, TRAJ57)
CAGHQGGSEKLVF

SEQ ID NO: 229032 - protein, 16 aa, Homo sapiens
  CDR3 for beta chain variable domain of TCR clone 114516 (TRBV7-6, TRBJ2-3)
CASSPLAGGSTDTQYF

SEQ ID NO: 229033 - protein, 13 aa, Homo sapiens
  CDR3 for alpha chain variable domain of TCR clone 114517 (TRAV35, TRAJ42)
CAGSPGSQGNLIF

SEQ ID NO: 229034 - protein, 14 aa, Homo sapiens
  CDR3 for beta chain variable domain of TCR clone 114517 (TRBV29-1, TRBJ2-2)
CSVLAETNTGELFF

SEQ ID NO: 229035 - protein, 14 aa, Homo sapiens
  CDR3 for alpha chain variable domain of TCR clone 114518 (TRAV8-6, TRAJ12)
CAVKAADSSYKLIF

SEQ ID NO: 229036 - protein, 15 aa, Homo sapiens
  CDR3 for beta chain variable domain of TCR clone 114518 (TRBV7-2, TRBJ2-1)
CASSSGLAGGNEQFF

SEQ ID NO: 229037 - protein, 11 aa, Homo sapiens
  CDR3 for alpha chain variable domain of TCR clone 114519 (TRAV17, TRAJ9)
CATTGGFKTIF

SEQ ID NO: 229038 - protein, 15 aa, Homo sapiens
  CDR3 for beta chain variable domain of TCR clone 114519 (TRBV5-1, TRBJ2-1)
CASSPPRAPYNEQFF

SEQ ID NO: 229039 - protein, 15 aa, Homo sapiens
  CDR3 for alpha chain variable domain of TCR clone 114520 (TRAV17, TRAJ4)
CATGTWSGGYNKLIF

SEQ ID NO: 229040 - protein, 16 aa, Homo sapiens
  CDR3 for beta chain variable domain of TCR clone 114520 (TRBV13, TRBJ2-2)
CASSTRTGEHTGELFF

SEQ ID NO: 229041 - protein, 15 aa, Homo sapiens
  CDR3 for alpha chain variable domain of TCR clone 114521 (TRAV21, TRAJ53)
CATLNSGGSNYKLTF

SEQ ID NO: 229042 - protein, 15 aa, Homo sapiens
  CDR3 for beta chain variable domain of TCR clone 114521 (TRBV4-2, TRBJ1-2)
CASSQRTGGRDGYTF

SEQ ID NO: 229043 - protein, 12 aa, Homo sapiens
  CDR3 for alpha chain variable domain of TCR clone 114522 (TRAV30, TRAJ20)
CGTESNDYKLSF

SEQ ID NO: 229044 - protein, 15 aa, Homo sapiens
  CDR3 for beta chain variable domain of TCR clone 114522 (TRBV20-1, TRBJ2-7)
CSARDWVSGMDEQYF

SEQ ID NO: 229045 - protein, 14 aa, Homo sapiens
  CDR3 for alpha chain variable domain of TCR clone 114523 (TRAV20, TRAJ44)
CAVQDTGAASKLTF

SEQ ID NO: 229046 - protein, 13 aa, Homo sapiens
  CDR3 for beta chain variable domain of TCR clone 114523 (TRBV29-1, TRBJ1-3)
CSAGTGRGNTIYF

SEQ ID NO: 229047 - protein, 14 aa, Homo sapiens
  CDR3 for alpha chain variable domain of TCR clone 114524 (TRAV8-3, TRAJ13)
CAVGAQEGYQKVTF

SEQ ID NO: 229048 - protein, 13 aa, Homo sapiens
  CDR3 for beta chain variable domain of TCR clone 114524 (TRBV10-3, TRBJ1-2)
CAISERDSYGYTF

SEQ ID NO: 229049 - protein, 17 aa, Homo sapiens
  CDR3 for alpha chain variable domain of TCR clone 114525 (TRAV3, )
CAVSSNSGYPEPCPCRL

SEQ ID NO: 229050 - protein, 13 aa, Homo sapiens
  CDR3 for beta chain variable domain of TCR clone 114525 (TRBV20-1, TRBJ2-2)
CSALSGGAGELFF

SEQ ID NO: 229051 - protein, 17 aa, Homo sapiens
  CDR3 for alpha chain variable domain of TCR clone 114526 (TRAV1-1, TRAJ28)
CAVDPAYSGAGSYQLTF

SEQ ID NO: 229052 - protein, 14 aa, Homo sapiens
  CDR3 for beta chain variable domain of TCR clone 114526 (TRBV19, TRBJ2-1)
CASPTCVLSGEQFF

SEQ ID NO: 229053 - protein, 14 aa, Homo sapiens
  CDR3 for alpha chain variable domain of TCR clone 114527 (TRAV20, TRAJ36)
CAVQAGTGANNLFF

SEQ ID NO: 229054 - protein, 12 aa, Homo sapiens
  CDR3 for beta chain variable domain of TCR clone 114527 (TRBV2, TRBJ2-7)
CASTYRTDEQYF

SEQ ID NO: 229055 - protein, 16 aa, Homo sapiens
  CDR3 for alpha chain variable domain of TCR clone 114528 (TRAV3, TRAJ37)
CAVRPHGSGNTGKLIF

SEQ ID NO: 229056 - protein, 16 aa, Homo sapiens
  CDR3 for beta chain variable domain of TCR clone 114528 (TRBV4-3, TRBJ2-1)
CASSPALDRGVNEQFF

SEQ ID NO: 229057 - protein, 16 aa, Homo sapiens
  CDR3 for alpha chain variable domain of TCR clone 114529 (TRAV30, TRAJ24)
CGSEIVDADSWGKFQF

SEQ ID NO: 229058 - protein, 16 aa, Homo sapiens
  CDR3 for beta chain variable domain of TCR clone 114529 (TRBV7-3, TRBJ2-2)
CASSLKRGTLSGELFF

SEQ ID NO: 229059 - protein, 14 aa, Homo sapiens
  CDR3 for alpha chain variable domain of TCR clone 114530 (TRAV1-2, TRAJ16)
CAVNRFSDGQKLLF

SEQ ID NO: 229060 - protein, 18 aa, Homo sapiens
  CDR3 for beta chain variable domain of TCR clone 114530 (TRBV7-9, TRBJ2-3)
CASSLPINGQISTDTQYF

SEQ ID NO: 229061 - protein, 19 aa, Homo sapiens
  CDR3 for alpha chain variable domain of TCR clone 114531 (TRAV2, TRAJ20)
ILQVREADAAVYRDCKLSF

SEQ ID NO: 229062 - protein, 16 aa, Homo sapiens
  CDR3 for beta chain variable domain of TCR clone 114531 (TRBV9, TRBJ2-2)
CASSAMGKGNTGELFS

SEQ ID NO: 229063 - protein, 14 aa, Homo sapiens
  CDR3 for alpha chain variable domain of TCR clone 114532 (TRAV12-2, TRAJ13)
CAVKKTGGYQKVTF

SEQ ID NO: 229064 - protein, 15 aa, Homo sapiens
  CDR3 for beta chain variable domain of TCR clone 114532 (TRBV10-3, TRBJ2-1)
CAIRNGTSGHNEQFF

SEQ ID NO: 229065 - protein, 12 aa, Homo sapiens
  CDR3 for alpha chain variable domain of TCR clone 114533 (TRAV10, TRAJ34)
CVVIGKHRQAHL

SEQ ID NO: 229066 - protein, 14 aa, Homo sapiens
  CDR3 for beta chain variable domain of TCR clone 114533 (TRBV19, TRBJ2-1)
CASPTFVLSGEQFF

SEQ ID NO: 229067 - protein, 11 aa, Homo sapiens
  CDR3 for alpha chain variable domain of TCR clone 114534 (TRAV3, TRAJ21)
CAVGNFNKFYF

SEQ ID NO: 229068 - protein, 14 aa, Homo sapiens
  CDR3 for beta chain variable domain of TCR clone 114534 (TRBV5-1, TRBJ2-5)
CASSLAGKQETQYF

SEQ ID NO: 229069 - protein, 13 aa, Homo sapiens
  CDR3 for alpha chain variable domain of TCR clone 114535 (TRAV12-2, TRAJ10)
CDVPTGGGNKLTF

SEQ ID NO: 229070 - protein, 11 aa, Homo sapiens
  CDR3 for beta chain variable domain of TCR clone 114535 (TRBV6-1, TRBJ2-1)
CASISSNEQFF

SEQ ID NO: 229071 - protein, 14 aa, Homo sapiens
  CDR3 for alpha chain variable domain of TCR clone 114536 (TRAV16, TRAJ17)
CALSGRAAGNKLTF

SEQ ID NO: 229072 - protein, 15 aa, Homo sapiens
  CDR3 for beta chain variable domain of TCR clone 114536 (TRBV3-1, TRBJ1-2)
CASSPTRLPEEGYTF

SEQ ID NO: 229073 - protein, 15 aa, Homo sapiens
  CDR3 for alpha chain variable domain of TCR clone 114537 (TRAV3, TRAJ9)
CAVRDINTGGLKTIF

SEQ ID NO: 229074 - protein, 13 aa, Homo sapiens
  CDR3 for beta chain variable domain of TCR clone 114537 (TRBV19, TRBJ2-7)
CASSIPSVREQYF

SEQ ID NO: 229075 - protein, 11 aa, Homo sapiens
  CDR3 for alpha chain variable domain of TCR clone 114538 (TRAV1-2, TRAJ20)
CAVANDYKLSF

SEQ ID NO: 229076 - protein, 14 aa, Homo sapiens
  CDR3 for beta chain variable domain of TCR clone 114538 (TRBV7-9, TRBJ2-1)
CASSPRDSLYEQFF

SEQ ID NO: 229077 - protein, 14 aa, Homo sapiens
  CDR3 for alpha chain variable domain of TCR clone 114539 (TRAV29/DV5, TRAJ44)
CSAFLVGTASKLTF

SEQ ID NO: 229078 - protein, 15 aa, Homo sapiens
  CDR3 for beta chain variable domain of TCR clone 114539 (TRBV7-3, TRBJ2-2)
CASSETGQGTGELFF

SEQ ID NO: 229079 - protein, 11 aa, Homo sapiens
  CDR3 for alpha chain variable domain of TCR clone 114540 (TRAV3, TRAJ21)
CAVGNFNKFYF

SEQ ID NO: 229080 - protein, 15 aa, Homo sapiens
  CDR3 for beta chain variable domain of TCR clone 114540 (TRBV4-3, TRBJ2-5)
CASSQGTGHRETQYF

SEQ ID NO: 229081 - protein, 13 aa, Homo sapiens
  CDR3 for alpha chain variable domain of TCR clone 114541 (TRAV26-2, TRAJ43)
CILRAVNNNDMRF

SEQ ID NO: 229082 - protein, 15 aa, Homo sapiens
  CDR3 for beta chain variable domain of TCR clone 114541 (TRBV19, TRBJ1-2)
CASSVGQVLNYGYAF

SEQ ID NO: 229083 - protein, 13 aa, Homo sapiens
  CDR3 for alpha chain variable domain of TCR clone 114542 (TRAV12-3, TRAJ13)
CAMSSGGYQKVTS

SEQ ID NO: 229084 - protein, 16 aa, Homo sapiens
  CDR3 for beta chain variable domain of TCR clone 114542 (TRBV4-1, TRBJ2-7)
CASSRGDILNSYEQYF

SEQ ID NO: 229085 - protein, 12 aa, Homo sapiens
  CDR3 for alpha chain variable domain of TCR clone 114543 (TRAV12-3, TRAJ4)
CAMTGAGTRLAV

SEQ ID NO: 229086 - protein, 14 aa, Homo sapiens
  CDR3 for beta chain variable domain of TCR clone 114543 (TRBV10-3, TRBJ1-1)
CANSDTDRGVEAFF

SEQ ID NO: 229087 - protein, 13 aa, Homo sapiens
  CDR3 for alpha chain variable domain of TCR clone 114544 (TRAV29/DV5, TRAJ47)
CAASAEYGNKLVF

SEQ ID NO: 229088 - protein, 13 aa, Homo sapiens
  CDR3 for beta chain variable domain of TCR clone 114544 (TRBV7-9, TRBJ1-2)
CASSLKQNYGYTF

SEQ ID NO: 229089 - protein, 15 aa, Homo sapiens
  CDR3 for alpha chain variable domain of TCR clone 114545 (TRAV12-1, TRAJ9)
CVVSFGDTGGFKTNF

SEQ ID NO: 229090 - protein, 13 aa, Homo sapiens
  CDR3 for beta chain variable domain of TCR clone 114545 (TRBV2, TRBJ1-4)
CASSERAGEKLFF

SEQ ID NO: 229091 - protein, 13 aa, Homo sapiens
  CDR3 for alpha chain variable domain of TCR clone 114546 (TRAV1-1, TRAJ9)
CAAKNTGGFKTIF

SEQ ID NO: 229092 - protein, 17 aa, Homo sapiens
  CDR3 for beta chain variable domain of TCR clone 114546 (TRBV12-4, TRBJ2-3)
CASSSGLAGGHFDTQYF

SEQ ID NO: 229093 - protein, 14 aa, Homo sapiens
  CDR3 for alpha chain variable domain of TCR clone 114547 (TRAV1-2, TRAJ8)
CAVREDTGFQKLVF

SEQ ID NO: 229094 - protein, 15 aa, Homo sapiens
  CDR3 for beta chain variable domain of TCR clone 114547 (TRBV28, TRBJ2-1)
CASSLRQGGYNEQFF

SEQ ID NO: 229095 - protein, 14 aa, Homo sapiens
  CDR3 for alpha chain variable domain of TCR clone 114548 (TRAV1-2, TRAJ16)
CAINRFSDGQKLLF

SEQ ID NO: 229096 - protein, 13 aa, Homo sapiens
  CDR3 for beta chain variable domain of TCR clone 114548 (TRBV7-9, TRBJ1-2)
CASSLKQNYGYTF

SEQ ID NO: 229097 - protein, 16 aa, Homo sapiens
  CDR3 for alpha chain variable domain of TCR clone 114549 (TRAV30, TRAJ24)
CGTEIVDADSWGKFQF

SEQ ID NO: 229098 - protein, 17 aa, Homo sapiens
  CDR3 for beta chain variable domain of TCR clone 114549 (TRBV28, TRBJ2-3)
CASRNPSYGFSTDTQYF

SEQ ID NO: 229099 - protein, 14 aa, Homo sapiens
  CDR3 for alpha chain variable domain of TCR clone 114550 (TRAV35, TRAJ33)
CAGSSQDSNYQLIW

SEQ ID NO: 229100 - protein, 15 aa, Homo sapiens
  CDR3 for beta chain variable domain of TCR clone 114550 (TRBV5-7, TRBJ2-7)
CAGSLGPGRGHEQYF

SEQ ID NO: 229101 - protein, 15 aa, Homo sapiens
  CDR3 for alpha chain variable domain of TCR clone 114551 (TRAV26-1, TRAJ29)
CIVRVEGSGNTALVF

SEQ ID NO: 229102 - protein, 15 aa, Homo sapiens
  CDR3 for beta chain variable domain of TCR clone 114551 (TRBV7-9, TRBJ1-5)
CASSQGHQPNQPQHF

SEQ ID NO: 229103 - protein, 13 aa, Homo sapiens
  CDR3 for alpha chain variable domain of TCR clone 114552 (TRAV20, TRAJ54)
CAVQAGGAQKLLF

SEQ ID NO: 229104 - protein, 14 aa, Homo sapiens
  CDR3 for beta chain variable domain of TCR clone 114552 (TRBV20-1, TRBJ2-7)
CSAKTGTGGYEQYF

SEQ ID NO: 229105 - protein, 13 aa, Homo sapiens
  CDR3 for alpha chain variable domain of TCR clone 114553 (TRAV3, TRAJ7)
CAVSSYGNNRLAF

SEQ ID NO: 229106 - protein, 14 aa, Homo sapiens
  CDR3 for beta chain variable domain of TCR clone 114553 (TRBV25-1, TRBJ1-1)
CASTHLGGNTEAFF

SEQ ID NO: 229107 - protein, 13 aa, Homo sapiens
  CDR3 for alpha chain variable domain of TCR clone 114554 (TRAV12-3, TRAJ5)
CAMIYTVRRALTF

SEQ ID NO: 229108 - protein, 12 aa, Homo sapiens
  CDR3 for beta chain variable domain of TCR clone 114554 (TRBV18, TRBJ1-4)
CASSPSREKLFF

SEQ ID NO: 229109 - protein, 15 aa, Homo sapiens
  CDR3 for alpha chain variable domain of TCR clone 114555 (TRAV34, TRAJ36)
CGAPARLGGANNLFF

SEQ ID NO: 229110 - protein, 16 aa, Homo sapiens
  CDR3 for beta chain variable domain of TCR clone 114555 (TRBV4-3, TRBJ2-1)
CASSYRRLGSWDEQFF

SEQ ID NO: 229111 - protein, 13 aa, Homo sapiens
  CDR3 for alpha chain variable domain of TCR clone 114556 (TRAV3, TRAJ21)
CAVREPDFNKFYF

SEQ ID NO: 229112 - protein, 12 aa, Homo sapiens
  CDR3 for beta chain variable domain of TCR clone 114556 (TRBV7-9, TRBJ1-5)
CASSPQGQPQHF

SEQ ID NO: 229113 - protein, 11 aa, Homo sapiens
  CDR3 for alpha chain variable domain of TCR clone 114557 (TRAV1-2, TRAJ20)
CAVSNDYKLSF

SEQ ID NO: 229114 - protein, 15 aa, Homo sapiens
  CDR3 for beta chain variable domain of TCR clone 114557 (TRBV20-1, TRBJ1-1)
CSASRGVTGNTEAFF

SEQ ID NO: 229115 - protein, 17 aa, Homo sapiens
  CDR3 for alpha chain variable domain of TCR clone 114558 (TRAV23/DV6, TRAJ58)
CAARLLRGETSGSRLTF

SEQ ID NO: 229116 - protein, 15 aa, Homo sapiens
  CDR3 for beta chain variable domain of TCR clone 114558 (TRBV27, TRBJ2-1)
CASSNGGGSSNEQFF

SEQ ID NO: 229117 - protein, 17 aa, Homo sapiens
  CDR3 for alpha chain variable domain of TCR clone 114559 (TRAV13-2, TRAJ42)
CAEEGKNYGGSQGNLIF

SEQ ID NO: 229118 - protein, 16 aa, Homo sapiens
  CDR3 for beta chain variable domain of TCR clone 114559 (TRBV7-9, TRBJ2-1)
CASSLGTGWDYNEQFF

SEQ ID NO: 229119 - protein, 17 aa, Homo sapiens
  CDR3 for alpha chain variable domain of TCR clone 114560 (TRAV1-1, TRAJ28)
CAVDPAYSGAGSYQLTF

SEQ ID NO: 229120 - protein, 14 aa, Homo sapiens
  CDR3 for beta chain variable domain of TCR clone 114560 (TRBV19, TRBJ2-1)
CASPTFVVSGEQFF

SEQ ID NO: 229121 - protein, 12 aa, Homo sapiens
  CDR3 for alpha chain variable domain of TCR clone 114561 (TRAV12-3, TRAJ17)
CAMTLTGNKLTL

SEQ ID NO: 229122 - protein, 15 aa, Homo sapiens
  CDR3 for beta chain variable domain of TCR clone 114561 (TRBV20-1, TRBJ2-7)
CSARYRVSGMDEQYF

SEQ ID NO: 229123 - protein, 13 aa, Homo sapiens
  CDR3 for alpha chain variable domain of TCR clone 114562 (TRAV2, TRAJ40)
CAVVTSGTYKYIF

SEQ ID NO: 229124 - protein, 16 aa, Homo sapiens
  CDR3 for beta chain variable domain of TCR clone 114562 (TRBV7-3, TRBJ2-3)
CASSLSGYRPEDTQYF

SEQ ID NO: 229125 - protein, 13 aa, Homo sapiens
  CDR3 for alpha chain variable domain of TCR clone 114563 (TRAV4, TRAJ34)
CLVPPYNTDKLIF

SEQ ID NO: 229126 - protein, 15 aa, Homo sapiens
  CDR3 for beta chain variable domain of TCR clone 114563 (TRBV18, TRBJ2-1)
CASSPPSASYNEQFF

SEQ ID NO: 229127 - protein, 12 aa, Homo sapiens
  CDR3 for alpha chain variable domain of TCR clone 114564 (TRAV13-2, TRAJ23)
CAERHRGGKLIF

SEQ ID NO: 229128 - protein, 14 aa, Homo sapiens
  CDR3 for beta chain variable domain of TCR clone 114564 (TRBV5-4, TRBJ2-1)
CASSLDQGLNEQFF

SEQ ID NO: 229129 - protein, 16 aa, Homo sapiens
  CDR3 for alpha chain variable domain of TCR clone 114565 (TRAV21, TRAJ37)
CAVRPRGSSNKGKLIF

SEQ ID NO: 229130 - protein, 13 aa, Homo sapiens
  CDR3 for beta chain variable domain of TCR clone 114565 (TRBV7-9, TRBJ2-5)
CASLSPGQETQYF

SEQ ID NO: 229131 - protein, 17 aa, Homo sapiens
  CDR3 for alpha chain variable domain of TCR clone 114566 (TRAV3, TRAJ42)
CAVRDRDYGGSQGNLIF

SEQ ID NO: 229132 - protein, 11 aa, Homo sapiens
  CDR3 for beta chain variable domain of TCR clone 114566 (TRBV6-3, TRBJ2-3)
CATGQADTQYF

SEQ ID NO: 229133 - protein, 13 aa, Homo sapiens
  CDR3 for alpha chain variable domain of TCR clone 114567 (TRAV3, TRAJ20)
CAARSLNDYKLSF

SEQ ID NO: 229134 - protein, 13 aa, Homo sapiens
  CDR3 for beta chain variable domain of TCR clone 114567 (TRBV6-1, TRBJ2-1)
CAGMDPTNNEQFF

SEQ ID NO: 229135 - protein, 14 aa, Homo sapiens
  CDR3 for alpha chain variable domain of TCR clone 114568 (TRAV12-2, TRAJ13)
CAVKKTGGYQKVTF

SEQ ID NO: 229136 - protein, 14 aa, Homo sapiens
  CDR3 for beta chain variable domain of TCR clone 114568 (TRBV7-2, TRBJ1-5)
CASSTQGAGQPQHF

SEQ ID NO: 229137 - protein, 16 aa, Homo sapiens
  CDR3 for alpha chain variable domain of TCR clone 114569 (TRAV30, TRAJ24)
RGTEIVDADSWGKFQF

SEQ ID NO: 229138 - protein, 14 aa, Homo sapiens
  CDR3 for beta chain variable domain of TCR clone 114569 (TRBV12-5, TRBJ2-5)
CASSSRTHQETQYF

SEQ ID NO: 229139 - protein, 15 aa, Homo sapiens
  CDR3 for alpha chain variable domain of TCR clone 114570 (TRAV26-1, TRAJ40)
CIVRAVPSGTYKYIF

SEQ ID NO: 229140 - protein, 14 aa, Homo sapiens
  CDR3 for beta chain variable domain of TCR clone 114570 (TRBV19, TRBJ2-1)
CVSKDPGLANEQFF

SEQ ID NO: 229141 - protein, 18 aa, Homo sapiens
  CDR3 for alpha chain variable domain of TCR clone 114571 (TRAV21, TRAJ52)
CAVRPSPAGGTRYGKLTF

SEQ ID NO: 229142 - protein, 13 aa, Homo sapiens
  CDR3 for beta chain variable domain of TCR clone 114571 (TRBV10-3, TRBJ2-7)
CASKLAVNYEQYF

SEQ ID NO: 229143 - protein, 13 aa, Homo sapiens
  CDR3 for alpha chain variable domain of TCR clone 114572 (TRAV22, TRAJ29)
CAVGGSGNTPLVF

SEQ ID NO: 229144 - protein, 16 aa, Homo sapiens
  CDR3 for beta chain variable domain of TCR clone 114572 (TRBV13, TRBJ2-2)
CASSPRTGEHTGELFF

SEQ ID NO: 229145 - protein, 10 aa, Homo sapiens
  CDR3 for alpha chain variable domain of TCR clone 114573 (TRAV1-2, TRAJ20)
CACNDYKLSI

SEQ ID NO: 229146 - protein, 16 aa, Homo sapiens
  CDR3 for beta chain variable domain of TCR clone 114573 (TRBV20-1, TRBJ2-1)
CSARDLKQGMNNEQFF

SEQ ID NO: 229147 - protein, 14 aa, Homo sapiens
  CDR3 for alpha chain variable domain of TCR clone 114574 (TRAV16, TRAJ26)
CITVLSAYGQNFVF

SEQ ID NO: 229148 - protein, 14 aa, Homo sapiens
  CDR3 for beta chain variable domain of TCR clone 114574 (TRBV7-2, TRBJ2-7)
CASRSQGAAYEQYL

SEQ ID NO: 229149 - protein, 16 aa, Homo sapiens
  CDR3 for alpha chain variable domain of TCR clone 114575 (TRAV1-2, TRAJ10)
CAVRGVLTGGGNKLTL

SEQ ID NO: 229150 - protein, 20 aa, Homo sapiens
  CDR3 for beta chain variable domain of TCR clone 114575 (TRBV7-8, TRBJ2-2)
CASSHLFPGPTIHITGELFF

SEQ ID NO: 229151 - protein, 10 aa, Homo sapiens
  CDR3 for alpha chain variable domain of TCR clone 114576 (TRAV26-1, TRAJ40)
CIAGTYKYIF

SEQ ID NO: 229152 - protein, 13 aa, Homo sapiens
  CDR3 for beta chain variable domain of TCR clone 114576 (TRBV19, TRBJ1-2)
CASSVPGQDGYTF

SEQ ID NO: 229153 - protein, 12 aa, Homo sapiens
  CDR3 for alpha chain variable domain of TCR clone 114577 (TRAV12-3, TRAJ17)
CAMTLTGNKLTF

SEQ ID NO: 229154 - protein, 13 aa, Homo sapiens
  CDR3 for beta chain variable domain of TCR clone 114577 (TRBV14, TRBJ1-1)
CASSQEAGTEAFF

SEQ ID NO: 229155 - protein, 14 aa, Homo sapiens
  CDR3 for alpha chain variable domain of TCR clone 114578 (TRAV12-3, TRAJ9)
CAMSVETGGFKTIF

SEQ ID NO: 229156 - protein, 19 aa, Homo sapiens
  CDR3 for beta chain variable domain of TCR clone 114578 (TRBV25-1, TRBJ2-2)
CAILVYRVDRGRKTGELFF

SEQ ID NO: 229157 - protein, 13 aa, Homo sapiens
  CDR3 for alpha chain variable domain of TCR clone 114579 (TRAV17, TRAJ9)
CATDYTGGFKTIF

SEQ ID NO: 229158 - protein, 13 aa, Homo sapiens
  CDR3 for beta chain variable domain of TCR clone 114579 (TRBV7-9, TRBJ1-2)
CASSLKQTYGYTF

SEQ ID NO: 229159 - protein, 14 aa, Homo sapiens
  CDR3 for alpha chain variable domain of TCR clone 114580 (TRAV4, TRAJ9)
CLVGSGTGGVKTIF

SEQ ID NO: 229160 - protein, 15 aa, Homo sapiens
  CDR3 for beta chain variable domain of TCR clone 114580 (TRBV7-2, TRBJ2-1)
CASSLASGRVNEQFF

SEQ ID NO: 229161 - protein, 15 aa, Homo sapiens
  CDR3 for alpha chain variable domain of TCR clone 114581 (TRAV3, TRAJ13)
CAVRAIAGGYQKVTF

SEQ ID NO: 229162 - protein, 13 aa, Homo sapiens
  CDR3 for beta chain variable domain of TCR clone 114581 (TRBV2, TRBJ2-2)
CASSKKNTGELFF

SEQ ID NO: 229163 - protein, 12 aa, Homo sapiens
  CDR3 for alpha chain variable domain of TCR clone 114582 (TRAV12-3, TRAJ17)
CAMTLTGNMLTF

SEQ ID NO: 229164 - protein, 14 aa, Homo sapiens
  CDR3 for beta chain variable domain of TCR clone 114582 (TRBV4-1, TRBJ2-7)
CASSQDREHVEQYF

SEQ ID NO: 229165 - protein, 13 aa, Homo sapiens
  CDR3 for alpha chain variable domain of TCR clone 114583 (TRAV3, TRAJ30)
CAVRDRGDDKIIF

SEQ ID NO: 229166 - protein, 16 aa, Homo sapiens
  CDR3 for beta chain variable domain of TCR clone 114583 (TRBV7-3, TRBJ2-2)
CASSLKRGTLYGELFF

SEQ ID NO: 229167 - protein, 12 aa, Homo sapiens
  CDR3 for alpha chain variable domain of TCR clone 114584 (TRAV21, TRAJ42)
CAVGGSQGNLIS

SEQ ID NO: 229168 - protein, 14 aa, Homo sapiens
  CDR3 for beta chain variable domain of TCR clone 114584 (TRBV12-4, TRBJ1-1)
CASSLGTGGTEAFF

SEQ ID NO: 229169 - protein, 18 aa, Homo sapiens
  CDR3 for alpha chain variable domain of TCR clone 114585 (TRAV13-1, TRAJ52)
CAASKRSAGGTSYGELTF

SEQ ID NO: 229170 - protein, 17 aa, Homo sapiens
  CDR3 for beta chain variable domain of TCR clone 114585 (TRBV4-3, TRBJ2-7)
CASSQDLIGQGAYEQYF

SEQ ID NO: 229171 - protein, 16 aa, Homo sapiens
  CDR3 for alpha chain variable domain of TCR clone 114586 (TRAV30, TRAJ57)
CGTGWAPQGGSEELVF

SEQ ID NO: 229172 - protein, 14 aa, Homo sapiens
  CDR3 for beta chain variable domain of TCR clone 114586 (TRBV18, TRBJ1-1)
CASSPGFQGVEAFF

SEQ ID NO: 229173 - protein, 12 aa, Homo sapiens
  CDR3 for alpha chain variable domain of TCR clone 114587 (TRAV13-1, TRAJ21)
CAAQEGFNKFYF

SEQ ID NO: 229174 - protein, 14 aa, Homo sapiens
  CDR3 for beta chain variable domain of TCR clone 114587 (TRBV5-4, TRBJ1-1)
CASSLDSRRDEAFF

SEQ ID NO: 229175 - protein, 17 aa, Homo sapiens
  CDR3 for alpha chain variable domain of TCR clone 114588 (TRAV3, TRAJ6)
CAVRYGPRAGGSYKPTF

SEQ ID NO: 229176 - protein, 14 aa, Homo sapiens
  CDR3 for beta chain variable domain of TCR clone 114588 (TRBV7-2, TRBJ2-7)
CASSPKTSFYEQYF

SEQ ID NO: 229177 - protein, 16 aa, Homo sapiens
  CDR3 for alpha chain variable domain of TCR clone 114589 (TRAV12-3, TRAJ53)
CAMSPGSGGSNYKLTF

SEQ ID NO: 229178 - protein, 16 aa, Homo sapiens
  CDR3 for beta chain variable domain of TCR clone 114589 (TRBV4-2, TRBJ1-1)
CASRQAGFGMNTEAFF

SEQ ID NO: 229179 - protein, 14 aa, Homo sapiens
  CDR3 for alpha chain variable domain of TCR clone 114590 (TRAV8-2, TRAJ23)
CVVSDDNQGGKLIF

SEQ ID NO: 229180 - protein, 15 aa, Homo sapiens
  CDR3 for beta chain variable domain of TCR clone 114590 (TRBV10-2, TRBJ2-6)
CASSEQGTGANVLTF

SEQ ID NO: 229181 - protein, 11 aa, Homo sapiens
  CDR3 for alpha chain variable domain of TCR clone 114591 (TRAV23/DV6, TRAJ58)
CAARLLRGETS

SEQ ID NO: 229182 - protein, 17 aa, Homo sapiens
  CDR3 for beta chain variable domain of TCR clone 114591 (TRBV19, TRBJ2-6)
CASSTGQVFSGANVLTF

SEQ ID NO: 229183 - protein, 14 aa, Homo sapiens
  CDR3 for alpha chain variable domain of TCR clone 114592 (TRAV17, TRAJ57)
CATDPQGGSEKLVF

SEQ ID NO: 229184 - protein, 16 aa, Homo sapiens
  CDR3 for beta chain variable domain of TCR clone 114592 (TRBV2, TRBJ1-5)
CASSAPGLEGAQPQHF

SEQ ID NO: 229185 - protein, 12 aa, Homo sapiens
  CDR3 for alpha chain variable domain of TCR clone 114593 (TRAV17, TRAJ57)
CATDGGAEKLVF

SEQ ID NO: 229186 - protein, 14 aa, Homo sapiens
  CDR3 for beta chain variable domain of TCR clone 114593 (TRBV28, TRBJ2-7)
CASTFYGRAHEQYF

SEQ ID NO: 229187 - protein, 11 aa, Homo sapiens
  CDR3 for alpha chain variable domain of TCR clone 114594 (TRAV23/DV6, TRAJ58)
CAARLLRGETS

SEQ ID NO: 229188 - protein, 16 aa, Homo sapiens
  CDR3 for beta chain variable domain of TCR clone 114594 (TRBV3-1, TRBJ1-6)
CASSQEFQGSYSPLHF

SEQ ID NO: 229189 - protein, 12 aa, Homo sapiens
  CDR3 for alpha chain variable domain of TCR clone 114595 (TRAV3, TRAJ20)
CAVRDPDYKLSF

SEQ ID NO: 229190 - protein, 15 aa, Homo sapiens
  CDR3 for beta chain variable domain of TCR clone 114595 (TRBV10-1, TRBJ2-3)
CASSATSGGFDTQYF

SEQ ID NO: 229191 - protein, 14 aa, Homo sapiens
  CDR3 for alpha chain variable domain of TCR clone 114596 (TRAV12-2, TRAJ44)
CAVNPAGTASKLTF

SEQ ID NO: 229192 - protein, 12 aa, Homo sapiens
  CDR3 for beta chain variable domain of TCR clone 114596 (TRBV11-2, TRBJ2-2)
CASSLPTGELFF

SEQ ID NO: 229193 - protein, 17 aa, Homo sapiens
  CDR3 for alpha chain variable domain of TCR clone 114597 (TRAV13-1, TRAJ52)
CSASLGAGGTSYGKLTF

SEQ ID NO: 229194 - protein, 15 aa, Homo sapiens
  CDR3 for beta chain variable domain of TCR clone 114597 (TRBV2, TRBJ2-1)
CASSELAGSYNEQFF

SEQ ID NO: 229195 - protein, 14 aa, Homo sapiens
  CDR3 for alpha chain variable domain of TCR clone 114598 (TRAV1-2, TRAJ16)
CAVNRFSDGQKLLF

SEQ ID NO: 229196 - protein, 15 aa, Homo sapiens
  CDR3 for beta chain variable domain of TCR clone 114598 (TRBV6-3, TRBJ2-7)
CASSSPVTVFYEQYF

SEQ ID NO: 229197 - protein, 12 aa, Homo sapiens
  CDR3 for alpha chain variable domain of TCR clone 114599 (TRAV12-1, TRAJ40)
CVVYSGTYKYIF

SEQ ID NO: 229198 - protein, 17 aa, Homo sapiens
  CDR3 for beta chain variable domain of TCR clone 114599 (TRBV11-3, TRBJ1-5)
CASSPLTGLRGNQAQHF

SEQ ID NO: 229199 - protein, 11 aa, Homo sapiens
  CDR3 for alpha chain variable domain of TCR clone 114600 (TRAV8-3, TRAJ15)
CAVGSGTALIF

SEQ ID NO: 229200 - protein, 18 aa, Homo sapiens
  CDR3 for beta chain variable domain of TCR clone 114600 (TRBV18, TRBJ2-3)
CASSYTSGAAGGTDTQYF

SEQ ID NO: 229201 - protein, 14 aa, Homo sapiens
  CDR3 for alpha chain variable domain of TCR clone 114601 (TRAV12-1, TRAJ29)
YVVNEGSGNTPLVF

SEQ ID NO: 229202 - protein, 13 aa, Homo sapiens
  CDR3 for beta chain variable domain of TCR clone 114601 (TRBV7-9, TRBJ2-3)
CASSPGSTDTQYF

SEQ ID NO: 229203 - protein, 10 aa, Homo sapiens
  CDR3 for alpha chain variable domain of TCR clone 114602 (TRAV23/DV6, TRAJ57)
CAASSTLSQG

SEQ ID NO: 229204 - protein, 16 aa, Homo sapiens
  CDR3 for beta chain variable domain of TCR clone 114602 (TRBV12-4, TRBJ1-3)
CASSPRTGRSGNTIYF

SEQ ID NO: 229205 - protein, 14 aa, Homo sapiens
  CDR3 for alpha chain variable domain of TCR clone 114603 (TRAV17, TRAJ57)
CATDPQGGSEKPVF

SEQ ID NO: 229206 - protein, 14 aa, Homo sapiens
  CDR3 for beta chain variable domain of TCR clone 114603 (TRBV11-2, TRBJ2-3)
CASSLGGGANTQYF

SEQ ID NO: 229207 - protein, 14 aa, Homo sapiens
  CDR3 for alpha chain variable domain of TCR clone 114604 (TRAV17, TRAJ22)
CATSPSGSARQLTF

SEQ ID NO: 229208 - protein, 14 aa, Homo sapiens
  CDR3 for beta chain variable domain of TCR clone 114604 (TRBV7-3, TRBJ2-1)
CASSLAGGTNEQFF

SEQ ID NO: 229209 - protein, 12 aa, Homo sapiens
  CDR3 for alpha chain variable domain of TCR clone 114605 (TRAV29/DV5, TRAJ15)
CASNQAGTALIF

SEQ ID NO: 229210 - protein, 14 aa, Homo sapiens
  CDR3 for beta chain variable domain of TCR clone 114605 (TRBV11-2, TRBJ2-2)
CQQLGQGECRELFF

SEQ ID NO: 229211 - protein, 11 aa, Homo sapiens
  CDR3 for alpha chain variable domain of TCR clone 114606 (TRAV3, TRAJ21)
LAVGNFNKFYF

SEQ ID NO: 229212 - protein, 16 aa, Homo sapiens
  CDR3 for beta chain variable domain of TCR clone 114606 (TRBV19, TRBJ2-1)
CASSKAGPSSYNEQFF

SEQ ID NO: 229213 - protein, 16 aa, Homo sapiens
  CDR3 for alpha chain variable domain of TCR clone 114607 (TRAV13-1, TRAJ37)
CAASSLGSSNTGKLNF

SEQ ID NO: 229214 - protein, 12 aa, Homo sapiens
  CDR3 for beta chain variable domain of TCR clone 114607 (TRBV6-1, TRBJ2-5)
CASSEGRETQYF

SEQ ID NO: 229215 - protein, 15 aa, Homo sapiens
  CDR3 for alpha chain variable domain of TCR clone 114608 (TRAV3, TRAJ20)
CAVRDIKLSDYKLSV

SEQ ID NO: 229216 - protein, 15 aa, Homo sapiens
  CDR3 for beta chain variable domain of TCR clone 114608 (TRBV7-9, TRBJ1-6)
CASSSPGRGNSPLHF

SEQ ID NO: 229217 - protein, 14 aa, Homo sapiens
  CDR3 for alpha chain variable domain of TCR clone 114609 (TRAV2, TRAJ9)
CAVEDRSGGFKTIF

SEQ ID NO: 229218 - protein, 14 aa, Homo sapiens
  CDR3 for beta chain variable domain of TCR clone 114609 (TRBV18, TRBJ2-7)
CASSPGGGAYEQYF

SEQ ID NO: 229219 - protein, 17 aa, Homo sapiens
  CDR3 for alpha chain variable domain of TCR clone 114610 (TRAV13-1, TRAJ52)
YAASSGAGGTSYGKLTF

SEQ ID NO: 229220 - protein, 15 aa, Homo sapiens
  CDR3 for beta chain variable domain of TCR clone 114610 (TRBV2, TRBJ2-1)
CASSELAGSYNEQFF

SEQ ID NO: 229221 - protein, 18 aa, Homo sapiens
  CDR3 for alpha chain variable domain of TCR clone 114611 (TRAV9-2, TRAJ13)
CQTQRCTEPSGGYQKVTF

SEQ ID NO: 229222 - protein, 13 aa, Homo sapiens
  CDR3 for beta chain variable domain of TCR clone 114611 (TRBV5-7, TRBJ2-5)
CASRASGGGTQYF

SEQ ID NO: 229223 - protein, 19 aa, Homo sapiens
  CDR3 for alpha chain variable domain of TCR clone 114612 (TRAV27, TRAJ49)
TAAQPGDTGLYPTSNQFYF

SEQ ID NO: 229224 - protein, 16 aa, Homo sapiens
  CDR3 for beta chain variable domain of TCR clone 114612 (TRBV20-1, TRBJ2-7)
CSASTSGRLSSYEQYF

SEQ ID NO: 229225 - protein, 13 aa, Homo sapiens
  CDR3 for alpha chain variable domain of TCR clone 114613 (TRAV21, TRAJ57)
CAVTQGGSEKLVF

SEQ ID NO: 229226 - protein, 15 aa, Homo sapiens
  CDR3 for beta chain variable domain of TCR clone 114613 (TRBV5-1, TRBJ1-1)
CASSSTTGANTEAFF

SEQ ID NO: 229227 - protein, 14 aa, Homo sapiens
  CDR3 for alpha chain variable domain of TCR clone 114614 (TRAV8-3, TRAJ42)
CAVGAWGSQGNLIF

SEQ ID NO: 229228 - protein, 14 aa, Homo sapiens
  CDR3 for beta chain variable domain of TCR clone 114614 (TRBV19, TRBJ1-2)
CASSLQGQAYGYTF

SEQ ID NO: 229229 - protein, 14 aa, Homo sapiens
  CDR3 for alpha chain variable domain of TCR clone 114615 (TRAV13-1, TRAJ35)
CAASKGGFGNVLHC

SEQ ID NO: 229230 - protein, 18 aa, Homo sapiens
  CDR3 for beta chain variable domain of TCR clone 114615 (TRBV18, TRBJ2-3)
CASSYTSGAAGGTDTQYF

SEQ ID NO: 229231 - protein, 16 aa, Homo sapiens
  CDR3 for alpha chain variable domain of TCR clone 114616 (TRAV3, TRAJ42)
CAVRDIEGGRQGNLIF

SEQ ID NO: 229232 - protein, 15 aa, Homo sapiens
  CDR3 for beta chain variable domain of TCR clone 114616 (TRBV9, TRBJ2-2)
CASSDFAGASGELFF

SEQ ID NO: 229233 - protein, 12 aa, Homo sapiens
  CDR3 for alpha chain variable domain of TCR clone 114617 (TRAV12-2, TRAJ30)
CAVRNRDDKIIF

SEQ ID NO: 229234 - protein, 15 aa, Homo sapiens
  CDR3 for beta chain variable domain of TCR clone 114617 (TRBV6-3, TRBJ1-5)
CASMVDRWSNQPQHF

SEQ ID NO: 229235 - protein, 13 aa, Homo sapiens
  CDR3 for alpha chain variable domain of TCR clone 114618 (TRAV2, TRAJ29)
CAAGNSGNTPLVF

SEQ ID NO: 229236 - protein, 13 aa, Homo sapiens
  CDR3 for beta chain variable domain of TCR clone 114618 (TRBV7-3, TRBJ1-1)
CASSQDWGAEAFF

SEQ ID NO: 229237 - protein, 12 aa, Homo sapiens
  CDR3 for alpha chain variable domain of TCR clone 114619 (TRAV17, TRAJ4)
CATDGGYNKLIF

SEQ ID NO: 229238 - protein, 13 aa, Homo sapiens
  CDR3 for beta chain variable domain of TCR clone 114619 (TRBV29-1, TRBJ2-2)
CSTTEVNTGELFF

SEQ ID NO: 229239 - protein, 12 aa, Homo sapiens
  CDR3 for alpha chain variable domain of TCR clone 114620 (TRAV13-1, TRAJ21)
CAAKEGFNKFYF

SEQ ID NO: 229240 - protein, 12 aa, Homo sapiens
  CDR3 for beta chain variable domain of TCR clone 114620 (TRBV5-4, TRBJ2-7)
CASSLEAYEQYF

SEQ ID NO: 229241 - protein, 13 aa, Homo sapiens
  CDR3 for alpha chain variable domain of TCR clone 114621 (TRAV8-1, TRAJ8)
CAVNRTGFQKLVF

SEQ ID NO: 229242 - protein, 16 aa, Homo sapiens
  CDR3 for beta chain variable domain of TCR clone 114621 (TRBV12-4, TRBJ1-5)
CASSRPVGGSNQPQHF

SEQ ID NO: 229243 - protein, 18 aa, Homo sapiens
  CDR3 for alpha chain variable domain of TCR clone 114622 (TRAV21, TRAJ52)
CAVRPSPAGGTSYGKLTF

SEQ ID NO: 229244 - protein, 13 aa, Homo sapiens
  CDR3 for beta chain variable domain of TCR clone 114622 (TRBV7-3, TRBJ1-1)
CASSEDWGAEAFF

SEQ ID NO: 229245 - protein, 13 aa, Homo sapiens
  CDR3 for alpha chain variable domain of TCR clone 114623 (TRAV12-1, TRAJ6)
CVVFPGGSYIPTF

SEQ ID NO: 229246 - protein, 13 aa, Homo sapiens
  CDR3 for beta chain variable domain of TCR clone 114623 (TRBV7-9, TRBJ1-2)
CASSVKQNYGYTF

SEQ ID NO: 229247 - protein, 12 aa, Homo sapiens
  CDR3 for alpha chain variable domain of TCR clone 114624 (TRAV13-1, TRAJ21)
CAAKEGFNKFYF

SEQ ID NO: 229248 - protein, 15 aa, Homo sapiens
  CDR3 for beta chain variable domain of TCR clone 114624 (TRBV24-1, TRBJ2-5)
CATSETTGAVGVQYF

SEQ ID NO: 229249 - protein, 16 aa, Homo sapiens
  CDR3 for alpha chain variable domain of TCR clone 114625 (TRAV12-3, TRAJ53)
CAMSPGSGGSNYKLTF

SEQ ID NO: 229250 - protein, 17 aa, Homo sapiens
  CDR3 for beta chain variable domain of TCR clone 114625 (TRBV4-2, TRBJ1-1)
CASTQFGGGSGNTEAFF

SEQ ID NO: 229251 - protein, 15 aa, Homo sapiens
  CDR3 for alpha chain variable domain of TCR clone 114626 (TRAV2, TRAJ9)
CAVEDRGTGGFKTIF

SEQ ID NO: 229252 - protein, 15 aa, Homo sapiens
  CDR3 for beta chain variable domain of TCR clone 114626 (TRBV6-1, TRBJ2-3)
CASSERGGITDTQYF

SEQ ID NO: 229253 - protein, 15 aa, Homo sapiens
  CDR3 for alpha chain variable domain of TCR clone 114627 (TRAV2, TRAJ9)
RAVEDRGTGGFKTIF

SEQ ID NO: 229254 - protein, 19 aa, Homo sapiens
  CDR3 for beta chain variable domain of TCR clone 114627 (TRBV28, TRBJ2-7)
CASSYSGTSRLGWVYEQYF

SEQ ID NO: 229255 - protein, 15 aa, Homo sapiens
  CDR3 for alpha chain variable domain of TCR clone 114628 (TRAV27, TRAJ38)
CAARRNAGNNRKLIW

SEQ ID NO: 229256 - protein, 13 aa, Homo sapiens
  CDR3 for beta chain variable domain of TCR clone 114628 (TRBV7-3, TRBJ2-1)
CASSVDSYNEQFF

SEQ ID NO: 229257 - protein, 12 aa, Homo sapiens
  CDR3 for alpha chain variable domain of TCR clone 114629 (TRAV8-3, TRAJ26)
CAGDNYAQNFVF

SEQ ID NO: 229258 - protein, 15 aa, Homo sapiens
  CDR3 for beta chain variable domain of TCR clone 114629 (TRBV9, TRBJ2-1)
CASSLAGSSYNEQFF

SEQ ID NO: 229259 - protein, 14 aa, Homo sapiens
  CDR3 for alpha chain variable domain of TCR clone 114630 (TRAV4, TRAJ6)
CLVGEAGGSYILTF

SEQ ID NO: 229260 - protein, 16 aa, Homo sapiens
  CDR3 for beta chain variable domain of TCR clone 114630 (TRBV7-6, TRBJ2-1)
CASSLNEGPSYNEQFF

SEQ ID NO: 229261 - protein, 14 aa, Homo sapiens
  CDR3 for alpha chain variable domain of TCR clone 114631 (TRAV14/DV4, TRAJ49)
CAFNRYLTGNQFYF

SEQ ID NO: 229262 - protein, 14 aa, Homo sapiens
  CDR3 for beta chain variable domain of TCR clone 114631 (TRBV19, TRBJ2-1)
CASPTFVLSGEQFF

SEQ ID NO: 229263 - protein, 15 aa, Homo sapiens
  CDR3 for alpha chain variable domain of TCR clone 114632 (TRAV1-2, TRAJ13)
CAVRGSPGGYQKVTF

SEQ ID NO: 229264 - protein, 15 aa, Homo sapiens
  CDR3 for beta chain variable domain of TCR clone 114632 (TRBV11-3, TRBJ1-3)
CASSLSGTSGNTIYF

SEQ ID NO: 229265 - protein, 12 aa, Homo sapiens
  CDR3 for alpha chain variable domain of TCR clone 114633 (TRAV1-2, TRAJ17)
CAVRAAGNKLTL

SEQ ID NO: 229266 - protein, 16 aa, Homo sapiens
  CDR3 for beta chain variable domain of TCR clone 114633 (TRBV20-1, TRBJ2-1)
CSAPGLAGSYSDEQFF

SEQ ID NO: 229267 - protein, 17 aa, Homo sapiens
  CDR3 for alpha chain variable domain of TCR clone 114634 (TRAV27, TRAJ26)
CAGARAPLDDYGQNFVF

SEQ ID NO: 229268 - protein, 15 aa, Homo sapiens
  CDR3 for beta chain variable domain of TCR clone 114634 (TRBV11-2, TRBJ2-5)
CASSPRSGGLETQYF

SEQ ID NO: 229269 - protein, 14 aa, Homo sapiens
  CDR3 for alpha chain variable domain of TCR clone 114635 (TRAV12-1, TRAJ34)
CVVNLDYNTDKLIF

SEQ ID NO: 229270 - protein, 13 aa, Homo sapiens
  CDR3 for beta chain variable domain of TCR clone 114635 (TRBV3-1, TRBJ1-1)
CASSPGVITEAFF

SEQ ID NO: 229271 - protein, 15 aa, Homo sapiens
  CDR3 for alpha chain variable domain of TCR clone 114636 (TRAV17, TRAJ22)
CATVAPSCSARQLTF

SEQ ID NO: 229272 - protein, 16 aa, Homo sapiens
  CDR3 for beta chain variable domain of TCR clone 114636 (TRBV10-3, TRBJ2-7)
CAISADFADRPYEQYF

SEQ ID NO: 229273 - protein, 14 aa, Homo sapiens
  CDR3 for alpha chain variable domain of TCR clone 114637 (TRAV1-2, TRAJ8)
CAVREDTGFKKLVF

SEQ ID NO: 229274 - protein, 16 aa, Homo sapiens
  CDR3 for beta chain variable domain of TCR clone 114637 (TRBV20-1, TRBJ1-4)
CSAPGQGLLTNEKLFF

SEQ ID NO: 229275 - protein, 13 aa, Homo sapiens
  CDR3 for alpha chain variable domain of TCR clone 114638 (TRAV26-2, TRAJ37)
CIRGSSNTGKLIF

SEQ ID NO: 229276 - protein, 21 aa, Homo sapiens
  CDR3 for beta chain variable domain of TCR clone 114638 (TRBV7-2, TRBJ2-5)
CASSPGGGPKRRDPVLRARHA

SEQ ID NO: 229277 - protein, 14 aa, Homo sapiens
  CDR3 for alpha chain variable domain of TCR clone 114639 (TRAV35, TRAJ22)
CAGLRPGSARQLTF

SEQ ID NO: 229278 - protein, 14 aa, Homo sapiens
  CDR3 for beta chain variable domain of TCR clone 114639 (TRBV12-5, TRBJ2-5)
CASGSRTHQETQYL

SEQ ID NO: 229279 - protein, 14 aa, Homo sapiens
  CDR3 for alpha chain variable domain of TCR clone 114640 (TRAV1-2, TRAJ8)
CAVREDTGFQELVF

SEQ ID NO: 229280 - protein, 15 aa, Homo sapiens
  CDR3 for beta chain variable domain of TCR clone 114640 (TRBV27, TRBJ2-1)
CASSNGGGSSNEQFF

SEQ ID NO: 229281 - protein, 17 aa, Homo sapiens
  CDR3 for alpha chain variable domain of TCR clone 114641 (TRAV17, TRAJ52)
CATERHSGGTSYGKLTF

SEQ ID NO: 229282 - protein, 15 aa, Homo sapiens
  CDR3 for beta chain variable domain of TCR clone 114641 (TRBV5-1, TRBJ2-1)
CASSLVANSYNEQFF

SEQ ID NO: 229283 - protein, 14 aa, Homo sapiens
  CDR3 for alpha chain variable domain of TCR clone 114642 (TRAV4, TRAJ17)
CLVGDMAAGHKLTF

SEQ ID NO: 229284 - protein, 13 aa, Homo sapiens
  CDR3 for beta chain variable domain of TCR clone 114642 (TRBV18, TRBJ2-7)
CASQSGGGYEQYF

SEQ ID NO: 229285 - protein, 16 aa, Homo sapiens
  CDR3 for alpha chain variable domain of TCR clone 114643 (TRAV23/DV6, TRAJ7)
CAASRVASMGTTDSLL

SEQ ID NO: 229286 - protein, 14 aa, Homo sapiens
  CDR3 for beta chain variable domain of TCR clone 114643 (TRBV19, TRBJ2-1)
CASPTFVLSGEQFF

SEQ ID NO: 229287 - protein, 15 aa, Homo sapiens
  CDR3 for alpha chain variable domain of TCR clone 114644 (TRAV27, TRAJ38)
CAARRNAGNNRKLIW

SEQ ID NO: 229288 - protein, 16 aa, Homo sapiens
  CDR3 for beta chain variable domain of TCR clone 114644 (TRBV20-1, TRBJ1-4)
CSAPGQGLLTNEKLFF

SEQ ID NO: 229289 - protein, 12 aa, Homo sapiens
  CDR3 for alpha chain variable domain of TCR clone 114645 (TRAV23/DV6, TRAJ30)
CAASKGDDKIIF

SEQ ID NO: 229290 - protein, 15 aa, Homo sapiens
  CDR3 for beta chain variable domain of TCR clone 114645 (TRBV20-1, TRBJ2-7)
CSAGDRVSGMDEQYF

SEQ ID NO: 229291 - protein, 15 aa, Homo sapiens
  CDR3 for alpha chain variable domain of TCR clone 114646 (TRAV3, TRAJ4)
CAVRDGTGVYNKLIF

SEQ ID NO: 229292 - protein, 13 aa, Homo sapiens
  CDR3 for beta chain variable domain of TCR clone 114646 (TRBV10-3, TRBJ2-7)
CASKLAVNYEQYF

SEQ ID NO: 229293 - protein, 15 aa, Homo sapiens
  CDR3 for alpha chain variable domain of TCR clone 114647 (TRAV8-3, TRAJ11)
YAVGLLNSGYSTLTF

SEQ ID NO: 229294 - protein, 16 aa, Homo sapiens
  CDR3 for beta chain variable domain of TCR clone 114647 (TRBV7-9, TRBJ1-2)
CASSLGFSSGEDGYTF

SEQ ID NO: 229295 - protein, 12 aa, Homo sapiens
  CDR3 for alpha chain variable domain of TCR clone 114648 (TRAV13-1, TRAJ21)
CAAKEGFNKFYF

SEQ ID NO: 229296 - protein, 15 aa, Homo sapiens
  CDR3 for beta chain variable domain of TCR clone 114648 (TRBV7-9, TRBJ2-7)
CASSLALAEAYEQYF

SEQ ID NO: 229297 - protein, 12 aa, Homo sapiens
  CDR3 for alpha chain variable domain of TCR clone 114649 (TRAV12-3, TRAJ17)
CAMTLTGNKLTF

SEQ ID NO: 229298 - protein, 17 aa, Homo sapiens
  CDR3 for beta chain variable domain of TCR clone 114649 (TRBV7-3, TRBJ2-3)
CASSLMKRMRGADAQYF

SEQ ID NO: 229299 - protein, 16 aa, Homo sapiens
  CDR3 for alpha chain variable domain of TCR clone 114650 (TRAV3, TRAJ10)
SAVRDMRAGGGNKLTF

SEQ ID NO: 229300 - protein, 15 aa, Homo sapiens
  CDR3 for beta chain variable domain of TCR clone 114650 (TRBV20-1, TRBJ2-1)
CSAEGGLLAGDEQFF

SEQ ID NO: 229301 - protein, 16 aa, Homo sapiens
  CDR3 for alpha chain variable domain of TCR clone 114651 (TRAV3, TRAJ10)
CAVRDMRAGGGNKLTF

SEQ ID NO: 229302 - protein, 15 aa, Homo sapiens
  CDR3 for beta chain variable domain of TCR clone 114651 (TRBV4-3, TRBJ2-7)
CASSQGDWGDYEQYF

SEQ ID NO: 229303 - protein, 14 aa, Homo sapiens
  CDR3 for alpha chain variable domain of TCR clone 114652 (TRAV13-1, TRAJ44)
CAAKATGTASKLTF

SEQ ID NO: 229304 - protein, 14 aa, Homo sapiens
  CDR3 for beta chain variable domain of TCR clone 114652 (TRBV25-1, TRBJ1-1)
CASTHLVGNTEAFF

SEQ ID NO: 229305 - protein, 14 aa, Homo sapiens
  CDR3 for alpha chain variable domain of TCR clone 114653 (TRAV1-2, TRAJ16)
CAVNRFSDGQKLLF

SEQ ID NO: 229306 - protein, 10 aa, Homo sapiens
  CDR3 for beta chain variable domain of TCR clone 114653 (TRBV19, TRBJ1-1)
CASRQVEAFF

SEQ ID NO: 229307 - protein, 12 aa, Homo sapiens
  CDR3 for alpha chain variable domain of TCR clone 114654 (TRAV3, TRAJ20)
CAVRDGDYKLSF

SEQ ID NO: 229308 - protein, 13 aa, Homo sapiens
  CDR3 for beta chain variable domain of TCR clone 114654 (TRBV9, TRBJ2-1)
CASSVGHGGEQFF

SEQ ID NO: 229309 - protein, 13 aa, Homo sapiens
  CDR3 for alpha chain variable domain of TCR clone 114655 (TRAV8-6, TRAJ49)
CAVIKNTGNQFYF

SEQ ID NO: 229310 - protein, 14 aa, Homo sapiens
  CDR3 for beta chain variable domain of TCR clone 114655 (TRBV28, TRBJ2-7)
CAIVGQGNLYEQYF

SEQ ID NO: 229311 - protein, 12 aa, Homo sapiens
  CDR3 for alpha chain variable domain of TCR clone 114656 (TRAV12-3, TRAJ17)
CAMTLTGNKLTF

SEQ ID NO: 229312 - protein, 19 aa, Homo sapiens
  CDR3 for beta chain variable domain of TCR clone 114656 (TRBV7-8, TRBJ2-2)
CQQPFISRADYPYHRELFF

SEQ ID NO: 229313 - protein, 14 aa, Homo sapiens
  CDR3 for alpha chain variable domain of TCR clone 114657 (TRAV35, TRAJ33)
CAGSSQDSNYQLIW

SEQ ID NO: 229314 - protein, 12 aa, Homo sapiens
  CDR3 for beta chain variable domain of TCR clone 114657 (TRBV28, TRBJ2-6)
CAIQAGANVLTF

SEQ ID NO: 229315 - protein, 15 aa, Homo sapiens
  CDR3 for alpha chain variable domain of TCR clone 114658 (TRAV8-4, TRAJ11)
CAVSRALSGYSTLTF

SEQ ID NO: 229316 - protein, 16 aa, Homo sapiens
  CDR3 for beta chain variable domain of TCR clone 114658 (TRBV5-4, TRBJ2-7)
CASSSKMTSGTYEQYF

SEQ ID NO: 229317 - protein, 16 aa, Homo sapiens
  CDR3 for alpha chain variable domain of TCR clone 114659 (TRAV3, TRAJ10)
CAVRDMRAGGGNKLTF

SEQ ID NO: 229318 - protein, 19 aa, Homo sapiens
  CDR3 for beta chain variable domain of TCR clone 114659 (TRBV6-3, TRBJ1-2)
CASSYSKGRTGPPSYGYTF

SEQ ID NO: 229319 - protein, 13 aa, Homo sapiens
  CDR3 for alpha chain variable domain of TCR clone 114660 (TRAV36/DV7, TRAJ7)
CAGTRDGNNRLAF

SEQ ID NO: 229320 - protein, 14 aa, Homo sapiens
  CDR3 for beta chain variable domain of TCR clone 114660 (TRBV19, TRBJ2-1)
CASPTFVLSGEQFF

SEQ ID NO: 229321 - protein, 13 aa, Homo sapiens
  CDR3 for alpha chain variable domain of TCR clone 114661 (TRAV23/DV6, TRAJ47)
CAASSQYGNKLVF

SEQ ID NO: 229322 - protein, 17 aa, Homo sapiens
  CDR3 for beta chain variable domain of TCR clone 114661 (TRBV11-2, TRBJ2-1)
CASSLYPPGVEYNEQFF

SEQ ID NO: 229323 - protein, 15 aa, Homo sapiens
  CDR3 for alpha chain variable domain of TCR clone 114662 (TRAV2, TRAJ13)
CATPSYSGGYQKVTF

SEQ ID NO: 229324 - protein, 13 aa, Homo sapiens
  CDR3 for beta chain variable domain of TCR clone 114662 (TRBV19, TRBJ1-3)
CASRLSLGNTIYF

SEQ ID NO: 229325 - protein, 15 aa, Homo sapiens
  CDR3 for alpha chain variable domain of TCR clone 114663 (TRAV8-4, TRAJ47)
CAVSDPEEYGNKLVF

SEQ ID NO: 229326 - protein, 15 aa, Homo sapiens
  CDR3 for beta chain variable domain of TCR clone 114663 (TRBV11-2, TRBJ2-1)
CASSLGPESYNEQFF

SEQ ID NO: 229327 - protein, 11 aa, Homo sapiens
  CDR3 for alpha chain variable domain of TCR clone 114664 (TRAV17, TRAJ43)
CATPRSNDMRF

SEQ ID NO: 229328 - protein, 16 aa, Homo sapiens
  CDR3 for beta chain variable domain of TCR clone 114664 (TRBV7-3, TRBJ2-2)
CASSLKRGTLSGELFF

SEQ ID NO: 229329 - protein, 15 aa, Homo sapiens
  CDR3 for alpha chain variable domain of TCR clone 114665 (TRAV27, TRAJ38)
CAARRNAGNNRKRIW

SEQ ID NO: 229330 - protein, 14 aa, Homo sapiens
  CDR3 for beta chain variable domain of TCR clone 114665 (TRBV6-1, TRBJ1-3)
CASVQGGGGNTIYF

SEQ ID NO: 229331 - protein, 14 aa, Homo sapiens
  CDR3 for alpha chain variable domain of TCR clone 114666 (TRAV12-3, TRAJ43)
CAMSLGGAGTRLTV

SEQ ID NO: 229332 - protein, 13 aa, Homo sapiens
  CDR3 for beta chain variable domain of TCR clone 114666 (TRBV7-9, TRBJ1-2)
CASSLKQNYGYTL

SEQ ID NO: 229333 - protein, 13 aa, Homo sapiens
  CDR3 for alpha chain variable domain of TCR clone 114667 (TRAV36/DV7, TRAJ37)
CAVFSSNTGKPIF

SEQ ID NO: 229334 - protein, 15 aa, Homo sapiens
  CDR3 for beta chain variable domain of TCR clone 114667 (TRBV5-1, TRBJ2-2)
CASSSQGGNTGELFF

SEQ ID NO: 229335 - protein, 13 aa, Homo sapiens
  CDR3 for alpha chain variable domain of TCR clone 114668 (TRAV2, TRAJ40)
CAVVTSGNYKYIF

SEQ ID NO: 229336 - protein, 16 aa, Homo sapiens
  CDR3 for beta chain variable domain of TCR clone 114668 (TRBV29-1, TRBJ2-6)
CSVEDITYSGANVLTF

SEQ ID NO: 229337 - protein, 17 aa, Homo sapiens
  CDR3 for alpha chain variable domain of TCR clone 114669 (TRAV3, TRAJ6)
CAVRDGPRAGGSYIPTF

SEQ ID NO: 229338 - protein, 15 aa, Homo sapiens
  CDR3 for beta chain variable domain of TCR clone 114669 (TRBV5-1, TRBJ2-2)
CASSSQGGNTGELFF

SEQ ID NO: 229339 - protein, 12 aa, Homo sapiens
  CDR3 for alpha chain variable domain of TCR clone 114670 (TRAV17, TRAJ49)
CATVTTGNQFYF

SEQ ID NO: 229340 - protein, 18 aa, Homo sapiens
  CDR3 for beta chain variable domain of TCR clone 114670 (TRBV11-2, TRBJ2-6)
CASSLTPFLGTGANVLTF

SEQ ID NO: 229341 - protein, 15 aa, Homo sapiens
  CDR3 for alpha chain variable domain of TCR clone 114671 (TRAV4, TRAJ26)
CLVGGLDNYGQNFFF

SEQ ID NO: 229342 - protein, 13 aa, Homo sapiens
  CDR3 for beta chain variable domain of TCR clone 114671 (TRBV20-1, TRBJ2-5)
CSASLTGRETQYF

SEQ ID NO: 229343 - protein, 12 aa, Homo sapiens
  CDR3 for alpha chain variable domain of TCR clone 114672 (TRAV21, TRAJ6)
CAVKGGSYIPTF

SEQ ID NO: 229344 - protein, 12 aa, Homo sapiens
  CDR3 for beta chain variable domain of TCR clone 114672 (TRBV24-1, TRBJ1-1)
CATSDSDRGAFF

SEQ ID NO: 229345 - protein, 14 aa, Homo sapiens
  CDR3 for alpha chain variable domain of TCR clone 114673 (TRAV1-2, TRAJ16)
CAVNRFSDGQKLLF

SEQ ID NO: 229346 - protein, 19 aa, Homo sapiens
  CDR3 for beta chain variable domain of TCR clone 114673 (TRBV28, TRBJ2-7)
CASSYSRTSRLGWVYEQYF

SEQ ID NO: 229347 - protein, 14 aa, Homo sapiens
  CDR3 for alpha chain variable domain of TCR clone 114674 (TRAV1-2, TRAJ16)
CAVNRFSDGQKLLF

SEQ ID NO: 229348 - protein, 14 aa, Homo sapiens
  CDR3 for beta chain variable domain of TCR clone 114674 (TRBV7-3, TRBJ1-1)
CASSLKGGNTESFF

SEQ ID NO: 229349 - protein, 14 aa, Homo sapiens
  CDR3 for alpha chain variable domain of TCR clone 114675 (TRAV12-2, TRAJ13)
CAVKKTGGYQKVTF

SEQ ID NO: 229350 - protein, 15 aa, Homo sapiens
  CDR3 for beta chain variable domain of TCR clone 114675 (TRBV7-9, TRBJ1-6)
CASSSATADNSPLHF

SEQ ID NO: 229351 - protein, 18 aa, Homo sapiens
  CDR3 for alpha chain variable domain of TCR clone 114676 (TRAV13-1, TRAJ52)
CAAKNPNAGGTSYGKLTF

SEQ ID NO: 229352 - protein, 16 aa, Homo sapiens
  CDR3 for beta chain variable domain of TCR clone 114676 (TRBV24-1, TRBJ2-1)
CATSGVTGANYNEQFF

SEQ ID NO: 229353 - protein, 14 aa, Homo sapiens
  CDR3 for alpha chain variable domain of TCR clone 114677 (TRAV17, TRAJ48)
CATEGNFGNEKLTF

SEQ ID NO: 229354 - protein, 15 aa, Homo sapiens
  CDR3 for beta chain variable domain of TCR clone 114677 (TRBV2, TRBJ2-7)
CASSEGLARSYEQYF

SEQ ID NO: 229355 - protein, 14 aa, Homo sapiens
  CDR3 for alpha chain variable domain of TCR clone 114678 (TRAV3, TRAJ9)
CAVRLNTGGFKTIF

SEQ ID NO: 229356 - protein, 15 aa, Homo sapiens
  CDR3 for beta chain variable domain of TCR clone 114678 (TRBV7-2, TRBJ2-1)
CASSLASGRVNEQFF

SEQ ID NO: 229357 - protein, 15 aa, Homo sapiens
  CDR3 for alpha chain variable domain of TCR clone 114679 (TRAV4, TRAJ28)
CLVAELWGWELPTHF

SEQ ID NO: 229358 - protein, 13 aa, Homo sapiens
  CDR3 for beta chain variable domain of TCR clone 114679 (TRBV12-4, TRBJ2-6)
CASSGTGANVLTF

SEQ ID NO: 229359 - protein, 11 aa, Homo sapiens
  CDR3 for alpha chain variable domain of TCR clone 114680 (TRAV23/DV6, TRAJ58)
CAARLLRGETS

SEQ ID NO: 229360 - protein, 15 aa, Homo sapiens
  CDR3 for beta chain variable domain of TCR clone 114680 (TRBV5-1, TRBJ1-4)
FAPAAWKDGNEKLFF

SEQ ID NO: 229361 - protein, 14 aa, Homo sapiens
  CDR3 for alpha chain variable domain of TCR clone 114681 (TRAV30, TRAJ26)
CGTEIVSYGQNFVF

SEQ ID NO: 229362 - protein, 14 aa, Homo sapiens
  CDR3 for beta chain variable domain of TCR clone 114681 (TRBV7-2, TRBJ2-7)
CASSPKTSFYEQYF

SEQ ID NO: 229363 - protein, 13 aa, Homo sapiens
  CDR3 for alpha chain variable domain of TCR clone 114682 (TRAV13-1, TRAJ6)
CAARRGGSYVPTF

SEQ ID NO: 229364 - protein, 16 aa, Homo sapiens
  CDR3 for beta chain variable domain of TCR clone 114682 (TRBV7-9, TRBJ2-2)
CASSLATGVGTGELFF

SEQ ID NO: 229365 - protein, 12 aa, Homo sapiens
  CDR3 for alpha chain variable domain of TCR clone 114683 (TRAV8-3, TRAJ26)
CAGDNYGQNFVF

SEQ ID NO: 229366 - protein, 16 aa, Homo sapiens
  CDR3 for beta chain variable domain of TCR clone 114683 (TRBV7-3, TRBJ2-1)
CASSLEGYRSYNEQFF

SEQ ID NO: 229367 - protein, 14 aa, Homo sapiens
  CDR3 for alpha chain variable domain of TCR clone 114684 (TRAV8-3, TRAJ4)
CAVGASGGYNKLIF

SEQ ID NO: 229368 - protein, 15 aa, Homo sapiens
  CDR3 for beta chain variable domain of TCR clone 114684 (TRBV11-2, TRBJ2-1)
CASSSPSTRYNEQFF

SEQ ID NO: 229369 - protein, 13 aa, Homo sapiens
  CDR3 for alpha chain variable domain of TCR clone 114685 (TRAV12-2, TRAJ42)
CAVKRGSQGNLTF

SEQ ID NO: 229370 - protein, 12 aa, Homo sapiens
  CDR3 for beta chain variable domain of TCR clone 114685 (TRBV5-7, TRBJ1-2)
CASSLVQNGYTF

SEQ ID NO: 229371 - protein, 14 aa, Homo sapiens
  CDR3 for alpha chain variable domain of TCR clone 114686 (TRAV29/DV5, TRAJ49)
CAASLSNTGNQFYF

SEQ ID NO: 229372 - protein, 15 aa, Homo sapiens
  CDR3 for beta chain variable domain of TCR clone 114686 (TRBV20-1, TRBJ2-1)
CSARGIGGTYNEQFF

SEQ ID NO: 229373 - protein, 16 aa, Homo sapiens
  CDR3 for alpha chain variable domain of TCR clone 114687 (TRAV3, TRAJ10)
CAVRDMRAGGGNKPTF

SEQ ID NO: 229374 - protein, 15 aa, Homo sapiens
  CDR3 for beta chain variable domain of TCR clone 114687 (TRBV11-2, TRBJ1-6)
CASTGFGTAVSPLHF

SEQ ID NO: 229375 - protein, 14 aa, Homo sapiens
  CDR3 for alpha chain variable domain of TCR clone 114688 (TRAV1-1, TRAJ27)
CAVIYNTNAGKSTF

SEQ ID NO: 229376 - protein, 18 aa, Homo sapiens
  CDR3 for beta chain variable domain of TCR clone 114688 (TRBV7-3, TRBJ2-1)
CASSVTLASGRAMVSSSS

SEQ ID NO: 229377 - protein, 14 aa, Homo sapiens
  CDR3 for alpha chain variable domain of TCR clone 114689 (TRAV35, TRAJ22)
YAGLRPGSARQLTF

SEQ ID NO: 229378 - protein, 15 aa, Homo sapiens
  CDR3 for beta chain variable domain of TCR clone 114689 (TRBV12-4, TRBJ2-5)
CASSPPTGLQETQYF

SEQ ID NO: 229379 - protein, 16 aa, Homo sapiens
  CDR3 for alpha chain variable domain of TCR clone 114690 (TRAV30, TRAJ24)
CGTEIEDADSWGKFQF

SEQ ID NO: 229380 - protein, 12 aa, Homo sapiens
  CDR3 for beta chain variable domain of TCR clone 114690 (TRBV11-2, TRBJ2-2)
CASSLGGGELFF

SEQ ID NO: 229381 - protein, 12 aa, Homo sapiens
  CDR3 for alpha chain variable domain of TCR clone 114691 (TRAV13-1, TRAJ21)
CAAKEGFNKFYF

SEQ ID NO: 229382 - protein, 15 aa, Homo sapiens
  CDR3 for beta chain variable domain of TCR clone 114691 (TRBV2, TRBJ2-3)
CASSERSGHTDTQYF

SEQ ID NO: 229383 - protein, 18 aa, Homo sapiens
  CDR3 for alpha chain variable domain of TCR clone 114692 (TRAV26-1, TRAJ23)
CIVRVGLEVWNQGGKLIF

SEQ ID NO: 229384 - protein, 18 aa, Homo sapiens
  CDR3 for beta chain variable domain of TCR clone 114692 (TRBV4-1, TRBJ2-1)
CASSLVGGELAGFNEQFF

SEQ ID NO: 229385 - protein, 13 aa, Homo sapiens
  CDR3 for alpha chain variable domain of TCR clone 114693 (TRAV1-2, TRAJ9)
CAALNTGGFKTIF

SEQ ID NO: 229386 - protein, 13 aa, Homo sapiens
  CDR3 for beta chain variable domain of TCR clone 114693 (TRBV19, TRBJ1-2)
CASSVPGQDGYPF

SEQ ID NO: 229387 - protein, 13 aa, Homo sapiens
  CDR3 for alpha chain variable domain of TCR clone 114694 (TRAV36/DV7, TRAJ49)
CAGDSNTGNQFYF

SEQ ID NO: 229388 - protein, 15 aa, Homo sapiens
  CDR3 for beta chain variable domain of TCR clone 114694 (TRBV20-1, TRBJ2-7)
CSARDRVSGMDEQYF

SEQ ID NO: 229389 - protein, 11 aa, Homo sapiens
  CDR3 for alpha chain variable domain of TCR clone 114695 (TRAV16, TRAJ29)
WAPSGNTPLVF

SEQ ID NO: 229390 - protein, 15 aa, Homo sapiens
  CDR3 for beta chain variable domain of TCR clone 114695 (TRBV5-7, TRBJ2-7)
CASSPYFEGSYEHYF

SEQ ID NO: 229391 - protein, 15 aa, Homo sapiens
  CDR3 for alpha chain variable domain of TCR clone 114696 (TRAV3, TRAJ22)
CAVRDRGGSARQLTF

SEQ ID NO: 229392 - protein, 16 aa, Homo sapiens
  CDR3 for beta chain variable domain of TCR clone 114696 (TRBV11-2, TRBJ2-1)
CASARGSYSHHNGQFF

SEQ ID NO: 229393 - protein, 14 aa, Homo sapiens
  CDR3 for alpha chain variable domain of TCR clone 114697 (TRAV12-3, TRAJ10)
SHLPLTGGGNKLTF

SEQ ID NO: 229394 - protein, 15 aa, Homo sapiens
  CDR3 for beta chain variable domain of TCR clone 114697 (TRBV28, TRBJ2-5)
CASSADRGRGETQYF

SEQ ID NO: 229395 - protein, 14 aa, Homo sapiens
  CDR3 for alpha chain variable domain of TCR clone 114698 (TRAV17, TRAJ22)
CATSPSGSARQLTF

SEQ ID NO: 229396 - protein, 13 aa, Homo sapiens
  CDR3 for beta chain variable domain of TCR clone 114698 (TRBV12-4, TRBJ2-1)
CASSHYTDNEQFF

SEQ ID NO: 229397 - protein, 17 aa, Homo sapiens
  CDR3 for alpha chain variable domain of TCR clone 114699 (TRAV3, TRAJ6)
CAVRDGPRAGGSYIPPF

SEQ ID NO: 229398 - protein, 16 aa, Homo sapiens
  CDR3 for beta chain variable domain of TCR clone 114699 (TRBV12-4, TRBJ2-7)
CASSLIGGTGTYEQYF

SEQ ID NO: 229399 - protein, 15 aa, Homo sapiens
  CDR3 for alpha chain variable domain of TCR clone 114700 (TRAV26-1, TRAJ47)
CIVRVGWGYGNKLVF

SEQ ID NO: 229400 - protein, 14 aa, Homo sapiens
  CDR3 for beta chain variable domain of TCR clone 114700 (TRBV4-1, TRBJ2-2)
CASSQAVNTGELFF

SEQ ID NO: 229401 - protein, 16 aa, Homo sapiens
  CDR3 for alpha chain variable domain of TCR clone 114701 (TRAV3, TRAJ6)
CAVRRTPSGGSYIPTF

SEQ ID NO: 229402 - protein, 14 aa, Homo sapiens
  CDR3 for beta chain variable domain of TCR clone 114701 (TRBV3-1, TRBJ1-5)
CASSTGDSNQTQHF

SEQ ID NO: 229403 - protein, 14 aa, Homo sapiens
  CDR3 for alpha chain variable domain of TCR clone 114702 (TRAV13-2, TRAJ43)
CAEIPTYNNNDLRF

SEQ ID NO: 229404 - protein, 15 aa, Homo sapiens
  CDR3 for beta chain variable domain of TCR clone 114702 (TRBV7-9, TRBJ2-2)
CASGPLDTFPGELFF

SEQ ID NO: 229405 - protein, 12 aa, Homo sapiens
  CDR3 for alpha chain variable domain of TCR clone 114703 (TRAV12-1, TRAJ40)
CVVYSGTYKYIF

SEQ ID NO: 229406 - protein, 15 aa, Homo sapiens
  CDR3 for beta chain variable domain of TCR clone 114703 (TRBV27, TRBJ1-6)
CASTFDRGLGSPLHF

SEQ ID NO: 229407 - protein, 13 aa, Homo sapiens
  CDR3 for alpha chain variable domain of TCR clone 114704 (TRAV2, TRAJ40)
CAVVTSGTYKYIF

SEQ ID NO: 229408 - protein, 13 aa, Homo sapiens
  CDR3 for beta chain variable domain of TCR clone 114704 (TRBV2, TRBJ2-7)
CASSVGGSGEQYF

SEQ ID NO: 229409 - protein, 15 aa, Homo sapiens
  CDR3 for alpha chain variable domain of TCR clone 114705 (TRAV3, TRAJ3)
CAVRDMSSSASKLIF

SEQ ID NO: 229410 - protein, 14 aa, Homo sapiens
  CDR3 for beta chain variable domain of TCR clone 114705 (TRBV6-6, TRBJ2-7)
CASSIAGGVDEQYF

SEQ ID NO: 229411 - protein, 17 aa, Homo sapiens
  CDR3 for alpha chain variable domain of TCR clone 114706 (TRAV12-2, TRAJ6)
CAMSARGGAGGSYIPTF

SEQ ID NO: 229412 - protein, 12 aa, Homo sapiens
  CDR3 for beta chain variable domain of TCR clone 114706 (TRBV12-4, TRBJ2-3)
CASSTLPDTQYF

SEQ ID NO: 229413 - protein, 16 aa, Homo sapiens
  CDR3 for alpha chain variable domain of TCR clone 114707 (TRAV30, TRAJ24)
CVTEIVDADSWGKSQF

SEQ ID NO: 229414 - protein, 14 aa, Homo sapiens
  CDR3 for beta chain variable domain of TCR clone 114707 (TRBV12-5, TRBJ2-5)
CASGSRTHQETQYF

SEQ ID NO: 229415 - protein, 14 aa, Homo sapiens
  CDR3 for alpha chain variable domain of TCR clone 114708 (TRAV17, TRAJ56)
CATVPAGANSKLTF

SEQ ID NO: 229416 - protein, 12 aa, Homo sapiens
  CDR3 for beta chain variable domain of TCR clone 114708 (TRBV4-2, TRBJ2-2)
CASSHLPGELFF

SEQ ID NO: 229417 - protein, 14 aa, Homo sapiens
  CDR3 for alpha chain variable domain of TCR clone 114709 (TRAV1-2, TRAJ16)
CAVNRFSDGQKLLF

SEQ ID NO: 229418 - protein, 14 aa, Homo sapiens
  CDR3 for beta chain variable domain of TCR clone 114709 (TRBV5-8, TRBJ2-3)
CASSLGQGTDTQYF

SEQ ID NO: 229419 - protein, 10 aa, Homo sapiens
  CDR3 for alpha chain variable domain of TCR clone 114710 (TRAV8-4, TRAJ43)
CAVSADDMRF

SEQ ID NO: 229420 - protein, 17 aa, Homo sapiens
  CDR3 for beta chain variable domain of TCR clone 114710 (TRBV7-8, TRBJ2-6)
CASSAGTGGAGANVLTF

SEQ ID NO: 229421 - protein, 16 aa, Homo sapiens
  CDR3 for alpha chain variable domain of TCR clone 114711 (TRAV12-3, TRAJ18)
CAMRGSRGSTLGRLYF

SEQ ID NO: 229422 - protein, 14 aa, Homo sapiens
  CDR3 for beta chain variable domain of TCR clone 114711 (TRBV7-2, TRBJ1-1)
CASSFLTGTTEAFF

SEQ ID NO: 229423 - protein, 16 aa, Homo sapiens
  CDR3 for alpha chain variable domain of TCR clone 114712 (TRAV4, TRAJ22)
CLVGDLYSGSARQLTF

SEQ ID NO: 229424 - protein, 15 aa, Homo sapiens
  CDR3 for beta chain variable domain of TCR clone 114712 (TRBV7-9, TRBJ2-5)
CASSLVAGGLETQYF

SEQ ID NO: 229425 - protein, 13 aa, Homo sapiens
  CDR3 for alpha chain variable domain of TCR clone 114713 (TRAV27, TRAJ45)
CRSSGGGADGLTF

SEQ ID NO: 229426 - protein, 13 aa, Homo sapiens
  CDR3 for beta chain variable domain of TCR clone 114713 (TRBV11-2, TRBJ2-5)
CASSSTGEETQYF

SEQ ID NO: 229427 - protein, 12 aa, Homo sapiens
  CDR3 for alpha chain variable domain of TCR clone 114714 (TRAV12-3, TRAJ17)
CAMTLTGNKLTF

SEQ ID NO: 229428 - protein, 14 aa, Homo sapiens
  CDR3 for beta chain variable domain of TCR clone 114714 (TRBV2, TRBJ2-7)
CAISLTSGGYEQYF

SEQ ID NO: 229429 - protein, 15 aa, Homo sapiens
  CDR3 for alpha chain variable domain of TCR clone 114715 (TRAV8-4, TRAJ47)
WAVSDPEEYGNKLVF

SEQ ID NO: 229430 - protein, 15 aa, Homo sapiens
  CDR3 for beta chain variable domain of TCR clone 114715 (TRBV11-2, TRBJ2-1)
CASSLGPDSYNEQFF

SEQ ID NO: 229431 - protein, 14 aa, Homo sapiens
  CDR3 for alpha chain variable domain of TCR clone 114716 (TRAV8-4, TRAJ9)
CAVRINTGGFKTIF

SEQ ID NO: 229432 - protein, 13 aa, Homo sapiens
  CDR3 for beta chain variable domain of TCR clone 114716 (TRBV7-9, TRBJ2-3)
CASSPGSTDTQYF

SEQ ID NO: 229433 - protein, 15 aa, Homo sapiens
  CDR3 for alpha chain variable domain of TCR clone 114717 (TRAV2, TRAJ22)
CAVPSRGGSARQLTF

SEQ ID NO: 229434 - protein, 11 aa, Homo sapiens
  CDR3 for beta chain variable domain of TCR clone 114717 (TRBV27, TRBJ2-3)
CASSLGDKQYF

SEQ ID NO: 229435 - protein, 11 aa, Homo sapiens
  CDR3 for alpha chain variable domain of TCR clone 114718 (TRAV2, TRAJ13)
CASGGYQKVTF

SEQ ID NO: 229436 - protein, 15 aa, Homo sapiens
  CDR3 for beta chain variable domain of TCR clone 114718 (TRBV25-1, TRBJ1-4)
CASSPGDSTNEKLFF

SEQ ID NO: 229437 - protein, 16 aa, Homo sapiens
  CDR3 for alpha chain variable domain of TCR clone 114719 (TRAV13-1, TRAJ13)
CTAFFLGVTRKLPLEL

SEQ ID NO: 229438 - protein, 14 aa, Homo sapiens
  CDR3 for beta chain variable domain of TCR clone 114719 (TRBV7-8, TRBJ2-3)
CASSLEAGTDTQYF

SEQ ID NO: 229439 - protein, 17 aa, Homo sapiens
  CDR3 for alpha chain variable domain of TCR clone 114720 (TRAV36/DV7, TRAJ52)
CAVAQRAGGTSYGKLTF

SEQ ID NO: 229440 - protein, 13 aa, Homo sapiens
  CDR3 for beta chain variable domain of TCR clone 114720 (TRBV9, TRBJ2-1)
CASSPSGGNEQFF

SEQ ID NO: 229441 - protein, 14 aa, Homo sapiens
  CDR3 for alpha chain variable domain of TCR clone 114721 (TRAV2, TRAJ3)
CAVRPYSSASKIIF

SEQ ID NO: 229442 - protein, 17 aa, Homo sapiens
  CDR3 for beta chain variable domain of TCR clone 114721 (TRBV7-6, TRBJ2-5)
CASSAPQAGDPSETQYF

SEQ ID NO: 229443 - protein, 10 aa, Homo sapiens
  CDR3 for alpha chain variable domain of TCR clone 114722 (TRAV21, TRAJ31)
CAVDNARLMF

SEQ ID NO: 229444 - protein, 14 aa, Homo sapiens
  CDR3 for beta chain variable domain of TCR clone 114722 (TRBV7-6, TRBJ2-3)
CASSVAGGTDTQYF

SEQ ID NO: 229445 - protein, 12 aa, Homo sapiens
  CDR3 for alpha chain variable domain of TCR clone 114723 (TRAV2, TRAJ24)
CAATDSWGKFQF

SEQ ID NO: 229446 - protein, 13 aa, Homo sapiens
  CDR3 for beta chain variable domain of TCR clone 114723 (TRBV5-8, TRBJ1-1)
CASSLGRGTEAFF

SEQ ID NO: 229447 - protein, 14 aa, Homo sapiens
  CDR3 for alpha chain variable domain of TCR clone 114724 (TRAV12-2, TRAJ5)
CAVNRSTGRRALTF

SEQ ID NO: 229448 - protein, 12 aa, Homo sapiens
  CDR3 for beta chain variable domain of TCR clone 114724 (TRBV11-2, TRBJ2-1)
CASSPGNNEQFF

SEQ ID NO: 229449 - protein, 17 aa, Homo sapiens
  CDR3 for alpha chain variable domain of TCR clone 114725 (TRAV3, TRAJ42)
CAVRDRDYGGSQGNLIF

SEQ ID NO: 229450 - protein, 14 aa, Homo sapiens
  CDR3 for beta chain variable domain of TCR clone 114725 (TRBV7-2, TRBJ2-1)
CASSRGGARNEQFF

SEQ ID NO: 229451 - protein, 16 aa, Homo sapiens
  CDR3 for alpha chain variable domain of TCR clone 114726 (TRAV12-3, TRAJ28)
CAMRANSGAGGYQLTF

SEQ ID NO: 229452 - protein, 16 aa, Homo sapiens
  CDR3 for beta chain variable domain of TCR clone 114726 (TRBV7-2, TRBJ1-3)
CASSRLEASSGNTIYF

SEQ ID NO: 229453 - protein, 15 aa, Homo sapiens
  CDR3 for alpha chain variable domain of TCR clone 114727 (TRAV14/DV4, TRAJ48)
CAMRAPNFGNEKLTF

SEQ ID NO: 229454 - protein, 14 aa, Homo sapiens
  CDR3 for beta chain variable domain of TCR clone 114727 (TRBV7-9, TRBJ2-5)
RASSLVGGEETQYF

SEQ ID NO: 229455 - protein, 12 aa, Homo sapiens
  CDR3 for alpha chain variable domain of TCR clone 114728 (TRAV8-3, TRAJ26)
CAGDNYGQNFVF

SEQ ID NO: 229456 - protein, 13 aa, Homo sapiens
  CDR3 for beta chain variable domain of TCR clone 114728 (TRBV18, TRBJ1-1)
CASSGGRNTEAFF

SEQ ID NO: 229457 - protein, 15 aa, Homo sapiens
  CDR3 for alpha chain variable domain of TCR clone 114729 (TRAV27, TRAJ38)
CAARRNAGNNRKLIW

SEQ ID NO: 229458 - protein, 15 aa, Homo sapiens
  CDR3 for beta chain variable domain of TCR clone 114729 (TRBV5-1, TRBJ2-3)
CASSYTSGSTDTQYF

SEQ ID NO: 229459 - protein, 13 aa, Homo sapiens
  CDR3 for alpha chain variable domain of TCR clone 114730 (TRAV12-2, TRAJ9)
CAGGNTGGFKTIF

SEQ ID NO: 229460 - protein, 17 aa, Homo sapiens
  CDR3 for beta chain variable domain of TCR clone 114730 (TRBV4-1, TRBJ2-1)
CASSQGRGEGLYNEQFF

SEQ ID NO: 229461 - protein, 16 aa, Homo sapiens
  CDR3 for alpha chain variable domain of TCR clone 114731 (TRAV30, TRAJ24)
CGTEMVDADSWGKFQF

SEQ ID NO: 229462 - protein, 13 aa, Homo sapiens
  CDR3 for beta chain variable domain of TCR clone 114731 (TRBV4-1, TRBJ2-2)
CASSQENTGELFF

SEQ ID NO: 229463 - protein, 13 aa, Homo sapiens
  CDR3 for alpha chain variable domain of TCR clone 114732 (TRAV21, TRAJ57)
CAVTQGGSEKLVF

SEQ ID NO: 229464 - protein, 13 aa, Homo sapiens
  CDR3 for beta chain variable domain of TCR clone 114732 (TRBV7-7, TRBJ2-3)
CASSLSRADTQYF

SEQ ID NO: 229465 - protein, 10 aa, Homo sapiens
  CDR3 for alpha chain variable domain of TCR clone 114733 (TRAV1-2, TRAJ20)
CALNDYKLSF

SEQ ID NO: 229466 - protein, 16 aa, Homo sapiens
  CDR3 for beta chain variable domain of TCR clone 114733 (TRBV20-1, TRBJ1-1)
CSARALTQGMNTEAFF

SEQ ID NO: 229467 - protein, 14 aa, Homo sapiens
  CDR3 for alpha chain variable domain of TCR clone 114734 (TRAV12-2, TRAJ13)
CAVKRTGGYQKVTF

SEQ ID NO: 229468 - protein, 15 aa, Homo sapiens
  CDR3 for beta chain variable domain of TCR clone 114734 (TRBV20-1, TRBJ2-1)
CSARGVGGTYNEQFF

SEQ ID NO: 229469 - protein, 15 aa, Homo sapiens
  CDR3 for alpha chain variable domain of TCR clone 114735 (TRAV12-3, TRAJ17)
CAMSPSLAAGNKLTF

SEQ ID NO: 229470 - protein, 13 aa, Homo sapiens
  CDR3 for beta chain variable domain of TCR clone 114735 (TRBV7-9, TRBJ1-2)
CASSLKQNYGYTF

SEQ ID NO: 229471 - protein, 13 aa, Homo sapiens
  CDR3 for alpha chain variable domain of TCR clone 114736 (TRAV12-2, TRAJ42)
CAVERGSQGNLIF

SEQ ID NO: 229472 - protein, 12 aa, Homo sapiens
  CDR3 for beta chain variable domain of TCR clone 114736 (TRBV5-7, TRBJ1-2)
CASSLVQNGYTF

SEQ ID NO: 229473 - protein, 14 aa, Homo sapiens
  CDR3 for alpha chain variable domain of TCR clone 114737 (TRAV1-2, TRAJ16)
YAVNRFSDGQKLLF

SEQ ID NO: 229474 - protein, 12 aa, Homo sapiens
  CDR3 for beta chain variable domain of TCR clone 114737 (TRBV28, TRBJ2-6)
CAIQAGANVLTF

SEQ ID NO: 229475 - protein, 12 aa, Homo sapiens
  CDR3 for alpha chain variable domain of TCR clone 114738 (TRAV2, TRAJ33)
CAFMDSNYQLIR

SEQ ID NO: 229476 - protein, 16 aa, Homo sapiens
  CDR3 for beta chain variable domain of TCR clone 114738 (TRBV2, TRBJ2-7)
CASSEPWTGPSYEQYF

SEQ ID NO: 229477 - protein, 15 aa, Homo sapiens
  CDR3 for alpha chain variable domain of TCR clone 114739 (TRAV13-1, TRAJ5)
RAASKADTGRRALTF

SEQ ID NO: 229478 - protein, 16 aa, Homo sapiens
  CDR3 for beta chain variable domain of TCR clone 114739 (TRBV7-2, TRBJ2-1)
CASSLGRTSGDNEQFF

SEQ ID NO: 229479 - protein, 13 aa, Homo sapiens
  CDR3 for alpha chain variable domain of TCR clone 114740 (TRAV3, TRAJ21)
CAVREPDFNKFYF

SEQ ID NO: 229480 - protein, 16 aa, Homo sapiens
  CDR3 for beta chain variable domain of TCR clone 114740 (TRBV7-2, TRBJ2-7)
CASSLEAGGPWYEQYF

SEQ ID NO: 229481 - protein, 20 aa, Homo sapiens
  CDR3 for alpha chain variable domain of TCR clone 114741 (TRAV12-1, TRAJ42)
SSVIQPPTSVKGGSHGNLIF

SEQ ID NO: 229482 - protein, 14 aa, Homo sapiens
  CDR3 for beta chain variable domain of TCR clone 114741 (TRBV25-1, TRBJ1-2)
CASSDTTGVVGYTF

SEQ ID NO: 229483 - protein, 11 aa, Homo sapiens
  CDR3 for alpha chain variable domain of TCR clone 114742 (TRAV2, TRAJ33)
CAVESNYQLIW

SEQ ID NO: 229484 - protein, 15 aa, Homo sapiens
  CDR3 for beta chain variable domain of TCR clone 114742 (TRBV5-1, TRBJ1-1)
CASSLSDLGGTEAFF

SEQ ID NO: 229485 - protein, 17 aa, Homo sapiens
  CDR3 for alpha chain variable domain of TCR clone 114743 (TRAV21, TRAJ24)
CAGIRLRSTDSWGKLQF

SEQ ID NO: 229486 - protein, 17 aa, Homo sapiens
  CDR3 for beta chain variable domain of TCR clone 114743 (TRBV10-3, TRBJ2-4)
CTSVPSVNKGSKNIQYF

SEQ ID NO: 229487 - protein, 17 aa, Homo sapiens
  CDR3 for alpha chain variable domain of TCR clone 114744 (TRAV8-6, TRAJ58)
CAVSSWVGETSGARLTF

SEQ ID NO: 229488 - protein, 17 aa, Homo sapiens
  CDR3 for beta chain variable domain of TCR clone 114744 (TRBV4-3, TRBJ1-2)
CASSSRLQAGGSVGYTF

SEQ ID NO: 229489 - protein, 13 aa, Homo sapiens
  CDR3 for alpha chain variable domain of TCR clone 114745 (TRAV1-1, TRAJ9)
CAAKNTGGFKTIF

SEQ ID NO: 229490 - protein, 14 aa, Homo sapiens
  CDR3 for beta chain variable domain of TCR clone 114745 (TRBV20-1, TRBJ2-1)
CSAQIGGSANAQFF

SEQ ID NO: 229491 - protein, 12 aa, Homo sapiens
  CDR3 for alpha chain variable domain of TCR clone 114746 (TRAV12-3, TRAJ20)
CAMVRGDYKLSF

SEQ ID NO: 229492 - protein, 19 aa, Homo sapiens
  CDR3 for beta chain variable domain of TCR clone 114746 (TRBV7-2, TRBJ2-3)
CASSFLSRNWGGGTDTQYF

SEQ ID NO: 229493 - protein, 16 aa, Homo sapiens
  CDR3 for alpha chain variable domain of TCR clone 114747 (TRAV3, TRAJ10)
CAVRDMNAGGGNKLTF

SEQ ID NO: 229494 - protein, 20 aa, Homo sapiens
  CDR3 for beta chain variable domain of TCR clone 114747 (TRBV19, TRBJ2-1)
CASSISRTVTSTRLNNEQFF

SEQ ID NO: 229495 - protein, 14 aa, Homo sapiens
  CDR3 for alpha chain variable domain of TCR clone 114748 (TRAV2, TRAJ9)
CAVEDRSGGFKTIF

SEQ ID NO: 229496 - protein, 16 aa, Homo sapiens
  CDR3 for beta chain variable domain of TCR clone 114748 (TRBV24-1, TRBJ2-5)
CATGKSGLKGRETQYF

SEQ ID NO: 229497 - protein, 17 aa, Homo sapiens
  CDR3 for alpha chain variable domain of TCR clone 114749 (TRAV3, TRAJ6)
CAVRDGPRAGGSYIPTF

SEQ ID NO: 229498 - protein, 19 aa, Homo sapiens
  CDR3 for beta chain variable domain of TCR clone 114749 (TRBV25-1, TRBJ2-2)
CAILVYRVDRGRKTGEMFF

SEQ ID NO: 229499 - protein, 13 aa, Homo sapiens
  CDR3 for alpha chain variable domain of TCR clone 114750 (TRAV13-1, TRAJ5)
CAAEHTGRRALTF

SEQ ID NO: 229500 - protein, 15 aa, Homo sapiens
  CDR3 for beta chain variable domain of TCR clone 114750 (TRBV6-3, TRBJ2-7)
CASSSPGTVFYEQYF

SEQ ID NO: 229501 - protein, 11 aa, Homo sapiens
  CDR3 for alpha chain variable domain of TCR clone 114751 (TRAV1-2, TRAJ20)
CAVANDYKLSF

SEQ ID NO: 229502 - protein, 15 aa, Homo sapiens
  CDR3 for beta chain variable domain of TCR clone 114751 (TRBV2, TRBJ2-1)
CASSELAGSDNEQFF

SEQ ID NO: 229503 - protein, 15 aa, Homo sapiens
  CDR3 for alpha chain variable domain of TCR clone 114752 (TRAV8-3, TRAJ27)
CAVGPSKTNAGKSTF

SEQ ID NO: 229504 - protein, 12 aa, Homo sapiens
  CDR3 for beta chain variable domain of TCR clone 114752 (TRBV5-1, TRBJ1-2)
CASSQDTYGYTF

SEQ ID NO: 229505 - protein, 11 aa, Homo sapiens
  CDR3 for alpha chain variable domain of TCR clone 114753 (TRAV12-3, TRAJ27)
CAMANAGKSTF

SEQ ID NO: 229506 - protein, 12 aa, Homo sapiens
  CDR3 for beta chain variable domain of TCR clone 114753 (TRBV20-1, TRBJ2-7)
CSAGRRQSEQYF

SEQ ID NO: 229507 - protein, 17 aa, Homo sapiens
  CDR3 for alpha chain variable domain of TCR clone 114754 (TRAV2, TRAJ22)
ILQVREADAAEQRQLTF

SEQ ID NO: 229508 - protein, 13 aa, Homo sapiens
  CDR3 for beta chain variable domain of TCR clone 114754 (TRBV10-3, TRBJ2-7)
CASKLAVNYEQYF

SEQ ID NO: 229509 - protein, 14 aa, Homo sapiens
  CDR3 for alpha chain variable domain of TCR clone 114755 (TRAV23/DV6, TRAJ4)
CAAPSSGGYNKMIF

SEQ ID NO: 229510 - protein, 16 aa, Homo sapiens
  CDR3 for beta chain variable domain of TCR clone 114755 (TRBV19, TRBJ1-1)
CASRFGGPVTGTEAFF

SEQ ID NO: 229511 - protein, 13 aa, Homo sapiens
  CDR3 for alpha chain variable domain of TCR clone 114756 (TRAV12-2, TRAJ20)
CAVYPSNDYKLSF

SEQ ID NO: 229512 - protein, 15 aa, Homo sapiens
  CDR3 for beta chain variable domain of TCR clone 114756 (TRBV27, TRBJ2-5)
CASILYPRGGETQYF

SEQ ID NO: 229513 - protein, 17 aa, Homo sapiens
  CDR3 for alpha chain variable domain of TCR clone 114757 (TRAV2, TRAJ52)
CAVAQRAGGTSYGKLTF

SEQ ID NO: 229514 - protein, 17 aa, Homo sapiens
  CDR3 for beta chain variable domain of TCR clone 114757 (TRBV28, TRBJ2-5)
CASSTPEGDALQETQYF

SEQ ID NO: 229515 - protein, 16 aa, Homo sapiens
  CDR3 for alpha chain variable domain of TCR clone 114758 (TRAV3, TRAJ21)
CAVRVIERGNFNKFYF

SEQ ID NO: 229516 - protein, 13 aa, Homo sapiens
  CDR3 for beta chain variable domain of TCR clone 114758 (TRBV27, TRBJ2-7)
CASSLTTGYEQYF

SEQ ID NO: 229517 - protein, 10 aa, Homo sapiens
  CDR3 for alpha chain variable domain of TCR clone 114759 (TRAV23/DV6, TRAJ57)
CAASSTLSQG

SEQ ID NO: 229518 - protein, 13 aa, Homo sapiens
  CDR3 for beta chain variable domain of TCR clone 114759 (TRBV15, TRBJ1-6)
CATSGGLNSPLHL

SEQ ID NO: 229519 - protein, 11 aa, Homo sapiens
  CDR3 for alpha chain variable domain of TCR clone 114760 (TRAV2, TRAJ13)
CASGGYQKVTF

SEQ ID NO: 229520 - protein, 13 aa, Homo sapiens
  CDR3 for beta chain variable domain of TCR clone 114760 (TRBV12-4, TRBJ1-2)
CASGLRQGKGYTF

SEQ ID NO: 229521 - protein, 10 aa, Homo sapiens
  CDR3 for alpha chain variable domain of TCR clone 114761 (TRAV36/DV7, TRAJ49)
CALTGNQFYF

SEQ ID NO: 229522 - protein, 15 aa, Homo sapiens
  CDR3 for beta chain variable domain of TCR clone 114761 (TRBV7-2, TRBJ1-2)
CASSPRAGWNYGYTF

SEQ ID NO: 229523 - protein, 12 aa, Homo sapiens
  CDR3 for alpha chain variable domain of TCR clone 114762 (TRAV29/DV5, TRAJ49)
CAATDTGNQFYF

SEQ ID NO: 229524 - protein, 17 aa, Homo sapiens
  CDR3 for beta chain variable domain of TCR clone 114762 (TRBV7-8, TRBJ2-6)
CASSAGTGGAGANVLTF

SEQ ID NO: 229525 - protein, 13 aa, Homo sapiens
  CDR3 for alpha chain variable domain of TCR clone 114763 (TRAV2, TRAJ29)
CAAQNSGNTPLVF

SEQ ID NO: 229526 - protein, 15 aa, Homo sapiens
  CDR3 for beta chain variable domain of TCR clone 114763 (TRBV9, TRBJ1-6)
CASSVAGTGDSPLHF

SEQ ID NO: 229527 - protein, 14 aa, Homo sapiens
  CDR3 for alpha chain variable domain of TCR clone 114764 (TRAV13-2, TRAJ22)
CADGTLGSARQPTF

SEQ ID NO: 229528 - protein, 16 aa, Homo sapiens
  CDR3 for beta chain variable domain of TCR clone 114764 (TRBV19, TRBJ2-1)
CASSSKGTRSYNEQFF

SEQ ID NO: 229529 - protein, 11 aa, Homo sapiens
  CDR3 for alpha chain variable domain of TCR clone 114765 (TRAV17, TRAJ31)
CATSNNAKLMF

SEQ ID NO: 229530 - protein, 16 aa, Homo sapiens
  CDR3 for beta chain variable domain of TCR clone 114765 (TRBV7-8, TRBJ2-4)
CASSAERTLAKNIQYF

SEQ ID NO: 229531 - protein, 16 aa, Homo sapiens
  CDR3 for alpha chain variable domain of TCR clone 114766 (TRAV26-1, TRAJ53)
CIIRVAMGGSNYKLTF

SEQ ID NO: 229532 - protein, 12 aa, Homo sapiens
  CDR3 for beta chain variable domain of TCR clone 114766 (TRBV7-9, TRBJ1-5)
CASSPQGQPQHF

SEQ ID NO: 229533 - protein, 14 aa, Homo sapiens
  CDR3 for alpha chain variable domain of TCR clone 114767 (TRAV2, TRAJ37)
CAVDFTSNTGKLIF

SEQ ID NO: 229534 - protein, 15 aa, Homo sapiens
  CDR3 for beta chain variable domain of TCR clone 114767 (TRBV7-9, TRBJ1-3)
CASSLRSGSGNTIYF

SEQ ID NO: 229535 - protein, 15 aa, Homo sapiens
  CDR3 for alpha chain variable domain of TCR clone 114768 (TRAV12-2, TRAJ53)
CAVNGGGGSNYKLTF

SEQ ID NO: 229536 - protein, 14 aa, Homo sapiens
  CDR3 for beta chain variable domain of TCR clone 114768 (TRBV5-4, TRBJ1-4)
CASSLNLGREKLFF

SEQ ID NO: 229537 - protein, 13 aa, Homo sapiens
  CDR3 for alpha chain variable domain of TCR clone 114769 (TRAV1-2, TRAJ17)
CAVSKAAGNKLTF

SEQ ID NO: 229538 - protein, 15 aa, Homo sapiens
  CDR3 for beta chain variable domain of TCR clone 114769 (TRBV7-9, TRBJ2-1)
CASSGTGGDYNEQFF

SEQ ID NO: 229539 - protein, 14 aa, Homo sapiens
  CDR3 for alpha chain variable domain of TCR clone 114770 (TRAV2, TRAJ9)
CAVEDRSGGFKTIF

SEQ ID NO: 229540 - protein, 14 aa, Homo sapiens
  CDR3 for beta chain variable domain of TCR clone 114770 (TRBV18, TRBJ1-5)
CASSRQQGNQPQHF

SEQ ID NO: 229541 - protein, 14 aa, Homo sapiens
  CDR3 for alpha chain variable domain of TCR clone 114771 (TRAV12-2, TRAJ17)
CAVLFKAAGNKLTF

SEQ ID NO: 229542 - protein, 15 aa, Homo sapiens
  CDR3 for beta chain variable domain of TCR clone 114771 (TRBV7-3, TRBJ2-1)
CASSLSSGSFDEQFF

SEQ ID NO: 229543 - protein, 14 aa, Homo sapiens
  CDR3 for alpha chain variable domain of TCR clone 114772 (TRAV13-2, TRAJ11)
CAETGNSGYSSLTF

SEQ ID NO: 229544 - protein, 11 aa, Homo sapiens
  CDR3 for beta chain variable domain of TCR clone 114772 (TRBV10-3, TRBJ2-7)
CAISEGLEQYF

SEQ ID NO: 229545 - protein, 18 aa, Homo sapiens
  CDR3 for alpha chain variable domain of TCR clone 114773 (TRAV29/DV5, TRAJ26)
CSVLLGSKRKPEGQNFVF

SEQ ID NO: 229546 - protein, 17 aa, Homo sapiens
  CDR3 for beta chain variable domain of TCR clone 114773 (TRBV20-1, TRBJ2-2)
CSASGSGQGGLTGELFF

SEQ ID NO: 229547 - protein, 13 aa, Homo sapiens
  CDR3 for alpha chain variable domain of TCR clone 114774 (TRAV17, TRAJ5)
CALRGTGRRALTF

SEQ ID NO: 229548 - protein, 15 aa, Homo sapiens
  CDR3 for beta chain variable domain of TCR clone 114774 (TRBV6-1, TRBJ1-5)
CASSELREGNQPQYF

SEQ ID NO: 229549 - protein, 17 aa, Homo sapiens
  CDR3 for alpha chain variable domain of TCR clone 114775 (TRAV38-2/DV8, TRAJ38)
CAYRSARGACNNRKLIW

SEQ ID NO: 229550 - protein, 13 aa, Homo sapiens
  CDR3 for beta chain variable domain of TCR clone 114775 (TRBV6-5, TRBJ2-1)
CASRGRVGNEQFF

SEQ ID NO: 229551 - protein, 15 aa, Homo sapiens
  CDR3 for alpha chain variable domain of TCR clone 114776 (TRAV12-1, TRAJ45)
CVVLSGGGGANGLTF

SEQ ID NO: 229552 - protein, 15 aa, Homo sapiens
  CDR3 for beta chain variable domain of TCR clone 114776 (TRBV12-5, TRBJ2-5)
CASGSGLAGRETQYF

SEQ ID NO: 229553 - protein, 14 aa, Homo sapiens
  CDR3 for alpha chain variable domain of TCR clone 114777 (TRAV13-1, TRAJ44)
CAAKATGTASKLTF

SEQ ID NO: 229554 - protein, 17 aa, Homo sapiens
  CDR3 for beta chain variable domain of TCR clone 114777 (TRBV7-3, TRBJ2-3)
RASSLMRRMRGADTQYF

SEQ ID NO: 229555 - protein, 14 aa, Homo sapiens
  CDR3 for alpha chain variable domain of TCR clone 114778 (TRAV16, TRAJ29)
CALTRNSGNTPLVF

SEQ ID NO: 229556 - protein, 12 aa, Homo sapiens
  CDR3 for beta chain variable domain of TCR clone 114778 (TRBV2, TRBJ2-1)
CAKREGYNEQFV

SEQ ID NO: 229557 - protein, 14 aa, Homo sapiens
  CDR3 for alpha chain variable domain of TCR clone 114779 (TRAV9-2, TRAJ39)
CAPYIYNAGNMLTF

SEQ ID NO: 229558 - protein, 15 aa, Homo sapiens
  CDR3 for beta chain variable domain of TCR clone 114779 (TRBV20-1, TRBJ1-6)
CSARVQGQGVSPLHF

SEQ ID NO: 229559 - protein, 14 aa, Homo sapiens
  CDR3 for alpha chain variable domain of TCR clone 114780 (TRAV4, TRAJ17)
CLVGDMDAGNKLTF

SEQ ID NO: 229560 - protein, 14 aa, Homo sapiens
  CDR3 for beta chain variable domain of TCR clone 114780 (TRBV4-1, TRBJ2-7)
CASSPVAGGDEQYF

SEQ ID NO: 229561 - protein, 14 aa, Homo sapiens
  CDR3 for alpha chain variable domain of TCR clone 114781 (TRAV4, TRAJ12)
CLVGDADSSYKLTF

SEQ ID NO: 229562 - protein, 17 aa, Homo sapiens
  CDR3 for beta chain variable domain of TCR clone 114781 (TRBV13, TRBJ2-3)
CASSLSRVAGGRNTQYF

SEQ ID NO: 229563 - protein, 12 aa, Homo sapiens
  CDR3 for alpha chain variable domain of TCR clone 114782 (TRAV17, TRAJ31)
CAMEQGNARLMF

SEQ ID NO: 229564 - protein, 14 aa, Homo sapiens
  CDR3 for beta chain variable domain of TCR clone 114782 (TRBV28, TRBJ2-7)
CASTTDRDGFVQYF

SEQ ID NO: 229565 - protein, 15 aa, Homo sapiens
  CDR3 for alpha chain variable domain of TCR clone 114783 (TRAV21, TRAJ53)
CATLTSGGSNYKLTF

SEQ ID NO: 229566 - protein, 16 aa, Homo sapiens
  CDR3 for beta chain variable domain of TCR clone 114783 (TRBV12-4, TRBJ2-3)
CASSLRLAETTDTQYF

SEQ ID NO: 229567 - protein, 12 aa, Homo sapiens
  CDR3 for alpha chain variable domain of TCR clone 114784 (TRAV12-1, TRAJ34)
CVVTFNTDKLIF

SEQ ID NO: 229568 - protein, 14 aa, Homo sapiens
  CDR3 for beta chain variable domain of TCR clone 114784 (TRBV19, TRBJ1-1)
RASLRTGLNTEAFF

SEQ ID NO: 229569 - protein, 15 aa, Homo sapiens
  CDR3 for alpha chain variable domain of TCR clone 114785 (TRAV8-4, TRAJ47)
CAVSDPEEYGNKLVF

SEQ ID NO: 229570 - protein, 20 aa, Homo sapiens
  CDR3 for beta chain variable domain of TCR clone 114785 (TRBV7-8, TRBJ2-2)
CASSHLFPGPTIHITGELFF

SEQ ID NO: 229571 - protein, 14 aa, Homo sapiens
  CDR3 for alpha chain variable domain of TCR clone 114786 (TRAV1-2, TRAJ16)
CAVNRFSDGHKLLF

SEQ ID NO: 229572 - protein, 16 aa, Homo sapiens
  CDR3 for beta chain variable domain of TCR clone 114786 (TRBV7-3, TRBJ2-2)
CASSLKRGTLSGELFF

SEQ ID NO: 229573 - protein, 14 aa, Homo sapiens
  CDR3 for alpha chain variable domain of TCR clone 114787 (TRAV8-1, TRAJ4)
CAVPFSGGYNKLIF

SEQ ID NO: 229574 - protein, 16 aa, Homo sapiens
  CDR3 for beta chain variable domain of TCR clone 114787 (TRBV4-1, TRBJ2-7)
CASSQEWTSGPLEQYF

SEQ ID NO: 229575 - protein, 15 aa, Homo sapiens
  CDR3 for alpha chain variable domain of TCR clone 114788 (TRAV41, TRAJ45)
CAASSSGGGADGLTF

SEQ ID NO: 229576 - protein, 14 aa, Homo sapiens
  CDR3 for beta chain variable domain of TCR clone 114788 (TRBV12-5, TRBJ2-5)
CASGSRTHQETQYF

SEQ ID NO: 229577 - protein, 12 aa, Homo sapiens
  CDR3 for alpha chain variable domain of TCR clone 114789 (TRAV12-3, TRAJ17)
CAMTLTGNKLTF

SEQ ID NO: 229578 - protein, 14 aa, Homo sapiens
  CDR3 for beta chain variable domain of TCR clone 114789 (TRBV7-3, TRBJ2-1)
CASSLSGSYNEQFF

SEQ ID NO: 229579 - protein, 15 aa, Homo sapiens
  CDR3 for alpha chain variable domain of TCR clone 114790 (TRAV12-3, TRAJ27)
CAMRAYNTNTGKSTF

SEQ ID NO: 229580 - protein, 13 aa, Homo sapiens
  CDR3 for beta chain variable domain of TCR clone 114790 (TRBV11-2, TRBJ2-5)
CASSRGPSETQYF

SEQ ID NO: 229581 - protein, 12 aa, Homo sapiens
  CDR3 for alpha chain variable domain of TCR clone 114791 (TRAV27, TRAJ36)
CAGMTGANNLFF

SEQ ID NO: 229582 - protein, 14 aa, Homo sapiens
  CDR3 for beta chain variable domain of TCR clone 114791 (TRBV11-2, TRBJ2-3)
CASSRLARTDTQYF

SEQ ID NO: 229583 - protein, 12 aa, Homo sapiens
  CDR3 for alpha chain variable domain of TCR clone 114792 (TRAV26-1, TRAJ36)
CVVRVRADNLFF

SEQ ID NO: 229584 - protein, 13 aa, Homo sapiens
  CDR3 for beta chain variable domain of TCR clone 114792 (TRBV11-2, TRBJ2-5)
CASSRGPSETQYF

SEQ ID NO: 229585 - protein, 15 aa, Homo sapiens
  CDR3 for alpha chain variable domain of TCR clone 114793 (TRAV23/DV6, TRAJ18)
CAASFRGSTPGRLYF

SEQ ID NO: 229586 - protein, 13 aa, Homo sapiens
  CDR3 for beta chain variable domain of TCR clone 114793 (TRBV28, TRBJ2-7)
CAILDRAGGEQYF

SEQ ID NO: 229587 - protein, 14 aa, Homo sapiens
  CDR3 for alpha chain variable domain of TCR clone 114794 (TRAV13-1, TRAJ44)
CAAKATGTASKLTF

SEQ ID NO: 229588 - protein, 15 aa, Homo sapiens
  CDR3 for beta chain variable domain of TCR clone 114794 (TRBV2, TRBJ2-7)
CASSEGLARSYEQYF

SEQ ID NO: 229589 - protein, 14 aa, Homo sapiens
  CDR3 for alpha chain variable domain of TCR clone 114795 (TRAV23/DV6, TRAJ40)
CAASLTSGTYQYIF

SEQ ID NO: 229590 - protein, 14 aa, Homo sapiens
  CDR3 for beta chain variable domain of TCR clone 114795 (TRBV5-1, TRBJ2-3)
CASSRGQGGGTQYF

SEQ ID NO: 229591 - protein, 13 aa, Homo sapiens
  CDR3 for alpha chain variable domain of TCR clone 114796 (TRAV26-2, TRAJ54)
CIPRVGGAQKLVF

SEQ ID NO: 229592 - protein, 16 aa, Homo sapiens
  CDR3 for beta chain variable domain of TCR clone 114796 (TRBV4-1, TRBJ1-1)
CASSSMSERPNTEAFF

SEQ ID NO: 229593 - protein, 14 aa, Homo sapiens
  CDR3 for alpha chain variable domain of TCR clone 114797 (TRAV35, TRAJ22)
CAGLRPGSARQLTF

SEQ ID NO: 229594 - protein, 13 aa, Homo sapiens
  CDR3 for beta chain variable domain of TCR clone 114797 (TRBV20-1, TRBJ1-5)
CSASWGRSQPQHF

SEQ ID NO: 229595 - protein, 13 aa, Homo sapiens
  CDR3 for alpha chain variable domain of TCR clone 114798 (TRAV12-3, TRAJ40)
CAMSARGTYKYIF

SEQ ID NO: 229596 - protein, 15 aa, Homo sapiens
  CDR3 for beta chain variable domain of TCR clone 114798 (TRBV7-2, TRBJ2-3)
CASSLNLRDTDTQYF

SEQ ID NO: 229597 - protein, 14 aa, Homo sapiens
  CDR3 for alpha chain variable domain of TCR clone 114799 (TRAV21, TRAJ35)
CAVMPIGVGNVLHC

SEQ ID NO: 229598 - protein, 12 aa, Homo sapiens
  CDR3 for beta chain variable domain of TCR clone 114799 (TRBV7-9, TRBJ2-7)
CASSIKREEQYF

SEQ ID NO: 229599 - protein, 17 aa, Homo sapiens
  CDR3 for alpha chain variable domain of TCR clone 114800 (TRAV3, TRAJ6)
CAVRDGPRAGGSYIPTF

SEQ ID NO: 229600 - protein, 13 aa, Homo sapiens
  CDR3 for beta chain variable domain of TCR clone 114800 (TRBV28, TRBJ2-7)
CASKAGGVYEQYF

SEQ ID NO: 229601 - protein, 14 aa, Homo sapiens
  CDR3 for alpha chain variable domain of TCR clone 114801 (TRAV21, TRAJ45)
CAVSSGGGADGLTF

SEQ ID NO: 229602 - protein, 12 aa, Homo sapiens
  CDR3 for beta chain variable domain of TCR clone 114801 (TRBV19, TRBJ2-1)
CASSMQDTEQFF

SEQ ID NO: 229603 - protein, 16 aa, Homo sapiens
  CDR3 for alpha chain variable domain of TCR clone 114802 (TRAV30, TRAJ24)
CGTEIVYADSWGKFQF

SEQ ID NO: 229604 - protein, 19 aa, Homo sapiens
  CDR3 for beta chain variable domain of TCR clone 114802 (TRBV25-1, TRBJ2-2)
CAILVYRVDRGRKTGELFF

SEQ ID NO: 229605 - protein, 11 aa, Homo sapiens
  CDR3 for alpha chain variable domain of TCR clone 114803 (TRAV13-1, TRAJ15)
CAATPGTALTF

SEQ ID NO: 229606 - protein, 17 aa, Homo sapiens
  CDR3 for beta chain variable domain of TCR clone 114803 (TRBV13, TRBJ2-3)
CASSLSRVAGGRNTQYF

SEQ ID NO: 229607 - protein, 14 aa, Homo sapiens
  CDR3 for alpha chain variable domain of TCR clone 114804 (TRAV12-3, TRAJ10)
SHLPLTGGGNKLTF

SEQ ID NO: 229608 - protein, 13 aa, Homo sapiens
  CDR3 for beta chain variable domain of TCR clone 114804 (TRBV24-1, TRBJ1-4)
CATNNGRSEKLFF

SEQ ID NO: 229609 - protein, 12 aa, Homo sapiens
  CDR3 for alpha chain variable domain of TCR clone 114805 (TRAV13-1, TRAJ21)
CAAKEGFNKFYF

SEQ ID NO: 229610 - protein, 18 aa, Homo sapiens
  CDR3 for beta chain variable domain of TCR clone 114805 (TRBV20-1, TRBJ2-6)
CSAETTPTHGAGANVLTF

SEQ ID NO: 229611 - protein, 16 aa, Homo sapiens
  CDR3 for alpha chain variable domain of TCR clone 114806 (TRAV3, TRAJ4)
CAVRPSPSAGYNKLIF

SEQ ID NO: 229612 - protein, 12 aa, Homo sapiens
  CDR3 for beta chain variable domain of TCR clone 114806 (TRBV7-9, TRBJ2-7)
CASSQGVYEQYF

SEQ ID NO: 229613 - protein, 15 aa, Homo sapiens
  CDR3 for alpha chain variable domain of TCR clone 114807 (TRAV26-2, TRAJ26)
CILRDFDNYGQNFVF

SEQ ID NO: 229614 - protein, 14 aa, Homo sapiens
  CDR3 for beta chain variable domain of TCR clone 114807 (TRBV29-1, TRBJ2-5)
CSVWTPYAGETQYF

SEQ ID NO: 229615 - protein, 13 aa, Homo sapiens
  CDR3 for alpha chain variable domain of TCR clone 114808 (TRAV1-2, TRAJ9)
CAALNTGGFKTIF

SEQ ID NO: 229616 - protein, 13 aa, Homo sapiens
  CDR3 for beta chain variable domain of TCR clone 114808 (TRBV7-9, TRBJ1-2)
CASSLKQDYGYTF

SEQ ID NO: 229617 - protein, 14 aa, Homo sapiens
  CDR3 for alpha chain variable domain of TCR clone 114809 (TRAV20, TRAJ29)
CAVQAWVGNTPLVC

SEQ ID NO: 229618 - protein, 15 aa, Homo sapiens
  CDR3 for beta chain variable domain of TCR clone 114809 (TRBV29-1, TRBJ2-7)
CSVEFFDRGSYEQYF

SEQ ID NO: 229619 - protein, 12 aa, Homo sapiens
  CDR3 for alpha chain variable domain of TCR clone 114810 (TRAV26-2, TRAJ21)
CILKGNFNKFYF

SEQ ID NO: 229620 - protein, 13 aa, Homo sapiens
  CDR3 for beta chain variable domain of TCR clone 114810 (TRBV3-1, TRBJ1-2)
CASSQDSRDGYTF

SEQ ID NO: 229621 - protein, 13 aa, Homo sapiens
  CDR3 for alpha chain variable domain of TCR clone 114811 (TRAV2, TRAJ40)
CAVVTSGTYKYIF

SEQ ID NO: 229622 - protein, 14 aa, Homo sapiens
  CDR3 for beta chain variable domain of TCR clone 114811 (TRBV19, TRBJ2-7)
CASSIFAGTYEQYF

SEQ ID NO: 229623 - protein, 16 aa, Homo sapiens
  CDR3 for alpha chain variable domain of TCR clone 114812 (TRAV26-1, TRAJ53)
CIVRVAMGGSNYKLTF

SEQ ID NO: 229624 - protein, 16 aa, Homo sapiens
  CDR3 for beta chain variable domain of TCR clone 114812 (TRBV12-5, TRBJ2-5)
CASGPRTSGNQETQYF

SEQ ID NO: 229625 - protein, 13 aa, Homo sapiens
  CDR3 for alpha chain variable domain of TCR clone 114813 (TRAV1-1, TRAJ9)
CAAKNTGGFKTIF

SEQ ID NO: 229626 - protein, 14 aa, Homo sapiens
  CDR3 for beta chain variable domain of TCR clone 114813 (TRBV20-1, TRBJ2-1)
CSAQIGASANEQFF

SEQ ID NO: 229627 - protein, 10 aa, Homo sapiens
  CDR3 for alpha chain variable domain of TCR clone 114814 (TRAV36/DV7, TRAJ56)
CAGPAVELSF

SEQ ID NO: 229628 - protein, 13 aa, Homo sapiens
  CDR3 for beta chain variable domain of TCR clone 114814 (TRBV7-9, TRBJ2-7)
CASSFWSSYEQYF

SEQ ID NO: 229629 - protein, 14 aa, Homo sapiens
  CDR3 for alpha chain variable domain of TCR clone 114815 (TRAV26-1, TRAJ22)
CIVRVYGSARQLTF

SEQ ID NO: 229630 - protein, 13 aa, Homo sapiens
  CDR3 for beta chain variable domain of TCR clone 114815 (TRBV7-9, TRBJ2-3)
CASSPGSTDTQYF

SEQ ID NO: 229631 - protein, 14 aa, Homo sapiens
  CDR3 for alpha chain variable domain of TCR clone 114816 (TRAV20, TRAJ22)
CAVQVSGSARQLTF

SEQ ID NO: 229632 - protein, 14 aa, Homo sapiens
  CDR3 for beta chain variable domain of TCR clone 114816 (TRBV19, TRBJ2-1)
CASPTFVLSGEQFF

SEQ ID NO: 229633 - protein, 12 aa, Homo sapiens
  CDR3 for alpha chain variable domain of TCR clone 114817 (TRAV3, TRAJ31)
CAVRDGNARLMF

SEQ ID NO: 229634 - protein, 14 aa, Homo sapiens
  CDR3 for beta chain variable domain of TCR clone 114817 (TRBV7-2, TRBJ2-7)
CASSPKTSFYEQYF

SEQ ID NO: 229635 - protein, 14 aa, Homo sapiens
  CDR3 for alpha chain variable domain of TCR clone 114818 (TRAV17, TRAJ57)
CATDPQGGSEKLVF

SEQ ID NO: 229636 - protein, 17 aa, Homo sapiens
  CDR3 for beta chain variable domain of TCR clone 114818 (TRBV20-1, TRBJ2-1)
CSARDISGGAPLGEQFF

SEQ ID NO: 229637 - protein, 17 aa, Homo sapiens
  CDR3 for alpha chain variable domain of TCR clone 114819 (TRAV3, TRAJ12)
CAVRDGGRMDSSYKLTF

SEQ ID NO: 229638 - protein, 14 aa, Homo sapiens
  CDR3 for beta chain variable domain of TCR clone 114819 (TRBV7-9, TRBJ1-2)
CASSRQGANYGYTF

SEQ ID NO: 229639 - protein, 14 aa, Homo sapiens
  CDR3 for alpha chain variable domain of TCR clone 114820 (TRAV30, TRAJ26)
CGTEIVSYGKNFVF

SEQ ID NO: 229640 - protein, 13 aa, Homo sapiens
  CDR3 for beta chain variable domain of TCR clone 114820 (TRBV24-1, TRBJ2-2)
CATSDWSTGELFF

SEQ ID NO: 229641 - protein, 18 aa, Homo sapiens
  CDR3 for alpha chain variable domain of TCR clone 114821 (TRAV3, TRAJ32)
CAVRDIRGYGGATNKLIF

SEQ ID NO: 229642 - protein, 15 aa, Homo sapiens
  CDR3 for beta chain variable domain of TCR clone 114821 (TRBV12-4, TRBJ2-2)
CASSLGVRRTGELFF

SEQ ID NO: 229643 - protein, 13 aa, Homo sapiens
  CDR3 for alpha chain variable domain of TCR clone 114822 (TRAV21, TRAJ20)
CAVGVFADYKLSF

SEQ ID NO: 229644 - protein, 16 aa, Homo sapiens
  CDR3 for beta chain variable domain of TCR clone 114822 (TRBV11-2, TRBJ1-2)
CASSLDRGGNNYGYTF

SEQ ID NO: 229645 - protein, 15 aa, Homo sapiens
  CDR3 for alpha chain variable domain of TCR clone 114823 (TRAV3, TRAJ20)
CAVRDIKLSDYKLSF

SEQ ID NO: 229646 - protein, 15 aa, Homo sapiens
  CDR3 for beta chain variable domain of TCR clone 114823 (TRBV7-9, TRBJ1-6)
CASSSPGRGNAPLHF

SEQ ID NO: 229647 - protein, 15 aa, Homo sapiens
  CDR3 for alpha chain variable domain of TCR clone 114824 (TRAV8-3, TRAJ45)
CASSYSGGGADGLTF

SEQ ID NO: 229648 - protein, 16 aa, Homo sapiens
  CDR3 for beta chain variable domain of TCR clone 114824 (TRBV12-4, TRBJ2-7)
CASSLIGGTGTYEQYF

SEQ ID NO: 229649 - protein, 11 aa, Homo sapiens
  CDR3 for alpha chain variable domain of TCR clone 114825 (TRAV2, TRAJ13)
CASGGYQKVTF

SEQ ID NO: 229650 - protein, 16 aa, Homo sapiens
  CDR3 for beta chain variable domain of TCR clone 114825 (TRBV4-2, TRBJ1-1)
CASSQAGFGMNTEAFF

SEQ ID NO: 229651 - protein, 14 aa, Homo sapiens
  CDR3 for alpha chain variable domain of TCR clone 114826 (TRAV1-2, TRAJ16)
CAVNRFSDGQKLLF

SEQ ID NO: 229652 - protein, 15 aa, Homo sapiens
  CDR3 for beta chain variable domain of TCR clone 114826 (TRBV7-3, TRBJ2-3)
CASSLAGGAGDTQYF

SEQ ID NO: 229653 - protein, 15 aa, Homo sapiens
  CDR3 for alpha chain variable domain of TCR clone 114827 (TRAV8-3, TRAJ11)
CAVGLLNSGYSTLTF

SEQ ID NO: 229654 - protein, 14 aa, Homo sapiens
  CDR3 for beta chain variable domain of TCR clone 114827 (TRBV4-1, TRBJ2-2)
CASSQAVNTGELFF

SEQ ID NO: 229655 - protein, 10 aa, Homo sapiens
  CDR3 for alpha chain variable domain of TCR clone 114828 (TRAV35, TRAJ41)
DASSGYALNF

SEQ ID NO: 229656 - protein, 14 aa, Homo sapiens
  CDR3 for beta chain variable domain of TCR clone 114828 (TRBV9, TRBJ2-3)
CASSVGLSTDTQYF

SEQ ID NO: 229657 - protein, 10 aa, Homo sapiens
  CDR3 for alpha chain variable domain of TCR clone 114829 (TRAV23/DV6, TRAJ43)
CAAAVAALEQ

SEQ ID NO: 229658 - protein, 13 aa, Homo sapiens
  CDR3 for beta chain variable domain of TCR clone 114829 (TRBV12-4, TRBJ1-2)
CASSSRQGKGYTF

SEQ ID NO: 229659 - protein, 14 aa, Homo sapiens
  CDR3 for alpha chain variable domain of TCR clone 114830 (TRAV12-2, TRAJ53)
CRERGGGSNYKLTF

SEQ ID NO: 229660 - protein, 13 aa, Homo sapiens
  CDR3 for beta chain variable domain of TCR clone 114830 (TRBV20-1, TRBJ1-5)
CSASGRGNQPQHF

SEQ ID NO: 229661 - protein, 15 aa, Homo sapiens
  CDR3 for alpha chain variable domain of TCR clone 114831 (TRAV17, TRAJ40)
CATVSSTSGTYKYIF

SEQ ID NO: 229662 - protein, 17 aa, Homo sapiens
  CDR3 for beta chain variable domain of TCR clone 114831 (TRBV28, TRBJ2-5)
CASSRQGGLAGAETQYF

SEQ ID NO: 229663 - protein, 14 aa, Homo sapiens
  CDR3 for alpha chain variable domain of TCR clone 114832 (TRAV12-3, TRAJ10)
SHLPLTGGGNKLTF

SEQ ID NO: 229664 - protein, 16 aa, Homo sapiens
  CDR3 for beta chain variable domain of TCR clone 114832 (TRBV20-1, TRBJ2-6)
CSPSSQGYDGANVLTF

SEQ ID NO: 229665 - protein, 14 aa, Homo sapiens
  CDR3 for alpha chain variable domain of TCR clone 114833 (TRAV2, TRAJ9)
CAVEDRSGGFKTIF

SEQ ID NO: 229666 - protein, 15 aa, Homo sapiens
  CDR3 for beta chain variable domain of TCR clone 114833 (TRBV7-9, TRBJ2-3)
CASSFLSRGGDTQYF

SEQ ID NO: 229667 - protein, 13 aa, Homo sapiens
  CDR3 for alpha chain variable domain of TCR clone 114834 (TRAV8-2, TRAJ47)
WATRLSTPGELVF

SEQ ID NO: 229668 - protein, 14 aa, Homo sapiens
  CDR3 for beta chain variable domain of TCR clone 114834 (TRBV5-7, TRBJ1-1)
CASSLAGDWTEAFF

SEQ ID NO: 229669 - protein, 17 aa, Homo sapiens
  CDR3 for alpha chain variable domain of TCR clone 114835 (TRAV17, TRAJ7)
CATLGRLAFGTGNQVVV

SEQ ID NO: 229670 - protein, 13 aa, Homo sapiens
  CDR3 for beta chain variable domain of TCR clone 114835 (TRBV12-4, TRBJ2-7)
CASSLERVREQYF

SEQ ID NO: 229671 - protein, 13 aa, Homo sapiens
  CDR3 for alpha chain variable domain of TCR clone 114836 (TRAV12-3, TRAJ33)
CAMSVDSNYQLIW

SEQ ID NO: 229672 - protein, 12 aa, Homo sapiens
  CDR3 for beta chain variable domain of TCR clone 114836 (TRBV11-2, TRBJ2-2)
CASSLGGGELFF

SEQ ID NO: 229673 - protein, 18 aa, Homo sapiens
  CDR3 for alpha chain variable domain of TCR clone 114837 (TRAV21, TRAJ52)
CAVRPSPAGGTSYGKLTF

SEQ ID NO: 229674 - protein, 14 aa, Homo sapiens
  CDR3 for beta chain variable domain of TCR clone 114837 (TRBV19, TRBJ2-2)
CASSTLHRSGELFF

SEQ ID NO: 229675 - protein, 12 aa, Homo sapiens
  CDR3 for alpha chain variable domain of TCR clone 114838 (TRAV8-4, TRAJ37)
CAVRSNTVKLIF

SEQ ID NO: 229676 - protein, 16 aa, Homo sapiens
  CDR3 for beta chain variable domain of TCR clone 114838 (TRBV7-2, TRBJ2-3)
CASSLVGDASTDTQYF

SEQ ID NO: 229677 - protein, 13 aa, Homo sapiens
  CDR3 for alpha chain variable domain of TCR clone 114839 (TRAV6, TRAJ20)
CALAVSNDYKLSF

SEQ ID NO: 229678 - protein, 18 aa, Homo sapiens
  CDR3 for beta chain variable domain of TCR clone 114839 (TRBV11-2, TRBJ2-3)
CASSLGGASRGAPNTQYF

SEQ ID NO: 229679 - protein, 13 aa, Homo sapiens
  CDR3 for alpha chain variable domain of TCR clone 114840 (TRAV21, TRAJ15)
CAVANQAGTALIF

SEQ ID NO: 229680 - protein, 15 aa, Homo sapiens
  CDR3 for beta chain variable domain of TCR clone 114840 (TRBV20-1, TRBJ2-7)
CSAESGTSGAYEQYF

SEQ ID NO: 229681 - protein, 13 aa, Homo sapiens
  CDR3 for alpha chain variable domain of TCR clone 114841 (TRAV13-1, TRAJ5)
CAARVTGRRALTF

SEQ ID NO: 229682 - protein, 12 aa, Homo sapiens
  CDR3 for beta chain variable domain of TCR clone 114841 (TRBV11-2, TRBJ2-2)
CASSLGGGELFF

SEQ ID NO: 229683 - protein, 15 aa, Homo sapiens
  CDR3 for alpha chain variable domain of TCR clone 114842 (TRAV2, TRAJ3)
CAVPPGYSSASKIIF

SEQ ID NO: 229684 - protein, 15 aa, Homo sapiens
  CDR3 for beta chain variable domain of TCR clone 114842 (TRBV20-1, TRBJ2-7)
CSARDRVSGMDEQYF

SEQ ID NO: 229685 - protein, 18 aa, Homo sapiens
  CDR3 for alpha chain variable domain of TCR clone 114843 (TRAV3, TRAJ17)
CAVRARRGGRSFRQQANF

SEQ ID NO: 229686 - protein, 14 aa, Homo sapiens
  CDR3 for beta chain variable domain of TCR clone 114843 (TRBV4-1, TRBJ2-2)
CASSQAVNTGELFF

SEQ ID NO: 229687 - protein, 16 aa, Homo sapiens
  CDR3 for alpha chain variable domain of TCR clone 114844 (TRAV12-1, TRAJ4)
CVVRRLPAGGYNKLIF

SEQ ID NO: 229688 - protein, 15 aa, Homo sapiens
  CDR3 for beta chain variable domain of TCR clone 114844 (TRBV6-5, TRBJ2-1)
CASSYDAGAGNEQFF

SEQ ID NO: 229689 - protein, 13 aa, Homo sapiens
  CDR3 for alpha chain variable domain of TCR clone 114845 (TRAV12-3, TRAJ7)
CAMSASGNNRLAF

SEQ ID NO: 229690 - protein, 13 aa, Homo sapiens
  CDR3 for beta chain variable domain of TCR clone 114845 (TRBV7-9, TRBJ2-5)
CASTPVGQETQYF

SEQ ID NO: 229691 - protein, 11 aa, Homo sapiens
  CDR3 for alpha chain variable domain of TCR clone 114846 (TRAV13-1, TRAJ15)
CAATPGTALIF

SEQ ID NO: 229692 - protein, 17 aa, Homo sapiens
  CDR3 for beta chain variable domain of TCR clone 114846 (TRBV13, TRBJ2-3)
CASSLSRAAGGRNTQYF

SEQ ID NO: 229693 - protein, 13 aa, Homo sapiens
  CDR3 for alpha chain variable domain of TCR clone 114847 (TRAV26-2, TRAJ43)
CILRAVNNNDMRF

SEQ ID NO: 229694 - protein, 13 aa, Homo sapiens
  CDR3 for beta chain variable domain of TCR clone 114847 (TRBV19, TRBJ1-2)
CASSQGQVYGYTF

SEQ ID NO: 229695 - protein, 13 aa, Homo sapiens
  CDR3 for alpha chain variable domain of TCR clone 114848 (TRAV38-1, TRAJ52)
CAFRGTSYGKLAF

SEQ ID NO: 229696 - protein, 15 aa, Homo sapiens
  CDR3 for beta chain variable domain of TCR clone 114848 (TRBV7-8, TRBJ2-5)
CASSDAAGSQETQYF

SEQ ID NO: 229697 - protein, 11 aa, Homo sapiens
  CDR3 for alpha chain variable domain of TCR clone 114849 (TRAV3, TRAJ21)
CAVGNFNKFYF

SEQ ID NO: 229698 - protein, 16 aa, Homo sapiens
  CDR3 for beta chain variable domain of TCR clone 114849 (TRBV12-4, TRBJ1-5)
CASSRPVGGSNQPQHF

SEQ ID NO: 229699 - protein, 13 aa, Homo sapiens
  CDR3 for alpha chain variable domain of TCR clone 114850 (TRAV35, TRAJ42)
CAGFPGSQGNLIF

SEQ ID NO: 229700 - protein, 16 aa, Homo sapiens
  CDR3 for beta chain variable domain of TCR clone 114850 (TRBV7-2, TRBJ2-5)
CASSSKWLIGQETQYF

SEQ ID NO: 229701 - protein, 14 aa, Homo sapiens
  CDR3 for alpha chain variable domain of TCR clone 114851 (TRAV29/DV5, TRAJ36)
RAARRKTGANNLFF

SEQ ID NO: 229702 - protein, 19 aa, Homo sapiens
  CDR3 for beta chain variable domain of TCR clone 114851 (TRBV11-3, TRBJ2-2)
CASSTRPGAKTTNTGELFF

SEQ ID NO: 229703 - protein, 12 aa, Homo sapiens
  CDR3 for alpha chain variable domain of TCR clone 114852 (TRAV21, TRAJ13)
PGPSGGYQKVTF

SEQ ID NO: 229704 - protein, 15 aa, Homo sapiens
  CDR3 for beta chain variable domain of TCR clone 114852 (TRBV7-9, TRBJ1-6)
CASSSPGRGKSPLHF

SEQ ID NO: 229705 - protein, 17 aa, Homo sapiens
  CDR3 for alpha chain variable domain of TCR clone 114853 (TRAV16, TRAJ58)
CITVLSNGETSGSRLTF

SEQ ID NO: 229706 - protein, 13 aa, Homo sapiens
  CDR3 for beta chain variable domain of TCR clone 114853 (TRBV20-1, TRBJ2-2)
CSASAADTGELFF

SEQ ID NO: 229707 - protein, 13 aa, Homo sapiens
  CDR3 for alpha chain variable domain of TCR clone 114854 (TRAV8-3, TRAJ43)
CAVGPDNNNDMRF

SEQ ID NO: 229708 - protein, 15 aa, Homo sapiens
  CDR3 for beta chain variable domain of TCR clone 114854 (TRBV6-3, TRBJ2-7)
CASSSPGTVFYEQYF

SEQ ID NO: 229709 - protein, 16 aa, Homo sapiens
  CDR3 for alpha chain variable domain of TCR clone 114855 (TRAV14/DV4, TRAJ34)
CAMREGRPHRQAHLWY

SEQ ID NO: 229710 - protein, 14 aa, Homo sapiens
  CDR3 for beta chain variable domain of TCR clone 114855 (TRBV19, TRBJ2-1)
CASPTFVLSGEQFF

SEQ ID NO: 229711 - protein, 13 aa, Homo sapiens
  CDR3 for alpha chain variable domain of TCR clone 114856 (TRAV21, TRAJ20)
CAVGVFADYRLSF

SEQ ID NO: 229712 - protein, 14 aa, Homo sapiens
  CDR3 for beta chain variable domain of TCR clone 114856 (TRBV4-2, TRBJ1-4)
CASSPSSGNEKLFF

SEQ ID NO: 229713 - protein, 15 aa, Homo sapiens
  CDR3 for alpha chain variable domain of TCR clone 114857 (TRAV38-1, TRAJ37)
CAFIFGSGNTGKLIF

SEQ ID NO: 229714 - protein, 12 aa, Homo sapiens
  CDR3 for beta chain variable domain of TCR clone 114857 (TRBV12-4, TRBJ2-1)
CASSPGRNEQFF

SEQ ID NO: 229715 - protein, 16 aa, Homo sapiens
  CDR3 for alpha chain variable domain of TCR clone 114858 (TRAV3, TRAJ37)
CAVRPHGFGNTGKLIF

SEQ ID NO: 229716 - protein, 13 aa, Homo sapiens
  CDR3 for beta chain variable domain of TCR clone 114858 (TRBV2, TRBJ1-5)
CASGTGGYQPQHF

SEQ ID NO: 229717 - protein, 14 aa, Homo sapiens
  CDR3 for alpha chain variable domain of TCR clone 114859 (TRAV12-2, TRAJ13)
CAVKKTGGYQKVTF

SEQ ID NO: 229718 - protein, 14 aa, Homo sapiens
  CDR3 for beta chain variable domain of TCR clone 114859 (TRBV7-9, TRBJ2-7)
CASSRPGGPYEQYF

SEQ ID NO: 229719 - protein, 12 aa, Homo sapiens
  CDR3 for alpha chain variable domain of TCR clone 114860 (TRAV21, TRAJ3)
CCFYSSASKIIF

SEQ ID NO: 229720 - protein, 20 aa, Homo sapiens
  CDR3 for beta chain variable domain of TCR clone 114860 (TRBV7-8, TRBJ2-2)
CASSHLFPGPTIHITGELFF

SEQ ID NO: 229721 - protein, 15 aa, Homo sapiens
  CDR3 for alpha chain variable domain of TCR clone 114861 (TRAV20, TRAJ40)
CAVQRGTSGTYKYIF

SEQ ID NO: 229722 - protein, 15 aa, Homo sapiens
  CDR3 for beta chain variable domain of TCR clone 114861 (TRBV25-1, TRBJ1-4)
CASSPGDSTNETLFF

SEQ ID NO: 229723 - protein, 16 aa, Homo sapiens
  CDR3 for alpha chain variable domain of TCR clone 114862 (TRAV3, TRAJ10)
CAVRDMRAGGGNKLTF

SEQ ID NO: 229724 - protein, 16 aa, Homo sapiens
  CDR3 for beta chain variable domain of TCR clone 114862 (TRBV5-7, TRBJ1-2)
CASSRGVTGGSYGYTF

SEQ ID NO: 229725 - protein, 13 aa, Homo sapiens
  CDR3 for alpha chain variable domain of TCR clone 114863 (TRAV2, TRAJ40)
CAVVTSGTYKYIF

SEQ ID NO: 229726 - protein, 13 aa, Homo sapiens
  CDR3 for beta chain variable domain of TCR clone 114863 (TRBV9, TRBJ2-1)
CASSPSGGSEQFF

SEQ ID NO: 229727 - protein, 14 aa, Homo sapiens
  CDR3 for alpha chain variable domain of TCR clone 114864 (TRAV27, TRAJ17)
CRSTIRAAGNKLTF

SEQ ID NO: 229728 - protein, 16 aa, Homo sapiens
  CDR3 for beta chain variable domain of TCR clone 114864 (TRBV5-7, TRBJ2-5)
CASTLAPAGGGETQYF

SEQ ID NO: 229729 - protein, 14 aa, Homo sapiens
  CDR3 for alpha chain variable domain of TCR clone 114865 (TRAV1-2, TRAJ16)
CAVNRFSDGQKLLF

SEQ ID NO: 229730 - protein, 14 aa, Homo sapiens
  CDR3 for beta chain variable domain of TCR clone 114865 (TRBV13, TRBJ2-5)
CASSLCRGQETQYF

SEQ ID NO: 229731 - protein, 17 aa, Homo sapiens
  CDR3 for alpha chain variable domain of TCR clone 114866 (TRAV3, TRAJ42)
CSVRDRDYGGSQGNLIF

SEQ ID NO: 229732 - protein, 12 aa, Homo sapiens
  CDR3 for beta chain variable domain of TCR clone 114866 (TRBV11-2, TRBJ2-1)
CASSPGNNEQFF

SEQ ID NO: 229733 - protein, 16 aa, Homo sapiens
  CDR3 for alpha chain variable domain of TCR clone 114867 (TRAV3, TRAJ3)
RAVRDRAKSSASKIIF

SEQ ID NO: 229734 - protein, 13 aa, Homo sapiens
  CDR3 for beta chain variable domain of TCR clone 114867 (TRBV10-3, TRBJ2-7)
CASKLAVNYEQYF

SEQ ID NO: 229735 - protein, 15 aa, Homo sapiens
  CDR3 for alpha chain variable domain of TCR clone 114868 (TRAV12-2, TRAJ53)
CAVNGGGGSNYKLTF

SEQ ID NO: 229736 - protein, 17 aa, Homo sapiens
  CDR3 for beta chain variable domain of TCR clone 114868 (TRBV7-3, TRBJ2-3)
WASSLMKRMRGADTQYF

SEQ ID NO: 229737 - protein, 17 aa, Homo sapiens
  CDR3 for alpha chain variable domain of TCR clone 114869 (TRAV1-1, TRAJ32)
CAVRVDELWWCYKQTHL

SEQ ID NO: 229738 - protein, 16 aa, Homo sapiens
  CDR3 for beta chain variable domain of TCR clone 114869 (TRBV5-4, TRBJ2-3)
CASQQPGAGGADTQYF

SEQ ID NO: 229739 - protein, 13 aa, Homo sapiens
  CDR3 for alpha chain variable domain of TCR clone 114870 (TRAV35, TRAJ43)
CAGYTYNNNDMRF

SEQ ID NO: 229740 - protein, 15 aa, Homo sapiens
  CDR3 for beta chain variable domain of TCR clone 114870 (TRBV25-1, TRBJ1-4)
CASSKRIATNEKLFF

SEQ ID NO: 229741 - protein, 13 aa, Homo sapiens
  CDR3 for alpha chain variable domain of TCR clone 114871 (TRAV36/DV7, TRAJ37)
CAVFSSNTGKLIF

SEQ ID NO: 229742 - protein, 16 aa, Homo sapiens
  CDR3 for beta chain variable domain of TCR clone 114871 (TRBV11-2, TRBJ1-2)
CASSLDRGGNNYGYTF

SEQ ID NO: 229743 - protein, 15 aa, Homo sapiens
  CDR3 for alpha chain variable domain of TCR clone 114872 (TRAV13-2, TRAJ10)
CAENRDTGGGNKLTY

SEQ ID NO: 229744 - protein, 16 aa, Homo sapiens
  CDR3 for beta chain variable domain of TCR clone 114872 (TRBV2, TRBJ1-3)
CASSRTGGSTGNTIYF

SEQ ID NO: 229745 - protein, 13 aa, Homo sapiens
  CDR3 for alpha chain variable domain of TCR clone 114873 (TRAV17, TRAJ21)
CVTDGGNFNKFYF

SEQ ID NO: 229746 - protein, 13 aa, Homo sapiens
  CDR3 for beta chain variable domain of TCR clone 114873 (TRBV11-3, TRBJ1-1)
CASTGSLNTEAFF

SEQ ID NO: 229747 - protein, 16 aa, Homo sapiens
  CDR3 for alpha chain variable domain of TCR clone 114874 (TRAV16, TRAJ4)
CALSRMFSGGYNKLIF

SEQ ID NO: 229748 - protein, 17 aa, Homo sapiens
  CDR3 for beta chain variable domain of TCR clone 114874 (TRBV5-1, TRBJ2-1)
CASSLGQISFSYNEQFF

SEQ ID NO: 229749 - protein, 16 aa, Homo sapiens
  CDR3 for alpha chain variable domain of TCR clone 114875 (TRAV30, TRAJ24)
CGTEIVDADSWGKFQF

SEQ ID NO: 229750 - protein, 14 aa, Homo sapiens
  CDR3 for beta chain variable domain of TCR clone 114875 (TRBV4-1, TRBJ1-2)
CASSQDGQVRGYTF

SEQ ID NO: 229751 - protein, 14 aa, Homo sapiens
  CDR3 for alpha chain variable domain of TCR clone 114876 (TRAV35, TRAJ22)
CAGLRPGSARQLTF

SEQ ID NO: 229752 - protein, 14 aa, Homo sapiens
  CDR3 for beta chain variable domain of TCR clone 114876 (TRBV3-1, TRBJ1-5)
CASSTGDSNQPQHF

SEQ ID NO: 229753 - protein, 13 aa, Homo sapiens
  CDR3 for alpha chain variable domain of TCR clone 114877 (TRAV17, TRAJ9)
CATAITGGFRTIF

SEQ ID NO: 229754 - protein, 16 aa, Homo sapiens
  CDR3 for beta chain variable domain of TCR clone 114877 (TRBV15, TRBJ2-1)
CATSRNLAGGYNEQFF

SEQ ID NO: 229755 - protein, 16 aa, Homo sapiens
  CDR3 for alpha chain variable domain of TCR clone 114878 (TRAV3, TRAJ37)
CAVRGKGSGNTGKLIF

SEQ ID NO: 229756 - protein, 16 aa, Homo sapiens
  CDR3 for beta chain variable domain of TCR clone 114878 (TRBV12-4, TRBJ1-5)
CASSRPVGGSNQPQHL

SEQ ID NO: 229757 - protein, 13 aa, Homo sapiens
  CDR3 for alpha chain variable domain of TCR clone 114879 (TRAV27, TRAJ8)
CAGGPTGFQKLVF

SEQ ID NO: 229758 - protein, 15 aa, Homo sapiens
  CDR3 for beta chain variable domain of TCR clone 114879 (TRBV7-3, TRBJ2-1)
CASSPTGGGEVEQFF

SEQ ID NO: 229759 - protein, 13 aa, Homo sapiens
  CDR3 for alpha chain variable domain of TCR clone 114880 (TRAV23/DV6, TRAJ22)
CAPYSGSARQLTF

SEQ ID NO: 229760 - protein, 16 aa, Homo sapiens
  CDR3 for beta chain variable domain of TCR clone 114880 (TRBV7-3, TRBJ2-2)
CASSLKRGTLSGELFF

SEQ ID NO: 229761 - protein, 13 aa, Homo sapiens
  CDR3 for alpha chain variable domain of TCR clone 114881 (TRAV3, TRAJ21)
CAVREPDFNKFYF

SEQ ID NO: 229762 - protein, 12 aa, Homo sapiens
  CDR3 for beta chain variable domain of TCR clone 114881 (TRBV11-2, TRBJ2-5)
CASSLVGETQYF

SEQ ID NO: 229763 - protein, 13 aa, Homo sapiens
  CDR3 for alpha chain variable domain of TCR clone 114882 (TRAV12-2, TRAJ20)
CAVYPSNDYKLSF

SEQ ID NO: 229764 - protein, 15 aa, Homo sapiens
  CDR3 for beta chain variable domain of TCR clone 114882 (TRBV5-1, TRBJ1-4)
FAPAAWKDGNEKLFF

SEQ ID NO: 229765 - protein, 11 aa, Homo sapiens
  CDR3 for alpha chain variable domain of TCR clone 114883 (TRAV2, TRAJ13)
CASGGYQKVTF

SEQ ID NO: 229766 - protein, 12 aa, Homo sapiens
  CDR3 for beta chain variable domain of TCR clone 114883 (TRBV11-2, TRBJ2-5)
CASSLGQETQYF

SEQ ID NO: 229767 - protein, 14 aa, Homo sapiens
  CDR3 for alpha chain variable domain of TCR clone 114884 (TRAV1-2, TRAJ16)
CAVNRFSDGQKLLF

SEQ ID NO: 229768 - protein, 16 aa, Homo sapiens
  CDR3 for beta chain variable domain of TCR clone 114884 (TRBV12-5, TRBJ2-5)
CTSGPRTSGNQETQYF

SEQ ID NO: 229769 - protein, 14 aa, Homo sapiens
  CDR3 for alpha chain variable domain of TCR clone 114885 (TRAV8-2, TRAJ11)
CVVSEKSGYSTSPL

SEQ ID NO: 229770 - protein, 16 aa, Homo sapiens
  CDR3 for beta chain variable domain of TCR clone 114885 (TRBV28, TRBJ2-1)
CASSSPEYPRDNEQFF

SEQ ID NO: 229771 - protein, 15 aa, Homo sapiens
  CDR3 for alpha chain variable domain of TCR clone 114886 (TRAV16, TRAJ10)
CALEGPTGGGNKLTF

SEQ ID NO: 229772 - protein, 16 aa, Homo sapiens
  CDR3 for beta chain variable domain of TCR clone 114886 (TRBV5-7, TRBJ1-1)
CASSLVGPRGNTEAFF

SEQ ID NO: 229773 - protein, 14 aa, Homo sapiens
  CDR3 for alpha chain variable domain of TCR clone 114887 (TRAV3, TRAJ22)
CAVRDSGSARQLTF

SEQ ID NO: 229774 - protein, 15 aa, Homo sapiens
  CDR3 for beta chain variable domain of TCR clone 114887 (TRBV11-2, TRBJ2-5)
CASSLASYSGETQYS

SEQ ID NO: 229775 - protein, 12 aa, Homo sapiens
  CDR3 for alpha chain variable domain of TCR clone 114888 (TRAV12-1, TRAJ23)
CVVNIPGGKLIF

SEQ ID NO: 229776 - protein, 12 aa, Homo sapiens
  CDR3 for beta chain variable domain of TCR clone 114888 (TRBV28, TRBJ2-3)
CASSLYRDTQYF

SEQ ID NO: 229777 - protein, 11 aa, Homo sapiens
  CDR3 for alpha chain variable domain of TCR clone 114889 (TRAV1-2, TRAJ31)
CPVNNNARLMF

SEQ ID NO: 229778 - protein, 15 aa, Homo sapiens
  CDR3 for beta chain variable domain of TCR clone 114889 (TRBV28, TRBJ2-1)
CASSIIAGGRSEQFF

SEQ ID NO: 229779 - protein, 18 aa, Homo sapiens
  CDR3 for alpha chain variable domain of TCR clone 114890 (TRAV1-2, TRAJ18)
CAVRDMGDRGSTLGRLYF

SEQ ID NO: 229780 - protein, 15 aa, Homo sapiens
  CDR3 for beta chain variable domain of TCR clone 114890 (TRBV27, TRBJ2-1)
CASSNGGGSSNEQFF

SEQ ID NO: 229781 - protein, 14 aa, Homo sapiens
  CDR3 for alpha chain variable domain of TCR clone 114891 (TRAV1-2, TRAJ8)
CAVREDTCFQKLVF

SEQ ID NO: 229782 - protein, 15 aa, Homo sapiens
  CDR3 for beta chain variable domain of TCR clone 114891 (TRBV29-1, TRBJ2-1)
CSVPTGLALYNEQFF

SEQ ID NO: 229783 - protein, 14 aa, Homo sapiens
  CDR3 for alpha chain variable domain of TCR clone 114892 (TRAV12-1, TRAJ22)
CVVTTSGSARQLTF

SEQ ID NO: 229784 - protein, 16 aa, Homo sapiens
  CDR3 for beta chain variable domain of TCR clone 114892 (TRBV6-6, TRBJ2-1)
CASSLLSDSSYNEQFL

SEQ ID NO: 229785 - protein, 16 aa, Homo sapiens
  CDR3 for alpha chain variable domain of TCR clone 114893 (TRAV23/DV6, TRAJ21)
CAASSGGGTTSTNFNL

SEQ ID NO: 229786 - protein, 11 aa, Homo sapiens
  CDR3 for beta chain variable domain of TCR clone 114893 (TRBV7-8, TRBJ2-7)
CASSLSLEQYF

SEQ ID NO: 229787 - protein, 16 aa, Homo sapiens
  CDR3 for alpha chain variable domain of TCR clone 114894 (TRAV30, TRAJ24)
CGTEIVDADSWGKFQF

SEQ ID NO: 229788 - protein, 12 aa, Homo sapiens
  CDR3 for beta chain variable domain of TCR clone 114894 (TRBV7-8, TRBJ2-7)
CASGLGDREQYF

SEQ ID NO: 229789 - protein, 14 aa, Homo sapiens
  CDR3 for alpha chain variable domain of TCR clone 114895 (TRAV25, TRAJ35)
CARRMEGFGNVLHC

SEQ ID NO: 229790 - protein, 13 aa, Homo sapiens
  CDR3 for beta chain variable domain of TCR clone 114895 (TRBV7-2, TRBJ1-4)
CASSLAGLDKLFF

SEQ ID NO: 229791 - protein, 10 aa, Homo sapiens
  CDR3 for alpha chain variable domain of TCR clone 114896 (TRAV1-2, TRAJ20)
CASNDYKLSF

SEQ ID NO: 229792 - protein, 16 aa, Homo sapiens
  CDR3 for beta chain variable domain of TCR clone 114896 (TRBV20-1, TRBJ2-1)
CSARDLKQGMNNEQFF

SEQ ID NO: 229793 - protein, 18 aa, Homo sapiens
  CDR3 for alpha chain variable domain of TCR clone 114897 (TRAV13-1, TRAJ52)
CAASKRSAGGTSYGKLTF

SEQ ID NO: 229794 - protein, 14 aa, Homo sapiens
  CDR3 for beta chain variable domain of TCR clone 114897 (TRBV7-3, TRBJ2-1)
CASSLAGGTNEQFF

SEQ ID NO: 229795 - protein, 11 aa, Homo sapiens
  CDR3 for alpha chain variable domain of TCR clone 114898 (TRAV23/DV6, TRAJ48)
CAPRWGEKLTF

SEQ ID NO: 229796 - protein, 13 aa, Homo sapiens
  CDR3 for beta chain variable domain of TCR clone 114898 (TRBV12-4, TRBJ2-5)
CASSPGTEETQDF

SEQ ID NO: 229797 - protein, 14 aa, Homo sapiens
  CDR3 for alpha chain variable domain of TCR clone 114899 (TRAV1-2, TRAJ8)
CAVREDTGFQKLVF

SEQ ID NO: 229798 - protein, 16 aa, Homo sapiens
  CDR3 for beta chain variable domain of TCR clone 114899 (TRBV11-3, TRBJ2-5)
CASSSVVAGSTETQYF

SEQ ID NO: 229799 - protein, 14 aa, Homo sapiens
  CDR3 for alpha chain variable domain of TCR clone 114900 (TRAV12-1, TRAJ12)
CVVTRMDSSYKLIF

SEQ ID NO: 229800 - protein, 14 aa, Homo sapiens
  CDR3 for beta chain variable domain of TCR clone 114900 (TRBV11-3, TRBJ1-1)
CASSPGAWNTEAFF

SEQ ID NO: 229801 - protein, 19 aa, Homo sapiens
  CDR3 for alpha chain variable domain of TCR clone 114901 (TRAV3, TRAJ6)
CAVRDRNPNRSGGSYIPTF

SEQ ID NO: 229802 - protein, 15 aa, Homo sapiens
  CDR3 for beta chain variable domain of TCR clone 114901 (TRBV18, TRBJ2-7)
CASSPTFMDSYEQYF

SEQ ID NO: 229803 - protein, 14 aa, Homo sapiens
  CDR3 for alpha chain variable domain of TCR clone 114902 (TRAV12-2, TRAJ9)
CAVNLNTGGFKTIF

SEQ ID NO: 229804 - protein, 17 aa, Homo sapiens
  CDR3 for beta chain variable domain of TCR clone 114902 (TRBV20-1, TRBJ2-2)
CSASSQVGQGYTGELFF

SEQ ID NO: 229805 - protein, 15 aa, Homo sapiens
  CDR3 for alpha chain variable domain of TCR clone 114903 (TRAV3, TRAJ22)
CAVRDRGGSARQLTF

SEQ ID NO: 229806 - protein, 15 aa, Homo sapiens
  CDR3 for beta chain variable domain of TCR clone 114903 (TRBV11-2, TRBJ2-2)
CASSSDRVNAGELFF

SEQ ID NO: 229807 - protein, 14 aa, Homo sapiens
  CDR3 for alpha chain variable domain of TCR clone 114904 (TRAV26-1, TRAJ38)
CIADKAGNNRKLIW

SEQ ID NO: 229808 - protein, 13 aa, Homo sapiens
  CDR3 for beta chain variable domain of TCR clone 114904 (TRBV20-1, TRBJ1-1)
CSARGEGNTEAFF

SEQ ID NO: 229809 - protein, 14 aa, Homo sapiens
  CDR3 for alpha chain variable domain of TCR clone 114905 (TRAV35, TRAJ33)
CWPRGRDSNYQLIW

SEQ ID NO: 229810 - protein, 11 aa, Homo sapiens
  CDR3 for beta chain variable domain of TCR clone 114905 (TRBV10-3, TRBJ2-7)
CAISEGLEQYL

SEQ ID NO: 229811 - protein, 12 aa, Homo sapiens
  CDR3 for alpha chain variable domain of TCR clone 114906 (TRAV13-2, TRAJ23)
CAERHRGGKLIF

SEQ ID NO: 229812 - protein, 16 aa, Homo sapiens
  CDR3 for beta chain variable domain of TCR clone 114906 (TRBV7-2, TRBJ2-6)
RAILSGVSSGANVLTF

SEQ ID NO: 229813 - protein, 18 aa, Homo sapiens
  CDR3 for alpha chain variable domain of TCR clone 114907 (TRAV13-1, TRAJ52)
CAAKNPNAGGTSYGKLTL

SEQ ID NO: 229814 - protein, 14 aa, Homo sapiens
  CDR3 for beta chain variable domain of TCR clone 114907 (TRBV7-2, TRBJ2-7)
CASSPKTSFYEQYF

SEQ ID NO: 229815 - protein, 14 aa, Homo sapiens
  CDR3 for alpha chain variable domain of TCR clone 114908 (TRAV38-1, TRAJ40)
CALRPTSGAYKYIF

SEQ ID NO: 229816 - protein, 14 aa, Homo sapiens
  CDR3 for beta chain variable domain of TCR clone 114908 (TRBV25-1, TRBJ1-1)
CASTHLGGDTEAFF

SEQ ID NO: 229817 - protein, 12 aa, Homo sapiens
  CDR3 for alpha chain variable domain of TCR clone 114909 (TRAV3, TRAJ43)
CAVRDPNNDMRF

SEQ ID NO: 229818 - protein, 14 aa, Homo sapiens
  CDR3 for beta chain variable domain of TCR clone 114909 (TRBV7-2, TRBJ1-1)
CASSFLTGTTEAFF

SEQ ID NO: 229819 - protein, 14 aa, Homo sapiens
  CDR3 for alpha chain variable domain of TCR clone 114910 (TRAV12-1, TRAJ9)
CVVNRGTGGFKTIF

SEQ ID NO: 229820 - protein, 15 aa, Homo sapiens
  CDR3 for beta chain variable domain of TCR clone 114910 (TRBV12-4, TRBJ2-2)
CASGPGQLNTGELFF

SEQ ID NO: 229821 - protein, 11 aa, Homo sapiens
  CDR3 for alpha chain variable domain of TCR clone 114911 (TRAV23/DV6, TRAJ58)
CAARLLSGETS

SEQ ID NO: 229822 - protein, 13 aa, Homo sapiens
  CDR3 for beta chain variable domain of TCR clone 114911 (TRBV6-4, TRBJ1-5)
CASSADLNQPQHF

SEQ ID NO: 229823 - protein, 11 aa, Homo sapiens
  CDR3 for alpha chain variable domain of TCR clone 114912 (TRAV12-2, TRAJ49)
CALQGGNRFYF

SEQ ID NO: 229824 - protein, 13 aa, Homo sapiens
  CDR3 for beta chain variable domain of TCR clone 114912 (TRBV4-1, TRBJ1-1)
CASSQLGTGEAFF

SEQ ID NO: 229825 - protein, 10 aa, Homo sapiens
  CDR3 for alpha chain variable domain of TCR clone 114913 (TRAV13-1, TRAJ30)
CAARDDKIIF

SEQ ID NO: 229826 - protein, 17 aa, Homo sapiens
  CDR3 for beta chain variable domain of TCR clone 114913 (TRBV13, TRBJ2-3)
CASSLSRVAGGRNTQYF

SEQ ID NO: 229827 - protein, 11 aa, Homo sapiens
  CDR3 for alpha chain variable domain of TCR clone 114914 (TRAV21, TRAJ48)
CAVDGNEKLTF

SEQ ID NO: 229828 - protein, 16 aa, Homo sapiens
  CDR3 for beta chain variable domain of TCR clone 114914 (TRBV12-4, TRBJ1-5)
CASSSGPRGSNRPQHF

SEQ ID NO: 229829 - protein, 14 aa, Homo sapiens
  CDR3 for alpha chain variable domain of TCR clone 114915 (TRAV21, TRAJ32)
CCGDYGGATNKLIF

SEQ ID NO: 229830 - protein, 15 aa, Homo sapiens
  CDR3 for beta chain variable domain of TCR clone 114915 (TRBV7-2, TRBJ2-1)
CASSLASGRVNEQFF

SEQ ID NO: 229831 - protein, 17 aa, Homo sapiens
  CDR3 for alpha chain variable domain of TCR clone 114916 (TRAV26-2, TRAJ42)
CILRDVGYGGSQGNLIF

SEQ ID NO: 229832 - protein, 12 aa, Homo sapiens
  CDR3 for beta chain variable domain of TCR clone 114916 (TRBV12-4, TRBJ1-3)
CASSFSGNTIYF

SEQ ID NO: 229833 - protein, 13 aa, Homo sapiens
  CDR3 for alpha chain variable domain of TCR clone 114917 (TRAV13-1, TRAJ39)
CSKYSNAGNMLTF

SEQ ID NO: 229834 - protein, 12 aa, Homo sapiens
  CDR3 for beta chain variable domain of TCR clone 114917 (TRBV5-4, TRBJ2-5)
CASSSTRETQYF

SEQ ID NO: 229835 - protein, 13 aa, Homo sapiens
  CDR3 for alpha chain variable domain of TCR clone 114918 (TRAV12-1, TRAJ29)
CVVVSSGNTPLVF

SEQ ID NO: 229836 - protein, 12 aa, Homo sapiens
  CDR3 for beta chain variable domain of TCR clone 114918 (TRBV11-2, TRBJ2-7)
CASSLPTYEQYF

SEQ ID NO: 229837 - protein, 12 aa, Homo sapiens
  CDR3 for alpha chain variable domain of TCR clone 114919 (TRAV13-1, TRAJ21)
CAAKEGFNKFYF

SEQ ID NO: 229838 - protein, 14 aa, Homo sapiens
  CDR3 for beta chain variable domain of TCR clone 114919 (TRBV4-2, TRBJ1-5)
CASSQDSINQPQHF

SEQ ID NO: 229839 - protein, 16 aa, Homo sapiens
  CDR3 for alpha chain variable domain of TCR clone 114920 (TRAV26-1, TRAJ37)
CIVRGDGSGNTGKLNF

SEQ ID NO: 229840 - protein, 17 aa, Homo sapiens
  CDR3 for beta chain variable domain of TCR clone 114920 (TRBV4-1, TRBJ2-7)
CASSRDPLGVRGGEQYF

SEQ ID NO: 229841 - protein, 15 aa, Homo sapiens
  CDR3 for alpha chain variable domain of TCR clone 114921 (TRAV27, TRAJ50)
CAGVGRGTSYDKVIF

SEQ ID NO: 229842 - protein, 14 aa, Homo sapiens
  CDR3 for beta chain variable domain of TCR clone 114921 (TRBV7-2, TRBJ1-1)
CASSFDDLNTEAFF

SEQ ID NO: 229843 - protein, 13 aa, Homo sapiens
  CDR3 for alpha chain variable domain of TCR clone 114922 (TRAV8-3, TRAJ36)
CAVGATGANNLFF

SEQ ID NO: 229844 - protein, 15 aa, Homo sapiens
  CDR3 for beta chain variable domain of TCR clone 114922 (TRBV7-2, TRBJ1-2)
CASSPRAGWNYGFTF

SEQ ID NO: 229845 - protein, 12 aa, Homo sapiens
  CDR3 for alpha chain variable domain of TCR clone 114923 (TRAV16, TRAJ10)
CSRTGGGNKLTF

SEQ ID NO: 229846 - protein, 14 aa, Homo sapiens
  CDR3 for beta chain variable domain of TCR clone 114923 (TRBV28, TRBJ2-7)
CASSLLRISYEQYF

SEQ ID NO: 229847 - protein, 18 aa, Homo sapiens
  CDR3 for alpha chain variable domain of TCR clone 114924 (TRAV21, TRAJ52)
CAVRPSPAGDTSYGKLTF

SEQ ID NO: 229848 - protein, 17 aa, Homo sapiens
  CDR3 for beta chain variable domain of TCR clone 114924 (TRBV20-1, TRBJ2-2)
CSASGSGQGGLTGELFF

SEQ ID NO: 229849 - protein, 16 aa, Homo sapiens
  CDR3 for alpha chain variable domain of TCR clone 114925 (TRAV8-3, TRAJ10)
CVVGPGVTGGGNKLTF

SEQ ID NO: 229850 - protein, 13 aa, Homo sapiens
  CDR3 for beta chain variable domain of TCR clone 114925 (TRBV18, TRBJ1-1)
CASSPGPSGEAFF

SEQ ID NO: 229851 - protein, 12 aa, Homo sapiens
  CDR3 for alpha chain variable domain of TCR clone 114926 (TRAV12-3, TRAJ17)
YAMTLTGNKLTF

SEQ ID NO: 229852 - protein, 15 aa, Homo sapiens
  CDR3 for beta chain variable domain of TCR clone 114926 (TRBV9, TRBJ1-6)
CASSVAGTGDSPLHF

SEQ ID NO: 229853 - protein, 19 aa, Homo sapiens
  CDR3 for alpha chain variable domain of TCR clone 114927 (TRAV26-1, TRAJ52)
GIVRAHRNAGGTSYGKLTF

SEQ ID NO: 229854 - protein, 15 aa, Homo sapiens
  CDR3 for beta chain variable domain of TCR clone 114927 (TRBV29-1, TRBJ2-1)
CSGRDRKSSYNEQFF

SEQ ID NO: 229855 - protein, 14 aa, Homo sapiens
  CDR3 for alpha chain variable domain of TCR clone 114928 (TRAV12-1, TRAJ23)
CVVIVYNQGGKLIF

SEQ ID NO: 229856 - protein, 15 aa, Homo sapiens
  CDR3 for beta chain variable domain of TCR clone 114928 (TRBV20-1, TRBJ1-5)
CSAKPPGQGPQPQHF

SEQ ID NO: 229857 - protein, 10 aa, Homo sapiens
  CDR3 for alpha chain variable domain of TCR clone 114929 (TRAV1-2, TRAJ20)
CAFNDYKLSF

SEQ ID NO: 229858 - protein, 16 aa, Homo sapiens
  CDR3 for beta chain variable domain of TCR clone 114929 (TRBV20-1, TRBJ1-1)
CSARALTQGMNTEAFF

SEQ ID NO: 229859 - protein, 15 aa, Homo sapiens
  CDR3 for alpha chain variable domain of TCR clone 114930 (TRAV13-2, TRAJ23)
CAERGSYNQGGKLIF

SEQ ID NO: 229860 - protein, 14 aa, Homo sapiens
  CDR3 for beta chain variable domain of TCR clone 114930 (TRBV4-1, TRBJ2-3)
CASSQDWSTDTQYF

SEQ ID NO: 229861 - protein, 14 aa, Homo sapiens
  CDR3 for alpha chain variable domain of TCR clone 114931 (TRAV1-2, TRAJ8)
CAVREDTGFQKLVF

SEQ ID NO: 229862 - protein, 16 aa, Homo sapiens
  CDR3 for beta chain variable domain of TCR clone 114931 (TRBV5-1, TRBJ2-7)
CASSLEGLAGLYEQYF

SEQ ID NO: 229863 - protein, 14 aa, Homo sapiens
  CDR3 for alpha chain variable domain of TCR clone 114932 (TRAV27, TRAJ22)
CAGLPSGSARQLTF

SEQ ID NO: 229864 - protein, 13 aa, Homo sapiens
  CDR3 for beta chain variable domain of TCR clone 114932 (TRBV7-2, TRBJ1-2)
CASSSRGAYGYTF

SEQ ID NO: 229865 - protein, 17 aa, Homo sapiens
  CDR3 for alpha chain variable domain of TCR clone 114933 (TRAV8-6, TRAJ58)
CAVSSWVGETSDSRLTF

SEQ ID NO: 229866 - protein, 14 aa, Homo sapiens
  CDR3 for beta chain variable domain of TCR clone 114933 (TRBV4-2, TRBJ2-1)
CASGLDRAYNEQFF

SEQ ID NO: 229867 - protein, 13 aa, Homo sapiens
  CDR3 for alpha chain variable domain of TCR clone 114934 (TRAV21, TRAJ27)
CAARPGNAGKSTF

SEQ ID NO: 229868 - protein, 13 aa, Homo sapiens
  CDR3 for beta chain variable domain of TCR clone 114934 (TRBV7-2, TRBJ2-7)
CASSSPSGSEQYF

SEQ ID NO: 229869 - protein, 12 aa, Homo sapiens
  CDR3 for alpha chain variable domain of TCR clone 114935 (TRAV27, TRAJ35)
CAGADFGNVLHC

SEQ ID NO: 229870 - protein, 13 aa, Homo sapiens
  CDR3 for beta chain variable domain of TCR clone 114935 (TRBV28, TRBJ2-5)
CASSFAGGETQYF

SEQ ID NO: 229871 - protein, 11 aa, Homo sapiens
  CDR3 for alpha chain variable domain of TCR clone 114936 (TRAV8-1, TRAJ8)
CAMTGFQKLVF

SEQ ID NO: 229872 - protein, 14 aa, Homo sapiens
  CDR3 for beta chain variable domain of TCR clone 114936 (TRBV5-4, TRBJ1-2)
CASTRQTDNYGDTF

SEQ ID NO: 229873 - protein, 13 aa, Homo sapiens
  CDR3 for alpha chain variable domain of TCR clone 114937 (TRAV8-2, TRAJ49)
CVVTPNTGNQFYF

SEQ ID NO: 229874 - protein, 15 aa, Homo sapiens
  CDR3 for beta chain variable domain of TCR clone 114937 (TRBV11-2, TRBJ2-1)
CASSFTSGGYNEQFF

SEQ ID NO: 229875 - protein, 12 aa, Homo sapiens
  CDR3 for alpha chain variable domain of TCR clone 114938 (TRAV13-2, TRAJ8)
CAPWLGFQKLVF

SEQ ID NO: 229876 - protein, 15 aa, Homo sapiens
  CDR3 for beta chain variable domain of TCR clone 114938 (TRBV7-9, TRBJ1-5)
CASSQGHQPNQPQHF

SEQ ID NO: 229877 - protein, 11 aa, Homo sapiens
  CDR3 for alpha chain variable domain of TCR clone 114939 (TRAV3, TRAJ21)
CAVGNFNKFYF

SEQ ID NO: 229878 - protein, 14 aa, Homo sapiens
  CDR3 for beta chain variable domain of TCR clone 114939 (TRBV15, TRBJ2-3)
CATRSGTSTDTQYF

SEQ ID NO: 229879 - protein, 13 aa, Homo sapiens
  CDR3 for alpha chain variable domain of TCR clone 114940 (TRAV12-2, TRAJ10)
CAVPPGGGNKLTF

SEQ ID NO: 229880 - protein, 11 aa, Homo sapiens
  CDR3 for beta chain variable domain of TCR clone 114940 (TRBV6-1, TRBJ2-1)
CASISSNEQFF

SEQ ID NO: 229881 - protein, 16 aa, Homo sapiens
  CDR3 for alpha chain variable domain of TCR clone 114941 (TRAV8-3, TRAJ13)
CAVGAYPSGGYQKVTF

SEQ ID NO: 229882 - protein, 15 aa, Homo sapiens
  CDR3 for beta chain variable domain of TCR clone 114941 (TRBV19, TRBJ1-5)
CASSIEWADNQPQHF

SEQ ID NO: 229883 - protein, 14 aa, Homo sapiens
  CDR3 for alpha chain variable domain of TCR clone 114942 (TRAV21, TRAJ45)
CAVSSGGGADGLTF

SEQ ID NO: 229884 - protein, 15 aa, Homo sapiens
  CDR3 for beta chain variable domain of TCR clone 114942 (TRBV19, TRBJ1-1)
CASTSGQIQNTEAFF

SEQ ID NO: 229885 - protein, 13 aa, Homo sapiens
  CDR3 for alpha chain variable domain of TCR clone 114943 (TRAV21, TRAJ36)
CAVIKTGANNLFF

SEQ ID NO: 229886 - protein, 15 aa, Homo sapiens
  CDR3 for beta chain variable domain of TCR clone 114943 (TRBV20-1, TRBJ2-7)
CSARDRVSGMDEQYF

SEQ ID NO: 229887 - protein, 12 aa, Homo sapiens
  CDR3 for alpha chain variable domain of TCR clone 114944 (TRAV16, TRAJ27)
CALNHQCRQINL

SEQ ID NO: 229888 - protein, 14 aa, Homo sapiens
  CDR3 for beta chain variable domain of TCR clone 114944 (TRBV11-2, TRBJ1-5)
CASSLDRGRQPQHV

SEQ ID NO: 229889 - protein, 14 aa, Homo sapiens
  CDR3 for alpha chain variable domain of TCR clone 114945 (TRAV1-2, TRAJ8)
CAVREDTGFQKLVF

SEQ ID NO: 229890 - protein, 16 aa, Homo sapiens
  CDR3 for beta chain variable domain of TCR clone 114945 (TRBV7-6, TRBJ2-6)
CASSLPGLSGANALTF

SEQ ID NO: 229891 - protein, 15 aa, Homo sapiens
  CDR3 for alpha chain variable domain of TCR clone 114946 (TRAV3, TRAJ5)
CAVRDLDTGRRALTF

SEQ ID NO: 229892 - protein, 12 aa, Homo sapiens
  CDR3 for beta chain variable domain of TCR clone 114946 (TRBV2, TRBJ1-5)
CASSENRTPQHF

SEQ ID NO: 229893 - protein, 13 aa, Homo sapiens
  CDR3 for alpha chain variable domain of TCR clone 114947 (TRAV38-1, TRAJ42)
CARWGGSQGNLIF

SEQ ID NO: 229894 - protein, 17 aa, Homo sapiens
  CDR3 for beta chain variable domain of TCR clone 114947 (TRBV20-1, TRBJ2-1)
CSARDPLARVWDNEQFF

SEQ ID NO: 229895 - protein, 10 aa, Homo sapiens
  CDR3 for alpha chain variable domain of TCR clone 114948 (TRAV13-2, TRAJ49)
CADTGNQFYF

SEQ ID NO: 229896 - protein, 13 aa, Homo sapiens
  CDR3 for beta chain variable domain of TCR clone 114948 (TRBV10-3, TRBJ1-2)
CAISERDSYGYAF

SEQ ID NO: 229897 - protein, 13 aa, Homo sapiens
  CDR3 for alpha chain variable domain of TCR clone 114949 (TRAV29/DV5, TRAJ31)
CAASRNNNARLMF

SEQ ID NO: 229898 - protein, 12 aa, Homo sapiens
  CDR3 for beta chain variable domain of TCR clone 114949 (TRBV14, TRBJ2-7)
CASSLDKDEQYF

SEQ ID NO: 229899 - protein, 15 aa, Homo sapiens
  CDR3 for alpha chain variable domain of TCR clone 114950 (TRAV12-2, TRAJ53)
CAVNGGGGSNYKLTF

SEQ ID NO: 229900 - protein, 10 aa, Homo sapiens
  CDR3 for beta chain variable domain of TCR clone 114950 (TRBV28, TRBJ1-2)
CASSSDRAVF

SEQ ID NO: 229901 - protein, 12 aa, Homo sapiens
  CDR3 for alpha chain variable domain of TCR clone 114951 (TRAV21, TRAJ11)
CAATSGYSTLTF

SEQ ID NO: 229902 - protein, 14 aa, Homo sapiens
  CDR3 for beta chain variable domain of TCR clone 114951 (TRBV20-1, TRBJ2-7)
CSAPELTGVGEQYF

SEQ ID NO: 229903 - protein, 15 aa, Homo sapiens
  CDR3 for alpha chain variable domain of TCR clone 114952 (TRAV23/DV6, TRAJ36)
CAALRAQTGANNLFF

SEQ ID NO: 229904 - protein, 15 aa, Homo sapiens
  CDR3 for beta chain variable domain of TCR clone 114952 (TRBV12-4, TRBJ1-2)
CASSPITGGGYGYTF

SEQ ID NO: 229905 - protein, 14 aa, Homo sapiens
  CDR3 for alpha chain variable domain of TCR clone 114953 (TRAV9-2, TRAJ39)
CALYIYNAVNMLTF

SEQ ID NO: 229906 - protein, 15 aa, Homo sapiens
  CDR3 for beta chain variable domain of TCR clone 114953 (TRBV20-1, TRBJ2-7)
CSARDRVSGMDEQYF

SEQ ID NO: 229907 - protein, 10 aa, Homo sapiens
  CDR3 for alpha chain variable domain of TCR clone 114954 (TRAV16, TRAJ26)
CAPEELWSEF

SEQ ID NO: 229908 - protein, 15 aa, Homo sapiens
  CDR3 for beta chain variable domain of TCR clone 114954 (TRBV7-2, TRBJ2-3)
CASSLTGTSTDTKYF

SEQ ID NO: 229909 - protein, 18 aa, Homo sapiens
  CDR3 for alpha chain variable domain of TCR clone 114955 (TRAV13-1, TRAJ52)
CAAKNPNAGGTSYGKLTF

SEQ ID NO: 229910 - protein, 18 aa, Homo sapiens
  CDR3 for beta chain variable domain of TCR clone 114955 (TRBV15, TRBJ2-1)
CVPPPGCSGGPTTNEQFF

SEQ ID NO: 229911 - protein, 11 aa, Homo sapiens
  CDR3 for alpha chain variable domain of TCR clone 114956 (TRAV21, TRAJ11)
CAVNGYSTLTF

SEQ ID NO: 229912 - protein, 12 aa, Homo sapiens
  CDR3 for beta chain variable domain of TCR clone 114956 (TRBV19, TRBJ1-5)
CASSIAQQPQHF

SEQ ID NO: 229913 - protein, 13 aa, Homo sapiens
  CDR3 for alpha chain variable domain of TCR clone 114957 (TRAV9-2, TRAJ49)
CALIQIGGNQFYF

SEQ ID NO: 229914 - protein, 14 aa, Homo sapiens
  CDR3 for beta chain variable domain of TCR clone 114957 (TRBV7-2, TRBJ2-7)
CASRSQGAAYEQYF

SEQ ID NO: 229915 - protein, 13 aa, Homo sapiens
  CDR3 for alpha chain variable domain of TCR clone 114958 (TRAV2, TRAJ40)
CAVVTSGTYKYIF

SEQ ID NO: 229916 - protein, 18 aa, Homo sapiens
  CDR3 for beta chain variable domain of TCR clone 114958 (TRBV10-3, TRBJ2-3)
CAISESRVGPMRGDTQYF

SEQ ID NO: 229917 - protein, 16 aa, Homo sapiens
  CDR3 for alpha chain variable domain of TCR clone 114959 (TRAV17, TRAJ28)
CATDEYSGAGSYQLTF

SEQ ID NO: 229918 - protein, 13 aa, Homo sapiens
  CDR3 for beta chain variable domain of TCR clone 114959 (TRBV7-9, TRBJ1-2)
CASRTGPSYGYTF

SEQ ID NO: 229919 - protein, 13 aa, Homo sapiens
  CDR3 for alpha chain variable domain of TCR clone 114960 (TRAV8-4, TRAJ49)
CAVRTLTGNQFYF

SEQ ID NO: 229920 - protein, 11 aa, Homo sapiens
  CDR3 for beta chain variable domain of TCR clone 114960 (TRBV29-1, TRBJ2-5)
CSEDRTGTQYF

SEQ ID NO: 229921 - protein, 14 aa, Homo sapiens
  CDR3 for alpha chain variable domain of TCR clone 114961 (TRAV12-2, TRAJ40)
CAVKIPSGTYKYIF

SEQ ID NO: 229922 - protein, 14 aa, Homo sapiens
  CDR3 for beta chain variable domain of TCR clone 114961 (TRBV15, TRBJ2-5)
CATSIGGLGETQYF

SEQ ID NO: 229923 - protein, 13 aa, Homo sapiens
  CDR3 for alpha chain variable domain of TCR clone 114962 (TRAV12-3, TRAJ13)
CAMSSGGYPKVTF

SEQ ID NO: 229924 - protein, 13 aa, Homo sapiens
  CDR3 for beta chain variable domain of TCR clone 114962 (TRBV20-1, TRBJ1-1)
CSAPPGGHTEAFF

SEQ ID NO: 229925 - protein, 15 aa, Homo sapiens
  CDR3 for alpha chain variable domain of TCR clone 114963 (TRAV12-3, TRAJ27)
CAMRAYNTNAGKSTF

SEQ ID NO: 229926 - protein, 12 aa, Homo sapiens
  CDR3 for beta chain variable domain of TCR clone 114963 (TRBV11-2, TRBJ2-2)
CASSLGGGELFF

SEQ ID NO: 229927 - protein, 14 aa, Homo sapiens
  CDR3 for alpha chain variable domain of TCR clone 114964 (TRAV2, TRAJ37)
TTVPGSSNTGTLIF

SEQ ID NO: 229928 - protein, 14 aa, Homo sapiens
  CDR3 for beta chain variable domain of TCR clone 114964 (TRBV7-8, TRBJ2-7)
CASSLWQSSYEQYF

SEQ ID NO: 229929 - protein, 13 aa, Homo sapiens
  CDR3 for alpha chain variable domain of TCR clone 114965 (TRAV36/DV7, TRAJ37)
CAVFSSNTGKLIF

SEQ ID NO: 229930 - protein, 16 aa, Homo sapiens
  CDR3 for beta chain variable domain of TCR clone 114965 (TRBV7-9, TRBJ2-5)
CASSPSGQGVKGTQYF

SEQ ID NO: 229931 - protein, 14 aa, Homo sapiens
  CDR3 for alpha chain variable domain of TCR clone 114966 (TRAV17, TRAJ5)
CATSTDTGRRALTF

SEQ ID NO: 229932 - protein, 15 aa, Homo sapiens
  CDR3 for beta chain variable domain of TCR clone 114966 (TRBV25-1, TRBJ1-4)
CASSKRIATNEKLFF

SEQ ID NO: 229933 - protein, 15 aa, Homo sapiens
  CDR3 for alpha chain variable domain of TCR clone 114967 (TRAV1-2, TRAJ40)
CLLPLCCPGTYKYIF

SEQ ID NO: 229934 - protein, 16 aa, Homo sapiens
  CDR3 for beta chain variable domain of TCR clone 114967 (TRBV29-1, TRBJ2-7)
CSVEVVGTSGSYEQYF

SEQ ID NO: 229935 - protein, 16 aa, Homo sapiens
  CDR3 for alpha chain variable domain of TCR clone 114968 (TRAV12-3, TRAJ53)
CAMSPGSGGSNYKLTF

SEQ ID NO: 229936 - protein, 14 aa, Homo sapiens
  CDR3 for beta chain variable domain of TCR clone 114968 (TRBV7-9, TRBJ2-1)
CASSDNSGYNEQFF

SEQ ID NO: 229937 - protein, 13 aa, Homo sapiens
  CDR3 for alpha chain variable domain of TCR clone 114969 (TRAV13-1, TRAJ5)
CAAGVTGRRALTF

SEQ ID NO: 229938 - protein, 15 aa, Homo sapiens
  CDR3 for beta chain variable domain of TCR clone 114969 (TRBV7-9, TRBJ2-7)
CASSPGGGLTYEQYF

SEQ ID NO: 229939 - protein, 15 aa, Homo sapiens
  CDR3 for alpha chain variable domain of TCR clone 114970 (TRAV27, TRAJ33)
CAGADIMDSNYQLIW

SEQ ID NO: 229940 - protein, 13 aa, Homo sapiens
  CDR3 for beta chain variable domain of TCR clone 114970 (TRBV28, TRBJ1-2)
CASSLQGRGGYTS

SEQ ID NO: 229941 - protein, 14 aa, Homo sapiens
  CDR3 for alpha chain variable domain of TCR clone 114971 (TRAV13-1, TRAJ13)
FAASRVGGYQKVTF

SEQ ID NO: 229942 - protein, 17 aa, Homo sapiens
  CDR3 for beta chain variable domain of TCR clone 114971 (TRBV15, TRBJ1-5)
CATSRAPPGTRNQPQHF

SEQ ID NO: 229943 - protein, 22 aa, Homo sapiens
  CDR3 for alpha chain variable domain of TCR clone 114972 (TRAV12-1, )
CVVLRGIPDIQNPDPAVYQLRD

SEQ ID NO: 229944 - protein, 15 aa, Homo sapiens
  CDR3 for beta chain variable domain of TCR clone 114972 (TRBV6-5, TRBJ2-1)
CASSYDAGAGNEQFF

SEQ ID NO: 229945 - protein, 11 aa, Homo sapiens
  CDR3 for alpha chain variable domain of TCR clone 114973 (TRAV8-3, TRAJ18)
CAVGGRQRLNP

SEQ ID NO: 229946 - protein, 12 aa, Homo sapiens
  CDR3 for beta chain variable domain of TCR clone 114973 (TRBV28, TRBJ2-6)
CAIQAGAHVLTF

SEQ ID NO: 229947 - protein, 15 aa, Homo sapiens
  CDR3 for alpha chain variable domain of TCR clone 114974 (TRAV3, TRAJ4)
CAVRDGTGGYNKLIF

SEQ ID NO: 229948 - protein, 15 aa, Homo sapiens
  CDR3 for beta chain variable domain of TCR clone 114974 (TRBV7-2, TRBJ2-1)
CASSSGLAGGNEQFF

SEQ ID NO: 229949 - protein, 11 aa, Homo sapiens
  CDR3 for alpha chain variable domain of TCR clone 114975 (TRAV3, TRAJ21)
CAVGNFKQFYF

SEQ ID NO: 229950 - protein, 16 aa, Homo sapiens
  CDR3 for beta chain variable domain of TCR clone 114975 (TRBV19, TRBJ2-1)
CASSKAGPSSYNEQFF

SEQ ID NO: 229951 - protein, 15 aa, Homo sapiens
  CDR3 for alpha chain variable domain of TCR clone 114976 (TRAV3, TRAJ22)
CAVRDRGGSARQLNF

SEQ ID NO: 229952 - protein, 14 aa, Homo sapiens
  CDR3 for beta chain variable domain of TCR clone 114976 (TRBV20-1, TRBJ2-5)
CSALVPGYQETQYF

SEQ ID NO: 229953 - protein, 13 aa, Homo sapiens
  CDR3 for alpha chain variable domain of TCR clone 114977 (TRAV13-1, TRAJ21)
CAASIYNFNKFYF

SEQ ID NO: 229954 - protein, 11 aa, Homo sapiens
  CDR3 for beta chain variable domain of TCR clone 114977 (TRBV27, TRBJ2-7)
CASSLGYEQYF

SEQ ID NO: 229955 - protein, 13 aa, Homo sapiens
  CDR3 for alpha chain variable domain of TCR clone 114978 (TRAV12-2, TRAJ20)
CAVYPSNDYKLSF

SEQ ID NO: 229956 - protein, 15 aa, Homo sapiens
  CDR3 for beta chain variable domain of TCR clone 114978 (TRBV27, TRBJ2-5)
CACSLYPRGGETQYF

SEQ ID NO: 229957 - protein, 13 aa, Homo sapiens
  CDR3 for alpha chain variable domain of TCR clone 114979 (TRAV1-2, TRAJ9)
CAVLNTGGFKTIF

SEQ ID NO: 229958 - protein, 17 aa, Homo sapiens
  CDR3 for beta chain variable domain of TCR clone 114979 (TRBV15, TRBJ1-4)
CATSRYGTGDPNEKLFF

SEQ ID NO: 229959 - protein, 13 aa, Homo sapiens
  CDR3 for alpha chain variable domain of TCR clone 114980 (TRAV27, TRAJ6)
CAGGTRGSYIPTF

SEQ ID NO: 229960 - protein, 13 aa, Homo sapiens
  CDR3 for beta chain variable domain of TCR clone 114980 (TRBV12-5, TRBJ2-3)
CASGDRQSDAQYF

SEQ ID NO: 229961 - protein, 15 aa, Homo sapiens
  CDR3 for alpha chain variable domain of TCR clone 114981 (TRAV8-3, TRAJ45)
CASSYSGGGADGLTF

SEQ ID NO: 229962 - protein, 14 aa, Homo sapiens
  CDR3 for beta chain variable domain of TCR clone 114981 (TRBV19, TRBJ2-1)
CASPTFVLSGAQFF

SEQ ID NO: 229963 - protein, 14 aa, Homo sapiens
  CDR3 for alpha chain variable domain of TCR clone 114982 (TRAV12-3, TRAJ22)
CAMSLFGSARQLTF

SEQ ID NO: 229964 - protein, 11 aa, Homo sapiens
  CDR3 for beta chain variable domain of TCR clone 114982 (TRBV12-4, TRBJ2-2)
CTSSSAGELFF

SEQ ID NO: 229965 - protein, 13 aa, Homo sapiens
  CDR3 for alpha chain variable domain of TCR clone 114983 (TRAV12-2, TRAJ12)
CAVNWDSSYKLIF

SEQ ID NO: 229966 - protein, 16 aa, Homo sapiens
  CDR3 for beta chain variable domain of TCR clone 114983 (TRBV5-4, TRBJ2-3)
CASQQPGAGGADTQYF

SEQ ID NO: 229967 - protein, 17 aa, Homo sapiens
  CDR3 for alpha chain variable domain of TCR clone 114984 (TRAV12-3, TRAJ6)
CAMSARGGAGGSYIPTF

SEQ ID NO: 229968 - protein, 16 aa, Homo sapiens
  CDR3 for beta chain variable domain of TCR clone 114984 (TRBV12-5, TRBJ2-5)
CASGPRTSGNQETQYF

SEQ ID NO: 229969 - protein, 14 aa, Homo sapiens
  CDR3 for alpha chain variable domain of TCR clone 114985 (TRAV12-2, TRAJ45)
CAVYSGGGADGLTF

SEQ ID NO: 229970 - protein, 11 aa, Homo sapiens
  CDR3 for beta chain variable domain of TCR clone 114985 (TRBV6-3, TRBJ2-3)
CATGQADTQYF

SEQ ID NO: 229971 - protein, 19 aa, Homo sapiens
  CDR3 for alpha chain variable domain of TCR clone 114986 (TRAV26-1, TRAJ50)
CCVLLHRQNPKTSYDKVIF

SEQ ID NO: 229972 - protein, 12 aa, Homo sapiens
  CDR3 for beta chain variable domain of TCR clone 114986 (TRBV7-8, TRBJ2-7)
CASSLGDREQYF

SEQ ID NO: 229973 - protein, 15 aa, Homo sapiens
  CDR3 for alpha chain variable domain of TCR clone 114987 (TRAV35, TRAJ52)
CAGPRGGTSYGKLTF

SEQ ID NO: 229974 - protein, 14 aa, Homo sapiens
  CDR3 for beta chain variable domain of TCR clone 114987 (TRBV20-1, TRBJ2-7)
CSAWTALSSYEQYV

SEQ ID NO: 229975 - protein, 14 aa, Homo sapiens
  CDR3 for alpha chain variable domain of TCR clone 114988 (TRAV1-2, TRAJ8)
CAVREDTGFQKLVF

SEQ ID NO: 229976 - protein, 13 aa, Homo sapiens
  CDR3 for beta chain variable domain of TCR clone 114988 (TRBV3-1, TRBJ1-1)
CASSPGVITEAFF

SEQ ID NO: 229977 - protein, 14 aa, Homo sapiens
  CDR3 for alpha chain variable domain of TCR clone 114989 (TRAV1-2, TRAJ16)
CAVNRFSDGQKLLF

SEQ ID NO: 229978 - protein, 16 aa, Homo sapiens
  CDR3 for beta chain variable domain of TCR clone 114989 (TRBV12-4, TRBJ2-5)
CASSFFARGRQETQYF

SEQ ID NO: 229979 - protein, 14 aa, Homo sapiens
  CDR3 for alpha chain variable domain of TCR clone 114990 (TRAV1-2, TRAJ16)
CAVNRFLDGQKLLF

SEQ ID NO: 229980 - protein, 12 aa, Homo sapiens
  CDR3 for beta chain variable domain of TCR clone 114990 (TRBV11-2, TRBJ2-2)
CASSLGGGELFF

SEQ ID NO: 229981 - protein, 12 aa, Homo sapiens
  CDR3 for alpha chain variable domain of TCR clone 114991 (TRAV3, TRAJ43)
CAVRDPNNAMRF

SEQ ID NO: 229982 - protein, 15 aa, Homo sapiens
  CDR3 for beta chain variable domain of TCR clone 114991 (TRBV27, TRBJ1-5)
CASSLGTGFDQPQHF

SEQ ID NO: 229983 - protein, 14 aa, Homo sapiens
  CDR3 for alpha chain variable domain of TCR clone 114992 (TRAV3, TRAJ21)
CAVRDKYNFNKFYF

SEQ ID NO: 229984 - protein, 15 aa, Homo sapiens
  CDR3 for beta chain variable domain of TCR clone 114992 (TRBV11-2, TRBJ2-1)
CASSLGTSGLNEQFF

SEQ ID NO: 229985 - protein, 15 aa, Homo sapiens
  CDR3 for alpha chain variable domain of TCR clone 114993 (TRAV2, TRAJ9)
CAVEDGGTGGFKTIF

SEQ ID NO: 229986 - protein, 16 aa, Homo sapiens
  CDR3 for beta chain variable domain of TCR clone 114993 (TRBV24-1, TRBJ2-3)
CATSDPGTGATDTQYF

SEQ ID NO: 229987 - protein, 12 aa, Homo sapiens
  CDR3 for alpha chain variable domain of TCR clone 114994 (TRAV25, TRAJ29)
CAGPRGNTPLVF

SEQ ID NO: 229988 - protein, 13 aa, Homo sapiens
  CDR3 for beta chain variable domain of TCR clone 114994 (TRBV7-3, TRBJ1-1)
CASSQDWGAEAFF

SEQ ID NO: 229989 - protein, 17 aa, Homo sapiens
  CDR3 for alpha chain variable domain of TCR clone 114995 (TRAV12-2, TRAJ48)
CASNEKLTFGTGTRLTI

SEQ ID NO: 229990 - protein, 20 aa, Homo sapiens
  CDR3 for beta chain variable domain of TCR clone 114995 (TRBV5-1, TRBJ2-5)
GSWCSVSAGCWGAGEKTQYL

SEQ ID NO: 229991 - protein, 14 aa, Homo sapiens
  CDR3 for alpha chain variable domain of TCR clone 114996 (TRAV8-3, TRAJ39)
CAVGANNAGNMLTL

SEQ ID NO: 229992 - protein, 16 aa, Homo sapiens
  CDR3 for beta chain variable domain of TCR clone 114996 (TRBV6-1, TRBJ2-5)
CASSETLDRGAETQYF

SEQ ID NO: 229993 - protein, 17 aa, Homo sapiens
  CDR3 for alpha chain variable domain of TCR clone 114997 (TRAV12-1, TRAJ6)
CVVKGGIPSGGSYITTF

SEQ ID NO: 229994 - protein, 13 aa, Homo sapiens
  CDR3 for beta chain variable domain of TCR clone 114997 (TRBV5-1, TRBJ2-5)
CASSLIPAETQYF

SEQ ID NO: 229995 - protein, 13 aa, Homo sapiens
  CDR3 for alpha chain variable domain of TCR clone 114998 (TRAV26-2, TRAJ33)
CILTLDSNYQLIW

SEQ ID NO: 229996 - protein, 15 aa, Homo sapiens
  CDR3 for beta chain variable domain of TCR clone 114998 (TRBV7-8, TRBJ1-5)
CASSRGGGADQPQHF

SEQ ID NO: 229997 - protein, 14 aa, Homo sapiens
  CDR3 for alpha chain variable domain of TCR clone 114999 (TRAV13-2, TRAJ39)
CAENYKGAGNMLTF

SEQ ID NO: 229998 - protein, 15 aa, Homo sapiens
  CDR3 for beta chain variable domain of TCR clone 114999 (TRBV7-2, TRBJ1-2)
CASSLAPDRGLGYTF

SEQ ID NO: 229999 - protein, 13 aa, Homo sapiens
  CDR3 for alpha chain variable domain of TCR clone 115000 (TRAV12-3, TRAJ40)
CAMSDSGTYKYIF

SEQ ID NO: 230000 - protein, 14 aa, Homo sapiens
  CDR3 for beta chain variable domain of TCR clone 115000 (TRBV7-2, TRBJ1-5)
CASSTQGAGEPQHF

SEQ ID NO: 230001 - protein, 18 aa, Homo sapiens
  CDR3 for alpha chain variable domain of TCR clone 115001 (TRAV13-1, TRAJ52)
CAASKRSAGGTSYGKLTF

SEQ ID NO: 230002 - protein, 14 aa, Homo sapiens
  CDR3 for beta chain variable domain of TCR clone 115001 (TRBV19, TRBJ2-7)
CASNFRDTFTGMYF

SEQ ID NO: 230003 - protein, 12 aa, Homo sapiens
  CDR3 for alpha chain variable domain of TCR clone 115002 (TRAV8-3, TRAJ43)
CAVGAGNNDMRF

SEQ ID NO: 230004 - protein, 13 aa, Homo sapiens
  CDR3 for beta chain variable domain of TCR clone 115002 (TRBV4-2, TRBJ1-5)
CQQPGQGQSAQHF

SEQ ID NO: 230005 - protein, 14 aa, Homo sapiens
  CDR3 for alpha chain variable domain of TCR clone 115003 (TRAV29/DV5, TRAJ32)
CAAAYGGAPNKLIF

SEQ ID NO: 230006 - protein, 15 aa, Homo sapiens
  CDR3 for beta chain variable domain of TCR clone 115003 (TRBV27, TRBJ2-7)
CASSTAGTGSYEQYF

SEQ ID NO: 230007 - protein, 12 aa, Homo sapiens
  CDR3 for alpha chain variable domain of TCR clone 115004 (TRAV3, TRAJ20)
CAVRDPDYKLSF

SEQ ID NO: 230008 - protein, 13 aa, Homo sapiens
  CDR3 for beta chain variable domain of TCR clone 115004 (TRBV6-1, TRBJ1-1)
CASSRQGNTEAFF

SEQ ID NO: 230009 - protein, 12 aa, Homo sapiens
  CDR3 for alpha chain variable domain of TCR clone 115005 (TRAV35, TRAJ39)
LAPNNAGNMLTF

SEQ ID NO: 230010 - protein, 16 aa, Homo sapiens
  CDR3 for beta chain variable domain of TCR clone 115005 (TRBV2, TRBJ2-3)
CASGTSVEGVTDTQYF

SEQ ID NO: 230011 - protein, 20 aa, Homo sapiens
  CDR3 for alpha chain variable domain of TCR clone 115006 (TRAV26-1, TRAJ42)
CCVLLHRQTYYGGSQGNLIF

SEQ ID NO: 230012 - protein, 15 aa, Homo sapiens
  CDR3 for beta chain variable domain of TCR clone 115006 (TRBV7-3, TRBJ2-2)
CQQLKAGTSSGELFF

SEQ ID NO: 230013 - protein, 15 aa, Homo sapiens
  CDR3 for alpha chain variable domain of TCR clone 115007 (TRAV12-1, TRAJ44)
CVADLPTGPASKLTF

SEQ ID NO: 230014 - protein, 13 aa, Homo sapiens
  CDR3 for beta chain variable domain of TCR clone 115007 (TRBV20-1, TRBJ2-5)
CSARGDYQETQYF

SEQ ID NO: 230015 - protein, 13 aa, Homo sapiens
  CDR3 for alpha chain variable domain of TCR clone 115008 (TRAV1-1, TRAJ9)
CAAKNTGGFKTIF

SEQ ID NO: 230016 - protein, 15 aa, Homo sapiens
  CDR3 for beta chain variable domain of TCR clone 115008 (TRBV24-1, TRBJ1-3)
CATSDHGESGNTIYF

SEQ ID NO: 230017 - protein, 14 aa, Homo sapiens
  CDR3 for alpha chain variable domain of TCR clone 115009 (TRAV21, TRAJ35)
CAVMPIGFGNVLHC

SEQ ID NO: 230018 - protein, 14 aa, Homo sapiens
  CDR3 for beta chain variable domain of TCR clone 115009 (TRBV4-1, TRBJ2-2)
CASSQAVNTGELFF

SEQ ID NO: 230019 - protein, 14 aa, Homo sapiens
  CDR3 for alpha chain variable domain of TCR clone 115010 (TRAV8-2, TRAJ37)
CVLSISGNTGKLIF

SEQ ID NO: 230020 - protein, 13 aa, Homo sapiens
  CDR3 for beta chain variable domain of TCR clone 115010 (TRBV27, TRBJ1-1)
CASSLSIGAEAFF

SEQ ID NO: 230021 - protein, 18 aa, Homo sapiens
  CDR3 for alpha chain variable domain of TCR clone 115011 (TRAV21, TRAJ52)
CAVRPSPAGGTSYGKLTF

SEQ ID NO: 230022 - protein, 13 aa, Homo sapiens
  CDR3 for beta chain variable domain of TCR clone 115011 (TRBV29-1, TRBJ2-2)
CSVYREDTGKLFF

SEQ ID NO: 230023 - protein, 17 aa, Homo sapiens
  CDR3 for alpha chain variable domain of TCR clone 115012 (TRAV26-1, TRAJ58)
CIVRVGAEETSGSRLTF

SEQ ID NO: 230024 - protein, 15 aa, Homo sapiens
  CDR3 for beta chain variable domain of TCR clone 115012 (TRBV27, TRBJ2-1)
CASSNGGGSSNEQFF

SEQ ID NO: 230025 - protein, 11 aa, Homo sapiens
  CDR3 for alpha chain variable domain of TCR clone 115013 (TRAV1-2, TRAJ40)
CAVPGTYKYIF

SEQ ID NO: 230026 - protein, 16 aa, Homo sapiens
  CDR3 for beta chain variable domain of TCR clone 115013 (TRBV29-1, TRBJ2-7)
CSVEVVGTSGSYEQYY

SEQ ID NO: 230027 - protein, 12 aa, Homo sapiens
  CDR3 for alpha chain variable domain of TCR clone 115014 (TRAV1-2, TRAJ29)
CAVRNLNTPLVF

SEQ ID NO: 230028 - protein, 14 aa, Homo sapiens
  CDR3 for beta chain variable domain of TCR clone 115014 (TRBV4-1, TRBJ2-2)
CASSQAVNTGELFF

SEQ ID NO: 230029 - protein, 15 aa, Homo sapiens
  CDR3 for alpha chain variable domain of TCR clone 115015 (TRAV16, TRAJ20)
CALQGGLRADYKLSF

SEQ ID NO: 230030 - protein, 16 aa, Homo sapiens
  CDR3 for beta chain variable domain of TCR clone 115015 (TRBV11-3, TRBJ2-2)
CASSSRTSPGTGELFF

SEQ ID NO: 230031 - protein, 15 aa, Homo sapiens
  CDR3 for alpha chain variable domain of TCR clone 115016 (TRAV21, TRAJ53)
CATLNSGGSNYKLTF

SEQ ID NO: 230032 - protein, 17 aa, Homo sapiens
  CDR3 for beta chain variable domain of TCR clone 115016 (TRBV12-4, TRBJ2-1)
CASSPGLAGGRINEQFF

SEQ ID NO: 230033 - protein, 12 aa, Homo sapiens
  CDR3 for alpha chain variable domain of TCR clone 115017 (TRAV3, TRAJ31)
CAVRPRGPRLMF

SEQ ID NO: 230034 - protein, 17 aa, Homo sapiens
  CDR3 for beta chain variable domain of TCR clone 115017 (TRBV7-9, TRBJ1-5)
CASSASQGGYSNQPQHC

SEQ ID NO: 230035 - protein, 13 aa, Homo sapiens
  CDR3 for alpha chain variable domain of TCR clone 115018 (TRAV12-3, TRAJ33)
CAMSMNSNYQLIW

SEQ ID NO: 230036 - protein, 16 aa, Homo sapiens
  CDR3 for beta chain variable domain of TCR clone 115018 (TRBV7-3, TRBJ2-3)
CASSLSGYRPEDTQYF

SEQ ID NO: 230037 - protein, 14 aa, Homo sapiens
  CDR3 for alpha chain variable domain of TCR clone 115019 (TRAV1-2, TRAJ16)
CAVNRFSDGQKLLF

SEQ ID NO: 230038 - protein, 14 aa, Homo sapiens
  CDR3 for beta chain variable domain of TCR clone 115019 (TRBV19, TRBJ2-7)
CASSVDSEPYEQYF

SEQ ID NO: 230039 - protein, 12 aa, Homo sapiens
  CDR3 for alpha chain variable domain of TCR clone 115020 (TRAV3, TRAJ21)
CALGRGSTNFTF

SEQ ID NO: 230040 - protein, 14 aa, Homo sapiens
  CDR3 for beta chain variable domain of TCR clone 115020 (TRBV7-9, TRBJ2-4)
CASSLAMGGNIQYF

SEQ ID NO: 230041 - protein, 12 aa, Homo sapiens
  CDR3 for alpha chain variable domain of TCR clone 115021 (TRAV27, TRAJ36)
ASTPAGAHNLFF

SEQ ID NO: 230042 - protein, 13 aa, Homo sapiens
  CDR3 for beta chain variable domain of TCR clone 115021 (TRBV7-9, TRBJ2-3)
CASSPGSTDTQYF

SEQ ID NO: 230043 - protein, 14 aa, Homo sapiens
  CDR3 for alpha chain variable domain of TCR clone 115022 (TRAV16, TRAJ33)
CALSAMDSNYRLIW

SEQ ID NO: 230044 - protein, 16 aa, Homo sapiens
  CDR3 for beta chain variable domain of TCR clone 115022 (TRBV12-4, TRBJ2-3)
CASSFPSNTNTDTQYF

SEQ ID NO: 230045 - protein, 13 aa, Homo sapiens
  CDR3 for alpha chain variable domain of TCR clone 115023 (TRAV1-2, TRAJ9)
CAALNTGGFKTIF

SEQ ID NO: 230046 - protein, 12 aa, Homo sapiens
  CDR3 for beta chain variable domain of TCR clone 115023 (TRBV19, TRBJ2-1)
CASSMQDTEQFF

SEQ ID NO: 230047 - protein, 14 aa, Homo sapiens
  CDR3 for alpha chain variable domain of TCR clone 115024 (TRAV12-1, TRAJ30)
CVVNIGGRDDKIIF

SEQ ID NO: 230048 - protein, 15 aa, Homo sapiens
  CDR3 for beta chain variable domain of TCR clone 115024 (TRBV18, TRBJ1-2)
CASSPSNTPNYGYAF

SEQ ID NO: 230049 - protein, 19 aa, Homo sapiens
  CDR3 for alpha chain variable domain of TCR clone 115025 (TRAV26-1, TRAJ50)
CCVLLHRQNPKTSYDKVIF

SEQ ID NO: 230050 - protein, 14 aa, Homo sapiens
  CDR3 for beta chain variable domain of TCR clone 115025 (TRBV7-7, TRBJ2-2)
CAARQDSDTGELFF

SEQ ID NO: 230051 - protein, 14 aa, Homo sapiens
  CDR3 for alpha chain variable domain of TCR clone 115026 (TRAV12-2, TRAJ33)
CAVKRARSNYQLIW

SEQ ID NO: 230052 - protein, 14 aa, Homo sapiens
  CDR3 for beta chain variable domain of TCR clone 115026 (TRBV2, TRBJ2-7)
CASSLTSGGYEQYF

SEQ ID NO: 230053 - protein, 14 aa, Homo sapiens
  CDR3 for alpha chain variable domain of TCR clone 115027 (TRAV26-1, TRAJ38)
CIADNAGNNRKLIG

SEQ ID NO: 230054 - protein, 13 aa, Homo sapiens
  CDR3 for beta chain variable domain of TCR clone 115027 (TRBV7-9, TRBJ2-3)
CASSPGSTDTQYF

SEQ ID NO: 230055 - protein, 14 aa, Homo sapiens
  CDR3 for alpha chain variable domain of TCR clone 115028 (TRAV1-2, TRAJ16)
CAVNRFSDGQKLLF

SEQ ID NO: 230056 - protein, 16 aa, Homo sapiens
  CDR3 for beta chain variable domain of TCR clone 115028 (TRBV20-1, TRBJ1-4)
CSAPGQGLLTNEKLSF

SEQ ID NO: 230057 - protein, 18 aa, Homo sapiens
  CDR3 for alpha chain variable domain of TCR clone 115029 (TRAV26-1, TRAJ22)
CIVRVALLSSGSARQLTF

SEQ ID NO: 230058 - protein, 13 aa, Homo sapiens
  CDR3 for beta chain variable domain of TCR clone 115029 (TRBV13, TRBJ2-5)
CASSPEVGETQYF

SEQ ID NO: 230059 - protein, 11 aa, Homo sapiens
  CDR3 for alpha chain variable domain of TCR clone 115030 (TRAV3, TRAJ21)
CAVGNFNKFYF

SEQ ID NO: 230060 - protein, 15 aa, Homo sapiens
  CDR3 for beta chain variable domain of TCR clone 115030 (TRBV29-1, TRBJ2-1)
CSVEGGPASYNEKFF

SEQ ID NO: 230061 - protein, 14 aa, Homo sapiens
  CDR3 for alpha chain variable domain of TCR clone 115031 (TRAV26-1, TRAJ52)
CIPAGGTSYGKLAF

SEQ ID NO: 230062 - protein, 16 aa, Homo sapiens
  CDR3 for beta chain variable domain of TCR clone 115031 (TRBV19, TRBJ2-2)
CASTIGARAGAGELFF

SEQ ID NO: 230063 - protein, 17 aa, Homo sapiens
  CDR3 for alpha chain variable domain of TCR clone 115032 (TRAV3, TRAJ38)
CAVRDCINAGNNRKLIW

SEQ ID NO: 230064 - protein, 14 aa, Homo sapiens
  CDR3 for beta chain variable domain of TCR clone 115032 (TRBV5-5, TRBJ1-5)
CASSGQGVDQPQHF

SEQ ID NO: 230065 - protein, 12 aa, Homo sapiens
  CDR3 for alpha chain variable domain of TCR clone 115033 (TRAV12-1, TRAJ40)
CVVPSGTYKYTF

SEQ ID NO: 230066 - protein, 15 aa, Homo sapiens
  CDR3 for beta chain variable domain of TCR clone 115033 (TRBV12-4, TRBJ2-1)
CASSPLSGRNSEQFF

SEQ ID NO: 230067 - protein, 15 aa, Homo sapiens
  CDR3 for alpha chain variable domain of TCR clone 115034 (TRAV25, TRAJ53)
CPPSNSGGSNYKLTF

SEQ ID NO: 230068 - protein, 14 aa, Homo sapiens
  CDR3 for beta chain variable domain of TCR clone 115034 (TRBV11-2, TRBJ2-3)
CASSRLARTDTQYF

SEQ ID NO: 230069 - protein, 14 aa, Homo sapiens
  CDR3 for alpha chain variable domain of TCR clone 115035 (TRAV1-2, TRAJ16)
CAVNRFSDGQKLLF

SEQ ID NO: 230070 - protein, 14 aa, Homo sapiens
  CDR3 for beta chain variable domain of TCR clone 115035 (TRBV5-1, TRBJ1-2)
CASSLEPVNYGYTF

SEQ ID NO: 230071 - protein, 14 aa, Homo sapiens
  CDR3 for alpha chain variable domain of TCR clone 115036 (TRAV12-2, TRAJ17)
CAVLFKAAGNKLTF

SEQ ID NO: 230072 - protein, 14 aa, Homo sapiens
  CDR3 for beta chain variable domain of TCR clone 115036 (TRBV13, TRBJ2-7)
CASSLKGASYEQYF

SEQ ID NO: 230073 - protein, 12 aa, Homo sapiens
  CDR3 for alpha chain variable domain of TCR clone 115037 (TRAV27, TRAJ35)
CAGADFGNVLHC

SEQ ID NO: 230074 - protein, 17 aa, Homo sapiens
  CDR3 for beta chain variable domain of TCR clone 115037 (TRBV11-2, TRBJ2-1)
CASSLYPPGVEYNEQFF

SEQ ID NO: 230075 - protein, 15 aa, Homo sapiens
  CDR3 for alpha chain variable domain of TCR clone 115038 (TRAV8-3, TRAJ23)
CAVGDRYNQGGKLIF

SEQ ID NO: 230076 - protein, 19 aa, Homo sapiens
  CDR3 for beta chain variable domain of TCR clone 115038 (TRBV29-1, TRBJ2-5)
NMSPEDSSIYLCSAGTQYF

SEQ ID NO: 230077 - protein, 15 aa, Homo sapiens
  CDR3 for alpha chain variable domain of TCR clone 115039 (TRAV4, TRAJ39)
CLVGPNNNAGNMLTF

SEQ ID NO: 230078 - protein, 14 aa, Homo sapiens
  CDR3 for beta chain variable domain of TCR clone 115039 (TRBV7-2, TRBJ2-2)
CASRGQGAAGELFF

SEQ ID NO: 230079 - protein, 13 aa, Homo sapiens
  CDR3 for alpha chain variable domain of TCR clone 115040 (TRAV12-3, TRAJ13)
CAMTSGGYQKVTF

SEQ ID NO: 230080 - protein, 10 aa, Homo sapiens
  CDR3 for beta chain variable domain of TCR clone 115040 (TRBV20-1, TRBJ2-2)
LAGGAGELFF

SEQ ID NO: 230081 - protein, 16 aa, Homo sapiens
  CDR3 for alpha chain variable domain of TCR clone 115041 (TRAV20, TRAJ53)
RAVQGNSGGSNYKLTF

SEQ ID NO: 230082 - protein, 14 aa, Homo sapiens
  CDR3 for beta chain variable domain of TCR clone 115041 (TRBV6-5, TRBJ2-7)
CASSPHRGLREQYF

SEQ ID NO: 230083 - protein, 14 aa, Homo sapiens
  CDR3 for alpha chain variable domain of TCR clone 115042 (TRAV8-3, TRAJ4)
CAVGAAGGYNKLIF

SEQ ID NO: 230084 - protein, 13 aa, Homo sapiens
  CDR3 for beta chain variable domain of TCR clone 115042 (TRBV3-1, TRBJ1-1)
CAGSPGVITEAFF

SEQ ID NO: 230085 - protein, 20 aa, Homo sapiens
  CDR3 for alpha chain variable domain of TCR clone 115043 (TRAV12-1, TRAJ42)
SSVIQPPTSVKGGSQGNLIF

SEQ ID NO: 230086 - protein, 17 aa, Homo sapiens
  CDR3 for beta chain variable domain of TCR clone 115043 (TRBV5-4, TRBJ2-1)
CASSSAGGRGPYNEQFF

SEQ ID NO: 230087 - protein, 15 aa, Homo sapiens
  CDR3 for alpha chain variable domain of TCR clone 115044 (TRAV4, TRAJ39)
CLVGPNNNAGNMITF

SEQ ID NO: 230088 - protein, 13 aa, Homo sapiens
  CDR3 for beta chain variable domain of TCR clone 115044 (TRBV11-2, TRBJ2-5)
CASSSTGEETQYF

SEQ ID NO: 230089 - protein, 15 aa, Homo sapiens
  CDR3 for alpha chain variable domain of TCR clone 115045 (TRAV2, TRAJ28)
CAVPHSGAGSYQLTS

SEQ ID NO: 230090 - protein, 17 aa, Homo sapiens
  CDR3 for beta chain variable domain of TCR clone 115045 (TRBV20-1, TRBJ2-4)
CSARDWASGGRENIQYF

SEQ ID NO: 230091 - protein, 14 aa, Homo sapiens
  CDR3 for alpha chain variable domain of TCR clone 115046 (TRAV12-1, TRAJ17)
CVVNYKAAGNKLTF

SEQ ID NO: 230092 - protein, 15 aa, Homo sapiens
  CDR3 for beta chain variable domain of TCR clone 115046 (TRBV4-1, TRBJ2-5)
CASSQWDLYQETQYF

SEQ ID NO: 230093 - protein, 15 aa, Homo sapiens
  CDR3 for alpha chain variable domain of TCR clone 115047 (TRAV16, TRAJ20)
CALKGGLSADYKLSF

SEQ ID NO: 230094 - protein, 16 aa, Homo sapiens
  CDR3 for beta chain variable domain of TCR clone 115047 (TRBV11-3, TRBJ2-2)
CASSSRTSPGTGELFF

SEQ ID NO: 230095 - protein, 16 aa, Homo sapiens
  CDR3 for alpha chain variable domain of TCR clone 115048 (TRAV23/DV6, TRAJ9)
CAASIGGSTGGFKTIF

SEQ ID NO: 230096 - protein, 13 aa, Homo sapiens
  CDR3 for beta chain variable domain of TCR clone 115048 (TRBV12-4, TRBJ1-1)
CASSPGTGFEAFF

SEQ ID NO: 230097 - protein, 16 aa, Homo sapiens
  CDR3 for alpha chain variable domain of TCR clone 115049 (TRAV29/DV5, TRAJ36)
CAASAGVETGANNLLF

SEQ ID NO: 230098 - protein, 16 aa, Homo sapiens
  CDR3 for beta chain variable domain of TCR clone 115049 (TRBV5-1, TRBJ2-3)
CASSLGLAVYTDTQYF

SEQ ID NO: 230099 - protein, 14 aa, Homo sapiens
  CDR3 for alpha chain variable domain of TCR clone 115050 (TRAV12-2, TRAJ4)
CAVLIGGGYNKLIF

SEQ ID NO: 230100 - protein, 19 aa, Homo sapiens
  CDR3 for beta chain variable domain of TCR clone 115050 (TRBV25-1, TRBJ2-2)
CAILVYRVDRGRKTGELFF

SEQ ID NO: 230101 - protein, 11 aa, Homo sapiens
  CDR3 for alpha chain variable domain of TCR clone 115051 (TRAV12-1, TRAJ37)
CVVNTPGKLIF

SEQ ID NO: 230102 - protein, 13 aa, Homo sapiens
  CDR3 for beta chain variable domain of TCR clone 115051 (TRBV12-4, TRBJ1-5)
CASSPDRAQHQHF

SEQ ID NO: 230103 - protein, 20 aa, Homo sapiens
  CDR3 for alpha chain variable domain of TCR clone 115052 (TRAV1-1, TRAJ4)
CLLLLRCEGFLPGGYNKLIF

SEQ ID NO: 230104 - protein, 16 aa, Homo sapiens
  CDR3 for beta chain variable domain of TCR clone 115052 (TRBV28, TRBJ1-4)
CASSPPYRGRSEKLFF

SEQ ID NO: 230105 - protein, 14 aa, Homo sapiens
  CDR3 for alpha chain variable domain of TCR clone 115053 (TRAV1-2, TRAJ27)
CAPAEYTNAGKSTF

SEQ ID NO: 230106 - protein, 18 aa, Homo sapiens
  CDR3 for beta chain variable domain of TCR clone 115053 (TRBV28, TRBJ1-2)
CASRQQQGKRDSNYGYTF

SEQ ID NO: 230107 - protein, 13 aa, Homo sapiens
  CDR3 for alpha chain variable domain of TCR clone 115054 (TRAV20, TRAJ3)
CARRYSSASKIIF

SEQ ID NO: 230108 - protein, 12 aa, Homo sapiens
  CDR3 for beta chain variable domain of TCR clone 115054 (TRBV28, TRBJ2-1)
CASSFRGNEQFS

SEQ ID NO: 230109 - protein, 13 aa, Homo sapiens
  CDR3 for alpha chain variable domain of TCR clone 115055 (TRAV20, TRAJ48)
CAVQGVGNEKLTF

SEQ ID NO: 230110 - protein, 14 aa, Homo sapiens
  CDR3 for beta chain variable domain of TCR clone 115055 (TRBV27, TRBJ2-7)
CASSFRDGPYEQHF

SEQ ID NO: 230111 - protein, 16 aa, Homo sapiens
  CDR3 for alpha chain variable domain of TCR clone 115056 (TRAV30, TRAJ24)
CGTEIVDADSWGKFQF

SEQ ID NO: 230112 - protein, 17 aa, Homo sapiens
  CDR3 for beta chain variable domain of TCR clone 115056 (TRBV6-1, TRBJ1-2)
CASSGTHSQRGNYGYTF

SEQ ID NO: 230113 - protein, 17 aa, Homo sapiens
  CDR3 for alpha chain variable domain of TCR clone 115057 (TRAV3, TRAJ42)
CAVRDWDYGGSQGNLIF

SEQ ID NO: 230114 - protein, 15 aa, Homo sapiens
  CDR3 for beta chain variable domain of TCR clone 115057 (TRBV9, TRBJ1-6)
CASSVAGTGDSPLHF

SEQ ID NO: 230115 - protein, 13 aa, Homo sapiens
  CDR3 for alpha chain variable domain of TCR clone 115058 (TRAV17, TRAJ9)
CAADYTGGFKTIF

SEQ ID NO: 230116 - protein, 16 aa, Homo sapiens
  CDR3 for beta chain variable domain of TCR clone 115058 (TRBV7-7, TRBJ2-1)
CASSLAGGTSYNEQFF

SEQ ID NO: 230117 - protein, 15 aa, Homo sapiens
  CDR3 for alpha chain variable domain of TCR clone 115059 (TRAV4, TRAJ39)
CLVGPNNNAGNMLTF

SEQ ID NO: 230118 - protein, 14 aa, Homo sapiens
  CDR3 for beta chain variable domain of TCR clone 115059 (TRBV11-2, TRBJ2-3)
CASSRLARTDTQYF

SEQ ID NO: 230119 - protein, 14 aa, Homo sapiens
  CDR3 for alpha chain variable domain of TCR clone 115060 (TRAV12-1, TRAJ17)
CVVNYKAAGNKLTF

SEQ ID NO: 230120 - protein, 16 aa, Homo sapiens
  CDR3 for beta chain variable domain of TCR clone 115060 (TRBV12-4, TRBJ1-5)
CASSRPVGGSNQPQHY

SEQ ID NO: 230121 - protein, 15 aa, Homo sapiens
  CDR3 for alpha chain variable domain of TCR clone 115061 (TRAV17, TRAJ42)
CATDHYGGSQGNLIF

SEQ ID NO: 230122 - protein, 14 aa, Homo sapiens
  CDR3 for beta chain variable domain of TCR clone 115061 (TRBV7-9, TRBJ2-5)
CASSLVGGEETQYF

SEQ ID NO: 230123 - protein, 12 aa, Homo sapiens
  CDR3 for alpha chain variable domain of TCR clone 115062 (TRAV12-3, TRAJ17)
CAMTLTGNKLTF

SEQ ID NO: 230124 - protein, 12 aa, Homo sapiens
  CDR3 for beta chain variable domain of TCR clone 115062 (TRBV20-1, TRBJ2-7)
CSAGLKMGEQYF

SEQ ID NO: 230125 - protein, 14 aa, Homo sapiens
  CDR3 for alpha chain variable domain of TCR clone 115063 (TRAV38-2/DV8, TRAJ54)
AAMYQIQGAQKMVF

SEQ ID NO: 230126 - protein, 17 aa, Homo sapiens
  CDR3 for beta chain variable domain of TCR clone 115063 (TRBV6-1, TRBJ2-3)
CASSEALRLISTDTQYF

SEQ ID NO: 230127 - protein, 10 aa, Homo sapiens
  CDR3 for alpha chain variable domain of TCR clone 115064 (TRAV21, TRAJ31)
CAVDNARLMF

SEQ ID NO: 230128 - protein, 15 aa, Homo sapiens
  CDR3 for beta chain variable domain of TCR clone 115064 (TRBV6-5, TRBJ2-1)
CASSYDAGAGNEQFF

SEQ ID NO: 230129 - protein, 11 aa, Homo sapiens
  CDR3 for alpha chain variable domain of TCR clone 115065 (TRAV21, TRAJ34)
CAHYNTDKLIF

SEQ ID NO: 230130 - protein, 17 aa, Homo sapiens
  CDR3 for beta chain variable domain of TCR clone 115065 (TRBV11-3, TRBJ2-6)
CASKWGQGLSGANALTF

SEQ ID NO: 230131 - protein, 14 aa, Homo sapiens
  CDR3 for alpha chain variable domain of TCR clone 115066 (TRAV21, TRAJ38)
CAVANAGNNRKLIW

SEQ ID NO: 230132 - protein, 16 aa, Homo sapiens
  CDR3 for beta chain variable domain of TCR clone 115066 (TRBV5-4, TRBJ2-1)
CASSLALAGAYNEQFF

SEQ ID NO: 230133 - protein, 12 aa, Homo sapiens
  CDR3 for alpha chain variable domain of TCR clone 115067 (TRAV8-3, TRAJ26)
CAGDNYGQNFVF

SEQ ID NO: 230134 - protein, 15 aa, Homo sapiens
  CDR3 for beta chain variable domain of TCR clone 115067 (TRBV9, TRBJ2-1)
CASSLAGSSYNEQYF

SEQ ID NO: 230135 - protein, 15 aa, Homo sapiens
  CDR3 for alpha chain variable domain of TCR clone 115068 (TRAV2, TRAJ9)
CAVEDRGTGCFKTIF

SEQ ID NO: 230136 - protein, 14 aa, Homo sapiens
  CDR3 for beta chain variable domain of TCR clone 115068 (TRBV4-1, TRBJ2-2)
CASSQAVNTGELFF

SEQ ID NO: 230137 - protein, 14 aa, Homo sapiens
  CDR3 for alpha chain variable domain of TCR clone 115069 (TRAV12-2, TRAJ33)
CAVKRARSNYQLIW

SEQ ID NO: 230138 - protein, 13 aa, Homo sapiens
  CDR3 for beta chain variable domain of TCR clone 115069 (TRBV7-3, TRBJ1-1)
CASSQDWGAEAFF

SEQ ID NO: 230139 - protein, 14 aa, Homo sapiens
  CDR3 for alpha chain variable domain of TCR clone 115070 (TRAV12-2, TRAJ13)
GAVKKTGGYQKVTF

SEQ ID NO: 230140 - protein, 12 aa, Homo sapiens
  CDR3 for beta chain variable domain of TCR clone 115070 (TRBV12-4, TRBJ1-2)
CASSFIWLHLRF

SEQ ID NO: 230141 - protein, 11 aa, Homo sapiens
  CDR3 for alpha chain variable domain of TCR clone 115071 (TRAV12-1, TRAJ8)
CVVTGFQELVF

SEQ ID NO: 230142 - protein, 11 aa, Homo sapiens
  CDR3 for beta chain variable domain of TCR clone 115071 (TRBV18, TRBJ2-5)
CASSPRETQYF

SEQ ID NO: 230143 - protein, 14 aa, Homo sapiens
  CDR3 for alpha chain variable domain of TCR clone 115072 (TRAV1-2, TRAJ16)
CAVNRFSDGKKLLF

SEQ ID NO: 230144 - protein, 17 aa, Homo sapiens
  CDR3 for beta chain variable domain of TCR clone 115072 (TRBV13, TRBJ2-3)
CASSLSRVAGGRNTQYF

SEQ ID NO: 230145 - protein, 16 aa, Homo sapiens
  CDR3 for alpha chain variable domain of TCR clone 115073 (TRAV30, TRAJ24)
CGTEIVDADSWGKFQF

SEQ ID NO: 230146 - protein, 15 aa, Homo sapiens
  CDR3 for beta chain variable domain of TCR clone 115073 (TRBV20-1, TRBJ2-7)
CSARDRVSGMDEQYI

SEQ ID NO: 230147 - protein, 14 aa, Homo sapiens
  CDR3 for alpha chain variable domain of TCR clone 115074 (TRAV1-2, TRAJ16)
CAVNRFSDGQKLLF

SEQ ID NO: 230148 - protein, 17 aa, Homo sapiens
  CDR3 for beta chain variable domain of TCR clone 115074 (TRBV4-1, TRBJ2-7)
CASSRDPLGVRGGEQHF

SEQ ID NO: 230149 - protein, 15 aa, Homo sapiens
  CDR3 for alpha chain variable domain of TCR clone 115075 (TRAV21, TRAJ53)
CATLNSGGSNYKLTF

SEQ ID NO: 230150 - protein, 16 aa, Homo sapiens
  CDR3 for beta chain variable domain of TCR clone 115075 (TRBV9, TRBJ2-1)
CARSVGGGGNYNEQFF

SEQ ID NO: 230151 - protein, 14 aa, Homo sapiens
  CDR3 for alpha chain variable domain of TCR clone 115076 (TRAV27, TRAJ36)
CAGPPKRGANNLFF

SEQ ID NO: 230152 - protein, 14 aa, Homo sapiens
  CDR3 for beta chain variable domain of TCR clone 115076 (TRBV25-1, TRBJ1-1)
CASTHLGGNTEAFF

SEQ ID NO: 230153 - protein, 15 aa, Homo sapiens
  CDR3 for alpha chain variable domain of TCR clone 115077 (TRAV8-3, TRAJ27)
CAVGPSKTNAGKSTF

SEQ ID NO: 230154 - protein, 16 aa, Homo sapiens
  CDR3 for beta chain variable domain of TCR clone 115077 (TRBV12-5, TRBJ2-5)
CASGPRTSGNQETQYF

SEQ ID NO: 230155 - protein, 15 aa, Homo sapiens
  CDR3 for alpha chain variable domain of TCR clone 115078 (TRAV38-2/DV8, TRAJ57)
CAYRGLQGGSEKLVF

SEQ ID NO: 230156 - protein, 15 aa, Homo sapiens
  CDR3 for beta chain variable domain of TCR clone 115078 (TRBV7-3, TRBJ2-3)
CASSLTSGVGDTQYF

SEQ ID NO: 230157 - protein, 14 aa, Homo sapiens
  CDR3 for alpha chain variable domain of TCR clone 115079 (TRAV16, TRAJ26)
CALSSANYGQNFVF

SEQ ID NO: 230158 - protein, 13 aa, Homo sapiens
  CDR3 for beta chain variable domain of TCR clone 115079 (TRBV7-9, TRBJ1-2)
CASSLKQNYGYTF

SEQ ID NO: 230159 - protein, 14 aa, Homo sapiens
  CDR3 for alpha chain variable domain of TCR clone 115080 (TRAV8-1, TRAJ13)
CAVKSSGGYQKVTF

SEQ ID NO: 230160 - protein, 16 aa, Homo sapiens
  CDR3 for beta chain variable domain of TCR clone 115080 (TRBV5-4, TRBJ2-3)
CASQQPGAGGADTQYF

SEQ ID NO: 230161 - protein, 11 aa, Homo sapiens
  CDR3 for alpha chain variable domain of TCR clone 115081 (TRAV13-1, TRAJ49)
CACVGGNQFYF

SEQ ID NO: 230162 - protein, 16 aa, Homo sapiens
  CDR3 for beta chain variable domain of TCR clone 115081 (TRBV11-2, TRBJ2-2)
CASSLRTGNIIGELFF

SEQ ID NO: 230163 - protein, 12 aa, Homo sapiens
  CDR3 for alpha chain variable domain of TCR clone 115082 (TRAV22, TRAJ29)
CAPPSGNKPLVF

SEQ ID NO: 230164 - protein, 14 aa, Homo sapiens
  CDR3 for beta chain variable domain of TCR clone 115082 (TRBV11-2, TRBJ2-7)
CASSLGAGAYEQYF

SEQ ID NO: 230165 - protein, 14 aa, Homo sapiens
  CDR3 for alpha chain variable domain of TCR clone 115083 (TRAV1-2, TRAJ16)
CAVNRFSDGQKLLF

SEQ ID NO: 230166 - protein, 14 aa, Homo sapiens
  CDR3 for beta chain variable domain of TCR clone 115083 (TRBV11-2, TRBJ2-3)
CSSPGGGATDTQYF

SEQ ID NO: 230167 - protein, 16 aa, Homo sapiens
  CDR3 for alpha chain variable domain of TCR clone 115084 (TRAV16, TRAJ52)
CALSAAGGTSSGKLTF

SEQ ID NO: 230168 - protein, 12 aa, Homo sapiens
  CDR3 for beta chain variable domain of TCR clone 115084 (TRBV12-4, TRBJ1-3)
CASSFSGNTIYF

SEQ ID NO: 230169 - protein, 15 aa, Homo sapiens
  CDR3 for alpha chain variable domain of TCR clone 115085 (TRAV3, TRAJ22)
CAVRDRGGSARQLTF

SEQ ID NO: 230170 - protein, 13 aa, Homo sapiens
  CDR3 for beta chain variable domain of TCR clone 115085 (TRBV7-3, TRBJ2-1)
CASSPVAYNKQFF

SEQ ID NO: 230171 - protein, 16 aa, Homo sapiens
  CDR3 for alpha chain variable domain of TCR clone 115086 (TRAV38-1, TRAJ32)
CAFMKGGGGATHKLIF

SEQ ID NO: 230172 - protein, 13 aa, Homo sapiens
  CDR3 for beta chain variable domain of TCR clone 115086 (TRBV20-1, TRBJ2-5)
CSAREAFQETQYF

SEQ ID NO: 230173 - protein, 13 aa, Homo sapiens
  CDR3 for alpha chain variable domain of TCR clone 115087 (TRAV8-6, TRAJ21)
YAVSPSSLNKFYF

SEQ ID NO: 230174 - protein, 14 aa, Homo sapiens
  CDR3 for beta chain variable domain of TCR clone 115087 (TRBV7-9, TRBJ2-5)
CASSLDAAQETQYF

SEQ ID NO: 230175 - protein, 11 aa, Homo sapiens
  CDR3 for alpha chain variable domain of TCR clone 115088 (TRAV27, TRAJ47)
CRSNQGNKLVF

SEQ ID NO: 230176 - protein, 16 aa, Homo sapiens
  CDR3 for beta chain variable domain of TCR clone 115088 (TRBV7-9, TRBJ2-1)
CAISDVAGGSYNEQFF

SEQ ID NO: 230177 - protein, 16 aa, Homo sapiens
  CDR3 for alpha chain variable domain of TCR clone 115089 (TRAV30, TRAJ24)
CGTEIVDADSWGKFQF

SEQ ID NO: 230178 - protein, 11 aa, Homo sapiens
  CDR3 for beta chain variable domain of TCR clone 115089 (TRBV7-9, TRBJ2-1)
CASSSQNEQFF

SEQ ID NO: 230179 - protein, 13 aa, Homo sapiens
  CDR3 for alpha chain variable domain of TCR clone 115090 (TRAV3, TRAJ29)
CAVRDIIDTPLVF

SEQ ID NO: 230180 - protein, 14 aa, Homo sapiens
  CDR3 for beta chain variable domain of TCR clone 115090 (TRBV27, TRBJ2-1)
CTSSATGGYNEQFF

SEQ ID NO: 230181 - protein, 12 aa, Homo sapiens
  CDR3 for alpha chain variable domain of TCR clone 115091 (TRAV8-3, TRAJ20)
CAVGANDYKLSF

SEQ ID NO: 230182 - protein, 15 aa, Homo sapiens
  CDR3 for beta chain variable domain of TCR clone 115091 (TRBV19, TRBJ1-6)
CASSTQGAVGSPLHF

SEQ ID NO: 230183 - protein, 16 aa, Homo sapiens
  CDR3 for alpha chain variable domain of TCR clone 115092 (TRAV3, TRAJ37)
CAVRGKGSGNTGKLIF

SEQ ID NO: 230184 - protein, 15 aa, Homo sapiens
  CDR3 for beta chain variable domain of TCR clone 115092 (TRBV2, TRBJ2-1)
CASSEARSAYNEQFF

SEQ ID NO: 230185 - protein, 20 aa, Homo sapiens
  CDR3 for alpha chain variable domain of TCR clone 115093 (TRAV1-1, TRAJ39)
CLLLLRCGSSAYNAGNMLTF

SEQ ID NO: 230186 - protein, 13 aa, Homo sapiens
  CDR3 for beta chain variable domain of TCR clone 115093 (TRBV12-4, TRBJ1-5)
CASSPDRAQPQHF

SEQ ID NO: 230187 - protein, 15 aa, Homo sapiens
  CDR3 for alpha chain variable domain of TCR clone 115094 (TRAV21, TRAJ24)
CAARSSTDSWGKSQF

SEQ ID NO: 230188 - protein, 11 aa, Homo sapiens
  CDR3 for beta chain variable domain of TCR clone 115094 (TRBV11-2, TRBJ2-2)
CASSLPGELFF

SEQ ID NO: 230189 - protein, 18 aa, Homo sapiens
  CDR3 for alpha chain variable domain of TCR clone 115095 (TRAV21, TRAJ52)
CAVRPSPAGGTSYGKLTF

SEQ ID NO: 230190 - protein, 15 aa, Homo sapiens
  CDR3 for beta chain variable domain of TCR clone 115095 (TRBV5-1, TRBJ1-1)
CASSLGEGENTEAFF

SEQ ID NO: 230191 - protein, 12 aa, Homo sapiens
  CDR3 for alpha chain variable domain of TCR clone 115096 (TRAV12-1, TRAJ34)
CVVAGATDKLIF

SEQ ID NO: 230192 - protein, 17 aa, Homo sapiens
  CDR3 for beta chain variable domain of TCR clone 115096 (TRBV7-8, TRBJ2-6)
CASSAGTGGAGANVLTF

SEQ ID NO: 230193 - protein, 13 aa, Homo sapiens
  CDR3 for alpha chain variable domain of TCR clone 115097 (TRAV23/DV6, TRAJ22)
CAPYSGSARQLTF

SEQ ID NO: 230194 - protein, 15 aa, Homo sapiens
  CDR3 for beta chain variable domain of TCR clone 115097 (TRBV11-2, TRBJ1-6)
CARSLDPWAVSPLHF

SEQ ID NO: 230195 - protein, 15 aa, Homo sapiens
  CDR3 for alpha chain variable domain of TCR clone 115098 (TRAV8-3, TRAJ45)
CASSYSGGGADGLTF

SEQ ID NO: 230196 - protein, 15 aa, Homo sapiens
  CDR3 for beta chain variable domain of TCR clone 115098 (TRBV4-1, TRBJ2-2)
CASSEGQGITGELFF

SEQ ID NO: 230197 - protein, 13 aa, Homo sapiens
  CDR3 for alpha chain variable domain of TCR clone 115099 (TRAV12-1, TRAJ9)
CVVLNTGGFKTIF

SEQ ID NO: 230198 - protein, 13 aa, Homo sapiens
  CDR3 for beta chain variable domain of TCR clone 115099 (TRBV20-1, TRBJ1-1)
CSARGGGNIEAFF

SEQ ID NO: 230199 - protein, 14 aa, Homo sapiens
  CDR3 for alpha chain variable domain of TCR clone 115100 (TRAV16, TRAJ57)
CALSGQGGAEKLVF

SEQ ID NO: 230200 - protein, 13 aa, Homo sapiens
  CDR3 for beta chain variable domain of TCR clone 115100 (TRBV5-4, TRBJ2-1)
CASSLQGPREQFF

SEQ ID NO: 230201 - protein, 16 aa, Homo sapiens
  CDR3 for alpha chain variable domain of TCR clone 115101 (TRAV8-4, TRAJ13)
CAVTLWGVTRKLPLEL

SEQ ID NO: 230202 - protein, 14 aa, Homo sapiens
  CDR3 for beta chain variable domain of TCR clone 115101 (TRBV7-2, TRBJ1-2)
CASSQTGSTYGYTF

SEQ ID NO: 230203 - protein, 13 aa, Homo sapiens
  CDR3 for alpha chain variable domain of TCR clone 115102 (TRAV12-3, TRAJ7)
CAMSASGNNRLAF

SEQ ID NO: 230204 - protein, 14 aa, Homo sapiens
  CDR3 for beta chain variable domain of TCR clone 115102 (TRBV6-1, TRBJ1-3)
CASVQGGGGNTIYF

SEQ ID NO: 230205 - protein, 15 aa, Homo sapiens
  CDR3 for alpha chain variable domain of TCR clone 115103 (TRAV34, TRAJ38)
CGADFTPGNNRKLIW

SEQ ID NO: 230206 - protein, 16 aa, Homo sapiens
  CDR3 for beta chain variable domain of TCR clone 115103 (TRBV12-5, TRBJ2-5)
WASGPRTSGNQETQYF

SEQ ID NO: 230207 - protein, 14 aa, Homo sapiens
  CDR3 for alpha chain variable domain of TCR clone 115104 (TRAV8-4, TRAJ13)
CAVTLSGGYQKVTF

SEQ ID NO: 230208 - protein, 15 aa, Homo sapiens
  CDR3 for beta chain variable domain of TCR clone 115104 (TRBV11-3, TRBJ2-7)
CASSPGPASSYEQYF

SEQ ID NO: 230209 - protein, 15 aa, Homo sapiens
  CDR3 for alpha chain variable domain of TCR clone 115105 (TRAV26-1, TRAJ22)
CIVRVSFWFCKATDL

SEQ ID NO: 230210 - protein, 15 aa, Homo sapiens
  CDR3 for beta chain variable domain of TCR clone 115105 (TRBV7-9, TRBJ1-6)
CASSSPGRGNSPLHF

SEQ ID NO: 230211 - protein, 22 aa, Homo sapiens
  CDR3 for alpha chain variable domain of TCR clone 115106 (TRAV40, )
CLLGDGIPDIQNPDPAAYQLRD

SEQ ID NO: 230212 - protein, 14 aa, Homo sapiens
  CDR3 for beta chain variable domain of TCR clone 115106 (TRBV11-2, TRBJ2-3)
CASSLGGGANTQYF

SEQ ID NO: 230213 - protein, 14 aa, Homo sapiens
  CDR3 for alpha chain variable domain of TCR clone 115107 (TRAV38-1, TRAJ45)
CASHSGGGADGLTF

SEQ ID NO: 230214 - protein, 14 aa, Homo sapiens
  CDR3 for beta chain variable domain of TCR clone 115107 (TRBV20-1, TRBJ1-1)
CSAQTRIGRTEAFF

SEQ ID NO: 230215 - protein, 17 aa, Homo sapiens
  CDR3 for alpha chain variable domain of TCR clone 115108 (TRAV38-2/DV8, TRAJ28)
CAFLTIYSGAGSYQLTF

SEQ ID NO: 230216 - protein, 14 aa, Homo sapiens
  CDR3 for beta chain variable domain of TCR clone 115108 (TRBV7-2, TRBJ2-5)
CASSLSGGGETQYF

SEQ ID NO: 230217 - protein, 12 aa, Homo sapiens
  CDR3 for alpha chain variable domain of TCR clone 115109 (TRAV12-3, TRAJ17)
CAMTLTGNKLTF

SEQ ID NO: 230218 - protein, 11 aa, Homo sapiens
  CDR3 for beta chain variable domain of TCR clone 115109 (TRBV20-1, TRBJ2-7)
IGSLGMDEQYF

SEQ ID NO: 230219 - protein, 12 aa, Homo sapiens
  CDR3 for alpha chain variable domain of TCR clone 115110 (TRAV26-2, TRAJ47)
CILVEYGNKLVF

SEQ ID NO: 230220 - protein, 16 aa, Homo sapiens
  CDR3 for beta chain variable domain of TCR clone 115110 (TRBV18, TRBJ1-4)
CASSPLVGDRSEKLFF

SEQ ID NO: 230221 - protein, 16 aa, Homo sapiens
  CDR3 for alpha chain variable domain of TCR clone 115111 (TRAV30, TRAJ24)
CGTEIVDADSWGKFQI

SEQ ID NO: 230222 - protein, 19 aa, Homo sapiens
  CDR3 for beta chain variable domain of TCR clone 115111 (TRBV25-1, TRBJ2-2)
CAILVYRVDRGRKTGELFF

SEQ ID NO: 230223 - protein, 14 aa, Homo sapiens
  CDR3 for alpha chain variable domain of TCR clone 115112 (TRAV13-1, TRAJ35)
CAASKGGFGNVLHC

SEQ ID NO: 230224 - protein, 13 aa, Homo sapiens
  CDR3 for beta chain variable domain of TCR clone 115112 (TRBV19, TRBJ1-2)
CASSQGQVYGYTF

SEQ ID NO: 230225 - protein, 13 aa, Homo sapiens
  CDR3 for alpha chain variable domain of TCR clone 115113 (TRAV13-2, TRAJ48)
CAEMDFGNEKLTF

SEQ ID NO: 230226 - protein, 12 aa, Homo sapiens
  CDR3 for beta chain variable domain of TCR clone 115113 (TRBV11-2, TRBJ2-2)
CASSLPTGELFL

SEQ ID NO: 230227 - protein, 13 aa, Homo sapiens
  CDR3 for alpha chain variable domain of TCR clone 115114 (TRAV8-3, TRAJ36)
CAVGATGANNLFF

SEQ ID NO: 230228 - protein, 19 aa, Homo sapiens
  CDR3 for beta chain variable domain of TCR clone 115114 (TRBV7-2, TRBJ2-3)
CASSFLSRNWGGGTDTQYF

SEQ ID NO: 230229 - protein, 14 aa, Homo sapiens
  CDR3 for alpha chain variable domain of TCR clone 115115 (TRAV13-2, TRAJ40)
CAELPTSGAYKYIF

SEQ ID NO: 230230 - protein, 14 aa, Homo sapiens
  CDR3 for beta chain variable domain of TCR clone 115115 (TRBV28, TRBJ1-2)
CASSRDRKNYGYTF

SEQ ID NO: 230231 - protein, 15 aa, Homo sapiens
  CDR3 for alpha chain variable domain of TCR clone 115116 (TRAV17, TRAJ4)
CATGTWSGGYNKLIF

SEQ ID NO: 230232 - protein, 13 aa, Homo sapiens
  CDR3 for beta chain variable domain of TCR clone 115116 (TRBV6-6, TRBJ2-7)
CASSPKHIAEQYF

SEQ ID NO: 230233 - protein, 16 aa, Homo sapiens
  CDR3 for alpha chain variable domain of TCR clone 115117 (TRAV12-2, TRAJ13)
CAVRRLGVTRKLPFEL

SEQ ID NO: 230234 - protein, 15 aa, Homo sapiens
  CDR3 for beta chain variable domain of TCR clone 115117 (TRBV27, TRBJ2-1)
CASSNGGGSSNEQFF

SEQ ID NO: 230235 - protein, 12 aa, Homo sapiens
  CDR3 for alpha chain variable domain of TCR clone 115118 (TRAV30, TRAJ43)
CVTEERGNDMRF

SEQ ID NO: 230236 - protein, 13 aa, Homo sapiens
  CDR3 for beta chain variable domain of TCR clone 115118 (TRBV27, TRBJ2-7)
CASSFSQGYEQYF

SEQ ID NO: 230237 - protein, 15 aa, Homo sapiens
  CDR3 for alpha chain variable domain of TCR clone 115119 (TRAV21, TRAJ52)
CAVRGGGTSYGKLTF

SEQ ID NO: 230238 - protein, 14 aa, Homo sapiens
  CDR3 for beta chain variable domain of TCR clone 115119 (TRBV27, TRBJ1-5)
CASSSQGSNQPQHF

SEQ ID NO: 230239 - protein, 12 aa, Homo sapiens
  CDR3 for alpha chain variable domain of TCR clone 115120 (TRAV13-1, TRAJ21)
CAAKEGFNKFYF

SEQ ID NO: 230240 - protein, 16 aa, Homo sapiens
  CDR3 for beta chain variable domain of TCR clone 115120 (TRBV28, TRBJ2-7)
CASSPWVATGDLSQYF

SEQ ID NO: 230241 - protein, 15 aa, Homo sapiens
  CDR3 for alpha chain variable domain of TCR clone 115121 (TRAV8-3, TRAJ41)
CAVGSNSNSGYALSF

SEQ ID NO: 230242 - protein, 17 aa, Homo sapiens
  CDR3 for beta chain variable domain of TCR clone 115121 (TRBV25-1, TRBJ2-1)
CASSAYGQGRGVYEQFF

SEQ ID NO: 230243 - protein, 13 aa, Homo sapiens
  CDR3 for alpha chain variable domain of TCR clone 115122 (TRAV12-3, TRAJ33)
CAMSVNSNYQLIW

SEQ ID NO: 230244 - protein, 15 aa, Homo sapiens
  CDR3 for beta chain variable domain of TCR clone 115122 (TRBV27, TRBJ2-2)
CTSVPANSSPGSCFF

SEQ ID NO: 230245 - protein, 15 aa, Homo sapiens
  CDR3 for alpha chain variable domain of TCR clone 115123 (TRAV38-1, TRAJ54)
CAFNYLIQGAQKLVF

SEQ ID NO: 230246 - protein, 15 aa, Homo sapiens
  CDR3 for beta chain variable domain of TCR clone 115123 (TRBV7-2, TRBJ2-1)
CASSLASGRVNEQFF

SEQ ID NO: 230247 - protein, 14 aa, Homo sapiens
  CDR3 for alpha chain variable domain of TCR clone 115124 (TRAV23/DV6, TRAJ57)
CAASNQGGSETLVF

SEQ ID NO: 230248 - protein, 13 aa, Homo sapiens
  CDR3 for beta chain variable domain of TCR clone 115124 (TRBV11-2, TRBJ2-7)
CASSSYPSYEQYF

SEQ ID NO: 230249 - protein, 11 aa, Homo sapiens
  CDR3 for alpha chain variable domain of TCR clone 115125 (TRAV1-2, TRAJ20)
CAVANDYKLSS

SEQ ID NO: 230250 - protein, 15 aa, Homo sapiens
  CDR3 for beta chain variable domain of TCR clone 115125 (TRBV2, TRBJ2-1)
CASSELAGSYNEQFF

SEQ ID NO: 230251 - protein, 11 aa, Homo sapiens
  CDR3 for alpha chain variable domain of TCR clone 115126 (TRAV12-2, TRAJ31)
CAILNNSRLMF

SEQ ID NO: 230252 - protein, 13 aa, Homo sapiens
  CDR3 for beta chain variable domain of TCR clone 115126 (TRBV20-1, TRBJ1-1)
CSARLGQGTEAFF

SEQ ID NO: 230253 - protein, 12 aa, Homo sapiens
  CDR3 for alpha chain variable domain of TCR clone 115127 (TRAV20, TRAJ56)
CAFTGANSKLTF

SEQ ID NO: 230254 - protein, 14 aa, Homo sapiens
  CDR3 for beta chain variable domain of TCR clone 115127 (TRBV20-1, TRBJ2-5)
CSALVPGYQETQYF

SEQ ID NO: 230255 - protein, 11 aa, Homo sapiens
  CDR3 for alpha chain variable domain of TCR clone 115128 (TRAV17, TRAJ9)
CGFTGGFKTIF

SEQ ID NO: 230256 - protein, 20 aa, Homo sapiens
  CDR3 for beta chain variable domain of TCR clone 115128 (TRBV28, TRBJ2-1)
CASTPIGRSPGLAGGNEQFF

SEQ ID NO: 230257 - protein, 17 aa, Homo sapiens
  CDR3 for alpha chain variable domain of TCR clone 115129 (TRAV17, TRAJ28)
CATDPRRGGAGSYQLTF

SEQ ID NO: 230258 - protein, 16 aa, Homo sapiens
  CDR3 for beta chain variable domain of TCR clone 115129 (TRBV25-1, TRBJ1-1)
CASSGDRDRWRIEAFF

SEQ ID NO: 230259 - protein, 12 aa, Homo sapiens
  CDR3 for alpha chain variable domain of TCR clone 115130 (TRAV1-1, TRAJ8)
CAGGTGFQKLVF

SEQ ID NO: 230260 - protein, 16 aa, Homo sapiens
  CDR3 for beta chain variable domain of TCR clone 115130 (TRBV12-4, TRBJ1-5)
CASSRTVGGSNQPQHF

SEQ ID NO: 230261 - protein, 19 aa, Homo sapiens
  CDR3 for alpha chain variable domain of TCR clone 115131 (TRAV8-3, TRAJ4)
LSTSVPWVFYSGGYNKLIF

SEQ ID NO: 230262 - protein, 14 aa, Homo sapiens
  CDR3 for beta chain variable domain of TCR clone 115131 (TRBV7-9, TRBJ2-3)
CASSLEDGTDTQYF

SEQ ID NO: 230263 - protein, 12 aa, Homo sapiens
  CDR3 for alpha chain variable domain of TCR clone 115132 (TRAV12-3, TRAJ17)
CAMTLTGNKLTF

SEQ ID NO: 230264 - protein, 15 aa, Homo sapiens
  CDR3 for beta chain variable domain of TCR clone 115132 (TRBV7-2, TRBJ2-5)
CASSLVSRGGETQYF

SEQ ID NO: 230265 - protein, 16 aa, Homo sapiens
  CDR3 for alpha chain variable domain of TCR clone 115133 (TRAV5, TRAJ6)
CAERPHASGGSYIPTL

SEQ ID NO: 230266 - protein, 13 aa, Homo sapiens
  CDR3 for beta chain variable domain of TCR clone 115133 (TRBV6-5, TRBJ1-2)
CASSYTGGGGYTF

SEQ ID NO: 230267 - protein, 14 aa, Homo sapiens
  CDR3 for alpha chain variable domain of TCR clone 115134 (TRAV3, TRAJ6)
CAVRDWGGGYIPTF

SEQ ID NO: 230268 - protein, 17 aa, Homo sapiens
  CDR3 for beta chain variable domain of TCR clone 115134 (TRBV6-5, TRBJ2-1)
CASRLSGRFESYNEQFF

SEQ ID NO: 230269 - protein, 14 aa, Homo sapiens
  CDR3 for alpha chain variable domain of TCR clone 115135 (TRAV23/DV6, TRAJ10)
CAAAISGGGHKLTF

SEQ ID NO: 230270 - protein, 12 aa, Homo sapiens
  CDR3 for beta chain variable domain of TCR clone 115135 (TRBV28, TRBJ2-7)
CASSVPPYEQYF

SEQ ID NO: 230271 - protein, 14 aa, Homo sapiens
  CDR3 for alpha chain variable domain of TCR clone 115136 (TRAV35, TRAJ22)
CAGLRPGPARQLTF

SEQ ID NO: 230272 - protein, 15 aa, Homo sapiens
  CDR3 for beta chain variable domain of TCR clone 115136 (TRBV12-4, TRBJ2-5)
CASSTPTGLQETQYF

SEQ ID NO: 230273 - protein, 17 aa, Homo sapiens
  CDR3 for alpha chain variable domain of TCR clone 115137 (TRAV3, TRAJ6)
CAVRDGPRAGGSYIPPF

SEQ ID NO: 230274 - protein, 18 aa, Homo sapiens
  CDR3 for beta chain variable domain of TCR clone 115137 (TRBV7-3, TRBJ2-3)
CASSSTGTYPGSTDTQYF

SEQ ID NO: 230275 - protein, 13 aa, Homo sapiens
  CDR3 for alpha chain variable domain of TCR clone 115138 (TRAV1-2, TRAJ11)
CAVRREGYSTLTF

SEQ ID NO: 230276 - protein, 11 aa, Homo sapiens
  CDR3 for beta chain variable domain of TCR clone 115138 (TRBV25-1, TRBJ1-1)
PTWGGNTEAFF

SEQ ID NO: 230277 - protein, 16 aa, Homo sapiens
  CDR3 for alpha chain variable domain of TCR clone 115139 (TRAV30, TRAJ24)
CGTEIVDADSWGKFQF

SEQ ID NO: 230278 - protein, 14 aa, Homo sapiens
  CDR3 for beta chain variable domain of TCR clone 115139 (TRBV12-5, TRBJ2-5)
CARGSRTHQETQYF

SEQ ID NO: 230279 - protein, 13 aa, Homo sapiens
  CDR3 for alpha chain variable domain of TCR clone 115140 (TRAV27, TRAJ6)
CAGGTRGSYIPTF

SEQ ID NO: 230280 - protein, 15 aa, Homo sapiens
  CDR3 for beta chain variable domain of TCR clone 115140 (TRBV11-2, TRBJ2-2)
CASSSDRVNAGELFF

SEQ ID NO: 230281 - protein, 16 aa, Homo sapiens
  CDR3 for alpha chain variable domain of TCR clone 115141 (TRAV26-1, TRAJ52)
CIVSNAGGTSYGKLTF

SEQ ID NO: 230282 - protein, 15 aa, Homo sapiens
  CDR3 for beta chain variable domain of TCR clone 115141 (TRBV7-9, TRBJ2-7)
CASSLDLDRGYEQYF

SEQ ID NO: 230283 - protein, 14 aa, Homo sapiens
  CDR3 for alpha chain variable domain of TCR clone 115142 (TRAV27, TRAJ22)
CAGLPSGSARQLTF

SEQ ID NO: 230284 - protein, 11 aa, Homo sapiens
  CDR3 for beta chain variable domain of TCR clone 115142 (TRBV11-2, TRBJ2-2)
CASSLPGELFF

SEQ ID NO: 230285 - protein, 13 aa, Homo sapiens
  CDR3 for alpha chain variable domain of TCR clone 115143 (TRAV35, TRAJ42)
CAGFPGSEGNLIF

SEQ ID NO: 230286 - protein, 13 aa, Homo sapiens
  CDR3 for beta chain variable domain of TCR clone 115143 (TRBV29-1, TRBJ2-1)
CSVEGGRVNEQFF

SEQ ID NO: 230287 - protein, 15 aa, Homo sapiens
  CDR3 for alpha chain variable domain of TCR clone 115144 (TRAV8-3, TRAJ6)
CAVGDDRGGSYIPTF

SEQ ID NO: 230288 - protein, 14 aa, Homo sapiens
  CDR3 for beta chain variable domain of TCR clone 115144 (TRBV27, TRBJ2-2)
CASLRSPPGGELFF

SEQ ID NO: 230289 - protein, 17 aa, Homo sapiens
  CDR3 for alpha chain variable domain of TCR clone 115145 (TRAV23/DV6, TRAJ57)
CAASSTLSQGGSEKLVF

SEQ ID NO: 230290 - protein, 14 aa, Homo sapiens
  CDR3 for beta chain variable domain of TCR clone 115145 (TRBV25-1, TRBJ1-1)
SASTHLGGNTEAFF

SEQ ID NO: 230291 - protein, 13 aa, Homo sapiens
  CDR3 for alpha chain variable domain of TCR clone 115146 (TRAV2, TRAJ12)
CAVGADSSYKLIF

SEQ ID NO: 230292 - protein, 13 aa, Homo sapiens
  CDR3 for beta chain variable domain of TCR clone 115146 (TRBV20-1, TRBJ2-1)
CSARYSPRDEQFF

SEQ ID NO: 230293 - protein, 13 aa, Homo sapiens
  CDR3 for alpha chain variable domain of TCR clone 115147 (TRAV8-3, TRAJ43)
CAVGPDNNNDLRF

SEQ ID NO: 230294 - protein, 12 aa, Homo sapiens
  CDR3 for beta chain variable domain of TCR clone 115147 (TRBV7-2, TRBJ1-6)
CASSLSSSPLHF

SEQ ID NO: 230295 - protein, 17 aa, Homo sapiens
  CDR3 for alpha chain variable domain of TCR clone 115148 (TRAV13-1, TRAJ28)
CAASPPYSGAGSYQLTF

SEQ ID NO: 230296 - protein, 13 aa, Homo sapiens
  CDR3 for beta chain variable domain of TCR clone 115148 (TRBV7-3, TRBJ2-5)
CASSFRGGETQYF

SEQ ID NO: 230297 - protein, 16 aa, Homo sapiens
  CDR3 for alpha chain variable domain of TCR clone 115149 (TRAV8-3, TRAJ13)
CAVGAYTSGGYQKVTF

SEQ ID NO: 230298 - protein, 14 aa, Homo sapiens
  CDR3 for beta chain variable domain of TCR clone 115149 (TRBV18, TRBJ2-5)
CASSPRASSETQYF

SEQ ID NO: 230299 - protein, 15 aa, Homo sapiens
  CDR3 for alpha chain variable domain of TCR clone 115150 (TRAV20, TRAJ53)
CAVQERGGSNYKLTF

SEQ ID NO: 230300 - protein, 13 aa, Homo sapiens
  CDR3 for beta chain variable domain of TCR clone 115150 (TRBV15, TRBJ1-6)
CATSGGLNSPLHF

SEQ ID NO: 230301 - protein, 13 aa, Homo sapiens
  CDR3 for alpha chain variable domain of TCR clone 115151 (TRAV12-3, TRAJ5)
CAVIYTGRRALTF

SEQ ID NO: 230302 - protein, 12 aa, Homo sapiens
  CDR3 for beta chain variable domain of TCR clone 115151 (TRBV18, TRBJ1-4)
CASSPSREKLFF

SEQ ID NO: 230303 - protein, 13 aa, Homo sapiens
  CDR3 for alpha chain variable domain of TCR clone 115152 (TRAV21, TRAJ27)
CAARPGNAGKSTF

SEQ ID NO: 230304 - protein, 16 aa, Homo sapiens
  CDR3 for beta chain variable domain of TCR clone 115152 (TRBV2, TRBJ2-1)
CASSVGGSLSYNEQFF

SEQ ID NO: 230305 - protein, 12 aa, Homo sapiens
  CDR3 for alpha chain variable domain of TCR clone 115153 (TRAV27, TRAJ35)
CAGADFGNVLHC

SEQ ID NO: 230306 - protein, 16 aa, Homo sapiens
  CDR3 for beta chain variable domain of TCR clone 115153 (TRBV13, TRBJ2-2)
CASSPRTGEHTGELFF

SEQ ID NO: 230307 - protein, 16 aa, Homo sapiens
  CDR3 for alpha chain variable domain of TCR clone 115154 (TRAV12-3, TRAJ53)
CAMSPGSGGSNYKLTV

SEQ ID NO: 230308 - protein, 17 aa, Homo sapiens
  CDR3 for beta chain variable domain of TCR clone 115154 (TRBV28, TRBJ2-5)
CASSTPEGDALQETQYF

SEQ ID NO: 230309 - protein, 17 aa, Homo sapiens
  CDR3 for alpha chain variable domain of TCR clone 115155 (TRAV8-1, TRAJ42)
CAVKWGNYGGSQGDLIF

SEQ ID NO: 230310 - protein, 15 aa, Homo sapiens
  CDR3 for beta chain variable domain of TCR clone 115155 (TRBV9, TRBJ1-6)
CASSVAGTGDSPLHF

SEQ ID NO: 230311 - protein, 14 aa, Homo sapiens
  CDR3 for alpha chain variable domain of TCR clone 115156 (TRAV17, TRAJ37)
CATDAFSNTGKLIF

SEQ ID NO: 230312 - protein, 13 aa, Homo sapiens
  CDR3 for beta chain variable domain of TCR clone 115156 (TRBV7-9, TRBJ1-2)
CASSLKQNYGYTF

SEQ ID NO: 230313 - protein, 15 aa, Homo sapiens
  CDR3 for alpha chain variable domain of TCR clone 115157 (TRAV3, TRAJ17)
CAVRDTGAAGNKLTF

SEQ ID NO: 230314 - protein, 14 aa, Homo sapiens
  CDR3 for beta chain variable domain of TCR clone 115157 (TRBV18, TRBJ2-5)
CASSPGVSQETQYF

SEQ ID NO: 230315 - protein, 18 aa, Homo sapiens
  CDR3 for alpha chain variable domain of TCR clone 115158 (TRAV29/DV5, TRAJ52)
CAAGFRGAGGTSYGKLTF

SEQ ID NO: 230316 - protein, 16 aa, Homo sapiens
  CDR3 for beta chain variable domain of TCR clone 115158 (TRBV19, TRBJ2-2)
CASRSPGTGATGELFF

SEQ ID NO: 230317 - protein, 15 aa, Homo sapiens
  CDR3 for alpha chain variable domain of TCR clone 115159 (TRAV3, TRAJ47)
CAVRDIGQYGNKLVF

SEQ ID NO: 230318 - protein, 14 aa, Homo sapiens
  CDR3 for beta chain variable domain of TCR clone 115159 (TRBV13, TRBJ2-5)
CASSLERVGETQYF

SEQ ID NO: 230319 - protein, 14 aa, Homo sapiens
  CDR3 for alpha chain variable domain of TCR clone 115160 (TRAV1-2, TRAJ16)
CAVNRFSDGQKLLF

SEQ ID NO: 230320 - protein, 15 aa, Homo sapiens
  CDR3 for beta chain variable domain of TCR clone 115160 (TRBV7-9, TRBJ2-1)
CASSLGLAGGTEQFF

SEQ ID NO: 230321 - protein, 16 aa, Homo sapiens
  CDR3 for alpha chain variable domain of TCR clone 115161 (TRAV30, TRAJ24)
CGTEIVYADSWGKFQF

SEQ ID NO: 230322 - protein, 15 aa, Homo sapiens
  CDR3 for beta chain variable domain of TCR clone 115161 (TRBV20-1, TRBJ2-6)
CSARDRGPGANVLTF

SEQ ID NO: 230323 - protein, 16 aa, Homo sapiens
  CDR3 for alpha chain variable domain of TCR clone 115162 (TRAV12-3, TRAJ53)
CAMSPGSGGSNFKLTF

SEQ ID NO: 230324 - protein, 14 aa, Homo sapiens
  CDR3 for beta chain variable domain of TCR clone 115162 (TRBV4-2, TRBJ2-1)
CASGLDRAYNEQFF

SEQ ID NO: 230325 - protein, 10 aa, Homo sapiens
  CDR3 for alpha chain variable domain of TCR clone 115163 (TRAV21, TRAJ35)
CAVFGNVLHC

SEQ ID NO: 230326 - protein, 17 aa, Homo sapiens
  CDR3 for beta chain variable domain of TCR clone 115163 (TRBV7-2, TRBJ2-2)
CASSPRGAGEGTGELFF

SEQ ID NO: 230327 - protein, 14 aa, Homo sapiens
  CDR3 for alpha chain variable domain of TCR clone 115164 (TRAV8-4, TRAJ9)
CAMRINTGGFKTIF

SEQ ID NO: 230328 - protein, 15 aa, Homo sapiens
  CDR3 for beta chain variable domain of TCR clone 115164 (TRBV10-2, TRBJ2-6)
CASSEQGTGANVLTF

SEQ ID NO: 230329 - protein, 15 aa, Homo sapiens
  CDR3 for alpha chain variable domain of TCR clone 115165 (TRAV4, TRAJ39)
CLVGPNNNAGNMLTF

SEQ ID NO: 230330 - protein, 16 aa, Homo sapiens
  CDR3 for beta chain variable domain of TCR clone 115165 (TRBV2, TRBJ2-3)
CASSTSVEGVTDTQYF

SEQ ID NO: 230331 - protein, 16 aa, Homo sapiens
  CDR3 for alpha chain variable domain of TCR clone 115166 (TRAV21, TRAJ37)
CAVRPRGSSNTGKLIF

SEQ ID NO: 230332 - protein, 14 aa, Homo sapiens
  CDR3 for beta chain variable domain of TCR clone 115166 (TRBV19, TRBJ2-1)
CASPTFVLSGEQFF

SEQ ID NO: 230333 - protein, 13 aa, Homo sapiens
  CDR3 for alpha chain variable domain of TCR clone 115167 (TRAV1-2, TRAJ9)
CAALNTGGFKTIF

SEQ ID NO: 230334 - protein, 14 aa, Homo sapiens
  CDR3 for beta chain variable domain of TCR clone 115167 (TRBV19, TRBJ2-3)
CASSAPRGTDTQYF

SEQ ID NO: 230335 - protein, 15 aa, Homo sapiens
  CDR3 for alpha chain variable domain of TCR clone 115168 (TRAV8-3, TRAJ45)
CASSYSGGGADGLTF

SEQ ID NO: 230336 - protein, 13 aa, Homo sapiens
  CDR3 for beta chain variable domain of TCR clone 115168 (TRBV4-1, TRBJ2-1)
CASSQAGGDEQFF

SEQ ID NO: 230337 - protein, 17 aa, Homo sapiens
  CDR3 for alpha chain variable domain of TCR clone 115169 (TRAV8-1, TRAJ43)
CAVTNDMRFGEGTRLTV

SEQ ID NO: 230338 - protein, 17 aa, Homo sapiens
  CDR3 for beta chain variable domain of TCR clone 115169 (TRBV5-4, TRBJ2-1)
CASSSAGGRGPYNEQFF

SEQ ID NO: 230339 - protein, 13 aa, Homo sapiens
  CDR3 for alpha chain variable domain of TCR clone 115170 (TRAV12-3, TRAJ13)
CAMNSGGYQKVTF

SEQ ID NO: 230340 - protein, 13 aa, Homo sapiens
  CDR3 for beta chain variable domain of TCR clone 115170 (TRBV20-1, TRBJ1-1)
CSAPPGGHTEAFF

SEQ ID NO: 230341 - protein, 12 aa, Homo sapiens
  CDR3 for alpha chain variable domain of TCR clone 115171 (TRAV12-3, TRAJ17)
CAMTLTGNKLTF

SEQ ID NO: 230342 - protein, 13 aa, Homo sapiens
  CDR3 for beta chain variable domain of TCR clone 115171 (TRBV7-8, TRBJ2-7)
CASSFAGLYEQYF

SEQ ID NO: 230343 - protein, 10 aa, Homo sapiens
  CDR3 for alpha chain variable domain of TCR clone 115172 (TRAV23/DV6, TRAJ31)
CARGGARLMF

SEQ ID NO: 230344 - protein, 13 aa, Homo sapiens
  CDR3 for beta chain variable domain of TCR clone 115172 (TRBV18, TRBJ2-7)
CASSRSGSYEQYF

SEQ ID NO: 230345 - protein, 15 aa, Homo sapiens
  CDR3 for alpha chain variable domain of TCR clone 115173 (TRAV13-1, TRAJ17)
CAASIERAAGNKLTF

SEQ ID NO: 230346 - protein, 17 aa, Homo sapiens
  CDR3 for beta chain variable domain of TCR clone 115173 (TRBV5-7, TRBJ1-1)
CASSLGRGESFLWTRHQ

SEQ ID NO: 230347 - protein, 15 aa, Homo sapiens
  CDR3 for alpha chain variable domain of TCR clone 115174 (TRAV8-3, TRAJ11)
CAVGLLNSGYSTLTF

SEQ ID NO: 230348 - protein, 16 aa, Homo sapiens
  CDR3 for beta chain variable domain of TCR clone 115174 (TRBV7-9, TRBJ1-2)
CAISLGFSSGEDGYTF

SEQ ID NO: 230349 - protein, 13 aa, Homo sapiens
  CDR3 for alpha chain variable domain of TCR clone 115175 (TRAV20, TRAJ37)
CAGCSSNTGKLIF

SEQ ID NO: 230350 - protein, 14 aa, Homo sapiens
  CDR3 for beta chain variable domain of TCR clone 115175 (TRBV4-2, TRBJ2-1)
CASGLDRAYNEQFF

SEQ ID NO: 230351 - protein, 14 aa, Homo sapiens
  CDR3 for alpha chain variable domain of TCR clone 115176 (TRAV2, TRAJ29)
CAVEDRVGNTPLVC

SEQ ID NO: 230352 - protein, 15 aa, Homo sapiens
  CDR3 for beta chain variable domain of TCR clone 115176 (TRBV10-3, TRBJ2-1)
CAISDVQDRAYERFF

SEQ ID NO: 230353 - protein, 12 aa, Homo sapiens
  CDR3 for alpha chain variable domain of TCR clone 115177 (TRAV17, TRAJ20)
CATQSNDYQLSF

SEQ ID NO: 230354 - protein, 13 aa, Homo sapiens
  CDR3 for beta chain variable domain of TCR clone 115177 (TRBV10-3, TRBJ1-1)
CAIIPEGGTEAFF

SEQ ID NO: 230355 - protein, 13 aa, Homo sapiens
  CDR3 for alpha chain variable domain of TCR clone 115178 (TRAV2, TRAJ40)
CAVVPSGTYKYIF

SEQ ID NO: 230356 - protein, 14 aa, Homo sapiens
  CDR3 for beta chain variable domain of TCR clone 115178 (TRBV19, TRBJ2-1)
CASPTFVVSGEQFF

SEQ ID NO: 230357 - protein, 13 aa, Homo sapiens
  CDR3 for alpha chain variable domain of TCR clone 115179 (TRAV21, TRAJ27)
CAALNTNAGKSTF

SEQ ID NO: 230358 - protein, 14 aa, Homo sapiens
  CDR3 for beta chain variable domain of TCR clone 115179 (TRBV20-1, TRBJ1-3)
CSASPTGAGNTIYF

SEQ ID NO: 230359 - protein, 13 aa, Homo sapiens
  CDR3 for alpha chain variable domain of TCR clone 115180 (TRAV8-6, TRAJ9)
CAVWDTGGFKTIF

SEQ ID NO: 230360 - protein, 14 aa, Homo sapiens
  CDR3 for beta chain variable domain of TCR clone 115180 (TRBV2, TRBJ2-1)
CASSEALIYDEQFF

SEQ ID NO: 230361 - protein, 15 aa, Homo sapiens
  CDR3 for alpha chain variable domain of TCR clone 115181 (TRAV3, TRAJ22)
CAVRDRGGSARQLTL

SEQ ID NO: 230362 - protein, 12 aa, Homo sapiens
  CDR3 for beta chain variable domain of TCR clone 115181 (TRBV3-1, TRBJ2-1)
FASSQGSSGQFF

SEQ ID NO: 230363 - protein, 14 aa, Homo sapiens
  CDR3 for alpha chain variable domain of TCR clone 115182 (TRAV26-1, TRAJ45)
CIEVTAGGADGLTF

SEQ ID NO: 230364 - protein, 13 aa, Homo sapiens
  CDR3 for beta chain variable domain of TCR clone 115182 (TRBV7-6, TRBJ1-2)
CASSLVADYGYTF

SEQ ID NO: 230365 - protein, 11 aa, Homo sapiens
  CDR3 for alpha chain variable domain of TCR clone 115183 (TRAV2, TRAJ23)
CAVETRGTLIF

SEQ ID NO: 230366 - protein, 14 aa, Homo sapiens
  CDR3 for beta chain variable domain of TCR clone 115183 (TRBV2, TRBJ2-3)
CASSEGQNTDTQYF

SEQ ID NO: 230367 - protein, 16 aa, Homo sapiens
  CDR3 for alpha chain variable domain of TCR clone 115184 (TRAV17, TRAJ28)
CATASVSGAGSYQLTF

SEQ ID NO: 230368 - protein, 11 aa, Homo sapiens
  CDR3 for beta chain variable domain of TCR clone 115184 (TRBV7-9, TRBJ2-5)
RASSLGETQYF

SEQ ID NO: 230369 - protein, 17 aa, Homo sapiens
  CDR3 for alpha chain variable domain of TCR clone 115185 (TRAV3, TRAJ42)
CAVRDRDYGGSQGNLIF

SEQ ID NO: 230370 - protein, 14 aa, Homo sapiens
  CDR3 for beta chain variable domain of TCR clone 115185 (TRBV7-2, TRBJ2-5)
CASSLSGGGETQYF

SEQ ID NO: 230371 - protein, 11 aa, Homo sapiens
  CDR3 for alpha chain variable domain of TCR clone 115186 (TRAV12-3, TRAJ43)
CAMSVSNDMRF

SEQ ID NO: 230372 - protein, 12 aa, Homo sapiens
  CDR3 for beta chain variable domain of TCR clone 115186 (TRBV27, TRBJ2-2)
CASKLFTGELFF

SEQ ID NO: 230373 - protein, 18 aa, Homo sapiens
  CDR3 for alpha chain variable domain of TCR clone 115187 (TRAV12-3, TRAJ52)
CAMSVGGAGGTSYGKLTF

SEQ ID NO: 230374 - protein, 13 aa, Homo sapiens
  CDR3 for beta chain variable domain of TCR clone 115187 (TRBV5-1, TRBJ2-1)
CASSLGSYNEQFF

SEQ ID NO: 230375 - protein, 12 aa, Homo sapiens
  CDR3 for alpha chain variable domain of TCR clone 115188 (TRAV12-3, TRAJ41)
CAMSYSGYALNF

SEQ ID NO: 230376 - protein, 15 aa, Homo sapiens
  CDR3 for beta chain variable domain of TCR clone 115188 (TRBV20-1, TRBJ2-7)
CSAESGTSGAYEQYF

SEQ ID NO: 230377 - protein, 16 aa, Homo sapiens
  CDR3 for alpha chain variable domain of TCR clone 115189 (TRAV3, TRAJ10)
FAVRDMRAGGGNKLTF

SEQ ID NO: 230378 - protein, 14 aa, Homo sapiens
  CDR3 for beta chain variable domain of TCR clone 115189 (TRBV6-1, TRBJ1-3)
CASVQGGGGNTIYF

SEQ ID NO: 230379 - protein, 21 aa, Homo sapiens
  CDR3 for alpha chain variable domain of TCR clone 115190 (TRAV1-1, TRAJ6)
CAVRREEATYLHLEEDPALLF

SEQ ID NO: 230380 - protein, 15 aa, Homo sapiens
  CDR3 for beta chain variable domain of TCR clone 115190 (TRBV6-6, TRBJ2-1)
CATRQGVSSYNEQFF

SEQ ID NO: 230381 - protein, 14 aa, Homo sapiens
  CDR3 for alpha chain variable domain of TCR clone 115191 (TRAV12-3, TRAJ9)
CAMSPNTGGFKTIF

SEQ ID NO: 230382 - protein, 12 aa, Homo sapiens
  CDR3 for beta chain variable domain of TCR clone 115191 (TRBV19, TRBJ1-5)
CGSSIAQQPQHF

SEQ ID NO: 230383 - protein, 14 aa, Homo sapiens
  CDR3 for alpha chain variable domain of TCR clone 115192 (TRAV1-2, TRAJ27)
CAPAEYTNAGKSTF

SEQ ID NO: 230384 - protein, 18 aa, Homo sapiens
  CDR3 for beta chain variable domain of TCR clone 115192 (TRBV28, TRBJ1-2)
CASRQQQGKRGSNYGYSF

SEQ ID NO: 230385 - protein, 10 aa, Homo sapiens
  CDR3 for alpha chain variable domain of TCR clone 115193 (TRAV23/DV6, TRAJ57)
CAASSTLSQG

SEQ ID NO: 230386 - protein, 12 aa, Homo sapiens
  CDR3 for beta chain variable domain of TCR clone 115193 (TRBV9, TRBJ1-2)
CASSVGDYGYTF

SEQ ID NO: 230387 - protein, 16 aa, Homo sapiens
  CDR3 for alpha chain variable domain of TCR clone 115194 (TRAV3, TRAJ37)
CAVRVRGSGNTGKLIL

SEQ ID NO: 230388 - protein, 15 aa, Homo sapiens
  CDR3 for beta chain variable domain of TCR clone 115194 (TRBV9, TRBJ1-6)
CASSVAGTGDSPLHF

SEQ ID NO: 230389 - protein, 13 aa, Homo sapiens
  CDR3 for alpha chain variable domain of TCR clone 115195 (TRAV13-1, TRAJ5)
CAAEHTGRRAITF

SEQ ID NO: 230390 - protein, 13 aa, Homo sapiens
  CDR3 for beta chain variable domain of TCR clone 115195 (TRBV2, TRBJ1-4)
CASNRGTNEKLFF

SEQ ID NO: 230391 - protein, 17 aa, Homo sapiens
  CDR3 for alpha chain variable domain of TCR clone 115196 (TRAV26-2, TRAJ42)
CILRDVGYGGSQGNLIF

SEQ ID NO: 230392 - protein, 16 aa, Homo sapiens
  CDR3 for beta chain variable domain of TCR clone 115196 (TRBV12-3, TRBJ2-7)
CASSLIGGTGTYEQYF

SEQ ID NO: 230393 - protein, 13 aa, Homo sapiens
  CDR3 for alpha chain variable domain of TCR clone 115197 (TRAV21, TRAJ45)
CAVMGGGAAGLTF

SEQ ID NO: 230394 - protein, 14 aa, Homo sapiens
  CDR3 for beta chain variable domain of TCR clone 115197 (TRBV4-3, TRBJ1-4)
CASSPLQRNEKLFF

SEQ ID NO: 230395 - protein, 16 aa, Homo sapiens
  CDR3 for alpha chain variable domain of TCR clone 115198 (TRAV26-1, TRAJ23)
CIVRVERYNQGGKLNF

SEQ ID NO: 230396 - protein, 15 aa, Homo sapiens
  CDR3 for beta chain variable domain of TCR clone 115198 (TRBV18, TRBJ2-7)
CASSPRGGKGYEQYF

SEQ ID NO: 230397 - protein, 13 aa, Homo sapiens
  CDR3 for alpha chain variable domain of TCR clone 115199 (TRAV20, TRAJ20)
CAVRWVRDYKLSF

SEQ ID NO: 230398 - protein, 14 aa, Homo sapiens
  CDR3 for beta chain variable domain of TCR clone 115199 (TRBV19, TRBJ2-2)
CASTVTANTGELLF

SEQ ID NO: 230399 - protein, 18 aa, Homo sapiens
  CDR3 for alpha chain variable domain of TCR clone 115200 (TRAV21, TRAJ52)
CAVMPSPAGCTSYGKLTF

SEQ ID NO: 230400 - protein, 17 aa, Homo sapiens
  CDR3 for beta chain variable domain of TCR clone 115200 (TRBV13, TRBJ2-3)
CASSLSRVAGGRNTQYF

SEQ ID NO: 230401 - protein, 13 aa, Homo sapiens
  CDR3 for alpha chain variable domain of TCR clone 115201 (TRAV14/DV4, TRAJ20)
CAMREGRDYKLSF

SEQ ID NO: 230402 - protein, 13 aa, Homo sapiens
  CDR3 for beta chain variable domain of TCR clone 115201 (TRBV7-9, TRBJ1-2)
CASSLKQNYGYTF

SEQ ID NO: 230403 - protein, 12 aa, Homo sapiens
  CDR3 for alpha chain variable domain of TCR clone 115202 (TRAV13-1, TRAJ53)
AASGGSNYKLTF

SEQ ID NO: 230404 - protein, 13 aa, Homo sapiens
  CDR3 for beta chain variable domain of TCR clone 115202 (TRBV9, TRBJ2-5)
CASSPAGLGTQYF

SEQ ID NO: 230405 - protein, 16 aa, Homo sapiens
  CDR3 for alpha chain variable domain of TCR clone 115203 (TRAV27, TRAJ13)
CAGAKSDSGGYQKVTF

SEQ ID NO: 230406 - protein, 13 aa, Homo sapiens
  CDR3 for beta chain variable domain of TCR clone 115203 (TRBV11-2, TRBJ1-3)
CASSLEPVNTIYF

SEQ ID NO: 230407 - protein, 12 aa, Homo sapiens
  CDR3 for alpha chain variable domain of TCR clone 115204 (TRAV13-1, TRAJ21)
CAAKEGFNKFYF

SEQ ID NO: 230408 - protein, 16 aa, Homo sapiens
  CDR3 for beta chain variable domain of TCR clone 115204 (TRBV4-3, TRBJ2-2)
CASSHLQGSGTGELFF

SEQ ID NO: 230409 - protein, 14 aa, Homo sapiens
  CDR3 for alpha chain variable domain of TCR clone 115205 (TRAV17, TRAJ53)
CATDAGGSNYKLTF

SEQ ID NO: 230410 - protein, 16 aa, Homo sapiens
  CDR3 for beta chain variable domain of TCR clone 115205 (TRBV4-1, TRBJ1-1)
CASSQDAGMGNAEAFF

SEQ ID NO: 230411 - protein, 12 aa, Homo sapiens
  CDR3 for alpha chain variable domain of TCR clone 115206 (TRAV26-1, TRAJ53)
CIEGGSDYKLTF

SEQ ID NO: 230412 - protein, 15 aa, Homo sapiens
  CDR3 for beta chain variable domain of TCR clone 115206 (TRBV5-1, TRBJ2-2)
CASSLLQGQPGELFF

SEQ ID NO: 230413 - protein, 13 aa, Homo sapiens
  CDR3 for alpha chain variable domain of TCR clone 115207 (TRAV12-3, TRAJ35)
CAMAIGFGNVLHC

SEQ ID NO: 230414 - protein, 15 aa, Homo sapiens
  CDR3 for beta chain variable domain of TCR clone 115207 (TRBV20-1, TRBJ2-1)
GSARGSGTYYNEQFF

SEQ ID NO: 230415 - protein, 13 aa, Homo sapiens
  CDR3 for alpha chain variable domain of TCR clone 115208 (TRAV8-3, TRAJ36)
CAVGATGANNLFF

SEQ ID NO: 230416 - protein, 11 aa, Homo sapiens
  CDR3 for beta chain variable domain of TCR clone 115208 (TRBV12-4, TRBJ2-3)
CASTATDTQYF

SEQ ID NO: 230417 - protein, 12 aa, Homo sapiens
  CDR3 for alpha chain variable domain of TCR clone 115209 (TRAV12-3, TRAJ17)
CAMTLTGNKLTF

SEQ ID NO: 230418 - protein, 18 aa, Homo sapiens
  CDR3 for beta chain variable domain of TCR clone 115209 (TRBV5-5, TRBJ1-5)
CASSLRQVKGSSNQPQHF

SEQ ID NO: 230419 - protein, 16 aa, Homo sapiens
  CDR3 for alpha chain variable domain of TCR clone 115210 (TRAV30, TRAJ24)
CGTEIVDADSWGKFQF

SEQ ID NO: 230420 - protein, 16 aa, Homo sapiens
  CDR3 for beta chain variable domain of TCR clone 115210 (TRBV11-2, TRBJ2-7)
CASSTVTAPKTYEQYF

SEQ ID NO: 230421 - protein, 14 aa, Homo sapiens
  CDR3 for alpha chain variable domain of TCR clone 115211 (TRAV27, TRAJ36)
CAGPPKRGANNLFF

SEQ ID NO: 230422 - protein, 15 aa, Homo sapiens
  CDR3 for beta chain variable domain of TCR clone 115211 (TRBV18, TRBJ2-7)
CASSPASTPNHEQYF

SEQ ID NO: 230423 - protein, 13 aa, Homo sapiens
  CDR3 for alpha chain variable domain of TCR clone 115212 (TRAV12-3, TRAJ7)
CAMTPYGNYRLAF

SEQ ID NO: 230424 - protein, 13 aa, Homo sapiens
  CDR3 for beta chain variable domain of TCR clone 115212 (TRBV10-3, TRBJ1-2)
CAINADLNYGYTF

SEQ ID NO: 230425 - protein, 15 aa, Homo sapiens
  CDR3 for alpha chain variable domain of TCR clone 115213 (TRAV21, TRAJ24)
CAARSSTDSWGKLQL

SEQ ID NO: 230426 - protein, 15 aa, Homo sapiens
  CDR3 for beta chain variable domain of TCR clone 115213 (TRBV20-1, TRBJ1-1)
CSASRGVTGNTEAFF

SEQ ID NO: 230427 - protein, 14 aa, Homo sapiens
  CDR3 for alpha chain variable domain of TCR clone 115214 (TRAV1-2, TRAJ8)
CAVREDTGFQKLVF

SEQ ID NO: 230428 - protein, 14 aa, Homo sapiens
  CDR3 for beta chain variable domain of TCR clone 115214 (TRBV5-1, TRBJ2-3)
CASSRGQGGGTQYF

SEQ ID NO: 230429 - protein, 17 aa, Homo sapiens
  CDR3 for alpha chain variable domain of TCR clone 115215 (TRAV3, TRAJ6)
CAVRDGPRAGGGYIPTF

SEQ ID NO: 230430 - protein, 15 aa, Homo sapiens
  CDR3 for beta chain variable domain of TCR clone 115215 (TRBV20-1, TRBJ1-1)
CSASWDRFLNTEAFF

SEQ ID NO: 230431 - protein, 16 aa, Homo sapiens
  CDR3 for alpha chain variable domain of TCR clone 115216 (TRAV3, TRAJ3)
CAVRDRAKSSASKIIF

SEQ ID NO: 230432 - protein, 12 aa, Homo sapiens
  CDR3 for beta chain variable domain of TCR clone 115216 (TRBV27, TRBJ2-5)
CASSPTGETQYF

SEQ ID NO: 230433 - protein, 16 aa, Homo sapiens
  CDR3 for alpha chain variable domain of TCR clone 115217 (TRAV30, TRAJ24)
FGTEIVDADSWGKFQF

SEQ ID NO: 230434 - protein, 15 aa, Homo sapiens
  CDR3 for beta chain variable domain of TCR clone 115217 (TRBV20-1, TRBJ2-7)
CSARDRVSGMDEQYF

SEQ ID NO: 230435 - protein, 14 aa, Homo sapiens
  CDR3 for alpha chain variable domain of TCR clone 115218 (TRAV12-3, TRAJ54)
CAMRGIQGAQKLVF

SEQ ID NO: 230436 - protein, 14 aa, Homo sapiens
  CDR3 for beta chain variable domain of TCR clone 115218 (TRBV11-1, TRBJ2-7)
CASSFRQGSYEQYF

SEQ ID NO: 230437 - protein, 14 aa, Homo sapiens
  CDR3 for alpha chain variable domain of TCR clone 115219 (TRAV13-1, TRAJ9)
CAASALTGGFKTIF

SEQ ID NO: 230438 - protein, 13 aa, Homo sapiens
  CDR3 for beta chain variable domain of TCR clone 115219 (TRBV20-1, TRBJ1-1)
CSAGTVGITEAFF

SEQ ID NO: 230439 - protein, 14 aa, Homo sapiens
  CDR3 for alpha chain variable domain of TCR clone 115220 (TRAV1-1, TRAJ27)
CAVIYNTNAGKSTF

SEQ ID NO: 230440 - protein, 16 aa, Homo sapiens
  CDR3 for beta chain variable domain of TCR clone 115220 (TRBV7-6, TRBJ2-1)
CASSAPGPSSYNEQFF

SEQ ID NO: 230441 - protein, 15 aa, Homo sapiens
  CDR3 for alpha chain variable domain of TCR clone 115221 (TRAV3, TRAJ22)
CAVRDRGGSARQLTF

SEQ ID NO: 230442 - protein, 14 aa, Homo sapiens
  CDR3 for beta chain variable domain of TCR clone 115221 (TRBV19, TRBJ1-5)
CASSLGLVGQPQHF

SEQ ID NO: 230443 - protein, 11 aa, Homo sapiens
  CDR3 for alpha chain variable domain of TCR clone 115222 (TRAV3, TRAJ21)
CAVGNFNKFYF

SEQ ID NO: 230444 - protein, 16 aa, Homo sapiens
  CDR3 for beta chain variable domain of TCR clone 115222 (TRBV11-2, TRBJ1-1)
CASSLRQGGEHSKAFF

SEQ ID NO: 230445 - protein, 12 aa, Homo sapiens
  CDR3 for alpha chain variable domain of TCR clone 115223 (TRAV38-2/DV8, TRAJ48)
CALLSGDEKLTF

SEQ ID NO: 230446 - protein, 15 aa, Homo sapiens
  CDR3 for beta chain variable domain of TCR clone 115223 (TRBV6-1, TRBJ2-1)
CASSELRGQYNEQFF

SEQ ID NO: 230447 - protein, 13 aa, Homo sapiens
  CDR3 for alpha chain variable domain of TCR clone 115224 (TRAV12-1, TRAJ21)
CVVIGDNFNKFYF

SEQ ID NO: 230448 - protein, 14 aa, Homo sapiens
  CDR3 for beta chain variable domain of TCR clone 115224 (TRBV7-3, TRBJ2-2)
CASSLYPLTVELFF

SEQ ID NO: 230449 - protein, 11 aa, Homo sapiens
  CDR3 for alpha chain variable domain of TCR clone 115225 (TRAV2, TRAJ21)
CAVFNFNKFYF

SEQ ID NO: 230450 - protein, 11 aa, Homo sapiens
  CDR3 for beta chain variable domain of TCR clone 115225 (TRBV23-1, TRBJ2-7)
SSSGTGLEQYF

SEQ ID NO: 230451 - protein, 15 aa, Homo sapiens
  CDR3 for alpha chain variable domain of TCR clone 115226 (TRAV8-2, TRAJ40)
CVVLGTTSGTYKYIF

SEQ ID NO: 230452 - protein, 16 aa, Homo sapiens
  CDR3 for beta chain variable domain of TCR clone 115226 (TRBV7-3, TRBJ2-1)
CTSSLEGYRSYNEQFF

SEQ ID NO: 230453 - protein, 14 aa, Homo sapiens
  CDR3 for alpha chain variable domain of TCR clone 115227 (TRAV38-1, TRAJ45)
CAYYSGGGADGLTF

SEQ ID NO: 230454 - protein, 20 aa, Homo sapiens
  CDR3 for beta chain variable domain of TCR clone 115227 (TRBV28, TRBJ2-1)
CASTPIGRSLGLAGGNEQFF

SEQ ID NO: 230455 - protein, 16 aa, Homo sapiens
  CDR3 for alpha chain variable domain of TCR clone 115228 (TRAV12-3, TRAJ18)
CAMRGSRGSTLGRLYL

SEQ ID NO: 230456 - protein, 19 aa, Homo sapiens
  CDR3 for beta chain variable domain of TCR clone 115228 (TRBV6-3, TRBJ2-7)
CASSYRTGLAGGVSGEQYF

SEQ ID NO: 230457 - protein, 15 aa, Homo sapiens
  CDR3 for alpha chain variable domain of TCR clone 115229 (TRAV21, TRAJ38)
CAVRQDAGNNRKRIW

SEQ ID NO: 230458 - protein, 16 aa, Homo sapiens
  CDR3 for beta chain variable domain of TCR clone 115229 (TRBV4-2, TRBJ1-1)
CASRPLDGGGDTEAFF

SEQ ID NO: 230459 - protein, 15 aa, Homo sapiens
  CDR3 for alpha chain variable domain of TCR clone 115230 (TRAV2, TRAJ15)
CAVEDRGQAGTALIF

SEQ ID NO: 230460 - protein, 15 aa, Homo sapiens
  CDR3 for beta chain variable domain of TCR clone 115230 (TRBV10-3, TRBJ1-5)
CAISDTGLGGQPQHF

SEQ ID NO: 230461 - protein, 18 aa, Homo sapiens
  CDR3 for alpha chain variable domain of TCR clone 115231 (TRAV26-1, TRAJ37)
FIVRVDMHGSSNTGKLIF

SEQ ID NO: 230462 - protein, 15 aa, Homo sapiens
  CDR3 for beta chain variable domain of TCR clone 115231 (TRBV20-1, TRBJ2-7)
CSARVLASPLYEQYF

SEQ ID NO: 230463 - protein, 13 aa, Homo sapiens
  CDR3 for alpha chain variable domain of TCR clone 115232 (TRAV35, TRAJ33)
CAGLMDSNYQLIW

SEQ ID NO: 230464 - protein, 13 aa, Homo sapiens
  CDR3 for beta chain variable domain of TCR clone 115232 (TRBV29-1, TRBJ2-1)
CSVEGGRVNEQFF

SEQ ID NO: 230465 - protein, 13 aa, Homo sapiens
  CDR3 for alpha chain variable domain of TCR clone 115233 (TRAV8-4, TRAJ10)
CAAFTGGGNKRTF

SEQ ID NO: 230466 - protein, 15 aa, Homo sapiens
  CDR3 for beta chain variable domain of TCR clone 115233 (TRBV2, TRBJ2-3)
CASSDFEKATDTQYF

SEQ ID NO: 230467 - protein, 13 aa, Homo sapiens
  CDR3 for alpha chain variable domain of TCR clone 115234 (TRAV2, TRAJ40)
CAVVTSGTYKYIF

SEQ ID NO: 230468 - protein, 18 aa, Homo sapiens
  CDR3 for beta chain variable domain of TCR clone 115234 (TRBV7-7, TRBJ2-1)
CASSLALTSGRSYNEQFF

SEQ ID NO: 230469 - protein, 17 aa, Homo sapiens
  CDR3 for alpha chain variable domain of TCR clone 115235 (TRAV35, TRAJ47)
GLLDCRTHTEYGNKLAF

SEQ ID NO: 230470 - protein, 11 aa, Homo sapiens
  CDR3 for beta chain variable domain of TCR clone 115235 (TRBV29-1, TRBJ1-1)
CSVEVGTRTFF

SEQ ID NO: 230471 - protein, 14 aa, Homo sapiens
  CDR3 for alpha chain variable domain of TCR clone 115236 (TRAV25, TRAJ35)
CARRMEGFGNVLHC

SEQ ID NO: 230472 - protein, 13 aa, Homo sapiens
  CDR3 for beta chain variable domain of TCR clone 115236 (TRBV7-2, TRBJ1-4)
CASSLAGLERLFF

SEQ ID NO: 230473 - protein, 11 aa, Homo sapiens
  CDR3 for alpha chain variable domain of TCR clone 115237 (TRAV35, TRAJ30)
CAGERDDKIIF

SEQ ID NO: 230474 - protein, 14 aa, Homo sapiens
  CDR3 for beta chain variable domain of TCR clone 115237 (TRBV15, TRBJ2-5)
CATSVDRGQETQYF

SEQ ID NO: 230475 - protein, 14 aa, Homo sapiens
  CDR3 for alpha chain variable domain of TCR clone 115238 (TRAV12-2, TRAJ40)
CAVKIPSGTYNYIF

SEQ ID NO: 230476 - protein, 13 aa, Homo sapiens
  CDR3 for beta chain variable domain of TCR clone 115238 (TRBV7-9, TRBJ1-2)
CASSLKQNYGYTF

SEQ ID NO: 230477 - protein, 15 aa, Homo sapiens
  CDR3 for alpha chain variable domain of TCR clone 115239 (TRAV21, TRAJ53)
CATLNSGGSNYKLTF

SEQ ID NO: 230478 - protein, 15 aa, Homo sapiens
  CDR3 for beta chain variable domain of TCR clone 115239 (TRBV5-1, TRBJ2-1)
CASSPQRAPYNEQFF

SEQ ID NO: 230479 - protein, 11 aa, Homo sapiens
  CDR3 for alpha chain variable domain of TCR clone 115240 (TRAV21, TRAJ34)
CAHYNTDKLIF

SEQ ID NO: 230480 - protein, 17 aa, Homo sapiens
  CDR3 for beta chain variable domain of TCR clone 115240 (TRBV13, TRBJ2-3)
CASSLSRVAGGRNTQYF

SEQ ID NO: 230481 - protein, 12 aa, Homo sapiens
  CDR3 for alpha chain variable domain of TCR clone 115241 (TRAV13-1, TRAJ21)
CAAKEGFNKFYF

SEQ ID NO: 230482 - protein, 15 aa, Homo sapiens
  CDR3 for beta chain variable domain of TCR clone 115241 (TRBV15, TRBJ1-5)
CATSRDPDSNQPQHF

SEQ ID NO: 230483 - protein, 15 aa, Homo sapiens
  CDR3 for alpha chain variable domain of TCR clone 115242 (TRAV12-1, TRAJ42)
CVVTRDGVSQGNLIF

SEQ ID NO: 230484 - protein, 14 aa, Homo sapiens
  CDR3 for beta chain variable domain of TCR clone 115242 (TRBV11-2, TRBJ2-3)
CASSLGGGANTQYF

SEQ ID NO: 230485 - protein, 15 aa, Homo sapiens
  CDR3 for alpha chain variable domain of TCR clone 115243 (TRAV25, TRAJ52)
CAGRPGGTSYGKLTF

SEQ ID NO: 230486 - protein, 16 aa, Homo sapiens
  CDR3 for beta chain variable domain of TCR clone 115243 (TRBV19, TRBJ2-1)
CASSKAGPSSYNEQFF

SEQ ID NO: 230487 - protein, 12 aa, Homo sapiens
  CDR3 for alpha chain variable domain of TCR clone 115244 (TRAV3, TRAJ20)
CAVRDPDYKLSF

SEQ ID NO: 230488 - protein, 11 aa, Homo sapiens
  CDR3 for beta chain variable domain of TCR clone 115244 (TRBV29-1, TRBJ2-5)
CSEDRTGTQYF

SEQ ID NO: 230489 - protein, 13 aa, Homo sapiens
  CDR3 for alpha chain variable domain of TCR clone 115245 (TRAV8-3, TRAJ43)
CAVVPYKNNDMRF

SEQ ID NO: 230490 - protein, 17 aa, Homo sapiens
  CDR3 for beta chain variable domain of TCR clone 115245 (TRBV7-7, TRBJ1-1)
CASIGDRPNLGVTEAFF

SEQ ID NO: 230491 - protein, 16 aa, Homo sapiens
  CDR3 for alpha chain variable domain of TCR clone 115246 (TRAV35, TRAJ28)
CAGQKYSGAGSYQLTF

SEQ ID NO: 230492 - protein, 16 aa, Homo sapiens
  CDR3 for beta chain variable domain of TCR clone 115246 (TRBV7-3, TRBJ2-2)
CASSLKRGTLSGKLFF

SEQ ID NO: 230493 - protein, 13 aa, Homo sapiens
  CDR3 for alpha chain variable domain of TCR clone 115247 (TRAV12-2, TRAJ4)
CAGFSGGYNKRIF

SEQ ID NO: 230494 - protein, 14 aa, Homo sapiens
  CDR3 for beta chain variable domain of TCR clone 115247 (TRBV24-1, TRBJ1-1)
CATSIPRGDTEAFF

SEQ ID NO: 230495 - protein, 15 aa, Homo sapiens
  CDR3 for alpha chain variable domain of TCR clone 115248 (TRAV13-1, TRAJ18)
CAASGGGSTLGRLYF

SEQ ID NO: 230496 - protein, 13 aa, Homo sapiens
  CDR3 for beta chain variable domain of TCR clone 115248 (TRBV18, TRBJ2-1)
CASGLASNNEQLF

SEQ ID NO: 230497 - protein, 12 aa, Homo sapiens
  CDR3 for alpha chain variable domain of TCR clone 115249 (TRAV13-1, TRAJ27)
CAAHTNAGKSSF

SEQ ID NO: 230498 - protein, 14 aa, Homo sapiens
  CDR3 for beta chain variable domain of TCR clone 115249 (TRBV19, TRBJ2-2)
CASSGQGIAGELFF

SEQ ID NO: 230499 - protein, 14 aa, Homo sapiens
  CDR3 for alpha chain variable domain of TCR clone 115250 (TRAV12-2, TRAJ17)
CAVLFKAAGNKLTF

SEQ ID NO: 230500 - protein, 14 aa, Homo sapiens
  CDR3 for beta chain variable domain of TCR clone 115250 (TRBV7-3, TRBJ1-1)
CASSLKGGNTEAFS

SEQ ID NO: 230501 - protein, 14 aa, Homo sapiens
  CDR3 for alpha chain variable domain of TCR clone 115251 (TRAV12-2, TRAJ13)
CAVKKTGGYQKVTF

SEQ ID NO: 230502 - protein, 17 aa, Homo sapiens
  CDR3 for beta chain variable domain of TCR clone 115251 (TRBV15, TRBJ1-4)
CATSRYGTGDPNEKLFF

SEQ ID NO: 230503 - protein, 16 aa, Homo sapiens
  CDR3 for alpha chain variable domain of TCR clone 115252 (TRAV30, TRAJ24)
CGKEIVDADSWGKFQF

SEQ ID NO: 230504 - protein, 19 aa, Homo sapiens
  CDR3 for beta chain variable domain of TCR clone 115252 (TRBV25-1, TRBJ2-2)
CAILVYRVDRGRKTGELFF

SEQ ID NO: 230505 - protein, 14 aa, Homo sapiens
  CDR3 for alpha chain variable domain of TCR clone 115253 (TRAV1-2, TRAJ8)
CAVREDTGFKKLVF

SEQ ID NO: 230506 - protein, 12 aa, Homo sapiens
  CDR3 for beta chain variable domain of TCR clone 115253 (TRBV7-8, TRBJ2-7)
CASSLGDREQYF

SEQ ID NO: 230507 - protein, 12 aa, Homo sapiens
  CDR3 for alpha chain variable domain of TCR clone 115254 (TRAV13-1, TRAJ49)
CAASPMGNQFYF

SEQ ID NO: 230508 - protein, 12 aa, Homo sapiens
  CDR3 for beta chain variable domain of TCR clone 115254 (TRBV12-4, TRBJ1-5)
CASSLSGQPQHF

SEQ ID NO: 230509 - protein, 11 aa, Homo sapiens
  CDR3 for alpha chain variable domain of TCR clone 115255 (TRAV1-1, TRAJ5)
CAVRVRRALTF

SEQ ID NO: 230510 - protein, 14 aa, Homo sapiens
  CDR3 for beta chain variable domain of TCR clone 115255 (TRBV19, TRBJ2-1)
CASPTFVLSGEQFF

SEQ ID NO: 230511 - protein, 15 aa, Homo sapiens
  CDR3 for alpha chain variable domain of TCR clone 115256 (TRAV17, TRAJ16)
CATALRFSDGQKLLF

SEQ ID NO: 230512 - protein, 15 aa, Homo sapiens
  CDR3 for beta chain variable domain of TCR clone 115256 (TRBV13, TRBJ1-5)
CASSFGQGGVQAQHF

SEQ ID NO: 230513 - protein, 15 aa, Homo sapiens
  CDR3 for alpha chain variable domain of TCR clone 115257 (TRAV27, TRAJ38)
CAGRFNAGNNRRLIW

SEQ ID NO: 230514 - protein, 12 aa, Homo sapiens
  CDR3 for beta chain variable domain of TCR clone 115257 (TRBV11-2, TRBJ2-2)
CASSLPTGELFF

SEQ ID NO: 230515 - protein, 12 aa, Homo sapiens
  CDR3 for alpha chain variable domain of TCR clone 115258 (TRAV12-2, TRAJ43)
CAVNVNNNDMRF

SEQ ID NO: 230516 - protein, 17 aa, Homo sapiens
  CDR3 for beta chain variable domain of TCR clone 115258 (TRBV20-1, TRBJ2-1)
CSASSSGLAGSYNEQFF

SEQ ID NO: 230517 - protein, 14 aa, Homo sapiens
  CDR3 for alpha chain variable domain of TCR clone 115259 (TRAV8-1, TRAJ5)
FAVSMDTGRRALTF

SEQ ID NO: 230518 - protein, 15 aa, Homo sapiens
  CDR3 for beta chain variable domain of TCR clone 115259 (TRBV19, TRBJ2-4)
CASRGPRRGENIQYF

SEQ ID NO: 230519 - protein, 13 aa, Homo sapiens
  CDR3 for alpha chain variable domain of TCR clone 115260 (TRAV23/DV6, TRAJ34)
CAEIENNTDKLIF

SEQ ID NO: 230520 - protein, 13 aa, Homo sapiens
  CDR3 for beta chain variable domain of TCR clone 115260 (TRBV29-1, TRBJ2-7)
CSVGPSGGYEQYF

SEQ ID NO: 230521 - protein, 13 aa, Homo sapiens
  CDR3 for alpha chain variable domain of TCR clone 115261 (TRAV21, TRAJ27)
CAALNTNAGKSTF

SEQ ID NO: 230522 - protein, 14 aa, Homo sapiens
  CDR3 for beta chain variable domain of TCR clone 115261 (TRBV27, TRBJ1-1)
CASSLLSGLSEAFF

SEQ ID NO: 230523 - protein, 13 aa, Homo sapiens
  CDR3 for alpha chain variable domain of TCR clone 115262 (TRAV17, TRAJ9)
CATAITGGFKTIF

SEQ ID NO: 230524 - protein, 14 aa, Homo sapiens
  CDR3 for beta chain variable domain of TCR clone 115262 (TRBV25-1, TRBJ1-1)
CASTHLGGNTEAFF

SEQ ID NO: 230525 - protein, 13 aa, Homo sapiens
  CDR3 for alpha chain variable domain of TCR clone 115263 (TRAV12-3, TRAJ9)
CAMRNTGGFKTIF

SEQ ID NO: 230526 - protein, 14 aa, Homo sapiens
  CDR3 for beta chain variable domain of TCR clone 115263 (TRBV20-1, TRBJ2-4)
CSASGRVGENIQYF

SEQ ID NO: 230527 - protein, 16 aa, Homo sapiens
  CDR3 for alpha chain variable domain of TCR clone 115264 (TRAV3, TRAJ37)
CAVRGKGSGNTGKLIF

SEQ ID NO: 230528 - protein, 13 aa, Homo sapiens
  CDR3 for beta chain variable domain of TCR clone 115264 (TRBV7-2, TRBJ2-2)
CASSLAVTGELFF

SEQ ID NO: 230529 - protein, 11 aa, Homo sapiens
  CDR3 for alpha chain variable domain of TCR clone 115265 (TRAV21, TRAJ11)
CAVNGYSTLTF

SEQ ID NO: 230530 - protein, 15 aa, Homo sapiens
  CDR3 for beta chain variable domain of TCR clone 115265 (TRBV6-1, TRBJ2-6)
CASSSRPSGANVLTF

SEQ ID NO: 230531 - protein, 15 aa, Homo sapiens
  CDR3 for alpha chain variable domain of TCR clone 115266 (TRAV8-6, TRAJ11)
CAVNFMNSGYSTLTF

SEQ ID NO: 230532 - protein, 14 aa, Homo sapiens
  CDR3 for beta chain variable domain of TCR clone 115266 (TRBV12-4, TRBJ1-1)
CASSSARGYTEAFF

SEQ ID NO: 230533 - protein, 13 aa, Homo sapiens
  CDR3 for alpha chain variable domain of TCR clone 115267 (TRAV12-2, TRAJ20)
CAVYPSNDYKPSF

SEQ ID NO: 230534 - protein, 15 aa, Homo sapiens
  CDR3 for beta chain variable domain of TCR clone 115267 (TRBV11-3, TRBJ2-3)
CASLKDGREGDTQYF

SEQ ID NO: 230535 - protein, 15 aa, Homo sapiens
  CDR3 for alpha chain variable domain of TCR clone 115268 (TRAV26-1, TRAJ40)
CIVTVTTSGTYKYIF

SEQ ID NO: 230536 - protein, 12 aa, Homo sapiens
  CDR3 for beta chain variable domain of TCR clone 115268 (TRBV7-9, TRBJ1-4)
CASSTDREKLFF

SEQ ID NO: 230537 - protein, 13 aa, Homo sapiens
  CDR3 for alpha chain variable domain of TCR clone 115269 (TRAV8-6, TRAJ49)
CAVITNTGNQFCF

SEQ ID NO: 230538 - protein, 14 aa, Homo sapiens
  CDR3 for beta chain variable domain of TCR clone 115269 (TRBV5-1, TRBJ2-7)
CASSRGESLYEQYF

SEQ ID NO: 230539 - protein, 14 aa, Homo sapiens
  CDR3 for alpha chain variable domain of TCR clone 115270 (TRAV12-2, TRAJ48)
CAVNAFCGNEKLTF

SEQ ID NO: 230540 - protein, 13 aa, Homo sapiens
  CDR3 for beta chain variable domain of TCR clone 115270 (TRBV28, TRBJ2-7)
CAGAQQGLDEQYF

SEQ ID NO: 230541 - protein, 14 aa, Homo sapiens
  CDR3 for alpha chain variable domain of TCR clone 115271 (TRAV12-3, TRAJ10)
SHLPLTGGGNKLTF

SEQ ID NO: 230542 - protein, 13 aa, Homo sapiens
  CDR3 for beta chain variable domain of TCR clone 115271 (TRBV7-7, TRBJ2-2)
CASSLTSAGELFF

SEQ ID NO: 230543 - protein, 14 aa, Homo sapiens
  CDR3 for alpha chain variable domain of TCR clone 115272 (TRAV12-3, TRAJ9)
CAMSPNTGGFKTIF

SEQ ID NO: 230544 - protein, 12 aa, Homo sapiens
  CDR3 for beta chain variable domain of TCR clone 115272 (TRBV19, TRBJ1-5)
CASIIAQQPQHF

SEQ ID NO: 230545 - protein, 17 aa, Homo sapiens
  CDR3 for alpha chain variable domain of TCR clone 115273 (TRAV3, TRAJ6)
CAVRDGPRAGGSYIPTF

SEQ ID NO: 230546 - protein, 16 aa, Homo sapiens
  CDR3 for beta chain variable domain of TCR clone 115273 (TRBV4-1, TRBJ2-3)
CASSQRAGGLTDTQYF

SEQ ID NO: 230547 - protein, 13 aa, Homo sapiens
  CDR3 for alpha chain variable domain of TCR clone 115274 (TRAV21, TRAJ27)
FAARPGNAGKSTL

SEQ ID NO: 230548 - protein, 14 aa, Homo sapiens
  CDR3 for beta chain variable domain of TCR clone 115274 (TRBV7-6, TRBJ2-3)
CASSLGTVTDTQYF

SEQ ID NO: 230549 - protein, 16 aa, Homo sapiens
  CDR3 for alpha chain variable domain of TCR clone 115275 (TRAV27, TRAJ52)
CAGAGAGGTSYGKLTF

SEQ ID NO: 230550 - protein, 17 aa, Homo sapiens
  CDR3 for beta chain variable domain of TCR clone 115275 (TRBV24-1, TRBJ2-3)
CATSDSPSGEDTDTQYF

SEQ ID NO: 230551 - protein, 15 aa, Homo sapiens
  CDR3 for alpha chain variable domain of TCR clone 115276 (TRAV8-4, TRAJ13)
CAVSDWSGGYQKVTF

SEQ ID NO: 230552 - protein, 15 aa, Homo sapiens
  CDR3 for beta chain variable domain of TCR clone 115276 (TRBV11-2, TRBJ1-6)
CASSLDPWAVSPLHF

SEQ ID NO: 230553 - protein, 20 aa, Homo sapiens
  CDR3 for alpha chain variable domain of TCR clone 115277 (TRAV14/DV4, TRAJ22)
CAMREGPFSISSGSASQLTF

SEQ ID NO: 230554 - protein, 13 aa, Homo sapiens
  CDR3 for beta chain variable domain of TCR clone 115277 (TRBV4-2, TRBJ2-3)
CASSQDWQHTQYF

SEQ ID NO: 230555 - protein, 17 aa, Homo sapiens
  CDR3 for alpha chain variable domain of TCR clone 115278 (TRAV38-2/DV8, TRAJ28)
CAFLTLYSGAGGYQLTF

SEQ ID NO: 230556 - protein, 14 aa, Homo sapiens
  CDR3 for beta chain variable domain of TCR clone 115278 (TRBV7-2, TRBJ2-5)
CASSLSGGGETQYF

SEQ ID NO: 230557 - protein, 14 aa, Homo sapiens
  CDR3 for alpha chain variable domain of TCR clone 115279 (TRAV1-2, TRAJ8)
CAVREDTGFQKLVF

SEQ ID NO: 230558 - protein, 13 aa, Homo sapiens
  CDR3 for beta chain variable domain of TCR clone 115279 (TRBV10-2, TRBJ2-7)
CASGTSGGYEQYF

SEQ ID NO: 230559 - protein, 14 aa, Homo sapiens
  CDR3 for alpha chain variable domain of TCR clone 115280 (TRAV12-1, TRAJ17)
CVVNYKAAGNKLTF

SEQ ID NO: 230560 - protein, 19 aa, Homo sapiens
  CDR3 for beta chain variable domain of TCR clone 115280 (TRBV7-9, TRBJ2-1)
CASSHNRGALLRSYNEQFF

SEQ ID NO: 230561 - protein, 11 aa, Homo sapiens
  CDR3 for alpha chain variable domain of TCR clone 115281 (TRAV27, TRAJ20)
CAGLNDYNLSF

SEQ ID NO: 230562 - protein, 14 aa, Homo sapiens
  CDR3 for beta chain variable domain of TCR clone 115281 (TRBV6-1, TRBJ1-1)
CASTPLQMNTEAFF

SEQ ID NO: 230563 - protein, 13 aa, Homo sapiens
  CDR3 for alpha chain variable domain of TCR clone 115282 (TRAV16, TRAJ54)
CALAKGGAQKLVF

SEQ ID NO: 230564 - protein, 15 aa, Homo sapiens
  CDR3 for beta chain variable domain of TCR clone 115282 (TRBV7-9, TRBJ1-4)
CASSARTGGNEKLFF

SEQ ID NO: 230565 - protein, 14 aa, Homo sapiens
  CDR3 for alpha chain variable domain of TCR clone 115283 (TRAV12-2, TRAJ13)
CAVKKTGGYQKVTF

SEQ ID NO: 230566 - protein, 15 aa, Homo sapiens
  CDR3 for beta chain variable domain of TCR clone 115283 (TRBV7-2, TRBJ2-1)
CASRKTGSSYNEQFF

SEQ ID NO: 230567 - protein, 15 aa, Homo sapiens
  CDR3 for alpha chain variable domain of TCR clone 115284 (TRAV4, TRAJ39)
CLVGPNNNAGNMLTF

SEQ ID NO: 230568 - protein, 16 aa, Homo sapiens
  CDR3 for beta chain variable domain of TCR clone 115284 (TRBV2, TRBJ2-1)
CASSVGGSLSYNEQFF

SEQ ID NO: 230569 - protein, 14 aa, Homo sapiens
  CDR3 for alpha chain variable domain of TCR clone 115285 (TRAV23/DV6, TRAJ8)
CAASKATGFQKLVS

SEQ ID NO: 230570 - protein, 15 aa, Homo sapiens
  CDR3 for beta chain variable domain of TCR clone 115285 (TRBV28, TRBJ2-3)
CASSPDRQGANTQYF

SEQ ID NO: 230571 - protein, 17 aa, Homo sapiens
  CDR3 for alpha chain variable domain of TCR clone 115286 (TRAV1-1, TRAJ4)
CALYNKLIFGAGTRLAV

SEQ ID NO: 230572 - protein, 16 aa, Homo sapiens
  CDR3 for beta chain variable domain of TCR clone 115286 (TRBV7-3, TRBJ2-2)
CASSLKRGTLSGELFS

SEQ ID NO: 230573 - protein, 11 aa, Homo sapiens
  CDR3 for alpha chain variable domain of TCR clone 115287 (TRAV3, TRAJ17)
PRGAAGHKLTF

SEQ ID NO: 230574 - protein, 16 aa, Homo sapiens
  CDR3 for beta chain variable domain of TCR clone 115287 (TRBV7-6, TRBJ2-1)
CASSAPGPSSYNEQFF

SEQ ID NO: 230575 - protein, 13 aa, Homo sapiens
  CDR3 for alpha chain variable domain of TCR clone 115288 (TRAV8-3, TRAJ36)
CAVGATGANNLVF

SEQ ID NO: 230576 - protein, 13 aa, Homo sapiens
  CDR3 for beta chain variable domain of TCR clone 115288 (TRBV12-4, TRBJ1-2)
CASSLRQGKGYTF

SEQ ID NO: 230577 - protein, 12 aa, Homo sapiens
  CDR3 for alpha chain variable domain of TCR clone 115289 (TRAV12-1, TRAJ34)
CVVAGATDKLIF

SEQ ID NO: 230578 - protein, 12 aa, Homo sapiens
  CDR3 for beta chain variable domain of TCR clone 115289 (TRBV7-9, TRBJ1-1)
CASSLVRGEAFC

SEQ ID NO: 230579 - protein, 20 aa, Homo sapiens
  CDR3 for alpha chain variable domain of TCR clone 115290 (TRAV26-1, TRAJ42)
CCVLLHRQTYYGGSQGNLIF

SEQ ID NO: 230580 - protein, 16 aa, Homo sapiens
  CDR3 for beta chain variable domain of TCR clone 115290 (TRBV12-5, TRBJ2-5)
CASGPRTSGNQETQYF

SEQ ID NO: 230581 - protein, 14 aa, Homo sapiens
  CDR3 for alpha chain variable domain of TCR clone 115291 (TRAV12-2, TRAJ13)
CAVKKTGGYQKVTF

SEQ ID NO: 230582 - protein, 15 aa, Homo sapiens
  CDR3 for beta chain variable domain of TCR clone 115291 (TRBV7-7, TRBJ2-1)
CASSNGGGSSNEQFF

SEQ ID NO: 230583 - protein, 17 aa, Homo sapiens
  CDR3 for alpha chain variable domain of TCR clone 115292 (TRAV3, TRAJ6)
CAVRNGPRAGGSYIPTF

SEQ ID NO: 230584 - protein, 20 aa, Homo sapiens
  CDR3 for beta chain variable domain of TCR clone 115292 (TRBV28, TRBJ2-1)
CASTPIGRSPGLAGGNEQFF

SEQ ID NO: 230585 - protein, 16 aa, Homo sapiens
  CDR3 for alpha chain variable domain of TCR clone 115293 (TRAV20, TRAJ52)
CAVLQDGGTSYGKLTF

SEQ ID NO: 230586 - protein, 12 aa, Homo sapiens
  CDR3 for beta chain variable domain of TCR clone 115293 (TRBV19, TRBJ2-1)
CASSQISNEQFF

SEQ ID NO: 230587 - protein, 13 aa, Homo sapiens
  CDR3 for alpha chain variable domain of TCR clone 115294 (TRAV17, TRAJ5)
CAPMDTGRRVLTF

SEQ ID NO: 230588 - protein, 15 aa, Homo sapiens
  CDR3 for beta chain variable domain of TCR clone 115294 (TRBV7-9, TRBJ1-6)
CASSSPGRGNSPLHF

SEQ ID NO: 230589 - protein, 12 aa, Homo sapiens
  CDR3 for alpha chain variable domain of TCR clone 115295 (TRAV13-1, TRAJ42)
VNYGGSQGNLIF

SEQ ID NO: 230590 - protein, 15 aa, Homo sapiens
  CDR3 for beta chain variable domain of TCR clone 115295 (TRBV20-1, TRBJ2-7)
CSARDRVSGMDEQYF

SEQ ID NO: 230591 - protein, 15 aa, Homo sapiens
  CDR3 for alpha chain variable domain of TCR clone 115296 (TRAV17, TRAJ23)
CATDAEDNQGVKLIF

SEQ ID NO: 230592 - protein, 12 aa, Homo sapiens
  CDR3 for beta chain variable domain of TCR clone 115296 (TRBV2, TRBJ2-1)
CAKREGYNEQFF

SEQ ID NO: 230593 - protein, 14 aa, Homo sapiens
  CDR3 for alpha chain variable domain of TCR clone 115297 (TRAV8-2, TRAJ4)
CVVSPSGGYNKLIF

SEQ ID NO: 230594 - protein, 16 aa, Homo sapiens
  CDR3 for beta chain variable domain of TCR clone 115297 (TRBV7-3, TRBJ2-1)
CASSLEGHRSYNEQFF

SEQ ID NO: 230595 - protein, 13 aa, Homo sapiens
  CDR3 for alpha chain variable domain of TCR clone 115298 (TRAV35, TRAJ42)
CAGFPGSQGNLIF

SEQ ID NO: 230596 - protein, 15 aa, Homo sapiens
  CDR3 for beta chain variable domain of TCR clone 115298 (TRBV6-3, TRBJ2-2)
CASSFLATLTGELFF

SEQ ID NO: 230597 - protein, 15 aa, Homo sapiens
  CDR3 for alpha chain variable domain of TCR clone 115299 (TRAV3, TRAJ4)
CAVRDGTGGYNKLIF

SEQ ID NO: 230598 - protein, 12 aa, Homo sapiens
  CDR3 for beta chain variable domain of TCR clone 115299 (TRBV11-2, TRBJ2-2)
CASSLGGGELFF

SEQ ID NO: 230599 - protein, 13 aa, Homo sapiens
  CDR3 for alpha chain variable domain of TCR clone 115300 (TRAV17, TRAJ31)
CATDENNNARLMF

SEQ ID NO: 230600 - protein, 11 aa, Homo sapiens
  CDR3 for beta chain variable domain of TCR clone 115300 (TRBV19, TRBJ1-1)
CASSIGSEAFF

SEQ ID NO: 230601 - protein, 15 aa, Homo sapiens
  CDR3 for alpha chain variable domain of TCR clone 115301 (TRAV12-3, TRAJ6)
CAMSATTGGSYIPTF

SEQ ID NO: 230602 - protein, 16 aa, Homo sapiens
  CDR3 for beta chain variable domain of TCR clone 115301 (TRBV5-1, TRBJ2-2)
CASSSRTGGRTGELFF

SEQ ID NO: 230603 - protein, 11 aa, Homo sapiens
  CDR3 for alpha chain variable domain of TCR clone 115302 (TRAV3, TRAJ32)
NYGGATNKLIF

SEQ ID NO: 230604 - protein, 15 aa, Homo sapiens
  CDR3 for beta chain variable domain of TCR clone 115302 (TRBV4-1, TRBJ2-7)
CASSQNTGRLYEQYF

SEQ ID NO: 230605 - protein, 11 aa, Homo sapiens
  CDR3 for alpha chain variable domain of TCR clone 115303 (TRAV3, TRAJ21)
CAVGNFNKLYF

SEQ ID NO: 230606 - protein, 17 aa, Homo sapiens
  CDR3 for beta chain variable domain of TCR clone 115303 (TRBV24-1, TRBJ2-1)
CATSDVSTSGTHNEQFF

SEQ ID NO: 230607 - protein, 11 aa, Homo sapiens
  CDR3 for alpha chain variable domain of TCR clone 115304 (TRAV21, TRAJ34)
CAHYNTDKLIF

SEQ ID NO: 230608 - protein, 13 aa, Homo sapiens
  CDR3 for beta chain variable domain of TCR clone 115304 (TRBV7-6, TRBJ1-2)
CASSLVADYGETF

SEQ ID NO: 230609 - protein, 15 aa, Homo sapiens
  CDR3 for alpha chain variable domain of TCR clone 115305 (TRAV26-1, TRAJ21)
CIVRVPNYNFNKFYF

SEQ ID NO: 230610 - protein, 14 aa, Homo sapiens
  CDR3 for beta chain variable domain of TCR clone 115305 (TRBV25-1, TRBJ1-1)
CASTHLGGNTEAFF

SEQ ID NO: 230611 - protein, 14 aa, Homo sapiens
  CDR3 for alpha chain variable domain of TCR clone 115306 (TRAV1-2, TRAJ16)
CAVNRFSDGQKLLF

SEQ ID NO: 230612 - protein, 12 aa, Homo sapiens
  CDR3 for beta chain variable domain of TCR clone 115306 (TRBV11-2, TRBJ2-2)
CASSLGGGELFF

SEQ ID NO: 230613 - protein, 14 aa, Homo sapiens
  CDR3 for alpha chain variable domain of TCR clone 115307 (TRAV29/DV5, TRAJ36)
CAARRKTGANNLFF

SEQ ID NO: 230614 - protein, 14 aa, Homo sapiens
  CDR3 for beta chain variable domain of TCR clone 115307 (TRBV4-1, TRBJ2-2)
CASSQAVNTGELFF

SEQ ID NO: 230615 - protein, 15 aa, Homo sapiens
  CDR3 for alpha chain variable domain of TCR clone 115308 (TRAV8-3, TRAJ45)
CASSYSGGGADGLTF

SEQ ID NO: 230616 - protein, 18 aa, Homo sapiens
  CDR3 for beta chain variable domain of TCR clone 115308 (TRBV18, TRBJ1-3)
CASSPRGGAGPSGNTIYV

SEQ ID NO: 230617 - protein, 16 aa, Homo sapiens
  CDR3 for alpha chain variable domain of TCR clone 115309 (TRAV12-3, TRAJ53)
CAMSPGSGGSNYKLTF

SEQ ID NO: 230618 - protein, 16 aa, Homo sapiens
  CDR3 for beta chain variable domain of TCR clone 115309 (TRBV4-2, TRBJ1-1)
CASSKAGFGMNTEAFF

SEQ ID NO: 230619 - protein, 13 aa, Homo sapiens
  CDR3 for alpha chain variable domain of TCR clone 115310 (TRAV12-1, TRAJ31)
CVVIPNNNARLMF

SEQ ID NO: 230620 - protein, 16 aa, Homo sapiens
  CDR3 for beta chain variable domain of TCR clone 115310 (TRBV11-2, TRBJ2-1)
CASARGSYSHHNEQFF

SEQ ID NO: 230621 - protein, 12 aa, Homo sapiens
  CDR3 for alpha chain variable domain of TCR clone 115311 (TRAV13-1, TRAJ53)
CAAGGSNYKLPF

SEQ ID NO: 230622 - protein, 11 aa, Homo sapiens
  CDR3 for beta chain variable domain of TCR clone 115311 (TRBV2, TRBJ1-1)
CASREGTEAFF

SEQ ID NO: 230623 - protein, 13 aa, Homo sapiens
  CDR3 for alpha chain variable domain of TCR clone 115312 (TRAV12-3, TRAJ7)
CAMTPYGNNRLAF

SEQ ID NO: 230624 - protein, 16 aa, Homo sapiens
  CDR3 for beta chain variable domain of TCR clone 115312 (TRBV20-1, TRBJ1-4)
CSAIPYGGELNEKLFF

SEQ ID NO: 230625 - protein, 13 aa, Homo sapiens
  CDR3 for alpha chain variable domain of TCR clone 115313 (TRAV12-2, TRAJ13)
CLKKTGGYQKVTF

SEQ ID NO: 230626 - protein, 15 aa, Homo sapiens
  CDR3 for beta chain variable domain of TCR clone 115313 (TRBV27, TRBJ2-1)
CASSNGGGSSNEQFF

SEQ ID NO: 230627 - protein, 14 aa, Homo sapiens
  CDR3 for alpha chain variable domain of TCR clone 115314 (TRAV12-2, TRAJ3)
CAVSLYSSASKIIF

SEQ ID NO: 230628 - protein, 13 aa, Homo sapiens
  CDR3 for beta chain variable domain of TCR clone 115314 (TRBV6-5, TRBJ2-5)
CASSPQGGETQYF

SEQ ID NO: 230629 - protein, 13 aa, Homo sapiens
  CDR3 for alpha chain variable domain of TCR clone 115315 (TRAV8-3, TRAJ47)
CAVGARRGNKLVF

SEQ ID NO: 230630 - protein, 16 aa, Homo sapiens
  CDR3 for beta chain variable domain of TCR clone 115315 (TRBV7-9, TRBJ1-2)
CASSLGFSSGEDGYTF

SEQ ID NO: 230631 - protein, 16 aa, Homo sapiens
  CDR3 for alpha chain variable domain of TCR clone 115316 (TRAV20, TRAJ10)
CAVLRGLTGGGNKLTF

SEQ ID NO: 230632 - protein, 14 aa, Homo sapiens
  CDR3 for beta chain variable domain of TCR clone 115316 (TRBV19, TRBJ1-5)
CASRAPDSFLTQHF

SEQ ID NO: 230633 - protein, 11 aa, Homo sapiens
  CDR3 for alpha chain variable domain of TCR clone 115317 (TRAV12-3, TRAJ43)
CAMSVSNDMRF

SEQ ID NO: 230634 - protein, 13 aa, Homo sapiens
  CDR3 for beta chain variable domain of TCR clone 115317 (TRBV10-2, TRBJ2-7)
CASGASGGYEQYF

SEQ ID NO: 230635 - protein, 16 aa, Homo sapiens
  CDR3 for alpha chain variable domain of TCR clone 115318 (TRAV3, TRAJ37)
CAARVRGSGNTGKLIF

SEQ ID NO: 230636 - protein, 16 aa, Homo sapiens
  CDR3 for beta chain variable domain of TCR clone 115318 (TRBV11-2, TRBJ2-7)
CASSPTTGGVSYEQYF

SEQ ID NO: 230637 - protein, 17 aa, Homo sapiens
  CDR3 for alpha chain variable domain of TCR clone 115319 (TRAV4, TRAJ18)
CLVGERSVGSTLGRLYF

SEQ ID NO: 230638 - protein, 18 aa, Homo sapiens
  CDR3 for beta chain variable domain of TCR clone 115319 (TRBV7-9, TRBJ2-7)
CASSLTTSGSRTWYEQYF

SEQ ID NO: 230639 - protein, 11 aa, Homo sapiens
  CDR3 for alpha chain variable domain of TCR clone 115320 (TRAV1-2, TRAJ40)
CAVPGTYKYIF

SEQ ID NO: 230640 - protein, 13 aa, Homo sapiens
  CDR3 for beta chain variable domain of TCR clone 115320 (TRBV19, TRBJ1-2)
CASSVPGQDGYTF

SEQ ID NO: 230641 - protein, 15 aa, Homo sapiens
  CDR3 for alpha chain variable domain of TCR clone 115321 (TRAV13-2, TRAJ23)
CAERGFYNQGGKRIF

SEQ ID NO: 230642 - protein, 14 aa, Homo sapiens
  CDR3 for beta chain variable domain of TCR clone 115321 (TRBV4-1, TRBJ2-3)
CASSQDWSTDTQYF

SEQ ID NO: 230643 - protein, 14 aa, Homo sapiens
  CDR3 for alpha chain variable domain of TCR clone 115322 (TRAV1-1, TRAJ30)
CAVRSLNRDDKIIF

SEQ ID NO: 230644 - protein, 15 aa, Homo sapiens
  CDR3 for beta chain variable domain of TCR clone 115322 (TRBV5-1, TRBJ2-7)
CASSLNGGPAREQYF

SEQ ID NO: 230645 - protein, 14 aa, Homo sapiens
  CDR3 for alpha chain variable domain of TCR clone 115323 (TRAV38-1, TRAJ40)
CALRPTSGTYKYIF

SEQ ID NO: 230646 - protein, 14 aa, Homo sapiens
  CDR3 for beta chain variable domain of TCR clone 115323 (TRBV25-1, TRBJ1-1)
CASTHLWGNTEAFF

SEQ ID NO: 230647 - protein, 14 aa, Homo sapiens
  CDR3 for alpha chain variable domain of TCR clone 115324 (TRAV27, TRAJ22)
CAGLPSGSARQLTF

SEQ ID NO: 230648 - protein, 15 aa, Homo sapiens
  CDR3 for beta chain variable domain of TCR clone 115324 (TRBV11-3, TRBJ2-3)
CASLKDGREGDTQYF

SEQ ID NO: 230649 - protein, 14 aa, Homo sapiens
  CDR3 for alpha chain variable domain of TCR clone 115325 (TRAV26-1, TRAJ38)
CIADNAGNNRKLIW

SEQ ID NO: 230650 - protein, 14 aa, Homo sapiens
  CDR3 for beta chain variable domain of TCR clone 115325 (TRBV2, TRBJ2-1)
CASSEALIYNEQFF

SEQ ID NO: 230651 - protein, 13 aa, Homo sapiens
  CDR3 for alpha chain variable domain of TCR clone 115326 (TRAV2, TRAJ40)
CAVVTSGTYKYIF

SEQ ID NO: 230652 - protein, 14 aa, Homo sapiens
  CDR3 for beta chain variable domain of TCR clone 115326 (TRBV19, TRBJ2-3)
CASPTFVLSGEQFF

SEQ ID NO: 230653 - protein, 16 aa, Homo sapiens
  CDR3 for alpha chain variable domain of TCR clone 115327 (TRAV12-3, TRAJ53)
CAMSPGSGGSHYKLTF

SEQ ID NO: 230654 - protein, 14 aa, Homo sapiens
  CDR3 for beta chain variable domain of TCR clone 115327 (TRBV4-1, TRBJ2-7)
CASSPVAGGDEQYF

SEQ ID NO: 230655 - protein, 17 aa, Homo sapiens
  CDR3 for alpha chain variable domain of TCR clone 115328 (TRAV13-1, TRAJ52)
CAASSGAGGTSYGKLTF

SEQ ID NO: 230656 - protein, 15 aa, Homo sapiens
  CDR3 for beta chain variable domain of TCR clone 115328 (TRBV2, TRBJ2-1)
CASSELAGSYNERFF

SEQ ID NO: 230657 - protein, 14 aa, Homo sapiens
  CDR3 for alpha chain variable domain of TCR clone 115329 (TRAV26-1, TRAJ21)
CIVRVVYTFNKFYF

SEQ ID NO: 230658 - protein, 11 aa, Homo sapiens
  CDR3 for beta chain variable domain of TCR clone 115329 (TRBV5-6, TRBJ2-5)
CASSLERTQYF

SEQ ID NO: 230659 - protein, 17 aa, Homo sapiens
  CDR3 for alpha chain variable domain of TCR clone 115330 (TRAV26-2, TRAJ37)
CILRELVGSSNTGKLIF

SEQ ID NO: 230660 - protein, 17 aa, Homo sapiens
  CDR3 for beta chain variable domain of TCR clone 115330 (TRBV20-1, TRBJ2-1)
CSARDPLAGVWDNEQFF

SEQ ID NO: 230661 - protein, 11 aa, Homo sapiens
  CDR3 for alpha chain variable domain of TCR clone 115331 (TRAV3, TRAJ49)
CAPITGNQFYF

SEQ ID NO: 230662 - protein, 16 aa, Homo sapiens
  CDR3 for beta chain variable domain of TCR clone 115331 (TRBV5-1, TRBJ2-3)
CASSVFTMSSTDTQYF

SEQ ID NO: 230663 - protein, 12 aa, Homo sapiens
  CDR3 for alpha chain variable domain of TCR clone 115332 (TRAV12-3, TRAJ17)
CAMTLTGNKLTF

SEQ ID NO: 230664 - protein, 14 aa, Homo sapiens
  CDR3 for beta chain variable domain of TCR clone 115332 (TRBV19, TRBJ1-2)
CASSLQGQAYGYTF

SEQ ID NO: 230665 - protein, 18 aa, Homo sapiens
  CDR3 for alpha chain variable domain of TCR clone 115333 (TRAV13-1, TRAJ52)
CAASKRSAGGTSYGKLTF

SEQ ID NO: 230666 - protein, 16 aa, Homo sapiens
  CDR3 for beta chain variable domain of TCR clone 115333 (TRBV5-1, TRBJ2-5)
CASSLTTSLGKETQYF

SEQ ID NO: 230667 - protein, 15 aa, Homo sapiens
  CDR3 for alpha chain variable domain of TCR clone 115334 (TRAV20, TRAJ6)
CAVRLQSGGSYIPTF

SEQ ID NO: 230668 - protein, 14 aa, Homo sapiens
  CDR3 for beta chain variable domain of TCR clone 115334 (TRBV12-4, TRBJ2-7)
CASSASGGWYEQYL

SEQ ID NO: 230669 - protein, 14 aa, Homo sapiens
  CDR3 for alpha chain variable domain of TCR clone 115335 (TRAV8-4, TRAJ8)
CAVSLNTGFQKLVF

SEQ ID NO: 230670 - protein, 13 aa, Homo sapiens
  CDR3 for beta chain variable domain of TCR clone 115335 (TRBV7-9, TRBJ2-3)
CASSPGSTDTQYS

SEQ ID NO: 230671 - protein, 15 aa, Homo sapiens
  CDR3 for alpha chain variable domain of TCR clone 115336 (TRAV12-2, TRAJ53)
CAVNGGGGSNYKLTF

SEQ ID NO: 230672 - protein, 17 aa, Homo sapiens
  CDR3 for beta chain variable domain of TCR clone 115336 (TRBV7-3, TRBJ2-3)
CASSLRKRMRGADTQYF

SEQ ID NO: 230673 - protein, 16 aa, Homo sapiens
  CDR3 for alpha chain variable domain of TCR clone 115337 (TRAV3, TRAJ10)
CAVRDMRAGGGNKLTF

SEQ ID NO: 230674 - protein, 14 aa, Homo sapiens
  CDR3 for beta chain variable domain of TCR clone 115337 (TRBV25-1, TRBJ1-1)
CASTHLGWNTEAFF

SEQ ID NO: 230675 - protein, 14 aa, Homo sapiens
  CDR3 for alpha chain variable domain of TCR clone 115338 (TRAV8-3, TRAJ39)
CAVGATNAGNMLTF

SEQ ID NO: 230676 - protein, 12 aa, Homo sapiens
  CDR3 for beta chain variable domain of TCR clone 115338 (TRBV28, TRBJ1-3)
CASVSSGNTIYF

SEQ ID NO: 230677 - protein, 15 aa, Homo sapiens
  CDR3 for alpha chain variable domain of TCR clone 115339 (TRAV17, TRAJ13)
CATDPGSGGYQKVTF

SEQ ID NO: 230678 - protein, 17 aa, Homo sapiens
  CDR3 for beta chain variable domain of TCR clone 115339 (TRBV11-2, TRBJ2-1)
CASSLYPPGVEYNEQFF

SEQ ID NO: 230679 - protein, 12 aa, Homo sapiens
  CDR3 for alpha chain variable domain of TCR clone 115340 (TRAV13-2, TRAJ23)
CAERHRGGKLIF

SEQ ID NO: 230680 - protein, 16 aa, Homo sapiens
  CDR3 for beta chain variable domain of TCR clone 115340 (TRBV7-2, TRBJ2-6)
CAILSGVSSGANVLTF

SEQ ID NO: 230681 - protein, 18 aa, Homo sapiens
  CDR3 for alpha chain variable domain of TCR clone 115341 (TRAV9-2, TRAJ52)
CALSRHNAGGTSYGKLPF

SEQ ID NO: 230682 - protein, 13 aa, Homo sapiens
  CDR3 for beta chain variable domain of TCR clone 115341 (TRBV7-9, TRBJ1-2)
CASSLKQNYGYTF

SEQ ID NO: 230683 - protein, 16 aa, Homo sapiens
  CDR3 for alpha chain variable domain of TCR clone 115342 (TRAV30, TRAJ24)
CGTEIVDADSWGKFKF

SEQ ID NO: 230684 - protein, 17 aa, Homo sapiens
  CDR3 for beta chain variable domain of TCR clone 115342 (TRBV7-9, TRBJ1-4)
CASSARTGGNEKLFLAV

SEQ ID NO: 230685 - protein, 17 aa, Homo sapiens
  CDR3 for alpha chain variable domain of TCR clone 115343 (TRAV8-6, TRAJ22)
CAVSLYPSSGSARQLTF

SEQ ID NO: 230686 - protein, 14 aa, Homo sapiens
  CDR3 for beta chain variable domain of TCR clone 115343 (TRBV7-2, TRBJ2-7)
CASSPKTSFYEQYF

SEQ ID NO: 230687 - protein, 13 aa, Homo sapiens
  CDR3 for alpha chain variable domain of TCR clone 115344 (TRAV12-2, TRAJ20)
CAVYPSNDYKLSF

SEQ ID NO: 230688 - protein, 15 aa, Homo sapiens
  CDR3 for beta chain variable domain of TCR clone 115344 (TRBV27, TRBJ2-5)
CASSLYPRGGETRYF

SEQ ID NO: 230689 - protein, 14 aa, Homo sapiens
  CDR3 for alpha chain variable domain of TCR clone 115345 (TRAV12-2, TRAJ17)
CAVLFKAAGNKLTF

SEQ ID NO: 230690 - protein, 16 aa, Homo sapiens
  CDR3 for beta chain variable domain of TCR clone 115345 (TRBV11-2, TRBJ1-2)
CASSLDTGGADYGYTF

SEQ ID NO: 230691 - protein, 12 aa, Homo sapiens
  CDR3 for alpha chain variable domain of TCR clone 115346 (TRAV13-1, TRAJ48)
CAANFGNEKLTF

SEQ ID NO: 230692 - protein, 16 aa, Homo sapiens
  CDR3 for beta chain variable domain of TCR clone 115346 (TRBV12-4, TRBJ1-5)
CASSRPVGGSNQPQHF

SEQ ID NO: 230693 - protein, 16 aa, Homo sapiens
  CDR3 for alpha chain variable domain of TCR clone 115347 (TRAV3, TRAJ10)
CAVRDMRAGGGNKLTF

SEQ ID NO: 230694 - protein, 15 aa, Homo sapiens
  CDR3 for beta chain variable domain of TCR clone 115347 (TRBV9, TRBJ1-6)
CASSVAGTGDSTLHF

SEQ ID NO: 230695 - protein, 13 aa, Homo sapiens
  CDR3 for alpha chain variable domain of TCR clone 115348 (TRAV13-1, TRAJ39)
CSKYSNAGNMLTF

SEQ ID NO: 230696 - protein, 16 aa, Homo sapiens
  CDR3 for beta chain variable domain of TCR clone 115348 (TRBV20-1, TRBJ1-4)
FSAPGQGLLTNEKLFF

SEQ ID NO: 230697 - protein, 11 aa, Homo sapiens
  CDR3 for alpha chain variable domain of TCR clone 115349 (TRAV12-2, TRAJ49)
CAVHTGNQFYF

SEQ ID NO: 230698 - protein, 11 aa, Homo sapiens
  CDR3 for beta chain variable domain of TCR clone 115349 (TRBV7-9, TRBJ2-5)
CASSLGETQYF

SEQ ID NO: 230699 - protein, 14 aa, Homo sapiens
  CDR3 for alpha chain variable domain of TCR clone 115350 (TRAV4, TRAJ6)
CLVGEAGGSYITTF

SEQ ID NO: 230700 - protein, 13 aa, Homo sapiens
  CDR3 for beta chain variable domain of TCR clone 115350 (TRBV7-3, TRBJ1-1)
CASSQDWGAEAFF

SEQ ID NO: 230701 - protein, 16 aa, Homo sapiens
  CDR3 for alpha chain variable domain of TCR clone 115351 (TRAV30, TRAJ24)
CGTEIVDADSWGKFRF

SEQ ID NO: 230702 - protein, 12 aa, Homo sapiens
  CDR3 for beta chain variable domain of TCR clone 115351 (TRBV11-2, TRBJ2-2)
CASSLGGGELFF

SEQ ID NO: 230703 - protein, 11 aa, Homo sapiens
  CDR3 for alpha chain variable domain of TCR clone 115352 (TRAV13-2, TRAJ20)
CADSNDYKISF

SEQ ID NO: 230704 - protein, 12 aa, Homo sapiens
  CDR3 for beta chain variable domain of TCR clone 115352 (TRBV11-2, TRBJ2-2)
CASSLGGGELFF

SEQ ID NO: 230705 - protein, 14 aa, Homo sapiens
  CDR3 for alpha chain variable domain of TCR clone 115353 (TRAV13-1, TRAJ35)
CAASKGGFGNVPHC

SEQ ID NO: 230706 - protein, 14 aa, Homo sapiens
  CDR3 for beta chain variable domain of TCR clone 115353 (TRBV7-2, TRBJ2-7)
CASSPKTSFYEQYF

SEQ ID NO: 230707 - protein, 23 aa, Homo sapiens
  CDR3 for alpha chain variable domain of TCR clone 115354 (TRAV26-1, TRAJ38)
CIADNAGNNHIQNPHPAVYQLRD

SEQ ID NO: 230708 - protein, 13 aa, Homo sapiens
  CDR3 for beta chain variable domain of TCR clone 115354 (TRBV20-1, TRBJ1-1)
CSARGGGNTEAFF

SEQ ID NO: 230709 - protein, 18 aa, Homo sapiens
  CDR3 for alpha chain variable domain of TCR clone 115355 (TRAV26-1, TRAJ22)
CIVRVALISSGSARQLTF

SEQ ID NO: 230710 - protein, 14 aa, Homo sapiens
  CDR3 for beta chain variable domain of TCR clone 115355 (TRBV7-6, TRBJ2-3)
CASSLGTVTDTQYF

SEQ ID NO: 230711 - protein, 16 aa, Homo sapiens
  CDR3 for alpha chain variable domain of TCR clone 115356 (TRAV3, TRAJ23)
CAVKIGIYNQGAKLIF

SEQ ID NO: 230712 - protein, 17 aa, Homo sapiens
  CDR3 for beta chain variable domain of TCR clone 115356 (TRBV10-3, TRBJ2-6)
CAISESTAPSGANVLTF

SEQ ID NO: 230713 - protein, 12 aa, Homo sapiens
  CDR3 for alpha chain variable domain of TCR clone 115357 (TRAV13-1, TRAJ53)
AASGGSNYKLTF

SEQ ID NO: 230714 - protein, 13 aa, Homo sapiens
  CDR3 for beta chain variable domain of TCR clone 115357 (TRBV4-1, TRBJ2-2)
CASSQENTGELFF

SEQ ID NO: 230715 - protein, 15 aa, Homo sapiens
  CDR3 for alpha chain variable domain of TCR clone 115358 (TRAV8-3, TRAJ41)
CAVGSNSNSGYALHF

SEQ ID NO: 230716 - protein, 17 aa, Homo sapiens
  CDR3 for beta chain variable domain of TCR clone 115358 (TRBV25-1, TRBJ2-1)
CASSAYGQGRGVYEQFF

SEQ ID NO: 230717 - protein, 15 aa, Homo sapiens
  CDR3 for alpha chain variable domain of TCR clone 115359 (TRAV27, TRAJ38)
CAARRNAGNNRKLIW

SEQ ID NO: 230718 - protein, 11 aa, Homo sapiens
  CDR3 for beta chain variable domain of TCR clone 115359 (TRBV29-1, TRBJ2-5)
CSEDRTGTQYF

SEQ ID NO: 230719 - protein, 14 aa, Homo sapiens
  CDR3 for alpha chain variable domain of TCR clone 115360 (TRAV12-2, TRAJ40)
CAVKIPSGTYKYII

SEQ ID NO: 230720 - protein, 14 aa, Homo sapiens
  CDR3 for beta chain variable domain of TCR clone 115360 (TRBV20-1, TRBJ1-1)
CSAQTRIGGTEAFF

SEQ ID NO: 230721 - protein, 14 aa, Homo sapiens
  CDR3 for alpha chain variable domain of TCR clone 115361 (TRAV13-1, TRAJ44)
CAAKATGTASKLTF

SEQ ID NO: 230722 - protein, 17 aa, Homo sapiens
  CDR3 for beta chain variable domain of TCR clone 115361 (TRBV7-3, TRBJ2-3)
FASSLMKRMRGADTRYF

SEQ ID NO: 230723 - protein, 16 aa, Homo sapiens
  CDR3 for alpha chain variable domain of TCR clone 115362 (TRAV3, TRAJ37)
CAVRGKGSGNTGKLIF

SEQ ID NO: 230724 - protein, 14 aa, Homo sapiens
  CDR3 for beta chain variable domain of TCR clone 115362 (TRBV28, TRBJ2-1)
CASSLVAPYNEQFF

SEQ ID NO: 230725 - protein, 14 aa, Homo sapiens
  CDR3 for alpha chain variable domain of TCR clone 115363 (TRAV1-2, TRAJ16)
CAVNRFSDGQKLLF

SEQ ID NO: 230726 - protein, 15 aa, Homo sapiens
  CDR3 for beta chain variable domain of TCR clone 115363 (TRBV20-1, TRBJ2-7)
CSARDRVSGIDEQYF

SEQ ID NO: 230727 - protein, 14 aa, Homo sapiens
  CDR3 for alpha chain variable domain of TCR clone 115364 (TRAV2, TRAJ37)
CAVDFTSYTGKLIF

SEQ ID NO: 230728 - protein, 15 aa, Homo sapiens
  CDR3 for beta chain variable domain of TCR clone 115364 (TRBV20-1, TRBJ1-1)
CSASRGVTGNTEAFF

SEQ ID NO: 230729 - protein, 15 aa, Homo sapiens
  CDR3 for alpha chain variable domain of TCR clone 115365 (TRAV12-2, TRAJ53)
CAVNGGGGSNYKLTF

SEQ ID NO: 230730 - protein, 14 aa, Homo sapiens
  CDR3 for beta chain variable domain of TCR clone 115365 (TRBV18, TRBJ2-7)
CASSPRGRAYEQYF

SEQ ID NO: 230731 - protein, 15 aa, Homo sapiens
  CDR3 for alpha chain variable domain of TCR clone 115366 (TRAV12-3, TRAJ6)
CAMSATTGGSYIPTL

SEQ ID NO: 230732 - protein, 13 aa, Homo sapiens
  CDR3 for beta chain variable domain of TCR clone 115366 (TRBV7-9, TRBJ1-2)
CASSLKQNYGYTF

SEQ ID NO: 230733 - protein, 17 aa, Homo sapiens
  CDR3 for alpha chain variable domain of TCR clone 115367 (TRAV13-1, TRAJ52)
CSKKPQCCGTSYGKLTF

SEQ ID NO: 230734 - protein, 15 aa, Homo sapiens
  CDR3 for beta chain variable domain of TCR clone 115367 (TRBV6-1, TRBJ2-3)
CASSERGGITDTQYF

SEQ ID NO: 230735 - protein, 14 aa, Homo sapiens
  CDR3 for alpha chain variable domain of TCR clone 115368 (TRAV23/DV6, TRAJ13)
CAASETGGYQKVTF

SEQ ID NO: 230736 - protein, 16 aa, Homo sapiens
  CDR3 for beta chain variable domain of TCR clone 115368 (TRBV5-1, TRBJ1-3)
CASSPWAPSSGNTIYF

SEQ ID NO: 230737 - protein, 12 aa, Homo sapiens
  CDR3 for alpha chain variable domain of TCR clone 115369 (TRAV20, TRAJ20)
CAVRFNDYKLSF

SEQ ID NO: 230738 - protein, 14 aa, Homo sapiens
  CDR3 for beta chain variable domain of TCR clone 115369 (TRBV18, TRBJ2-7)
CASSPRGGAYEQYF

SEQ ID NO: 230739 - protein, 17 aa, Homo sapiens
  CDR3 for alpha chain variable domain of TCR clone 115370 (TRAV26-1, TRAJ27)
CIVSTPWIHTNAGKSTF

SEQ ID NO: 230740 - protein, 16 aa, Homo sapiens
  CDR3 for beta chain variable domain of TCR clone 115370 (TRBV7-9, TRBJ2-1)
CASSLDPGLAIDEQFF

SEQ ID NO: 230741 - protein, 13 aa, Homo sapiens
  CDR3 for alpha chain variable domain of TCR clone 115371 (TRAV39, TRAJ58)
CAGEETSGSRLTF

SEQ ID NO: 230742 - protein, 13 aa, Homo sapiens
  CDR3 for beta chain variable domain of TCR clone 115371 (TRBV4-1, TRBJ1-1)
CASSRKMNTEAFF

SEQ ID NO: 230743 - protein, 15 aa, Homo sapiens
  CDR3 for alpha chain variable domain of TCR clone 115372 (TRAV2, TRAJ28)
CAVPYSGAGSYQLTF

SEQ ID NO: 230744 - protein, 15 aa, Homo sapiens
  CDR3 for beta chain variable domain of TCR clone 115372 (TRBV28, TRBJ2-7)
CASSPGGRGFYEQYF

SEQ ID NO: 230745 - protein, 14 aa, Homo sapiens
  CDR3 for alpha chain variable domain of TCR clone 115373 (TRAV1-2, TRAJ13)
CAVKHSGGYQKVTF

SEQ ID NO: 230746 - protein, 12 aa, Homo sapiens
  CDR3 for beta chain variable domain of TCR clone 115373 (TRBV7-3, TRBJ2-5)
CASSSPGGTQHF

SEQ ID NO: 230747 - protein, 17 aa, Homo sapiens
  CDR3 for alpha chain variable domain of TCR clone 115374 (TRAV13-2, TRAJ42)
CAEKGKNCGGSQGNLIF

SEQ ID NO: 230748 - protein, 16 aa, Homo sapiens
  CDR3 for beta chain variable domain of TCR clone 115374 (TRBV7-9, TRBJ2-1)
CASSLGTGWDYNEQFF

SEQ ID NO: 230749 - protein, 16 aa, Homo sapiens
  CDR3 for alpha chain variable domain of TCR clone 115375 (TRAV17, TRAJ28)
CATASVSGAGSYQLTF

SEQ ID NO: 230750 - protein, 13 aa, Homo sapiens
  CDR3 for beta chain variable domain of TCR clone 115375 (TRBV7-9, TRBJ1-2)
CASSLKQNYGYTF

SEQ ID NO: 230751 - protein, 14 aa, Homo sapiens
  CDR3 for alpha chain variable domain of TCR clone 115376 (TRAV27, TRAJ33)
CRSGSRDSNYQLIW

SEQ ID NO: 230752 - protein, 13 aa, Homo sapiens
  CDR3 for beta chain variable domain of TCR clone 115376 (TRBV7-9, TRBJ1-2)
CASSLKQNYGYTF

SEQ ID NO: 230753 - protein, 18 aa, Homo sapiens
  CDR3 for alpha chain variable domain of TCR clone 115377 (TRAV12-3, TRAJ52)
CAMSVGGAGGTSYGKLTF

SEQ ID NO: 230754 - protein, 16 aa, Homo sapiens
  CDR3 for beta chain variable domain of TCR clone 115377 (TRBV19, TRBJ2-1)
CASRTSSGSIVNEQFF

SEQ ID NO: 230755 - protein, 12 aa, Homo sapiens
  CDR3 for alpha chain variable domain of TCR clone 115378 (TRAV12-2, TRAJ45)
CASGGGADVLTF

SEQ ID NO: 230756 - protein, 16 aa, Homo sapiens
  CDR3 for beta chain variable domain of TCR clone 115378 (TRBV19, TRBJ2-3)
CASSPGLLASTDTQYF

SEQ ID NO: 230757 - protein, 11 aa, Homo sapiens
  CDR3 for alpha chain variable domain of TCR clone 115379 (TRAV23/DV6, TRAJ43)
CAASSGNDMSF

SEQ ID NO: 230758 - protein, 14 aa, Homo sapiens
  CDR3 for beta chain variable domain of TCR clone 115379 (TRBV4-1, TRBJ1-2)
CASSQDPLPYGYTF

SEQ ID NO: 230759 - protein, 14 aa, Homo sapiens
  CDR3 for alpha chain variable domain of TCR clone 115380 (TRAV12-2, TRAJ13)
CAVKKTGGYQKFTF

SEQ ID NO: 230760 - protein, 12 aa, Homo sapiens
  CDR3 for beta chain variable domain of TCR clone 115380 (TRBV29-1, TRBJ1-1)
CSESDGNTEAFF

SEQ ID NO: 230761 - protein, 11 aa, Homo sapiens
  CDR3 for alpha chain variable domain of TCR clone 115381 (TRAV12-3, TRAJ27)
CAMANAGKSTF

SEQ ID NO: 230762 - protein, 16 aa, Homo sapiens
  CDR3 for beta chain variable domain of TCR clone 115381 (TRBV12-4, TRBJ1-5)
CASSRPVGGSNQPQHF

SEQ ID NO: 230763 - protein, 14 aa, Homo sapiens
  CDR3 for alpha chain variable domain of TCR clone 115382 (TRAV12-3, TRAJ10)
SHLPLTGGGNKLTF

SEQ ID NO: 230764 - protein, 13 aa, Homo sapiens
  CDR3 for beta chain variable domain of TCR clone 115382 (TRBV2, TRBJ2-7)
CASTGGSSYEQYF

SEQ ID NO: 230765 - protein, 14 aa, Homo sapiens
  CDR3 for alpha chain variable domain of TCR clone 115383 (TRAV12-3, TRAJ42)
CAMNYGGSQGNLIF

SEQ ID NO: 230766 - protein, 15 aa, Homo sapiens
  CDR3 for beta chain variable domain of TCR clone 115383 (TRBV7-8, TRBJ2-1)
RASSLADSLYNEQFF

SEQ ID NO: 230767 - protein, 17 aa, Homo sapiens
  CDR3 for alpha chain variable domain of TCR clone 115384 (TRAV23/DV6, TRAJ58)
CAARLLRGETSGSRLTF

SEQ ID NO: 230768 - protein, 12 aa, Homo sapiens
  CDR3 for beta chain variable domain of TCR clone 115384 (TRBV6-3, TRBJ2-7)
CASSLTPYEQYF

SEQ ID NO: 230769 - protein, 16 aa, Homo sapiens
  CDR3 for alpha chain variable domain of TCR clone 115385 (TRAV3, TRAJ10)
CAVRDMRAGGGHKLTF

SEQ ID NO: 230770 - protein, 14 aa, Homo sapiens
  CDR3 for beta chain variable domain of TCR clone 115385 (TRBV25-1, TRBJ1-1)
CASTHLGGNTEAFF

SEQ ID NO: 230771 - protein, 17 aa, Homo sapiens
  CDR3 for alpha chain variable domain of TCR clone 115386 (TRAV21, TRAJ52)
CCEPSPAGGTSYGKLTF

SEQ ID NO: 230772 - protein, 17 aa, Homo sapiens
  CDR3 for beta chain variable domain of TCR clone 115386 (TRBV13, TRBJ2-3)
CASSLSRVAGGRNTQYF

SEQ ID NO: 230773 - protein, 16 aa, Homo sapiens
  CDR3 for alpha chain variable domain of TCR clone 115387 (TRAV2, TRAJ4)
CAVEDRFSGGYNMLIF

SEQ ID NO: 230774 - protein, 13 aa, Homo sapiens
  CDR3 for beta chain variable domain of TCR clone 115387 (TRBV7-7, TRBJ2-5)
CASSRSGQETQYF

SEQ ID NO: 230775 - protein, 17 aa, Homo sapiens
  CDR3 for alpha chain variable domain of TCR clone 115388 (TRAV8-6, TRAJ58)
CAVSSWVGETSGSRLTF

SEQ ID NO: 230776 - protein, 13 aa, Homo sapiens
  CDR3 for beta chain variable domain of TCR clone 115388 (TRBV11-2, TRBJ1-1)
CASSLGNGAEAFF

SEQ ID NO: 230777 - protein, 13 aa, Homo sapiens
  CDR3 for alpha chain variable domain of TCR clone 115389 (TRAV16, TRAJ9)
CALRDTGGFKTIF

SEQ ID NO: 230778 - protein, 16 aa, Homo sapiens
  CDR3 for beta chain variable domain of TCR clone 115389 (TRBV5-1, TRBJ1-3)
CASSRSGEDSGNTIYF

SEQ ID NO: 230779 - protein, 15 aa, Homo sapiens
  CDR3 for alpha chain variable domain of TCR clone 115390 (TRAV12-3, TRAJ6)
CAISATTGGSYIPTF

SEQ ID NO: 230780 - protein, 17 aa, Homo sapiens
  CDR3 for beta chain variable domain of TCR clone 115390 (TRBV13, TRBJ2-3)
CASSLSRVAGGRNTQYF

SEQ ID NO: 230781 - protein, 15 aa, Homo sapiens
  CDR3 for alpha chain variable domain of TCR clone 115391 (TRAV17, TRAJ4)
CATGTWSGGYNKLIF

SEQ ID NO: 230782 - protein, 15 aa, Homo sapiens
  CDR3 for beta chain variable domain of TCR clone 115391 (TRBV7-9, TRBJ2-2)
CASGPLDTFPGELFF

SEQ ID NO: 230783 - protein, 10 aa, Homo sapiens
  CDR3 for alpha chain variable domain of TCR clone 115392 (TRAV21, TRAJ43)
CAVRIGDMRF

SEQ ID NO: 230784 - protein, 12 aa, Homo sapiens
  CDR3 for beta chain variable domain of TCR clone 115392 (TRBV20-1, TRBJ2-7)
QCSGTSDYEQYF

SEQ ID NO: 230785 - protein, 14 aa, Homo sapiens
  CDR3 for alpha chain variable domain of TCR clone 115393 (TRAV12-2, TRAJ13)
CAVKKTGGYQKVTF

SEQ ID NO: 230786 - protein, 14 aa, Homo sapiens
  CDR3 for beta chain variable domain of TCR clone 115393 (TRBV18, TRBJ2-5)
CASSPPGHQETQYF

SEQ ID NO: 230787 - protein, 14 aa, Homo sapiens
  CDR3 for alpha chain variable domain of TCR clone 115394 (TRAV26-2, TRAJ31)
CILIPGNNNARLMF

SEQ ID NO: 230788 - protein, 16 aa, Homo sapiens
  CDR3 for beta chain variable domain of TCR clone 115394 (TRBV7-3, TRBJ2-1)
CASSVVSGSSNNEQFF

SEQ ID NO: 230789 - protein, 15 aa, Homo sapiens
  CDR3 for alpha chain variable domain of TCR clone 115395 (TRAV3, TRAJ4)
CAVRDGTGGYNKLIF

SEQ ID NO: 230790 - protein, 16 aa, Homo sapiens
  CDR3 for beta chain variable domain of TCR clone 115395 (TRBV27, TRBJ2-2)
CASSSSRVSNTGELFF

SEQ ID NO: 230791 - protein, 14 aa, Homo sapiens
  CDR3 for alpha chain variable domain of TCR clone 115396 (TRAV3, TRAJ8)
CAVSLNTGFQKFVF

SEQ ID NO: 230792 - protein, 14 aa, Homo sapiens
  CDR3 for beta chain variable domain of TCR clone 115396 (TRBV6-6, TRBJ1-5)
CASVDSGFNQPQHF

SEQ ID NO: 230793 - protein, 16 aa, Homo sapiens
  CDR3 for alpha chain variable domain of TCR clone 115397 (TRAV30, TRAJ24)
CGTEIVDADSWGKFQF

SEQ ID NO: 230794 - protein, 15 aa, Homo sapiens
  CDR3 for beta chain variable domain of TCR clone 115397 (TRBV7-9, TRBJ1-4)
CASSARTGGNKKLFF

SEQ ID NO: 230795 - protein, 12 aa, Homo sapiens
  CDR3 for alpha chain variable domain of TCR clone 115398 (TRAV2, TRAJ5)
CALDTGRRSLTF

SEQ ID NO: 230796 - protein, 15 aa, Homo sapiens
  CDR3 for beta chain variable domain of TCR clone 115398 (TRBV10-3, TRBJ2-1)
CAISDVQDRAYEQFF

SEQ ID NO: 230797 - protein, 11 aa, Homo sapiens
  CDR3 for alpha chain variable domain of TCR clone 115399 (TRAV1-2, TRAJ20)
CAVSNDYKLSF

SEQ ID NO: 230798 - protein, 16 aa, Homo sapiens
  CDR3 for beta chain variable domain of TCR clone 115399 (TRBV29-1, TRBJ2-6)
CSVEDIPYSGANVLTF

SEQ ID NO: 230799 - protein, 12 aa, Homo sapiens
  CDR3 for alpha chain variable domain of TCR clone 115400 (TRAV1-2, TRAJ33)
CAALDSNYQLIW

SEQ ID NO: 230800 - protein, 14 aa, Homo sapiens
  CDR3 for beta chain variable domain of TCR clone 115400 (TRBV7-2, TRBJ2-5)
CASSPRGSSETQYF

SEQ ID NO: 230801 - protein, 19 aa, Homo sapiens
  CDR3 for alpha chain variable domain of TCR clone 115401 (TRAV3, TRAJ6)
CAVRDGPREEEATYLHLEE

SEQ ID NO: 230802 - protein, 14 aa, Homo sapiens
  CDR3 for beta chain variable domain of TCR clone 115401 (TRBV7-2, TRBJ2-7)
CASSPKTSFYEQYF

SEQ ID NO: 230803 - protein, 14 aa, Homo sapiens
  CDR3 for alpha chain variable domain of TCR clone 115402 (TRAV1-2, TRAJ16)
CAVNRFSAGQKLLF

SEQ ID NO: 230804 - protein, 16 aa, Homo sapiens
  CDR3 for beta chain variable domain of TCR clone 115402 (TRBV29-1, TRBJ2-7)
CSVEVVGTSGSYEQYF

SEQ ID NO: 230805 - protein, 14 aa, Homo sapiens
  CDR3 for alpha chain variable domain of TCR clone 115403 (TRAV1-1, TRAJ27)
CVVIYNTNAGKSTF

SEQ ID NO: 230806 - protein, 15 aa, Homo sapiens
  CDR3 for beta chain variable domain of TCR clone 115403 (TRBV7-2, TRBJ2-1)
CASSSGLAGGNEQFF

SEQ ID NO: 230807 - protein, 13 aa, Homo sapiens
  CDR3 for alpha chain variable domain of TCR clone 115404 (TRAV1-1, TRAJ31)
CASYLNNNARLMF

SEQ ID NO: 230808 - protein, 13 aa, Homo sapiens
  CDR3 for beta chain variable domain of TCR clone 115404 (TRBV15, TRBJ1-6)
CATSGGLKSPLHF

SEQ ID NO: 230809 - protein, 15 aa, Homo sapiens
  CDR3 for alpha chain variable domain of TCR clone 115405 (TRAV12-1, TRAJ4)
CVVNGFSGGYNKLIF

SEQ ID NO: 230810 - protein, 14 aa, Homo sapiens
  CDR3 for beta chain variable domain of TCR clone 115405 (TRBV19, TRBJ2-5)
CASSMTGQQETQYF

SEQ ID NO: 230811 - protein, 14 aa, Homo sapiens
  CDR3 for alpha chain variable domain of TCR clone 115406 (TRAV12-1, TRAJ17)
CVVNYKAAGNKLTF

SEQ ID NO: 230812 - protein, 13 aa, Homo sapiens
  CDR3 for beta chain variable domain of TCR clone 115406 (TRBV18, TRBJ1-1)
CASSPNGDTEAFF

SEQ ID NO: 230813 - protein, 17 aa, Homo sapiens
  CDR3 for alpha chain variable domain of TCR clone 115407 (TRAV14/DV4, TRAJ4)
CAMREASGRGGYNKLIF

SEQ ID NO: 230814 - protein, 14 aa, Homo sapiens
  CDR3 for beta chain variable domain of TCR clone 115407 (TRBV19, TRBJ2-7)
CASSMGQGAIEEYF

SEQ ID NO: 230815 - protein, 14 aa, Homo sapiens
  CDR3 for alpha chain variable domain of TCR clone 115408 (TRAV27, TRAJ23)
PHLGAKDQGGKLIF

SEQ ID NO: 230816 - protein, 12 aa, Homo sapiens
  CDR3 for beta chain variable domain of TCR clone 115408 (TRBV25-1, TRBJ2-5)
CASSQAWETQYF

SEQ ID NO: 230817 - protein, 15 aa, Homo sapiens
  CDR3 for alpha chain variable domain of TCR clone 115409 (TRAV14/DV4, TRAJ26)
CAMREGQNYSQNFVF

SEQ ID NO: 230818 - protein, 13 aa, Homo sapiens
  CDR3 for beta chain variable domain of TCR clone 115409 (TRBV24-1, TRBJ2-2)
CATSDWSTGELFF

SEQ ID NO: 230819 - protein, 14 aa, Homo sapiens
  CDR3 for alpha chain variable domain of TCR clone 115410 (TRAV4, TRAJ43)
CLVGPMYNNNDMRF

SEQ ID NO: 230820 - protein, 21 aa, Homo sapiens
  CDR3 for beta chain variable domain of TCR clone 115410 (TRBV11-1, TRBJ2-1)
CASSARERLRPEGPSYDEQFF

SEQ ID NO: 230821 - protein, 15 aa, Homo sapiens
  CDR3 for alpha chain variable domain of TCR clone 115411 (TRAV13-2, TRAJ45)
CAEHHSGGGADGLTF

SEQ ID NO: 230822 - protein, 15 aa, Homo sapiens
  CDR3 for beta chain variable domain of TCR clone 115411 (TRBV7-2, TRBJ2-7)
CASSLALGSAYGQYF

SEQ ID NO: 230823 - protein, 15 aa, Homo sapiens
  CDR3 for alpha chain variable domain of TCR clone 115412 (TRAV26-1, TRAJ22)
CIVRVSFGFCKATDL

SEQ ID NO: 230824 - protein, 13 aa, Homo sapiens
  CDR3 for beta chain variable domain of TCR clone 115412 (TRBV7-9, TRBJ1-2)
CASSLKQNYGYTF

SEQ ID NO: 230825 - protein, 16 aa, Homo sapiens
  CDR3 for alpha chain variable domain of TCR clone 115413 (TRAV30, TRAJ24)
CGTEIVDADSWGEFQF

SEQ ID NO: 230826 - protein, 18 aa, Homo sapiens
  CDR3 for beta chain variable domain of TCR clone 115413 (TRBV11-2, TRBJ2-3)
CASSLGGASRGAPNTQYF

SEQ ID NO: 230827 - protein, 17 aa, Homo sapiens
  CDR3 for alpha chain variable domain of TCR clone 115414 (TRAV13-1, TRAJ28)
CAASPPYSGAGSYQLTF

SEQ ID NO: 230828 - protein, 15 aa, Homo sapiens
  CDR3 for beta chain variable domain of TCR clone 115414 (TRBV6-3, TRBJ2-2)
CASSFLATLTGELFS

SEQ ID NO: 230829 - protein, 14 aa, Homo sapiens
  CDR3 for alpha chain variable domain of TCR clone 115415 (TRAV3, TRAJ7)
CAVREEGREQQTRF

SEQ ID NO: 230830 - protein, 15 aa, Homo sapiens
  CDR3 for beta chain variable domain of TCR clone 115415 (TRBV20-1, TRBJ1-5)
CSAFKNGQRNQPQHF

SEQ ID NO: 230831 - protein, 13 aa, Homo sapiens
  CDR3 for alpha chain variable domain of TCR clone 115416 (TRAV19, TRAJ57)
CALLQGGSEKLVF

SEQ ID NO: 230832 - protein, 14 aa, Homo sapiens
  CDR3 for beta chain variable domain of TCR clone 115416 (TRBV7-2, TRBJ2-7)
CASRSQGAAYEQYF

SEQ ID NO: 230833 - protein, 16 aa, Homo sapiens
  CDR3 for alpha chain variable domain of TCR clone 115417 (TRAV30, TRAJ48)
CGTEIKSNFGNEKLTF

SEQ ID NO: 230834 - protein, 17 aa, Homo sapiens
  CDR3 for beta chain variable domain of TCR clone 115417 (TRBV27, TRBJ2-1)
CASSSERGGQSADEKFF

SEQ ID NO: 230835 - protein, 17 aa, Homo sapiens
  CDR3 for alpha chain variable domain of TCR clone 115418 (TRAV26-1, TRAJ53)
CIVRVDDSGGSNYKLKF

SEQ ID NO: 230836 - protein, 15 aa, Homo sapiens
  CDR3 for beta chain variable domain of TCR clone 115418 (TRBV11-2, TRBJ2-2)
CASSSDRVNAGELFF

SEQ ID NO: 230837 - protein, 13 aa, Homo sapiens
  CDR3 for alpha chain variable domain of TCR clone 115419 (TRAV8-3, TRAJ20)
CAVGRPNEYKLSF

SEQ ID NO: 230838 - protein, 14 aa, Homo sapiens
  CDR3 for beta chain variable domain of TCR clone 115419 (TRBV12-5, TRBJ2-5)
CASGSRTHQETQYF

SEQ ID NO: 230839 - protein, 13 aa, Homo sapiens
  CDR3 for alpha chain variable domain of TCR clone 115420 (TRAV1-2, TRAJ9)
CAALNTGGFKTIF

SEQ ID NO: 230840 - protein, 13 aa, Homo sapiens
  CDR3 for beta chain variable domain of TCR clone 115420 (TRBV28, TRBJ2-5)
CASSFAGGETQYF

SEQ ID NO: 230841 - protein, 13 aa, Homo sapiens
  CDR3 for alpha chain variable domain of TCR clone 115421 (TRAV12-3, TRAJ56)
CALATGANSKLRF

SEQ ID NO: 230842 - protein, 12 aa, Homo sapiens
  CDR3 for beta chain variable domain of TCR clone 115421 (TRBV10-2, TRBJ2-3)
CASSPESDTQYF

SEQ ID NO: 230843 - protein, 11 aa, Homo sapiens
  CDR3 for alpha chain variable domain of TCR clone 115422 (TRAV12-2, TRAJ39)
CAVNNMLTFGG

SEQ ID NO: 230844 - protein, 15 aa, Homo sapiens
  CDR3 for beta chain variable domain of TCR clone 115422 (TRBV19, TRBJ1-2)
CASSVGQVLNYGYTF

SEQ ID NO: 230845 - protein, 15 aa, Homo sapiens
  CDR3 for alpha chain variable domain of TCR clone 115423 (TRAV8-3, TRAJ45)
CASSYSGGGADGLTF

SEQ ID NO: 230846 - protein, 15 aa, Homo sapiens
  CDR3 for beta chain variable domain of TCR clone 115423 (TRBV20-1, TRBJ2-7)
CSARDRVAGMDEQYF

SEQ ID NO: 230847 - protein, 11 aa, Homo sapiens
  CDR3 for alpha chain variable domain of TCR clone 115424 (TRAV12-3, TRAJ43)
CAMSVSNDTRF

SEQ ID NO: 230848 - protein, 14 aa, Homo sapiens
  CDR3 for beta chain variable domain of TCR clone 115424 (TRBV12-5, TRBJ2-5)
CASGSRTHQETQYF

SEQ ID NO: 230849 - protein, 13 aa, Homo sapiens
  CDR3 for alpha chain variable domain of TCR clone 115425 (TRAV13-1, TRAJ39)
CSKYSNAGNMLTF

SEQ ID NO: 230850 - protein, 13 aa, Homo sapiens
  CDR3 for beta chain variable domain of TCR clone 115425 (TRBV27, TRBJ1-1)
CASSLSIGAEAFF

SEQ ID NO: 230851 - protein, 15 aa, Homo sapiens
  CDR3 for alpha chain variable domain of TCR clone 115426 (TRAV8-4, TRAJ10)
CAVSDGPGGGNKLTF

SEQ ID NO: 230852 - protein, 13 aa, Homo sapiens
  CDR3 for beta chain variable domain of TCR clone 115426 (TRBV28, TRBJ1-3)
CASSFLGSGTIHF

SEQ ID NO: 230853 - protein, 19 aa, Homo sapiens
  CDR3 for alpha chain variable domain of TCR clone 115427 (TRAV16, TRAJ26)
CALTRWSEFCLWSRNQIVR

SEQ ID NO: 230854 - protein, 13 aa, Homo sapiens
  CDR3 for beta chain variable domain of TCR clone 115427 (TRBV4-1, TRBJ2-2)
CASSQENTGELFF

SEQ ID NO: 230855 - protein, 10 aa, Homo sapiens
  CDR3 for alpha chain variable domain of TCR clone 115428 (TRAV3, TRAJ30)
CSVREIEIIF

SEQ ID NO: 230856 - protein, 14 aa, Homo sapiens
  CDR3 for beta chain variable domain of TCR clone 115428 (TRBV15, TRBJ2-3)
CATRSGTSTDTQYF

SEQ ID NO: 230857 - protein, 16 aa, Homo sapiens
  CDR3 for alpha chain variable domain of TCR clone 115429 (TRAV30, TRAJ24)
CGTEIVDADSWGKFQL

SEQ ID NO: 230858 - protein, 14 aa, Homo sapiens
  CDR3 for beta chain variable domain of TCR clone 115429 (TRBV13, TRBJ2-1)
CASSPRPRYNEQFF

SEQ ID NO: 230859 - protein, 17 aa, Homo sapiens
  CDR3 for alpha chain variable domain of TCR clone 115430 (TRAV8-6, TRAJ8)
CAVKEGIENTGFQKLVF

SEQ ID NO: 230860 - protein, 12 aa, Homo sapiens
  CDR3 for beta chain variable domain of TCR clone 115430 (TRBV19, TRBJ1-4)
CASKDWPGGLSF

SEQ ID NO: 230861 - protein, 14 aa, Homo sapiens
  CDR3 for alpha chain variable domain of TCR clone 115431 (TRAV23/DV6, TRAJ4)
CAANLSGGYNKLIF

SEQ ID NO: 230862 - protein, 17 aa, Homo sapiens
  CDR3 for beta chain variable domain of TCR clone 115431 (TRBV4-1, TRBJ1-3)
CASSPQRGIRFGNTIYL

SEQ ID NO: 230863 - protein, 10 aa, Homo sapiens
  CDR3 for alpha chain variable domain of TCR clone 115432 (TRAV26-1, TRAJ22)
CIAGSRQLTF

SEQ ID NO: 230864 - protein, 15 aa, Homo sapiens
  CDR3 for beta chain variable domain of TCR clone 115432 (TRBV12-4, TRBJ2-5)
CASSPPTGLQETQYF

SEQ ID NO: 230865 - protein, 15 aa, Homo sapiens
  CDR3 for alpha chain variable domain of TCR clone 115433 (TRAV27, TRAJ38)
CAARRNAGNTRKLIW

SEQ ID NO: 230866 - protein, 13 aa, Homo sapiens
  CDR3 for beta chain variable domain of TCR clone 115433 (TRBV12-5, TRBJ2-3)
CASGDRQSDTHYF

SEQ ID NO: 230867 - protein, 15 aa, Homo sapiens
  CDR3 for alpha chain variable domain of TCR clone 115434 (TRAV17, TRAJ42)
CATDNYGGSQGNLIF

SEQ ID NO: 230868 - protein, 14 aa, Homo sapiens
  CDR3 for beta chain variable domain of TCR clone 115434 (TRBV19, TRBJ2-5)
CASSIEHSQETQYF

SEQ ID NO: 230869 - protein, 15 aa, Homo sapiens
  CDR3 for alpha chain variable domain of TCR clone 115435 (TRAV8-3, TRAJ11)
CAVGLLNSGYSTLTF

SEQ ID NO: 230870 - protein, 13 aa, Homo sapiens
  CDR3 for beta chain variable domain of TCR clone 115435 (TRBV2, TRBJ1-6)
CASGRGGISPLHF

SEQ ID NO: 230871 - protein, 14 aa, Homo sapiens
  CDR3 for alpha chain variable domain of TCR clone 115436 (TRAV12-3, TRAJ56)
CAMSVTGANSKLTF

SEQ ID NO: 230872 - protein, 16 aa, Homo sapiens
  CDR3 for beta chain variable domain of TCR clone 115436 (TRBV13, TRBJ2-2)
CASSPRTGEHTGELFF

SEQ ID NO: 230873 - protein, 13 aa, Homo sapiens
  CDR3 for alpha chain variable domain of TCR clone 115437 (TRAV8-3, TRAJ6)
CAARRGGSYIPTF

SEQ ID NO: 230874 - protein, 15 aa, Homo sapiens
  CDR3 for beta chain variable domain of TCR clone 115437 (TRBV4-1, TRBJ2-3)
CARSNLAGGRDTQYF

SEQ ID NO: 230875 - protein, 13 aa, Homo sapiens
  CDR3 for alpha chain variable domain of TCR clone 115438 (TRAV8-6, TRAJ24)
CAVSSDSWGKLQF

SEQ ID NO: 230876 - protein, 14 aa, Homo sapiens
  CDR3 for beta chain variable domain of TCR clone 115438 (TRBV19, TRBJ2-1)
CAGPTFVLSGEQFF

SEQ ID NO: 230877 - protein, 15 aa, Homo sapiens
  CDR3 for alpha chain variable domain of TCR clone 115439 (TRAV12-2, TRAJ53)
CAVNGGGGSNYKLTF

SEQ ID NO: 230878 - protein, 17 aa, Homo sapiens
  CDR3 for beta chain variable domain of TCR clone 115439 (TRBV7-3, TRBJ2-5)
CASSLGSGRSGSETQYF

SEQ ID NO: 230879 - protein, 23 aa, Homo sapiens
  CDR3 for alpha chain variable domain of TCR clone 115440 (TRAV26-1, TRAJ38)
CIADNAGNNHIQNPDPAGYQLRD

SEQ ID NO: 230880 - protein, 13 aa, Homo sapiens
  CDR3 for beta chain variable domain of TCR clone 115440 (TRBV5-4, TRBJ1-1)
CASSVDLGTEAFF

SEQ ID NO: 230881 - protein, 15 aa, Homo sapiens
  CDR3 for alpha chain variable domain of TCR clone 115441 (TRAV21, TRAJ18)
CAVRDRGSTLGRLYF

SEQ ID NO: 230882 - protein, 12 aa, Homo sapiens
  CDR3 for beta chain variable domain of TCR clone 115441 (TRBV11-2, TRBJ2-2)
CASSLGGGELFF

SEQ ID NO: 230883 - protein, 16 aa, Homo sapiens
  CDR3 for alpha chain variable domain of TCR clone 115442 (TRAV8-2, TRAJ7)
CVVSEGPNYGNNRLAF

SEQ ID NO: 230884 - protein, 15 aa, Homo sapiens
  CDR3 for beta chain variable domain of TCR clone 115442 (TRBV27, TRBJ2-3)
CASSLGLAATDTQYF

SEQ ID NO: 230885 - protein, 23 aa, Homo sapiens
  CDR3 for alpha chain variable domain of TCR clone 115443 (TRAV8-6, TRAJ26)
PLEETLSPYKRHGWVLLSQNFVF

SEQ ID NO: 230886 - protein, 12 aa, Homo sapiens
  CDR3 for beta chain variable domain of TCR clone 115443 (TRBV20-1, TRBJ2-1)
CSARLGTDEQFF

SEQ ID NO: 230887 - protein, 18 aa, Homo sapiens
  CDR3 for alpha chain variable domain of TCR clone 115444 (TRAV21, TRAJ52)
CAVRPSTAGGISYGKLTF

SEQ ID NO: 230888 - protein, 14 aa, Homo sapiens
  CDR3 for beta chain variable domain of TCR clone 115444 (TRBV19, TRBJ2-1)
CARGARSFQWEQFF

SEQ ID NO: 230889 - protein, 17 aa, Homo sapiens
  CDR3 for alpha chain variable domain of TCR clone 115445 (TRAV8-6, TRAJ58)
CAVSPWVGETSGSRLTF

SEQ ID NO: 230890 - protein, 15 aa, Homo sapiens
  CDR3 for beta chain variable domain of TCR clone 115445 (TRBV6-5, TRBJ2-1)
CASSYDAGAGNEQFF

SEQ ID NO: 230891 - protein, 15 aa, Homo sapiens
  CDR3 for alpha chain variable domain of TCR clone 115446 (TRAV2, TRAJ9)
CAVEDRGTGGFKTIF

SEQ ID NO: 230892 - protein, 16 aa, Homo sapiens
  CDR3 for beta chain variable domain of TCR clone 115446 (TRBV24-1, TRBJ2-3)
CATSDPGTGATDMQYF

SEQ ID NO: 230893 - protein, 15 aa, Homo sapiens
  CDR3 for alpha chain variable domain of TCR clone 115447 (TRAV12-1, TRAJ44)
CVADLPTGTASKLTF

SEQ ID NO: 230894 - protein, 22 aa, Homo sapiens
  CDR3 for beta chain variable domain of TCR clone 115447 (TRBV11-3, TRBJ2-2)
LGTRPCISVPAAQGGTPGSCFF

SEQ ID NO: 230895 - protein, 16 aa, Homo sapiens
  CDR3 for alpha chain variable domain of TCR clone 115448 (TRAV27, TRAJ52)
CEGAGAGGTSYGKLTF

SEQ ID NO: 230896 - protein, 17 aa, Homo sapiens
  CDR3 for beta chain variable domain of TCR clone 115448 (TRBV24-1, TRBJ2-3)
CATSDLPSGEDTDTQYF

SEQ ID NO: 230897 - protein, 16 aa, Homo sapiens
  CDR3 for alpha chain variable domain of TCR clone 115449 (TRAV27, TRAJ52)
CAGAGAGGTSYGKLTF

SEQ ID NO: 230898 - protein, 17 aa, Homo sapiens
  CDR3 for beta chain variable domain of TCR clone 115449 (TRBV24-1, TRBJ2-3)
CATSDWPSGEDTDTQYF

SEQ ID NO: 230899 - protein, 13 aa, Homo sapiens
  CDR3 for alpha chain variable domain of TCR clone 115450 (TRAV21, TRAJ27)
CAALNTNAGKSTF

SEQ ID NO: 230900 - protein, 16 aa, Homo sapiens
  CDR3 for beta chain variable domain of TCR clone 115450 (TRBV2, TRBJ2-1)
CASSDSPGQPYNEQFF

SEQ ID NO: 230901 - protein, 23 aa, Homo sapiens
  CDR3 for alpha chain variable domain of TCR clone 115451 (TRAV26-1, TRAJ38)
CIADNAGNNHIQNPDPAVYQLRD

SEQ ID NO: 230902 - protein, 14 aa, Homo sapiens
  CDR3 for beta chain variable domain of TCR clone 115451 (TRBV18, TRBJ2-7)
CASSPRGGAYEQYF

SEQ ID NO: 230903 - protein, 13 aa, Homo sapiens
  CDR3 for alpha chain variable domain of TCR clone 115452 (TRAV12-3, TRAJ48)
CAMSLVGNEKLTF

SEQ ID NO: 230904 - protein, 15 aa, Homo sapiens
  CDR3 for beta chain variable domain of TCR clone 115452 (TRBV11-3, TRBJ2-3)
CASLKDGREGDTQYF

SEQ ID NO: 230905 - protein, 12 aa, Homo sapiens
  CDR3 for alpha chain variable domain of TCR clone 115453 (TRAV13-1, TRAJ20)
CAASMGDYKLSL

SEQ ID NO: 230906 - protein, 14 aa, Homo sapiens
  CDR3 for beta chain variable domain of TCR clone 115453 (TRBV20-1, TRBJ2-5)
CSASDSGSGETQYF

SEQ ID NO: 230907 - protein, 12 aa, Homo sapiens
  CDR3 for alpha chain variable domain of TCR clone 115454 (TRAV20, TRAJ39)
CAVGNAGNMLTF

SEQ ID NO: 230908 - protein, 16 aa, Homo sapiens
  CDR3 for beta chain variable domain of TCR clone 115454 (TRBV15, TRBJ1-2)
CATSRGLRTGGGGYTF

SEQ ID NO: 230909 - protein, 15 aa, Homo sapiens
  CDR3 for alpha chain variable domain of TCR clone 115455 (TRAV21, TRAJ57)
CAVIITQGGSEKRVF

SEQ ID NO: 230910 - protein, 14 aa, Homo sapiens
  CDR3 for beta chain variable domain of TCR clone 115455 (TRBV5-1, TRBJ2-2)
CASSLIWIPGELFF

SEQ ID NO: 230911 - protein, 14 aa, Homo sapiens
  CDR3 for alpha chain variable domain of TCR clone 115456 (TRAV1-2, TRAJ16)
CAVNRFSDGQKLLF

SEQ ID NO: 230912 - protein, 15 aa, Homo sapiens
  CDR3 for beta chain variable domain of TCR clone 115456 (TRBV2, TRBJ2-1)
CASSELAGGHNEQFF

SEQ ID NO: 230913 - protein, 15 aa, Homo sapiens
  CDR3 for alpha chain variable domain of TCR clone 115457 (TRAV12-1, TRAJ44)
CVVFVNTGTASKLTF

SEQ ID NO: 230914 - protein, 16 aa, Homo sapiens
  CDR3 for beta chain variable domain of TCR clone 115457 (TRBV20-1, TRBJ2-5)
CSPGGTGGGYMETQYF

SEQ ID NO: 230915 - protein, 14 aa, Homo sapiens
  CDR3 for alpha chain variable domain of TCR clone 115458 (TRAV8-3, TRAJ4)
CAVGASGGSNKLIF

SEQ ID NO: 230916 - protein, 16 aa, Homo sapiens
  CDR3 for beta chain variable domain of TCR clone 115458 (TRBV4-3, TRBJ2-2)
CASSHLQGSGTGELFF

SEQ ID NO: 230917 - protein, 14 aa, Homo sapiens
  CDR3 for alpha chain variable domain of TCR clone 115459 (TRAV12-2, TRAJ11)
YAVRKNSGYSTFTF

SEQ ID NO: 230918 - protein, 14 aa, Homo sapiens
  CDR3 for beta chain variable domain of TCR clone 115459 (TRBV7-2, TRBJ2-5)
CASWQERFRETQYF

SEQ ID NO: 230919 - protein, 15 aa, Homo sapiens
  CDR3 for alpha chain variable domain of TCR clone 115460 (TRAV12-2, TRAJ53)
CAVNGGGGSNYKLTF

SEQ ID NO: 230920 - protein, 13 aa, Homo sapiens
  CDR3 for beta chain variable domain of TCR clone 115460 (TRBV3-1, TRBJ1-1)
CASSPGVITEAFS

SEQ ID NO: 230921 - protein, 17 aa, Homo sapiens
  CDR3 for alpha chain variable domain of TCR clone 115461 (TRAV13-1, TRAJ52)
CAAGRNAGGTSYGKLTF

SEQ ID NO: 230922 - protein, 15 aa, Homo sapiens
  CDR3 for beta chain variable domain of TCR clone 115461 (TRBV6-3, TRBJ2-7)
CASSSPGTVFYEQYS

SEQ ID NO: 230923 - protein, 14 aa, Homo sapiens
  CDR3 for alpha chain variable domain of TCR clone 115462 (TRAV17, TRAJ16)
CATADFSDGQKLLF

SEQ ID NO: 230924 - protein, 14 aa, Homo sapiens
  CDR3 for beta chain variable domain of TCR clone 115462 (TRBV18, TRBJ2-5)
CASSPGVSQETQYF

SEQ ID NO: 230925 - protein, 13 aa, Homo sapiens
  CDR3 for alpha chain variable domain of TCR clone 115463 (TRAV1-1, TRAJ13)
CAENSGGYQKVTF

SEQ ID NO: 230926 - protein, 12 aa, Homo sapiens
  CDR3 for beta chain variable domain of TCR clone 115463 (TRBV28, TRBJ2-1)
CASSVQINEQFF

SEQ ID NO: 230927 - protein, 14 aa, Homo sapiens
  CDR3 for alpha chain variable domain of TCR clone 115464 (TRAV1-2, TRAJ16)
CAVNRFSDGQKLLF

SEQ ID NO: 230928 - protein, 13 aa, Homo sapiens
  CDR3 for beta chain variable domain of TCR clone 115464 (TRBV6-3, TRBJ2-1)
CASSYDNYNEQFF

SEQ ID NO: 230929 - protein, 12 aa, Homo sapiens
  CDR3 for alpha chain variable domain of TCR clone 115465 (TRAV29/DV5, TRAJ53)
CAASGGNYKLTF

SEQ ID NO: 230930 - protein, 16 aa, Homo sapiens
  CDR3 for beta chain variable domain of TCR clone 115465 (TRBV12-4, TRBJ1-5)
CASSRPVGGSNQPQHF

SEQ ID NO: 230931 - protein, 16 aa, Homo sapiens
  CDR3 for alpha chain variable domain of TCR clone 115466 (TRAV30, TRAJ24)
CGTEIVDADSWGKFQF

SEQ ID NO: 230932 - protein, 13 aa, Homo sapiens
  CDR3 for beta chain variable domain of TCR clone 115466 (TRBV7-6, TRBJ2-7)
CASSLDHTHEQYF

SEQ ID NO: 230933 - protein, 23 aa, Homo sapiens
  CDR3 for alpha chain variable domain of TCR clone 115467 (TRAV26-1, TRAJ38)
CIADNAGNNHIQNPDPAVYQLRD

SEQ ID NO: 230934 - protein, 16 aa, Homo sapiens
  CDR3 for beta chain variable domain of TCR clone 115467 (TRBV28, TRBJ2-7)
CASSLFFETGGPEQYF

SEQ ID NO: 230935 - protein, 14 aa, Homo sapiens
  CDR3 for alpha chain variable domain of TCR clone 115468 (TRAV4, TRAJ9)
CLVGSGTGGFKTIS

SEQ ID NO: 230936 - protein, 15 aa, Homo sapiens
  CDR3 for beta chain variable domain of TCR clone 115468 (TRBV7-2, TRBJ2-1)
CASSLASGRVNEQFF

SEQ ID NO: 230937 - protein, 13 aa, Homo sapiens
  CDR3 for alpha chain variable domain of TCR clone 115469 (TRAV2, TRAJ47)
CAVDREYGNKLVF

SEQ ID NO: 230938 - protein, 17 aa, Homo sapiens
  CDR3 for beta chain variable domain of TCR clone 115469 (TRBV15, TRBJ1-5)
CATSRVKGIYSNQHQHF

SEQ ID NO: 230939 - protein, 14 aa, Homo sapiens
  CDR3 for alpha chain variable domain of TCR clone 115470 (TRAV2, TRAJ9)
CAVEDRSGGFKTIF

SEQ ID NO: 230940 - protein, 14 aa, Homo sapiens
  CDR3 for beta chain variable domain of TCR clone 115470 (TRBV7-2, TRBJ2-5)
CASSFGGAQETQYF

SEQ ID NO: 230941 - protein, 13 aa, Homo sapiens
  CDR3 for alpha chain variable domain of TCR clone 115471 (TRAV26-2, TRAJ43)
CILRAVNNNDRRF

SEQ ID NO: 230942 - protein, 15 aa, Homo sapiens
  CDR3 for beta chain variable domain of TCR clone 115471 (TRBV7-2, TRBJ2-1)
CASTHGTGIYNEQFF

SEQ ID NO: 230943 - protein, 10 aa, Homo sapiens
  CDR3 for alpha chain variable domain of TCR clone 115472 (TRAV17, TRAJ36)
CATVAGNLFF

SEQ ID NO: 230944 - protein, 10 aa, Homo sapiens
  CDR3 for beta chain variable domain of TCR clone 115472 (TRBV6-3, TRBJ2-2)
CASRDGELFF

SEQ ID NO: 230945 - protein, 17 aa, Homo sapiens
  CDR3 for alpha chain variable domain of TCR clone 115473 (TRAV27, TRAJ26)
CAGARAPLDNYGQNFVF

SEQ ID NO: 230946 - protein, 15 aa, Homo sapiens
  CDR3 for beta chain variable domain of TCR clone 115473 (TRBV11-2, TRBJ2-5)
CASSPHSGGLETQYF

SEQ ID NO: 230947 - protein, 16 aa, Homo sapiens
  CDR3 for alpha chain variable domain of TCR clone 115474 (TRAV30, TRAJ24)
CGTEIVDADSWGKFQF

SEQ ID NO: 230948 - protein, 15 aa, Homo sapiens
  CDR3 for beta chain variable domain of TCR clone 115474 (TRBV28, TRBJ2-5)
CASSSGRVIQETQYF

SEQ ID NO: 230949 - protein, 11 aa, Homo sapiens
  CDR3 for alpha chain variable domain of TCR clone 115475 (TRAV29/DV5, TRAJ47)
CAATYGNKLVF

SEQ ID NO: 230950 - protein, 17 aa, Homo sapiens
  CDR3 for beta chain variable domain of TCR clone 115475 (TRBV7-9, TRBJ2-1)
CAISLVASYPSYNEQFF

SEQ ID NO: 230951 - protein, 13 aa, Homo sapiens
  CDR3 for alpha chain variable domain of TCR clone 115476 (TRAV21, TRAJ57)
CAVTQGGSEKLVF

SEQ ID NO: 230952 - protein, 16 aa, Homo sapiens
  CDR3 for beta chain variable domain of TCR clone 115476 (TRBV12-4, TRBJ1-5)
CASSRPVGGSNQPQHF

SEQ ID NO: 230953 - protein, 14 aa, Homo sapiens
  CDR3 for alpha chain variable domain of TCR clone 115477 (TRAV35, TRAJ50)
CAGHRKTSYDKVIF

SEQ ID NO: 230954 - protein, 16 aa, Homo sapiens
  CDR3 for beta chain variable domain of TCR clone 115477 (TRBV19, TRBJ2-1)
CASSKAGPSSYNEQFF

SEQ ID NO: 230955 - protein, 15 aa, Homo sapiens
  CDR3 for alpha chain variable domain of TCR clone 115478 (TRAV12-2, TRAJ53)
CAVNGGGGSNSKLTF

SEQ ID NO: 230956 - protein, 14 aa, Homo sapiens
  CDR3 for beta chain variable domain of TCR clone 115478 (TRBV19, TRBJ2-2)
CASSTLHRSGELFF

SEQ ID NO: 230957 - protein, 14 aa, Homo sapiens
  CDR3 for alpha chain variable domain of TCR clone 115479 (TRAV1-2, TRAJ16)
CAVNRFSDGQKLLF

SEQ ID NO: 230958 - protein, 14 aa, Homo sapiens
  CDR3 for beta chain variable domain of TCR clone 115479 (TRBV5-1, TRBJ2-1)
CASSLDDRFDGQFF

SEQ ID NO: 230959 - protein, 13 aa, Homo sapiens
  CDR3 for alpha chain variable domain of TCR clone 115480 (TRAV8-1, TRAJ39)
CAGLNNAGNMLTF

SEQ ID NO: 230960 - protein, 12 aa, Homo sapiens
  CDR3 for beta chain variable domain of TCR clone 115480 (TRBV11-2, TRBJ2-2)
CASSLGGGELFF

SEQ ID NO: 230961 - protein, 12 aa, Homo sapiens
  CDR3 for alpha chain variable domain of TCR clone 115481 (TRAV13-1, TRAJ27)
CAAHTNAGKSTF

SEQ ID NO: 230962 - protein, 16 aa, Homo sapiens
  CDR3 for beta chain variable domain of TCR clone 115481 (TRBV28, TRBJ1-5)
CASRTGLQGEGQPQHF

SEQ ID NO: 230963 - protein, 14 aa, Homo sapiens
  CDR3 for alpha chain variable domain of TCR clone 115482 (TRAV26-1, TRAJ49)
CIVRPSNNGNQFYF

SEQ ID NO: 230964 - protein, 15 aa, Homo sapiens
  CDR3 for beta chain variable domain of TCR clone 115482 (TRBV19, TRBJ1-1)
CASMGFRDVNTEAFF

SEQ ID NO: 230965 - protein, 16 aa, Homo sapiens
  CDR3 for alpha chain variable domain of TCR clone 115483 (TRAV3, TRAJ21)
CAVRDIERGNFNKFYF

SEQ ID NO: 230966 - protein, 15 aa, Homo sapiens
  CDR3 for beta chain variable domain of TCR clone 115483 (TRBV12-4, TRBJ1-5)
CQQPTGRGSNQPQHF

SEQ ID NO: 230967 - protein, 16 aa, Homo sapiens
  CDR3 for alpha chain variable domain of TCR clone 115484 (TRAV1-2, TRAJ40)
CAVRGSRTSGTYKYIF

SEQ ID NO: 230968 - protein, 14 aa, Homo sapiens
  CDR3 for beta chain variable domain of TCR clone 115484 (TRBV4-1, TRBJ2-3)
CASSQESGTDTQYF

SEQ ID NO: 230969 - protein, 19 aa, Homo sapiens
  CDR3 for alpha chain variable domain of TCR clone 115485 (TRAV26-1, TRAJ52)
CIVRAHRNAGGTSYGKLTF

SEQ ID NO: 230970 - protein, 15 aa, Homo sapiens
  CDR3 for beta chain variable domain of TCR clone 115485 (TRBV7-9, TRBJ2-7)
CASSLALAEAYEQYF

SEQ ID NO: 230971 - protein, 14 aa, Homo sapiens
  CDR3 for alpha chain variable domain of TCR clone 115486 (TRAV21, TRAJ58)
CAVRRGRSGPRLTF

SEQ ID NO: 230972 - protein, 13 aa, Homo sapiens
  CDR3 for beta chain variable domain of TCR clone 115486 (TRBV7-2, TRBJ1-6)
CASSLKFDSPLHF

SEQ ID NO: 230973 - protein, 16 aa, Homo sapiens
  CDR3 for alpha chain variable domain of TCR clone 115487 (TRAV26-1, TRAJ37)
CIVRGDGSGNTGKLIF

SEQ ID NO: 230974 - protein, 14 aa, Homo sapiens
  CDR3 for beta chain variable domain of TCR clone 115487 (TRBV19, TRBJ2-2)
CASSGQGIAGVLFF

SEQ ID NO: 230975 - protein, 12 aa, Homo sapiens
  CDR3 for alpha chain variable domain of TCR clone 115488 (TRAV41, TRAJ58)
CAVETSGPRLTF

SEQ ID NO: 230976 - protein, 15 aa, Homo sapiens
  CDR3 for beta chain variable domain of TCR clone 115488 (TRBV29-1, TRBJ2-6)
CSVGDRGSGANVLTF

SEQ ID NO: 230977 - protein, 12 aa, Homo sapiens
  CDR3 for alpha chain variable domain of TCR clone 115489 (TRAV12-1, TRAJ6)
CVVSESSYIPTF

SEQ ID NO: 230978 - protein, 21 aa, Homo sapiens
  CDR3 for beta chain variable domain of TCR clone 115489 (TRBV7-3, TRBJ2-1)
GGTQPCISVPAAYGLAGAQFF

SEQ ID NO: 230979 - protein, 15 aa, Homo sapiens
  CDR3 for alpha chain variable domain of TCR clone 115490 (TRAV12-1, TRAJ44)
CVVFVNTGPASKLTF

SEQ ID NO: 230980 - protein, 17 aa, Homo sapiens
  CDR3 for beta chain variable domain of TCR clone 115490 (TRBV7-8, TRBJ2-6)
CASSAGTGGAGANVLTF

SEQ ID NO: 230981 - protein, 19 aa, Homo sapiens
  CDR3 for alpha chain variable domain of TCR clone 115491 (TRAV3, TRAJ6)
CAVRDRNPSRSGGSNIPTF

SEQ ID NO: 230982 - protein, 15 aa, Homo sapiens
  CDR3 for beta chain variable domain of TCR clone 115491 (TRBV18, TRBJ2-7)
CASSPTVMDSYEQYF

SEQ ID NO: 230983 - protein, 15 aa, Homo sapiens
  CDR3 for alpha chain variable domain of TCR clone 115492 (TRAV21, TRAJ52)
CAVRGGGTSYGKLTF

SEQ ID NO: 230984 - protein, 14 aa, Homo sapiens
  CDR3 for beta chain variable domain of TCR clone 115492 (TRBV7-9, TRBJ2-2)
CASSLVQDTGELFF

SEQ ID NO: 230985 - protein, 14 aa, Homo sapiens
  CDR3 for alpha chain variable domain of TCR clone 115493 (TRAV17, TRAJ11)
CATDARSGYSTLTF

SEQ ID NO: 230986 - protein, 14 aa, Homo sapiens
  CDR3 for beta chain variable domain of TCR clone 115493 (TRBV7-2, TRBJ2-7)
CASRSQGAAYEQYF

SEQ ID NO: 230987 - protein, 13 aa, Homo sapiens
  CDR3 for alpha chain variable domain of TCR clone 115494 (TRAV8-3, TRAJ28)
CAVGADGSYQLTF

SEQ ID NO: 230988 - protein, 14 aa, Homo sapiens
  CDR3 for beta chain variable domain of TCR clone 115494 (TRBV7-2, TRBJ2-7)
CASRSQGAAYEQYF

SEQ ID NO: 230989 - protein, 11 aa, Homo sapiens
  CDR3 for alpha chain variable domain of TCR clone 115495 (TRAV2, TRAJ33)
CAVDSNYQLIW

SEQ ID NO: 230990 - protein, 15 aa, Homo sapiens
  CDR3 for beta chain variable domain of TCR clone 115495 (TRBV18, TRBJ2-1)
CASSPPSASYNEQFF

SEQ ID NO: 230991 - protein, 15 aa, Homo sapiens
  CDR3 for alpha chain variable domain of TCR clone 115496 (TRAV13-2, TRAJ5)
CAENPHWTCRRALTF

SEQ ID NO: 230992 - protein, 16 aa, Homo sapiens
  CDR3 for beta chain variable domain of TCR clone 115496 (TRBV7-9, TRBJ1-3)
CASSQTSGLRMGTIYF

SEQ ID NO: 230993 - protein, 12 aa, Homo sapiens
  CDR3 for alpha chain variable domain of TCR clone 115497 (TRAV12-2, TRAJ9)
CAVYNGGFKTIF

SEQ ID NO: 230994 - protein, 14 aa, Homo sapiens
  CDR3 for beta chain variable domain of TCR clone 115497 (TRBV12-5, TRBJ2-5)
CAGGSRTHQETQYF

SEQ ID NO: 230995 - protein, 17 aa, Homo sapiens
  CDR3 for alpha chain variable domain of TCR clone 115498 (TRAV3, TRAJ6)
CAVRDGPRAGGSYIPTF

SEQ ID NO: 230996 - protein, 16 aa, Homo sapiens
  CDR3 for beta chain variable domain of TCR clone 115498 (TRBV13, TRBJ2-5)
CASSRGAGIRQETQYF

SEQ ID NO: 230997 - protein, 16 aa, Homo sapiens
  CDR3 for alpha chain variable domain of TCR clone 115499 (TRAV17, TRAJ28)
CATASVSGAGSYQLTF

SEQ ID NO: 230998 - protein, 11 aa, Homo sapiens
  CDR3 for beta chain variable domain of TCR clone 115499 (TRBV7-9, TRBJ2-5)
GASSLGETQYF

SEQ ID NO: 230999 - protein, 12 aa, Homo sapiens
  CDR3 for alpha chain variable domain of TCR clone 115500 (TRAV12-1, TRAJ40)
CVVYSGTYKYIF

SEQ ID NO: 231000 - protein, 14 aa, Homo sapiens
  CDR3 for beta chain variable domain of TCR clone 115500 (TRBV4-2, TRBJ2-1)
CASGLDRAYNEQFF

SEQ ID NO: 231001 - protein, 14 aa, Homo sapiens
  CDR3 for alpha chain variable domain of TCR clone 115501 (TRAV26-1, TRAJ38)
CIADNAGNNRKLIW

SEQ ID NO: 231002 - protein, 15 aa, Homo sapiens
  CDR3 for beta chain variable domain of TCR clone 115501 (TRBV19, TRBJ1-2)
CASSVGQVLNYGYTF

SEQ ID NO: 231003 - protein, 12 aa, Homo sapiens
  CDR3 for alpha chain variable domain of TCR clone 115502 (TRAV27, TRAJ41)
CAGRNSGYALNF

SEQ ID NO: 231004 - protein, 20 aa, Homo sapiens
  CDR3 for beta chain variable domain of TCR clone 115502 (TRBV7-8, TRBJ2-2)
CASSHLFPGPTIHITGELFF

SEQ ID NO: 231005 - protein, 15 aa, Homo sapiens
  CDR3 for alpha chain variable domain of TCR clone 115503 (TRAV3, TRAJ4)
CAQNTFSGGYNKLIF

SEQ ID NO: 231006 - protein, 16 aa, Homo sapiens
  CDR3 for beta chain variable domain of TCR clone 115503 (TRBV3-1, TRBJ1-6)
CASSQEFQGSYSPLHF

SEQ ID NO: 231007 - protein, 14 aa, Homo sapiens
  CDR3 for alpha chain variable domain of TCR clone 115504 (TRAV10, TRAJ32)
CGEPRGGAPNKLIF

SEQ ID NO: 231008 - protein, 14 aa, Homo sapiens
  CDR3 for beta chain variable domain of TCR clone 115504 (TRBV5-4, TRBJ2-2)
CASRLDGGTGELFF

SEQ ID NO: 231009 - protein, 13 aa, Homo sapiens
  CDR3 for alpha chain variable domain of TCR clone 115505 (TRAV12-3, TRAJ13)
CAMTSGGHQKVTF

SEQ ID NO: 231010 - protein, 10 aa, Homo sapiens
  CDR3 for beta chain variable domain of TCR clone 115505 (TRBV20-1, TRBJ2-2)
LAGGAGELFF

SEQ ID NO: 231011 - protein, 14 aa, Homo sapiens
  CDR3 for alpha chain variable domain of TCR clone 115506 (TRAV1-2, TRAJ16)
CAVNRFSDGQKLLF

SEQ ID NO: 231012 - protein, 15 aa, Homo sapiens
  CDR3 for beta chain variable domain of TCR clone 115506 (TRBV9, TRBJ1-6)
CASSVARTGDSALHF

SEQ ID NO: 231013 - protein, 14 aa, Homo sapiens
  CDR3 for alpha chain variable domain of TCR clone 115507 (TRAV2, TRAJ9)
CAVDPNTGGFKTIF

SEQ ID NO: 231014 - protein, 13 aa, Homo sapiens
  CDR3 for beta chain variable domain of TCR clone 115507 (TRBV20-1, TRBJ2-1)
CSASTWTSNEQFF

SEQ ID NO: 231015 - protein, 15 aa, Homo sapiens
  CDR3 for alpha chain variable domain of TCR clone 115508 (TRAV8-3, TRAJ45)
CASSYSGGGADGRTF

SEQ ID NO: 231016 - protein, 17 aa, Homo sapiens
  CDR3 for beta chain variable domain of TCR clone 115508 (TRBV7-8, TRBJ1-2)
CASSLRPLQGHLYGYTF

SEQ ID NO: 231017 - protein, 15 aa, Homo sapiens
  CDR3 for alpha chain variable domain of TCR clone 115509 (TRAV12-2, TRAJ8)
CAVREENTGFQKLVF

SEQ ID NO: 231018 - protein, 15 aa, Homo sapiens
  CDR3 for beta chain variable domain of TCR clone 115509 (TRBV28, TRBJ2-4)
CAAGSGTLLMGIQYV

SEQ ID NO: 231019 - protein, 15 aa, Homo sapiens
  CDR3 for alpha chain variable domain of TCR clone 115510 (TRAV26-1, TRAJ29)
CIVRVEGSGNTPLVF

SEQ ID NO: 231020 - protein, 16 aa, Homo sapiens
  CDR3 for beta chain variable domain of TCR clone 115510 (TRBV6-1, TRBJ2-5)
CASSETLDRGAETQYF

SEQ ID NO: 231021 - protein, 15 aa, Homo sapiens
  CDR3 for alpha chain variable domain of TCR clone 115511 (TRAV1-2, TRAJ30)
CAVRAHGNRDDKIIF

SEQ ID NO: 231022 - protein, 13 aa, Homo sapiens
  CDR3 for beta chain variable domain of TCR clone 115511 (TRBV4-1, TRBJ2-7)
CASSQGQAYEQYF

SEQ ID NO: 231023 - protein, 18 aa, Homo sapiens
  CDR3 for alpha chain variable domain of TCR clone 115512 (TRAV9-2, TRAJ52)
CALSRHNAGGTSYGKLTF

SEQ ID NO: 231024 - protein, 15 aa, Homo sapiens
  CDR3 for beta chain variable domain of TCR clone 115512 (TRBV11-2, TRBJ2-1)
CASSKNRGLIYEQFF

SEQ ID NO: 231025 - protein, 12 aa, Homo sapiens
  CDR3 for alpha chain variable domain of TCR clone 115513 (TRAV25, TRAJ11)
CAGASGYSTLTF

SEQ ID NO: 231026 - protein, 13 aa, Homo sapiens
  CDR3 for beta chain variable domain of TCR clone 115513 (TRBV19, TRBJ1-2)
CASSVPGQDGYTF

SEQ ID NO: 231027 - protein, 17 aa, Homo sapiens
  CDR3 for alpha chain variable domain of TCR clone 115514 (TRAV26-2, TRAJ42)
CILRDVGYGGSQGNLIF

SEQ ID NO: 231028 - protein, 13 aa, Homo sapiens
  CDR3 for beta chain variable domain of TCR clone 115514 (TRBV12-4, TRBJ1-5)
CASSPDRAQPQHF

SEQ ID NO: 231029 - protein, 12 aa, Homo sapiens
  CDR3 for alpha chain variable domain of TCR clone 115515 (TRAV12-3, TRAJ17)
CAMTLTGNKLTF

SEQ ID NO: 231030 - protein, 15 aa, Homo sapiens
  CDR3 for beta chain variable domain of TCR clone 115515 (TRBV20-1, TRBJ1-5)
CSATSDRGLGQPQHF

SEQ ID NO: 231031 - protein, 12 aa, Homo sapiens
  CDR3 for alpha chain variable domain of TCR clone 115516 (TRAV4, TRAJ26)
CLVGDYGQNFVF

SEQ ID NO: 231032 - protein, 16 aa, Homo sapiens
  CDR3 for beta chain variable domain of TCR clone 115516 (TRBV7-2, TRBJ1-2)
CASSSDQDRRGHGYTF

SEQ ID NO: 231033 - protein, 13 aa, Homo sapiens
  CDR3 for alpha chain variable domain of TCR clone 115517 (TRAV12-2, TRAJ4)
CAVRSGGYNKLIF

SEQ ID NO: 231034 - protein, 15 aa, Homo sapiens
  CDR3 for beta chain variable domain of TCR clone 115517 (TRBV10-3, TRBJ2-1)
CASSDVQDRAYEQFF

SEQ ID NO: 231035 - protein, 16 aa, Homo sapiens
  CDR3 for alpha chain variable domain of TCR clone 115518 (TRAV26-1, TRAJ47)
CIVRVVLSQSGNKLVF

SEQ ID NO: 231036 - protein, 16 aa, Homo sapiens
  CDR3 for beta chain variable domain of TCR clone 115518 (TRBV5-1, TRBJ2-1)
CASSFGVSGSYNEQFF

SEQ ID NO: 231037 - protein, 14 aa, Homo sapiens
  CDR3 for alpha chain variable domain of TCR clone 115519 (TRAV9-2, TRAJ39)
FALYIYNAGNMLTF

SEQ ID NO: 231038 - protein, 14 aa, Homo sapiens
  CDR3 for beta chain variable domain of TCR clone 115519 (TRBV6-1, TRBJ1-3)
CASVQGGGGNTIYF

SEQ ID NO: 231039 - protein, 12 aa, Homo sapiens
  CDR3 for alpha chain variable domain of TCR clone 115520 (TRAV13-2, TRAJ23)
RAERHRGGKLIF

SEQ ID NO: 231040 - protein, 15 aa, Homo sapiens
  CDR3 for beta chain variable domain of TCR clone 115520 (TRBV20-1, TRBJ2-7)
CSARDRVSGMDEQYF

SEQ ID NO: 231041 - protein, 14 aa, Homo sapiens
  CDR3 for alpha chain variable domain of TCR clone 115521 (TRAV12-2, TRAJ8)
CAVKENTGFQKLVF

SEQ ID NO: 231042 - protein, 15 aa, Homo sapiens
  CDR3 for beta chain variable domain of TCR clone 115521 (TRBV7-9, TRBJ1-5)
CASSQGHQPNQPQHF

SEQ ID NO: 231043 - protein, 13 aa, Homo sapiens
  CDR3 for alpha chain variable domain of TCR clone 115522 (TRAV30, TRAJ24)
CGTVTDSWGKLQF

SEQ ID NO: 231044 - protein, 15 aa, Homo sapiens
  CDR3 for beta chain variable domain of TCR clone 115522 (TRBV25-1, TRBJ1-4)
CASSPGDSTNEKLFL

SEQ ID NO: 231045 - protein, 14 aa, Homo sapiens
  CDR3 for alpha chain variable domain of TCR clone 115523 (TRAV17, TRAJ42)
CATDAPGSQGNLIF

SEQ ID NO: 231046 - protein, 13 aa, Homo sapiens
  CDR3 for beta chain variable domain of TCR clone 115523 (TRBV7-7, TRBJ1-5)
CASSPGKNQTQHF

SEQ ID NO: 231047 - protein, 17 aa, Homo sapiens
  CDR3 for alpha chain variable domain of TCR clone 115524 (TRAV4, TRAJ18)
CLVGERSVGSTLGRLYF

SEQ ID NO: 231048 - protein, 13 aa, Homo sapiens
  CDR3 for beta chain variable domain of TCR clone 115524 (TRBV7-9, TRBJ2-1)
CASSLDVGNEQFF

SEQ ID NO: 231049 - protein, 13 aa, Homo sapiens
  CDR3 for alpha chain variable domain of TCR clone 115525 (TRAV36/DV7, TRAJ38)
CVANAGNDRKLIW

SEQ ID NO: 231050 - protein, 14 aa, Homo sapiens
  CDR3 for beta chain variable domain of TCR clone 115525 (TRBV7-2, TRBJ2-7)
CASSLRWEVNEQYF

SEQ ID NO: 231051 - protein, 12 aa, Homo sapiens
  CDR3 for alpha chain variable domain of TCR clone 115526 (TRAV13-1, TRAJ15)
CAASPAGTALIF

SEQ ID NO: 231052 - protein, 18 aa, Homo sapiens
  CDR3 for beta chain variable domain of TCR clone 115526 (TRBV7-9, TRBJ2-3)
CASSLPINGQISTDTQYF

SEQ ID NO: 231053 - protein, 13 aa, Homo sapiens
  CDR3 for alpha chain variable domain of TCR clone 115527 (TRAV12-3, TRAJ13)
CAMSSGGYQKVTF

SEQ ID NO: 231054 - protein, 13 aa, Homo sapiens
  CDR3 for beta chain variable domain of TCR clone 115527 (TRBV20-1, TRBJ1-1)
CSAPPGGHTEAFS

SEQ ID NO: 231055 - protein, 14 aa, Homo sapiens
  CDR3 for alpha chain variable domain of TCR clone 115528 (TRAV13-1, TRAJ44)
CAAKATGTASKLTF

SEQ ID NO: 231056 - protein, 17 aa, Homo sapiens
  CDR3 for beta chain variable domain of TCR clone 115528 (TRBV7-3, TRBJ2-3)
RASSLMKRTRGADTQYF

SEQ ID NO: 231057 - protein, 14 aa, Homo sapiens
  CDR3 for alpha chain variable domain of TCR clone 115529 (TRAV2, TRAJ9)
CAVEDRSGGFKTIF

SEQ ID NO: 231058 - protein, 17 aa, Homo sapiens
  CDR3 for beta chain variable domain of TCR clone 115529 (TRBV11-2, TRBJ2-3)
CQQLRGGLAGAPNTQYF

SEQ ID NO: 231059 - protein, 19 aa, Homo sapiens
  CDR3 for alpha chain variable domain of TCR clone 115530 (TRAV26-1, TRAJ52)
CIVRAHRNDGGTSYGKLTF

SEQ ID NO: 231060 - protein, 15 aa, Homo sapiens
  CDR3 for beta chain variable domain of TCR clone 115530 (TRBV29-1, TRBJ2-1)
CSGRDRKSSYNEQFF

SEQ ID NO: 231061 - protein, 11 aa, Homo sapiens
  CDR3 for alpha chain variable domain of TCR clone 115531 (TRAV12-3, TRAJ43)
CAMSVSNDMRF

SEQ ID NO: 231062 - protein, 14 aa, Homo sapiens
  CDR3 for beta chain variable domain of TCR clone 115531 (TRBV20-1, TRBJ2-3)
CSARGGTSTDTQYF

SEQ ID NO: 231063 - protein, 13 aa, Homo sapiens
  CDR3 for alpha chain variable domain of TCR clone 115532 (TRAV12-3, TRAJ7)
FAMTPYGNNRLAF

SEQ ID NO: 231064 - protein, 16 aa, Homo sapiens
  CDR3 for beta chain variable domain of TCR clone 115532 (TRBV20-1, TRBJ1-4)
CSARPYGGELNEKLFF

SEQ ID NO: 231065 - protein, 14 aa, Homo sapiens
  CDR3 for alpha chain variable domain of TCR clone 115533 (TRAV12-1, TRAJ30)
CVVNIGGRDDKIIF

SEQ ID NO: 231066 - protein, 20 aa, Homo sapiens
  CDR3 for beta chain variable domain of TCR clone 115533 (TRBV7-8, TRBJ2-2)
CASSHLFPGPTIHITGELFF

SEQ ID NO: 231067 - protein, 18 aa, Homo sapiens
  CDR3 for alpha chain variable domain of TCR clone 115534 (TRAV21, TRAJ52)
CAVRPSPAGGASYGKLTL

SEQ ID NO: 231068 - protein, 17 aa, Homo sapiens
  CDR3 for beta chain variable domain of TCR clone 115534 (TRBV13, TRBJ2-3)
CASSLSRVAGGRNTQYF

SEQ ID NO: 231069 - protein, 15 aa, Homo sapiens
  CDR3 for alpha chain variable domain of TCR clone 115535 (TRAV12-2, TRAJ53)
CAVNGGGGSNYKLTF

SEQ ID NO: 231070 - protein, 17 aa, Homo sapiens
  CDR3 for beta chain variable domain of TCR clone 115535 (TRBV7-3, TRBJ2-3)
CASNLMKRMRGADTQYF

SEQ ID NO: 231071 - protein, 14 aa, Homo sapiens
  CDR3 for alpha chain variable domain of TCR clone 115536 (TRAV1-2, TRAJ16)
CAVNRFSDGQKLLF

SEQ ID NO: 231072 - protein, 13 aa, Homo sapiens
  CDR3 for beta chain variable domain of TCR clone 115536 (TRBV3-1, TRBJ2-2)
CASLARGSGELFF

SEQ ID NO: 231073 - protein, 13 aa, Homo sapiens
  CDR3 for alpha chain variable domain of TCR clone 115537 (TRAV20, TRAJ37)
CAGCSSNTGKLIF

SEQ ID NO: 231074 - protein, 14 aa, Homo sapiens
  CDR3 for beta chain variable domain of TCR clone 115537 (TRBV7-8, TRBJ2-5)
CASSATGGQETQYF

SEQ ID NO: 231075 - protein, 12 aa, Homo sapiens
  CDR3 for alpha chain variable domain of TCR clone 115538 (TRAV21, TRAJ39)
CAADNAGNMLTF

SEQ ID NO: 231076 - protein, 22 aa, Homo sapiens
  CDR3 for beta chain variable domain of TCR clone 115538 (TRBV11-2, TRBJ1-4)
CASSLDITRRGIPRKDNEKLFF

SEQ ID NO: 231077 - protein, 14 aa, Homo sapiens
  CDR3 for alpha chain variable domain of TCR clone 115539 (TRAV12-3, TRAJ10)
SNLPLTGGGNKLTF

SEQ ID NO: 231078 - protein, 15 aa, Homo sapiens
  CDR3 for beta chain variable domain of TCR clone 115539 (TRBV27, TRBJ1-5)
CASSLGTGFDQPQHF

SEQ ID NO: 231079 - protein, 15 aa, Homo sapiens
  CDR3 for alpha chain variable domain of TCR clone 115540 (TRAV26-1, TRAJ23)
CIVRVAGDQGGKLIF

SEQ ID NO: 231080 - protein, 18 aa, Homo sapiens
  CDR3 for beta chain variable domain of TCR clone 115540 (TRBV28, TRBJ2-1)
CASSSTSGRANSYNEQFF

SEQ ID NO: 231081 - protein, 11 aa, Homo sapiens
  CDR3 for alpha chain variable domain of TCR clone 115541 (TRAV17, TRAJ17)
CATDGRPGVIK

SEQ ID NO: 231082 - protein, 17 aa, Homo sapiens
  CDR3 for beta chain variable domain of TCR clone 115541 (TRBV12-4, TRBJ1-1)
CASSLSGFRTMNTEAFF

SEQ ID NO: 231083 - protein, 16 aa, Homo sapiens
  CDR3 for alpha chain variable domain of TCR clone 115542 (TRAV26-1, TRAJ52)
FIVSNAGGTSYGKLTF

SEQ ID NO: 231084 - protein, 16 aa, Homo sapiens
  CDR3 for beta chain variable domain of TCR clone 115542 (TRBV5-1, TRBJ2-1)
CASSLEGRGLYNEQFF

SEQ ID NO: 231085 - protein, 10 aa, Homo sapiens
  CDR3 for alpha chain variable domain of TCR clone 115543 (TRAV23/DV6, TRAJ57)
CAASSTLSQG

SEQ ID NO: 231086 - protein, 14 aa, Homo sapiens
  CDR3 for beta chain variable domain of TCR clone 115543 (TRBV5-1, TRBJ2-7)
CASSRGESLYEQYF

SEQ ID NO: 231087 - protein, 15 aa, Homo sapiens
  CDR3 for alpha chain variable domain of TCR clone 115544 (TRAV30, TRAJ32)
CGTEILGGATNKLIF

SEQ ID NO: 231088 - protein, 13 aa, Homo sapiens
  CDR3 for beta chain variable domain of TCR clone 115544 (TRBV6-3, TRBJ2-7)
CASIFSGGYEQYF

SEQ ID NO: 231089 - protein, 20 aa, Homo sapiens
  CDR3 for alpha chain variable domain of TCR clone 115545 (TRAV26-1, TRAJ57)
CCVLLHRQIETQGGSEKLVF

SEQ ID NO: 231090 - protein, 13 aa, Homo sapiens
  CDR3 for beta chain variable domain of TCR clone 115545 (TRBV7-9, TRBJ2-5)
CASLPSGRETQYF

SEQ ID NO: 231091 - protein, 13 aa, Homo sapiens
  CDR3 for alpha chain variable domain of TCR clone 115546 (TRAV8-6, TRAJ8)
CAVGNTGFQKLVF

SEQ ID NO: 231092 - protein, 15 aa, Homo sapiens
  CDR3 for beta chain variable domain of TCR clone 115546 (TRBV28, TRBJ2-5)
CASSSGRTIQETQYF

SEQ ID NO: 231093 - protein, 15 aa, Homo sapiens
  CDR3 for alpha chain variable domain of TCR clone 115547 (TRAV23/DV6, TRAJ18)
CAARYRGSTLGRLYF

SEQ ID NO: 231094 - protein, 19 aa, Homo sapiens
  CDR3 for beta chain variable domain of TCR clone 115547 (TRBV7-2, TRBJ2-3)
CASSSQGGPRLAGADTQYF

SEQ ID NO: 231095 - protein, 15 aa, Homo sapiens
  CDR3 for alpha chain variable domain of TCR clone 115548 (TRAV20, TRAJ4)
CAVQVFSGGYDKLIF

SEQ ID NO: 231096 - protein, 14 aa, Homo sapiens
  CDR3 for beta chain variable domain of TCR clone 115548 (TRBV7-6, TRBJ2-3)
CASNSGGDANTQYF

SEQ ID NO: 231097 - protein, 14 aa, Homo sapiens
  CDR3 for alpha chain variable domain of TCR clone 115549 (TRAV12-2, TRAJ44)
CAVNPAGTASKLTF

SEQ ID NO: 231098 - protein, 14 aa, Homo sapiens
  CDR3 for beta chain variable domain of TCR clone 115549 (TRBV2, TRBJ2-1)
CASSEALIYNEQFF

SEQ ID NO: 231099 - protein, 15 aa, Homo sapiens
  CDR3 for alpha chain variable domain of TCR clone 115550 (TRAV3, TRAJ4)
CAVRDGTGGYNKLIF

SEQ ID NO: 231100 - protein, 16 aa, Homo sapiens
  CDR3 for beta chain variable domain of TCR clone 115550 (TRBV27, TRBJ2-2)
CGSSSSGVSNTGELFF

SEQ ID NO: 231101 - protein, 17 aa, Homo sapiens
  CDR3 for alpha chain variable domain of TCR clone 115551 (TRAV3, TRAJ42)
CAVRDRDYGGSQGKLIF

SEQ ID NO: 231102 - protein, 18 aa, Homo sapiens
  CDR3 for beta chain variable domain of TCR clone 115551 (TRBV20-1, TRBJ2-3)
CSASGLAGGPGTTDTQYF

SEQ ID NO: 231103 - protein, 13 aa, Homo sapiens
  CDR3 for alpha chain variable domain of TCR clone 115552 (TRAV8-3, TRAJ28)
CAVGAVGSYQLSF

SEQ ID NO: 231104 - protein, 14 aa, Homo sapiens
  CDR3 for beta chain variable domain of TCR clone 115552 (TRBV7-2, TRBJ2-7)
CASRSQGAAYEQYF

SEQ ID NO: 231105 - protein, 14 aa, Homo sapiens
  CDR3 for alpha chain variable domain of TCR clone 115553 (TRAV23/DV6, TRAJ11)
CAASLESGYSTLTF

SEQ ID NO: 231106 - protein, 13 aa, Homo sapiens
  CDR3 for beta chain variable domain of TCR clone 115553 (TRBV12-4, TRBJ2-5)
CASSPGTEETQYF

SEQ ID NO: 231107 - protein, 15 aa, Homo sapiens
  CDR3 for alpha chain variable domain of TCR clone 115554 (TRAV26-1, TRAJ29)
CIVRVEGSGNTPLVF

SEQ ID NO: 231108 - protein, 14 aa, Homo sapiens
  CDR3 for beta chain variable domain of TCR clone 115554 (TRBV27, TRBJ2-7)
CASATGTERREQYF

SEQ ID NO: 231109 - protein, 12 aa, Homo sapiens
  CDR3 for alpha chain variable domain of TCR clone 115555 (TRAV8-3, TRAJ26)
CAGDNYGQNFVF

SEQ ID NO: 231110 - protein, 13 aa, Homo sapiens
  CDR3 for beta chain variable domain of TCR clone 115555 (TRBV7-8, TRBJ2-7)
RRVRLTEMGEQYF

SEQ ID NO: 231111 - protein, 16 aa, Homo sapiens
  CDR3 for alpha chain variable domain of TCR clone 115556 (TRAV38-1, TRAJ32)
CAFMPFLGGATNKLIF

SEQ ID NO: 231112 - protein, 14 aa, Homo sapiens
  CDR3 for beta chain variable domain of TCR clone 115556 (TRBV7-9, TRBJ2-1)
CASSPRDSLYEQFF

SEQ ID NO: 231113 - protein, 18 aa, Homo sapiens
  CDR3 for alpha chain variable domain of TCR clone 115557 (TRAV13-1, TRAJ52)
CAAKNPNAGGTSYGKLTF

SEQ ID NO: 231114 - protein, 15 aa, Homo sapiens
  CDR3 for beta chain variable domain of TCR clone 115557 (TRBV10-3, TRBJ2-1)
CAIRNGTSGHNEQFF

SEQ ID NO: 231115 - protein, 13 aa, Homo sapiens
  CDR3 for alpha chain variable domain of TCR clone 115558 (TRAV29/DV5, TRAJ34)
CAARVDNTDKLIF

SEQ ID NO: 231116 - protein, 19 aa, Homo sapiens
  CDR3 for beta chain variable domain of TCR clone 115558 (TRBV25-1, TRBJ2-2)
CAILVYRVDRGRKTGELFF

SEQ ID NO: 231117 - protein, 14 aa, Homo sapiens
  CDR3 for alpha chain variable domain of TCR clone 115559 (TRAV12-3, TRAJ10)
SHLPLPGGGNKLTF

SEQ ID NO: 231118 - protein, 15 aa, Homo sapiens
  CDR3 for beta chain variable domain of TCR clone 115559 (TRBV10-2, TRBJ2-6)
CASSEQGTGANVLTF

SEQ ID NO: 231119 - protein, 14 aa, Homo sapiens
  CDR3 for alpha chain variable domain of TCR clone 115560 (TRAV1-2, TRAJ8)
CAVREDTGFQKLVF

SEQ ID NO: 231120 - protein, 13 aa, Homo sapiens
  CDR3 for beta chain variable domain of TCR clone 115560 (TRBV4-3, TRBJ2-3)
CASSQGYTDTQYF

SEQ ID NO: 231121 - protein, 12 aa, Homo sapiens
  CDR3 for alpha chain variable domain of TCR clone 115561 (TRAV13-1, TRAJ9)
CASHTGGFKTIF

SEQ ID NO: 231122 - protein, 13 aa, Homo sapiens
  CDR3 for beta chain variable domain of TCR clone 115561 (TRBV12-4, TRBJ1-2)
CASSSGSKDGHTF

SEQ ID NO: 231123 - protein, 12 aa, Homo sapiens
  CDR3 for alpha chain variable domain of TCR clone 115562 (TRAV3, TRAJ20)
CAVRDPDYKLSF

SEQ ID NO: 231124 - protein, 17 aa, Homo sapiens
  CDR3 for beta chain variable domain of TCR clone 115562 (TRBV28, TRBJ2-1)
CASSSARQALTYNEQFF

SEQ ID NO: 231125 - protein, 16 aa, Homo sapiens
  CDR3 for alpha chain variable domain of TCR clone 115563 (TRAV20, TRAJ53)
CVVQGNSGGSNYKLTF

SEQ ID NO: 231126 - protein, 16 aa, Homo sapiens
  CDR3 for beta chain variable domain of TCR clone 115563 (TRBV29-1, TRBJ2-6)
CSVEDITYSGANVLTF

SEQ ID NO: 231127 - protein, 14 aa, Homo sapiens
  CDR3 for alpha chain variable domain of TCR clone 115564 (TRAV16, TRAJ33)
CALSAMDSNYQLIW

SEQ ID NO: 231128 - protein, 17 aa, Homo sapiens
  CDR3 for beta chain variable domain of TCR clone 115564 (TRBV25-1, TRBJ2-1)
CASSAYGQGRGVYEQFF

SEQ ID NO: 231129 - protein, 14 aa, Homo sapiens
  CDR3 for alpha chain variable domain of TCR clone 115565 (TRAV13-2, TRAJ32)
CRGLLGGATNKLIF

SEQ ID NO: 231130 - protein, 15 aa, Homo sapiens
  CDR3 for beta chain variable domain of TCR clone 115565 (TRBV11-2, TRBJ2-1)
CASSLGPDSYNEQFF

SEQ ID NO: 231131 - protein, 16 aa, Homo sapiens
  CDR3 for alpha chain variable domain of TCR clone 115566 (TRAV27, TRAJ13)
CAGAKSDSGGYQKVTF

SEQ ID NO: 231132 - protein, 15 aa, Homo sapiens
  CDR3 for beta chain variable domain of TCR clone 115566 (TRBV29-1, TRBJ2-1)
CSVGRRALFYNEQFF

SEQ ID NO: 231133 - protein, 18 aa, Homo sapiens
  CDR3 for alpha chain variable domain of TCR clone 115567 (TRAV12-3, TRAJ52)
CAMSVGGAGGTSYGKLTV

SEQ ID NO: 231134 - protein, 15 aa, Homo sapiens
  CDR3 for beta chain variable domain of TCR clone 115567 (TRBV27, TRBJ1-6)
CASSFDRGLGSPLHF

SEQ ID NO: 231135 - protein, 15 aa, Homo sapiens
  CDR3 for alpha chain variable domain of TCR clone 115568 (TRAV17, TRAJ57)
CATGPSHGGSEKLVF

SEQ ID NO: 231136 - protein, 18 aa, Homo sapiens
  CDR3 for beta chain variable domain of TCR clone 115568 (TRBV7-9, TRBJ2-7)
CASSLTTSGSRTWYEQYF

SEQ ID NO: 231137 - protein, 16 aa, Homo sapiens
  CDR3 for alpha chain variable domain of TCR clone 115569 (TRAV26-1, TRAJ23)
CIVRVERYNQGGKLIF

SEQ ID NO: 231138 - protein, 19 aa, Homo sapiens
  CDR3 for beta chain variable domain of TCR clone 115569 (TRBV25-1, TRBJ2-2)
CAILVYRVDRGRKTGELFF

SEQ ID NO: 231139 - protein, 13 aa, Homo sapiens
  CDR3 for alpha chain variable domain of TCR clone 115570 (TRAV1-2, TRAJ9)
CAALNTGGFKTIS

SEQ ID NO: 231140 - protein, 14 aa, Homo sapiens
  CDR3 for beta chain variable domain of TCR clone 115570 (TRBV13, TRBJ2-3)
CASSSGSPTDTQYF

SEQ ID NO: 231141 - protein, 14 aa, Homo sapiens
  CDR3 for alpha chain variable domain of TCR clone 115571 (TRAV16, TRAJ17)
CALSGCAAGNKLTF

SEQ ID NO: 231142 - protein, 15 aa, Homo sapiens
  CDR3 for beta chain variable domain of TCR clone 115571 (TRBV3-1, TRBJ1-2)
CASSPTRLPEGGYTF

SEQ ID NO: 231143 - protein, 15 aa, Homo sapiens
  CDR3 for alpha chain variable domain of TCR clone 115572 (TRAV12-1, TRAJ42)
CVVTRDGGSQGNLIF

SEQ ID NO: 231144 - protein, 14 aa, Homo sapiens
  CDR3 for beta chain variable domain of TCR clone 115572 (TRBV11-2, TRBJ2-3)
CASSLGGGANTQYF

SEQ ID NO: 231145 - protein, 20 aa, Homo sapiens
  CDR3 for alpha chain variable domain of TCR clone 115573 (TRAV12-1, TRAJ42)
SSVIQPPTSVKVGSQGNLIF

SEQ ID NO: 231146 - protein, 18 aa, Homo sapiens
  CDR3 for beta chain variable domain of TCR clone 115573 (TRBV11-2, TRBJ2-3)
CASSLGGASRGAPNTQYF

SEQ ID NO: 231147 - protein, 15 aa, Homo sapiens
  CDR3 for alpha chain variable domain of TCR clone 115574 (TRAV8-2, TRAJ40)
CVVLGTTSGTYKYIF

SEQ ID NO: 231148 - protein, 16 aa, Homo sapiens
  CDR3 for beta chain variable domain of TCR clone 115574 (TRBV7-3, TRBJ2-1)
CACSLEGYRSYNEQFF

SEQ ID NO: 231149 - protein, 13 aa, Homo sapiens
  CDR3 for alpha chain variable domain of TCR clone 115575 (TRAV12-2, TRAJ40)
CAVKRTGTYKYIF

SEQ ID NO: 231150 - protein, 15 aa, Homo sapiens
  CDR3 for beta chain variable domain of TCR clone 115575 (TRBV9, TRBJ1-6)
CASSVAGTGDPPLHF

SEQ ID NO: 231151 - protein, 15 aa, Homo sapiens
  CDR3 for alpha chain variable domain of TCR clone 115576 (TRAV17, TRAJ56)
CATEPFTGANSKLTF

SEQ ID NO: 231152 - protein, 15 aa, Homo sapiens
  CDR3 for beta chain variable domain of TCR clone 115576 (TRBV28, TRBJ1-5)
CASSRTGCYVQPQHF

SEQ ID NO: 231153 - protein, 13 aa, Homo sapiens
  CDR3 for alpha chain variable domain of TCR clone 115577 (TRAV38-1, TRAJ42)
CARWGGSQGNLIF

SEQ ID NO: 231154 - protein, 17 aa, Homo sapiens
  CDR3 for beta chain variable domain of TCR clone 115577 (TRBV20-1, TRBJ2-1)
CSARDPLAGVLDNEQFF

SEQ ID NO: 231155 - protein, 11 aa, Homo sapiens
  CDR3 for alpha chain variable domain of TCR clone 115578 (TRAV3, TRAJ32)
CAVSPKGMVVL

SEQ ID NO: 231156 - protein, 15 aa, Homo sapiens
  CDR3 for beta chain variable domain of TCR clone 115578 (TRBV7-9, TRBJ1-6)
CASSSPGRGNSPLHF

SEQ ID NO: 231157 - protein, 15 aa, Homo sapiens
  CDR3 for alpha chain variable domain of TCR clone 115579 (TRAV38-1, TRAJ37)
CAFIFGSGNTGKLIF

SEQ ID NO: 231158 - protein, 13 aa, Homo sapiens
  CDR3 for beta chain variable domain of TCR clone 115579 (TRBV10-3, TRBJ2-7)
CASKLAVNYEQYF

SEQ ID NO: 231159 - protein, 16 aa, Homo sapiens
  CDR3 for alpha chain variable domain of TCR clone 115580 (TRAV3, TRAJ18)
CAVRDGRGATLGRLSF

SEQ ID NO: 231160 - protein, 15 aa, Homo sapiens
  CDR3 for beta chain variable domain of TCR clone 115580 (TRBV7-9, TRBJ1-6)
CASSSPGRGNSPLHF

SEQ ID NO: 231161 - protein, 15 aa, Homo sapiens
  CDR3 for alpha chain variable domain of TCR clone 115581 (TRAV27, TRAJ38)
CAGRFNAGNNSKLIW

SEQ ID NO: 231162 - protein, 13 aa, Homo sapiens
  CDR3 for beta chain variable domain of TCR clone 115581 (TRBV12-5, TRBJ2-3)
CASQNRGTDTQYF

SEQ ID NO: 231163 - protein, 18 aa, Homo sapiens
  CDR3 for alpha chain variable domain of TCR clone 115582 (TRAV29/DV5, TRAJ53)
CSVLLCSKRGGSNYKLTS

SEQ ID NO: 231164 - protein, 17 aa, Homo sapiens
  CDR3 for beta chain variable domain of TCR clone 115582 (TRBV7-8, TRBJ2-6)
CASSAGTGGAGANVLTF

SEQ ID NO: 231165 - protein, 17 aa, Homo sapiens
  CDR3 for alpha chain variable domain of TCR clone 115583 (TRAV8-6, TRAJ58)
CAVSSWEGETSGSRLTF

SEQ ID NO: 231166 - protein, 14 aa, Homo sapiens
  CDR3 for beta chain variable domain of TCR clone 115583 (TRBV4-2, TRBJ2-1)
CASGLDRAYNEQFF

SEQ ID NO: 231167 - protein, 15 aa, Homo sapiens
  CDR3 for alpha chain variable domain of TCR clone 115584 (TRAV12-1, TRAJ15)
CVVTRANQAGTALTF

SEQ ID NO: 231168 - protein, 14 aa, Homo sapiens
  CDR3 for beta chain variable domain of TCR clone 115584 (TRBV5-1, TRBJ1-1)
CASSLVSINTEAFF

SEQ ID NO: 231169 - protein, 15 aa, Homo sapiens
  CDR3 for alpha chain variable domain of TCR clone 115585 (TRAV3, TRAJ5)
CAVRDLDTGRRALTF

SEQ ID NO: 231170 - protein, 16 aa, Homo sapiens
  CDR3 for beta chain variable domain of TCR clone 115585 (TRBV7-7, TRBJ2-1)
CASSLASGTSYNEQFF

SEQ ID NO: 231171 - protein, 14 aa, Homo sapiens
  CDR3 for alpha chain variable domain of TCR clone 115586 (TRAV17, TRAJ57)
CATDPPGGSEKLVF

SEQ ID NO: 231172 - protein, 15 aa, Homo sapiens
  CDR3 for beta chain variable domain of TCR clone 115586 (TRBV5-1, TRBJ2-7)
CASSLDLTSSYEQYF

SEQ ID NO: 231173 - protein, 14 aa, Homo sapiens
  CDR3 for alpha chain variable domain of TCR clone 115587 (TRAV12-3, TRAJ42)
CAMNYGGSQGNPIF

SEQ ID NO: 231174 - protein, 13 aa, Homo sapiens
  CDR3 for beta chain variable domain of TCR clone 115587 (TRBV7-3, TRBJ2-1)
CASSLWPYNEQFF

SEQ ID NO: 231175 - protein, 14 aa, Homo sapiens
  CDR3 for alpha chain variable domain of TCR clone 115588 (TRAV1-2, TRAJ8)
CAVREETGFQKLVF

SEQ ID NO: 231176 - protein, 15 aa, Homo sapiens
  CDR3 for beta chain variable domain of TCR clone 115588 (TRBV28, TRBJ2-4)
CAAGSGTLLMGIQYF

SEQ ID NO: 231177 - protein, 14 aa, Homo sapiens
  CDR3 for alpha chain variable domain of TCR clone 115589 (TRAV12-2, TRAJ44)
CAVNKAGTASKLTF

SEQ ID NO: 231178 - protein, 12 aa, Homo sapiens
  CDR3 for beta chain variable domain of TCR clone 115589 (TRBV19, TRBJ1-4)
CASKDWPGELFF

SEQ ID NO: 231179 - protein, 14 aa, Homo sapiens
  CDR3 for alpha chain variable domain of TCR clone 115590 (TRAV12-3, TRAJ12)
CAMSEVDSSYKLIF

SEQ ID NO: 231180 - protein, 12 aa, Homo sapiens
  CDR3 for beta chain variable domain of TCR clone 115590 (TRBV18, TRBJ1-4)
CASSPSREELFF

SEQ ID NO: 231181 - protein, 12 aa, Homo sapiens
  CDR3 for alpha chain variable domain of TCR clone 115591 (TRAV12-1, TRAJ20)
CVVNPDDYKLSF

SEQ ID NO: 231182 - protein, 16 aa, Homo sapiens
  CDR3 for beta chain variable domain of TCR clone 115591 (TRBV7-3, TRBJ2-2)
CASSLKRGTLSGELFF

SEQ ID NO: 231183 - protein, 12 aa, Homo sapiens
  CDR3 for alpha chain variable domain of TCR clone 115592 (TRAV3, TRAJ7)
CADLLWEQQTRF

SEQ ID NO: 231184 - protein, 21 aa, Homo sapiens
  CDR3 for beta chain variable domain of TCR clone 115592 (TRBV7-3, TRBJ2-5)
GGTQPCISGPAASGGGETQYF

SEQ ID NO: 231185 - protein, 15 aa, Homo sapiens
  CDR3 for alpha chain variable domain of TCR clone 115593 (TRAV17, TRAJ16)
CATALRFSDGQKLLF

SEQ ID NO: 231186 - protein, 16 aa, Homo sapiens
  CDR3 for beta chain variable domain of TCR clone 115593 (TRBV12-4, TRBJ2-7)
CASSLIGGTGTYEQYF

SEQ ID NO: 231187 - protein, 15 aa, Homo sapiens
  CDR3 for alpha chain variable domain of TCR clone 115594 (TRAV3, TRAJ5)
CAVRDRKTARRALTF

SEQ ID NO: 231188 - protein, 15 aa, Homo sapiens
  CDR3 for beta chain variable domain of TCR clone 115594 (TRBV7-8, TRBJ2-1)
CASSLADSLYNEQFF

SEQ ID NO: 231189 - protein, 13 aa, Homo sapiens
  CDR3 for alpha chain variable domain of TCR clone 115595 (TRAV12-2, TRAJ12)
CAGLEDSSYKLIF

SEQ ID NO: 231190 - protein, 13 aa, Homo sapiens
  CDR3 for beta chain variable domain of TCR clone 115595 (TRBV28, TRBJ2-1)
CASSLIGRDEQFF

SEQ ID NO: 231191 - protein, 13 aa, Homo sapiens
  CDR3 for alpha chain variable domain of TCR clone 115596 (TRAV29/DV5, TRAJ31)
CAARRNNNARLMF

SEQ ID NO: 231192 - protein, 12 aa, Homo sapiens
  CDR3 for beta chain variable domain of TCR clone 115596 (TRBV11-2, TRBJ2-2)
CASSLGGGELFF

SEQ ID NO: 231193 - protein, 11 aa, Homo sapiens
  CDR3 for alpha chain variable domain of TCR clone 115597 (TRAV36/DV7, TRAJ54)
CAMEGAQKLVF

SEQ ID NO: 231194 - protein, 13 aa, Homo sapiens
  CDR3 for beta chain variable domain of TCR clone 115597 (TRBV12-4, TRBJ1-5)
CASSSRSYQPQHF

SEQ ID NO: 231195 - protein, 15 aa, Homo sapiens
  CDR3 for alpha chain variable domain of TCR clone 115598 (TRAV25, TRAJ53)
CPTSNSGGSNYKLTF

SEQ ID NO: 231196 - protein, 20 aa, Homo sapiens
  CDR3 for beta chain variable domain of TCR clone 115598 (TRBV7-8, TRBJ2-2)
CASSHLFPGPTIHITGELFF

SEQ ID NO: 231197 - protein, 14 aa, Homo sapiens
  CDR3 for alpha chain variable domain of TCR clone 115599 (TRAV26-1, TRAJ45)
CIEVTGGGANGLTF

SEQ ID NO: 231198 - protein, 13 aa, Homo sapiens
  CDR3 for beta chain variable domain of TCR clone 115599 (TRBV7-6, TRBJ1-2)
CASSLVADYGYTF

SEQ ID NO: 231199 - protein, 12 aa, Homo sapiens
  CDR3 for alpha chain variable domain of TCR clone 115600 (TRAV21, TRAJ33)
CAKMDSNYQLIW

SEQ ID NO: 231200 - protein, 14 aa, Homo sapiens
  CDR3 for beta chain variable domain of TCR clone 115600 (TRBV2, TRBJ2-7)
CASSVTSGGYEQYF

SEQ ID NO: 231201 - protein, 10 aa, Homo sapiens
  CDR3 for alpha chain variable domain of TCR clone 115601 (TRAV16, TRAJ22)
SAMYLRQLTF

SEQ ID NO: 231202 - protein, 13 aa, Homo sapiens
  CDR3 for beta chain variable domain of TCR clone 115601 (TRBV18, TRBJ1-1)
CASSPGPSGEAFF

SEQ ID NO: 231203 - protein, 16 aa, Homo sapiens
  CDR3 for alpha chain variable domain of TCR clone 115602 (TRAV30, TRAJ49)
SAAQRVGPNTGNQFYF

SEQ ID NO: 231204 - protein, 15 aa, Homo sapiens
  CDR3 for beta chain variable domain of TCR clone 115602 (TRBV2, TRBJ2-1)
CASSELAGSYNEQFS

SEQ ID NO: 231205 - protein, 14 aa, Homo sapiens
  CDR3 for alpha chain variable domain of TCR clone 115603 (TRAV35, TRAJ40)
CAGSTTSGTYKYIF

SEQ ID NO: 231206 - protein, 14 aa, Homo sapiens
  CDR3 for beta chain variable domain of TCR clone 115603 (TRBV20-1, TRBJ2-4)
CSASGRVGENIQYF

SEQ ID NO: 231207 - protein, 16 aa, Homo sapiens
  CDR3 for alpha chain variable domain of TCR clone 115604 (TRAV3, TRAJ21)
CAVRDIERGNFNKFYF

SEQ ID NO: 231208 - protein, 15 aa, Homo sapiens
  CDR3 for beta chain variable domain of TCR clone 115604 (TRBV13, TRBJ1-2)
CASSLGRQPGYGYTF

SEQ ID NO: 231209 - protein, 12 aa, Homo sapiens
  CDR3 for alpha chain variable domain of TCR clone 115605 (TRAV27, TRAJ33)
CAGDGSDYQLIW

SEQ ID NO: 231210 - protein, 12 aa, Homo sapiens
  CDR3 for beta chain variable domain of TCR clone 115605 (TRBV11-2, TRBJ2-2)
CASSLGGGELFF

SEQ ID NO: 231211 - protein, 16 aa, Homo sapiens
  CDR3 for alpha chain variable domain of TCR clone 115606 (TRAV8-3, TRAJ13)
CAVRAYPSGGYQKVTF

SEQ ID NO: 231212 - protein, 15 aa, Homo sapiens
  CDR3 for beta chain variable domain of TCR clone 115606 (TRBV19, TRBJ1-5)
CASSIVWADNQPQHF

SEQ ID NO: 231213 - protein, 13 aa, Homo sapiens
  CDR3 for alpha chain variable domain of TCR clone 115607 (TRAV8-3, TRAJ28)
GAVGAVGSYQLTF

SEQ ID NO: 231214 - protein, 14 aa, Homo sapiens
  CDR3 for beta chain variable domain of TCR clone 115607 (TRBV7-2, TRBJ2-7)
CASRSQGAAYEQYF

SEQ ID NO: 231215 - protein, 15 aa, Homo sapiens
  CDR3 for alpha chain variable domain of TCR clone 115608 (TRAV13-1, TRAJ32)
CAASIYGGATNKLIF

SEQ ID NO: 231216 - protein, 17 aa, Homo sapiens
  CDR3 for beta chain variable domain of TCR clone 115608 (TRBV7-3, TRBJ2-5)
FASSLGSGRSGSETQYF

SEQ ID NO: 231217 - protein, 17 aa, Homo sapiens
  CDR3 for alpha chain variable domain of TCR clone 115609 (TRAV13-1, TRAJ53)
CSASWKSSGGSNYKLTF

SEQ ID NO: 231218 - protein, 19 aa, Homo sapiens
  CDR3 for beta chain variable domain of TCR clone 115609 (TRBV7-9, TRBJ2-1)
CASSHNRGALLRSYNEQFF

SEQ ID NO: 231219 - protein, 11 aa, Homo sapiens
  CDR3 for alpha chain variable domain of TCR clone 115610 (TRAV1-1, TRAJ23)
FAVRQGGKLIF

SEQ ID NO: 231220 - protein, 14 aa, Homo sapiens
  CDR3 for beta chain variable domain of TCR clone 115610 (TRBV19, TRBJ2-1)
CASPTFVLSGEQFF

SEQ ID NO: 231221 - protein, 14 aa, Homo sapiens
  CDR3 for alpha chain variable domain of TCR clone 115611 (TRAV1-2, TRAJ16)
CAVNRFSDAQKLLF

SEQ ID NO: 231222 - protein, 14 aa, Homo sapiens
  CDR3 for beta chain variable domain of TCR clone 115611 (TRBV20-1, TRBJ1-5)
CSAPGTGVGQPQHF

SEQ ID NO: 231223 - protein, 12 aa, Homo sapiens
  CDR3 for alpha chain variable domain of TCR clone 115612 (TRAV20, TRAJ39)
CAVGNAGNMLTF

SEQ ID NO: 231224 - protein, 17 aa, Homo sapiens
  CDR3 for beta chain variable domain of TCR clone 115612 (TRBV4-1, TRBJ2-3)
CASSQGYVSGDTDTQYF

SEQ ID NO: 231225 - protein, 13 aa, Homo sapiens
  CDR3 for alpha chain variable domain of TCR clone 115613 (TRAV29/DV5, TRAJ31)
CAASRNNNARLMF

SEQ ID NO: 231226 - protein, 14 aa, Homo sapiens
  CDR3 for beta chain variable domain of TCR clone 115613 (TRBV7-9, TRBJ2-2)
CAISLVQDTGELFF

SEQ ID NO: 231227 - protein, 15 aa, Homo sapiens
  CDR3 for alpha chain variable domain of TCR clone 115614 (TRAV12-2, TRAJ53)
CAVNGGGGSNYKLTF

SEQ ID NO: 231228 - protein, 17 aa, Homo sapiens
  CDR3 for beta chain variable domain of TCR clone 115614 (TRBV7-3, TRBJ2-3)
CASSLMKRIRGADTQYF

SEQ ID NO: 231229 - protein, 15 aa, Homo sapiens
  CDR3 for alpha chain variable domain of TCR clone 115615 (TRAV26-1, TRAJ15)
CIVRAANQAVTALIF

SEQ ID NO: 231230 - protein, 15 aa, Homo sapiens
  CDR3 for beta chain variable domain of TCR clone 115615 (TRBV20-1, TRBJ1-1)
CSARSAATSNTEAFF

SEQ ID NO: 231231 - protein, 11 aa, Homo sapiens
  CDR3 for alpha chain variable domain of TCR clone 115616 (TRAV17, TRAJ21)
CATGNFNKFYF

SEQ ID NO: 231232 - protein, 15 aa, Homo sapiens
  CDR3 for beta chain variable domain of TCR clone 115616 (TRBV6-3, TRBJ2-7)
CASSSPGTVFYEQYF

SEQ ID NO: 231233 - protein, 14 aa, Homo sapiens
  CDR3 for alpha chain variable domain of TCR clone 115617 (TRAV17, TRAJ11)
CATDTSRGYSTLTF

SEQ ID NO: 231234 - protein, 13 aa, Homo sapiens
  CDR3 for beta chain variable domain of TCR clone 115617 (TRBV19, TRBJ2-5)
CASRDSRREAQYF

SEQ ID NO: 231235 - protein, 14 aa, Homo sapiens
  CDR3 for alpha chain variable domain of TCR clone 115618 (TRAV12-2, TRAJ13)
CAVKKTGGYQKVTF

SEQ ID NO: 231236 - protein, 14 aa, Homo sapiens
  CDR3 for beta chain variable domain of TCR clone 115618 (TRBV12-5, TRBJ2-5)
CASGSRTHHETQYF

SEQ ID NO: 231237 - protein, 17 aa, Homo sapiens
  CDR3 for alpha chain variable domain of TCR clone 115619 (TRAV13-1, TRAJ52)
CAASSGAGGTSYGKLTF

SEQ ID NO: 231238 - protein, 15 aa, Homo sapiens
  CDR3 for beta chain variable domain of TCR clone 115619 (TRBV5-1, TRBJ2-1)
CASSQAGYWWNEQFF

SEQ ID NO: 231239 - protein, 11 aa, Homo sapiens
  CDR3 for alpha chain variable domain of TCR clone 115620 (TRAV21, TRAJ34)
CAVTNTDKLIF

SEQ ID NO: 231240 - protein, 16 aa, Homo sapiens
  CDR3 for beta chain variable domain of TCR clone 115620 (TRBV18, TRBJ1-1)
CASSPGLGGRGGEAFF

SEQ ID NO: 231241 - protein, 13 aa, Homo sapiens
  CDR3 for alpha chain variable domain of TCR clone 115621 (TRAV2, TRAJ40)
CAVVTSGTYKYIF

SEQ ID NO: 231242 - protein, 13 aa, Homo sapiens
  CDR3 for beta chain variable domain of TCR clone 115621 (TRBV27, TRBJ1-4)
CASSLMGDEKLFF

SEQ ID NO: 231243 - protein, 15 aa, Homo sapiens
  CDR3 for alpha chain variable domain of TCR clone 115622 (TRAV26-1, TRAJ56)
CIVRVATGANSKLTF

SEQ ID NO: 231244 - protein, 15 aa, Homo sapiens
  CDR3 for beta chain variable domain of TCR clone 115622 (TRBV27, TRBJ2-7)
CASSPPREGQREQYF

SEQ ID NO: 231245 - protein, 18 aa, Homo sapiens
  CDR3 for alpha chain variable domain of TCR clone 115623 (TRAV8-6, TRAJ52)
CAVSRANAGGTSYGKLTF

SEQ ID NO: 231246 - protein, 13 aa, Homo sapiens
  CDR3 for beta chain variable domain of TCR clone 115623 (TRBV12-5, TRBJ2-3)
CASGDRQSDTQYF

SEQ ID NO: 231247 - protein, 12 aa, Homo sapiens
  CDR3 for alpha chain variable domain of TCR clone 115624 (TRAV4, TRAJ6)
CLAPGGSYILTF

SEQ ID NO: 231248 - protein, 17 aa, Homo sapiens
  CDR3 for beta chain variable domain of TCR clone 115624 (TRBV20-1, TRBJ2-2)
CSASGSGQGGLTGELFF

SEQ ID NO: 231249 - protein, 20 aa, Homo sapiens
  CDR3 for alpha chain variable domain of TCR clone 115625 (TRAV12-1, TRAJ42)
SSVIQPPTSVKGGSQGNLIF

SEQ ID NO: 231250 - protein, 15 aa, Homo sapiens
  CDR3 for beta chain variable domain of TCR clone 115625 (TRBV11-3, TRBJ2-7)
CASSPGPASSYEQYF

SEQ ID NO: 231251 - protein, 15 aa, Homo sapiens
  CDR3 for alpha chain variable domain of TCR clone 115626 (TRAV2, TRAJ9)
CAVADRGTGGFKTIF

SEQ ID NO: 231252 - protein, 14 aa, Homo sapiens
  CDR3 for beta chain variable domain of TCR clone 115626 (TRBV4-1, TRBJ2-2)
CASSQAVNTGELFF

SEQ ID NO: 231253 - protein, 17 aa, Homo sapiens
  CDR3 for alpha chain variable domain of TCR clone 115627 (TRAV2, TRAJ36)
CAVEDRGNGGKQPLLWD

SEQ ID NO: 231254 - protein, 14 aa, Homo sapiens
  CDR3 for beta chain variable domain of TCR clone 115627 (TRBV7-9, TRBJ2-5)
CASSLDTAQETQYF

SEQ ID NO: 231255 - protein, 11 aa, Homo sapiens
  CDR3 for alpha chain variable domain of TCR clone 115628 (TRAV12-2, TRAJ49)
CAVNTVNQFYF

SEQ ID NO: 231256 - protein, 12 aa, Homo sapiens
  CDR3 for beta chain variable domain of TCR clone 115628 (TRBV2, TRBJ2-3)
CASSGRFDTQYF

SEQ ID NO: 231257 - protein, 14 aa, Homo sapiens
  CDR3 for alpha chain variable domain of TCR clone 115629 (TRAV12-3, TRAJ10)
SHLPLTGGGNKLSF

SEQ ID NO: 231258 - protein, 12 aa, Homo sapiens
  CDR3 for beta chain variable domain of TCR clone 115629 (TRBV7-9, TRBJ2-7)
CASSIKREEQYF

SEQ ID NO: 231259 - protein, 14 aa, Homo sapiens
  CDR3 for alpha chain variable domain of TCR clone 115630 (TRAV2, TRAJ9)
CAVEDRGGGFKTIF

SEQ ID NO: 231260 - protein, 15 aa, Homo sapiens
  CDR3 for beta chain variable domain of TCR clone 115630 (TRBV11-3, TRBJ2-3)
CASSAGTVVTNTQYF

SEQ ID NO: 231261 - protein, 12 aa, Homo sapiens
  CDR3 for alpha chain variable domain of TCR clone 115631 (TRAV2, TRAJ31)
CAVEDNNARLMF

SEQ ID NO: 231262 - protein, 14 aa, Homo sapiens
  CDR3 for beta chain variable domain of TCR clone 115631 (TRBV7-2, TRBJ2-7)
CASSLYPGRYEQYF

SEQ ID NO: 231263 - protein, 13 aa, Homo sapiens
  CDR3 for alpha chain variable domain of TCR clone 115632 (TRAV17, TRAJ9)
CTTDYTGGFKTIF

SEQ ID NO: 231264 - protein, 16 aa, Homo sapiens
  CDR3 for beta chain variable domain of TCR clone 115632 (TRBV7-7, TRBJ2-1)
CASSLASGTSYNEQFF

SEQ ID NO: 231265 - protein, 19 aa, Homo sapiens
  CDR3 for alpha chain variable domain of TCR clone 115633 (TRAV1-2, TRAJ26)
CLLPLCCERPDNYGQNFVF

SEQ ID NO: 231266 - protein, 13 aa, Homo sapiens
  CDR3 for beta chain variable domain of TCR clone 115633 (TRBV29-1, TRBJ2-5)
CSVLLASGETQYF

SEQ ID NO: 231267 - protein, 16 aa, Homo sapiens
  CDR3 for alpha chain variable domain of TCR clone 115634 (TRAV3, TRAJ10)
CAVRDMNAGGGNKLTF

SEQ ID NO: 231268 - protein, 14 aa, Homo sapiens
  CDR3 for beta chain variable domain of TCR clone 115634 (TRBV19, TRBJ2-1)
CASKDPSSYNEQFF

SEQ ID NO: 231269 - protein, 14 aa, Homo sapiens
  CDR3 for alpha chain variable domain of TCR clone 115635 (TRAV8-4, TRAJ15)
CAVTIREAGTSLIF

SEQ ID NO: 231270 - protein, 13 aa, Homo sapiens
  CDR3 for beta chain variable domain of TCR clone 115635 (TRBV10-3, TRBJ2-7)
CAISEKGGYEQYF

SEQ ID NO: 231271 - protein, 15 aa, Homo sapiens
  CDR3 for alpha chain variable domain of TCR clone 115636 (TRAV21, TRAJ24)
YAARSSTDSWGKLQF

SEQ ID NO: 231272 - protein, 13 aa, Homo sapiens
  CDR3 for beta chain variable domain of TCR clone 115636 (TRBV11-2, TRBJ2-5)
CASSSTGEETQYF

SEQ ID NO: 231273 - protein, 13 aa, Homo sapiens
  CDR3 for alpha chain variable domain of TCR clone 115637 (TRAV21, TRAJ27)
CAARPGNAGKSTF

SEQ ID NO: 231274 - protein, 15 aa, Homo sapiens
  CDR3 for beta chain variable domain of TCR clone 115637 (TRBV24-1, TRBJ2-4)
CATSDPRDRANIQYF

SEQ ID NO: 231275 - protein, 17 aa, Homo sapiens
  CDR3 for alpha chain variable domain of TCR clone 115638 (TRAV3, TRAJ42)
CAVRDRDYGGSQGNLIF

SEQ ID NO: 231276 - protein, 12 aa, Homo sapiens
  CDR3 for beta chain variable domain of TCR clone 115638 (TRBV18, TRBJ2-5)
CASSPNQETQYF

SEQ ID NO: 231277 - protein, 13 aa, Homo sapiens
  CDR3 for alpha chain variable domain of TCR clone 115639 (TRAV13-2, TRAJ48)
RAEMDFGNEKLTF

SEQ ID NO: 231278 - protein, 13 aa, Homo sapiens
  CDR3 for beta chain variable domain of TCR clone 115639 (TRBV7-9, TRBJ1-2)
CASSLKQNYGYTF

SEQ ID NO: 231279 - protein, 13 aa, Homo sapiens
  CDR3 for alpha chain variable domain of TCR clone 115640 (TRAV8-3, TRAJ43)
CAVVPYNNNDMRF

SEQ ID NO: 231280 - protein, 15 aa, Homo sapiens
  CDR3 for beta chain variable domain of TCR clone 115640 (TRBV19, TRBJ1-2)
CASSVGQVLNYGYTF

SEQ ID NO: 231281 - protein, 11 aa, Homo sapiens
  CDR3 for alpha chain variable domain of TCR clone 115641 (TRAV1-2, TRAJ40)
CAVPGAYKYIF

SEQ ID NO: 231282 - protein, 16 aa, Homo sapiens
  CDR3 for beta chain variable domain of TCR clone 115641 (TRBV7-3, TRBJ2-2)
CASSLKRGTLSGELFF

SEQ ID NO: 231283 - protein, 12 aa, Homo sapiens
  CDR3 for alpha chain variable domain of TCR clone 115642 (TRAV13-1, TRAJ9)
CASHTGGFKTIF

SEQ ID NO: 231284 - protein, 13 aa, Homo sapiens
  CDR3 for beta chain variable domain of TCR clone 115642 (TRBV12-4, TRBJ1-2)
CASSPGSKDGYTF

SEQ ID NO: 231285 - protein, 15 aa, Homo sapiens
  CDR3 for alpha chain variable domain of TCR clone 115643 (TRAV3, TRAJ5)
CAVRDRKTGRRALTL

SEQ ID NO: 231286 - protein, 15 aa, Homo sapiens
  CDR3 for beta chain variable domain of TCR clone 115643 (TRBV7-9, TRBJ2-2)
CASGPLDTFPGELFF

SEQ ID NO: 231287 - protein, 14 aa, Homo sapiens
  CDR3 for alpha chain variable domain of TCR clone 115644 (TRAV8-2, TRAJ44)
CVVSLTGTASKLTF

SEQ ID NO: 231288 - protein, 13 aa, Homo sapiens
  CDR3 for beta chain variable domain of TCR clone 115644 (TRBV7-9, TRBJ1-2)
CASSLKQNYGYTF

SEQ ID NO: 231289 - protein, 11 aa, Homo sapiens
  CDR3 for alpha chain variable domain of TCR clone 115645 (TRAV13-1, TRAJ6)
CATLGSYIPTF

SEQ ID NO: 231290 - protein, 14 aa, Homo sapiens
  CDR3 for beta chain variable domain of TCR clone 115645 (TRBV7-6, TRBJ2-3)
CASSLGTVTDTQYF

SEQ ID NO: 231291 - protein, 23 aa, Homo sapiens
  CDR3 for alpha chain variable domain of TCR clone 115646 (TRAV26-1, TRAJ38)
CIADNAGNNHIQNPDPAVYQLRD

SEQ ID NO: 231292 - protein, 12 aa, Homo sapiens
  CDR3 for beta chain variable domain of TCR clone 115646 (TRBV11-2, TRBJ2-2)
CASSLGCGELFF

SEQ ID NO: 231293 - protein, 14 aa, Homo sapiens
  CDR3 for alpha chain variable domain of TCR clone 115647 (TRAV13-2, TRAJ17)
CAENSKAAGNKLTF

SEQ ID NO: 231294 - protein, 16 aa, Homo sapiens
  CDR3 for beta chain variable domain of TCR clone 115647 (TRBV20-1, TRBJ2-3)
CSAVRDRGPIADTQYF

SEQ ID NO: 231295 - protein, 16 aa, Homo sapiens
  CDR3 for alpha chain variable domain of TCR clone 115648 (TRAV12-3, TRAJ45)
CAMGWGSGGGADGLTF

SEQ ID NO: 231296 - protein, 14 aa, Homo sapiens
  CDR3 for beta chain variable domain of TCR clone 115648 (TRBV12-5, TRBJ2-5)
CASGSRTHQETQYF

SEQ ID NO: 231297 - protein, 17 aa, Homo sapiens
  CDR3 for alpha chain variable domain of TCR clone 115649 (TRAV3, TRAJ6)
CAVRDGPRAGGSYIPTF

SEQ ID NO: 231298 - protein, 16 aa, Homo sapiens
  CDR3 for beta chain variable domain of TCR clone 115649 (TRBV5-1, TRBJ1-3)
FASSPWAPSSGNTIYF

SEQ ID NO: 231299 - protein, 10 aa, Homo sapiens
  CDR3 for alpha chain variable domain of TCR clone 115650 (TRAV36/DV7, TRAJ48)
CAVGNEKLTF

SEQ ID NO: 231300 - protein, 14 aa, Homo sapiens
  CDR3 for beta chain variable domain of TCR clone 115650 (TRBV5-7, TRBJ1-1)
CASSLAGDWTEAFF

SEQ ID NO: 231301 - protein, 12 aa, Homo sapiens
  CDR3 for alpha chain variable domain of TCR clone 115651 (TRAV13-1, TRAJ9)
CASHTGGFQTIF

SEQ ID NO: 231302 - protein, 18 aa, Homo sapiens
  CDR3 for beta chain variable domain of TCR clone 115651 (TRBV11-2, TRBJ2-3)
CASSLGGASRGAPNTQYF

SEQ ID NO: 231303 - protein, 12 aa, Homo sapiens
  CDR3 for alpha chain variable domain of TCR clone 115652 (TRAV12-1, TRAJ40)
CVVYSGTYKYIF

SEQ ID NO: 231304 - protein, 14 aa, Homo sapiens
  CDR3 for beta chain variable domain of TCR clone 115652 (TRBV7-2, TRBJ2-5)
CASSFTQGQETQYF

SEQ ID NO: 231305 - protein, 14 aa, Homo sapiens
  CDR3 for alpha chain variable domain of TCR clone 115653 (TRAV26-1, TRAJ34)
CIVRVAGNTDKLIF

SEQ ID NO: 231306 - protein, 16 aa, Homo sapiens
  CDR3 for beta chain variable domain of TCR clone 115653 (TRBV12-5, TRBJ2-5)
CASGPRTSGNQETQHF

SEQ ID NO: 231307 - protein, 14 aa, Homo sapiens
  CDR3 for alpha chain variable domain of TCR clone 115654 (TRAV12-3, TRAJ42)
CAMNYGGSQGNLIF

SEQ ID NO: 231308 - protein, 12 aa, Homo sapiens
  CDR3 for beta chain variable domain of TCR clone 115654 (TRBV12-4, TRBJ1-1)
CASSPDREGAFF

SEQ ID NO: 231309 - protein, 12 aa, Homo sapiens
  CDR3 for alpha chain variable domain of TCR clone 115655 (TRAV12-2, TRAJ21)
CAVNRNFKKFYF

SEQ ID NO: 231310 - protein, 14 aa, Homo sapiens
  CDR3 for beta chain variable domain of TCR clone 115655 (TRBV12-4, TRBJ2-3)
CASSLSGATDTQYF

SEQ ID NO: 231311 - protein, 14 aa, Homo sapiens
  CDR3 for alpha chain variable domain of TCR clone 115656 (TRAV1-2, TRAJ16)
CAVNRFSDGQKLLF

SEQ ID NO: 231312 - protein, 16 aa, Homo sapiens
  CDR3 for beta chain variable domain of TCR clone 115656 (TRBV12-4, TRBJ2-7)
CASRSTGTGPSYEQYF

SEQ ID NO: 231313 - protein, 11 aa, Homo sapiens
  CDR3 for alpha chain variable domain of TCR clone 115657 (TRAV2, TRAJ33)
CAVDSNYQLIW

SEQ ID NO: 231314 - protein, 12 aa, Homo sapiens
  CDR3 for beta chain variable domain of TCR clone 115657 (TRBV11-2, TRBJ2-4)
CASSSASGSEYF

SEQ ID NO: 231315 - protein, 13 aa, Homo sapiens
  CDR3 for alpha chain variable domain of TCR clone 115658 (TRAV3, TRAJ5)
CAVRDTGRRALTF

SEQ ID NO: 231316 - protein, 16 aa, Homo sapiens
  CDR3 for beta chain variable domain of TCR clone 115658 (TRBV12-4, TRBJ1-4)
CASSLKGIGHGEKLFF

SEQ ID NO: 231317 - protein, 15 aa, Homo sapiens
  CDR3 for alpha chain variable domain of TCR clone 115659 (TRAV23/DV6, TRAJ44)
CAASGGTGTASKRTF

SEQ ID NO: 231318 - protein, 16 aa, Homo sapiens
  CDR3 for beta chain variable domain of TCR clone 115659 (TRBV20-1, TRBJ2-3)
CSALAFDTGDPDTQYF

SEQ ID NO: 231319 - protein, 12 aa, Homo sapiens
  CDR3 for alpha chain variable domain of TCR clone 115660 (TRAV12-3, TRAJ3)
CAIDSSASKIIF

SEQ ID NO: 231320 - protein, 17 aa, Homo sapiens
  CDR3 for beta chain variable domain of TCR clone 115660 (TRBV7-9, TRBJ2-3)
CASSVEEAGAYPDTQYF

SEQ ID NO: 231321 - protein, 15 aa, Homo sapiens
  CDR3 for alpha chain variable domain of TCR clone 115661 (TRAV14/DV4, TRAJ33)
CAMREGRDSKYQLIW

SEQ ID NO: 231322 - protein, 15 aa, Homo sapiens
  CDR3 for beta chain variable domain of TCR clone 115661 (TRBV5-5, TRBJ1-5)
CASSSTPGSNQPQHF

SEQ ID NO: 231323 - protein, 11 aa, Homo sapiens
  CDR3 for alpha chain variable domain of TCR clone 115662 (TRAV21, TRAJ30)
CCEVTDDKIIF

SEQ ID NO: 231324 - protein, 15 aa, Homo sapiens
  CDR3 for beta chain variable domain of TCR clone 115662 (TRBV6-6, TRBJ2-7)
CASSYSYGGSYEQYF

SEQ ID NO: 231325 - protein, 13 aa, Homo sapiens
  CDR3 for alpha chain variable domain of TCR clone 115663 (TRAV1-1, TRAJ31)
CASYLNNNARLMF

SEQ ID NO: 231326 - protein, 14 aa, Homo sapiens
  CDR3 for beta chain variable domain of TCR clone 115663 (TRBV4-1, TRBJ2-5)
CASSRSGSGEAQYF

SEQ ID NO: 231327 - protein, 13 aa, Homo sapiens
  CDR3 for alpha chain variable domain of TCR clone 115664 (TRAV8-3, TRAJ36)
CAVGATGANNLFF

SEQ ID NO: 231328 - protein, 14 aa, Homo sapiens
  CDR3 for beta chain variable domain of TCR clone 115664 (TRBV4-1, TRBJ2-2)
CASSQAVNTGELFF

SEQ ID NO: 231329 - protein, 13 aa, Homo sapiens
  CDR3 for alpha chain variable domain of TCR clone 115665 (TRAV27, TRAJ8)
CAGGPTGFQKLVF

SEQ ID NO: 231330 - protein, 15 aa, Homo sapiens
  CDR3 for beta chain variable domain of TCR clone 115665 (TRBV6-1, TRBJ2-7)
CASSESMGDLYEQYF

SEQ ID NO: 231331 - protein, 13 aa, Homo sapiens
  CDR3 for alpha chain variable domain of TCR clone 115666 (TRAV13-1, TRAJ5)
CAASDTGRRAFTF

SEQ ID NO: 231332 - protein, 12 aa, Homo sapiens
  CDR3 for beta chain variable domain of TCR clone 115666 (TRBV28, TRBJ2-3)
CASSLYRDTQYF

SEQ ID NO: 231333 - protein, 16 aa, Homo sapiens
  CDR3 for alpha chain variable domain of TCR clone 115667 (TRAV30, TRAJ24)
CGTEIVDADSWGKFQF

SEQ ID NO: 231334 - protein, 13 aa, Homo sapiens
  CDR3 for beta chain variable domain of TCR clone 115667 (TRBV12-4, TRBJ1-2)
CASSSGPNYGYTF

SEQ ID NO: 231335 - protein, 17 aa, Homo sapiens
  CDR3 for alpha chain variable domain of TCR clone 115668 (TRAV3, TRAJ42)
CAVRDRDYGGSQGNLIF

SEQ ID NO: 231336 - protein, 13 aa, Homo sapiens
  CDR3 for beta chain variable domain of TCR clone 115668 (TRBV10-3, TRBJ2-7)
CASNLAVNYEQYF

SEQ ID NO: 231337 - protein, 14 aa, Homo sapiens
  CDR3 for alpha chain variable domain of TCR clone 115669 (TRAV1-2, TRAJ16)
CAVNRFSDGQKLRF

SEQ ID NO: 231338 - protein, 15 aa, Homo sapiens
  CDR3 for beta chain variable domain of TCR clone 115669 (TRBV7-9, TRBJ1-4)
CASSARTGGNEKLFF

SEQ ID NO: 231339 - protein, 15 aa, Homo sapiens
  CDR3 for alpha chain variable domain of TCR clone 115670 (TRAV12-3, TRAJ6)
CAMSATTGGSYIPTF

SEQ ID NO: 231340 - protein, 14 aa, Homo sapiens
  CDR3 for beta chain variable domain of TCR clone 115670 (TRBV18, TRBJ2-7)
CASSPRGGAYEQYF

SEQ ID NO: 231341 - protein, 10 aa, Homo sapiens
  CDR3 for alpha chain variable domain of TCR clone 115671 (TRAV1-2, TRAJ20)
CALNDYKLSF

SEQ ID NO: 231342 - protein, 16 aa, Homo sapiens
  CDR3 for beta chain variable domain of TCR clone 115671 (TRBV20-1, TRBJ1-1)
CSARALTQGMNTEAFF

SEQ ID NO: 231343 - protein, 13 aa, Homo sapiens
  CDR3 for alpha chain variable domain of TCR clone 115672 (TRAV2, TRAJ40)
CAVVTSGTYKYIF

SEQ ID NO: 231344 - protein, 15 aa, Homo sapiens
  CDR3 for beta chain variable domain of TCR clone 115672 (TRBV6-4, TRBJ2-1)
CASSSGTSGYNEQFF

SEQ ID NO: 231345 - protein, 13 aa, Homo sapiens
  CDR3 for alpha chain variable domain of TCR clone 115673 (TRAV3, TRAJ4)
CAVRDGGYNKRIF

SEQ ID NO: 231346 - protein, 15 aa, Homo sapiens
  CDR3 for beta chain variable domain of TCR clone 115673 (TRBV5-1, TRBJ2-1)
CASSPPRAPYNEQFF

SEQ ID NO: 231347 - protein, 14 aa, Homo sapiens
  CDR3 for alpha chain variable domain of TCR clone 115674 (TRAV26-1, TRAJ22)
CIVRVSGSARQLTF

SEQ ID NO: 231348 - protein, 15 aa, Homo sapiens
  CDR3 for beta chain variable domain of TCR clone 115674 (TRBV11-2, TRBJ1-6)
CASSLDPWAVSPLHF

SEQ ID NO: 231349 - protein, 15 aa, Homo sapiens
  CDR3 for alpha chain variable domain of TCR clone 115675 (TRAV29/DV5, TRAJ29)
CAASERSSGNTPLVF

SEQ ID NO: 231350 - protein, 17 aa, Homo sapiens
  CDR3 for beta chain variable domain of TCR clone 115675 (TRBV4-1, TRBJ1-4)
CASSQDGPRGVEEKLFF

SEQ ID NO: 231351 - protein, 16 aa, Homo sapiens
  CDR3 for alpha chain variable domain of TCR clone 115676 (TRAV3, TRAJ21)
CAVRDIERGNFNKFYF

SEQ ID NO: 231352 - protein, 13 aa, Homo sapiens
  CDR3 for beta chain variable domain of TCR clone 115676 (TRBV27, TRBJ2-7)
CASSLKTGYEQYF

SEQ ID NO: 231353 - protein, 14 aa, Homo sapiens
  CDR3 for alpha chain variable domain of TCR clone 115677 (TRAV26-1, TRAJ21)
CIIRVVYNFNKFYF

SEQ ID NO: 231354 - protein, 17 aa, Homo sapiens
  CDR3 for beta chain variable domain of TCR clone 115677 (TRBV11-2, TRBJ2-1)
CASSLYPPGVEYNEQFF

SEQ ID NO: 231355 - protein, 13 aa, Homo sapiens
  CDR3 for alpha chain variable domain of TCR clone 115678 (TRAV23/DV6, TRAJ22)
CAPYSGSARQLTF

SEQ ID NO: 231356 - protein, 13 aa, Homo sapiens
  CDR3 for beta chain variable domain of TCR clone 115678 (TRBV19, TRBJ2-7)
CASRKAGGSEQYF

SEQ ID NO: 231357 - protein, 15 aa, Homo sapiens
  CDR3 for alpha chain variable domain of TCR clone 115679 (TRAV13-1, TRAJ8)
CAASIPNTGFQKLVF

SEQ ID NO: 231358 - protein, 17 aa, Homo sapiens
  CDR3 for beta chain variable domain of TCR clone 115679 (TRBV5-1, TRBJ2-5)
CASSLLGLAANQETQYF

SEQ ID NO: 231359 - protein, 14 aa, Homo sapiens
  CDR3 for alpha chain variable domain of TCR clone 115680 (TRAV1-2, TRAJ6)
CAVRSSGGSYIPTF

SEQ ID NO: 231360 - protein, 17 aa, Homo sapiens
  CDR3 for beta chain variable domain of TCR clone 115680 (TRBV7-9, TRBJ2-6)
CASSFGAGYSGANVLTF

SEQ ID NO: 231361 - protein, 14 aa, Homo sapiens
  CDR3 for alpha chain variable domain of TCR clone 115681 (TRAV13-1, TRAJ35)
CAASKGGFGNVLHC

SEQ ID NO: 231362 - protein, 15 aa, Homo sapiens
  CDR3 for beta chain variable domain of TCR clone 115681 (TRBV7-2, TRBJ1-2)
CASSPRAGWNYGYTF

SEQ ID NO: 231363 - protein, 12 aa, Homo sapiens
  CDR3 for alpha chain variable domain of TCR clone 115682 (TRAV16, TRAJ49)
CALNEGGNQFCF

SEQ ID NO: 231364 - protein, 14 aa, Homo sapiens
  CDR3 for beta chain variable domain of TCR clone 115682 (TRBV7-9, TRBJ2-1)
CASRPTGLRNEQFF

SEQ ID NO: 231365 - protein, 13 aa, Homo sapiens
  CDR3 for alpha chain variable domain of TCR clone 115683 (TRAV27, TRAJ49)
CAPRPYTGNQLYF

SEQ ID NO: 231366 - protein, 18 aa, Homo sapiens
  CDR3 for beta chain variable domain of TCR clone 115683 (TRBV7-3, TRBJ2-5)
CASSLGGAAQGRWETQYF

SEQ ID NO: 231367 - protein, 14 aa, Homo sapiens
  CDR3 for alpha chain variable domain of TCR clone 115684 (TRAV12-2, TRAJ5)
FAVNRSTGRRALTF

SEQ ID NO: 231368 - protein, 12 aa, Homo sapiens
  CDR3 for beta chain variable domain of TCR clone 115684 (TRBV19, TRBJ1-5)
CASSIAQQPQHF

SEQ ID NO: 231369 - protein, 13 aa, Homo sapiens
  CDR3 for alpha chain variable domain of TCR clone 115685 (TRAV21, TRAJ27)
CAARPGNAGKSTF

SEQ ID NO: 231370 - protein, 13 aa, Homo sapiens
  CDR3 for beta chain variable domain of TCR clone 115685 (TRBV18, TRBJ2-7)
CASQSGGRYEQYF

SEQ ID NO: 231371 - protein, 14 aa, Homo sapiens
  CDR3 for alpha chain variable domain of TCR clone 115686 (TRAV17, TRAJ16)
CATVDFSDGQKLLF

SEQ ID NO: 231372 - protein, 12 aa, Homo sapiens
  CDR3 for beta chain variable domain of TCR clone 115686 (TRBV24-1, TRBJ1-1)
CATLYPDTEAFF

SEQ ID NO: 231373 - protein, 18 aa, Homo sapiens
  CDR3 for alpha chain variable domain of TCR clone 115687 (TRAV26-2, TRAJ45)
CILRLWGYSGGGADRLTF

SEQ ID NO: 231374 - protein, 17 aa, Homo sapiens
  CDR3 for beta chain variable domain of TCR clone 115687 (TRBV28, TRBJ2-3)
CASSPTPAGGRVDTQYF

SEQ ID NO: 231375 - protein, 14 aa, Homo sapiens
  CDR3 for alpha chain variable domain of TCR clone 115688 (TRAV27, TRAJ12)
CAGARIDSSYKLIF

SEQ ID NO: 231376 - protein, 18 aa, Homo sapiens
  CDR3 for beta chain variable domain of TCR clone 115688 (TRBV10-3, TRBJ2-7)
CAISESGRPSGGRVEQYF

SEQ ID NO: 231377 - protein, 15 aa, Homo sapiens
  CDR3 for alpha chain variable domain of TCR clone 115689 (TRAV27, TRAJ38)
CAARRNADNHRKLIW

SEQ ID NO: 231378 - protein, 13 aa, Homo sapiens
  CDR3 for beta chain variable domain of TCR clone 115689 (TRBV12-5, TRBJ2-3)
CASGDRQSDTQYF

SEQ ID NO: 231379 - protein, 17 aa, Homo sapiens
  CDR3 for alpha chain variable domain of TCR clone 115690 (TRAV26-1, TRAJ37)
CIVRVITVSSNTGKLIF

SEQ ID NO: 231380 - protein, 16 aa, Homo sapiens
  CDR3 for beta chain variable domain of TCR clone 115690 (TRBV5-4, TRBJ2-3)
CASQQPGAGGADTQYF

SEQ ID NO: 231381 - protein, 16 aa, Homo sapiens
  CDR3 for alpha chain variable domain of TCR clone 115691 (TRAV21, TRAJ17)
CAVRPVEEAAGNKLTF

SEQ ID NO: 231382 - protein, 14 aa, Homo sapiens
  CDR3 for beta chain variable domain of TCR clone 115691 (TRBV3-1, TRBJ2-5)
CASSQGPDQETQYF

SEQ ID NO: 231383 - protein, 17 aa, Homo sapiens
  CDR3 for alpha chain variable domain of TCR clone 115692 (TRAV4, TRAJ18)
CLVGERSVGSTLGRLYF

SEQ ID NO: 231384 - protein, 14 aa, Homo sapiens
  CDR3 for beta chain variable domain of TCR clone 115692 (TRBV6-5, TRBJ1-2)
CASSYDGTGGGYTS

SEQ ID NO: 231385 - protein, 14 aa, Homo sapiens
  CDR3 for alpha chain variable domain of TCR clone 115693 (TRAV1-2, TRAJ8)
CAAREDTGFQKLVF

SEQ ID NO: 231386 - protein, 16 aa, Homo sapiens
  CDR3 for beta chain variable domain of TCR clone 115693 (TRBV20-1, TRBJ1-4)
CSAPGQGLLTNEKLFF

SEQ ID NO: 231387 - protein, 13 aa, Homo sapiens
  CDR3 for alpha chain variable domain of TCR clone 115694 (TRAV38-2/DV8, TRAJ34)
CAYRNYNTDKLIF

SEQ ID NO: 231388 - protein, 15 aa, Homo sapiens
  CDR3 for beta chain variable domain of TCR clone 115694 (TRBV20-1, TRBJ2-5)
CSAEGTGGLQETQYV

SEQ ID NO: 231389 - protein, 16 aa, Homo sapiens
  CDR3 for alpha chain variable domain of TCR clone 115695 (TRAV23/DV6, )
CADIQNPDPAVYQLRD

SEQ ID NO: 231390 - protein, 16 aa, Homo sapiens
  CDR3 for beta chain variable domain of TCR clone 115695 (TRBV5-4, TRBJ2-3)
CASQQPGAGGADTQYF

SEQ ID NO: 231391 - protein, 22 aa, Homo sapiens
  CDR3 for alpha chain variable domain of TCR clone 115696 (TRAV21, )
CAVRQDAGNNHIQNPDPAVYQL

SEQ ID NO: 231392 - protein, 19 aa, Homo sapiens
  CDR3 for beta chain variable domain of TCR clone 115696 (TRBV4-1, TRBJ2-5)
CASSQEGSGTSKRGETQYF

SEQ ID NO: 231393 - protein, 14 aa, Homo sapiens
  CDR3 for alpha chain variable domain of TCR clone 115697 (TRAV17, TRAJ37)
CATDGSSNKGKLIF

SEQ ID NO: 231394 - protein, 13 aa, Homo sapiens
  CDR3 for beta chain variable domain of TCR clone 115697 (TRBV11-2, TRBJ2-1)
CASSLDLVNEQFF

SEQ ID NO: 231395 - protein, 13 aa, Homo sapiens
  CDR3 for alpha chain variable domain of TCR clone 115698 (TRAV12-2, TRAJ13)
CAVTAGGYQKVTF

SEQ ID NO: 231396 - protein, 15 aa, Homo sapiens
  CDR3 for beta chain variable domain of TCR clone 115698 (TRBV28, TRBJ2-4)
CAAGSGTLLMGIQYF

SEQ ID NO: 231397 - protein, 10 aa, Homo sapiens
  CDR3 for alpha chain variable domain of TCR clone 115699 (TRAV26-1, TRAJ22)
CIASLNFFWF

SEQ ID NO: 231398 - protein, 15 aa, Homo sapiens
  CDR3 for beta chain variable domain of TCR clone 115699 (TRBV4-2, TRBJ1-2)
CASSQRTGGRDGYTF

SEQ ID NO: 231399 - protein, 12 aa, Homo sapiens
  CDR3 for alpha chain variable domain of TCR clone 115700 (TRAV29/DV5, TRAJ53)
CAASGGNYKLTF

SEQ ID NO: 231400 - protein, 17 aa, Homo sapiens
  CDR3 for beta chain variable domain of TCR clone 115700 (TRBV7-2, TRBJ2-3)
CASSLEARGTSTDTQYF

SEQ ID NO: 231401 - protein, 17 aa, Homo sapiens
  CDR3 for alpha chain variable domain of TCR clone 115701 (TRAV3, TRAJ42)
CAVRDRDYGGSQGNLIF

SEQ ID NO: 231402 - protein, 16 aa, Homo sapiens
  CDR3 for beta chain variable domain of TCR clone 115701 (TRBV29-1, TRBJ2-7)
CSVEDAEDGTAYEQYF

SEQ ID NO: 231403 - protein, 14 aa, Homo sapiens
  CDR3 for alpha chain variable domain of TCR clone 115702 (TRAV26-1, TRAJ38)
CIADNAGNNRKLIW

SEQ ID NO: 231404 - protein, 15 aa, Homo sapiens
  CDR3 for beta chain variable domain of TCR clone 115702 (TRBV20-1, TRBJ1-1)
CSARGGGNTEAFLDK

SEQ ID NO: 231405 - protein, 16 aa, Homo sapiens
  CDR3 for alpha chain variable domain of TCR clone 115703 (TRAV30, TRAJ24)
CGTEIVDADSWGKFNF

SEQ ID NO: 231406 - protein, 14 aa, Homo sapiens
  CDR3 for beta chain variable domain of TCR clone 115703 (TRBV12-5, TRBJ2-5)
CASGSRTHQETQYF

SEQ ID NO: 231407 - protein, 15 aa, Homo sapiens
  CDR3 for alpha chain variable domain of TCR clone 115704 (TRAV40, TRAJ45)
CLLGDLGGGADGLTF

SEQ ID NO: 231408 - protein, 13 aa, Homo sapiens
  CDR3 for beta chain variable domain of TCR clone 115704 (TRBV7-9, TRBJ1-2)
CASSLKQNNGYTF

SEQ ID NO: 231409 - protein, 18 aa, Homo sapiens
  CDR3 for alpha chain variable domain of TCR clone 115705 (TRAV13-1, TRAJ52)
CAASKRSAGGTSYGKLTF

SEQ ID NO: 231410 - protein, 13 aa, Homo sapiens
  CDR3 for beta chain variable domain of TCR clone 115705 (TRBV12-4, TRBJ1-2)
CASSLRQGKDYTF

SEQ ID NO: 231411 - protein, 10 aa, Homo sapiens
  CDR3 for alpha chain variable domain of TCR clone 115706 (TRAV26-1, TRAJ40)
CIAGTYKYIF

SEQ ID NO: 231412 - protein, 15 aa, Homo sapiens
  CDR3 for beta chain variable domain of TCR clone 115706 (TRBV19, TRBJ2-1)
CASSSPGVPLMSSSS

SEQ ID NO: 231413 - protein, 14 aa, Homo sapiens
  CDR3 for alpha chain variable domain of TCR clone 115707 (TRAV6, TRAJ6)
CALPASGGSYIPTF

SEQ ID NO: 231414 - protein, 14 aa, Homo sapiens
  CDR3 for beta chain variable domain of TCR clone 115707 (TRBV20-1, TRBJ2-1)
CSAQIGGSANEQFF

SEQ ID NO: 231415 - protein, 16 aa, Homo sapiens
  CDR3 for alpha chain variable domain of TCR clone 115708 (TRAV30, TRAJ24)
CGTEIVDADSWGKFQF

SEQ ID NO: 231416 - protein, 15 aa, Homo sapiens
  CDR3 for beta chain variable domain of TCR clone 115708 (TRBV5-1, TRBJ1-1)
CASSLAPRGNTEAFL

SEQ ID NO: 231417 - protein, 14 aa, Homo sapiens
  CDR3 for alpha chain variable domain of TCR clone 115709 (TRAV12-3, TRAJ10)
NHLPLTGGGNKLTF

SEQ ID NO: 231418 - protein, 16 aa, Homo sapiens
  CDR3 for beta chain variable domain of TCR clone 115709 (TRBV18, TRBJ1-3)
CASSLGILNGENTIYF

SEQ ID NO: 231419 - protein, 13 aa, Homo sapiens
  CDR3 for alpha chain variable domain of TCR clone 115710 (TRAV13-1, TRAJ11)
CAAVLAGYSTLTF

SEQ ID NO: 231420 - protein, 15 aa, Homo sapiens
  CDR3 for beta chain variable domain of TCR clone 115710 (TRBV6-3, TRBJ2-7)
CASSSPGTVFYEQYF

SEQ ID NO: 231421 - protein, 13 aa, Homo sapiens
  CDR3 for alpha chain variable domain of TCR clone 115711 (TRAV26-1, TRAJ33)
CIVRVEGNYQLIL

SEQ ID NO: 231422 - protein, 16 aa, Homo sapiens
  CDR3 for beta chain variable domain of TCR clone 115711 (TRBV15, TRBJ2-7)
CATSRDRGRRRGEQYF

SEQ ID NO: 231423 - protein, 13 aa, Homo sapiens
  CDR3 for alpha chain variable domain of TCR clone 115712 (TRAV12-1, TRAJ31)
CVVNMNNNARLMF

SEQ ID NO: 231424 - protein, 12 aa, Homo sapiens
  CDR3 for beta chain variable domain of TCR clone 115712 (TRBV11-2, TRBJ2-2)
CASSLPTGELFF

SEQ ID NO: 231425 - protein, 14 aa, Homo sapiens
  CDR3 for alpha chain variable domain of TCR clone 115713 (TRAV13-1, TRAJ44)
CAAKATGTASKLTF

SEQ ID NO: 231426 - protein, 22 aa, Homo sapiens
  CDR3 for beta chain variable domain of TCR clone 115713 (TRBV19, TRBJ2-1)
CASSVRDRLTGTSGRIYNEQFF

SEQ ID NO: 231427 - protein, 13 aa, Homo sapiens
  CDR3 for alpha chain variable domain of TCR clone 115714 (TRAV27, TRAJ57)
CAGFQGGSVKLVF

SEQ ID NO: 231428 - protein, 14 aa, Homo sapiens
  CDR3 for beta chain variable domain of TCR clone 115714 (TRBV20-1, TRBJ1-2)
CSGRKDGRAYGYTF

SEQ ID NO: 231429 - protein, 14 aa, Homo sapiens
  CDR3 for alpha chain variable domain of TCR clone 115715 (TRAV12-2, TRAJ17)
CAVLFKAEGNKLTF

SEQ ID NO: 231430 - protein, 14 aa, Homo sapiens
  CDR3 for beta chain variable domain of TCR clone 115715 (TRBV19, TRBJ2-1)
CASPTFVLSGEQFF

SEQ ID NO: 231431 - protein, 13 aa, Homo sapiens
  CDR3 for alpha chain variable domain of TCR clone 115716 (TRAV3, TRAJ43)
CAVRDTRGGDVRF

SEQ ID NO: 231432 - protein, 15 aa, Homo sapiens
  CDR3 for beta chain variable domain of TCR clone 115716 (TRBV6-5, TRBJ1-5)
CASSYSRRSNQPQHF

SEQ ID NO: 231433 - protein, 15 aa, Homo sapiens
  CDR3 for alpha chain variable domain of TCR clone 115717 (TRAV3, TRAJ3)
CAVRDGHSSVSKIIF

SEQ ID NO: 231434 - protein, 17 aa, Homo sapiens
  CDR3 for beta chain variable domain of TCR clone 115717 (TRBV25-1, TRBJ2-7)
CASSDARVVFSSYEQYF

SEQ ID NO: 231435 - protein, 14 aa, Homo sapiens
  CDR3 for alpha chain variable domain of TCR clone 115718 (TRAV12-2, TRAJ53)
CAVKGGGSNYKRTF

SEQ ID NO: 231436 - protein, 15 aa, Homo sapiens
  CDR3 for beta chain variable domain of TCR clone 115718 (TRBV11-2, TRBJ2-2)
CASSSDRVNAGELFF

SEQ ID NO: 231437 - protein, 11 aa, Homo sapiens
  CDR3 for alpha chain variable domain of TCR clone 115719 (TRAV12-1, TRAJ31)
CVVNGDARLMF

SEQ ID NO: 231438 - protein, 15 aa, Homo sapiens
  CDR3 for beta chain variable domain of TCR clone 115719 (TRBV2, TRBJ2-7)
CASSEGLARSYEQYF

SEQ ID NO: 231439 - protein, 16 aa, Homo sapiens
  CDR3 for alpha chain variable domain of TCR clone 115720 (TRAV12-2, TRAJ32)
CAVNLGQGGATNKLIF

SEQ ID NO: 231440 - protein, 13 aa, Homo sapiens
  CDR3 for beta chain variable domain of TCR clone 115720 (TRBV9, TRBJ2-2)
CASRPRPAGELFF

SEQ ID NO: 231441 - protein, 19 aa, Homo sapiens
  CDR3 for alpha chain variable domain of TCR clone 115721 (TRAV8-4, TRAJ3)
CAVTGENLVQQCFKDNLWI

SEQ ID NO: 231442 - protein, 16 aa, Homo sapiens
  CDR3 for beta chain variable domain of TCR clone 115721 (TRBV4-2, TRBJ1-1)
CASSQAGFGMNTEAFF

SEQ ID NO: 231443 - protein, 16 aa, Homo sapiens
  CDR3 for alpha chain variable domain of TCR clone 115722 (TRAV27, TRAJ48)
TAAQSGDTGLYLPLTF

SEQ ID NO: 231444 - protein, 13 aa, Homo sapiens
  CDR3 for beta chain variable domain of TCR clone 115722 (TRBV7-2, TRBJ2-5)
CASSQTSVETQYF

SEQ ID NO: 231445 - protein, 11 aa, Homo sapiens
  CDR3 for alpha chain variable domain of TCR clone 115723 (TRAV12-1, TRAJ30)
CVVNGQDKIIF

SEQ ID NO: 231446 - protein, 12 aa, Homo sapiens
  CDR3 for beta chain variable domain of TCR clone 115723 (TRBV27, TRBJ2-2)
CASKLFTGQLFF

SEQ ID NO: 231447 - protein, 14 aa, Homo sapiens
  CDR3 for alpha chain variable domain of TCR clone 115724 (TRAV17, TRAJ57)
CATDPQGGSEKLVF

SEQ ID NO: 231448 - protein, 18 aa, Homo sapiens
  CDR3 for beta chain variable domain of TCR clone 115724 (TRBV6-6, TRBJ1-3)
CASSYSKWESISGNTIYF

SEQ ID NO: 231449 - protein, 14 aa, Homo sapiens
  CDR3 for alpha chain variable domain of TCR clone 115725 (TRAV1-2, TRAJ8)
CAVREDTGFQKLVF

SEQ ID NO: 231450 - protein, 15 aa, Homo sapiens
  CDR3 for beta chain variable domain of TCR clone 115725 (TRBV28, TRBJ2-6)
CASSLAGSGANVLSF

SEQ ID NO: 231451 - protein, 13 aa, Homo sapiens
  CDR3 for alpha chain variable domain of TCR clone 115726 (TRAV35, TRAJ36)
CAGPRIGANNLFF

SEQ ID NO: 231452 - protein, 15 aa, Homo sapiens
  CDR3 for beta chain variable domain of TCR clone 115726 (TRBV28, TRBJ2-1)
CASSIIAGGRSEQFF

SEQ ID NO: 231453 - protein, 13 aa, Homo sapiens
  CDR3 for alpha chain variable domain of TCR clone 115727 (TRAV8-3, TRAJ37)
CAVPSSDTGKLIF

SEQ ID NO: 231454 - protein, 12 aa, Homo sapiens
  CDR3 for beta chain variable domain of TCR clone 115727 (TRBV11-2, TRBJ2-1)
CASSPGNNEQFF

SEQ ID NO: 231455 - protein, 12 aa, Homo sapiens
  CDR3 for alpha chain variable domain of TCR clone 115728 (TRAV2, TRAJ31)
CAVEDNNARLMF

SEQ ID NO: 231456 - protein, 16 aa, Homo sapiens
  CDR3 for beta chain variable domain of TCR clone 115728 (TRBV10-3, TRBJ2-1)
CAISGVGDGGVGEQFF

SEQ ID NO: 231457 - protein, 14 aa, Homo sapiens
  CDR3 for alpha chain variable domain of TCR clone 115729 (TRAV1-2, TRAJ8)
CAVREDTGFQKLVF

SEQ ID NO: 231458 - protein, 12 aa, Homo sapiens
  CDR3 for beta chain variable domain of TCR clone 115729 (TRBV24-1, TRBJ1-1)
CATFYPDTEAFF

SEQ ID NO: 231459 - protein, 14 aa, Homo sapiens
  CDR3 for alpha chain variable domain of TCR clone 115730 (TRAV12-2, TRAJ13)
CAVKTTGGYQKVTF

SEQ ID NO: 231460 - protein, 14 aa, Homo sapiens
  CDR3 for beta chain variable domain of TCR clone 115730 (TRBV12-5, TRBJ2-5)
CASGSRTHQETQYF

SEQ ID NO: 231461 - protein, 14 aa, Homo sapiens
  CDR3 for alpha chain variable domain of TCR clone 115731 (TRAV13-1, TRAJ10)
CAAKEPGGGNNLTF

SEQ ID NO: 231462 - protein, 14 aa, Homo sapiens
  CDR3 for beta chain variable domain of TCR clone 115731 (TRBV6-6, TRBJ2-7)
CASSDSGAGYEQYF

SEQ ID NO: 231463 - protein, 13 aa, Homo sapiens
  CDR3 for alpha chain variable domain of TCR clone 115732 (TRAV8-2, TRAJ49)
CVVSPFTGNQFYF

SEQ ID NO: 231464 - protein, 14 aa, Homo sapiens
  CDR3 for beta chain variable domain of TCR clone 115732 (TRBV11-2, TRBJ2-7)
CASSRSGGAGEQYF

SEQ ID NO: 231465 - protein, 16 aa, Homo sapiens
  CDR3 for alpha chain variable domain of TCR clone 115733 (TRAV3, TRAJ10)
CAVRDMRAGGGNKLTF

SEQ ID NO: 231466 - protein, 14 aa, Homo sapiens
  CDR3 for beta chain variable domain of TCR clone 115733 (TRBV7-8, TRBJ2-5)
CASSATGGQETQYF

SEQ ID NO: 231467 - protein, 14 aa, Homo sapiens
  CDR3 for alpha chain variable domain of TCR clone 115734 (TRAV2, TRAJ37)
CAVEDQGNTGKLIF

SEQ ID NO: 231468 - protein, 14 aa, Homo sapiens
  CDR3 for beta chain variable domain of TCR clone 115734 (TRBV18, TRBJ2-1)
CASSPQGRFNEQSF

SEQ ID NO: 231469 - protein, 14 aa, Homo sapiens
  CDR3 for alpha chain variable domain of TCR clone 115735 (TRAV8-3, TRAJ4)
CAVGAAGGYNKLIF

SEQ ID NO: 231470 - protein, 16 aa, Homo sapiens
  CDR3 for beta chain variable domain of TCR clone 115735 (TRBV6-1, TRBJ2-5)
CASSETLDRGAETQYF

SEQ ID NO: 231471 - protein, 15 aa, Homo sapiens
  CDR3 for alpha chain variable domain of TCR clone 115736 (TRAV26-1, TRAJ22)
CIVRVSFWFCKATDL

SEQ ID NO: 231472 - protein, 12 aa, Homo sapiens
  CDR3 for beta chain variable domain of TCR clone 115736 (TRBV7-9, TRBJ2-7)
CASSIKREEQYF

SEQ ID NO: 231473 - protein, 17 aa, Homo sapiens
  CDR3 for alpha chain variable domain of TCR clone 115737 (TRAV4, TRAJ18)
CLVGERSVGSTLGRLYF

SEQ ID NO: 231474 - protein, 13 aa, Homo sapiens
  CDR3 for beta chain variable domain of TCR clone 115737 (TRBV11-2, TRBJ2-5)
CASSSTGEETQYF

SEQ ID NO: 231475 - protein, 15 aa, Homo sapiens
  CDR3 for alpha chain variable domain of TCR clone 115738 (TRAV12-3, TRAJ6)
CAMSPASGGSYIPTF

SEQ ID NO: 231476 - protein, 15 aa, Homo sapiens
  CDR3 for beta chain variable domain of TCR clone 115738 (TRBV10-3, TRBJ2-1)
CAISDVQDRAYEQFF

SEQ ID NO: 231477 - protein, 14 aa, Homo sapiens
  CDR3 for alpha chain variable domain of TCR clone 115739 (TRAV1-2, TRAJ8)
CAVREDTGFQKLVF

SEQ ID NO: 231478 - protein, 16 aa, Homo sapiens
  CDR3 for beta chain variable domain of TCR clone 115739 (TRBV7-7, TRBJ2-1)
CASSLASGTSYNEQFF

SEQ ID NO: 231479 - protein, 14 aa, Homo sapiens
  CDR3 for alpha chain variable domain of TCR clone 115740 (TRAV8-4, TRAJ52)
CAVTTGTSYGKLTF

SEQ ID NO: 231480 - protein, 14 aa, Homo sapiens
  CDR3 for beta chain variable domain of TCR clone 115740 (TRBV27, TRBJ2-2)
CASRPGVNTGELFF

SEQ ID NO: 231481 - protein, 15 aa, Homo sapiens
  CDR3 for alpha chain variable domain of TCR clone 115741 (TRAV8-6, TRAJ10)
CAVSDQAGGGNKLTF

SEQ ID NO: 231482 - protein, 12 aa, Homo sapiens
  CDR3 for beta chain variable domain of TCR clone 115741 (TRBV12-4, TRBJ2-7)
CASSLGGYEQYF

SEQ ID NO: 231483 - protein, 16 aa, Homo sapiens
  CDR3 for alpha chain variable domain of TCR clone 115742 (TRAV21, TRAJ33)
CAVSPASMDSNYQLIW

SEQ ID NO: 231484 - protein, 17 aa, Homo sapiens
  CDR3 for beta chain variable domain of TCR clone 115742 (TRBV2, TRBJ1-4)
CASSKRELTQGEENLFF

SEQ ID NO: 231485 - protein, 14 aa, Homo sapiens
  CDR3 for alpha chain variable domain of TCR clone 115743 (TRAV35, TRAJ13)
CAGSPSGGYQKVTF

SEQ ID NO: 231486 - protein, 11 aa, Homo sapiens
  CDR3 for beta chain variable domain of TCR clone 115743 (TRBV12-4, TRBJ2-3)
CASTATDTQYF

SEQ ID NO: 231487 - protein, 13 aa, Homo sapiens
  CDR3 for alpha chain variable domain of TCR clone 115744 (TRAV29/DV5, TRAJ31)
CAASRNNNARLMF

SEQ ID NO: 231488 - protein, 12 aa, Homo sapiens
  CDR3 for beta chain variable domain of TCR clone 115744 (TRBV14, TRBJ2-7)
CASSSLEGEQHF

SEQ ID NO: 231489 - protein, 14 aa, Homo sapiens
  CDR3 for alpha chain variable domain of TCR clone 115745 (TRAV25, TRAJ6)
CAGRESGGSYIPTF

SEQ ID NO: 231490 - protein, 13 aa, Homo sapiens
  CDR3 for beta chain variable domain of TCR clone 115745 (TRBV7-9, TRBJ1-2)
CASSLKQNYGYTF

SEQ ID NO: 231491 - protein, 14 aa, Homo sapiens
  CDR3 for alpha chain variable domain of TCR clone 115746 (TRAV13-1, TRAJ39)
CAASYNNAGNMLTF

SEQ ID NO: 231492 - protein, 13 aa, Homo sapiens
  CDR3 for beta chain variable domain of TCR clone 115746 (TRBV24-1, TRBJ1-4)
CATNNGRSEELFF

SEQ ID NO: 231493 - protein, 14 aa, Homo sapiens
  CDR3 for alpha chain variable domain of TCR clone 115747 (TRAV35, TRAJ22)
CAGLRPGSARQLTF

SEQ ID NO: 231494 - protein, 14 aa, Homo sapiens
  CDR3 for beta chain variable domain of TCR clone 115747 (TRBV5-1, TRBJ2-7)
CASSTGESLYEQYF

SEQ ID NO: 231495 - protein, 15 aa, Homo sapiens
  CDR3 for alpha chain variable domain of TCR clone 115748 (TRAV2, TRAJ9)
CAVEDRGTGGFKTIF

SEQ ID NO: 231496 - protein, 13 aa, Homo sapiens
  CDR3 for beta chain variable domain of TCR clone 115748 (TRBV19, TRBJ1-2)
YASSVPGQDGYTF

SEQ ID NO: 231497 - protein, 14 aa, Homo sapiens
  CDR3 for alpha chain variable domain of TCR clone 115749 (TRAV1-2, TRAJ8)
CAVREDTGFQKLVF

SEQ ID NO: 231498 - protein, 15 aa, Homo sapiens
  CDR3 for beta chain variable domain of TCR clone 115749 (TRBV7-8, TRBJ1-5)
CASSRGGGADQPQHF

SEQ ID NO: 231499 - protein, 12 aa, Homo sapiens
  CDR3 for alpha chain variable domain of TCR clone 115750 (TRAV3, TRAJ34)
CAVLGKTDKLIF

SEQ ID NO: 231500 - protein, 13 aa, Homo sapiens
  CDR3 for beta chain variable domain of TCR clone 115750 (TRBV19, TRBJ2-1)
CASSIGTGNEQFF

SEQ ID NO: 231501 - protein, 13 aa, Homo sapiens
  CDR3 for alpha chain variable domain of TCR clone 115751 (TRAV8-3, TRAJ37)
CAVPSSKTGKLIF

SEQ ID NO: 231502 - protein, 12 aa, Homo sapiens
  CDR3 for beta chain variable domain of TCR clone 115751 (TRBV11-2, TRBJ2-1)
CASSPGNNEQFF

SEQ ID NO: 231503 - protein, 14 aa, Homo sapiens
  CDR3 for alpha chain variable domain of TCR clone 115752 (TRAV30, TRAJ26)
CGTEIVSYGQNFAF

SEQ ID NO: 231504 - protein, 13 aa, Homo sapiens
  CDR3 for beta chain variable domain of TCR clone 115752 (TRBV19, TRBJ1-3)
CASRLSLGNTIYF

SEQ ID NO: 231505 - protein, 14 aa, Homo sapiens
  CDR3 for alpha chain variable domain of TCR clone 115753 (TRAV12-3, TRAJ15)
CAMIPPQAGTALIF

SEQ ID NO: 231506 - protein, 12 aa, Homo sapiens
  CDR3 for beta chain variable domain of TCR clone 115753 (TRBV11-2, TRBJ2-2)
CASSFGGGELFL

SEQ ID NO: 231507 - protein, 14 aa, Homo sapiens
  CDR3 for alpha chain variable domain of TCR clone 115754 (TRAV14/DV4, TRAJ41)
CARGGPDSGYALNF

SEQ ID NO: 231508 - protein, 14 aa, Homo sapiens
  CDR3 for beta chain variable domain of TCR clone 115754 (TRBV7-2, TRBJ2-7)
CASSPKTSFYEQYF

SEQ ID NO: 231509 - protein, 15 aa, Homo sapiens
  CDR3 for alpha chain variable domain of TCR clone 115755 (TRAV13-1, TRAJ45)
CAASGSGGGADGLTF

SEQ ID NO: 231510 - protein, 13 aa, Homo sapiens
  CDR3 for beta chain variable domain of TCR clone 115755 (TRBV7-9, TRBJ1-2)
CASSLKQNYGYTF

SEQ ID NO: 231511 - protein, 16 aa, Homo sapiens
  CDR3 for alpha chain variable domain of TCR clone 115756 (TRAV12-3, TRAJ53)
RAMSPGSGGSNYKLTF

SEQ ID NO: 231512 - protein, 16 aa, Homo sapiens
  CDR3 for beta chain variable domain of TCR clone 115756 (TRBV4-2, TRBJ1-1)
CASSQAGFGMNTEAFF

SEQ ID NO: 231513 - protein, 15 aa, Homo sapiens
  CDR3 for alpha chain variable domain of TCR clone 115757 (TRAV8-6, TRAJ6)
CAVSGESGGSYIPTF

SEQ ID NO: 231514 - protein, 14 aa, Homo sapiens
  CDR3 for beta chain variable domain of TCR clone 115757 (TRBV7-9, TRBJ2-1)
CASSSIVGFGEQFF

SEQ ID NO: 231515 - protein, 21 aa, Homo sapiens
  CDR3 for alpha chain variable domain of TCR clone 115758 (TRAV12-2, TRAJ36)
LIRDSQPSDSATLERANNLFF

SEQ ID NO: 231516 - protein, 15 aa, Homo sapiens
  CDR3 for beta chain variable domain of TCR clone 115758 (TRBV18, TRBJ2-1)
CASSPPSASYNEQFF

SEQ ID NO: 231517 - protein, 21 aa, Homo sapiens
  CDR3 for alpha chain variable domain of TCR clone 115759 (TRAV27, TRAJ3)
TAAQPGDTGLPPGQQCFKIIF

SEQ ID NO: 231518 - protein, 15 aa, Homo sapiens
  CDR3 for beta chain variable domain of TCR clone 115759 (TRBV28, TRBJ1-3)
CASSMGWASGNTIYF

SEQ ID NO: 231519 - protein, 11 aa, Homo sapiens
  CDR3 for alpha chain variable domain of TCR clone 115760 (TRAV21, TRAJ11)
CAVNGYSTLTF

SEQ ID NO: 231520 - protein, 17 aa, Homo sapiens
  CDR3 for beta chain variable domain of TCR clone 115760 (TRBV7-8, TRBJ2-6)
CASSAGTGGAGANVLTF

SEQ ID NO: 231521 - protein, 16 aa, Homo sapiens
  CDR3 for alpha chain variable domain of TCR clone 115761 (TRAV16, TRAJ52)
CALSAAGGTSYGKPTF

SEQ ID NO: 231522 - protein, 12 aa, Homo sapiens
  CDR3 for beta chain variable domain of TCR clone 115761 (TRBV12-4, TRBJ1-3)
CASSFSGNTIYF

SEQ ID NO: 231523 - protein, 14 aa, Homo sapiens
  CDR3 for alpha chain variable domain of TCR clone 115762 (TRAV20, TRAJ56)
CAVQVGGANSKLTF

SEQ ID NO: 231524 - protein, 14 aa, Homo sapiens
  CDR3 for beta chain variable domain of TCR clone 115762 (TRBV20-1, TRBJ2-7)
CSAKRGRSSYEQYF

SEQ ID NO: 231525 - protein, 15 aa, Homo sapiens
  CDR3 for alpha chain variable domain of TCR clone 115763 (TRAV13-1, TRAJ57)
QVPPLSQGGSEKLVF

SEQ ID NO: 231526 - protein, 16 aa, Homo sapiens
  CDR3 for beta chain variable domain of TCR clone 115763 (TRBV7-6, TRBJ2-1)
CASSAPGPSSYNEQFF

SEQ ID NO: 231527 - protein, 11 aa, Homo sapiens
  CDR3 for alpha chain variable domain of TCR clone 115764 (TRAV17, TRAJ9)
CATTGGFKTIF

SEQ ID NO: 231528 - protein, 15 aa, Homo sapiens
  CDR3 for beta chain variable domain of TCR clone 115764 (TRBV9, TRBJ1-6)
CASSVAGTGDSTLHF

SEQ ID NO: 231529 - protein, 13 aa, Homo sapiens
  CDR3 for alpha chain variable domain of TCR clone 115765 (TRAV13-1, TRAJ21)
CAASIYNFNKFYF

SEQ ID NO: 231530 - protein, 15 aa, Homo sapiens
  CDR3 for beta chain variable domain of TCR clone 115765 (TRBV11-1, TRBJ2-7)
CASSLNYGASYEQYF

SEQ ID NO: 231531 - protein, 12 aa, Homo sapiens
  CDR3 for alpha chain variable domain of TCR clone 115766 (TRAV27, TRAJ9)
CAGESGGFKTIF

SEQ ID NO: 231532 - protein, 14 aa, Homo sapiens
  CDR3 for beta chain variable domain of TCR clone 115766 (TRBV6-1, TRBJ2-1)
CASAKDGFCNEQFF

SEQ ID NO: 231533 - protein, 14 aa, Homo sapiens
  CDR3 for alpha chain variable domain of TCR clone 115767 (TRAV8-3, TRAJ6)
CAVGASGGSYIPTF

SEQ ID NO: 231534 - protein, 16 aa, Homo sapiens
  CDR3 for beta chain variable domain of TCR clone 115767 (TRBV18, TRBJ2-2)
CQLTSDPWQNTGELFF

SEQ ID NO: 231535 - protein, 14 aa, Homo sapiens
  CDR3 for alpha chain variable domain of TCR clone 115768 (TRAV9-2, TRAJ39)
CALYIYNAGNMLTF

SEQ ID NO: 231536 - protein, 17 aa, Homo sapiens
  CDR3 for beta chain variable domain of TCR clone 115768 (TRBV28, TRBJ2-1)
CASSSARQALTYNEQFF

SEQ ID NO: 231537 - protein, 18 aa, Homo sapiens
  CDR3 for alpha chain variable domain of TCR clone 115769 (TRAV21, TRAJ52)
CAVRPSPAGGTSYGKLTF

SEQ ID NO: 231538 - protein, 15 aa, Homo sapiens
  CDR3 for beta chain variable domain of TCR clone 115769 (TRBV28, TRBJ2-2)
CASTVAGANTGELFF

SEQ ID NO: 231539 - protein, 14 aa, Homo sapiens
  CDR3 for alpha chain variable domain of TCR clone 115770 (TRAV12-2, TRAJ24)
CAVTPADGWGKLQF

SEQ ID NO: 231540 - protein, 13 aa, Homo sapiens
  CDR3 for beta chain variable domain of TCR clone 115770 (TRBV6-4, TRBJ1-5)
CASSADLNQPQHF

SEQ ID NO: 231541 - protein, 14 aa, Homo sapiens
  CDR3 for alpha chain variable domain of TCR clone 115771 (TRAV3, TRAJ9)
CAVRLNTGGFKTIF

SEQ ID NO: 231542 - protein, 15 aa, Homo sapiens
  CDR3 for beta chain variable domain of TCR clone 115771 (TRBV20-1, TRBJ1-1)
CSARKAETSNTEAFF

SEQ ID NO: 231543 - protein, 18 aa, Homo sapiens
  CDR3 for alpha chain variable domain of TCR clone 115772 (TRAV21, TRAJ52)
CAVRPSPAGGTSYGKLTF

SEQ ID NO: 231544 - protein, 14 aa, Homo sapiens
  CDR3 for beta chain variable domain of TCR clone 115772 (TRBV28, TRBJ2-1)
CASSIQGTVGEQFF

SEQ ID NO: 231545 - protein, 15 aa, Homo sapiens
  CDR3 for alpha chain variable domain of TCR clone 115773 (TRAV26-1, TRAJ29)
CIARVEGSGNTPLVF

SEQ ID NO: 231546 - protein, 14 aa, Homo sapiens
  CDR3 for beta chain variable domain of TCR clone 115773 (TRBV25-1, TRBJ1-1)
CASTHLGGNTEAFF

SEQ ID NO: 231547 - protein, 16 aa, Homo sapiens
  CDR3 for alpha chain variable domain of TCR clone 115774 (TRAV16, TRAJ4)
CALSRMFSGGYNKLIF

SEQ ID NO: 231548 - protein, 16 aa, Homo sapiens
  CDR3 for beta chain variable domain of TCR clone 115774 (TRBV12-4, TRBJ1-5)
CASSRPVGGSNQHQHF

SEQ ID NO: 231549 - protein, 15 aa, Homo sapiens
  CDR3 for alpha chain variable domain of TCR clone 115775 (TRAV17, TRAJ54)
CATTRSEQGAQKLVF

SEQ ID NO: 231550 - protein, 16 aa, Homo sapiens
  CDR3 for beta chain variable domain of TCR clone 115775 (TRBV12-4, TRBJ2-3)
CARSLRLAETTDTQYF

SEQ ID NO: 231551 - protein, 12 aa, Homo sapiens
  CDR3 for alpha chain variable domain of TCR clone 115776 (TRAV17, TRAJ30)
CVPERRDDKIIF

SEQ ID NO: 231552 - protein, 14 aa, Homo sapiens
  CDR3 for beta chain variable domain of TCR clone 115776 (TRBV7-7, TRBJ2-2)
CASSRDRRTGELFF

SEQ ID NO: 231553 - protein, 14 aa, Homo sapiens
  CDR3 for alpha chain variable domain of TCR clone 115777 (TRAV3, TRAJ21)
CAVRDAYNFNKFYF

SEQ ID NO: 231554 - protein, 19 aa, Homo sapiens
  CDR3 for beta chain variable domain of TCR clone 115777 (TRBV25-1, TRBJ2-2)
CAILVYRVDRGRKTGELFF

SEQ ID NO: 231555 - protein, 13 aa, Homo sapiens
  CDR3 for alpha chain variable domain of TCR clone 115778 (TRAV20, TRAJ54)
CAVQAGGAQKLVF

SEQ ID NO: 231556 - protein, 14 aa, Homo sapiens
  CDR3 for beta chain variable domain of TCR clone 115778 (TRBV20-1, TRBJ2-7)
CRAKTGTGGYEQYF

SEQ ID NO: 231557 - protein, 14 aa, Homo sapiens
  CDR3 for alpha chain variable domain of TCR clone 115779 (TRAV8-4, TRAJ48)
GAVSETFGNEKLTF

SEQ ID NO: 231558 - protein, 14 aa, Homo sapiens
  CDR3 for beta chain variable domain of TCR clone 115779 (TRBV13, TRBJ2-7)
CASSLKGASYEQYF

SEQ ID NO: 231559 - protein, 18 aa, Homo sapiens
  CDR3 for alpha chain variable domain of TCR clone 115780 (TRAV12-3, TRAJ52)
CAMSVGEAGGTSYGKLTF

SEQ ID NO: 231560 - protein, 17 aa, Homo sapiens
  CDR3 for beta chain variable domain of TCR clone 115780 (TRBV13, TRBJ2-3)
CASSLSRVAGGRNTQYF

SEQ ID NO: 231561 - protein, 14 aa, Homo sapiens
  CDR3 for alpha chain variable domain of TCR clone 115781 (TRAV29/DV5, TRAJ36)
CAARRKTGANNLFF

SEQ ID NO: 231562 - protein, 15 aa, Homo sapiens
  CDR3 for beta chain variable domain of TCR clone 115781 (TRBV5-1, TRBJ1-2)
CASSPGDRGSYGYTF

SEQ ID NO: 231563 - protein, 16 aa, Homo sapiens
  CDR3 for alpha chain variable domain of TCR clone 115782 (TRAV12-1, TRAJ43)
CVVNPHRFGAGTSLTV

SEQ ID NO: 231564 - protein, 13 aa, Homo sapiens
  CDR3 for beta chain variable domain of TCR clone 115782 (TRBV12-4, TRBJ1-2)
CASSSGPNYGYTF

SEQ ID NO: 231565 - protein, 14 aa, Homo sapiens
  CDR3 for alpha chain variable domain of TCR clone 115783 (TRAV9-2, TRAJ13)
CALYHSGGYQKVTF

SEQ ID NO: 231566 - protein, 15 aa, Homo sapiens
  CDR3 for beta chain variable domain of TCR clone 115783 (TRBV9, TRBJ1-6)
CASSVAGTGDSPLHF

SEQ ID NO: 231567 - protein, 13 aa, Homo sapiens
  CDR3 for alpha chain variable domain of TCR clone 115784 (TRAV12-3, TRAJ13)
CAMSSGGYQKVTF

SEQ ID NO: 231568 - protein, 14 aa, Homo sapiens
  CDR3 for beta chain variable domain of TCR clone 115784 (TRBV2, TRBJ2-7)
CASSLTSGGYEQYF

SEQ ID NO: 231569 - protein, 16 aa, Homo sapiens
  CDR3 for alpha chain variable domain of TCR clone 115785 (TRAV12-2, TRAJ45)
CAVKRNPGGGADGRTF

SEQ ID NO: 231570 - protein, 12 aa, Homo sapiens
  CDR3 for beta chain variable domain of TCR clone 115785 (TRBV6-1, TRBJ2-5)
CASSEGRETQYF

SEQ ID NO: 231571 - protein, 13 aa, Homo sapiens
  CDR3 for alpha chain variable domain of TCR clone 115786 (TRAV16, TRAJ10)
CALLTGGGNKLTF

SEQ ID NO: 231572 - protein, 12 aa, Homo sapiens
  CDR3 for beta chain variable domain of TCR clone 115786 (TRBV28, TRBJ2-7)
CARTGNHYEQYF

SEQ ID NO: 231573 - protein, 15 aa, Homo sapiens
  CDR3 for alpha chain variable domain of TCR clone 115787 (TRAV26-1, TRAJ29)
CIVRVAGSGNTPLVF

SEQ ID NO: 231574 - protein, 15 aa, Homo sapiens
  CDR3 for beta chain variable domain of TCR clone 115787 (TRBV12-4, TRBJ1-1)
CQQQDRVVANTEAFF

SEQ ID NO: 231575 - protein, 13 aa, Homo sapiens
  CDR3 for alpha chain variable domain of TCR clone 115788 (TRAV36/DV7, TRAJ21)
CAVEAYNFNKFYF

SEQ ID NO: 231576 - protein, 14 aa, Homo sapiens
  CDR3 for beta chain variable domain of TCR clone 115788 (TRBV6-1, TRBJ1-1)
CASSGTGLNTEAVF

SEQ ID NO: 231577 - protein, 14 aa, Homo sapiens
  CDR3 for alpha chain variable domain of TCR clone 115789 (TRAV12-3, TRAJ13)
CAMKNSGGYQKVTF

SEQ ID NO: 231578 - protein, 17 aa, Homo sapiens
  CDR3 for beta chain variable domain of TCR clone 115789 (TRBV7-3, TRBJ2-3)
CASSLMKRMRGADTQYF

SEQ ID NO: 231579 - protein, 14 aa, Homo sapiens
  CDR3 for alpha chain variable domain of TCR clone 115790 (TRAV2, TRAJ9)
CAVEDRSGGFKTIF

SEQ ID NO: 231580 - protein, 17 aa, Homo sapiens
  CDR3 for beta chain variable domain of TCR clone 115790 (TRBV24-1, TRBJ2-1)
CATSDVSTSGTYNEQFS

SEQ ID NO: 231581 - protein, 13 aa, Homo sapiens
  CDR3 for alpha chain variable domain of TCR clone 115791 (TRAV27, TRAJ3)
ASLRGSSASKIIF

SEQ ID NO: 231582 - protein, 13 aa, Homo sapiens
  CDR3 for beta chain variable domain of TCR clone 115791 (TRBV20-1, TRBJ2-2)
CSASAAGTGELFF

SEQ ID NO: 231583 - protein, 11 aa, Homo sapiens
  CDR3 for alpha chain variable domain of TCR clone 115792 (TRAV2, TRAJ21)
CAVFNFNKFYI

SEQ ID NO: 231584 - protein, 14 aa, Homo sapiens
  CDR3 for beta chain variable domain of TCR clone 115792 (TRBV15, TRBJ2-3)
CATRSGTSTDTQYF

SEQ ID NO: 231585 - protein, 16 aa, Homo sapiens
  CDR3 for alpha chain variable domain of TCR clone 115793 (TRAV30, TRAJ24)
CGTEIVDADSWGKFQF

SEQ ID NO: 231586 - protein, 15 aa, Homo sapiens
  CDR3 for beta chain variable domain of TCR clone 115793 (TRBV7-9, TRBJ1-4)
CARSARTGGNEKLFF

SEQ ID NO: 231587 - protein, 19 aa, Homo sapiens
  CDR3 for alpha chain variable domain of TCR clone 115794 (TRAV1-2, TRAJ26)
CLLPLCCERPDNYGQNFVF

SEQ ID NO: 231588 - protein, 13 aa, Homo sapiens
  CDR3 for beta chain variable domain of TCR clone 115794 (TRBV11-2, TRBJ1-5)
CASSLDLHQPQHF

SEQ ID NO: 231589 - protein, 13 aa, Homo sapiens
  CDR3 for alpha chain variable domain of TCR clone 115795 (TRAV12-2, TRAJ15)
CAVFNQAGTALIF

SEQ ID NO: 231590 - protein, 19 aa, Homo sapiens
  CDR3 for beta chain variable domain of TCR clone 115795 (TRBV7-8, TRBJ1-5)
RRVSLGQQPGGGADQPQHF

SEQ ID NO: 231591 - protein, 16 aa, Homo sapiens
  CDR3 for alpha chain variable domain of TCR clone 115796 (TRAV30, TRAJ24)
CGTEIVDADSWGKFQF

SEQ ID NO: 231592 - protein, 15 aa, Homo sapiens
  CDR3 for beta chain variable domain of TCR clone 115796 (TRBV5-1, TRBJ2-1)
CASKGLAGVYNEQFF

SEQ ID NO: 231593 - protein, 14 aa, Homo sapiens
  CDR3 for alpha chain variable domain of TCR clone 115797 (TRAV1-2, TRAJ6)
CAVSLSGGSYIPTF

SEQ ID NO: 231594 - protein, 15 aa, Homo sapiens
  CDR3 for beta chain variable domain of TCR clone 115797 (TRBV28, TRBJ2-7)
CASRPGGRGFYEQYF

SEQ ID NO: 231595 - protein, 13 aa, Homo sapiens
  CDR3 for alpha chain variable domain of TCR clone 115798 (TRAV8-3, TRAJ20)
CAVGRPNDYKLSF

SEQ ID NO: 231596 - protein, 15 aa, Homo sapiens
  CDR3 for beta chain variable domain of TCR clone 115798 (TRBV7-9, TRBJ1-4)
CASSRTGGFNEKLFF

SEQ ID NO: 231597 - protein, 16 aa, Homo sapiens
  CDR3 for alpha chain variable domain of TCR clone 115799 (TRAV30, TRAJ24)
CGTEIVDADSWGKFQF

SEQ ID NO: 231598 - protein, 16 aa, Homo sapiens
  CDR3 for beta chain variable domain of TCR clone 115799 (TRBV7-9, TRBJ1-1)
CASSLVGRGLGTEAFF

SEQ ID NO: 231599 - protein, 13 aa, Homo sapiens
  CDR3 for alpha chain variable domain of TCR clone 115800 (TRAV13-2, TRAJ41)
CSESINSGYALNF

SEQ ID NO: 231600 - protein, 14 aa, Homo sapiens
  CDR3 for beta chain variable domain of TCR clone 115800 (TRBV2, TRBJ2-1)
CASSEALDGNEQFF

SEQ ID NO: 231601 - protein, 13 aa, Homo sapiens
  CDR3 for alpha chain variable domain of TCR clone 115801 (TRAV12-2, TRAJ42)
CSVKRGSQGNLIF

SEQ ID NO: 231602 - protein, 12 aa, Homo sapiens
  CDR3 for beta chain variable domain of TCR clone 115801 (TRBV5-7, TRBJ1-2)
CASSLVQNGYTF

SEQ ID NO: 231603 - protein, 14 aa, Homo sapiens
  CDR3 for alpha chain variable domain of TCR clone 115802 (TRAV16, TRAJ32)
CALKSGGATNKLIF

SEQ ID NO: 231604 - protein, 15 aa, Homo sapiens
  CDR3 for beta chain variable domain of TCR clone 115802 (TRBV19, TRBJ1-1)
CASTSGQIQDTEAFF

SEQ ID NO: 231605 - protein, 13 aa, Homo sapiens
  CDR3 for alpha chain variable domain of TCR clone 115803 (TRAV26-1, TRAJ48)
CIVRVVGDEKLTF

SEQ ID NO: 231606 - protein, 14 aa, Homo sapiens
  CDR3 for beta chain variable domain of TCR clone 115803 (TRBV7-6, TRBJ2-3)
CASSLGTVTDTQYF

SEQ ID NO: 231607 - protein, 12 aa, Homo sapiens
  CDR3 for alpha chain variable domain of TCR clone 115804 (TRAV35, TRAJ49)
CAGWNTGNQFYF

SEQ ID NO: 231608 - protein, 16 aa, Homo sapiens
  CDR3 for beta chain variable domain of TCR clone 115804 (TRBV5-1, TRBJ2-2)
CASSLWDTANTGELFF

SEQ ID NO: 231609 - protein, 14 aa, Homo sapiens
  CDR3 for alpha chain variable domain of TCR clone 115805 (TRAV1-2, TRAJ16)
CAVNRFSDGQKLLF

SEQ ID NO: 231610 - protein, 13 aa, Homo sapiens
  CDR3 for beta chain variable domain of TCR clone 115805 (TRBV12-4, TRBJ1-1)
CASSSRAGAEAFF

SEQ ID NO: 231611 - protein, 11 aa, Homo sapiens
  CDR3 for alpha chain variable domain of TCR clone 115806 (TRAV12-2, TRAJ31)
CAVTRWARLMF

SEQ ID NO: 231612 - protein, 15 aa, Homo sapiens
  CDR3 for beta chain variable domain of TCR clone 115806 (TRBV19, TRBJ2-7)
CASGIGGGLVNEQYF

SEQ ID NO: 231613 - protein, 16 aa, Homo sapiens
  CDR3 for alpha chain variable domain of TCR clone 115807 (TRAV26-2, TRAJ57)
CILRDVGSGGSEKLVF

SEQ ID NO: 231614 - protein, 13 aa, Homo sapiens
  CDR3 for beta chain variable domain of TCR clone 115807 (TRBV18, TRBJ2-3)
CASSPGVADTQYF

SEQ ID NO: 231615 - protein, 12 aa, Homo sapiens
  CDR3 for alpha chain variable domain of TCR clone 115808 (TRAV13-1, TRAJ21)
CAAKEGFNKFYF

SEQ ID NO: 231616 - protein, 13 aa, Homo sapiens
  CDR3 for beta chain variable domain of TCR clone 115808 (TRBV12-4, TRBJ2-5)
CASRLAVQETQYF

SEQ ID NO: 231617 - protein, 16 aa, Homo sapiens
  CDR3 for alpha chain variable domain of TCR clone 115809 (TRAV21, TRAJ37)
CAVRTAGSSNTGKLIF

SEQ ID NO: 231618 - protein, 13 aa, Homo sapiens
  CDR3 for beta chain variable domain of TCR clone 115809 (TRBV7-9, TRBJ2-5)
CACLPSGRETQYF

SEQ ID NO: 231619 - protein, 14 aa, Homo sapiens
  CDR3 for alpha chain variable domain of TCR clone 115810 (TRAV1-1, TRAJ23)
CAVSIYNKGGKLIF

SEQ ID NO: 231620 - protein, 15 aa, Homo sapiens
  CDR3 for beta chain variable domain of TCR clone 115810 (TRBV9, TRBJ1-6)
CASSVAGTGDSPLHF

SEQ ID NO: 231621 - protein, 13 aa, Homo sapiens
  CDR3 for alpha chain variable domain of TCR clone 115811 (TRAV17, TRAJ40)
CATDEGGTYKYIF

SEQ ID NO: 231622 - protein, 15 aa, Homo sapiens
  CDR3 for beta chain variable domain of TCR clone 115811 (TRBV20-1, TRBJ2-5)
CSAGRLPSGQETQYF

SEQ ID NO: 231623 - protein, 15 aa, Homo sapiens
  CDR3 for alpha chain variable domain of TCR clone 115812 (TRAV25, TRAJ52)
CAGRPGGTSYGKLTF

SEQ ID NO: 231624 - protein, 17 aa, Homo sapiens
  CDR3 for beta chain variable domain of TCR clone 115812 (TRBV11-2, TRBJ2-1)
CASSLYPPGVEYNEQFF

SEQ ID NO: 231625 - protein, 14 aa, Homo sapiens
  CDR3 for alpha chain variable domain of TCR clone 115813 (TRAV23/DV6, TRAJ40)
CAASLTSGTYKYIF

SEQ ID NO: 231626 - protein, 14 aa, Homo sapiens
  CDR3 for beta chain variable domain of TCR clone 115813 (TRBV5-1, TRBJ2-7)
CASSATGGYDEQYF

SEQ ID NO: 231627 - protein, 16 aa, Homo sapiens
  CDR3 for alpha chain variable domain of TCR clone 115814 (TRAV30, TRAJ24)
CGTELVDADSWGKFQF

SEQ ID NO: 231628 - protein, 14 aa, Homo sapiens
  CDR3 for beta chain variable domain of TCR clone 115814 (TRBV12-5, TRBJ2-5)
CASGSRTHQETQYV

SEQ ID NO: 231629 - protein, 13 aa, Homo sapiens
  CDR3 for alpha chain variable domain of TCR clone 115815 (TRAV8-6, TRAJ16)
CAVSSPDGQKLLF

SEQ ID NO: 231630 - protein, 13 aa, Homo sapiens
  CDR3 for beta chain variable domain of TCR clone 115815 (TRBV10-2, TRBJ2-3)
CASSESGDHTQYF

SEQ ID NO: 231631 - protein, 13 aa, Homo sapiens
  CDR3 for alpha chain variable domain of TCR clone 115816 (TRAV20, TRAJ37)
CAGGSSNTGKLIF

SEQ ID NO: 231632 - protein, 14 aa, Homo sapiens
  CDR3 for beta chain variable domain of TCR clone 115816 (TRBV20-1, TRBJ2-5)
CSARDGRAGETQYF

SEQ ID NO: 231633 - protein, 13 aa, Homo sapiens
  CDR3 for alpha chain variable domain of TCR clone 115817 (TRAV30, TRAJ16)
CGTFGGDGQKLLF

SEQ ID NO: 231634 - protein, 12 aa, Homo sapiens
  CDR3 for beta chain variable domain of TCR clone 115817 (TRBV11-2, TRBJ2-2)
CASSLGGGELFF

SEQ ID NO: 231635 - protein, 16 aa, Homo sapiens
  CDR3 for alpha chain variable domain of TCR clone 115818 (TRAV12-2, TRAJ6)
CAAPLAGSGRSYIPTF

SEQ ID NO: 231636 - protein, 10 aa, Homo sapiens
  CDR3 for beta chain variable domain of TCR clone 115818 (TRBV28, TRBJ1-2)
CASSSDRAVF

SEQ ID NO: 231637 - protein, 14 aa, Homo sapiens
  CDR3 for alpha chain variable domain of TCR clone 115819 (TRAV17, TRAJ35)
CATDRPGFGNVLHC

SEQ ID NO: 231638 - protein, 19 aa, Homo sapiens
  CDR3 for beta chain variable domain of TCR clone 115819 (TRBV11-3, TRBJ2-2)
CASSTRLGAKTTNTGELFF

SEQ ID NO: 231639 - protein, 15 aa, Homo sapiens
  CDR3 for alpha chain variable domain of TCR clone 115820 (TRAV17, TRAJ52)
CATESGGTSYGKLTF

SEQ ID NO: 231640 - protein, 14 aa, Homo sapiens
  CDR3 for beta chain variable domain of TCR clone 115820 (TRBV28, TRBJ1-5)
CASSLGVLVKPQHF

SEQ ID NO: 231641 - protein, 12 aa, Homo sapiens
  CDR3 for alpha chain variable domain of TCR clone 115821 (TRAV35, TRAJ23)
CCAHNQGGKLIF

SEQ ID NO: 231642 - protein, 17 aa, Homo sapiens
  CDR3 for beta chain variable domain of TCR clone 115821 (TRBV10-3, TRBJ2-4)
CTSVPSVNKGSKNIQYF

SEQ ID NO: 231643 - protein, 17 aa, Homo sapiens
  CDR3 for alpha chain variable domain of TCR clone 115822 (TRAV12-2, TRAJ53)
CAPLTDSQEGSNYKLKF

SEQ ID NO: 231644 - protein, 12 aa, Homo sapiens
  CDR3 for beta chain variable domain of TCR clone 115822 (TRBV11-2, TRBJ2-2)
CASSLGGGELFF

SEQ ID NO: 231645 - protein, 17 aa, Homo sapiens
  CDR3 for alpha chain variable domain of TCR clone 115823 (TRAV3, TRAJ38)
CAVRDCLNAGNNRKLIG

SEQ ID NO: 231646 - protein, 15 aa, Homo sapiens
  CDR3 for beta chain variable domain of TCR clone 115823 (TRBV20-1, TRBJ2-7)
CSARDRVSGMDEQYF

SEQ ID NO: 231647 - protein, 14 aa, Homo sapiens
  CDR3 for alpha chain variable domain of TCR clone 115824 (TRAV2, TRAJ9)
CAVEDRSGGFKTIF

SEQ ID NO: 231648 - protein, 20 aa, Homo sapiens
  CDR3 for beta chain variable domain of TCR clone 115824 (TRBV7-8, TRBJ2-1)
CASSLAHRLAGVRSYNEQFF

SEQ ID NO: 231649 - protein, 18 aa, Homo sapiens
  CDR3 for alpha chain variable domain of TCR clone 115825 (TRAV21, TRAJ53)
CAVKGGENSGGSNYKLTF

SEQ ID NO: 231650 - protein, 14 aa, Homo sapiens
  CDR3 for beta chain variable domain of TCR clone 115825 (TRBV12-5, TRBJ2-5)
CASGSRTHQETQYF

SEQ ID NO: 231651 - protein, 13 aa, Homo sapiens
  CDR3 for alpha chain variable domain of TCR clone 115826 (TRAV29/DV5, TRAJ13)
CAARPGGYQKVTF

SEQ ID NO: 231652 - protein, 13 aa, Homo sapiens
  CDR3 for beta chain variable domain of TCR clone 115826 (TRBV7-2, TRBJ2-2)
CASSLAVTGELFF

SEQ ID NO: 231653 - protein, 12 aa, Homo sapiens
  CDR3 for alpha chain variable domain of TCR clone 115827 (TRAV29/DV5, TRAJ15)
CASNHAGTALIF

SEQ ID NO: 231654 - protein, 15 aa, Homo sapiens
  CDR3 for beta chain variable domain of TCR clone 115827 (TRBV11-2, TRBJ2-2)
CASSSDRVNAGELFF

SEQ ID NO: 231655 - protein, 14 aa, Homo sapiens
  CDR3 for alpha chain variable domain of TCR clone 115828 (TRAV23/DV6, TRAJ4)
CAANLSGGYNKLIF

SEQ ID NO: 231656 - protein, 11 aa, Homo sapiens
  CDR3 for beta chain variable domain of TCR clone 115828 (TRBV7-9, TRBJ2-3)
CASSPTDTQDF

SEQ ID NO: 231657 - protein, 14 aa, Homo sapiens
  CDR3 for alpha chain variable domain of TCR clone 115829 (TRAV1-1, TRAJ30)
CAVRSLNRDDKIIF

SEQ ID NO: 231658 - protein, 15 aa, Homo sapiens
  CDR3 for beta chain variable domain of TCR clone 115829 (TRBV27, TRBJ1-4)
CASSAQQELNEKLFF

SEQ ID NO: 231659 - protein, 13 aa, Homo sapiens
  CDR3 for alpha chain variable domain of TCR clone 115830 (TRAV12-3, TRAJ20)
CAMSATNDYKLSF

SEQ ID NO: 231660 - protein, 16 aa, Homo sapiens
  CDR3 for beta chain variable domain of TCR clone 115830 (TRBV18, TRBJ2-7)
CASSPYRDGQTYERYF

SEQ ID NO: 231661 - protein, 15 aa, Homo sapiens
  CDR3 for alpha chain variable domain of TCR clone 115831 (TRAV8-3, TRAJ23)
CAVGDRYKQGGKLIF

SEQ ID NO: 231662 - protein, 22 aa, Homo sapiens
  CDR3 for beta chain variable domain of TCR clone 115831 (TRBV29-1, TRBJ2-5)
TVSNMSPEDSSIYLCSAGTQYF

SEQ ID NO: 231663 - protein, 12 aa, Homo sapiens
  CDR3 for alpha chain variable domain of TCR clone 115832 (TRAV2, TRAJ9)
CAVGAGGFKTIF

SEQ ID NO: 231664 - protein, 16 aa, Homo sapiens
  CDR3 for beta chain variable domain of TCR clone 115832 (TRBV13, TRBJ2-2)
CASSTRTGGHTGELFF

SEQ ID NO: 231665 - protein, 15 aa, Homo sapiens
  CDR3 for alpha chain variable domain of TCR clone 115833 (TRAV35, TRAJ40)
CAGQLGQAGSYKYIF

SEQ ID NO: 231666 - protein, 14 aa, Homo sapiens
  CDR3 for beta chain variable domain of TCR clone 115833 (TRBV7-3, TRBJ2-1)
CASSLTGGANEQFF

SEQ ID NO: 231667 - protein, 16 aa, Homo sapiens
  CDR3 for alpha chain variable domain of TCR clone 115834 (TRAV16, TRAJ52)
CALSAAGGTSYGKLTF

SEQ ID NO: 231668 - protein, 14 aa, Homo sapiens
  CDR3 for beta chain variable domain of TCR clone 115834 (TRBV7-3, TRBJ2-2)
CASSSGGYTGELFF

SEQ ID NO: 231669 - protein, 13 aa, Homo sapiens
  CDR3 for alpha chain variable domain of TCR clone 115835 (TRAV16, TRAJ54)
CTLKVRGAQKLVF

SEQ ID NO: 231670 - protein, 13 aa, Homo sapiens
  CDR3 for beta chain variable domain of TCR clone 115835 (TRBV20-1, TRBJ1-1)
CSARGGGNTEAFF

SEQ ID NO: 231671 - protein, 16 aa, Homo sapiens
  CDR3 for alpha chain variable domain of TCR clone 115836 (TRAV3, TRAJ18)
CAVRDGRGSTLGRLYF

SEQ ID NO: 231672 - protein, 15 aa, Homo sapiens
  CDR3 for beta chain variable domain of TCR clone 115836 (TRBV7-9, TRBJ1-6)
CACSSPGRGNSPLHF

SEQ ID NO: 231673 - protein, 14 aa, Homo sapiens
  CDR3 for alpha chain variable domain of TCR clone 115837 (TRAV12-1, TRAJ17)
CVVNYKAAGNKLTF

SEQ ID NO: 231674 - protein, 16 aa, Homo sapiens
  CDR3 for beta chain variable domain of TCR clone 115837 (TRBV29-1, TRBJ2-7)
CSVEDAEDGTAYEQYF

SEQ ID NO: 231675 - protein, 14 aa, Homo sapiens
  CDR3 for alpha chain variable domain of TCR clone 115838 (TRAV4, TRAJ12)
CLVGYMDSSYKLIF

SEQ ID NO: 231676 - protein, 14 aa, Homo sapiens
  CDR3 for beta chain variable domain of TCR clone 115838 (TRBV27, TRBJ1-1)
CASSPGSGATEAFF

SEQ ID NO: 231677 - protein, 15 aa, Homo sapiens
  CDR3 for alpha chain variable domain of TCR clone 115839 (TRAV25, TRAJ53)
CPTSNSGGSNYKLTF

SEQ ID NO: 231678 - protein, 14 aa, Homo sapiens
  CDR3 for beta chain variable domain of TCR clone 115839 (TRBV12-5, TRBJ2-5)
CASGSRTHQETQYF

SEQ ID NO: 231679 - protein, 13 aa, Homo sapiens
  CDR3 for alpha chain variable domain of TCR clone 115840 (TRAV23/DV6, TRAJ10)
ASVLTGGGNKLTF

SEQ ID NO: 231680 - protein, 13 aa, Homo sapiens
  CDR3 for beta chain variable domain of TCR clone 115840 (TRBV11-1, TRBJ1-2)
CASVGSWGYGYNF

SEQ ID NO: 231681 - protein, 10 aa, Homo sapiens
  CDR3 for alpha chain variable domain of TCR clone 115841 (TRAV14/DV4, TRAJ48)
CAPRSEKLTF

SEQ ID NO: 231682 - protein, 12 aa, Homo sapiens
  CDR3 for beta chain variable domain of TCR clone 115841 (TRBV5-1, TRBJ1-2)
CASSQDTYGYTF

SEQ ID NO: 231683 - protein, 16 aa, Homo sapiens
  CDR3 for alpha chain variable domain of TCR clone 115842 (TRAV30, TRAJ24)
CGTEIVDADSWGKFQF

SEQ ID NO: 231684 - protein, 15 aa, Homo sapiens
  CDR3 for beta chain variable domain of TCR clone 115842 (TRBV5-1, TRBJ2-7)
CASSLMTSGSNEQYF

SEQ ID NO: 231685 - protein, 13 aa, Homo sapiens
  CDR3 for alpha chain variable domain of TCR clone 115843 (TRAV17, TRAJ9)
CATDYTGGFKTIF

SEQ ID NO: 231686 - protein, 16 aa, Homo sapiens
  CDR3 for beta chain variable domain of TCR clone 115843 (TRBV7-7, TRBJ2-1)
CASSLVSGTSYNEQFF

SEQ ID NO: 231687 - protein, 16 aa, Homo sapiens
  CDR3 for alpha chain variable domain of TCR clone 115844 (TRAV3, TRAJ28)
CAVLPRSGAGSYQLTF

SEQ ID NO: 231688 - protein, 18 aa, Homo sapiens
  CDR3 for beta chain variable domain of TCR clone 115844 (TRBV7-9, TRBJ2-7)
CASSLTTSGSRTWYEQYF

SEQ ID NO: 231689 - protein, 16 aa, Homo sapiens
  CDR3 for alpha chain variable domain of TCR clone 115845 (TRAV16, TRAJ4)
CALSRMFSGGYNKLIF

SEQ ID NO: 231690 - protein, 14 aa, Homo sapiens
  CDR3 for beta chain variable domain of TCR clone 115845 (TRBV7-6, TRBJ2-3)
CASSLGTVTDTQYF

SEQ ID NO: 231691 - protein, 13 aa, Homo sapiens
  CDR3 for alpha chain variable domain of TCR clone 115846 (TRAV30, TRAJ44)
CGSNAGTASKLTF

SEQ ID NO: 231692 - protein, 15 aa, Homo sapiens
  CDR3 for beta chain variable domain of TCR clone 115846 (TRBV5-1, TRBJ1-1)
CASSLDTVRDTEAFF

SEQ ID NO: 231693 - protein, 13 aa, Homo sapiens
  CDR3 for alpha chain variable domain of TCR clone 115847 (TRAV35, TRAJ57)
CAGSQGGSEKLVF

SEQ ID NO: 231694 - protein, 17 aa, Homo sapiens
  CDR3 for beta chain variable domain of TCR clone 115847 (TRBV24-1, TRBJ2-1)
CATSDVSTSGTYNEQFF

SEQ ID NO: 231695 - protein, 13 aa, Homo sapiens
  CDR3 for alpha chain variable domain of TCR clone 115848 (TRAV26-2, TRAJ53)
CILSGGSNYKLTF

SEQ ID NO: 231696 - protein, 15 aa, Homo sapiens
  CDR3 for beta chain variable domain of TCR clone 115848 (TRBV11-2, TRBJ2-2)
CASSSDRVNAGELFF

SEQ ID NO: 231697 - protein, 15 aa, Homo sapiens
  CDR3 for alpha chain variable domain of TCR clone 115849 (TRAV8-4, TRAJ12)
CAVSGGMDSSYKLIF

SEQ ID NO: 231698 - protein, 13 aa, Homo sapiens
  CDR3 for beta chain variable domain of TCR clone 115849 (TRBV20-1, TRBJ1-2)
CSARDQGAYGYTS

SEQ ID NO: 231699 - protein, 15 aa, Homo sapiens
  CDR3 for alpha chain variable domain of TCR clone 115850 (TRAV21, TRAJ40)
CAVRPQTSGTYKYIF

SEQ ID NO: 231700 - protein, 15 aa, Homo sapiens
  CDR3 for beta chain variable domain of TCR clone 115850 (TRBV20-1, TRBJ2-7)
CSARDRVSGMDEQYF

SEQ ID NO: 231701 - protein, 18 aa, Homo sapiens
  CDR3 for alpha chain variable domain of TCR clone 115851 (TRAV21, TRAJ52)
CAVRPSPAGGTSYGKLTF

SEQ ID NO: 231702 - protein, 13 aa, Homo sapiens
  CDR3 for beta chain variable domain of TCR clone 115851 (TRBV29-1, TRBJ2-1)
CSVECGRVNEQFF

SEQ ID NO: 231703 - protein, 14 aa, Homo sapiens
  CDR3 for alpha chain variable domain of TCR clone 115852 (TRAV12-3, TRAJ33)
CAMSVPGSNYQLIW

SEQ ID NO: 231704 - protein, 12 aa, Homo sapiens
  CDR3 for beta chain variable domain of TCR clone 115852 (TRBV7-8, TRBJ2-7)
RASSLGDREQYF

SEQ ID NO: 231705 - protein, 14 aa, Homo sapiens
  CDR3 for alpha chain variable domain of TCR clone 115853 (TRAV12-2, TRAJ15)
CAPHTGQAGTALIF

SEQ ID NO: 231706 - protein, 15 aa, Homo sapiens
  CDR3 for beta chain variable domain of TCR clone 115853 (TRBV9, TRBJ1-6)
CASSVAGTGDSPLHF

SEQ ID NO: 231707 - protein, 14 aa, Homo sapiens
  CDR3 for alpha chain variable domain of TCR clone 115854 (TRAV13-1, TRAJ35)
CAASKGGFGNVLHC

SEQ ID NO: 231708 - protein, 18 aa, Homo sapiens
  CDR3 for beta chain variable domain of TCR clone 115854 (TRBV20-1, TRBJ2-6)
CSAETTPTHGSGANVLTF

SEQ ID NO: 231709 - protein, 13 aa, Homo sapiens
  CDR3 for alpha chain variable domain of TCR clone 115855 (TRAV1-2, TRAJ9)
CAALNTGGFKTIF

SEQ ID NO: 231710 - protein, 13 aa, Homo sapiens
  CDR3 for beta chain variable domain of TCR clone 115855 (TRBV19, TRBJ1-2)
CASSVPGQVGYTF

SEQ ID NO: 231711 - protein, 14 aa, Homo sapiens
  CDR3 for alpha chain variable domain of TCR clone 115856 (TRAV8-3, TRAJ39)
CAVVAWGAGNMLTF

SEQ ID NO: 231712 - protein, 16 aa, Homo sapiens
  CDR3 for beta chain variable domain of TCR clone 115856 (TRBV7-2, TRBJ1-3)
CASSSGRVLSGNTIYF

SEQ ID NO: 231713 - protein, 13 aa, Homo sapiens
  CDR3 for alpha chain variable domain of TCR clone 115857 (TRAV9-2, TRAJ49)
CALSEGTGNQFYF

SEQ ID NO: 231714 - protein, 20 aa, Homo sapiens
  CDR3 for beta chain variable domain of TCR clone 115857 (TRBV19, TRBJ2-1)
CASSISRTVTSTRLNNEQFF

SEQ ID NO: 231715 - protein, 14 aa, Homo sapiens
  CDR3 for alpha chain variable domain of TCR clone 115858 (TRAV1-2, TRAJ6)
CAVSLSGGIYIPTF

SEQ ID NO: 231716 - protein, 15 aa, Homo sapiens
  CDR3 for beta chain variable domain of TCR clone 115858 (TRBV28, TRBJ2-7)
CASSPGGRGFYEQYF

SEQ ID NO: 231717 - protein, 13 aa, Homo sapiens
  CDR3 for alpha chain variable domain of TCR clone 115859 (TRAV3, TRAJ21)
CAVREPDFNKFYF

SEQ ID NO: 231718 - protein, 18 aa, Homo sapiens
  CDR3 for beta chain variable domain of TCR clone 115859 (TRBV20-1, TRBJ2-6)
CSAETKPTHGSGANVLTF

SEQ ID NO: 231719 - protein, 17 aa, Homo sapiens
  CDR3 for alpha chain variable domain of TCR clone 115860 (TRAV4, TRAJ18)
FLVGERSVGSTLGRLYF

SEQ ID NO: 231720 - protein, 16 aa, Homo sapiens
  CDR3 for beta chain variable domain of TCR clone 115860 (TRBV4-2, TRBJ1-1)
CASSPSPGRAAPEAFF

SEQ ID NO: 231721 - protein, 14 aa, Homo sapiens
  CDR3 for alpha chain variable domain of TCR clone 115861 (TRAV12-2, TRAJ40)
CAVKIPSGTYKYIF

SEQ ID NO: 231722 - protein, 17 aa, Homo sapiens
  CDR3 for beta chain variable domain of TCR clone 115861 (TRBV13, TRBJ2-3)
CAISLSRVAGGRNTQYF

SEQ ID NO: 231723 - protein, 12 aa, Homo sapiens
  CDR3 for alpha chain variable domain of TCR clone 115862 (TRAV13-1, TRAJ11)
CAGPSGYSTLPF

SEQ ID NO: 231724 - protein, 13 aa, Homo sapiens
  CDR3 for beta chain variable domain of TCR clone 115862 (TRBV12-4, TRBJ2-1)
CASSLSPSNEQFF

SEQ ID NO: 231725 - protein, 12 aa, Homo sapiens
  CDR3 for alpha chain variable domain of TCR clone 115863 (TRAV3, TRAJ39)
CAVIEWSNMLTF

SEQ ID NO: 231726 - protein, 15 aa, Homo sapiens
  CDR3 for beta chain variable domain of TCR clone 115863 (TRBV24-1, TRBJ2-4)
CATSDPGDRANIQYF

SEQ ID NO: 231727 - protein, 11 aa, Homo sapiens
  CDR3 for alpha chain variable domain of TCR clone 115864 (TRAV8-3, TRAJ49)
CAVGGGNQFYF

SEQ ID NO: 231728 - protein, 18 aa, Homo sapiens
  CDR3 for beta chain variable domain of TCR clone 115864 (TRBV11-2, TRBJ2-3)
CASSLGGASRGAPNTQYF

SEQ ID NO: 231729 - protein, 12 aa, Homo sapiens
  CDR3 for alpha chain variable domain of TCR clone 115865 (TRAV12-2, TRAJ4)
GWPEGGYNKLMF

SEQ ID NO: 231730 - protein, 16 aa, Homo sapiens
  CDR3 for beta chain variable domain of TCR clone 115865 (TRBV6-1, TRBJ2-5)
CASSETLDRGAETQYF

SEQ ID NO: 231731 - protein, 14 aa, Homo sapiens
  CDR3 for alpha chain variable domain of TCR clone 115866 (TRAV1-2, TRAJ16)
CAVNRFSDGQKLLF

SEQ ID NO: 231732 - protein, 13 aa, Homo sapiens
  CDR3 for beta chain variable domain of TCR clone 115866 (TRBV12-4, TRBJ2-7)
CASSLSGVYEQYF

SEQ ID NO: 231733 - protein, 15 aa, Homo sapiens
  CDR3 for alpha chain variable domain of TCR clone 115867 (TRAV12-3, TRAJ6)
CAMSAASGGSYIPTF

SEQ ID NO: 231734 - protein, 13 aa, Homo sapiens
  CDR3 for beta chain variable domain of TCR clone 115867 (TRBV20-1, TRBJ1-2)
CSASTGRIYGYTF

SEQ ID NO: 231735 - protein, 13 aa, Homo sapiens
  CDR3 for alpha chain variable domain of TCR clone 115868 (TRAV27, TRAJ8)
CAGGPTGFKKLVF

SEQ ID NO: 231736 - protein, 15 aa, Homo sapiens
  CDR3 for beta chain variable domain of TCR clone 115868 (TRBV6-1, TRBJ2-7)
CASSESMGDFYEQYF

SEQ ID NO: 231737 - protein, 13 aa, Homo sapiens
  CDR3 for alpha chain variable domain of TCR clone 115869 (TRAV29/DV5, TRAJ47)
CAASAEYGNKLVF

SEQ ID NO: 231738 - protein, 15 aa, Homo sapiens
  CDR3 for beta chain variable domain of TCR clone 115869 (TRBV7-9, TRBJ1-4)
CASSARTGGNENLFF

SEQ ID NO: 231739 - protein, 11 aa, Homo sapiens
  CDR3 for alpha chain variable domain of TCR clone 115870 (TRAV13-1, TRAJ20)
CAASNDYKLSF

SEQ ID NO: 231740 - protein, 14 aa, Homo sapiens
  CDR3 for beta chain variable domain of TCR clone 115870 (TRBV12-5, TRBJ2-5)
CASGSRTHQETQYF

SEQ ID NO: 231741 - protein, 14 aa, Homo sapiens
  CDR3 for alpha chain variable domain of TCR clone 115871 (TRAV13-1, TRAJ35)
CAASKGGFGNVLHC

SEQ ID NO: 231742 - protein, 15 aa, Homo sapiens
  CDR3 for beta chain variable domain of TCR clone 115871 (TRBV12-4, TRBJ2-5)
CASSGTGQAQETQYF

SEQ ID NO: 231743 - protein, 16 aa, Homo sapiens
  CDR3 for alpha chain variable domain of TCR clone 115872 (TRAV4, TRAJ8)
CLVGDSGNSGFQKLVF

SEQ ID NO: 231744 - protein, 15 aa, Homo sapiens
  CDR3 for beta chain variable domain of TCR clone 115872 (TRBV15, TRBJ1-2)
CATSRVRASGSGYTF

SEQ ID NO: 231745 - protein, 13 aa, Homo sapiens
  CDR3 for alpha chain variable domain of TCR clone 115873 (TRAV12-2, TRAJ6)
CAVNVSRKLHTYI

SEQ ID NO: 231746 - protein, 13 aa, Homo sapiens
  CDR3 for beta chain variable domain of TCR clone 115873 (TRBV7-9, TRBJ1-2)
CASSLKQNYGYTF

SEQ ID NO: 231747 - protein, 14 aa, Homo sapiens
  CDR3 for alpha chain variable domain of TCR clone 115874 (TRAV13-2, TRAJ15)
CAENPNQAGTALIF

SEQ ID NO: 231748 - protein, 16 aa, Homo sapiens
  CDR3 for beta chain variable domain of TCR clone 115874 (TRBV12-4, TRBJ1-2)
CASSQTATGKTRGYTF

SEQ ID NO: 231749 - protein, 13 aa, Homo sapiens
  CDR3 for alpha chain variable domain of TCR clone 115875 (TRAV8-3, TRAJ43)
CAVVPYNNNDMRF

SEQ ID NO: 231750 - protein, 12 aa, Homo sapiens
  CDR3 for beta chain variable domain of TCR clone 115875 (TRBV7-9, TRBJ2-7)
CASSIKREEQYF

SEQ ID NO: 231751 - protein, 10 aa, Homo sapiens
  CDR3 for alpha chain variable domain of TCR clone 115876 (TRAV12-1, TRAJ23)
CVVSGGKLIF

SEQ ID NO: 231752 - protein, 15 aa, Homo sapiens
  CDR3 for beta chain variable domain of TCR clone 115876 (TRBV18, TRBJ2-7)
CASSPSSTGNYEQYF

SEQ ID NO: 231753 - protein, 11 aa, Homo sapiens
  CDR3 for alpha chain variable domain of TCR clone 115877 (TRAV16, TRAJ29)
WAPSGNTPLAF

SEQ ID NO: 231754 - protein, 15 aa, Homo sapiens
  CDR3 for beta chain variable domain of TCR clone 115877 (TRBV5-7, TRBJ2-7)
CASSPYFEGSYEQYF

SEQ ID NO: 231755 - protein, 15 aa, Homo sapiens
  CDR3 for alpha chain variable domain of TCR clone 115878 (TRAV20, TRAJ53)
CAVQARGGSNYKLTF

SEQ ID NO: 231756 - protein, 15 aa, Homo sapiens
  CDR3 for beta chain variable domain of TCR clone 115878 (TRBV9, TRBJ2-1)
CASSLAGSSYNEQFF

SEQ ID NO: 231757 - protein, 15 aa, Homo sapiens
  CDR3 for alpha chain variable domain of TCR clone 115879 (TRAV1-2, TRAJ9)
CAVREVNTGGFKTIF

SEQ ID NO: 231758 - protein, 15 aa, Homo sapiens
  CDR3 for beta chain variable domain of TCR clone 115879 (TRBV7-6, TRBJ2-3)
CASSSEGGLAHTQYF

SEQ ID NO: 231759 - protein, 13 aa, Homo sapiens
  CDR3 for alpha chain variable domain of TCR clone 115880 (TRAV23/DV6, TRAJ16)
CAASISDGQQLLF

SEQ ID NO: 231760 - protein, 15 aa, Homo sapiens
  CDR3 for beta chain variable domain of TCR clone 115880 (TRBV2, TRBJ2-2)
CASSRETVGTGELFF

SEQ ID NO: 231761 - protein, 13 aa, Homo sapiens
  CDR3 for alpha chain variable domain of TCR clone 115881 (TRAV36/DV7, TRAJ49)
CAGDSNTGNQFYF

SEQ ID NO: 231762 - protein, 12 aa, Homo sapiens
  CDR3 for beta chain variable domain of TCR clone 115881 (TRBV12-4, TRBJ1-2)
CASSFIWLHLRF

SEQ ID NO: 231763 - protein, 16 aa, Homo sapiens
  CDR3 for alpha chain variable domain of TCR clone 115882 (TRAV12-3, TRAJ10)
CAMKKGITGGGNKLTF

SEQ ID NO: 231764 - protein, 13 aa, Homo sapiens
  CDR3 for beta chain variable domain of TCR clone 115882 (TRBV19, TRBJ1-2)
CASSVPGQDGYTF

SEQ ID NO: 231765 - protein, 17 aa, Homo sapiens
  CDR3 for alpha chain variable domain of TCR clone 115883 (TRAV8-6, TRAJ58)
CAVGSWVGETSGSRLTF

SEQ ID NO: 231766 - protein, 16 aa, Homo sapiens
  CDR3 for beta chain variable domain of TCR clone 115883 (TRBV20-1, TRBJ1-4)
CSAPGQGLLTNEKLFF

SEQ ID NO: 231767 - protein, 15 aa, Homo sapiens
  CDR3 for alpha chain variable domain of TCR clone 115884 (TRAV3, TRAJ45)
CAVRTPWGGADVLTF

SEQ ID NO: 231768 - protein, 16 aa, Homo sapiens
  CDR3 for beta chain variable domain of TCR clone 115884 (TRBV6-1, TRBJ2-2)
CASSFGQGANTGELFF

SEQ ID NO: 231769 - protein, 13 aa, Homo sapiens
  CDR3 for alpha chain variable domain of TCR clone 115885 (TRAV21, TRAJ57)
CAVTQGGSEKLVF

SEQ ID NO: 231770 - protein, 16 aa, Homo sapiens
  CDR3 for beta chain variable domain of TCR clone 115885 (TRBV29-1, TRBJ2-7)
CSVEDAEDRTAYEQYF

SEQ ID NO: 231771 - protein, 14 aa, Homo sapiens
  CDR3 for alpha chain variable domain of TCR clone 115886 (TRAV12-2, TRAJ13)
CAGPFSGGYQKVTF

SEQ ID NO: 231772 - protein, 15 aa, Homo sapiens
  CDR3 for beta chain variable domain of TCR clone 115886 (TRBV4-1, TRBJ2-3)
CASRSTRAGTDTQYF

SEQ ID NO: 231773 - protein, 15 aa, Homo sapiens
  CDR3 for alpha chain variable domain of TCR clone 115887 (TRAV12-3, TRAJ49)
CAMVVTPNTGNQFYF

SEQ ID NO: 231774 - protein, 18 aa, Homo sapiens
  CDR3 for beta chain variable domain of TCR clone 115887 (TRBV4-1, TRBJ1-5)
CASSQDPRGQGLNQPQHF

SEQ ID NO: 231775 - protein, 15 aa, Homo sapiens
  CDR3 for alpha chain variable domain of TCR clone 115888 (TRAV3, TRAJ36)
CAVRASQTGANNLFF

SEQ ID NO: 231776 - protein, 13 aa, Homo sapiens
  CDR3 for beta chain variable domain of TCR clone 115888 (TRBV10-3, TRBJ1-2)
CAISGRDSYGYTF

SEQ ID NO: 231777 - protein, 15 aa, Homo sapiens
  CDR3 for alpha chain variable domain of TCR clone 115889 (TRAV12-1, TRAJ44)
CVVFVNTGTASKLTF

SEQ ID NO: 231778 - protein, 14 aa, Homo sapiens
  CDR3 for beta chain variable domain of TCR clone 115889 (TRBV7-2, TRBJ2-7)
CASSPKTSFYEQYF

SEQ ID NO: 231779 - protein, 15 aa, Homo sapiens
  CDR3 for alpha chain variable domain of TCR clone 115890 (TRAV23/DV6, TRAJ30)
CAASRQESRDDKIIF

SEQ ID NO: 231780 - protein, 17 aa, Homo sapiens
  CDR3 for beta chain variable domain of TCR clone 115890 (TRBV4-3, TRBJ2-1)
CASSQFSSGRASGEQFF

SEQ ID NO: 231781 - protein, 14 aa, Homo sapiens
  CDR3 for alpha chain variable domain of TCR clone 115891 (TRAV2, TRAJ29)
CAVTPPSGNTPLVV

SEQ ID NO: 231782 - protein, 13 aa, Homo sapiens
  CDR3 for beta chain variable domain of TCR clone 115891 (TRBV11-2, TRBJ2-1)
CASSLGLAGGRFF

SEQ ID NO: 231783 - protein, 14 aa, Homo sapiens
  CDR3 for alpha chain variable domain of TCR clone 115892 (TRAV1-2, TRAJ16)
CAVNRFSDGKKLLF

SEQ ID NO: 231784 - protein, 12 aa, Homo sapiens
  CDR3 for beta chain variable domain of TCR clone 115892 (TRBV7-9, TRBJ2-7)
CASSLEGYEQYF

SEQ ID NO: 231785 - protein, 20 aa, Homo sapiens
  CDR3 for alpha chain variable domain of TCR clone 115893 (TRAV1-1, TRAJ4)
CLLLLRYEGFLSGGYNKLIF

SEQ ID NO: 231786 - protein, 16 aa, Homo sapiens
  CDR3 for beta chain variable domain of TCR clone 115893 (TRBV28, TRBJ1-4)
CASSPPYRGRSEKLFF

SEQ ID NO: 231787 - protein, 16 aa, Homo sapiens
  CDR3 for alpha chain variable domain of TCR clone 115894 (TRAV3, TRAJ37)
CAVRGKGSGNTGKLIF

SEQ ID NO: 231788 - protein, 13 aa, Homo sapiens
  CDR3 for beta chain variable domain of TCR clone 115894 (TRBV14, TRBJ2-7)
CASIQDRRYEQYF

SEQ ID NO: 231789 - protein, 14 aa, Homo sapiens
  CDR3 for alpha chain variable domain of TCR clone 115895 (TRAV8-3, TRAJ9)
CAVVYNTGGFKTIF

SEQ ID NO: 231790 - protein, 19 aa, Homo sapiens
  CDR3 for beta chain variable domain of TCR clone 115895 (TRBV7-2, TRBJ2-3)
CASSFLSRNWGGGTDTQYF

SEQ ID NO: 231791 - protein, 15 aa, Homo sapiens
  CDR3 for alpha chain variable domain of TCR clone 115896 (TRAV12-2, TRAJ43)
CAFDMRFGAGTRLTV

SEQ ID NO: 231792 - protein, 20 aa, Homo sapiens
  CDR3 for beta chain variable domain of TCR clone 115896 (TRBV7-8, TRBJ2-2)
CASSHLFPGPTIHITGELFF

SEQ ID NO: 231793 - protein, 17 aa, Homo sapiens
  CDR3 for alpha chain variable domain of TCR clone 115897 (TRAV17, TRAJ7)
CATLGSLAFGKGNQVVV

SEQ ID NO: 231794 - protein, 13 aa, Homo sapiens
  CDR3 for beta chain variable domain of TCR clone 115897 (TRBV12-4, TRBJ2-7)
CASSLERVREQYF

SEQ ID NO: 231795 - protein, 12 aa, Homo sapiens
  CDR3 for alpha chain variable domain of TCR clone 115898 (TRAV13-2, TRAJ23)
CAERHRGGKLIF

SEQ ID NO: 231796 - protein, 13 aa, Homo sapiens
  CDR3 for beta chain variable domain of TCR clone 115898 (TRBV11-2, TRBJ2-5)
CASSSTGEETQYF

SEQ ID NO: 231797 - protein, 10 aa, Homo sapiens
  CDR3 for alpha chain variable domain of TCR clone 115899 (TRAV26-2, TRAJ20)
CIQNDYKLSF

SEQ ID NO: 231798 - protein, 15 aa, Homo sapiens
  CDR3 for beta chain variable domain of TCR clone 115899 (TRBV6-3, TRBJ2-7)
CASSSPGTVFYEQYF

SEQ ID NO: 231799 - protein, 13 aa, Homo sapiens
  CDR3 for alpha chain variable domain of TCR clone 115900 (TRAV20, TRAJ20)
CAVQAGSGYKLSF

SEQ ID NO: 231800 - protein, 16 aa, Homo sapiens
  CDR3 for beta chain variable domain of TCR clone 115900 (TRBV7-3, TRBJ2-1)
CASSLEGYRSYNEQFF

SEQ ID NO: 231801 - protein, 13 aa, Homo sapiens
  CDR3 for alpha chain variable domain of TCR clone 115901 (TRAV29/DV5, TRAJ33)
CAASVESNYQLIW

SEQ ID NO: 231802 - protein, 16 aa, Homo sapiens
  CDR3 for beta chain variable domain of TCR clone 115901 (TRBV2, TRBJ2-5)
CASSETQGVGEETQYF

SEQ ID NO: 231803 - protein, 15 aa, Homo sapiens
  CDR3 for alpha chain variable domain of TCR clone 115902 (TRAV2, TRAJ9)
CAVEDRDTGGFKTIF

SEQ ID NO: 231804 - protein, 16 aa, Homo sapiens
  CDR3 for beta chain variable domain of TCR clone 115902 (TRBV5-7, TRBJ2-3)
CASSSLGGAITDTQYF

SEQ ID NO: 231805 - protein, 12 aa, Homo sapiens
  CDR3 for alpha chain variable domain of TCR clone 115903 (TRAV2, TRAJ9)
CAVGAGGFKTIF

SEQ ID NO: 231806 - protein, 17 aa, Homo sapiens
  CDR3 for beta chain variable domain of TCR clone 115903 (TRBV3-1, TRBJ2-7)
CASSEVGHRGPSYEQYF

SEQ ID NO: 231807 - protein, 17 aa, Homo sapiens
  CDR3 for alpha chain variable domain of TCR clone 115904 (TRAV3, TRAJ42)
CAVRDRDYGGSQGNLIF

SEQ ID NO: 231808 - protein, 15 aa, Homo sapiens
  CDR3 for beta chain variable domain of TCR clone 115904 (TRBV3-1, TRBJ1-2)
CASSPDGVSYGSYTF

SEQ ID NO: 231809 - protein, 10 aa, Homo sapiens
  CDR3 for alpha chain variable domain of TCR clone 115905 (TRAV2, TRAJ34)
CAVVNDKLIF

SEQ ID NO: 231810 - protein, 12 aa, Homo sapiens
  CDR3 for beta chain variable domain of TCR clone 115905 (TRBV7-8, TRBJ2-7)
CASSLGDREQYL

SEQ ID NO: 231811 - protein, 14 aa, Homo sapiens
  CDR3 for alpha chain variable domain of TCR clone 115906 (TRAV1-2, TRAJ16)
CAVNRFSDGQKLLF

SEQ ID NO: 231812 - protein, 16 aa, Homo sapiens
  CDR3 for beta chain variable domain of TCR clone 115906 (TRBV9, TRBJ2-1)
CASSALGGIGKNEQFF

SEQ ID NO: 231813 - protein, 16 aa, Homo sapiens
  CDR3 for alpha chain variable domain of TCR clone 115907 (TRAV14/DV4, TRAJ54)
CAMREGRIQGAQKLVF

SEQ ID NO: 231814 - protein, 18 aa, Homo sapiens
  CDR3 for beta chain variable domain of TCR clone 115907 (TRBV20-1, TRBJ2-6)
CSAETTPTHGSGANVLTF

SEQ ID NO: 231815 - protein, 19 aa, Homo sapiens
  CDR3 for alpha chain variable domain of TCR clone 115908 (TRAV38-1, TRAJ53)
CSFMKHGLESGGSNYKLTF

SEQ ID NO: 231816 - protein, 13 aa, Homo sapiens
  CDR3 for beta chain variable domain of TCR clone 115908 (TRBV19, TRBJ2-7)
CASSPRQSYEQYF

SEQ ID NO: 231817 - protein, 13 aa, Homo sapiens
  CDR3 for alpha chain variable domain of TCR clone 115909 (TRAV2, TRAJ40)
YAVVTSGTYKYIF

SEQ ID NO: 231818 - protein, 11 aa, Homo sapiens
  CDR3 for beta chain variable domain of TCR clone 115909 (TRBV19, TRBJ1-1)
CASSIGSEAFF

SEQ ID NO: 231819 - protein, 12 aa, Homo sapiens
  CDR3 for alpha chain variable domain of TCR clone 115910 (TRAV8-3, TRAJ26)
CAGDNYGQNFVF

SEQ ID NO: 231820 - protein, 13 aa, Homo sapiens
  CDR3 for beta chain variable domain of TCR clone 115910 (TRBV7-7, TRBJ2-3)
CASSLSRADTQYF

SEQ ID NO: 231821 - protein, 17 aa, Homo sapiens
  CDR3 for alpha chain variable domain of TCR clone 115911 (TRAV3, TRAJ6)
CAVRDGPGAGGSYIPTF

SEQ ID NO: 231822 - protein, 13 aa, Homo sapiens
  CDR3 for beta chain variable domain of TCR clone 115911 (TRBV27, TRBJ2-1)
CASRTLGVGEQFF

SEQ ID NO: 231823 - protein, 12 aa, Homo sapiens
  CDR3 for alpha chain variable domain of TCR clone 115912 (TRAV21, TRAJ11)
CAATSGYSTLTF

SEQ ID NO: 231824 - protein, 14 aa, Homo sapiens
  CDR3 for beta chain variable domain of TCR clone 115912 (TRBV20-1, TRBJ2-7)
CSAPELPGVGEQYF

SEQ ID NO: 231825 - protein, 14 aa, Homo sapiens
  CDR3 for alpha chain variable domain of TCR clone 115913 (TRAV13-2, TRAJ9)
CAENLETGGFKTIF

SEQ ID NO: 231826 - protein, 12 aa, Homo sapiens
  CDR3 for beta chain variable domain of TCR clone 115913 (TRBV11-2, TRBJ2-2)
CASSLGGGELFF

SEQ ID NO: 231827 - protein, 17 aa, Homo sapiens
  CDR3 for alpha chain variable domain of TCR clone 115914 (TRAV35, TRAJ47)
GLLACRTHTEYGNKLVF

SEQ ID NO: 231828 - protein, 11 aa, Homo sapiens
  CDR3 for beta chain variable domain of TCR clone 115914 (TRBV29-1, TRBJ1-1)
CSVEVGTRTFF

SEQ ID NO: 231829 - protein, 13 aa, Homo sapiens
  CDR3 for alpha chain variable domain of TCR clone 115915 (TRAV20, TRAJ37)
CAGCSSNTGKLIF

SEQ ID NO: 231830 - protein, 12 aa, Homo sapiens
  CDR3 for beta chain variable domain of TCR clone 115915 (TRBV5-1, TRBJ2-5)
CASSLGLETQYF

SEQ ID NO: 231831 - protein, 13 aa, Homo sapiens
  CDR3 for alpha chain variable domain of TCR clone 115916 (TRAV1-1, TRAJ13)
SAVNSGGYQKVTF

SEQ ID NO: 231832 - protein, 12 aa, Homo sapiens
  CDR3 for beta chain variable domain of TCR clone 115916 (TRBV28, TRBJ2-1)
CASSVQINEQFF

SEQ ID NO: 231833 - protein, 11 aa, Homo sapiens
  CDR3 for alpha chain variable domain of TCR clone 115917 (TRAV2, TRAJ4)
CAVGWYNKLIF

SEQ ID NO: 231834 - protein, 15 aa, Homo sapiens
  CDR3 for beta chain variable domain of TCR clone 115917 (TRBV7-2, TRBJ2-2)
CASSCQRGETGELFF

SEQ ID NO: 231835 - protein, 10 aa, Homo sapiens
  CDR3 for alpha chain variable domain of TCR clone 115918 (TRAV20, TRAJ22)
CAAPARQLTF

SEQ ID NO: 231836 - protein, 15 aa, Homo sapiens
  CDR3 for beta chain variable domain of TCR clone 115918 (TRBV7-2, TRBJ2-3)
CASSLAPGSTDTQYF

SEQ ID NO: 231837 - protein, 12 aa, Homo sapiens
  CDR3 for alpha chain variable domain of TCR clone 115919 (TRAV21, TRAJ56)
CAVGVNRSKLTF

SEQ ID NO: 231838 - protein, 14 aa, Homo sapiens
  CDR3 for beta chain variable domain of TCR clone 115919 (TRBV19, TRBJ2-1)
CASPTFVLSGEQFF

SEQ ID NO: 231839 - protein, 12 aa, Homo sapiens
  CDR3 for alpha chain variable domain of TCR clone 115920 (TRAV1-2, TRAJ29)
CAVPSGNTPLVF

SEQ ID NO: 231840 - protein, 14 aa, Homo sapiens
  CDR3 for beta chain variable domain of TCR clone 115920 (TRBV28, TRBJ1-1)
CASSFPRKNTEAFF

SEQ ID NO: 231841 - protein, 14 aa, Homo sapiens
  CDR3 for alpha chain variable domain of TCR clone 115921 (TRAV13-1, TRAJ9)
CAASALTGGFKTIV

SEQ ID NO: 231842 - protein, 13 aa, Homo sapiens
  CDR3 for beta chain variable domain of TCR clone 115921 (TRBV20-1, TRBJ1-1)
CSAGTVGNTEAFF

SEQ ID NO: 231843 - protein, 15 aa, Homo sapiens
  CDR3 for alpha chain variable domain of TCR clone 115922 (TRAV34, TRAJ38)
CGADFTPGNNRKLIW

SEQ ID NO: 231844 - protein, 11 aa, Homo sapiens
  CDR3 for beta chain variable domain of TCR clone 115922 (TRBV12-4, TRBJ2-2)
CASSSAGELFF

SEQ ID NO: 231845 - protein, 14 aa, Homo sapiens
  CDR3 for alpha chain variable domain of TCR clone 115923 (TRAV1-2, TRAJ16)
CAVNRFSDGQKLLF

SEQ ID NO: 231846 - protein, 13 aa, Homo sapiens
  CDR3 for beta chain variable domain of TCR clone 115923 (TRBV12-4, TRBJ1-3)
CASSLASGNTIYF

SEQ ID NO: 231847 - protein, 15 aa, Homo sapiens
  CDR3 for alpha chain variable domain of TCR clone 115924 (TRAV21, TRAJ38)
CAVRQDAGNNRKLFW

SEQ ID NO: 231848 - protein, 16 aa, Homo sapiens
  CDR3 for beta chain variable domain of TCR clone 115924 (TRBV4-2, TRBJ1-1)
CASRPLDGGGDTEAFF

SEQ ID NO: 231849 - protein, 14 aa, Homo sapiens
  CDR3 for alpha chain variable domain of TCR clone 115925 (TRAV1-2, TRAJ16)
CAVNRFSDGQKLLF

SEQ ID NO: 231850 - protein, 14 aa, Homo sapiens
  CDR3 for beta chain variable domain of TCR clone 115925 (TRBV7-8, TRBJ2-3)
CASSFPDGQDTQYF

SEQ ID NO: 231851 - protein, 13 aa, Homo sapiens
  CDR3 for alpha chain variable domain of TCR clone 115926 (TRAV8-4, TRAJ9)
CAVSETGGFKTIF

SEQ ID NO: 231852 - protein, 15 aa, Homo sapiens
  CDR3 for beta chain variable domain of TCR clone 115926 (TRBV15, TRBJ1-2)
CATSRVRASGSGYTF

SEQ ID NO: 231853 - protein, 13 aa, Homo sapiens
  CDR3 for alpha chain variable domain of TCR clone 115927 (TRAV20, TRAJ20)
CAVQAGSGYKLSF

SEQ ID NO: 231854 - protein, 15 aa, Homo sapiens
  CDR3 for beta chain variable domain of TCR clone 115927 (TRBV7-9, TRBJ2-2)
CASGPLDTFPGELFF

SEQ ID NO: 231855 - protein, 12 aa, Homo sapiens
  CDR3 for alpha chain variable domain of TCR clone 115928 (TRAV12-2, TRAJ4)
GWPEGGYNKLIF

SEQ ID NO: 231856 - protein, 13 aa, Homo sapiens
  CDR3 for beta chain variable domain of TCR clone 115928 (TRBV7-9, TRBJ1-2)
CASSLKQNYGYTF

SEQ ID NO: 231857 - protein, 15 aa, Homo sapiens
  CDR3 for alpha chain variable domain of TCR clone 115929 (TRAV12-3, TRAJ42)
CAMSGHGGSQGNLIF

SEQ ID NO: 231858 - protein, 10 aa, Homo sapiens
  CDR3 for beta chain variable domain of TCR clone 115929 (TRBV24-1, TRBJ2-2)
CATSDDGDTP

SEQ ID NO: 231859 - protein, 14 aa, Homo sapiens
  CDR3 for alpha chain variable domain of TCR clone 115930 (TRAV14/DV4, TRAJ15)
CAMRREQAGTALIF

SEQ ID NO: 231860 - protein, 16 aa, Homo sapiens
  CDR3 for beta chain variable domain of TCR clone 115930 (TRBV15, TRBJ2-3)
CATSRDLGIVADTQYF

SEQ ID NO: 231861 - protein, 15 aa, Homo sapiens
  CDR3 for alpha chain variable domain of TCR clone 115931 (TRAV35, TRAJ58)
CAGRRQETSGSRLTF

SEQ ID NO: 231862 - protein, 11 aa, Homo sapiens
  CDR3 for beta chain variable domain of TCR clone 115931 (TRBV11-2, TRBJ1-1)
CVSSINTEAFF

SEQ ID NO: 231863 - protein, 11 aa, Homo sapiens
  CDR3 for alpha chain variable domain of TCR clone 115932 (TRAV12-1, TRAJ15)
CVVNAGTALIF

SEQ ID NO: 231864 - protein, 16 aa, Homo sapiens
  CDR3 for beta chain variable domain of TCR clone 115932 (TRBV28, TRBJ2-1)
CASSYRVRDSYNEQFF

SEQ ID NO: 231865 - protein, 15 aa, Homo sapiens
  CDR3 for alpha chain variable domain of TCR clone 115933 (TRAV12-3, TRAJ53)
CNERPIEGSNYKLTF

SEQ ID NO: 231866 - protein, 17 aa, Homo sapiens
  CDR3 for beta chain variable domain of TCR clone 115933 (TRBV7-8, TRBJ2-6)
CASSAGTGGAGANVLTF

SEQ ID NO: 231867 - protein, 12 aa, Homo sapiens
  CDR3 for alpha chain variable domain of TCR clone 115934 (TRAV13-1, TRAJ34)
CAASKGTDKLIF

SEQ ID NO: 231868 - protein, 13 aa, Homo sapiens
  CDR3 for beta chain variable domain of TCR clone 115934 (TRBV24-1, TRBJ2-2)
CATSDWSTGELFF

SEQ ID NO: 231869 - protein, 16 aa, Homo sapiens
  CDR3 for alpha chain variable domain of TCR clone 115935 (TRAV30, TRAJ24)
CGTEIVDADSWGKFQF

SEQ ID NO: 231870 - protein, 14 aa, Homo sapiens
  CDR3 for beta chain variable domain of TCR clone 115935 (TRBV13, TRBJ2-1)
CASSPRPRYNELFF

SEQ ID NO: 231871 - protein, 13 aa, Homo sapiens
  CDR3 for alpha chain variable domain of TCR clone 115936 (TRAV17, TRAJ9)
CATDYTGGFKTIF

SEQ ID NO: 231872 - protein, 13 aa, Homo sapiens
  CDR3 for beta chain variable domain of TCR clone 115936 (TRBV10-3, TRBJ2-7)
CASKLAVNYEQYF

SEQ ID NO: 231873 - protein, 18 aa, Homo sapiens
  CDR3 for alpha chain variable domain of TCR clone 115937 (TRAV13-1, TRAJ10)
CAASKGRAVTGGGNKITF

SEQ ID NO: 231874 - protein, 14 aa, Homo sapiens
  CDR3 for beta chain variable domain of TCR clone 115937 (TRBV18, TRBJ2-7)
CASSPRGGAYEQYF

SEQ ID NO: 231875 - protein, 15 aa, Homo sapiens
  CDR3 for alpha chain variable domain of TCR clone 115938 (TRAV17, TRAJ16)
CATALRFSDGQNLLF

SEQ ID NO: 231876 - protein, 15 aa, Homo sapiens
  CDR3 for beta chain variable domain of TCR clone 115938 (TRBV20-1, TRBJ1-1)
CSASRGVTGNTEAFF

SEQ ID NO: 231877 - protein, 12 aa, Homo sapiens
  CDR3 for alpha chain variable domain of TCR clone 115939 (TRAV21, TRAJ56)
CAVGVNRSKLTF

SEQ ID NO: 231878 - protein, 13 aa, Homo sapiens
  CDR3 for beta chain variable domain of TCR clone 115939 (TRBV4-1, TRBJ2-7)
CASSQGQAYEQYF

SEQ ID NO: 231879 - protein, 12 aa, Homo sapiens
  CDR3 for alpha chain variable domain of TCR clone 115940 (TRAV27, TRAJ41)
CAGRNSGYALNF

SEQ ID NO: 231880 - protein, 14 aa, Homo sapiens
  CDR3 for beta chain variable domain of TCR clone 115940 (TRBV19, TRBJ2-1)
CASPTFVLSGEQFF

SEQ ID NO: 231881 - protein, 14 aa, Homo sapiens
  CDR3 for alpha chain variable domain of TCR clone 115941 (TRAV12-2, TRAJ13)
CAVKKTVGYQKVTF

SEQ ID NO: 231882 - protein, 14 aa, Homo sapiens
  CDR3 for beta chain variable domain of TCR clone 115941 (TRBV19, TRBJ2-1)
CASPTFVLSGEQFF

SEQ ID NO: 231883 - protein, 15 aa, Homo sapiens
  CDR3 for alpha chain variable domain of TCR clone 115942 (TRAV23/DV6, TRAJ18)
CAARYRGSTLGRLYF

SEQ ID NO: 231884 - protein, 14 aa, Homo sapiens
  CDR3 for beta chain variable domain of TCR clone 115942 (TRBV7-6, TRBJ2-3)
CASSLGTVTDTQYF

SEQ ID NO: 231885 - protein, 17 aa, Homo sapiens
  CDR3 for alpha chain variable domain of TCR clone 115943 (TRAV1-2, TRAJ8)
CAVRDPDENTGFQKLVF

SEQ ID NO: 231886 - protein, 16 aa, Homo sapiens
  CDR3 for beta chain variable domain of TCR clone 115943 (TRBV7-9, TRBJ2-2)
CASSGFGGANTVELFF

SEQ ID NO: 231887 - protein, 13 aa, Homo sapiens
  CDR3 for alpha chain variable domain of TCR clone 115944 (TRAV12-3, TRAJ20)
CAMRRSNDYKPSF

SEQ ID NO: 231888 - protein, 15 aa, Homo sapiens
  CDR3 for beta chain variable domain of TCR clone 115944 (TRBV9, TRBJ2-3)
CASSVAGGRSDTQYF

SEQ ID NO: 231889 - protein, 14 aa, Homo sapiens
  CDR3 for alpha chain variable domain of TCR clone 115945 (TRAV39, TRAJ42)
CAVSYGGSQGNLIF

SEQ ID NO: 231890 - protein, 15 aa, Homo sapiens
  CDR3 for beta chain variable domain of TCR clone 115945 (TRBV5-1, TRBJ2-3)
CASRVTSGSTDTQYF

SEQ ID NO: 231891 - protein, 14 aa, Homo sapiens
  CDR3 for alpha chain variable domain of TCR clone 115946 (TRAV2, TRAJ9)
CAVEDRCGGFKTIF

SEQ ID NO: 231892 - protein, 16 aa, Homo sapiens
  CDR3 for beta chain variable domain of TCR clone 115946 (TRBV28, TRBJ1-5)
CASSLTGQGWNQPQHF

SEQ ID NO: 231893 - protein, 15 aa, Homo sapiens
  CDR3 for alpha chain variable domain of TCR clone 115947 (TRAV8-3, TRAJ45)
CASSYSGGGADGLTF

SEQ ID NO: 231894 - protein, 18 aa, Homo sapiens
  CDR3 for beta chain variable domain of TCR clone 115947 (TRBV18, TRBJ1-3)
CASSPRGGAVPSGNTIYF

SEQ ID NO: 231895 - protein, 16 aa, Homo sapiens
  CDR3 for alpha chain variable domain of TCR clone 115948 (TRAV3, TRAJ10)
CAVRDMRAGGGNKLTF

SEQ ID NO: 231896 - protein, 15 aa, Homo sapiens
  CDR3 for beta chain variable domain of TCR clone 115948 (TRBV27, TRBJ2-1)
CASSNGGESSNEQFF

SEQ ID NO: 231897 - protein, 10 aa, Homo sapiens
  CDR3 for alpha chain variable domain of TCR clone 115949 (TRAV26-1, TRAJ40)
CIAGTYKYIF

SEQ ID NO: 231898 - protein, 15 aa, Homo sapiens
  CDR3 for beta chain variable domain of TCR clone 115949 (TRBV6-3, TRBJ2-7)
CASSSPGTVFYEQYL

SEQ ID NO: 231899 - protein, 16 aa, Homo sapiens
  CDR3 for alpha chain variable domain of TCR clone 115950 (TRAV30, TRAJ24)
CGTEIVDADSWGKSQF

SEQ ID NO: 231900 - protein, 17 aa, Homo sapiens
  CDR3 for beta chain variable domain of TCR clone 115950 (TRBV20-1, TRBJ2-1)
CSASSSGLAGSYNEQFF

SEQ ID NO: 231901 - protein, 12 aa, Homo sapiens
  CDR3 for alpha chain variable domain of TCR clone 115951 (TRAV27, TRAJ35)
CAGADFGNVLHC

SEQ ID NO: 231902 - protein, 14 aa, Homo sapiens
  CDR3 for beta chain variable domain of TCR clone 115951 (TRBV6-1, TRBJ1-3)
CASVQGGGGNTIYF

SEQ ID NO: 231903 - protein, 17 aa, Homo sapiens
  CDR3 for alpha chain variable domain of TCR clone 115952 (TRAV8-3, TRAJ52)
CAVGAEAGGTSYGKLTF

SEQ ID NO: 231904 - protein, 15 aa, Homo sapiens
  CDR3 for beta chain variable domain of TCR clone 115952 (TRBV5-1, TRBJ2-5)
CASSRQGLGQGTQYF

SEQ ID NO: 231905 - protein, 13 aa, Homo sapiens
  CDR3 for alpha chain variable domain of TCR clone 115953 (TRAV12-2, TRAJ34)
CAVRGYKTDKLIF

SEQ ID NO: 231906 - protein, 15 aa, Homo sapiens
  CDR3 for beta chain variable domain of TCR clone 115953 (TRBV28, TRBJ2-1)
CASRTGAGVIARQFF

SEQ ID NO: 231907 - protein, 11 aa, Homo sapiens
  CDR3 for alpha chain variable domain of TCR clone 115954 (TRAV3, TRAJ13)
CAVTSYQKVTF

SEQ ID NO: 231908 - protein, 15 aa, Homo sapiens
  CDR3 for beta chain variable domain of TCR clone 115954 (TRBV7-9, TRBJ2-7)
CASSSSGLAVYEKYF

SEQ ID NO: 231909 - protein, 14 aa, Homo sapiens
  CDR3 for alpha chain variable domain of TCR clone 115955 (TRAV12-3, TRAJ58)
CAMSTDTSGSRLTF

SEQ ID NO: 231910 - protein, 15 aa, Homo sapiens
  CDR3 for beta chain variable domain of TCR clone 115955 (TRBV4-1, TRBJ1-4)
CASSDTGGTNEKLFF

SEQ ID NO: 231911 - protein, 12 aa, Homo sapiens
  CDR3 for alpha chain variable domain of TCR clone 115956 (TRAV26-1, TRAJ36)
CIVRVRADNLFF

SEQ ID NO: 231912 - protein, 14 aa, Homo sapiens
  CDR3 for beta chain variable domain of TCR clone 115956 (TRBV4-2, TRBJ1-5)
CASSQDSINQPQHF

SEQ ID NO: 231913 - protein, 11 aa, Homo sapiens
  CDR3 for alpha chain variable domain of TCR clone 115957 (TRAV23/DV6, TRAJ58)
CAARLLRGETS

SEQ ID NO: 231914 - protein, 16 aa, Homo sapiens
  CDR3 for beta chain variable domain of TCR clone 115957 (TRBV27, TRBJ2-2)
CASSFRGLVRTGELFF

SEQ ID NO: 231915 - protein, 11 aa, Homo sapiens
  CDR3 for alpha chain variable domain of TCR clone 115958 (TRAV35, TRAJ30)
CAPGGDGKIIF

SEQ ID NO: 231916 - protein, 14 aa, Homo sapiens
  CDR3 for beta chain variable domain of TCR clone 115958 (TRBV7-6, TRBJ2-1)
CASSLGGGADEQFF

SEQ ID NO: 231917 - protein, 13 aa, Homo sapiens
  CDR3 for alpha chain variable domain of TCR clone 115959 (TRAV26-2, TRAJ43)
CNLRAVNNNDMRF

SEQ ID NO: 231918 - protein, 15 aa, Homo sapiens
  CDR3 for beta chain variable domain of TCR clone 115959 (TRBV7-2, TRBJ2-1)
CASTHGTGIYNEQFF

SEQ ID NO: 231919 - protein, 18 aa, Homo sapiens
  CDR3 for alpha chain variable domain of TCR clone 115960 (TRAV26-1, TRAJ52)
CIVRVAGAGGTSYGKLTF

SEQ ID NO: 231920 - protein, 13 aa, Homo sapiens
  CDR3 for beta chain variable domain of TCR clone 115960 (TRBV7-8, TRBJ1-2)
CASSAQSYYGYIF

SEQ ID NO: 231921 - protein, 15 aa, Homo sapiens
  CDR3 for alpha chain variable domain of TCR clone 115961 (TRAV8-3, TRAJ45)
CASSYSGGGADGLTF

SEQ ID NO: 231922 - protein, 17 aa, Homo sapiens
  CDR3 for beta chain variable domain of TCR clone 115961 (TRBV4-1, TRBJ2-3)
CASSQGYVSGGTDTQYF

SEQ ID NO: 231923 - protein, 14 aa, Homo sapiens
  CDR3 for alpha chain variable domain of TCR clone 115962 (TRAV8-6, TRAJ54)
CAVTEGRGARKLVF

SEQ ID NO: 231924 - protein, 14 aa, Homo sapiens
  CDR3 for beta chain variable domain of TCR clone 115962 (TRBV27, TRBJ2-7)
CASSIGQGAQKQYF

SEQ ID NO: 231925 - protein, 14 aa, Homo sapiens
  CDR3 for alpha chain variable domain of TCR clone 115963 (TRAV13-1, TRAJ35)
CAASKGGFGNVLHC

SEQ ID NO: 231926 - protein, 15 aa, Homo sapiens
  CDR3 for beta chain variable domain of TCR clone 115963 (TRBV7-9, TRBJ2-2)
CASSPETGAGGELFF

SEQ ID NO: 231927 - protein, 16 aa, Homo sapiens
  CDR3 for alpha chain variable domain of TCR clone 115964 (TRAV4, TRAJ9)
CLVGDPNRPGGFKTIF

SEQ ID NO: 231928 - protein, 16 aa, Homo sapiens
  CDR3 for beta chain variable domain of TCR clone 115964 (TRBV28, TRBJ1-4)
CASSPLYRGRSEKLFF

SEQ ID NO: 231929 - protein, 13 aa, Homo sapiens
  CDR3 for alpha chain variable domain of TCR clone 115965 (TRAV12-3, TRAJ53)
CAMRGGSNYNLTF

SEQ ID NO: 231930 - protein, 15 aa, Homo sapiens
  CDR3 for beta chain variable domain of TCR clone 115965 (TRBV2, TRBJ2-1)
CATQARLVMIGEQFF

SEQ ID NO: 231931 - protein, 12 aa, Homo sapiens
  CDR3 for alpha chain variable domain of TCR clone 115966 (TRAV12-1, TRAJ40)
CVFYSGTYKYIF

SEQ ID NO: 231932 - protein, 14 aa, Homo sapiens
  CDR3 for beta chain variable domain of TCR clone 115966 (TRBV12-4, TRBJ1-1)
CASSLGTGGTEAFF

SEQ ID NO: 231933 - protein, 13 aa, Homo sapiens
  CDR3 for alpha chain variable domain of TCR clone 115967 (TRAV12-1, TRAJ37)
CVVNIDNTGKLIF

SEQ ID NO: 231934 - protein, 17 aa, Homo sapiens
  CDR3 for beta chain variable domain of TCR clone 115967 (TRBV13, TRBJ2-3)
CASSLSRVAGGRNTQYF

SEQ ID NO: 231935 - protein, 15 aa, Homo sapiens
  CDR3 for alpha chain variable domain of TCR clone 115968 (TRAV3, TRAJ8)
CAVRDNETGFQKLVF

SEQ ID NO: 231936 - protein, 12 aa, Homo sapiens
  CDR3 for beta chain variable domain of TCR clone 115968 (TRBV29-1, TRBJ2-3)
CSVTGGADTQYF

SEQ ID NO: 231937 - protein, 14 aa, Homo sapiens
  CDR3 for alpha chain variable domain of TCR clone 115969 (TRAV12-1, TRAJ17)
CVVNYKAAGNKLTF

SEQ ID NO: 231938 - protein, 17 aa, Homo sapiens
  CDR3 for beta chain variable domain of TCR clone 115969 (TRBV20-1, TRBJ2-1)
CSASSSGLAGSYNKQFF

SEQ ID NO: 231939 - protein, 13 aa, Homo sapiens
  CDR3 for alpha chain variable domain of TCR clone 115970 (TRAV3, TRAJ21)
CAVREPDFNKFYF

SEQ ID NO: 231940 - protein, 15 aa, Homo sapiens
  CDR3 for beta chain variable domain of TCR clone 115970 (TRBV19, TRBJ2-7)
CASSPAGSGEALRYF

SEQ ID NO: 231941 - protein, 13 aa, Homo sapiens
  CDR3 for alpha chain variable domain of TCR clone 115971 (TRAV25, TRAJ30)
CAGRVDRDDKIIF

SEQ ID NO: 231942 - protein, 17 aa, Homo sapiens
  CDR3 for beta chain variable domain of TCR clone 115971 (TRBV7-9, TRBJ2-6)
CASSFGAGYSGANILTF

SEQ ID NO: 231943 - protein, 14 aa, Homo sapiens
  CDR3 for alpha chain variable domain of TCR clone 115972 (TRAV35, TRAJ22)
CAGLRPGSARQLTF

SEQ ID NO: 231944 - protein, 14 aa, Homo sapiens
  CDR3 for beta chain variable domain of TCR clone 115972 (TRBV20-1, TRBJ1-1)
CSAQTRIGGTEAFF

SEQ ID NO: 231945 - protein, 13 aa, Homo sapiens
  CDR3 for alpha chain variable domain of TCR clone 115973 (TRAV13-2, TRAJ13)
CAERPGGYQKVTF

SEQ ID NO: 231946 - protein, 13 aa, Homo sapiens
  CDR3 for beta chain variable domain of TCR clone 115973 (TRBV12-4, TRBJ2-7)
CASSPTETYEQYF

SEQ ID NO: 231947 - protein, 11 aa, Homo sapiens
  CDR3 for alpha chain variable domain of TCR clone 115974 (TRAV2, TRAJ13)
CASGGYQKVTF

SEQ ID NO: 231948 - protein, 14 aa, Homo sapiens
  CDR3 for beta chain variable domain of TCR clone 115974 (TRBV27, TRBJ1-1)
CASSPQGKRAEAFF

SEQ ID NO: 231949 - protein, 15 aa, Homo sapiens
  CDR3 for alpha chain variable domain of TCR clone 115975 (TRAV20, TRAJ41)
CAVQANSNSRYALNF

SEQ ID NO: 231950 - protein, 18 aa, Homo sapiens
  CDR3 for beta chain variable domain of TCR clone 115975 (TRBV7-9, TRBJ2-7)
CASSLTTSGSRTWYEQYF

SEQ ID NO: 231951 - protein, 14 aa, Homo sapiens
  CDR3 for alpha chain variable domain of TCR clone 115976 (TRAV12-2, TRAJ13)
WAVKKTGGYQKVTF

SEQ ID NO: 231952 - protein, 14 aa, Homo sapiens
  CDR3 for beta chain variable domain of TCR clone 115976 (TRBV5-5, TRBJ2-7)
CASSLGQGTYEQYF

SEQ ID NO: 231953 - protein, 14 aa, Homo sapiens
  CDR3 for alpha chain variable domain of TCR clone 115977 (TRAV2, TRAJ22)
CAVGRGGSARQLTF

SEQ ID NO: 231954 - protein, 12 aa, Homo sapiens
  CDR3 for beta chain variable domain of TCR clone 115977 (TRBV19, TRBJ2-1)
CASSMQDTEQVF

SEQ ID NO: 231955 - protein, 13 aa, Homo sapiens
  CDR3 for alpha chain variable domain of TCR clone 115978 (TRAV29/DV5, TRAJ31)
CAASRNNNARLMF

SEQ ID NO: 231956 - protein, 12 aa, Homo sapiens
  CDR3 for beta chain variable domain of TCR clone 115978 (TRBV7-8, TRBJ2-7)
CASSLGDREQYF

SEQ ID NO: 231957 - protein, 14 aa, Homo sapiens
  CDR3 for alpha chain variable domain of TCR clone 115979 (TRAV8-3, TRAJ4)
CAMGAAGGYNKLIF

SEQ ID NO: 231958 - protein, 13 aa, Homo sapiens
  CDR3 for beta chain variable domain of TCR clone 115979 (TRBV20-1, TRBJ2-7)
CSARPSTNYEQYF

SEQ ID NO: 231959 - protein, 14 aa, Homo sapiens
  CDR3 for alpha chain variable domain of TCR clone 115980 (TRAV13-1, TRAJ35)
CAASKRGFGNVLHC

SEQ ID NO: 231960 - protein, 13 aa, Homo sapiens
  CDR3 for beta chain variable domain of TCR clone 115980 (TRBV7-3, TRBJ1-1)
RASSQDWGAEAFF

SEQ ID NO: 231961 - protein, 18 aa, Homo sapiens
  CDR3 for alpha chain variable domain of TCR clone 115981 (TRAV29/DV5, TRAJ53)
CSVLLCSKRGGSNYKLTF

SEQ ID NO: 231962 - protein, 17 aa, Homo sapiens
  CDR3 for beta chain variable domain of TCR clone 115981 (TRBV7-8, TRBJ2-6)
GASSAGTGGAGANVLTF

SEQ ID NO: 231963 - protein, 13 aa, Homo sapiens
  CDR3 for alpha chain variable domain of TCR clone 115982 (TRAV12-2, TRAJ10)
CAVPTGGGNKLTF

SEQ ID NO: 231964 - protein, 14 aa, Homo sapiens
  CDR3 for beta chain variable domain of TCR clone 115982 (TRBV7-9, TRBJ2-5)
CASSLVGGEETQYF

SEQ ID NO: 231965 - protein, 13 aa, Homo sapiens
  CDR3 for alpha chain variable domain of TCR clone 115983 (TRAV12-2, TRAJ39)
CAVNNNAGNKLTF

SEQ ID NO: 231966 - protein, 13 aa, Homo sapiens
  CDR3 for beta chain variable domain of TCR clone 115983 (TRBV2, TRBJ1-5)
CATAGPGNQPQHF

SEQ ID NO: 231967 - protein, 12 aa, Homo sapiens
  CDR3 for alpha chain variable domain of TCR clone 115984 (TRAV13-1, TRAJ21)
CAAKKGFNRFYF

SEQ ID NO: 231968 - protein, 15 aa, Homo sapiens
  CDR3 for beta chain variable domain of TCR clone 115984 (TRBV25-1, TRBJ1-4)
CASSPGDSTNEKLFF

SEQ ID NO: 231969 - protein, 13 aa, Homo sapiens
  CDR3 for alpha chain variable domain of TCR clone 115985 (TRAV29/DV5, TRAJ41)
CAASGNSGYALNF

SEQ ID NO: 231970 - protein, 16 aa, Homo sapiens
  CDR3 for beta chain variable domain of TCR clone 115985 (TRBV6-1, TRBJ2-5)
CASSETLDRGAETQYF

SEQ ID NO: 231971 - protein, 16 aa, Homo sapiens
  CDR3 for alpha chain variable domain of TCR clone 115986 (TRAV26-1, TRAJ32)
CIVRTNYGGATNKFIF

SEQ ID NO: 231972 - protein, 14 aa, Homo sapiens
  CDR3 for beta chain variable domain of TCR clone 115986 (TRBV27, TRBJ1-1)
CASSLLSGLSEAFF

SEQ ID NO: 231973 - protein, 14 aa, Homo sapiens
  CDR3 for alpha chain variable domain of TCR clone 115987 (TRAV17, TRAJ57)
CATDPQGGSEKLVF

SEQ ID NO: 231974 - protein, 18 aa, Homo sapiens
  CDR3 for beta chain variable domain of TCR clone 115987 (TRBV6-6, TRBJ1-3)
CASSYSKWDSISGNTIYC

SEQ ID NO: 231975 - protein, 16 aa, Homo sapiens
  CDR3 for alpha chain variable domain of TCR clone 115988 (TRAV8-2, TRAJ7)
CVVSEGPYYGNNRLAF

SEQ ID NO: 231976 - protein, 15 aa, Homo sapiens
  CDR3 for beta chain variable domain of TCR clone 115988 (TRBV27, TRBJ2-3)
CTSSLGLAATDTQYF

SEQ ID NO: 231977 - protein, 11 aa, Homo sapiens
  CDR3 for alpha chain variable domain of TCR clone 115989 (TRAV1-1, TRAJ23)
CAVRQGGKLIF

SEQ ID NO: 231978 - protein, 16 aa, Homo sapiens
  CDR3 for beta chain variable domain of TCR clone 115989 (TRBV7-9, TRBJ2-3)
CASSFSVAGGTDTQYF

SEQ ID NO: 231979 - protein, 15 aa, Homo sapiens
  CDR3 for alpha chain variable domain of TCR clone 115990 (TRAV26-1, TRAJ29)
CIVRVEGSGNTPLVF

SEQ ID NO: 231980 - protein, 17 aa, Homo sapiens
  CDR3 for beta chain variable domain of TCR clone 115990 (TRBV25-1, TRBJ2-7)
CASSDARVVFSSYEQYF

SEQ ID NO: 231981 - protein, 16 aa, Homo sapiens
  CDR3 for alpha chain variable domain of TCR clone 115991 (TRAV30, TRAJ24)
CGTEIVDADSWGKFQV

SEQ ID NO: 231982 - protein, 14 aa, Homo sapiens
  CDR3 for beta chain variable domain of TCR clone 115991 (TRBV12-5, TRBJ2-5)
CASGSRTHQETRYF

SEQ ID NO: 231983 - protein, 16 aa, Homo sapiens
  CDR3 for alpha chain variable domain of TCR clone 115992 (TRAV21, TRAJ37)
CAVRPRGSSNTGTLIF

SEQ ID NO: 231984 - protein, 13 aa, Homo sapiens
  CDR3 for beta chain variable domain of TCR clone 115992 (TRBV7-9, TRBJ2-5)
CASLSPGQETQYF

SEQ ID NO: 231985 - protein, 13 aa, Homo sapiens
  CDR3 for alpha chain variable domain of TCR clone 115993 (TRAV3, TRAJ21)
CAVREPDFNKFYF

SEQ ID NO: 231986 - protein, 13 aa, Homo sapiens
  CDR3 for beta chain variable domain of TCR clone 115993 (TRBV9, TRBJ2-1)
CASSPSGGNEQFC

SEQ ID NO: 231987 - protein, 11 aa, Homo sapiens
  CDR3 for alpha chain variable domain of TCR clone 115994 (TRAV1-1, TRAJ23)
CAVRQVGKLIF

SEQ ID NO: 231988 - protein, 13 aa, Homo sapiens
  CDR3 for beta chain variable domain of TCR clone 115994 (TRBV11-2, TRBJ2-5)
CASSRGPSETQYF

SEQ ID NO: 231989 - protein, 13 aa, Homo sapiens
  CDR3 for alpha chain variable domain of TCR clone 115995 (TRAV8-4, TRAJ4)
CAVSDIGYNKLIF

SEQ ID NO: 231990 - protein, 13 aa, Homo sapiens
  CDR3 for beta chain variable domain of TCR clone 115995 (TRBV19, TRBJ1-2)
CASSQGQVYGDTF

SEQ ID NO: 231991 - protein, 14 aa, Homo sapiens
  CDR3 for alpha chain variable domain of TCR clone 115996 (TRAV38-1, TRAJ40)
CALRPTSGTYTYIF

SEQ ID NO: 231992 - protein, 16 aa, Homo sapiens
  CDR3 for beta chain variable domain of TCR clone 115996 (TRBV6-1, TRBJ1-2)
CASSGAWQGRSHGYTF

SEQ ID NO: 231993 - protein, 13 aa, Homo sapiens
  CDR3 for alpha chain variable domain of TCR clone 115997 (TRAV13-1, TRAJ6)
CAARRGGSYIPTF

SEQ ID NO: 231994 - protein, 15 aa, Homo sapiens
  CDR3 for beta chain variable domain of TCR clone 115997 (TRBV28, TRBJ1-3)
CASSMGWASGNTIYF

SEQ ID NO: 231995 - protein, 10 aa, Homo sapiens
  CDR3 for alpha chain variable domain of TCR clone 115998 (TRAV12-2, TRAJ49)
CAVRRNQFYF

SEQ ID NO: 231996 - protein, 13 aa, Homo sapiens
  CDR3 for beta chain variable domain of TCR clone 115998 (TRBV27, TRBJ2-7)
CASSFVSSYEQYF

SEQ ID NO: 231997 - protein, 14 aa, Homo sapiens
  CDR3 for alpha chain variable domain of TCR clone 115999 (TRAV1-2, TRAJ16)
CAVRSASDGQKLLF

SEQ ID NO: 231998 - protein, 12 aa, Homo sapiens
  CDR3 for beta chain variable domain of TCR clone 115999 (TRBV11-2, TRBJ2-2)
CASSLGGGELFF

SEQ ID NO: 231999 - protein, 14 aa, Homo sapiens
  CDR3 for alpha chain variable domain of TCR clone 116000 (TRAV16, TRAJ39)
CALSKNNAGNMLTF

SEQ ID NO: 232000 - protein, 13 aa, Homo sapiens
  CDR3 for beta chain variable domain of TCR clone 116000 (TRBV10-3, TRBJ2-7)
CASKLAVSYEQYF

SEQ ID NO: 232001 - protein, 14 aa, Homo sapiens
  CDR3 for alpha chain variable domain of TCR clone 116001 (TRAV12-2, TRAJ13)
CAVKKTGGYQKVTF

SEQ ID NO: 232002 - protein, 13 aa, Homo sapiens
  CDR3 for beta chain variable domain of TCR clone 116001 (TRBV12-4, TRBJ1-3)
CASSLASGNTIYF

SEQ ID NO: 232003 - protein, 13 aa, Homo sapiens
  CDR3 for alpha chain variable domain of TCR clone 116002 (TRAV25, TRAJ54)
CAGTIQGAQKLVF

SEQ ID NO: 232004 - protein, 15 aa, Homo sapiens
  CDR3 for beta chain variable domain of TCR clone 116002 (TRBV19, TRBJ1-5)
CASSILTGENQPRHF

SEQ ID NO: 232005 - protein, 13 aa, Homo sapiens
  CDR3 for alpha chain variable domain of TCR clone 116003 (TRAV35, TRAJ37)
CAGSSGNTGELIF

SEQ ID NO: 232006 - protein, 16 aa, Homo sapiens
  CDR3 for beta chain variable domain of TCR clone 116003 (TRBV10-3, TRBJ2-1)
CAISLTSGNSYNEQFF

SEQ ID NO: 232007 - protein, 13 aa, Homo sapiens
  CDR3 for alpha chain variable domain of TCR clone 116004 (TRAV35, TRAJ42)
CAGFPGSQGNLIF

SEQ ID NO: 232008 - protein, 14 aa, Homo sapiens
  CDR3 for beta chain variable domain of TCR clone 116004 (TRBV4-1, TRBJ2-2)
CASSQAVNTRELFF

SEQ ID NO: 232009 - protein, 12 aa, Homo sapiens
  CDR3 for alpha chain variable domain of TCR clone 116005 (TRAV12-2, TRAJ10)
WGVTGGGNKLTF

SEQ ID NO: 232010 - protein, 17 aa, Homo sapiens
  CDR3 for beta chain variable domain of TCR clone 116005 (TRBV7-8, TRBJ2-6)
CASSAGTGGAGANVLTF

SEQ ID NO: 232011 - protein, 15 aa, Homo sapiens
  CDR3 for alpha chain variable domain of TCR clone 116006 (TRAV38-1, TRAJ57)
CAFMDSQGGSEKLVF

SEQ ID NO: 232012 - protein, 14 aa, Homo sapiens
  CDR3 for beta chain variable domain of TCR clone 116006 (TRBV12-5, TRBJ2-5)
CASGSRTHQETQYF

SEQ ID NO: 232013 - protein, 13 aa, Homo sapiens
  CDR3 for alpha chain variable domain of TCR clone 116007 (TRAV8-1, TRAJ30)
CAVIMNRDDKIIF

SEQ ID NO: 232014 - protein, 14 aa, Homo sapiens
  CDR3 for beta chain variable domain of TCR clone 116007 (TRBV7-2, TRBJ1-6)
CASRLQGANSPLHF

SEQ ID NO: 232015 - protein, 12 aa, Homo sapiens
  CDR3 for alpha chain variable domain of TCR clone 116008 (TRAV16, TRAJ27)
CALNTNAGKSTF

SEQ ID NO: 232016 - protein, 13 aa, Homo sapiens
  CDR3 for beta chain variable domain of TCR clone 116008 (TRBV7-3, TRBJ1-1)
CASSQDWGAEAFF

SEQ ID NO: 232017 - protein, 18 aa, Homo sapiens
  CDR3 for alpha chain variable domain of TCR clone 116009 (TRAV21, TRAJ52)
CAVRPSPAGGTSYGKLTF

SEQ ID NO: 232018 - protein, 14 aa, Homo sapiens
  CDR3 for beta chain variable domain of TCR clone 116009 (TRBV15, TRBJ2-5)
CATSSTGYQETQYF

SEQ ID NO: 232019 - protein, 16 aa, Homo sapiens
  CDR3 for alpha chain variable domain of TCR clone 116010 (TRAV26-1, TRAJ48)
IASSDLSNFGNEKLTF

SEQ ID NO: 232020 - protein, 14 aa, Homo sapiens
  CDR3 for beta chain variable domain of TCR clone 116010 (TRBV13, TRBJ2-7)
CASSLRGARYEQYF

SEQ ID NO: 232021 - protein, 16 aa, Homo sapiens
  CDR3 for alpha chain variable domain of TCR clone 116011 (TRAV3, TRAJ23)
CAVKIGIYNQGVKLIF

SEQ ID NO: 232022 - protein, 17 aa, Homo sapiens
  CDR3 for beta chain variable domain of TCR clone 116011 (TRBV10-3, TRBJ2-6)
CAISESTAPSGANVLTF

SEQ ID NO: 232023 - protein, 14 aa, Homo sapiens
  CDR3 for alpha chain variable domain of TCR clone 116012 (TRAV26-1, TRAJ38)
RIADNAGNNRKLIW

SEQ ID NO: 232024 - protein, 14 aa, Homo sapiens
  CDR3 for beta chain variable domain of TCR clone 116012 (TRBV4-1, TRBJ2-2)
CASSQAVNTGELFF

SEQ ID NO: 232025 - protein, 14 aa, Homo sapiens
  CDR3 for alpha chain variable domain of TCR clone 116013 (TRAV13-1, TRAJ35)
CAASKGGFGNVLHC

SEQ ID NO: 232026 - protein, 16 aa, Homo sapiens
  CDR3 for beta chain variable domain of TCR clone 116013 (TRBV27, TRBJ2-2)
CASSFRGLVRTGELFF

SEQ ID NO: 232027 - protein, 16 aa, Homo sapiens
  CDR3 for alpha chain variable domain of TCR clone 116014 (TRAV30, TRAJ24)
CGTEIVDADSWGKFQF

SEQ ID NO: 232028 - protein, 18 aa, Homo sapiens
  CDR3 for beta chain variable domain of TCR clone 116014 (TRBV7-9, TRBJ1-1)
CASSPRVGTRILRAEAFF

SEQ ID NO: 232029 - protein, 12 aa, Homo sapiens
  CDR3 for alpha chain variable domain of TCR clone 116015 (TRAV8-3, TRAJ43)
CAVGAGNNDMLF

SEQ ID NO: 232030 - protein, 14 aa, Homo sapiens
  CDR3 for beta chain variable domain of TCR clone 116015 (TRBV4-2, TRBJ1-5)
CASSRDRGNQPQHF

SEQ ID NO: 232031 - protein, 14 aa, Homo sapiens
  CDR3 for alpha chain variable domain of TCR clone 116016 (TRAV12-2, TRAJ17)
CPVLFKAAGNKLTF

SEQ ID NO: 232032 - protein, 17 aa, Homo sapiens
  CDR3 for beta chain variable domain of TCR clone 116016 (TRBV11-2, TRBJ2-1)
CASSLYPPGVEYNEQFF

SEQ ID NO: 232033 - protein, 17 aa, Homo sapiens
  CDR3 for alpha chain variable domain of TCR clone 116017 (TRAV4, TRAJ18)
CLVVAAGRGSALGRLYF

SEQ ID NO: 232034 - protein, 17 aa, Homo sapiens
  CDR3 for beta chain variable domain of TCR clone 116017 (TRBV28, TRBJ2-2)
CASSLATGMGDAGELFF

SEQ ID NO: 232035 - protein, 16 aa, Homo sapiens
  CDR3 for alpha chain variable domain of TCR clone 116018 (TRAV23/DV6, TRAJ9)
CSKPFPPNTGGFKTIF

SEQ ID NO: 232036 - protein, 18 aa, Homo sapiens
  CDR3 for beta chain variable domain of TCR clone 116018 (TRBV4-1, TRBJ2-7)
CASSQDTGAGSGLNEQYF

SEQ ID NO: 232037 - protein, 12 aa, Homo sapiens
  CDR3 for alpha chain variable domain of TCR clone 116019 (TRAV35, TRAJ39)
LAPNNAGNMLTF

SEQ ID NO: 232038 - protein, 16 aa, Homo sapiens
  CDR3 for beta chain variable domain of TCR clone 116019 (TRBV2, TRBJ2-3)
CASSTLVEGVTDTQYF

SEQ ID NO: 232039 - protein, 15 aa, Homo sapiens
  CDR3 for alpha chain variable domain of TCR clone 116020 (TRAV26-1, TRAJ29)
CIVRVEGSGNTPLVS

SEQ ID NO: 232040 - protein, 14 aa, Homo sapiens
  CDR3 for beta chain variable domain of TCR clone 116020 (TRBV25-1, TRBJ1-1)
CASTHLGGNTEAFF

SEQ ID NO: 232041 - protein, 14 aa, Homo sapiens
  CDR3 for alpha chain variable domain of TCR clone 116021 (TRAV14/DV4, TRAJ11)
CAMSSNSGYSTLTF

SEQ ID NO: 232042 - protein, 14 aa, Homo sapiens
  CDR3 for beta chain variable domain of TCR clone 116021 (TRBV25-1, TRBJ1-1)
CASTHLGGNTEAFF

SEQ ID NO: 232043 - protein, 15 aa, Homo sapiens
  CDR3 for alpha chain variable domain of TCR clone 116022 (TRAV8-2, TRAJ16)
CVVSDGFSDGQKLLF

SEQ ID NO: 232044 - protein, 17 aa, Homo sapiens
  CDR3 for beta chain variable domain of TCR clone 116022 (TRBV7-8, TRBJ2-6)
CASSAGTGGAGANVLTF

SEQ ID NO: 232045 - protein, 14 aa, Homo sapiens
  CDR3 for alpha chain variable domain of TCR clone 116023 (TRAV6, TRAJ6)
CALPTSGGSYIPTF

SEQ ID NO: 232046 - protein, 12 aa, Homo sapiens
  CDR3 for beta chain variable domain of TCR clone 116023 (TRBV11-2, TRBJ2-2)
CASSLGGGELFF

SEQ ID NO: 232047 - protein, 12 aa, Homo sapiens
  CDR3 for alpha chain variable domain of TCR clone 116024 (TRAV2, TRAJ10)
CATTGGGNKLTF

SEQ ID NO: 232048 - protein, 14 aa, Homo sapiens
  CDR3 for beta chain variable domain of TCR clone 116024 (TRBV7-2, TRBJ2-2)
CASRGQGAAGELFF

SEQ ID NO: 232049 - protein, 14 aa, Homo sapiens
  CDR3 for alpha chain variable domain of TCR clone 116025 (TRAV1-2, TRAJ16)
CAVNRFSDGQKLRF

SEQ ID NO: 232050 - protein, 13 aa, Homo sapiens
  CDR3 for beta chain variable domain of TCR clone 116025 (TRBV7-9, TRBJ1-2)
CASSLKQNYGYTF

SEQ ID NO: 232051 - protein, 11 aa, Homo sapiens
  CDR3 for alpha chain variable domain of TCR clone 116026 (TRAV2, TRAJ33)
CAVDSNYQLIW

SEQ ID NO: 232052 - protein, 15 aa, Homo sapiens
  CDR3 for beta chain variable domain of TCR clone 116026 (TRBV19, TRBJ1-2)
CASSVGPVLNYGYTF

SEQ ID NO: 232053 - protein, 16 aa, Homo sapiens
  CDR3 for alpha chain variable domain of TCR clone 116027 (TRAV3, TRAJ42)
CAVRDIEGGSQGSLIF

SEQ ID NO: 232054 - protein, 15 aa, Homo sapiens
  CDR3 for beta chain variable domain of TCR clone 116027 (TRBV9, TRBJ2-2)
CASSDFAGASGELFF

SEQ ID NO: 232055 - protein, 13 aa, Homo sapiens
  CDR3 for alpha chain variable domain of TCR clone 116028 (TRAV1-1, TRAJ9)
CAAASTGGFKTIF

SEQ ID NO: 232056 - protein, 15 aa, Homo sapiens
  CDR3 for beta chain variable domain of TCR clone 116028 (TRBV27, TRBJ1-5)
CASTFNRGSNQPQHF

SEQ ID NO: 232057 - protein, 14 aa, Homo sapiens
  CDR3 for alpha chain variable domain of TCR clone 116029 (TRAV1-2, TRAJ16)
CAVNRFSDGQKLLF

SEQ ID NO: 232058 - protein, 14 aa, Homo sapiens
  CDR3 for beta chain variable domain of TCR clone 116029 (TRBV4-1, TRBJ2-7)
CASSQDREHVEQYF

SEQ ID NO: 232059 - protein, 13 aa, Homo sapiens
  CDR3 for alpha chain variable domain of TCR clone 116030 (TRAV4, TRAJ42)
CLAGGGSQGNLIF

SEQ ID NO: 232060 - protein, 16 aa, Homo sapiens
  CDR3 for beta chain variable domain of TCR clone 116030 (TRBV5-1, TRBJ2-3)
CASSLQGRVGADTQYF

SEQ ID NO: 232061 - protein, 11 aa, Homo sapiens
  CDR3 for alpha chain variable domain of TCR clone 116031 (TRAV1-2, TRAJ20)
CAVANDYKLSF

SEQ ID NO: 232062 - protein, 18 aa, Homo sapiens
  CDR3 for beta chain variable domain of TCR clone 116031 (TRBV20-1, TRBJ2-6)
SSAETTPTHGSGANVLTF

SEQ ID NO: 232063 - protein, 13 aa, Homo sapiens
  CDR3 for alpha chain variable domain of TCR clone 116032 (TRAV27, TRAJ6)
CAGGTRGSYIPTF

SEQ ID NO: 232064 - protein, 13 aa, Homo sapiens
  CDR3 for beta chain variable domain of TCR clone 116032 (TRBV14, TRBJ1-2)
CASSEDRRYGYTF

SEQ ID NO: 232065 - protein, 12 aa, Homo sapiens
  CDR3 for alpha chain variable domain of TCR clone 116033 (TRAV23/DV6, TRAJ31)
CAARRIGAKLMF

SEQ ID NO: 232066 - protein, 13 aa, Homo sapiens
  CDR3 for beta chain variable domain of TCR clone 116033 (TRBV28, TRBJ2-7)
CASKAGGVYEQYF

SEQ ID NO: 232067 - protein, 15 aa, Homo sapiens
  CDR3 for alpha chain variable domain of TCR clone 116034 (TRAV21, TRAJ40)
CAVRPQTSGTYKYIF

SEQ ID NO: 232068 - protein, 13 aa, Homo sapiens
  CDR3 for beta chain variable domain of TCR clone 116034 (TRBV7-2, TRBJ2-2)
RASSSVRAGELFF

SEQ ID NO: 232069 - protein, 14 aa, Homo sapiens
  CDR3 for alpha chain variable domain of TCR clone 116035 (TRAV26-1, TRAJ34)
CIVRVAYNTDKLIF

SEQ ID NO: 232070 - protein, 15 aa, Homo sapiens
  CDR3 for beta chain variable domain of TCR clone 116035 (TRBV20-1, TRBJ2-7)
CSARDRVSGMDEQYF

SEQ ID NO: 232071 - protein, 16 aa, Homo sapiens
  CDR3 for alpha chain variable domain of TCR clone 116036 (TRAV27, TRAJ53)
CAAPEGSGGSNYKLTF

SEQ ID NO: 232072 - protein, 15 aa, Homo sapiens
  CDR3 for beta chain variable domain of TCR clone 116036 (TRBV18, TRBJ1-2)
CASSPGNGLGYGYTF

SEQ ID NO: 232073 - protein, 14 aa, Homo sapiens
  CDR3 for alpha chain variable domain of TCR clone 116037 (TRAV13-1, TRAJ52)
CAAAGGTSYGELAF

SEQ ID NO: 232074 - protein, 17 aa, Homo sapiens
  CDR3 for beta chain variable domain of TCR clone 116037 (TRBV19, TRBJ1-1)
CASSKSGTGGPYTEAFF

SEQ ID NO: 232075 - protein, 16 aa, Homo sapiens
  CDR3 for alpha chain variable domain of TCR clone 116038 (TRAV3, TRAJ37)
CAVRPHGSGNTAKLIF

SEQ ID NO: 232076 - protein, 14 aa, Homo sapiens
  CDR3 for beta chain variable domain of TCR clone 116038 (TRBV25-1, TRBJ1-1)
CASTHLGGNTEAFF

SEQ ID NO: 232077 - protein, 15 aa, Homo sapiens
  CDR3 for alpha chain variable domain of TCR clone 116039 (TRAV26-1, TRAJ29)
CIVRVEGSGNTPLVF

SEQ ID NO: 232078 - protein, 14 aa, Homo sapiens
  CDR3 for beta chain variable domain of TCR clone 116039 (TRBV18, TRBJ2-5)
SASSPGVSQETQYF

SEQ ID NO: 232079 - protein, 13 aa, Homo sapiens
  CDR3 for alpha chain variable domain of TCR clone 116040 (TRAV27, TRAJ49)
CAPRPYTGNQFYF

SEQ ID NO: 232080 - protein, 15 aa, Homo sapiens
  CDR3 for beta chain variable domain of TCR clone 116040 (TRBV4-1, TRBJ1-4)
CASSDTGGTNEKLFF

SEQ ID NO: 232081 - protein, 14 aa, Homo sapiens
  CDR3 for alpha chain variable domain of TCR clone 116041 (TRAV13-1, TRAJ44)
CAAKATGIASKLTF

SEQ ID NO: 232082 - protein, 14 aa, Homo sapiens
  CDR3 for beta chain variable domain of TCR clone 116041 (TRBV5-4, TRBJ1-1)
CASSLDSRRDEAFF

SEQ ID NO: 232083 - protein, 13 aa, Homo sapiens
  CDR3 for alpha chain variable domain of TCR clone 116042 (TRAV35, TRAJ22)
CWLRPGSARQLTF

SEQ ID NO: 232084 - protein, 13 aa, Homo sapiens
  CDR3 for beta chain variable domain of TCR clone 116042 (TRBV20-1, TRBJ2-7)
CSATHTSGYEQYF

SEQ ID NO: 232085 - protein, 13 aa, Homo sapiens
  CDR3 for alpha chain variable domain of TCR clone 116043 (TRAV13-1, TRAJ36)
CAASRTGANNLFF

SEQ ID NO: 232086 - protein, 11 aa, Homo sapiens
  CDR3 for beta chain variable domain of TCR clone 116043 (TRBV10-3, TRBJ2-7)
CAISEGLEQYF

SEQ ID NO: 232087 - protein, 14 aa, Homo sapiens
  CDR3 for alpha chain variable domain of TCR clone 116044 (TRAV12-3, TRAJ13)
CAMKNSGGYQKVTF

SEQ ID NO: 232088 - protein, 16 aa, Homo sapiens
  CDR3 for beta chain variable domain of TCR clone 116044 (TRBV15, TRBJ2-5)
CATSPTTGQGMETQYF

SEQ ID NO: 232089 - protein, 11 aa, Homo sapiens
  CDR3 for alpha chain variable domain of TCR clone 116045 (TRAV21, TRAJ34)
CAVTNTAKLIF

SEQ ID NO: 232090 - protein, 16 aa, Homo sapiens
  CDR3 for beta chain variable domain of TCR clone 116045 (TRBV6-1, TRBJ2-5)
CASSETLDRGAETQYF

SEQ ID NO: 232091 - protein, 12 aa, Homo sapiens
  CDR3 for alpha chain variable domain of TCR clone 116046 (TRAV12-3, TRAJ17)
CAMTLTGNKLTF

SEQ ID NO: 232092 - protein, 15 aa, Homo sapiens
  CDR3 for beta chain variable domain of TCR clone 116046 (TRBV12-4, TRBJ2-1)
CASSLLATGNNEQFF

SEQ ID NO: 232093 - protein, 15 aa, Homo sapiens
  CDR3 for alpha chain variable domain of TCR clone 116047 (TRAV12-1, TRAJ42)
CVVTRDGGSQGNLIF

SEQ ID NO: 232094 - protein, 13 aa, Homo sapiens
  CDR3 for beta chain variable domain of TCR clone 116047 (TRBV12-5, TRBJ2-3)
CASGDRQSDTQYF

SEQ ID NO: 232095 - protein, 15 aa, Homo sapiens
  CDR3 for alpha chain variable domain of TCR clone 116048 (TRAV26-2, TRAJ13)
CILRDLSGGYQKVTF

SEQ ID NO: 232096 - protein, 15 aa, Homo sapiens
  CDR3 for beta chain variable domain of TCR clone 116048 (TRBV4-1, TRBJ2-7)
CASSQQGQGFDEQYF

SEQ ID NO: 232097 - protein, 22 aa, Homo sapiens
  CDR3 for alpha chain variable domain of TCR clone 116049 (TRAV34, TRAJ52)
STSVEQTRRSNAGGTSCGKLTF

SEQ ID NO: 232098 - protein, 15 aa, Homo sapiens
  CDR3 for beta chain variable domain of TCR clone 116049 (TRBV5-1, TRBJ2-7)
CASSLNGGPAREQYF

SEQ ID NO: 232099 - protein, 15 aa, Homo sapiens
  CDR3 for alpha chain variable domain of TCR clone 116050 (TRAV27, TRAJ38)
CAARRNAGNNRKLIW

SEQ ID NO: 232100 - protein, 16 aa, Homo sapiens
  CDR3 for beta chain variable domain of TCR clone 116050 (TRBV4-1, TRBJ2-7)
CASSQNDRDNSYEQYF

SEQ ID NO: 232101 - protein, 12 aa, Homo sapiens
  CDR3 for alpha chain variable domain of TCR clone 116051 (TRAV12-2, TRAJ52)
IGGGTSYGKLPF

SEQ ID NO: 232102 - protein, 13 aa, Homo sapiens
  CDR3 for beta chain variable domain of TCR clone 116051 (TRBV12-4, TRBJ1-1)
CASSPGTGFEAFF

SEQ ID NO: 232103 - protein, 14 aa, Homo sapiens
  CDR3 for alpha chain variable domain of TCR clone 116052 (TRAV12-2, TRAJ13)
CAVKKTGGYQKVTF

SEQ ID NO: 232104 - protein, 13 aa, Homo sapiens
  CDR3 for beta chain variable domain of TCR clone 116052 (TRBV20-1, TRBJ1-1)
CSARLGQGTEAVF

SEQ ID NO: 232105 - protein, 14 aa, Homo sapiens
  CDR3 for alpha chain variable domain of TCR clone 116053 (TRAV12-2, TRAJ13)
CAVKKTGGYQKVTF

SEQ ID NO: 232106 - protein, 14 aa, Homo sapiens
  CDR3 for beta chain variable domain of TCR clone 116053 (TRBV7-3, TRBJ1-2)
CASSPVGGTYGYTF

SEQ ID NO: 232107 - protein, 16 aa, Homo sapiens
  CDR3 for alpha chain variable domain of TCR clone 116054 (TRAV23/DV6, TRAJ9)
CAASIGGNTGGSKTIF

SEQ ID NO: 232108 - protein, 14 aa, Homo sapiens
  CDR3 for beta chain variable domain of TCR clone 116054 (TRBV9, TRBJ2-7)
CASSVGVGSYEQYF

SEQ ID NO: 232109 - protein, 15 aa, Homo sapiens
  CDR3 for alpha chain variable domain of TCR clone 116055 (TRAV8-3, TRAJ45)
YASSYSGGGADGLTF

SEQ ID NO: 232110 - protein, 17 aa, Homo sapiens
  CDR3 for beta chain variable domain of TCR clone 116055 (TRBV7-8, TRBJ1-2)
CASSLRPLQGHLYGYTF

SEQ ID NO: 232111 - protein, 13 aa, Homo sapiens
  CDR3 for alpha chain variable domain of TCR clone 116056 (TRAV1-2, TRAJ9)
CAALNTGGFETIF

SEQ ID NO: 232112 - protein, 15 aa, Homo sapiens
  CDR3 for beta chain variable domain of TCR clone 116056 (TRBV18, TRBJ2-6)
CASSPSYAGANVLTF

SEQ ID NO: 232113 - protein, 15 aa, Homo sapiens
  CDR3 for alpha chain variable domain of TCR clone 116057 (TRAV8-6, TRAJ10)
CAVSDQAGGGNKLTF

SEQ ID NO: 232114 - protein, 17 aa, Homo sapiens
  CDR3 for beta chain variable domain of TCR clone 116057 (TRBV13, TRBJ2-3)
CASSLSRVAGGRNTQYF

SEQ ID NO: 232115 - protein, 12 aa, Homo sapiens
  CDR3 for alpha chain variable domain of TCR clone 116058 (TRAV12-2, TRAJ31)
CAVNTPDARLMF

SEQ ID NO: 232116 - protein, 15 aa, Homo sapiens
  CDR3 for beta chain variable domain of TCR clone 116058 (TRBV4-2, TRBJ1-1)
GASSQDQGLNTEAFF

SEQ ID NO: 232117 - protein, 13 aa, Homo sapiens
  CDR3 for alpha chain variable domain of TCR clone 116059 (TRAV12-1, TRAJ35)
CVVRGGFGNVLHC

SEQ ID NO: 232118 - protein, 17 aa, Homo sapiens
  CDR3 for beta chain variable domain of TCR clone 116059 (TRBV13, TRBJ2-3)
CASSLSRVAGGRNTQYF

SEQ ID NO: 232119 - protein, 14 aa, Homo sapiens
  CDR3 for alpha chain variable domain of TCR clone 116060 (TRAV1-2, TRAJ16)
CAVNRFSDGQKLLF

SEQ ID NO: 232120 - protein, 15 aa, Homo sapiens
  CDR3 for beta chain variable domain of TCR clone 116060 (TRBV29-1, TRBJ2-7)
CSVEFCDRGSYEQYF

SEQ ID NO: 232121 - protein, 12 aa, Homo sapiens
  CDR3 for alpha chain variable domain of TCR clone 116061 (TRAV35, TRAJ43)
CWIPVNNNDMRF

SEQ ID NO: 232122 - protein, 15 aa, Homo sapiens
  CDR3 for beta chain variable domain of TCR clone 116061 (TRBV25-1, TRBJ1-4)
CASSKRIATNEKLFF

SEQ ID NO: 232123 - protein, 13 aa, Homo sapiens
  CDR3 for alpha chain variable domain of TCR clone 116062 (TRAV2, TRAJ40)
CAVVTSGTYKYIF

SEQ ID NO: 232124 - protein, 13 aa, Homo sapiens
  CDR3 for beta chain variable domain of TCR clone 116062 (TRBV4-1, TRBJ2-1)
CASSQEVQYEQFF

SEQ ID NO: 232125 - protein, 23 aa, Homo sapiens
  CDR3 for alpha chain variable domain of TCR clone 116063 (TRAV26-1, TRAJ38)
CIADNAGNNHIQNPDPAVYQLRD

SEQ ID NO: 232126 - protein, 13 aa, Homo sapiens
  CDR3 for beta chain variable domain of TCR clone 116063 (TRBV20-1, TRBJ1-1)
FSARGGGNTEAFF

SEQ ID NO: 232127 - protein, 14 aa, Homo sapiens
  CDR3 for alpha chain variable domain of TCR clone 116064 (TRAV14/DV4, TRAJ32)
SNVLPLTPTNKLIF

SEQ ID NO: 232128 - protein, 14 aa, Homo sapiens
  CDR3 for beta chain variable domain of TCR clone 116064 (TRBV7-9, TRBJ2-2)
CASSLVQDTGELFF

SEQ ID NO: 232129 - protein, 12 aa, Homo sapiens
  CDR3 for alpha chain variable domain of TCR clone 116065 (TRAV13-2, TRAJ23)
CAERHRGGKLIF

SEQ ID NO: 232130 - protein, 16 aa, Homo sapiens
  CDR3 for beta chain variable domain of TCR clone 116065 (TRBV7-2, TRBJ2-6)
CAILSGVASGANDLTF

SEQ ID NO: 232131 - protein, 11 aa, Homo sapiens
  CDR3 for alpha chain variable domain of TCR clone 116066 (TRAV17, TRAJ49)
CATDTGNQFYF

SEQ ID NO: 232132 - protein, 16 aa, Homo sapiens
  CDR3 for beta chain variable domain of TCR clone 116066 (TRBV7-2, TRBJ1-2)
CASSPTSGTSLGGYTF

SEQ ID NO: 232133 - protein, 14 aa, Homo sapiens
  CDR3 for alpha chain variable domain of TCR clone 116067 (TRAV12-2, TRAJ13)
CAVKKTGGYQKVTL

SEQ ID NO: 232134 - protein, 15 aa, Homo sapiens
  CDR3 for beta chain variable domain of TCR clone 116067 (TRBV19, TRBJ1-1)
CASTSGQIQNTEAFF

SEQ ID NO: 232135 - protein, 15 aa, Homo sapiens
  CDR3 for alpha chain variable domain of TCR clone 116068 (TRAV8-4, TRAJ47)
CAVSDPEGYGNKLVF

SEQ ID NO: 232136 - protein, 15 aa, Homo sapiens
  CDR3 for beta chain variable domain of TCR clone 116068 (TRBV11-2, TRBJ2-1)
CASSLGPDSYNEQFF

SEQ ID NO: 232137 - protein, 13 aa, Homo sapiens
  CDR3 for alpha chain variable domain of TCR clone 116069 (TRAV13-1, TRAJ20)
CAARVSNDYKLSF

SEQ ID NO: 232138 - protein, 15 aa, Homo sapiens
  CDR3 for beta chain variable domain of TCR clone 116069 (TRBV27, TRBJ2-1)
CASSNGGGSSNEQFF

SEQ ID NO: 232139 - protein, 13 aa, Homo sapiens
  CDR3 for alpha chain variable domain of TCR clone 116070 (TRAV2, TRAJ15)
CSVASQAGTALIF

SEQ ID NO: 232140 - protein, 12 aa, Homo sapiens
  CDR3 for beta chain variable domain of TCR clone 116070 (TRBV2, TRBJ2-1)
CAYGPPGNEQFF

SEQ ID NO: 232141 - protein, 13 aa, Homo sapiens
  CDR3 for alpha chain variable domain of TCR clone 116071 (TRAV35, TRAJ36)
CAGPRIGVNNLFF

SEQ ID NO: 232142 - protein, 15 aa, Homo sapiens
  CDR3 for beta chain variable domain of TCR clone 116071 (TRBV28, TRBJ2-5)
CASSPPWSYQETQYF

SEQ ID NO: 232143 - protein, 17 aa, Homo sapiens
  CDR3 for alpha chain variable domain of TCR clone 116072 (TRAV8-3, TRAJ50)
CAVGAVDTETSYDKVIF

SEQ ID NO: 232144 - protein, 13 aa, Homo sapiens
  CDR3 for beta chain variable domain of TCR clone 116072 (TRBV7-9, TRBJ2-2)
CASSAAGTGELFF

SEQ ID NO: 232145 - protein, 19 aa, Homo sapiens
  CDR3 for alpha chain variable domain of TCR clone 116073 (TRAV2, TRAJ20)
ILQVREADAAVYRDCKLSF

SEQ ID NO: 232146 - protein, 16 aa, Homo sapiens
  CDR3 for beta chain variable domain of TCR clone 116073 (TRBV24-1, TRBJ2-3)
CATSDPGTGATGTQYF

SEQ ID NO: 232147 - protein, 16 aa, Homo sapiens
  CDR3 for alpha chain variable domain of TCR clone 116074 (TRAV12-3, TRAJ53)
CAMSPGSGGSNYKLTF

SEQ ID NO: 232148 - protein, 12 aa, Homo sapiens
  CDR3 for beta chain variable domain of TCR clone 116074 (TRBV7-9, TRBJ1-1)
CASSLSGGVAFF

SEQ ID NO: 232149 - protein, 12 aa, Homo sapiens
  CDR3 for alpha chain variable domain of TCR clone 116075 (TRAV20, TRAJ33)
CAVRGSNFQLIW

SEQ ID NO: 232150 - protein, 13 aa, Homo sapiens
  CDR3 for beta chain variable domain of TCR clone 116075 (TRBV4-3, TRBJ1-1)
CASSPTGNTEAFF

SEQ ID NO: 232151 - protein, 15 aa, Homo sapiens
  CDR3 for alpha chain variable domain of TCR clone 116076 (TRAV13-1, TRAJ44)
CAASRNTGTASKLTF

SEQ ID NO: 232152 - protein, 14 aa, Homo sapiens
  CDR3 for beta chain variable domain of TCR clone 116076 (TRBV7-6, TRBJ2-3)
CASSVAGGTDTQYF

SEQ ID NO: 232153 - protein, 14 aa, Homo sapiens
  CDR3 for alpha chain variable domain of TCR clone 116077 (TRAV1-2, TRAJ16)
CAVNRFSEGQKLLF

SEQ ID NO: 232154 - protein, 15 aa, Homo sapiens
  CDR3 for beta chain variable domain of TCR clone 116077 (TRBV7-9, TRBJ1-6)
CASSSPGRGNSPLHF

SEQ ID NO: 232155 - protein, 11 aa, Homo sapiens
  CDR3 for alpha chain variable domain of TCR clone 116078 (TRAV12-2, TRAJ43)
CASPIGNDMRL

SEQ ID NO: 232156 - protein, 12 aa, Homo sapiens
  CDR3 for beta chain variable domain of TCR clone 116078 (TRBV20-1, TRBJ2-7)
CSAGLKMGEQYF

SEQ ID NO: 232157 - protein, 14 aa, Homo sapiens
  CDR3 for alpha chain variable domain of TCR clone 116079 (TRAV12-3, TRAJ9)
CAMSPNTGGFKTIF

SEQ ID NO: 232158 - protein, 12 aa, Homo sapiens
  CDR3 for beta chain variable domain of TCR clone 116079 (TRBV19, TRBJ1-5)
CASSIAQQPHHF

SEQ ID NO: 232159 - protein, 11 aa, Homo sapiens
  CDR3 for alpha chain variable domain of TCR clone 116080 (TRAV13-1, TRAJ39)
CASHAGNMLTF

SEQ ID NO: 232160 - protein, 14 aa, Homo sapiens
  CDR3 for beta chain variable domain of TCR clone 116080 (TRBV11-2, TRBJ1-5)
CASGLGRGRQPQHF

SEQ ID NO: 232161 - protein, 12 aa, Homo sapiens
  CDR3 for alpha chain variable domain of TCR clone 116081 (TRAV12-3, TRAJ17)
CAMTLAGNKLTF

SEQ ID NO: 232162 - protein, 20 aa, Homo sapiens
  CDR3 for beta chain variable domain of TCR clone 116081 (TRBV7-8, TRBJ2-2)
CASSHLFPGPTIHITGELFF

SEQ ID NO: 232163 - protein, 17 aa, Homo sapiens
  CDR3 for alpha chain variable domain of TCR clone 116082 (TRAV1-2, TRAJ8)
CAVRDPDENTGFQKLVF

SEQ ID NO: 232164 - protein, 16 aa, Homo sapiens
  CDR3 for beta chain variable domain of TCR clone 116082 (TRBV7-9, TRBJ2-2)
CASSGFGGANTGELFC

SEQ ID NO: 232165 - protein, 13 aa, Homo sapiens
  CDR3 for alpha chain variable domain of TCR clone 116083 (TRAV8-2, TRAJ29)
CALPGAGNTPLAF

SEQ ID NO: 232166 - protein, 16 aa, Homo sapiens
  CDR3 for beta chain variable domain of TCR clone 116083 (TRBV5-1, TRBJ2-5)
CASSSSGLGGAETQYF

SEQ ID NO: 232167 - protein, 12 aa, Homo sapiens
  CDR3 for alpha chain variable domain of TCR clone 116084 (TRAV21, TRAJ13)
PGPSGGFQKVTF

SEQ ID NO: 232168 - protein, 15 aa, Homo sapiens
  CDR3 for beta chain variable domain of TCR clone 116084 (TRBV7-9, TRBJ1-6)
CASSSPGRGNSPLHF

SEQ ID NO: 232169 - protein, 13 aa, Homo sapiens
  CDR3 for alpha chain variable domain of TCR clone 116085 (TRAV35, TRAJ37)
CAGSSGNTGKLIF

SEQ ID NO: 232170 - protein, 16 aa, Homo sapiens
  CDR3 for beta chain variable domain of TCR clone 116085 (TRBV10-3, TRBJ2-1)
CAISLTSGNSYNEQFV

SEQ ID NO: 232171 - protein, 11 aa, Homo sapiens
  CDR3 for alpha chain variable domain of TCR clone 116086 (TRAV12-3, TRAJ27)
CAMANAGKSTF

SEQ ID NO: 232172 - protein, 13 aa, Homo sapiens
  CDR3 for beta chain variable domain of TCR clone 116086 (TRBV20-1, TRBJ1-1)
CNARVGGNTEAFF

SEQ ID NO: 232173 - protein, 14 aa, Homo sapiens
  CDR3 for alpha chain variable domain of TCR clone 116087 (TRAV1-2, TRAJ22)
CAVKTSGSARQLTF

SEQ ID NO: 232174 - protein, 15 aa, Homo sapiens
  CDR3 for beta chain variable domain of TCR clone 116087 (TRBV28, TRBJ2-1)
CASSIIAGGRSEQFF

SEQ ID NO: 232175 - protein, 12 aa, Homo sapiens
  CDR3 for alpha chain variable domain of TCR clone 116088 (TRAV35, TRAJ23)
CCAHNQGGKLIF

SEQ ID NO: 232176 - protein, 17 aa, Homo sapiens
  CDR3 for beta chain variable domain of TCR clone 116088 (TRBV9, TRBJ1-6)
CASSVEGHPTEPSPLHF

SEQ ID NO: 232177 - protein, 15 aa, Homo sapiens
  CDR3 for alpha chain variable domain of TCR clone 116089 (TRAV12-2, TRAJ53)
CAVNGGGGSNYKLTF

SEQ ID NO: 232178 - protein, 16 aa, Homo sapiens
  CDR3 for beta chain variable domain of TCR clone 116089 (TRBV13, TRBJ2-2)
CASSPRTGEHTGELFF

SEQ ID NO: 232179 - protein, 14 aa, Homo sapiens
  CDR3 for alpha chain variable domain of TCR clone 116090 (TRAV25, TRAJ22)
CAVRSSGSARQLTF

SEQ ID NO: 232180 - protein, 18 aa, Homo sapiens
  CDR3 for beta chain variable domain of TCR clone 116090 (TRBV4-2, TRBJ1-1)
CASSPSPVGPRLKLSLDK

SEQ ID NO: 232181 - protein, 11 aa, Homo sapiens
  CDR3 for alpha chain variable domain of TCR clone 116091 (TRAV13-2, TRAJ54)
RAVQGAQKLVF

SEQ ID NO: 232182 - protein, 15 aa, Homo sapiens
  CDR3 for beta chain variable domain of TCR clone 116091 (TRBV28, TRBJ1-1)
CASRIKGGLNTEAFF

SEQ ID NO: 232183 - protein, 20 aa, Homo sapiens
  CDR3 for alpha chain variable domain of TCR clone 116092 (TRAV25, TRAJ21)
TATQTTDVGTYPLSFNKFYF

SEQ ID NO: 232184 - protein, 17 aa, Homo sapiens
  CDR3 for beta chain variable domain of TCR clone 116092 (TRBV7-2, TRBJ1-4)
CASSFKAGPTTNEKLFF

SEQ ID NO: 232185 - protein, 14 aa, Homo sapiens
  CDR3 for alpha chain variable domain of TCR clone 116093 (TRAV12-3, TRAJ29)
CAMILLSGNTLLVF

SEQ ID NO: 232186 - protein, 16 aa, Homo sapiens
  CDR3 for beta chain variable domain of TCR clone 116093 (TRBV28, TRBJ2-7)
CASSSGTSGGGYEQYF

SEQ ID NO: 232187 - protein, 20 aa, Homo sapiens
  CDR3 for alpha chain variable domain of TCR clone 116094 (TRAV12-3, TRAJ41)
SLFIRDSQPSDSATPEALNF

SEQ ID NO: 232188 - protein, 15 aa, Homo sapiens
  CDR3 for beta chain variable domain of TCR clone 116094 (TRBV5-1, TRBJ2-7)
CASSLDITSSYEQYF

SEQ ID NO: 232189 - protein, 11 aa, Homo sapiens
  CDR3 for alpha chain variable domain of TCR clone 116095 (TRAV8-3, TRAJ15)
CAVCPGTALIF

SEQ ID NO: 232190 - protein, 18 aa, Homo sapiens
  CDR3 for beta chain variable domain of TCR clone 116095 (TRBV18, TRBJ2-3)
CASSYTSGAAGGTDTQYF

SEQ ID NO: 232191 - protein, 14 aa, Homo sapiens
  CDR3 for alpha chain variable domain of TCR clone 116096 (TRAV12-2, TRAJ15)
CAPHTGQAGTALIF

SEQ ID NO: 232192 - protein, 17 aa, Homo sapiens
  CDR3 for beta chain variable domain of TCR clone 116096 (TRBV11-2, TRBJ2-1)
CASSLYPPGVEYNEQFF

SEQ ID NO: 232193 - protein, 10 aa, Homo sapiens
  CDR3 for alpha chain variable domain of TCR clone 116097 (TRAV36/DV7, TRAJ38)
CSANNRKLIW

SEQ ID NO: 232194 - protein, 15 aa, Homo sapiens
  CDR3 for beta chain variable domain of TCR clone 116097 (TRBV20-1, TRBJ2-7)
CSARDRVSGMDEQYF

SEQ ID NO: 232195 - protein, 14 aa, Homo sapiens
  CDR3 for alpha chain variable domain of TCR clone 116098 (TRAV12-2, TRAJ11)
CAVEGGSGYSTLTF

SEQ ID NO: 232196 - protein, 16 aa, Homo sapiens
  CDR3 for beta chain variable domain of TCR clone 116098 (TRBV6-1, TRBJ1-2)
CASIGAWQGRSHGYTF

SEQ ID NO: 232197 - protein, 10 aa, Homo sapiens
  CDR3 for alpha chain variable domain of TCR clone 116099 (TRAV1-2, TRAJ34)
CAVNTDKLIF

SEQ ID NO: 232198 - protein, 17 aa, Homo sapiens
  CDR3 for beta chain variable domain of TCR clone 116099 (TRBV4-2, TRBJ1-1)
CASTQFGGGSGNTEAFF

SEQ ID NO: 232199 - protein, 16 aa, Homo sapiens
  CDR3 for alpha chain variable domain of TCR clone 116100 (TRAV8-3, TRAJ13)
CAVSAYPSGGYQKVTF

SEQ ID NO: 232200 - protein, 15 aa, Homo sapiens
  CDR3 for beta chain variable domain of TCR clone 116100 (TRBV19, TRBJ1-5)
CASSIVWADNQPQHF

SEQ ID NO: 232201 - protein, 14 aa, Homo sapiens
  CDR3 for alpha chain variable domain of TCR clone 116101 (TRAV8-4, TRAJ13)
CAVTLSGGYQKVTF

SEQ ID NO: 232202 - protein, 19 aa, Homo sapiens
  CDR3 for beta chain variable domain of TCR clone 116101 (TRBV25-1, TRBJ2-2)
CAILVYRVDRGRKTGELFF

SEQ ID NO: 232203 - protein, 19 aa, Homo sapiens
  CDR3 for alpha chain variable domain of TCR clone 116102 (TRAV26-1, TRAJ28)
CIVRVAHAYSGAGSYQLTF

SEQ ID NO: 232204 - protein, 17 aa, Homo sapiens
  CDR3 for beta chain variable domain of TCR clone 116102 (TRBV4-1, TRBJ1-4)
CASSQERPRGVEEKLFF

SEQ ID NO: 232205 - protein, 12 aa, Homo sapiens
  CDR3 for alpha chain variable domain of TCR clone 116103 (TRAV13-1, TRAJ3)
CAATGVQQFFQD

SEQ ID NO: 232206 - protein, 16 aa, Homo sapiens
  CDR3 for beta chain variable domain of TCR clone 116103 (TRBV7-3, TRBJ2-2)
CASSLKRGTLSGELFF

SEQ ID NO: 232207 - protein, 13 aa, Homo sapiens
  CDR3 for alpha chain variable domain of TCR clone 116104 (TRAV12-2, TRAJ52)
CAVSGTSYGKLTF

SEQ ID NO: 232208 - protein, 14 aa, Homo sapiens
  CDR3 for beta chain variable domain of TCR clone 116104 (TRBV12-5, TRBJ2-5)
CASGSRTHQETQYF

SEQ ID NO: 232209 - protein, 14 aa, Homo sapiens
  CDR3 for alpha chain variable domain of TCR clone 116105 (TRAV17, TRAJ39)
CATDPVRAGNMLTF

SEQ ID NO: 232210 - protein, 15 aa, Homo sapiens
  CDR3 for beta chain variable domain of TCR clone 116105 (TRBV7-3, TRBJ2-2)
CASSETGQGTGELFF

SEQ ID NO: 232211 - protein, 12 aa, Homo sapiens
  CDR3 for alpha chain variable domain of TCR clone 116106 (TRAV35, TRAJ49)
CAGHEHRQPVLF

SEQ ID NO: 232212 - protein, 13 aa, Homo sapiens
  CDR3 for beta chain variable domain of TCR clone 116106 (TRBV6-3, TRBJ2-5)
CASSWAGEETQYF

SEQ ID NO: 232213 - protein, 12 aa, Homo sapiens
  CDR3 for alpha chain variable domain of TCR clone 116107 (TRAV17, TRAJ36)
CATLTGANNLFS

SEQ ID NO: 232214 - protein, 15 aa, Homo sapiens
  CDR3 for beta chain variable domain of TCR clone 116107 (TRBV19, TRBJ1-2)
CASSTKTDTNYGYTF

SEQ ID NO: 232215 - protein, 13 aa, Homo sapiens
  CDR3 for alpha chain variable domain of TCR clone 116108 (TRAV17, TRAJ54)
CAAGIQGAQQLVF

SEQ ID NO: 232216 - protein, 14 aa, Homo sapiens
  CDR3 for beta chain variable domain of TCR clone 116108 (TRBV11-2, TRBJ1-2)
CASSLGTANYGYTF

SEQ ID NO: 232217 - protein, 16 aa, Homo sapiens
  CDR3 for alpha chain variable domain of TCR clone 116109 (TRAV38-2/DV8, TRAJ47)
CAYRSAIMDYGNKLVF

SEQ ID NO: 232218 - protein, 14 aa, Homo sapiens
  CDR3 for beta chain variable domain of TCR clone 116109 (TRBV19, TRBJ2-7)
CASSIFAGTYEQYF

SEQ ID NO: 232219 - protein, 14 aa, Homo sapiens
  CDR3 for alpha chain variable domain of TCR clone 116110 (TRAV29/DV5, TRAJ44)
CAAFLVVTASKLTF

SEQ ID NO: 232220 - protein, 16 aa, Homo sapiens
  CDR3 for beta chain variable domain of TCR clone 116110 (TRBV19, TRBJ1-5)
CASSIQGGYSNQPQHF

SEQ ID NO: 232221 - protein, 13 aa, Homo sapiens
  CDR3 for alpha chain variable domain of TCR clone 116111 (TRAV12-1, TRAJ33)
CGDAPDSNYQLIR

SEQ ID NO: 232222 - protein, 12 aa, Homo sapiens
  CDR3 for beta chain variable domain of TCR clone 116111 (TRBV11-2, TRBJ2-2)
CASSLGGGELFF

SEQ ID NO: 232223 - protein, 18 aa, Homo sapiens
  CDR3 for alpha chain variable domain of TCR clone 116112 (TRAV29/DV5, TRAJ52)
CAAGFRGAGGTSYGKLTF

SEQ ID NO: 232224 - protein, 16 aa, Homo sapiens
  CDR3 for beta chain variable domain of TCR clone 116112 (TRBV7-3, TRBJ2-2)
WASSLKRGTLSGELFF

SEQ ID NO: 232225 - protein, 15 aa, Homo sapiens
  CDR3 for alpha chain variable domain of TCR clone 116113 (TRAV17, TRAJ52)
CATEAGGTSYGKLTF

SEQ ID NO: 232226 - protein, 14 aa, Homo sapiens
  CDR3 for beta chain variable domain of TCR clone 116113 (TRBV28, TRBJ1-5)
CDSSLGVLVKPQHF

SEQ ID NO: 232227 - protein, 13 aa, Homo sapiens
  CDR3 for alpha chain variable domain of TCR clone 116114 (TRAV12-3, TRAJ49)
CAMSRNTGNQVYF

SEQ ID NO: 232228 - protein, 16 aa, Homo sapiens
  CDR3 for beta chain variable domain of TCR clone 116114 (TRBV5-8, TRBJ2-2)
CASSLINPGGAGELFF

SEQ ID NO: 232229 - protein, 17 aa, Homo sapiens
  CDR3 for alpha chain variable domain of TCR clone 116115 (TRAV13-2, TRAJ42)
CAEKGKNYGGSKGNLIF

SEQ ID NO: 232230 - protein, 16 aa, Homo sapiens
  CDR3 for beta chain variable domain of TCR clone 116115 (TRBV7-9, TRBJ2-1)
CASSLGTGWDYNEQFF

SEQ ID NO: 232231 - protein, 13 aa, Homo sapiens
  CDR3 for alpha chain variable domain of TCR clone 116116 (TRAV24, TRAJ53)
CAFGGGSNYKLTF

SEQ ID NO: 232232 - protein, 15 aa, Homo sapiens
  CDR3 for beta chain variable domain of TCR clone 116116 (TRBV4-1, TRBJ1-4)
CASSQTGGQAEKLLF

SEQ ID NO: 232233 - protein, 19 aa, Homo sapiens
  CDR3 for alpha chain variable domain of TCR clone 116117 (TRAV1-2, TRAJ26)
CLLPLCCERPDNYGQNFVF

SEQ ID NO: 232234 - protein, 15 aa, Homo sapiens
  CDR3 for beta chain variable domain of TCR clone 116117 (TRBV9, TRBJ1-6)
CASSVAGAGDSPLHF

SEQ ID NO: 232235 - protein, 12 aa, Homo sapiens
  CDR3 for alpha chain variable domain of TCR clone 116118 (TRAV27, TRAJ35)
CAGADFGNVLHC

SEQ ID NO: 232236 - protein, 12 aa, Homo sapiens
  CDR3 for beta chain variable domain of TCR clone 116118 (TRBV7-3, TRBJ1-1)
CQQPGLGAEAFF

SEQ ID NO: 232237 - protein, 17 aa, Homo sapiens
  CDR3 for alpha chain variable domain of TCR clone 116119 (TRAV13-1, TRAJ23)
CAASKRFHRLRKAYLRT

SEQ ID NO: 232238 - protein, 14 aa, Homo sapiens
  CDR3 for beta chain variable domain of TCR clone 116119 (TRBV11-2, TRBJ2-7)
CASSRSGGAGEQYF

SEQ ID NO: 232239 - protein, 18 aa, Homo sapiens
  CDR3 for alpha chain variable domain of TCR clone 116120 (TRAV26-2, TRAJ45)
CILRLWWYSGGGADGLTF

SEQ ID NO: 232240 - protein, 17 aa, Homo sapiens
  CDR3 for beta chain variable domain of TCR clone 116120 (TRBV28, TRBJ2-3)
CASSPTPAGGRVDTQYF

SEQ ID NO: 232241 - protein, 12 aa, Homo sapiens
  CDR3 for alpha chain variable domain of TCR clone 116121 (TRAV21, TRAJ42)
CAVGGSQGNLIF

SEQ ID NO: 232242 - protein, 11 aa, Homo sapiens
  CDR3 for beta chain variable domain of TCR clone 116121 (TRBV12-4, TRBJ2-5)
CASTYQETQYF

SEQ ID NO: 232243 - protein, 10 aa, Homo sapiens
  CDR3 for alpha chain variable domain of TCR clone 116122 (TRAV30, TRAJ48)
CGIGNEKLTF

SEQ ID NO: 232244 - protein, 16 aa, Homo sapiens
  CDR3 for beta chain variable domain of TCR clone 116122 (TRBV19, TRBJ2-1)
CASRTSSGSIVNEQFF

SEQ ID NO: 232245 - protein, 16 aa, Homo sapiens
  CDR3 for alpha chain variable domain of TCR clone 116123 (TRAV26-1, TRAJ53)
CIVRVAMGGSNYKLTF

SEQ ID NO: 232246 - protein, 14 aa, Homo sapiens
  CDR3 for beta chain variable domain of TCR clone 116123 (TRBV7-9, TRBJ1-4)
CAITEGEANEKLFF

SEQ ID NO: 232247 - protein, 12 aa, Homo sapiens
  CDR3 for alpha chain variable domain of TCR clone 116124 (TRAV9-2, TRAJ26)
CALRGYGQNFVF

SEQ ID NO: 232248 - protein, 17 aa, Homo sapiens
  CDR3 for beta chain variable domain of TCR clone 116124 (TRBV11-2, TRBJ2-1)
CASSLYPPGVEYNEQFF

SEQ ID NO: 232249 - protein, 14 aa, Homo sapiens
  CDR3 for alpha chain variable domain of TCR clone 116125 (TRAV12-1, TRAJ38)
CVVHNAGNNRKLLW

SEQ ID NO: 232250 - protein, 13 aa, Homo sapiens
  CDR3 for beta chain variable domain of TCR clone 116125 (TRBV19, TRBJ2-1)
CATSRGVYNEQFF

SEQ ID NO: 232251 - protein, 11 aa, Homo sapiens
  CDR3 for alpha chain variable domain of TCR clone 116126 (TRAV35, TRAJ31)
CAESGDARLMS

SEQ ID NO: 232252 - protein, 11 aa, Homo sapiens
  CDR3 for beta chain variable domain of TCR clone 116126 (TRBV24-1, TRBJ2-3)
CATSDLDTQYF

SEQ ID NO: 232253 - protein, 10 aa, Homo sapiens
  CDR3 for alpha chain variable domain of TCR clone 116127 (TRAV1-2, TRAJ20)
CALNDYKLSL

SEQ ID NO: 232254 - protein, 11 aa, Homo sapiens
  CDR3 for beta chain variable domain of TCR clone 116127 (TRBV29-1, TRBJ2-5)
CSEDRTGTQYF

SEQ ID NO: 232255 - protein, 18 aa, Homo sapiens
  CDR3 for alpha chain variable domain of TCR clone 116128 (TRAV2, TRAJ32)
CCLLLCFHYGGATNKLIF

SEQ ID NO: 232256 - protein, 16 aa, Homo sapiens
  CDR3 for beta chain variable domain of TCR clone 116128 (TRBV4-2, TRBJ2-1)
CASSQELRGGLNEQFF

SEQ ID NO: 232257 - protein, 16 aa, Homo sapiens
  CDR3 for alpha chain variable domain of TCR clone 116129 (TRAV12-3, TRAJ53)
CAMNVGSGGSNYKLTF

SEQ ID NO: 232258 - protein, 11 aa, Homo sapiens
  CDR3 for beta chain variable domain of TCR clone 116129 (TRBV29-1, TRBJ2-5)
CSVASGETQYF

SEQ ID NO: 232259 - protein, 16 aa, Homo sapiens
  CDR3 for alpha chain variable domain of TCR clone 116130 (TRAV14/DV4, TRAJ53)
CAMREGGGGSNYKLTF

SEQ ID NO: 232260 - protein, 19 aa, Homo sapiens
  CDR3 for beta chain variable domain of TCR clone 116130 (TRBV28, TRBJ2-4)
CASSFQPGGPAHSKNMQYF

SEQ ID NO: 232261 - protein, 14 aa, Homo sapiens
  CDR3 for alpha chain variable domain of TCR clone 116131 (TRAV13-1, TRAJ35)
CAASKGGFGNVLHC

SEQ ID NO: 232262 - protein, 14 aa, Homo sapiens
  CDR3 for beta chain variable domain of TCR clone 116131 (TRBV4-1, TRBJ2-2)
CASSQAVNTGELFL

SEQ ID NO: 232263 - protein, 12 aa, Homo sapiens
  CDR3 for alpha chain variable domain of TCR clone 116132 (TRAV21, TRAJ57)
CAAGDGSEKLVF

SEQ ID NO: 232264 - protein, 14 aa, Homo sapiens
  CDR3 for beta chain variable domain of TCR clone 116132 (TRBV7-3, TRBJ2-1)
CASSLAGGTNEQFF

SEQ ID NO: 232265 - protein, 14 aa, Homo sapiens
  CDR3 for alpha chain variable domain of TCR clone 116133 (TRAV12-2, TRAJ17)
CAALFKAAGNKLTF

SEQ ID NO: 232266 - protein, 14 aa, Homo sapiens
  CDR3 for beta chain variable domain of TCR clone 116133 (TRBV7-9, TRBJ2-1)
CASSPRDSLYEQFF

SEQ ID NO: 232267 - protein, 14 aa, Homo sapiens
  CDR3 for alpha chain variable domain of TCR clone 116134 (TRAV12-2, TRAJ45)
CAVNKGGGADGLTF

SEQ ID NO: 232268 - protein, 15 aa, Homo sapiens
  CDR3 for beta chain variable domain of TCR clone 116134 (TRBV9, TRBJ1-6)
CASSVAGTGDSPLHC

SEQ ID NO: 232269 - protein, 13 aa, Homo sapiens
  CDR3 for alpha chain variable domain of TCR clone 116135 (TRAV21, TRAJ27)
CAARPGNAGKSTF

SEQ ID NO: 232270 - protein, 16 aa, Homo sapiens
  CDR3 for beta chain variable domain of TCR clone 116135 (TRBV3-1, TRBJ2-5)
CASSQDWASGQETQYF

SEQ ID NO: 232271 - protein, 15 aa, Homo sapiens
  CDR3 for alpha chain variable domain of TCR clone 116136 (TRAV26-1, TRAJ42)
CIVRVAEGSQGNLIF

SEQ ID NO: 232272 - protein, 14 aa, Homo sapiens
  CDR3 for beta chain variable domain of TCR clone 116136 (TRBV11-2, TRBJ2-3)
CASSRLARTDTQYF

SEQ ID NO: 232273 - protein, 13 aa, Homo sapiens
  CDR3 for alpha chain variable domain of TCR clone 116137 (TRAV35, TRAJ36)
CARPRIGANNLFF

SEQ ID NO: 232274 - protein, 16 aa, Homo sapiens
  CDR3 for beta chain variable domain of TCR clone 116137 (TRBV2, TRBJ2-3)
CASSTSVEGVTDTQYF

SEQ ID NO: 232275 - protein, 16 aa, Homo sapiens
  CDR3 for alpha chain variable domain of TCR clone 116138 (TRAV30, TRAJ24)
CGTEIVDADSWGKFQF

SEQ ID NO: 232276 - protein, 16 aa, Homo sapiens
  CDR3 for beta chain variable domain of TCR clone 116138 (TRBV6-5, TRBJ2-1)
CASSYSLSGGYNEQFF

SEQ ID NO: 232277 - protein, 11 aa, Homo sapiens
  CDR3 for alpha chain variable domain of TCR clone 116139 (TRAV2, TRAJ33)
CAVDSNYQLIW

SEQ ID NO: 232278 - protein, 16 aa, Homo sapiens
  CDR3 for beta chain variable domain of TCR clone 116139 (TRBV7-3, TRBJ2-1)
CASSLEGYRSYNEQFF

SEQ ID NO: 232279 - protein, 14 aa, Homo sapiens
  CDR3 for alpha chain variable domain of TCR clone 116140 (TRAV26-1, TRAJ49)
CIVRLTNTGNQSYF

SEQ ID NO: 232280 - protein, 13 aa, Homo sapiens
  CDR3 for beta chain variable domain of TCR clone 116140 (TRBV10-1, TRBJ1-1)
CASQGQTNTEAFF

SEQ ID NO: 232281 - protein, 12 aa, Homo sapiens
  CDR3 for alpha chain variable domain of TCR clone 116141 (TRAV8-4, TRAJ43)
CAVSVNNNDMRF

SEQ ID NO: 232282 - protein, 13 aa, Homo sapiens
  CDR3 for beta chain variable domain of TCR clone 116141 (TRBV7-9, TRBJ1-2)
CASSLKQNYGYAF

SEQ ID NO: 232283 - protein, 15 aa, Homo sapiens
  CDR3 for alpha chain variable domain of TCR clone 116142 (TRAV12-3, TRAJ11)
CAMSEENSGYCTPTF

SEQ ID NO: 232284 - protein, 16 aa, Homo sapiens
  CDR3 for beta chain variable domain of TCR clone 116142 (TRBV5-1, TRBJ2-7)
CASSLEGLAGLYEQYF

SEQ ID NO: 232285 - protein, 11 aa, Homo sapiens
  CDR3 for alpha chain variable domain of TCR clone 116143 (TRAV21, TRAJ20)
CCRVNDYKPSF

SEQ ID NO: 232286 - protein, 15 aa, Homo sapiens
  CDR3 for beta chain variable domain of TCR clone 116143 (TRBV2, TRBJ2-2)
CASSRQGPNTGELFF

SEQ ID NO: 232287 - protein, 14 aa, Homo sapiens
  CDR3 for alpha chain variable domain of TCR clone 116144 (TRAV9-2, TRAJ39)
CALYIYNAGNMLTF

SEQ ID NO: 232288 - protein, 13 aa, Homo sapiens
  CDR3 for beta chain variable domain of TCR clone 116144 (TRBV19, TRBJ2-7)
CASSIDRTYEQYF

SEQ ID NO: 232289 - protein, 18 aa, Homo sapiens
  CDR3 for alpha chain variable domain of TCR clone 116145 (TRAV12-3, TRAJ52)
CAMSVGGAGGTSYGKLTF

SEQ ID NO: 232290 - protein, 16 aa, Homo sapiens
  CDR3 for beta chain variable domain of TCR clone 116145 (TRBV12-5, TRBJ2-5)
CASGPRTSRNQETQYF

SEQ ID NO: 232291 - protein, 12 aa, Homo sapiens
  CDR3 for alpha chain variable domain of TCR clone 116146 (TRAV23/DV6, TRAJ16)
CAARGRGQKLLF

SEQ ID NO: 232292 - protein, 15 aa, Homo sapiens
  CDR3 for beta chain variable domain of TCR clone 116146 (TRBV15, TRBJ2-1)
CATSRPGQGLHDQFF

SEQ ID NO: 232293 - protein, 16 aa, Homo sapiens
  CDR3 for alpha chain variable domain of TCR clone 116147 (TRAV21, TRAJ37)
CAVRPRGSSNTGKLIF

SEQ ID NO: 232294 - protein, 11 aa, Homo sapiens
  CDR3 for beta chain variable domain of TCR clone 116147 (TRBV18, TRBJ2-5)
CASSPRETQYF

SEQ ID NO: 232295 - protein, 14 aa, Homo sapiens
  CDR3 for alpha chain variable domain of TCR clone 116148 (TRAV6, TRAJ6)
CALPTSGRSYIPTF

SEQ ID NO: 232296 - protein, 17 aa, Homo sapiens
  CDR3 for beta chain variable domain of TCR clone 116148 (TRBV5-1, TRBJ2-5)
CASSPVALGQNQETQYF

SEQ ID NO: 232297 - protein, 14 aa, Homo sapiens
  CDR3 for alpha chain variable domain of TCR clone 116149 (TRAV8-3, TRAJ10)
CAVGNAGGGNKLTF

SEQ ID NO: 232298 - protein, 14 aa, Homo sapiens
  CDR3 for beta chain variable domain of TCR clone 116149 (TRBV19, TRBJ2-1)
CASPTFVLSGEQFF

SEQ ID NO: 232299 - protein, 13 aa, Homo sapiens
  CDR3 for alpha chain variable domain of TCR clone 116150 (TRAV21, TRAJ27)
CAARPGNAGQSTF

SEQ ID NO: 232300 - protein, 13 aa, Homo sapiens
  CDR3 for beta chain variable domain of TCR clone 116150 (TRBV13, TRBJ2-1)
CASILGGRGEQFF

SEQ ID NO: 232301 - protein, 10 aa, Homo sapiens
  CDR3 for alpha chain variable domain of TCR clone 116151 (TRAV1-2, TRAJ20)
CACNDYKLRF

SEQ ID NO: 232302 - protein, 16 aa, Homo sapiens
  CDR3 for beta chain variable domain of TCR clone 116151 (TRBV20-1, TRBJ2-1)
CSARDLKQGMNNEQFF

SEQ ID NO: 232303 - protein, 14 aa, Homo sapiens
  CDR3 for alpha chain variable domain of TCR clone 116152 (TRAV1-2, TRAJ16)
SAVNRFSDGQKLLF

SEQ ID NO: 232304 - protein, 13 aa, Homo sapiens
  CDR3 for beta chain variable domain of TCR clone 116152 (TRBV4-1, TRBJ2-1)
CASSQAGGDEQFF

SEQ ID NO: 232305 - protein, 18 aa, Homo sapiens
  CDR3 for alpha chain variable domain of TCR clone 116153 (TRAV13-1, TRAJ52)
CAASKRSAGGTSYGKLTF

SEQ ID NO: 232306 - protein, 14 aa, Homo sapiens
  CDR3 for beta chain variable domain of TCR clone 116153 (TRBV29-1, TRBJ2-5)
CSVETSGSGETQYF

SEQ ID NO: 232307 - protein, 18 aa, Homo sapiens
  CDR3 for alpha chain variable domain of TCR clone 116154 (TRAV12-3, TRAJ52)
CAMSRTNAGGTSYGKLTF

SEQ ID NO: 232308 - protein, 14 aa, Homo sapiens
  CDR3 for beta chain variable domain of TCR clone 116154 (TRBV4-2, TRBJ2-3)
CASRETRAPGMQYF

SEQ ID NO: 232309 - protein, 14 aa, Homo sapiens
  CDR3 for alpha chain variable domain of TCR clone 116155 (TRAV12-1, TRAJ12)
CVVTRMDSSYKLIF

SEQ ID NO: 232310 - protein, 15 aa, Homo sapiens
  CDR3 for beta chain variable domain of TCR clone 116155 (TRBV12-4, TRBJ2-5)
CASSPPTGLQETQYF

SEQ ID NO: 232311 - protein, 15 aa, Homo sapiens
  CDR3 for alpha chain variable domain of TCR clone 116156 (TRAV26-1, TRAJ29)
CIVRVEGSGNTRLVF

SEQ ID NO: 232312 - protein, 14 aa, Homo sapiens
  CDR3 for beta chain variable domain of TCR clone 116156 (TRBV18, TRBJ2-5)
CASSPGVSQETQYF

SEQ ID NO: 232313 - protein, 17 aa, Homo sapiens
  CDR3 for alpha chain variable domain of TCR clone 116157 (TRAV3, TRAJ6)
CAVRDGPRAGGSYIPTF

SEQ ID NO: 232314 - protein, 14 aa, Homo sapiens
  CDR3 for beta chain variable domain of TCR clone 116157 (TRBV20-1, TRBJ2-7)
CSAKRGRSSYEQYF

SEQ ID NO: 232315 - protein, 17 aa, Homo sapiens
  CDR3 for alpha chain variable domain of TCR clone 116158 (TRAV3, TRAJ42)
CAVRDRDYGGSRGNLIF

SEQ ID NO: 232316 - protein, 15 aa, Homo sapiens
  CDR3 for beta chain variable domain of TCR clone 116158 (TRBV29-1, TRBJ1-2)
CSVVLEAGSNYGYTF

SEQ ID NO: 232317 - protein, 20 aa, Homo sapiens
  CDR3 for alpha chain variable domain of TCR clone 116159 (TRAV25, TRAJ21)
TATQTTDVGTYPLSFNKFYF

SEQ ID NO: 232318 - protein, 14 aa, Homo sapiens
  CDR3 for beta chain variable domain of TCR clone 116159 (TRBV6-1, TRBJ2-1)
CASVKDGFYNEQFF

SEQ ID NO: 232319 - protein, 15 aa, Homo sapiens
  CDR3 for alpha chain variable domain of TCR clone 116160 (TRAV17, TRAJ13)
CATDAWSGGYQKVTF

SEQ ID NO: 232320 - protein, 17 aa, Homo sapiens
  CDR3 for beta chain variable domain of TCR clone 116160 (TRBV11-2, TRBJ2-1)
CASSLYPPGVEYNEQFF

SEQ ID NO: 232321 - protein, 16 aa, Homo sapiens
  CDR3 for alpha chain variable domain of TCR clone 116161 (TRAV30, TRAJ24)
CGTEIVYADSWGKFQF

SEQ ID NO: 232322 - protein, 15 aa, Homo sapiens
  CDR3 for beta chain variable domain of TCR clone 116161 (TRBV27, TRBJ2-1)
CASSNGGGSSNEQFF

SEQ ID NO: 232323 - protein, 13 aa, Homo sapiens
  CDR3 for alpha chain variable domain of TCR clone 116162 (TRAV13-1, TRAJ5)
CAASDTGRRALTF

SEQ ID NO: 232324 - protein, 13 aa, Homo sapiens
  CDR3 for beta chain variable domain of TCR clone 116162 (TRBV4-1, TRBJ2-2)
CASSQENTGELFF

SEQ ID NO: 232325 - protein, 12 aa, Homo sapiens
  CDR3 for alpha chain variable domain of TCR clone 116163 (TRAV1-1, TRAJ8)
CAGGTGFQKLVF

SEQ ID NO: 232326 - protein, 13 aa, Homo sapiens
  CDR3 for beta chain variable domain of TCR clone 116163 (TRBV7-9, TRBJ1-2)
CASSLKQNYGDTF

SEQ ID NO: 232327 - protein, 14 aa, Homo sapiens
  CDR3 for alpha chain variable domain of TCR clone 116164 (TRAV12-2, TRAJ13)
CAVKKTGGYQKVTF

SEQ ID NO: 232328 - protein, 12 aa, Homo sapiens
  CDR3 for beta chain variable domain of TCR clone 116164 (TRBV19, TRBJ2-1)
CASSMQDTEQFF

SEQ ID NO: 232329 - protein, 15 aa, Homo sapiens
  CDR3 for alpha chain variable domain of TCR clone 116165 (TRAV8-2, TRAJ15)
CVVTMGNQAGTALIF

SEQ ID NO: 232330 - protein, 15 aa, Homo sapiens
  CDR3 for beta chain variable domain of TCR clone 116165 (TRBV19, TRBJ2-7)
CASSPAGSGEALRYF

SEQ ID NO: 232331 - protein, 17 aa, Homo sapiens
  CDR3 for alpha chain variable domain of TCR clone 116166 (TRAV13-2, TRAJ31)
CAENARPMFGDGTQLVV

SEQ ID NO: 232332 - protein, 14 aa, Homo sapiens
  CDR3 for beta chain variable domain of TCR clone 116166 (TRBV7-9, TRBJ2-1)
CASSLGVADNEQFF

SEQ ID NO: 232333 - protein, 13 aa, Homo sapiens
  CDR3 for alpha chain variable domain of TCR clone 116167 (TRAV8-4, TRAJ9)
CVVSETGGFKTIF

SEQ ID NO: 232334 - protein, 12 aa, Homo sapiens
  CDR3 for beta chain variable domain of TCR clone 116167 (TRBV11-2, TRBJ2-1)
CASSPGNNEQFF

SEQ ID NO: 232335 - protein, 15 aa, Homo sapiens
  CDR3 for alpha chain variable domain of TCR clone 116168 (TRAV25, TRAJ52)
CAGTSGGTSYGKLTV

SEQ ID NO: 232336 - protein, 16 aa, Homo sapiens
  CDR3 for beta chain variable domain of TCR clone 116168 (TRBV15, TRBJ1-2)
CATSRGPRTGGGGYTF

SEQ ID NO: 232337 - protein, 15 aa, Homo sapiens
  CDR3 for alpha chain variable domain of TCR clone 116169 (TRAV38-2/DV8, TRAJ45)
CAYWDLGGGADGLTF

SEQ ID NO: 232338 - protein, 14 aa, Homo sapiens
  CDR3 for beta chain variable domain of TCR clone 116169 (TRBV7-2, TRBJ2-7)
CASRSQGAAYEQYF

SEQ ID NO: 232339 - protein, 12 aa, Homo sapiens
  CDR3 for alpha chain variable domain of TCR clone 116170 (TRAV12-3, TRAJ17)
CAMTLTGNKLTF

SEQ ID NO: 232340 - protein, 14 aa, Homo sapiens
  CDR3 for beta chain variable domain of TCR clone 116170 (TRBV6-1, TRBJ2-6)
CASQQGAGANVLTF

SEQ ID NO: 232341 - protein, 13 aa, Homo sapiens
  CDR3 for alpha chain variable domain of TCR clone 116171 (TRAV16, TRAJ31)
CALSAHNNARLMF

SEQ ID NO: 232342 - protein, 13 aa, Homo sapiens
  CDR3 for beta chain variable domain of TCR clone 116171 (TRBV7-9, TRBJ1-2)
CASSLRQNYGYTF

SEQ ID NO: 232343 - protein, 14 aa, Homo sapiens
  CDR3 for alpha chain variable domain of TCR clone 116172 (TRAV8-4, TRAJ9)
CAVSDRTGGFKTIF

SEQ ID NO: 232344 - protein, 15 aa, Homo sapiens
  CDR3 for beta chain variable domain of TCR clone 116172 (TRBV11-2, TRBJ2-2)
CASRGLAANTGELFF

SEQ ID NO: 232345 - protein, 10 aa, Homo sapiens
  CDR3 for alpha chain variable domain of TCR clone 116173 (TRAV8-4, TRAJ43)
CAVSADDMRF

SEQ ID NO: 232346 - protein, 15 aa, Homo sapiens
  CDR3 for beta chain variable domain of TCR clone 116173 (TRBV5-1, TRBJ2-3)
CASSVNSGSTDTQYF

SEQ ID NO: 232347 - protein, 15 aa, Homo sapiens
  CDR3 for alpha chain variable domain of TCR clone 116174 (TRAV26-1, TRAJ22)
CIVRVSFWFCKATDL

SEQ ID NO: 232348 - protein, 14 aa, Homo sapiens
  CDR3 for beta chain variable domain of TCR clone 116174 (TRBV18, TRBJ2-7)
SASSPRGGAYEQYF

SEQ ID NO: 232349 - protein, 14 aa, Homo sapiens
  CDR3 for alpha chain variable domain of TCR clone 116175 (TRAV26-2, TRAJ32)
CCVGYGCATNKLIF

SEQ ID NO: 232350 - protein, 13 aa, Homo sapiens
  CDR3 for beta chain variable domain of TCR clone 116175 (TRBV12-5, TRBJ2-3)
CASGDRQSDTQYF

SEQ ID NO: 232351 - protein, 14 aa, Homo sapiens
  CDR3 for alpha chain variable domain of TCR clone 116176 (TRAV12-2, TRAJ45)
CAVNIGGGADGPTF

SEQ ID NO: 232352 - protein, 13 aa, Homo sapiens
  CDR3 for beta chain variable domain of TCR clone 116176 (TRBV19, TRBJ2-2)
CASSIWSTGELFF

SEQ ID NO: 232353 - protein, 12 aa, Homo sapiens
  CDR3 for alpha chain variable domain of TCR clone 116177 (TRAV12-1, TRAJ34)
CVVAGATDKLIF

SEQ ID NO: 232354 - protein, 12 aa, Homo sapiens
  CDR3 for beta chain variable domain of TCR clone 116177 (TRBV7-9, TRBJ1-1)
CASRLVRGEAFF

SEQ ID NO: 232355 - protein, 14 aa, Homo sapiens
  CDR3 for alpha chain variable domain of TCR clone 116178 (TRAV3, TRAJ21)
CAVRDAYNFNKFYF

SEQ ID NO: 232356 - protein, 12 aa, Homo sapiens
  CDR3 for beta chain variable domain of TCR clone 116178 (TRBV11-2, TRBJ2-2)
CASSLGGGELFF

SEQ ID NO: 232357 - protein, 14 aa, Homo sapiens
  CDR3 for alpha chain variable domain of TCR clone 116179 (TRAV12-2, TRAJ11)
CAMNRESGYSTLTF

SEQ ID NO: 232358 - protein, 10 aa, Homo sapiens
  CDR3 for beta chain variable domain of TCR clone 116179 (TRBV20-1, TRBJ2-5)
CSARFETQYF

SEQ ID NO: 232359 - protein, 14 aa, Homo sapiens
  CDR3 for alpha chain variable domain of TCR clone 116180 (TRAV26-1, TRAJ38)
CIAANAGNNRKLIW

SEQ ID NO: 232360 - protein, 17 aa, Homo sapiens
  CDR3 for beta chain variable domain of TCR clone 116180 (TRBV7-9, TRBJ2-3)
CASSPTVAGDLTDTQYF

SEQ ID NO: 232361 - protein, 14 aa, Homo sapiens
  CDR3 for alpha chain variable domain of TCR clone 116181 (TRAV10, TRAJ50)
CVVSGRGSYDKVIF

SEQ ID NO: 232362 - protein, 16 aa, Homo sapiens
  CDR3 for beta chain variable domain of TCR clone 116181 (TRBV5-1, TRBJ2-2)
CASSSRTGGRTGELFF

SEQ ID NO: 232363 - protein, 12 aa, Homo sapiens
  CDR3 for alpha chain variable domain of TCR clone 116182 (TRAV12-3, TRAJ17)
CAMTLTGNKLTF

SEQ ID NO: 232364 - protein, 14 aa, Homo sapiens
  CDR3 for beta chain variable domain of TCR clone 116182 (TRBV10-3, TRBJ1-1)
CAISDTDRGVEAFF

SEQ ID NO: 232365 - protein, 13 aa, Homo sapiens
  CDR3 for alpha chain variable domain of TCR clone 116183 (TRAV20, TRAJ56)
CAVQAGANSKLTF

SEQ ID NO: 232366 - protein, 14 aa, Homo sapiens
  CDR3 for beta chain variable domain of TCR clone 116183 (TRBV28, TRBJ1-1)
CASSPRPRWAEAFF

SEQ ID NO: 232367 - protein, 15 aa, Homo sapiens
  CDR3 for alpha chain variable domain of TCR clone 116184 (TRAV21, TRAJ38)
CAVRQDAGNNRKLIW

SEQ ID NO: 232368 - protein, 16 aa, Homo sapiens
  CDR3 for beta chain variable domain of TCR clone 116184 (TRBV4-3, TRBJ1-1)
CASRPLDGGGDTEAFF

SEQ ID NO: 232369 - protein, 11 aa, Homo sapiens
  CDR3 for alpha chain variable domain of TCR clone 116185 (TRAV4, TRAJ31)
CLVGDNARLMF

SEQ ID NO: 232370 - protein, 11 aa, Homo sapiens
  CDR3 for beta chain variable domain of TCR clone 116185 (TRBV20-1, TRBJ2-7)
CSARTSYEQYF

SEQ ID NO: 232371 - protein, 14 aa, Homo sapiens
  CDR3 for alpha chain variable domain of TCR clone 116186 (TRAV12-2, TRAJ13)
CAVKKPGGYQKVTF

SEQ ID NO: 232372 - protein, 16 aa, Homo sapiens
  CDR3 for beta chain variable domain of TCR clone 116186 (TRBV2, TRBJ2-1)
CASRSPAGGKYNEQFF

SEQ ID NO: 232373 - protein, 15 aa, Homo sapiens
  CDR3 for alpha chain variable domain of TCR clone 116187 (TRAV26-1, TRAJ15)
CIVRAADQAGTALIF

SEQ ID NO: 232374 - protein, 15 aa, Homo sapiens
  CDR3 for beta chain variable domain of TCR clone 116187 (TRBV20-1, TRBJ1-1)
CSARSAATSNTEAFF

SEQ ID NO: 232375 - protein, 15 aa, Homo sapiens
  CDR3 for alpha chain variable domain of TCR clone 116188 (TRAV3, TRAJ32)
CAVSSYGGATNKLIF

SEQ ID NO: 232376 - protein, 13 aa, Homo sapiens
  CDR3 for beta chain variable domain of TCR clone 116188 (TRBV20-1, TRBJ2-7)
CSARPSTSYEQYF

SEQ ID NO: 232377 - protein, 14 aa, Homo sapiens
  CDR3 for alpha chain variable domain of TCR clone 116189 (TRAV2, TRAJ9)
CAVEDRCGGFKTIF

SEQ ID NO: 232378 - protein, 14 aa, Homo sapiens
  CDR3 for beta chain variable domain of TCR clone 116189 (TRBV3-1, TRBJ2-5)
CASSQGPDQETQYF

SEQ ID NO: 232379 - protein, 13 aa, Homo sapiens
  CDR3 for alpha chain variable domain of TCR clone 116190 (TRAV3, TRAJ21)
CAVREPDFNKFYF

SEQ ID NO: 232380 - protein, 17 aa, Homo sapiens
  CDR3 for beta chain variable domain of TCR clone 116190 (TRBV7-8, TRBJ2-6)
CASSAVTGGAGANVLTF

SEQ ID NO: 232381 - protein, 11 aa, Homo sapiens
  CDR3 for alpha chain variable domain of TCR clone 116191 (TRAV2, TRAJ33)
CAVDSNYQLIW

SEQ ID NO: 232382 - protein, 14 aa, Homo sapiens
  CDR3 for beta chain variable domain of TCR clone 116191 (TRBV7-8, TRBJ2-7)
CASSPRDRVYEQYF

SEQ ID NO: 232383 - protein, 16 aa, Homo sapiens
  CDR3 for alpha chain variable domain of TCR clone 116192 (TRAV12-3, TRAJ53)
CAMSPGSGGSNYKLTF

SEQ ID NO: 232384 - protein, 15 aa, Homo sapiens
  CDR3 for beta chain variable domain of TCR clone 116192 (TRBV27, TRBJ2-1)
CASSNGGGSSNEQSF

SEQ ID NO: 232385 - protein, 10 aa, Homo sapiens
  CDR3 for alpha chain variable domain of TCR clone 116193 (TRAV12-1, TRAJ37)
ARGNTGKLIF

SEQ ID NO: 232386 - protein, 14 aa, Homo sapiens
  CDR3 for beta chain variable domain of TCR clone 116193 (TRBV7-2, TRBJ1-1)
CASSFLTGTTEAFF

SEQ ID NO: 232387 - protein, 15 aa, Homo sapiens
  CDR3 for alpha chain variable domain of TCR clone 116194 (TRAV26-1, TRAJ56)
CIVRVATGANSKLTF

SEQ ID NO: 232388 - protein, 14 aa, Homo sapiens
  CDR3 for beta chain variable domain of TCR clone 116194 (TRBV19, TRBJ2-1)
CASPTFVLSGEQFF

SEQ ID NO: 232389 - protein, 18 aa, Homo sapiens
  CDR3 for alpha chain variable domain of TCR clone 116195 (TRAV12-3, TRAJ52)
CAMSVGGAGGTSYGKLTF

SEQ ID NO: 232390 - protein, 15 aa, Homo sapiens
  CDR3 for beta chain variable domain of TCR clone 116195 (TRBV27, TRBJ1-6)
CASSFDRGLGTPLHF

SEQ ID NO: 232391 - protein, 13 aa, Homo sapiens
  CDR3 for alpha chain variable domain of TCR clone 116196 (TRAV20, TRAJ21)
CAVEGYNFNKFHF

SEQ ID NO: 232392 - protein, 15 aa, Homo sapiens
  CDR3 for beta chain variable domain of TCR clone 116196 (TRBV7-2, TRBJ2-3)
CASSLAGAFIDTQYF

SEQ ID NO: 232393 - protein, 14 aa, Homo sapiens
  CDR3 for alpha chain variable domain of TCR clone 116197 (TRAV12-2, TRAJ44)
CAVNPAGTASKLPF

SEQ ID NO: 232394 - protein, 16 aa, Homo sapiens
  CDR3 for beta chain variable domain of TCR clone 116197 (TRBV2, TRBJ2-6)
CASSEVGGAGANVLTF

SEQ ID NO: 232395 - protein, 16 aa, Homo sapiens
  CDR3 for alpha chain variable domain of TCR clone 116198 (TRAV27, TRAJ13)
CAGAKSDSGGYQKVTF

SEQ ID NO: 232396 - protein, 13 aa, Homo sapiens
  CDR3 for beta chain variable domain of TCR clone 116198 (TRBV29-1, TRBJ1-1)
CSVESGFGTEAFF

SEQ ID NO: 232397 - protein, 12 aa, Homo sapiens
  CDR3 for alpha chain variable domain of TCR clone 116199 (TRAV3, TRAJ27)
CAVRDGAGKPTF

SEQ ID NO: 232398 - protein, 15 aa, Homo sapiens
  CDR3 for beta chain variable domain of TCR clone 116199 (TRBV13, TRBJ2-2)
CASGYRGRRTGEPFF

SEQ ID NO: 232399 - protein, 16 aa, Homo sapiens
  CDR3 for alpha chain variable domain of TCR clone 116200 (TRAV30, TRAJ24)
CGTEIVDADSWGKFQL

SEQ ID NO: 232400 - protein, 15 aa, Homo sapiens
  CDR3 for beta chain variable domain of TCR clone 116200 (TRBV4-1, TRBJ1-4)
CASSDTGGTNEKLFF

SEQ ID NO: 232401 - protein, 11 aa, Homo sapiens
  CDR3 for alpha chain variable domain of TCR clone 116201 (TRAV12-3, TRAJ27)
CAMANAGKTTF

SEQ ID NO: 232402 - protein, 12 aa, Homo sapiens
  CDR3 for beta chain variable domain of TCR clone 116201 (TRBV11-2, TRBJ2-2)
CASSLGGGELFF

SEQ ID NO: 232403 - protein, 12 aa, Homo sapiens
  CDR3 for alpha chain variable domain of TCR clone 116202 (TRAV13-1, TRAJ9)
CASHTGGFKTIF

SEQ ID NO: 232404 - protein, 18 aa, Homo sapiens
  CDR3 for beta chain variable domain of TCR clone 116202 (TRBV11-2, TRBJ2-3)
CASSLGWASRGAPNTQYF

SEQ ID NO: 232405 - protein, 14 aa, Homo sapiens
  CDR3 for alpha chain variable domain of TCR clone 116203 (TRAV26-1, TRAJ38)
CIADNAGNKRKLIW

SEQ ID NO: 232406 - protein, 14 aa, Homo sapiens
  CDR3 for beta chain variable domain of TCR clone 116203 (TRBV4-1, TRBJ2-2)
CASSQAVNTGELFF

SEQ ID NO: 232407 - protein, 12 aa, Homo sapiens
  CDR3 for alpha chain variable domain of TCR clone 116204 (TRAV8-3, TRAJ34)
WASGYNTDRLIF

SEQ ID NO: 232408 - protein, 13 aa, Homo sapiens
  CDR3 for beta chain variable domain of TCR clone 116204 (TRBV6-4, TRBJ2-3)
CASSVSWADTQYF

SEQ ID NO: 232409 - protein, 13 aa, Homo sapiens
  CDR3 for alpha chain variable domain of TCR clone 116205 (TRAV2, TRAJ23)
CAVMGNQGGKLIF

SEQ ID NO: 232410 - protein, 14 aa, Homo sapiens
  CDR3 for beta chain variable domain of TCR clone 116205 (TRBV11-2, TRBJ2-1)
CANSRATSYNEQFF

SEQ ID NO: 232411 - protein, 16 aa, Homo sapiens
  CDR3 for alpha chain variable domain of TCR clone 116206 (TRAV17, TRAJ53)
CATDALSGGSNCKLTF

SEQ ID NO: 232412 - protein, 15 aa, Homo sapiens
  CDR3 for beta chain variable domain of TCR clone 116206 (TRBV6-6, TRBJ2-7)
CASSYSYGGSYEQYF

SEQ ID NO: 232413 - protein, 15 aa, Homo sapiens
  CDR3 for alpha chain variable domain of TCR clone 116207 (TRAV12-2, TRAJ20)
CAVKGGFGAGTTVTV

SEQ ID NO: 232414 - protein, 13 aa, Homo sapiens
  CDR3 for beta chain variable domain of TCR clone 116207 (TRBV12-4, TRBJ2-7)
CAGSPGQLYEQYF

SEQ ID NO: 232415 - protein, 13 aa, Homo sapiens
  CDR3 for alpha chain variable domain of TCR clone 116208 (TRAV12-2, TRAJ20)
CAVYPSNDYKLSF

SEQ ID NO: 232416 - protein, 14 aa, Homo sapiens
  CDR3 for beta chain variable domain of TCR clone 116208 (TRBV15, TRBJ2-5)
CATSGDRGQETQYF

SEQ ID NO: 232417 - protein, 14 aa, Homo sapiens
  CDR3 for alpha chain variable domain of TCR clone 116209 (TRAV2, TRAJ9)
CAVEDRSGGFKTIF

SEQ ID NO: 232418 - protein, 12 aa, Homo sapiens
  CDR3 for beta chain variable domain of TCR clone 116209 (TRBV20-1, TRBJ2-7)
CSAGLKMGEQYF

SEQ ID NO: 232419 - protein, 12 aa, Homo sapiens
  CDR3 for alpha chain variable domain of TCR clone 116210 (TRAV3, TRAJ31)
CAVRDGNARLMF

SEQ ID NO: 232420 - protein, 18 aa, Homo sapiens
  CDR3 for beta chain variable domain of TCR clone 116210 (TRBV7-2, TRBJ2-3)
RASSLKREGSGITDTQYF

SEQ ID NO: 232421 - protein, 13 aa, Homo sapiens
  CDR3 for alpha chain variable domain of TCR clone 116211 (TRAV3, TRAJ27)
CAVRPLGAGKSTF

SEQ ID NO: 232422 - protein, 13 aa, Homo sapiens
  CDR3 for beta chain variable domain of TCR clone 116211 (TRBV7-9, TRBJ2-3)
CATSPGSTDTQYF

SEQ ID NO: 232423 - protein, 17 aa, Homo sapiens
  CDR3 for alpha chain variable domain of TCR clone 116212 (TRAV3, TRAJ6)
CAVRDGPRAGGRYIPTF

SEQ ID NO: 232424 - protein, 13 aa, Homo sapiens
  CDR3 for beta chain variable domain of TCR clone 116212 (TRBV19, TRBJ1-1)
CASSITGESEAFF

SEQ ID NO: 232425 - protein, 10 aa, Homo sapiens
  CDR3 for alpha chain variable domain of TCR clone 116213 (TRAV8-3, TRAJ43)
CAVALADMRF

SEQ ID NO: 232426 - protein, 14 aa, Homo sapiens
  CDR3 for beta chain variable domain of TCR clone 116213 (TRBV4-2, TRBJ2-1)
CASGLDRAYNEQSF

SEQ ID NO: 232427 - protein, 14 aa, Homo sapiens
  CDR3 for alpha chain variable domain of TCR clone 116214 (TRAV8-1, TRAJ24)
CAVNAADSWGKLQL

SEQ ID NO: 232428 - protein, 15 aa, Homo sapiens
  CDR3 for beta chain variable domain of TCR clone 116214 (TRBV20-1, TRBJ2-7)
CSARVPAAYFYEQYF

SEQ ID NO: 232429 - protein, 16 aa, Homo sapiens
  CDR3 for alpha chain variable domain of TCR clone 116215 (TRAV26-1, TRAJ33)
CIVPFWGEDSNYQLIW

SEQ ID NO: 232430 - protein, 20 aa, Homo sapiens
  CDR3 for beta chain variable domain of TCR clone 116215 (TRBV7-8, TRBJ2-1)
CASSLAHRLAGVRSYNEQFF

SEQ ID NO: 232431 - protein, 15 aa, Homo sapiens
  CDR3 for alpha chain variable domain of TCR clone 116216 (TRAV12-3, TRAJ11)
CAMSEENSGYSTLTF

SEQ ID NO: 232432 - protein, 20 aa, Homo sapiens
  CDR3 for beta chain variable domain of TCR clone 116216 (TRBV7-8, TRBJ2-2)
CAGSHLFPGPTIHITGELFF

SEQ ID NO: 232433 - protein, 14 aa, Homo sapiens
  CDR3 for alpha chain variable domain of TCR clone 116217 (TRAV35, TRAJ36)
CAGHRLTGANNLFF

SEQ ID NO: 232434 - protein, 15 aa, Homo sapiens
  CDR3 for beta chain variable domain of TCR clone 116217 (TRBV27, TRBJ2-1)
CASSNGGGSSNEQFF

SEQ ID NO: 232435 - protein, 13 aa, Homo sapiens
  CDR3 for alpha chain variable domain of TCR clone 116218 (TRAV29/DV5, TRAJ44)
CAASTGTASKLTF

SEQ ID NO: 232436 - protein, 16 aa, Homo sapiens
  CDR3 for beta chain variable domain of TCR clone 116218 (TRBV29-1, TRBJ2-6)
CSVEDITYSGANVLTF

SEQ ID NO: 232437 - protein, 15 aa, Homo sapiens
  CDR3 for alpha chain variable domain of TCR clone 116219 (TRAV3, TRAJ32)
CAVSSYGGATNKLIF

SEQ ID NO: 232438 - protein, 13 aa, Homo sapiens
  CDR3 for beta chain variable domain of TCR clone 116219 (TRBV20-1, TRBJ2-7)
CGARPSTNYEQYF

SEQ ID NO: 232439 - protein, 13 aa, Homo sapiens
  CDR3 for alpha chain variable domain of TCR clone 116220 (TRAV12-2, TRAJ11)
CAVPNSGYSTLTF

SEQ ID NO: 232440 - protein, 14 aa, Homo sapiens
  CDR3 for beta chain variable domain of TCR clone 116220 (TRBV4-1, TRBJ2-2)
CASSQAVNTGGLFF

SEQ ID NO: 232441 - protein, 13 aa, Homo sapiens
  CDR3 for alpha chain variable domain of TCR clone 116221 (TRAV4, TRAJ28)
CLFIWGWELPTHF

SEQ ID NO: 232442 - protein, 14 aa, Homo sapiens
  CDR3 for beta chain variable domain of TCR clone 116221 (TRBV7-9, TRBJ2-5)
CASRLDTAQETQYF

SEQ ID NO: 232443 - protein, 14 aa, Homo sapiens
  CDR3 for alpha chain variable domain of TCR clone 116222 (TRAV12-2, TRAJ53)
CAVKGAGSNYKLTF

SEQ ID NO: 232444 - protein, 14 aa, Homo sapiens
  CDR3 for beta chain variable domain of TCR clone 116222 (TRBV7-7, TRBJ2-2)
CATRQDSDTGELFF

SEQ ID NO: 232445 - protein, 16 aa, Homo sapiens
  CDR3 for alpha chain variable domain of TCR clone 116223 (TRAV14/DV4, TRAJ15)
CAMREGPAQSGTALIF

SEQ ID NO: 232446 - protein, 12 aa, Homo sapiens
  CDR3 for beta chain variable domain of TCR clone 116223 (TRBV28, TRBJ2-6)
CAIQAGANVLTF

SEQ ID NO: 232447 - protein, 17 aa, Homo sapiens
  CDR3 for alpha chain variable domain of TCR clone 116224 (TRAV3, TRAJ6)
CAVRDGPRAGGSYIPTF

SEQ ID NO: 232448 - protein, 16 aa, Homo sapiens
  CDR3 for beta chain variable domain of TCR clone 116224 (TRBV19, TRBJ2-7)
CASSLTGTSELGEQYF

SEQ ID NO: 232449 - protein, 12 aa, Homo sapiens
  CDR3 for alpha chain variable domain of TCR clone 116225 (TRAV21, TRAJ13)
PGPSGGYQKVTF

SEQ ID NO: 232450 - protein, 15 aa, Homo sapiens
  CDR3 for beta chain variable domain of TCR clone 116225 (TRBV7-9, TRBJ1-6)
CASSSPRRGNSPLHF

SEQ ID NO: 232451 - protein, 14 aa, Homo sapiens
  CDR3 for alpha chain variable domain of TCR clone 116226 (TRAV1-2, TRAJ15)
CAVRDRQAGTALIF

SEQ ID NO: 232452 - protein, 14 aa, Homo sapiens
  CDR3 for beta chain variable domain of TCR clone 116226 (TRBV7-2, TRBJ1-2)
CASSQTGSTYGYTF

SEQ ID NO: 232453 - protein, 13 aa, Homo sapiens
  CDR3 for alpha chain variable domain of TCR clone 116227 (TRAV12-3, TRAJ13)
CAMSSGGYQKVTF

SEQ ID NO: 232454 - protein, 14 aa, Homo sapiens
  CDR3 for beta chain variable domain of TCR clone 116227 (TRBV7-3, TRBJ1-1)
CASSLKGGNTEAFF

SEQ ID NO: 232455 - protein, 15 aa, Homo sapiens
  CDR3 for alpha chain variable domain of TCR clone 116228 (TRAV16, TRAJ16)
CALQGRGSDGQKLLF

SEQ ID NO: 232456 - protein, 15 aa, Homo sapiens
  CDR3 for beta chain variable domain of TCR clone 116228 (TRBV20-1, TRBJ2-7)
CSARDRVSGMDEQYF

SEQ ID NO: 232457 - protein, 16 aa, Homo sapiens
  CDR3 for alpha chain variable domain of TCR clone 116229 (TRAV14/DV4, TRAJ20)
CAMREGRSRDDYKLSF

SEQ ID NO: 232458 - protein, 13 aa, Homo sapiens
  CDR3 for beta chain variable domain of TCR clone 116229 (TRBV7-3, TRBJ1-1)
CASSQDWGAEAFF

SEQ ID NO: 232459 - protein, 14 aa, Homo sapiens
  CDR3 for alpha chain variable domain of TCR clone 116230 (TRAV12-1, TRAJ17)
CVVNYKASGNKLTF

SEQ ID NO: 232460 - protein, 17 aa, Homo sapiens
  CDR3 for beta chain variable domain of TCR clone 116230 (TRBV20-1, TRBJ2-1)
RSASSSGLAGSYNEQFF

SEQ ID NO: 232461 - protein, 15 aa, Homo sapiens
  CDR3 for alpha chain variable domain of TCR clone 116231 (TRAV8-1, TRAJ6)
CAVNAGAGGSYIPTF

SEQ ID NO: 232462 - protein, 14 aa, Homo sapiens
  CDR3 for beta chain variable domain of TCR clone 116231 (TRBV25-1, TRBJ1-6)
CASSLSADISPLHF

SEQ ID NO: 232463 - protein, 14 aa, Homo sapiens
  CDR3 for alpha chain variable domain of TCR clone 116232 (TRAV3, TRAJ16)
CCERLKSDGKKLLF

SEQ ID NO: 232464 - protein, 15 aa, Homo sapiens
  CDR3 for beta chain variable domain of TCR clone 116232 (TRBV28, TRBJ2-7)
CASSPGGRGFYEQYF

SEQ ID NO: 232465 - protein, 12 aa, Homo sapiens
  CDR3 for alpha chain variable domain of TCR clone 116233 (TRAV8-3, TRAJ26)
CAGDNYGQNFVF

SEQ ID NO: 232466 - protein, 14 aa, Homo sapiens
  CDR3 for beta chain variable domain of TCR clone 116233 (TRBV5-1, TRBJ2-7)
CASSRGESLYEQYF

SEQ ID NO: 232467 - protein, 14 aa, Homo sapiens
  CDR3 for alpha chain variable domain of TCR clone 116234 (TRAV1-2, TRAJ16)
FAVNRFSDGQKLLF

SEQ ID NO: 232468 - protein, 16 aa, Homo sapiens
  CDR3 for beta chain variable domain of TCR clone 116234 (TRBV11-2, TRBJ1-2)
CASSLDTGGADYGYTF

SEQ ID NO: 232469 - protein, 13 aa, Homo sapiens
  CDR3 for alpha chain variable domain of TCR clone 116235 (TRAV13-1, TRAJ37)
CAARSGNTGKPIF

SEQ ID NO: 232470 - protein, 14 aa, Homo sapiens
  CDR3 for beta chain variable domain of TCR clone 116235 (TRBV12-4, TRBJ2-3)
CASSLGQGTDTQYF

SEQ ID NO: 232471 - protein, 12 aa, Homo sapiens
  CDR3 for alpha chain variable domain of TCR clone 116236 (TRAV29/DV5, TRAJ49)
CAATDTGNQFYF

SEQ ID NO: 232472 - protein, 16 aa, Homo sapiens
  CDR3 for beta chain variable domain of TCR clone 116236 (TRBV20-1, TRBJ1-4)
CSAPGQGLLTNEKLFF

SEQ ID NO: 232473 - protein, 11 aa, Homo sapiens
  CDR3 for alpha chain variable domain of TCR clone 116237 (TRAV17, TRAJ31)
CATSNNARLMF

SEQ ID NO: 232474 - protein, 12 aa, Homo sapiens
  CDR3 for beta chain variable domain of TCR clone 116237 (TRBV11-2, TRBJ2-2)
CASSLGGGELFF

SEQ ID NO: 232475 - protein, 10 aa, Homo sapiens
  CDR3 for alpha chain variable domain of TCR clone 116238 (TRAV1-2, TRAJ31)
CVSEDARLMF

SEQ ID NO: 232476 - protein, 15 aa, Homo sapiens
  CDR3 for beta chain variable domain of TCR clone 116238 (TRBV6-6, TRBJ2-7)
CASSYSYGGSYEQYF

SEQ ID NO: 232477 - protein, 15 aa, Homo sapiens
  CDR3 for alpha chain variable domain of TCR clone 116239 (TRAV26-1, TRAJ29)
CIVRVEGSGNTPLVF

SEQ ID NO: 232478 - protein, 19 aa, Homo sapiens
  CDR3 for beta chain variable domain of TCR clone 116239 (TRBV28, TRBJ2-7)
CASSYSGTSRLGWVYEQYF

SEQ ID NO: 232479 - protein, 14 aa, Homo sapiens
  CDR3 for alpha chain variable domain of TCR clone 116240 (TRAV20, TRAJ42)
CAVQAGGSPRNLIF

SEQ ID NO: 232480 - protein, 14 aa, Homo sapiens
  CDR3 for beta chain variable domain of TCR clone 116240 (TRBV28, TRBJ1-2)
CASRIQGANYGYTF

SEQ ID NO: 232481 - protein, 17 aa, Homo sapiens
  CDR3 for alpha chain variable domain of TCR clone 116241 (TRAV36/DV7, TRAJ52)
CAVAQRAGGTSYGKMTF

SEQ ID NO: 232482 - protein, 17 aa, Homo sapiens
  CDR3 for beta chain variable domain of TCR clone 116241 (TRBV28, TRBJ2-5)
CASSTPEGDALQETQYF

SEQ ID NO: 232483 - protein, 14 aa, Homo sapiens
  CDR3 for alpha chain variable domain of TCR clone 116242 (TRAV26-1, TRAJ38)
CIADNAGNNRKLIW

SEQ ID NO: 232484 - protein, 13 aa, Homo sapiens
  CDR3 for beta chain variable domain of TCR clone 116242 (TRBV15, TRBJ1-6)
CATSGGLNSPLNF

SEQ ID NO: 232485 - protein, 11 aa, Homo sapiens
  CDR3 for alpha chain variable domain of TCR clone 116243 (TRAV1-1, TRAJ5)
CAVRVRRALIF

SEQ ID NO: 232486 - protein, 18 aa, Homo sapiens
  CDR3 for beta chain variable domain of TCR clone 116243 (TRBV12-4, TRBJ1-2)
CASSPNPGQAGPYYGYTF

SEQ ID NO: 232487 - protein, 15 aa, Homo sapiens
  CDR3 for alpha chain variable domain of TCR clone 116244 (TRAV17, TRAJ52)
CAAEAGGTSYGKLTF

SEQ ID NO: 232488 - protein, 14 aa, Homo sapiens
  CDR3 for beta chain variable domain of TCR clone 116244 (TRBV28, TRBJ1-5)
CASSLGVLVKPQHF

SEQ ID NO: 232489 - protein, 13 aa, Homo sapiens
  CDR3 for alpha chain variable domain of TCR clone 116245 (TRAV20, TRAJ3)
CARRYSSASKIIF

SEQ ID NO: 232490 - protein, 12 aa, Homo sapiens
  CDR3 for beta chain variable domain of TCR clone 116245 (TRBV28, TRBJ2-1)
CASSFRGNGQFF

SEQ ID NO: 232491 - protein, 17 aa, Homo sapiens
  CDR3 for alpha chain variable domain of TCR clone 116246 (TRAV13-1, TRAJ52)
CAAGRNAGGTSYRKLTF

SEQ ID NO: 232492 - protein, 15 aa, Homo sapiens
  CDR3 for beta chain variable domain of TCR clone 116246 (TRBV6-3, TRBJ2-7)
CASSSPGTVFYEQYF

SEQ ID NO: 232493 - protein, 14 aa, Homo sapiens
  CDR3 for alpha chain variable domain of TCR clone 116247 (TRAV9-2, TRAJ36)
CALPWRTGANNLSF

SEQ ID NO: 232494 - protein, 14 aa, Homo sapiens
  CDR3 for beta chain variable domain of TCR clone 116247 (TRBV2, TRBJ1-2)
CASSELQVNYGYTF

SEQ ID NO: 232495 - protein, 13 aa, Homo sapiens
  CDR3 for alpha chain variable domain of TCR clone 116248 (TRAV13-2, TRAJ48)
CAEMDFGNEKLTF

SEQ ID NO: 232496 - protein, 11 aa, Homo sapiens
  CDR3 for beta chain variable domain of TCR clone 116248 (TRBV29-1, TRBJ2-5)
CSEDRTGTQYF

SEQ ID NO: 232497 - protein, 15 aa, Homo sapiens
  CDR3 for alpha chain variable domain of TCR clone 116249 (TRAV8-4, TRAJ15)
CAVSDPVQAGTALIF

SEQ ID NO: 232498 - protein, 14 aa, Homo sapiens
  CDR3 for beta chain variable domain of TCR clone 116249 (TRBV7-2, TRBJ1-3)
CASSLSRSGNTMYF

SEQ ID NO: 232499 - protein, 12 aa, Homo sapiens
  CDR3 for alpha chain variable domain of TCR clone 116250 (TRAV21, TRAJ39)
CAADNAGNMLTF

SEQ ID NO: 232500 - protein, 12 aa, Homo sapiens
  CDR3 for beta chain variable domain of TCR clone 116250 (TRBV11-2, TRBJ2-2)
CASSLGGGELFF

SEQ ID NO: 232501 - protein, 14 aa, Homo sapiens
  CDR3 for alpha chain variable domain of TCR clone 116251 (TRAV13-1, TRAJ44)
CAAKATGTASKHTF

SEQ ID NO: 232502 - protein, 14 aa, Homo sapiens
  CDR3 for beta chain variable domain of TCR clone 116251 (TRBV9, TRBJ2-7)
CASSVGVGSYEQYF

SEQ ID NO: 232503 - protein, 12 aa, Homo sapiens
  CDR3 for alpha chain variable domain of TCR clone 116252 (TRAV29/DV5, TRAJ49)
CAATDTGNQFYF

SEQ ID NO: 232504 - protein, 19 aa, Homo sapiens
  CDR3 for beta chain variable domain of TCR clone 116252 (TRBV25-1, TRBJ2-2)
CAILVYRVDRGRKTGELFV

SEQ ID NO: 232505 - protein, 13 aa, Homo sapiens
  CDR3 for alpha chain variable domain of TCR clone 116253 (TRAV8-3, TRAJ48)
CAVVPFGNEKLTF

SEQ ID NO: 232506 - protein, 14 aa, Homo sapiens
  CDR3 for beta chain variable domain of TCR clone 116253 (TRBV12-4, TRBJ1-4)
CASRMTGRSEKLFF

SEQ ID NO: 232507 - protein, 14 aa, Homo sapiens
  CDR3 for alpha chain variable domain of TCR clone 116254 (TRAV9-2, TRAJ39)
CALYIYNAVNMLTF

SEQ ID NO: 232508 - protein, 15 aa, Homo sapiens
  CDR3 for beta chain variable domain of TCR clone 116254 (TRBV28, TRBJ1-3)
CASSMGWASGNTIYF

SEQ ID NO: 232509 - protein, 14 aa, Homo sapiens
  CDR3 for alpha chain variable domain of TCR clone 116255 (TRAV26-1, TRAJ38)
CIADNAGNNRKPIW

SEQ ID NO: 232510 - protein, 15 aa, Homo sapiens
  CDR3 for beta chain variable domain of TCR clone 116255 (TRBV7-2, TRBJ2-1)
CASSLVAGRYNEQFF

SEQ ID NO: 232511 - protein, 13 aa, Homo sapiens
  CDR3 for alpha chain variable domain of TCR clone 116256 (TRAV39, TRAJ49)
CAVDRNTGNQFSF

SEQ ID NO: 232512 - protein, 14 aa, Homo sapiens
  CDR3 for beta chain variable domain of TCR clone 116256 (TRBV4-1, TRBJ1-1)
CASSRSGQSFEAFF

SEQ ID NO: 232513 - protein, 13 aa, Homo sapiens
  CDR3 for alpha chain variable domain of TCR clone 116257 (TRAV17, TRAJ4)
CATKSGGYYKLIF

SEQ ID NO: 232514 - protein, 14 aa, Homo sapiens
  CDR3 for beta chain variable domain of TCR clone 116257 (TRBV20-1, TRBJ1-5)
CSARDDRGNQPQHF

SEQ ID NO: 232515 - protein, 16 aa, Homo sapiens
  CDR3 for alpha chain variable domain of TCR clone 116258 (TRAV25, TRAJ52)
CAGPRAGGTSYGKLTF

SEQ ID NO: 232516 - protein, 19 aa, Homo sapiens
  CDR3 for beta chain variable domain of TCR clone 116258 (TRBV7-2, TRBJ2-3)
CASSFLSRNWGGGTDTQYF

SEQ ID NO: 232517 - protein, 13 aa, Homo sapiens
  CDR3 for alpha chain variable domain of TCR clone 116259 (TRAV13-1, TRAJ43)
CAASKNNNNDMRF

SEQ ID NO: 232518 - protein, 12 aa, Homo sapiens
  CDR3 for beta chain variable domain of TCR clone 116259 (TRBV11-3, TRBJ2-3)
CASAFGGRSQYF

SEQ ID NO: 232519 - protein, 20 aa, Homo sapiens
  CDR3 for alpha chain variable domain of TCR clone 116260 (TRAV26-1, TRAJ42)
CCVLLHRQIYYGGSQGNLIF

SEQ ID NO: 232520 - protein, 16 aa, Homo sapiens
  CDR3 for beta chain variable domain of TCR clone 116260 (TRBV7-3, TRBJ2-2)
CASSLKRGTLSGELFF

SEQ ID NO: 232521 - protein, 14 aa, Homo sapiens
  CDR3 for alpha chain variable domain of TCR clone 116261 (TRAV1-2, TRAJ8)
CALREDTGFQKLVF

SEQ ID NO: 232522 - protein, 16 aa, Homo sapiens
  CDR3 for beta chain variable domain of TCR clone 116261 (TRBV7-3, TRBJ2-2)
CASSLKRGTLSGELFF

SEQ ID NO: 232523 - protein, 12 aa, Homo sapiens
  CDR3 for alpha chain variable domain of TCR clone 116262 (TRAV12-3, TRAJ17)
CAMTLTGNELTF

SEQ ID NO: 232524 - protein, 15 aa, Homo sapiens
  CDR3 for beta chain variable domain of TCR clone 116262 (TRBV20-1, TRBJ2-7)
CSARDRVYGMDEQYF

SEQ ID NO: 232525 - protein, 12 aa, Homo sapiens
  CDR3 for alpha chain variable domain of TCR clone 116263 (TRAV26-2, TRAJ21)
CILKGNFNKFYF

SEQ ID NO: 232526 - protein, 14 aa, Homo sapiens
  CDR3 for beta chain variable domain of TCR clone 116263 (TRBV7-8, TRBJ2-3)
CASSLEAGTDTQYF

SEQ ID NO: 232527 - protein, 14 aa, Homo sapiens
  CDR3 for alpha chain variable domain of TCR clone 116264 (TRAV12-2, TRAJ5)
CAVNRSPGRRALTF

SEQ ID NO: 232528 - protein, 12 aa, Homo sapiens
  CDR3 for beta chain variable domain of TCR clone 116264 (TRBV19, TRBJ1-5)
CASSIAQQPQHF

SEQ ID NO: 232529 - protein, 15 aa, Homo sapiens
  CDR3 for alpha chain variable domain of TCR clone 116265 (TRAV12-3, TRAJ49)
CAMAVTPNTGNQFYY

SEQ ID NO: 232530 - protein, 18 aa, Homo sapiens
  CDR3 for beta chain variable domain of TCR clone 116265 (TRBV4-1, TRBJ1-5)
CASSQDPRGQGLNQPQHF

SEQ ID NO: 232531 - protein, 19 aa, Homo sapiens
  CDR3 for alpha chain variable domain of TCR clone 116266 (TRAV23/DV6, TRAJ9)
CSKHRLKGAGHTGGFKTIL

SEQ ID NO: 232532 - protein, 15 aa, Homo sapiens
  CDR3 for beta chain variable domain of TCR clone 116266 (TRBV6-3, TRBJ2-1)
CASSYASDSYNEQFF

SEQ ID NO: 232533 - protein, 10 aa, Homo sapiens
  CDR3 for alpha chain variable domain of TCR clone 116267 (TRAV38-1, TRAJ34)
CAFMDDKLIF

SEQ ID NO: 232534 - protein, 15 aa, Homo sapiens
  CDR3 for beta chain variable domain of TCR clone 116267 (TRBV11-3, TRBJ2-3)
CASLKDGREGDTQYF

SEQ ID NO: 232535 - protein, 23 aa, Homo sapiens
  CDR3 for alpha chain variable domain of TCR clone 116268 (TRAV26-1, TRAJ38)
CIADNAGNNHIQNPDPAVYQLRD

SEQ ID NO: 232536 - protein, 12 aa, Homo sapiens
  CDR3 for beta chain variable domain of TCR clone 116268 (TRBV11-2, TRBJ2-2)
CAGSLGGGELFF

SEQ ID NO: 232537 - protein, 12 aa, Homo sapiens
  CDR3 for alpha chain variable domain of TCR clone 116269 (TRAV4, TRAJ21)
CLVGDNFNKFYF

SEQ ID NO: 232538 - protein, 16 aa, Homo sapiens
  CDR3 for beta chain variable domain of TCR clone 116269 (TRBV24-1, TRBJ2-3)
CATSDPGTGATDTQYF

SEQ ID NO: 232539 - protein, 14 aa, Homo sapiens
  CDR3 for alpha chain variable domain of TCR clone 116270 (TRAV14/DV4, TRAJ58)
CAMMKETSGARLTF

SEQ ID NO: 232540 - protein, 12 aa, Homo sapiens
  CDR3 for beta chain variable domain of TCR clone 116270 (TRBV12-4, TRBJ2-1)
CASTYVLNEQFF

SEQ ID NO: 232541 - protein, 13 aa, Homo sapiens
  CDR3 for alpha chain variable domain of TCR clone 116271 (TRAV2, TRAJ15)
CAVASQAGTALFF

SEQ ID NO: 232542 - protein, 16 aa, Homo sapiens
  CDR3 for beta chain variable domain of TCR clone 116271 (TRBV5-1, TRBJ1-1)
CASSSGGNSLNTEAFF

SEQ ID NO: 232543 - protein, 14 aa, Homo sapiens
  CDR3 for alpha chain variable domain of TCR clone 116272 (TRAV12-1, TRAJ34)
CVVNLDYNTDKLIF

SEQ ID NO: 232544 - protein, 13 aa, Homo sapiens
  CDR3 for beta chain variable domain of TCR clone 116272 (TRBV20-1, TRBJ2-5)
CSARGDYQETQYF

SEQ ID NO: 232545 - protein, 10 aa, Homo sapiens
  CDR3 for alpha chain variable domain of TCR clone 116273 (TRAV8-4, TRAJ43)
CAVSADDMRF

SEQ ID NO: 232546 - protein, 14 aa, Homo sapiens
  CDR3 for beta chain variable domain of TCR clone 116273 (TRBV7-8, TRBJ2-7)
CASSVGQGAYEQYF

SEQ ID NO: 232547 - protein, 14 aa, Homo sapiens
  CDR3 for alpha chain variable domain of TCR clone 116274 (TRAV26-1, TRAJ38)
CIADNAGNNRKLIW

SEQ ID NO: 232548 - protein, 16 aa, Homo sapiens
  CDR3 for beta chain variable domain of TCR clone 116274 (TRBV7-9, TRBJ2-3)
CQQPYCSGDLTDTQYF

SEQ ID NO: 232549 - protein, 17 aa, Homo sapiens
  CDR3 for alpha chain variable domain of TCR clone 116275 (TRAV3, TRAJ6)
CAVRDGPRAGGSYIPTF

SEQ ID NO: 232550 - protein, 16 aa, Homo sapiens
  CDR3 for beta chain variable domain of TCR clone 116275 (TRBV11-2, TRBJ2-3)
CASSSRTSGGAGTQYF

SEQ ID NO: 232551 - protein, 16 aa, Homo sapiens
  CDR3 for alpha chain variable domain of TCR clone 116276 (TRAV2, TRAJ26)
TTMLGPPGDYGQNFVF

SEQ ID NO: 232552 - protein, 16 aa, Homo sapiens
  CDR3 for beta chain variable domain of TCR clone 116276 (TRBV13, TRBJ2-2)
CASSPRTGEHTGELFF

SEQ ID NO: 232553 - protein, 17 aa, Homo sapiens
  CDR3 for alpha chain variable domain of TCR clone 116277 (TRAV13-1, TRAJ52)
GAAGRNAGGTSYGKLTF

SEQ ID NO: 232554 - protein, 13 aa, Homo sapiens
  CDR3 for beta chain variable domain of TCR clone 116277 (TRBV7-2, TRBJ1-1)
CASNLKGAKVAFF

SEQ ID NO: 232555 - protein, 14 aa, Homo sapiens
  CDR3 for alpha chain variable domain of TCR clone 116278 (TRAV1-2, TRAJ16)
CAVNRFSDGKKLLF

SEQ ID NO: 232556 - protein, 13 aa, Homo sapiens
  CDR3 for beta chain variable domain of TCR clone 116278 (TRBV19, TRBJ1-2)
CASSVPGQDGYTF

SEQ ID NO: 232557 - protein, 13 aa, Homo sapiens
  CDR3 for alpha chain variable domain of TCR clone 116279 (TRAV1-2, TRAJ9)
CAALNNGGFKTIF

SEQ ID NO: 232558 - protein, 13 aa, Homo sapiens
  CDR3 for beta chain variable domain of TCR clone 116279 (TRBV19, TRBJ1-2)
CASSVPGQDGYAF

SEQ ID NO: 232559 - protein, 12 aa, Homo sapiens
  CDR3 for alpha chain variable domain of TCR clone 116280 (TRAV13-1, TRAJ21)
CAAKEGFNKFYF

SEQ ID NO: 232560 - protein, 12 aa, Homo sapiens
  CDR3 for beta chain variable domain of TCR clone 116280 (TRBV2, TRBJ2-3)
CASSGRFDTQYF

SEQ ID NO: 232561 - protein, 11 aa, Homo sapiens
  CDR3 for alpha chain variable domain of TCR clone 116281 (TRAV2, TRAJ21)
CAVFNFNKFSF

SEQ ID NO: 232562 - protein, 14 aa, Homo sapiens
  CDR3 for beta chain variable domain of TCR clone 116281 (TRBV15, TRBJ2-3)
CATRSGTSTDTQYF

SEQ ID NO: 232563 - protein, 14 aa, Homo sapiens
  CDR3 for alpha chain variable domain of TCR clone 116282 (TRAV38-1, TRAJ29)
CAFITPSGNTLLVF

SEQ ID NO: 232564 - protein, 15 aa, Homo sapiens
  CDR3 for beta chain variable domain of TCR clone 116282 (TRBV5-1, TRBJ2-1)
CASSPPRAPYNEQFF

SEQ ID NO: 232565 - protein, 13 aa, Homo sapiens
  CDR3 for alpha chain variable domain of TCR clone 116283 (TRAV1-1, TRAJ31)
CASYLNNNARLMF

SEQ ID NO: 232566 - protein, 14 aa, Homo sapiens
  CDR3 for beta chain variable domain of TCR clone 116283 (TRBV4-1, TRBJ2-5)
CASSRSGSGETQYS

SEQ ID NO: 232567 - protein, 18 aa, Homo sapiens
  CDR3 for alpha chain variable domain of TCR clone 116284 (TRAV29/DV5, TRAJ52)
CAAGFRGAGGTSYGKLTF

SEQ ID NO: 232568 - protein, 16 aa, Homo sapiens
  CDR3 for beta chain variable domain of TCR clone 116284 (TRBV19, TRBJ2-1)
CASSKAGPSSYNEQFF

SEQ ID NO: 232569 - protein, 17 aa, Homo sapiens
  CDR3 for alpha chain variable domain of TCR clone 116285 (TRAV3, TRAJ13)
CAVRDMRMTGGYQKVTF

SEQ ID NO: 232570 - protein, 14 aa, Homo sapiens
  CDR3 for beta chain variable domain of TCR clone 116285 (TRBV5-1, TRBJ2-7)
CASSLTGSGYEQYF

SEQ ID NO: 232571 - protein, 15 aa, Homo sapiens
  CDR3 for alpha chain variable domain of TCR clone 116286 (TRAV21, TRAJ40)
CAVRPQTSGPYKYIF

SEQ ID NO: 232572 - protein, 13 aa, Homo sapiens
  CDR3 for beta chain variable domain of TCR clone 116286 (TRBV7-2, TRBJ2-2)
CASSSVRAGELFF

SEQ ID NO: 232573 - protein, 14 aa, Homo sapiens
  CDR3 for alpha chain variable domain of TCR clone 116287 (TRAV12-3, TRAJ10)
SHLPLTGGGNKLTF

SEQ ID NO: 232574 - protein, 12 aa, Homo sapiens
  CDR3 for beta chain variable domain of TCR clone 116287 (TRBV7-8, TRBJ2-7)
CASKLGDREQYF

SEQ ID NO: 232575 - protein, 13 aa, Homo sapiens
  CDR3 for alpha chain variable domain of TCR clone 116288 (TRAV13-2, TRAJ48)
CAEMDFGNEKLTF

SEQ ID NO: 232576 - protein, 13 aa, Homo sapiens
  CDR3 for beta chain variable domain of TCR clone 116288 (TRBV19, TRBJ1-2)
CASSVPGQDGYTF

SEQ ID NO: 232577 - protein, 14 aa, Homo sapiens
  CDR3 for alpha chain variable domain of TCR clone 116289 (TRAV12-3, TRAJ10)
SHLPLTGGGNKLTF

SEQ ID NO: 232578 - protein, 15 aa, Homo sapiens
  CDR3 for beta chain variable domain of TCR clone 116289 (TRBV20-1, TRBJ2-1)
CSARGIGGTYNEQFF

SEQ ID NO: 232579 - protein, 13 aa, Homo sapiens
  CDR3 for alpha chain variable domain of TCR clone 116290 (TRAV12-1, TRAJ33)
CGDAPDSNCQLIW

SEQ ID NO: 232580 - protein, 15 aa, Homo sapiens
  CDR3 for beta chain variable domain of TCR clone 116290 (TRBV27, TRBJ2-1)
CASSNGGGSSNEQFF

SEQ ID NO: 232581 - protein, 17 aa, Homo sapiens
  CDR3 for alpha chain variable domain of TCR clone 116291 (TRAV3, TRAJ6)
CAVRDGPRAGGSYIPTF

SEQ ID NO: 232582 - protein, 13 aa, Homo sapiens
  CDR3 for beta chain variable domain of TCR clone 116291 (TRBV28, TRBJ1-2)
CAGRDRGNYGYTF

SEQ ID NO: 232583 - protein, 15 aa, Homo sapiens
  CDR3 for alpha chain variable domain of TCR clone 116292 (TRAV17, TRAJ57)
CAMGPSQGGSEKLVF

SEQ ID NO: 232584 - protein, 14 aa, Homo sapiens
  CDR3 for beta chain variable domain of TCR clone 116292 (TRBV12-5, TRBJ2-5)
CASGSRTHQETQYF

SEQ ID NO: 232585 - protein, 13 aa, Homo sapiens
  CDR3 for alpha chain variable domain of TCR clone 116293 (TRAV23/DV6, TRAJ6)
CAAKTGGSYIPTF

SEQ ID NO: 232586 - protein, 15 aa, Homo sapiens
  CDR3 for beta chain variable domain of TCR clone 116293 (TRBV5-1, TRBJ1-2)
CASSSYGEFDYGDTF

SEQ ID NO: 232587 - protein, 14 aa, Homo sapiens
  CDR3 for alpha chain variable domain of TCR clone 116294 (TRAV12-2, TRAJ15)
CAPHTGQAGTALIF

SEQ ID NO: 232588 - protein, 16 aa, Homo sapiens
  CDR3 for beta chain variable domain of TCR clone 116294 (TRBV10-3, TRBJ2-1)
CAISGVGDGGGGEQFF

SEQ ID NO: 232589 - protein, 12 aa, Homo sapiens
  CDR3 for alpha chain variable domain of TCR clone 116295 (TRAV8-3, TRAJ27)
CAVGAEAGKSTF

SEQ ID NO: 232590 - protein, 14 aa, Homo sapiens
  CDR3 for beta chain variable domain of TCR clone 116295 (TRBV2, TRBJ2-1)
CASRLIMGHDEQFF

SEQ ID NO: 232591 - protein, 14 aa, Homo sapiens
  CDR3 for alpha chain variable domain of TCR clone 116296 (TRAV2, TRAJ29)
CAVTPPSGNTPLVF

SEQ ID NO: 232592 - protein, 14 aa, Homo sapiens
  CDR3 for beta chain variable domain of TCR clone 116296 (TRBV7-9, TRBJ2-3)
CASSLEDGTDTQYF

SEQ ID NO: 232593 - protein, 14 aa, Homo sapiens
  CDR3 for alpha chain variable domain of TCR clone 116297 (TRAV13-1, TRAJ9)
CAASALTGGFKNIF

SEQ ID NO: 232594 - protein, 16 aa, Homo sapiens
  CDR3 for beta chain variable domain of TCR clone 116297 (TRBV12-4, TRBJ2-3)
CASSFGTGGISDTQYF

SEQ ID NO: 232595 - protein, 14 aa, Homo sapiens
  CDR3 for alpha chain variable domain of TCR clone 116298 (TRAV12-2, TRAJ40)
CAVKIPSGTYKYIF

SEQ ID NO: 232596 - protein, 20 aa, Homo sapiens
  CDR3 for beta chain variable domain of TCR clone 116298 (TRBV28, TRBJ2-1)
CASTPIERSPGLAGGNEQFF

SEQ ID NO: 232597 - protein, 13 aa, Homo sapiens
  CDR3 for alpha chain variable domain of TCR clone 116299 (TRAV17, TRAJ26)
CATVDNYGQNFVF

SEQ ID NO: 232598 - protein, 16 aa, Homo sapiens
  CDR3 for beta chain variable domain of TCR clone 116299 (TRBV2, TRBJ2-1)
CANSVGVSPSYNEQFF

SEQ ID NO: 232599 - protein, 16 aa, Homo sapiens
  CDR3 for alpha chain variable domain of TCR clone 116300 (TRAV3, TRAJ37)
CAVRVRGSGNTGKLIF

SEQ ID NO: 232600 - protein, 15 aa, Homo sapiens
  CDR3 for beta chain variable domain of TCR clone 116300 (TRBV20-1, TRBJ2-7)
CSARDRVSGMDEQYF

SEQ ID NO: 232601 - protein, 16 aa, Homo sapiens
  CDR3 for alpha chain variable domain of TCR clone 116301 (TRAV20, TRAJ22)
CAVQASSSGSARQLTF

SEQ ID NO: 232602 - protein, 13 aa, Homo sapiens
  CDR3 for beta chain variable domain of TCR clone 116301 (TRBV7-2, TRBJ2-5)
CASSQPSVETQYF

SEQ ID NO: 232603 - protein, 18 aa, Homo sapiens
  CDR3 for alpha chain variable domain of TCR clone 116302 (TRAV21, TRAJ52)
CAVRPSPAGGTNYGKLTF

SEQ ID NO: 232604 - protein, 13 aa, Homo sapiens
  CDR3 for beta chain variable domain of TCR clone 116302 (TRBV7-3, TRBJ1-1)
CASSQDWGAEAFF

SEQ ID NO: 232605 - protein, 18 aa, Homo sapiens
  CDR3 for alpha chain variable domain of TCR clone 116303 (TRAV9-2, TRAJ52)
CALSDLNLGGTSYGTLTF

SEQ ID NO: 232606 - protein, 15 aa, Homo sapiens
  CDR3 for beta chain variable domain of TCR clone 116303 (TRBV6-5, TRBJ1-2)
CASSYLLQGGYGYTF

SEQ ID NO: 232607 - protein, 17 aa, Homo sapiens
  CDR3 for alpha chain variable domain of TCR clone 116304 (TRAV26-1, TRAJ53)
CIVRVDDSGGSNYKLTF

SEQ ID NO: 232608 - protein, 15 aa, Homo sapiens
  CDR3 for beta chain variable domain of TCR clone 116304 (TRBV19, TRBJ1-5)
CASSIVWADNQPQHF

SEQ ID NO: 232609 - protein, 14 aa, Homo sapiens
  CDR3 for alpha chain variable domain of TCR clone 116305 (TRAV12-3, TRAJ10)
SHLPLTGGGNKLTF

SEQ ID NO: 232610 - protein, 15 aa, Homo sapiens
  CDR3 for beta chain variable domain of TCR clone 116305 (TRBV7-9, TRBJ1-4)
CSSSRTGGFNEKLFF

SEQ ID NO: 232611 - protein, 14 aa, Homo sapiens
  CDR3 for alpha chain variable domain of TCR clone 116306 (TRAV16, TRAJ15)
CALSGPQAGTALIF

SEQ ID NO: 232612 - protein, 12 aa, Homo sapiens
  CDR3 for beta chain variable domain of TCR clone 116306 (TRBV18, TRBJ2-5)
CASSPSKDTQYF

SEQ ID NO: 232613 - protein, 13 aa, Homo sapiens
  CDR3 for alpha chain variable domain of TCR clone 116307 (TRAV2, TRAJ40)
CAVVTPGTYKYIF

SEQ ID NO: 232614 - protein, 15 aa, Homo sapiens
  CDR3 for beta chain variable domain of TCR clone 116307 (TRBV18, TRBJ2-1)
CASSPPSASYNEQFF

SEQ ID NO: 232615 - protein, 14 aa, Homo sapiens
  CDR3 for alpha chain variable domain of TCR clone 116308 (TRAV26-1, TRAJ48)
CIVRSWGGNEKLTF

SEQ ID NO: 232616 - protein, 14 aa, Homo sapiens
  CDR3 for beta chain variable domain of TCR clone 116308 (TRBV11-3, TRBJ1-1)
CASSADRDHAEAFF

SEQ ID NO: 232617 - protein, 16 aa, Homo sapiens
  CDR3 for alpha chain variable domain of TCR clone 116309 (TRAV26-1, TRAJ23)
CIVRPRFYNQGGKLIF

SEQ ID NO: 232618 - protein, 13 aa, Homo sapiens
  CDR3 for beta chain variable domain of TCR clone 116309 (TRBV20-1, TRBJ1-1)
CSARGGGNTEAFS

SEQ ID NO: 232619 - protein, 12 aa, Homo sapiens
  CDR3 for alpha chain variable domain of TCR clone 116310 (TRAV21, TRAJ49)
CAVSWTGNQFYF

SEQ ID NO: 232620 - protein, 18 aa, Homo sapiens
  CDR3 for beta chain variable domain of TCR clone 116310 (TRBV7-8, TRBJ2-1)
CASSPAEGLAGGRNEQFF

SEQ ID NO: 232621 - protein, 13 aa, Homo sapiens
  CDR3 for alpha chain variable domain of TCR clone 116311 (TRAV12-3, TRAJ33)
CAMSVNSNYQLIW

SEQ ID NO: 232622 - protein, 15 aa, Homo sapiens
  CDR3 for beta chain variable domain of TCR clone 116311 (TRBV29-1, TRBJ2-6)
CSVGDRGSGANVLTF

SEQ ID NO: 232623 - protein, 12 aa, Homo sapiens
  CDR3 for alpha chain variable domain of TCR clone 116312 (TRAV21, TRAJ33)
CAKMDSNYQLIW

SEQ ID NO: 232624 - protein, 12 aa, Homo sapiens
  CDR3 for beta chain variable domain of TCR clone 116312 (TRBV28, TRBJ2-3)
CASSLYRDTQYF

SEQ ID NO: 232625 - protein, 14 aa, Homo sapiens
  CDR3 for alpha chain variable domain of TCR clone 116313 (TRAV3, TRAJ21)
CAVESQANFNNFYF

SEQ ID NO: 232626 - protein, 12 aa, Homo sapiens
  CDR3 for beta chain variable domain of TCR clone 116313 (TRBV6-3, TRBJ2-7)
CASSLTPYEQYF

SEQ ID NO: 232627 - protein, 10 aa, Homo sapiens
  CDR3 for alpha chain variable domain of TCR clone 116314 (TRAV26-1, TRAJ10)
CIVSFRGLTG

SEQ ID NO: 232628 - protein, 13 aa, Homo sapiens
  CDR3 for beta chain variable domain of TCR clone 116314 (TRBV20-1, TRBJ2-3)
CSASRQAADTQYF

SEQ ID NO: 232629 - protein, 11 aa, Homo sapiens
  CDR3 for alpha chain variable domain of TCR clone 116315 (TRAV38-1, TRAJ43)
CAFMKHNGGRH

SEQ ID NO: 232630 - protein, 11 aa, Homo sapiens
  CDR3 for beta chain variable domain of TCR clone 116315 (TRBV7-9, TRBJ2-3)
CASSYTDTQYF

SEQ ID NO: 232631 - protein, 10 aa, Homo sapiens
  CDR3 for alpha chain variable domain of TCR clone 116316 (TRAV8-3, TRAJ43)
CAVALADMRF

SEQ ID NO: 232632 - protein, 12 aa, Homo sapiens
  CDR3 for beta chain variable domain of TCR clone 116316 (TRBV7-9, TRBJ2-7)
CATRTDAYEQYF

SEQ ID NO: 232633 - protein, 14 aa, Homo sapiens
  CDR3 for alpha chain variable domain of TCR clone 116317 (TRAV13-1, TRAJ44)
CAAKATGTASKLTF

SEQ ID NO: 232634 - protein, 17 aa, Homo sapiens
  CDR3 for beta chain variable domain of TCR clone 116317 (TRBV7-3, TRBJ2-3)
CASSLMKSMRGADTQYF

SEQ ID NO: 232635 - protein, 14 aa, Homo sapiens
  CDR3 for alpha chain variable domain of TCR clone 116318 (TRAV1-2, TRAJ8)
CAVREDTGFQKLVF

SEQ ID NO: 232636 - protein, 14 aa, Homo sapiens
  CDR3 for beta chain variable domain of TCR clone 116318 (TRBV19, TRBJ2-1)
CASSRLASINEQFF

SEQ ID NO: 232637 - protein, 13 aa, Homo sapiens
  CDR3 for alpha chain variable domain of TCR clone 116319 (TRAV8-3, TRAJ6)
FAVGSGGSYIPTF

SEQ ID NO: 232638 - protein, 14 aa, Homo sapiens
  CDR3 for beta chain variable domain of TCR clone 116319 (TRBV11-2, TRBJ1-1)
CASSTQRGRTEAFF

SEQ ID NO: 232639 - protein, 15 aa, Homo sapiens
  CDR3 for alpha chain variable domain of TCR clone 116320 (TRAV3, TRAJ22)
CAVRDRGGSARQLTF

SEQ ID NO: 232640 - protein, 13 aa, Homo sapiens
  CDR3 for beta chain variable domain of TCR clone 116320 (TRBV20-1, TRBJ1-1)
CSARVGGNTEAFL

SEQ ID NO: 232641 - protein, 14 aa, Homo sapiens
  CDR3 for alpha chain variable domain of TCR clone 116321 (TRAV1-2, TRAJ16)
CDVNRFSDGQKLLF

SEQ ID NO: 232642 - protein, 14 aa, Homo sapiens
  CDR3 for beta chain variable domain of TCR clone 116321 (TRBV12-4, TRBJ1-1)
CASSLGTGGTEAFF

SEQ ID NO: 232643 - protein, 14 aa, Homo sapiens
  CDR3 for alpha chain variable domain of TCR clone 116322 (TRAV38-1, TRAJ29)
CAFITPSGNIPLVF

SEQ ID NO: 232644 - protein, 15 aa, Homo sapiens
  CDR3 for beta chain variable domain of TCR clone 116322 (TRBV5-1, TRBJ2-1)
CASSPPRAPYNEQFF

SEQ ID NO: 232645 - protein, 12 aa, Homo sapiens
  CDR3 for alpha chain variable domain of TCR clone 116323 (TRAV13-1, TRAJ9)
CASHTGGFKTIF

SEQ ID NO: 232646 - protein, 18 aa, Homo sapiens
  CDR3 for beta chain variable domain of TCR clone 116323 (TRBV11-3, TRBJ2-3)
CASSLGGASRGAPNTQYF

SEQ ID NO: 232647 - protein, 15 aa, Homo sapiens
  CDR3 for alpha chain variable domain of TCR clone 116324 (TRAV17, TRAJ28)
CATVDSGAGSYQLTF

SEQ ID NO: 232648 - protein, 13 aa, Homo sapiens
  CDR3 for beta chain variable domain of TCR clone 116324 (TRBV12-4, TRBJ2-7)
CASSPTETYEQYF

SEQ ID NO: 232649 - protein, 11 aa, Homo sapiens
  CDR3 for alpha chain variable domain of TCR clone 116325 (TRAV2, TRAJ33)
CAVDSNYQLIC

SEQ ID NO: 232650 - protein, 15 aa, Homo sapiens
  CDR3 for beta chain variable domain of TCR clone 116325 (TRBV19, TRBJ1-1)
CASTSGQIQNTEAFF

SEQ ID NO: 232651 - protein, 13 aa, Homo sapiens
  CDR3 for alpha chain variable domain of TCR clone 116326 (TRAV17, TRAJ5)
CATMDTGRRALTF

SEQ ID NO: 232652 - protein, 15 aa, Homo sapiens
  CDR3 for beta chain variable domain of TCR clone 116326 (TRBV20-1, TRBJ2-5)
CSATRTSGGLETQYF

SEQ ID NO: 232653 - protein, 17 aa, Homo sapiens
  CDR3 for alpha chain variable domain of TCR clone 116327 (TRAV12-2, TRAJ4)
CAVNVRPVSGGYNKLIF

SEQ ID NO: 232654 - protein, 13 aa, Homo sapiens
  CDR3 for beta chain variable domain of TCR clone 116327 (TRBV4-2, TRBJ1-1)
CASSQAGNTEAFF

SEQ ID NO: 232655 - protein, 14 aa, Homo sapiens
  CDR3 for alpha chain variable domain of TCR clone 116328 (TRAV12-3, TRAJ57)
CAMSAWGGSEKLVF

SEQ ID NO: 232656 - protein, 14 aa, Homo sapiens
  CDR3 for beta chain variable domain of TCR clone 116328 (TRBV27, TRBJ2-2)
CASRPGVNTGELFF

SEQ ID NO: 232657 - protein, 14 aa, Homo sapiens
  CDR3 for alpha chain variable domain of TCR clone 116329 (TRAV16, TRAJ33)
CVLSAMDSNYQLIW

SEQ ID NO: 232658 - protein, 15 aa, Homo sapiens
  CDR3 for beta chain variable domain of TCR clone 116329 (TRBV28, TRBJ2-7)
CASSLEAYPIYEQYF

SEQ ID NO: 232659 - protein, 14 aa, Homo sapiens
  CDR3 for alpha chain variable domain of TCR clone 116330 (TRAV2, TRAJ9)
CAVEDRSVGFKTIF

SEQ ID NO: 232660 - protein, 13 aa, Homo sapiens
  CDR3 for beta chain variable domain of TCR clone 116330 (TRBV7-3, TRBJ2-5)
CASSFRGGETQYF

SEQ ID NO: 232661 - protein, 14 aa, Homo sapiens
  CDR3 for alpha chain variable domain of TCR clone 116331 (TRAV17, TRAJ15)
CATDRGQAGTALIF

SEQ ID NO: 232662 - protein, 17 aa, Homo sapiens
  CDR3 for beta chain variable domain of TCR clone 116331 (TRBV29-1, TRBJ2-1)
CSVVGLAGAYFYNEQFF

SEQ ID NO: 232663 - protein, 16 aa, Homo sapiens
  CDR3 for alpha chain variable domain of TCR clone 116332 (TRAV3, TRAJ3)
CAVRDRAKSSASKIIF

SEQ ID NO: 232664 - protein, 13 aa, Homo sapiens
  CDR3 for beta chain variable domain of TCR clone 116332 (TRBV10-3, TRBJ2-7)
CAAKLAVNYEQYF

SEQ ID NO: 232665 - protein, 11 aa, Homo sapiens
  CDR3 for alpha chain variable domain of TCR clone 116333 (TRAV4, TRAJ23)
CLVAPGGKLIF

SEQ ID NO: 232666 - protein, 17 aa, Homo sapiens
  CDR3 for beta chain variable domain of TCR clone 116333 (TRBV13, TRBJ2-3)
CASSLSRVAGGRNTQYF

SEQ ID NO: 232667 - protein, 14 aa, Homo sapiens
  CDR3 for alpha chain variable domain of TCR clone 116334 (TRAV21, TRAJ32)
CAVWDGGATNKLIF

SEQ ID NO: 232668 - protein, 15 aa, Homo sapiens
  CDR3 for beta chain variable domain of TCR clone 116334 (TRBV20-1, TRBJ2-7)
CSARDRVSGMDEQYF

SEQ ID NO: 232669 - protein, 13 aa, Homo sapiens
  CDR3 for alpha chain variable domain of TCR clone 116335 (TRAV17, TRAJ5)
CATGDTGRRALTF

SEQ ID NO: 232670 - protein, 13 aa, Homo sapiens
  CDR3 for beta chain variable domain of TCR clone 116335 (TRBV19, TRBJ1-5)
CASSIEPVQHQHF

SEQ ID NO: 232671 - protein, 13 aa, Homo sapiens
  CDR3 for alpha chain variable domain of TCR clone 116336 (TRAV8-3, TRAJ37)
CAVGSGNTGKLVF

SEQ ID NO: 232672 - protein, 11 aa, Homo sapiens
  CDR3 for beta chain variable domain of TCR clone 116336 (TRBV29-1, TRBJ1-1)
CSIQQNTEAFF

SEQ ID NO: 232673 - protein, 18 aa, Homo sapiens
  CDR3 for alpha chain variable domain of TCR clone 116337 (TRAV13-1, TRAJ52)
CAAKNPNAGGTSYGKLTF

SEQ ID NO: 232674 - protein, 15 aa, Homo sapiens
  CDR3 for beta chain variable domain of TCR clone 116337 (TRBV6-1, TRBJ2-3)
CTSSERGGITDTQYF

SEQ ID NO: 232675 - protein, 15 aa, Homo sapiens
  CDR3 for alpha chain variable domain of TCR clone 116338 (TRAV12-3, TRAJ17)
CAMSPSLAAGNKLTF

SEQ ID NO: 232676 - protein, 14 aa, Homo sapiens
  CDR3 for beta chain variable domain of TCR clone 116338 (TRBV7-2, TRBJ2-7)
CASSPKTSFYEQYF

SEQ ID NO: 232677 - protein, 20 aa, Homo sapiens
  CDR3 for alpha chain variable domain of TCR clone 116339 (TRAV1-1, TRAJ4)
CLLLLHCEGFLSGGYNKLIF

SEQ ID NO: 232678 - protein, 16 aa, Homo sapiens
  CDR3 for beta chain variable domain of TCR clone 116339 (TRBV28, TRBJ1-4)
CASSPPYRGRSEKLFF

SEQ ID NO: 232679 - protein, 14 aa, Homo sapiens
  CDR3 for alpha chain variable domain of TCR clone 116340 (TRAV26-1, TRAJ38)
CSADNAGNNRKLIW

SEQ ID NO: 232680 - protein, 15 aa, Homo sapiens
  CDR3 for beta chain variable domain of TCR clone 116340 (TRBV7-6, TRBJ1-4)
CASSLGAGAGEKLFF

SEQ ID NO: 232681 - protein, 13 aa, Homo sapiens
  CDR3 for alpha chain variable domain of TCR clone 116341 (TRAV29/DV5, TRAJ31)
CAASRNNNARLMF

SEQ ID NO: 232682 - protein, 13 aa, Homo sapiens
  CDR3 for beta chain variable domain of TCR clone 116341 (TRBV7-2, TRBJ2-4)
CASSREHANNQYF

SEQ ID NO: 232683 - protein, 18 aa, Homo sapiens
  CDR3 for alpha chain variable domain of TCR clone 116342 (TRAV26-1, TRAJ52)
CIVGVEGAGGTSYGKLTF

SEQ ID NO: 232684 - protein, 13 aa, Homo sapiens
  CDR3 for beta chain variable domain of TCR clone 116342 (TRBV7-3, TRBJ1-2)
CASSLKRGYGYTF

SEQ ID NO: 232685 - protein, 13 aa, Homo sapiens
  CDR3 for alpha chain variable domain of TCR clone 116343 (TRAV2, TRAJ40)
CAVVTSGTYKYIF

SEQ ID NO: 232686 - protein, 14 aa, Homo sapiens
  CDR3 for beta chain variable domain of TCR clone 116343 (TRBV7-9, TRBJ1-6)
CASSVMTDYSPLHF

SEQ ID NO: 232687 - protein, 15 aa, Homo sapiens
  CDR3 for alpha chain variable domain of TCR clone 116344 (TRAV27, TRAJ38)
CAGRFNAGNNRKLIW

SEQ ID NO: 232688 - protein, 20 aa, Homo sapiens
  CDR3 for beta chain variable domain of TCR clone 116344 (TRBV7-8, TRBJ2-2)
CASSHLFPGPTIHITGELFF

SEQ ID NO: 232689 - protein, 13 aa, Homo sapiens
  CDR3 for alpha chain variable domain of TCR clone 116345 (TRAV12-1, TRAJ11)
CVVTRGGYSTLTF

SEQ ID NO: 232690 - protein, 13 aa, Homo sapiens
  CDR3 for beta chain variable domain of TCR clone 116345 (TRBV20-1, TRBJ1-2)
CSARDQGAYGDTF

SEQ ID NO: 232691 - protein, 15 aa, Homo sapiens
  CDR3 for alpha chain variable domain of TCR clone 116346 (TRAV8-3, TRAJ44)
CAVGAGAGTASKLTF

SEQ ID NO: 232692 - protein, 12 aa, Homo sapiens
  CDR3 for beta chain variable domain of TCR clone 116346 (TRBV7-8, TRBJ2-4)
CASSSGGNIQYF

SEQ ID NO: 232693 - protein, 12 aa, Homo sapiens
  CDR3 for alpha chain variable domain of TCR clone 116347 (TRAV13-1, TRAJ42)
VNYGGSQGNLIF

SEQ ID NO: 232694 - protein, 15 aa, Homo sapiens
  CDR3 for beta chain variable domain of TCR clone 116347 (TRBV20-1, TRBJ2-1)
CSASAAGSSYNEQFF

SEQ ID NO: 232695 - protein, 15 aa, Homo sapiens
  CDR3 for alpha chain variable domain of TCR clone 116348 (TRAV8-4, TRAJ6)
CAGSAPSGGSYIPTF

SEQ ID NO: 232696 - protein, 15 aa, Homo sapiens
  CDR3 for beta chain variable domain of TCR clone 116348 (TRBV2, TRBJ2-1)
CASSEARSAYNEQFF

SEQ ID NO: 232697 - protein, 13 aa, Homo sapiens
  CDR3 for alpha chain variable domain of TCR clone 116349 (TRAV2, TRAJ29)
CAAGNAGNTPLVF

SEQ ID NO: 232698 - protein, 16 aa, Homo sapiens
  CDR3 for beta chain variable domain of TCR clone 116349 (TRBV7-9, TRBJ1-2)
CASSPGGGAINYGYTF

SEQ ID NO: 232699 - protein, 11 aa, Homo sapiens
  CDR3 for alpha chain variable domain of TCR clone 116350 (TRAV2, TRAJ33)
CAVDSNYQLIW

SEQ ID NO: 232700 - protein, 13 aa, Homo sapiens
  CDR3 for beta chain variable domain of TCR clone 116350 (TRBV7-3, TRBJ2-5)
CASSFRGGETQYF

SEQ ID NO: 232701 - protein, 19 aa, Homo sapiens
  CDR3 for alpha chain variable domain of TCR clone 116351 (TRAV26-1, TRAJ22)
CCVLLHRGVFSGSARQLTF

SEQ ID NO: 232702 - protein, 19 aa, Homo sapiens
  CDR3 for beta chain variable domain of TCR clone 116351 (TRBV19, TRBJ2-5)
CASSIGQVTDFFLGETQYF

SEQ ID NO: 232703 - protein, 12 aa, Homo sapiens
  CDR3 for alpha chain variable domain of TCR clone 116352 (TRAV21, TRAJ33)
CAKMDSNYQLIW

SEQ ID NO: 232704 - protein, 14 aa, Homo sapiens
  CDR3 for beta chain variable domain of TCR clone 116352 (TRBV5-4, TRBJ1-3)
CASSSQSAGNTIYF

SEQ ID NO: 232705 - protein, 15 aa, Homo sapiens
  CDR3 for alpha chain variable domain of TCR clone 116353 (TRAV1-2, TRAJ8)
CAVRDRNTGFQKLVF

SEQ ID NO: 232706 - protein, 16 aa, Homo sapiens
  CDR3 for beta chain variable domain of TCR clone 116353 (TRBV12-4, TRBJ1-5)
CASSRPVGGSNQPQHF

SEQ ID NO: 232707 - protein, 14 aa, Homo sapiens
  CDR3 for alpha chain variable domain of TCR clone 116354 (TRAV29/DV5, TRAJ48)
CAAMALFGNEKLTF

SEQ ID NO: 232708 - protein, 17 aa, Homo sapiens
  CDR3 for beta chain variable domain of TCR clone 116354 (TRBV13, TRBJ2-3)
CASSLSRVAGGRNTQYF

SEQ ID NO: 232709 - protein, 13 aa, Homo sapiens
  CDR3 for alpha chain variable domain of TCR clone 116355 (TRAV21, TRAJ57)
CAVTQGGSEKLVF

SEQ ID NO: 232710 - protein, 16 aa, Homo sapiens
  CDR3 for beta chain variable domain of TCR clone 116355 (TRBV5-1, TRBJ1-1)
CASSSGGNSLNTEAFF

SEQ ID NO: 232711 - protein, 12 aa, Homo sapiens
  CDR3 for alpha chain variable domain of TCR clone 116356 (TRAV3, TRAJ20)
CAVRDPDYKLSF

SEQ ID NO: 232712 - protein, 15 aa, Homo sapiens
  CDR3 for beta chain variable domain of TCR clone 116356 (TRBV2, TRBJ2-2)
CASSSETVGTGELFF

SEQ ID NO: 232713 - protein, 13 aa, Homo sapiens
  CDR3 for alpha chain variable domain of TCR clone 116357 (TRAV13-1, TRAJ39)
CSKYSNAGNMLTF

SEQ ID NO: 232714 - protein, 16 aa, Homo sapiens
  CDR3 for beta chain variable domain of TCR clone 116357 (TRBV7-2, TRBJ2-3)
CDSSLVALYSTDTQYF

SEQ ID NO: 232715 - protein, 13 aa, Homo sapiens
  CDR3 for alpha chain variable domain of TCR clone 116358 (TRAV12-3, TRAJ54)
CAMTLQGAQKLVF

SEQ ID NO: 232716 - protein, 14 aa, Homo sapiens
  CDR3 for beta chain variable domain of TCR clone 116358 (TRBV4-1, TRBJ2-2)
CASSQAANTGELFF

SEQ ID NO: 232717 - protein, 18 aa, Homo sapiens
  CDR3 for alpha chain variable domain of TCR clone 116359 (TRAV12-3, TRAJ52)
CAMSVGGAGGTSYGKLTF

SEQ ID NO: 232718 - protein, 18 aa, Homo sapiens
  CDR3 for beta chain variable domain of TCR clone 116359 (TRBV11-2, TRBJ1-3)
CASTPRVTTLGSGNTIYF

SEQ ID NO: 232719 - protein, 11 aa, Homo sapiens
  CDR3 for alpha chain variable domain of TCR clone 116360 (TRAV12-3, TRAJ49)
CAANTGNQFYF

SEQ ID NO: 232720 - protein, 15 aa, Homo sapiens
  CDR3 for beta chain variable domain of TCR clone 116360 (TRBV11-2, TRBJ2-1)
CAISLGTSGLNEQFF

SEQ ID NO: 232721 - protein, 17 aa, Homo sapiens
  CDR3 for alpha chain variable domain of TCR clone 116361 (TRAV2, TRAJ28)
CAGLQVYSGAGSYQLTF

SEQ ID NO: 232722 - protein, 15 aa, Homo sapiens
  CDR3 for beta chain variable domain of TCR clone 116361 (TRBV2, TRBJ1-2)
CASSEIGGANYGYTF

SEQ ID NO: 232723 - protein, 14 aa, Homo sapiens
  CDR3 for alpha chain variable domain of TCR clone 116362 (TRAV26-1, TRAJ48)
CIVSSNFGNEKLTF

SEQ ID NO: 232724 - protein, 14 aa, Homo sapiens
  CDR3 for beta chain variable domain of TCR clone 116362 (TRBV4-3, TRBJ1-5)
CASSQGGQGWPQHF

SEQ ID NO: 232725 - protein, 17 aa, Homo sapiens
  CDR3 for alpha chain variable domain of TCR clone 116363 (TRAV3, TRAJ12)
CAVRDGGRMDSSYKLIF

SEQ ID NO: 232726 - protein, 14 aa, Homo sapiens
  CDR3 for beta chain variable domain of TCR clone 116363 (TRBV19, TRBJ2-1)
CASPTFVLSGEQFF

SEQ ID NO: 232727 - protein, 11 aa, Homo sapiens
  CDR3 for alpha chain variable domain of TCR clone 116364 (TRAV2, TRAJ13)
CASGGYQKVTF

SEQ ID NO: 232728 - protein, 15 aa, Homo sapiens
  CDR3 for beta chain variable domain of TCR clone 116364 (TRBV11-2, TRBJ2-1)
CASSLGPDSYNEQFF

SEQ ID NO: 232729 - protein, 11 aa, Homo sapiens
  CDR3 for alpha chain variable domain of TCR clone 116365 (TRAV2, TRAJ21)
CAVFNFNKFYF

SEQ ID NO: 232730 - protein, 14 aa, Homo sapiens
  CDR3 for beta chain variable domain of TCR clone 116365 (TRBV15, TRBJ2-3)
CATSSGISTDTQYF

SEQ ID NO: 232731 - protein, 13 aa, Homo sapiens
  CDR3 for alpha chain variable domain of TCR clone 116366 (TRAV13-1, TRAJ9)
CAASGTGGSKTIF

SEQ ID NO: 232732 - protein, 13 aa, Homo sapiens
  CDR3 for beta chain variable domain of TCR clone 116366 (TRBV12-4, TRBJ2-7)
CASSLERVREQYF

SEQ ID NO: 232733 - protein, 14 aa, Homo sapiens
  CDR3 for alpha chain variable domain of TCR clone 116367 (TRAV12-1, TRAJ22)
CVVTTSGSARQLTF

SEQ ID NO: 232734 - protein, 13 aa, Homo sapiens
  CDR3 for beta chain variable domain of TCR clone 116367 (TRBV19, TRBJ2-7)
CASSPRQSYEQYF

SEQ ID NO: 232735 - protein, 13 aa, Homo sapiens
  CDR3 for alpha chain variable domain of TCR clone 116368 (TRAV12-1, TRAJ3)
CVVNPRGASKIIF

SEQ ID NO: 232736 - protein, 13 aa, Homo sapiens
  CDR3 for beta chain variable domain of TCR clone 116368 (TRBV28, TRBJ1-5)
CASSDRGNQHQHF

SEQ ID NO: 232737 - protein, 14 aa, Homo sapiens
  CDR3 for alpha chain variable domain of TCR clone 116369 (TRAV12-3, TRAJ54)
CAMRGIQGAQKLVF

SEQ ID NO: 232738 - protein, 15 aa, Homo sapiens
  CDR3 for beta chain variable domain of TCR clone 116369 (TRBV10-3, TRBJ2-2)
CAISEGDRAAGELFF

SEQ ID NO: 232739 - protein, 11 aa, Homo sapiens
  CDR3 for alpha chain variable domain of TCR clone 116370 (TRAV13-1, TRAJ20)
CAASNDYKLSF

SEQ ID NO: 232740 - protein, 15 aa, Homo sapiens
  CDR3 for beta chain variable domain of TCR clone 116370 (TRBV6-5, TRBJ2-1)
CASSYDAGAGNEQFF

SEQ ID NO: 232741 - protein, 17 aa, Homo sapiens
  CDR3 for alpha chain variable domain of TCR clone 116371 (TRAV26-1, TRAJ37)
CIVRVITVSSNTGKLIF

SEQ ID NO: 232742 - protein, 14 aa, Homo sapiens
  CDR3 for beta chain variable domain of TCR clone 116371 (TRBV19, TRBJ2-1)
CASTTFVLSGEQFF

SEQ ID NO: 232743 - protein, 14 aa, Homo sapiens
  CDR3 for alpha chain variable domain of TCR clone 116372 (TRAV1-2, TRAJ8)
CAVREDTGFQKLEV

SEQ ID NO: 232744 - protein, 15 aa, Homo sapiens
  CDR3 for beta chain variable domain of TCR clone 116372 (TRBV6-3, TRBJ2-7)
CASSSPGTVFYEQYF

SEQ ID NO: 232745 - protein, 13 aa, Homo sapiens
  CDR3 for alpha chain variable domain of TCR clone 116373 (TRAV3, TRAJ29)
CAVRDIIDIPLVF

SEQ ID NO: 232746 - protein, 14 aa, Homo sapiens
  CDR3 for beta chain variable domain of TCR clone 116373 (TRBV27, TRBJ2-1)
CASSATGGYNEQFF

SEQ ID NO: 232747 - protein, 16 aa, Homo sapiens
  CDR3 for alpha chain variable domain of TCR clone 116374 (TRAV3, TRAJ37)
CAVRGKGSGNTGKLIF

SEQ ID NO: 232748 - protein, 14 aa, Homo sapiens
  CDR3 for beta chain variable domain of TCR clone 116374 (TRBV20-1, TRBJ2-3)
CSDRGGTSTDTQYF

SEQ ID NO: 232749 - protein, 14 aa, Homo sapiens
  CDR3 for alpha chain variable domain of TCR clone 116375 (TRAV13-1, TRAJ45)
CAAIGGGGADGLTF

SEQ ID NO: 232750 - protein, 13 aa, Homo sapiens
  CDR3 for beta chain variable domain of TCR clone 116375 (TRBV7-3, TRBJ2-1)
CASSLDSYNEQFF

SEQ ID NO: 232751 - protein, 15 aa, Homo sapiens
  CDR3 for alpha chain variable domain of TCR clone 116376 (TRAV8-1, TRAJ6)
CAVNAGAGGSYIPTF

SEQ ID NO: 232752 - protein, 16 aa, Homo sapiens
  CDR3 for beta chain variable domain of TCR clone 116376 (TRBV19, TRBJ2-7)
CASSLTGTSELGEQYF

SEQ ID NO: 232753 - protein, 14 aa, Homo sapiens
  CDR3 for alpha chain variable domain of TCR clone 116377 (TRAV29/DV5, TRAJ36)
CAARRKTGANNLFF

SEQ ID NO: 232754 - protein, 15 aa, Homo sapiens
  CDR3 for beta chain variable domain of TCR clone 116377 (TRBV5-1, TRBJ2-7)
CASSLNGGPAREQYF

SEQ ID NO: 232755 - protein, 13 aa, Homo sapiens
  CDR3 for alpha chain variable domain of TCR clone 116378 (TRAV27, TRAJ39)
CAGVNNAGNMLTC

SEQ ID NO: 232756 - protein, 19 aa, Homo sapiens
  CDR3 for beta chain variable domain of TCR clone 116378 (TRBV5-1, TRBJ2-3)
CASSLWLAGGITTTDTQYF

SEQ ID NO: 232757 - protein, 16 aa, Homo sapiens
  CDR3 for alpha chain variable domain of TCR clone 116379 (TRAV21, TRAJ33)
CAVSPASMDSNYQLIW

SEQ ID NO: 232758 - protein, 10 aa, Homo sapiens
  CDR3 for beta chain variable domain of TCR clone 116379 (TRBV2, TRBJ1-4)
CASSKRELTQ

SEQ ID NO: 232759 - protein, 15 aa, Homo sapiens
  CDR3 for alpha chain variable domain of TCR clone 116380 (TRAV38-1, TRAJ30)
CAFMMSYGGDDKIVF

SEQ ID NO: 232760 - protein, 16 aa, Homo sapiens
  CDR3 for beta chain variable domain of TCR clone 116380 (TRBV7-9, TRBJ2-7)
CASSFGLAGPSYEQYF

SEQ ID NO: 232761 - protein, 12 aa, Homo sapiens
  CDR3 for alpha chain variable domain of TCR clone 116381 (TRAV17, TRAJ20)
CATQSNDYKLSF

SEQ ID NO: 232762 - protein, 13 aa, Homo sapiens
  CDR3 for beta chain variable domain of TCR clone 116381 (TRBV10-3, TRBJ1-1)
CASIPEGGTEAFF

SEQ ID NO: 232763 - protein, 14 aa, Homo sapiens
  CDR3 for alpha chain variable domain of TCR clone 116382 (TRAV12-2, TRAJ17)
CAVNIKAASNKLTF

SEQ ID NO: 232764 - protein, 16 aa, Homo sapiens
  CDR3 for beta chain variable domain of TCR clone 116382 (TRBV20-1, TRBJ2-6)
CSASSQGYDGANVLTF

SEQ ID NO: 232765 - protein, 13 aa, Homo sapiens
  CDR3 for alpha chain variable domain of TCR clone 116383 (TRAV8-1, TRAJ30)
CAVIMNRDDKIIF

SEQ ID NO: 232766 - protein, 14 aa, Homo sapiens
  CDR3 for beta chain variable domain of TCR clone 116383 (TRBV7-2, TRBJ1-6)
CAGSLQGANSPLHF

SEQ ID NO: 232767 - protein, 16 aa, Homo sapiens
  CDR3 for alpha chain variable domain of TCR clone 116384 (TRAV8-1, TRAJ42)
CAVTSRYVGSQGNLIF

SEQ ID NO: 232768 - protein, 12 aa, Homo sapiens
  CDR3 for beta chain variable domain of TCR clone 116384 (TRBV6-3, TRBJ2-7)
CASSLGRRGLYF

SEQ ID NO: 232769 - protein, 16 aa, Homo sapiens
  CDR3 for alpha chain variable domain of TCR clone 116385 (TRAV3, TRAJ37)
CAVRGKGSGNTGKLIF

SEQ ID NO: 232770 - protein, 16 aa, Homo sapiens
  CDR3 for beta chain variable domain of TCR clone 116385 (TRBV12-5, TRBJ2-5)
CASGPRTSGSQETQFF

SEQ ID NO: 232771 - protein, 17 aa, Homo sapiens
  CDR3 for alpha chain variable domain of TCR clone 116386 (TRAV3, TRAJ42)
CAVRDRDYGGSQGNLIF

SEQ ID NO: 232772 - protein, 12 aa, Homo sapiens
  CDR3 for beta chain variable domain of TCR clone 116386 (TRBV20-1, TRBJ2-3)
CSADGAGDTQYF

SEQ ID NO: 232773 - protein, 12 aa, Homo sapiens
  CDR3 for alpha chain variable domain of TCR clone 116387 (TRAV13-2, TRAJ31)
CAEGYNNARLMF

SEQ ID NO: 232774 - protein, 13 aa, Homo sapiens
  CDR3 for beta chain variable domain of TCR clone 116387 (TRBV24-1, TRBJ1-3)
CATMADSGNTIYF

SEQ ID NO: 232775 - protein, 13 aa, Homo sapiens
  CDR3 for alpha chain variable domain of TCR clone 116388 (TRAV3, TRAJ21)
CAVRETDFNKFYF

SEQ ID NO: 232776 - protein, 13 aa, Homo sapiens
  CDR3 for beta chain variable domain of TCR clone 116388 (TRBV12-4, TRBJ1-2)
CASSYRVNYGYTF

SEQ ID NO: 232777 - protein, 14 aa, Homo sapiens
  CDR3 for alpha chain variable domain of TCR clone 116389 (TRAV13-1, TRAJ35)
CAASKGGFGNVLHC

SEQ ID NO: 232778 - protein, 16 aa, Homo sapiens
  CDR3 for beta chain variable domain of TCR clone 116389 (TRBV2, TRBJ2-3)
CQHRGAPRRWADTQYF

SEQ ID NO: 232779 - protein, 16 aa, Homo sapiens
  CDR3 for alpha chain variable domain of TCR clone 116390 (TRAV12-3, TRAJ53)
CAMSPGSGGSNYKLTF

SEQ ID NO: 232780 - protein, 15 aa, Homo sapiens
  CDR3 for beta chain variable domain of TCR clone 116390 (TRBV20-1, TRBJ2-7)
CIARDRVSGMDEQYF

SEQ ID NO: 232781 - protein, 14 aa, Homo sapiens
  CDR3 for alpha chain variable domain of TCR clone 116391 (TRAV2, TRAJ37)
CAVDFTSNTGKLIF

SEQ ID NO: 232782 - protein, 14 aa, Homo sapiens
  CDR3 for beta chain variable domain of TCR clone 116391 (TRBV20-1, TRBJ2-5)
CSARDGRAGETQYF

SEQ ID NO: 232783 - protein, 14 aa, Homo sapiens
  CDR3 for alpha chain variable domain of TCR clone 116392 (TRAV13-1, TRAJ15)
CAPGGNQAGTALIF

SEQ ID NO: 232784 - protein, 14 aa, Homo sapiens
  CDR3 for beta chain variable domain of TCR clone 116392 (TRBV7-9, TRBJ2-1)
CASSPRDSLYEQFF

SEQ ID NO: 232785 - protein, 13 aa, Homo sapiens
  CDR3 for alpha chain variable domain of TCR clone 116393 (TRAV8-4, TRAJ10)
CSAFTGGGNKPTF

SEQ ID NO: 232786 - protein, 15 aa, Homo sapiens
  CDR3 for beta chain variable domain of TCR clone 116393 (TRBV2, TRBJ2-3)
CASSDFEKATDTQYF

SEQ ID NO: 232787 - protein, 16 aa, Homo sapiens
  CDR3 for alpha chain variable domain of TCR clone 116394 (TRAV17, TRAJ53)
CSTDALSGGSNYKLTF

SEQ ID NO: 232788 - protein, 12 aa, Homo sapiens
  CDR3 for beta chain variable domain of TCR clone 116394 (TRBV5-1, TRBJ2-7)
CASSFRGYEQYF

SEQ ID NO: 232789 - protein, 17 aa, Homo sapiens
  CDR3 for alpha chain variable domain of TCR clone 116395 (TRAV3, TRAJ6)
CAVRDGPRAGGSYIPTF

SEQ ID NO: 232790 - protein, 14 aa, Homo sapiens
  CDR3 for beta chain variable domain of TCR clone 116395 (TRBV11-2, TRBJ1-5)
CASSLDRGRQPQHF

SEQ ID NO: 232791 - protein, 11 aa, Homo sapiens
  CDR3 for alpha chain variable domain of TCR clone 116396 (TRAV12-1, TRAJ30)
CVVSGQDKIIF

SEQ ID NO: 232792 - protein, 14 aa, Homo sapiens
  CDR3 for beta chain variable domain of TCR clone 116396 (TRBV28, TRBJ2-5)
CASSLGDRAETQYF

SEQ ID NO: 232793 - protein, 12 aa, Homo sapiens
  CDR3 for alpha chain variable domain of TCR clone 116397 (TRAV12-3, TRAJ17)
CAMTLTGNKLTF

SEQ ID NO: 232794 - protein, 13 aa, Homo sapiens
  CDR3 for beta chain variable domain of TCR clone 116397 (TRBV29-1, TRBJ2-2)
CSVEGQNTGELFF

SEQ ID NO: 232795 - protein, 12 aa, Homo sapiens
  CDR3 for alpha chain variable domain of TCR clone 116398 (TRAV21, TRAJ58)
CAAETSGSRLTF

SEQ ID NO: 232796 - protein, 15 aa, Homo sapiens
  CDR3 for beta chain variable domain of TCR clone 116398 (TRBV20-1, TRBJ2-7)
CSARDPVKGEGEQYL

SEQ ID NO: 232797 - protein, 14 aa, Homo sapiens
  CDR3 for alpha chain variable domain of TCR clone 116399 (TRAV12-2, TRAJ40)
CAVKIPSGTYKSIF

SEQ ID NO: 232798 - protein, 15 aa, Homo sapiens
  CDR3 for beta chain variable domain of TCR clone 116399 (TRBV20-1, TRBJ1-4)
CSARREWGVNEKLFF

SEQ ID NO: 232799 - protein, 12 aa, Homo sapiens
  CDR3 for alpha chain variable domain of TCR clone 116400 (TRAV3, TRAJ43)
CAVRDPNNDMRF

SEQ ID NO: 232800 - protein, 15 aa, Homo sapiens
  CDR3 for beta chain variable domain of TCR clone 116400 (TRBV27, TRBJ1-5)
CASSIGTGFDQPQHF

SEQ ID NO: 232801 - protein, 17 aa, Homo sapiens
  CDR3 for alpha chain variable domain of TCR clone 116401 (TRAV3, TRAJ6)
CAVRDGPRAGGSYIPTF

SEQ ID NO: 232802 - protein, 14 aa, Homo sapiens
  CDR3 for beta chain variable domain of TCR clone 116401 (TRBV13, TRBJ2-5)
CASSLGPRGETQYF

SEQ ID NO: 232803 - protein, 12 aa, Homo sapiens
  CDR3 for alpha chain variable domain of TCR clone 116402 (TRAV13-2, TRAJ23)
CAERHRGGKLIF

SEQ ID NO: 232804 - protein, 12 aa, Homo sapiens
  CDR3 for beta chain variable domain of TCR clone 116402 (TRBV6-3, TRBJ2-3)
CASGDWTDTQYF

SEQ ID NO: 232805 - protein, 13 aa, Homo sapiens
  CDR3 for alpha chain variable domain of TCR clone 116403 (TRAV13-1, TRAJ6)
CARGSGGSYIPAF

SEQ ID NO: 232806 - protein, 15 aa, Homo sapiens
  CDR3 for beta chain variable domain of TCR clone 116403 (TRBV7-2, TRBJ2-1)
CASTHGTGIYNEQFF

SEQ ID NO: 232807 - protein, 15 aa, Homo sapiens
  CDR3 for alpha chain variable domain of TCR clone 116404 (TRAV17, TRAJ57)
CATGPSQGGSEKLVF

SEQ ID NO: 232808 - protein, 15 aa, Homo sapiens
  CDR3 for beta chain variable domain of TCR clone 116404 (TRBV6-1, TRBJ2-3)
CASSERGGITDTQYF

SEQ ID NO: 232809 - protein, 16 aa, Homo sapiens
  CDR3 for alpha chain variable domain of TCR clone 116405 (TRAV8-3, TRAJ10)
CAVGPILTGGGNKLTF

SEQ ID NO: 232810 - protein, 16 aa, Homo sapiens
  CDR3 for beta chain variable domain of TCR clone 116405 (TRBV7-2, TRBJ2-5)
CASSSKWLSGQDTQYF

SEQ ID NO: 232811 - protein, 13 aa, Homo sapiens
  CDR3 for alpha chain variable domain of TCR clone 116406 (TRAV20, TRAJ20)
CAVQAGSGYKLSF

SEQ ID NO: 232812 - protein, 12 aa, Homo sapiens
  CDR3 for beta chain variable domain of TCR clone 116406 (TRBV18, TRBJ1-4)
CASSPSREKLFF

SEQ ID NO: 232813 - protein, 17 aa, Homo sapiens
  CDR3 for alpha chain variable domain of TCR clone 116407 (TRAV3, TRAJ6)
CAVRDGPRTGGSYIPTF

SEQ ID NO: 232814 - protein, 13 aa, Homo sapiens
  CDR3 for beta chain variable domain of TCR clone 116407 (TRBV4-1, TRBJ2-2)
CASSQENTGELFF

SEQ ID NO: 232815 - protein, 23 aa, Homo sapiens
  CDR3 for alpha chain variable domain of TCR clone 116408 (TRAV8-3, )
CAVVTTRIPDIQNPDPAVYQLRD

SEQ ID NO: 232816 - protein, 17 aa, Homo sapiens
  CDR3 for beta chain variable domain of TCR clone 116408 (TRBV7-9, TRBJ2-6)
CASSFGAGYSGANVLTF

SEQ ID NO: 232817 - protein, 15 aa, Homo sapiens
  CDR3 for alpha chain variable domain of TCR clone 116409 (TRAV23/DV6, TRAJ4)
CAASPLRGGYNKLIF

SEQ ID NO: 232818 - protein, 15 aa, Homo sapiens
  CDR3 for beta chain variable domain of TCR clone 116409 (TRBV7-9, TRBJ1-6)
CASSSPGRGNSPLLF

SEQ ID NO: 232819 - protein, 14 aa, Homo sapiens
  CDR3 for alpha chain variable domain of TCR clone 116410 (TRAV41, TRAJ22)
CCSLPSGSARQLTF

SEQ ID NO: 232820 - protein, 13 aa, Homo sapiens
  CDR3 for beta chain variable domain of TCR clone 116410 (TRBV10-3, TRBJ2-7)
CASKLAVNYEQYF

SEQ ID NO: 232821 - protein, 13 aa, Homo sapiens
  CDR3 for alpha chain variable domain of TCR clone 116411 (TRAV21, TRAJ27)
CAAPNTNAGKSTF

SEQ ID NO: 232822 - protein, 14 aa, Homo sapiens
  CDR3 for beta chain variable domain of TCR clone 116411 (TRBV27, TRBJ1-1)
CASSLLSGLSEAFF

SEQ ID NO: 232823 - protein, 13 aa, Homo sapiens
  CDR3 for alpha chain variable domain of TCR clone 116412 (TRAV3, TRAJ21)
CAVREPDFNKFSF

SEQ ID NO: 232824 - protein, 18 aa, Homo sapiens
  CDR3 for beta chain variable domain of TCR clone 116412 (TRBV11-2, TRBJ2-3)
CASSLGGASRGAPNTQYF

SEQ ID NO: 232825 - protein, 18 aa, Homo sapiens
  CDR3 for alpha chain variable domain of TCR clone 116413 (TRAV12-3, TRAJ52)
CAMSRTNAGGTSYGKLTF

SEQ ID NO: 232826 - protein, 16 aa, Homo sapiens
  CDR3 for beta chain variable domain of TCR clone 116413 (TRBV9, TRBJ2-2)
CASSAMGKGNTGELFF

SEQ ID NO: 232827 - protein, 14 aa, Homo sapiens
  CDR3 for alpha chain variable domain of TCR clone 116414 (TRAV2, TRAJ37)
CAVDFTSNTGKRIF

SEQ ID NO: 232828 - protein, 13 aa, Homo sapiens
  CDR3 for beta chain variable domain of TCR clone 116414 (TRBV20-1, TRBJ1-1)
CSAPLGGGTEAFF

SEQ ID NO: 232829 - protein, 13 aa, Homo sapiens
  CDR3 for alpha chain variable domain of TCR clone 116415 (TRAV35, TRAJ57)
CAGSQCGSEKLVF

SEQ ID NO: 232830 - protein, 15 aa, Homo sapiens
  CDR3 for beta chain variable domain of TCR clone 116415 (TRBV20-1, TRBJ2-7)
CSARDRVSGMDEQYF

SEQ ID NO: 232831 - protein, 15 aa, Homo sapiens
  CDR3 for alpha chain variable domain of TCR clone 116416 (TRAV3, TRAJ5)
CAVRDLDTGRRALTF

SEQ ID NO: 232832 - protein, 14 aa, Homo sapiens
  CDR3 for beta chain variable domain of TCR clone 116416 (TRBV5-1, TRBJ2-3)
CASSRGQGGGTQYF

SEQ ID NO: 232833 - protein, 15 aa, Homo sapiens
  CDR3 for alpha chain variable domain of TCR clone 116417 (TRAV12-1, TRAJ44)
CVVYTPQGTASKLTF

SEQ ID NO: 232834 - protein, 13 aa, Homo sapiens
  CDR3 for beta chain variable domain of TCR clone 116417 (TRBV27, TRBJ2-1)
CASSSGSYNEQFF

SEQ ID NO: 232835 - protein, 18 aa, Homo sapiens
  CDR3 for alpha chain variable domain of TCR clone 116418 (TRAV12-3, TRAJ52)
CAMSVGGAGGTSYGKLTF

SEQ ID NO: 232836 - protein, 20 aa, Homo sapiens
  CDR3 for beta chain variable domain of TCR clone 116418 (TRBV28, TRBJ2-1)
CASTPIGRSPGLAGGNEQFF

SEQ ID NO: 232837 - protein, 14 aa, Homo sapiens
  CDR3 for alpha chain variable domain of TCR clone 116419 (TRAV8-1, TRAJ5)
CAVRTDTGRRALTF

SEQ ID NO: 232838 - protein, 12 aa, Homo sapiens
  CDR3 for beta chain variable domain of TCR clone 116419 (TRBV11-2, TRBJ2-1)
CASSPGNNGQFF

SEQ ID NO: 232839 - protein, 18 aa, Homo sapiens
  CDR3 for alpha chain variable domain of TCR clone 116420 (TRAV12-2, )
CAVEDIQNPDPAVYQLRD

SEQ ID NO: 232840 - protein, 23 aa, Homo sapiens
  CDR3 for beta chain variable domain of TCR clone 116420 (TRBV11-3, TRBJ2-7)
LGARPCISVPAAKGLAGAWEQYF

SEQ ID NO: 232841 - protein, 18 aa, Homo sapiens
  CDR3 for alpha chain variable domain of TCR clone 116421 (TRAV26-1, TRAJ52)
CIVRVGRAGGTSYGKLTF

SEQ ID NO: 232842 - protein, 13 aa, Homo sapiens
  CDR3 for beta chain variable domain of TCR clone 116421 (TRBV7-3, TRBJ1-2)
CASSLKRGYGYTF

SEQ ID NO: 232843 - protein, 14 aa, Homo sapiens
  CDR3 for alpha chain variable domain of TCR clone 116422 (TRAV1-2, TRAJ16)
CAANRFSDGQKLLF

SEQ ID NO: 232844 - protein, 19 aa, Homo sapiens
  CDR3 for beta chain variable domain of TCR clone 116422 (TRBV6-3, TRBJ1-2)
CASSYSKGRTGPPNYGYTF

SEQ ID NO: 232845 - protein, 14 aa, Homo sapiens
  CDR3 for alpha chain variable domain of TCR clone 116423 (TRAV8-1, TRAJ13)
CAVKSSGGYQKVTF

SEQ ID NO: 232846 - protein, 15 aa, Homo sapiens
  CDR3 for beta chain variable domain of TCR clone 116423 (TRBV20-1, TRBJ2-7)
CSARDRVSGMDEQYF

SEQ ID NO: 232847 - protein, 14 aa, Homo sapiens
  CDR3 for alpha chain variable domain of TCR clone 116424 (TRAV26-1, TRAJ40)
CIVRLLSGTYKYIF

SEQ ID NO: 232848 - protein, 13 aa, Homo sapiens
  CDR3 for beta chain variable domain of TCR clone 116424 (TRBV4-1, TRBJ1-1)
CASSRKMNTEAFF

SEQ ID NO: 232849 - protein, 13 aa, Homo sapiens
  CDR3 for alpha chain variable domain of TCR clone 116425 (TRAV27, TRAJ49)
CAPRPYTVNQFYF

SEQ ID NO: 232850 - protein, 16 aa, Homo sapiens
  CDR3 for beta chain variable domain of TCR clone 116425 (TRBV4-1, TRBJ1-2)
CASSHDAGQVLYGYTF

SEQ ID NO: 232851 - protein, 11 aa, Homo sapiens
  CDR3 for alpha chain variable domain of TCR clone 116426 (TRAV1-1, TRAJ23)
CAVRQGGKLIF

SEQ ID NO: 232852 - protein, 13 aa, Homo sapiens
  CDR3 for beta chain variable domain of TCR clone 116426 (TRBV7-8, TRBJ2-2)
CASSIYFPGRLSI

SEQ ID NO: 232853 - protein, 14 aa, Homo sapiens
  CDR3 for alpha chain variable domain of TCR clone 116427 (TRAV17, TRAJ22)
CATSPSGSARQLTF

SEQ ID NO: 232854 - protein, 15 aa, Homo sapiens
  CDR3 for beta chain variable domain of TCR clone 116427 (TRBV4-1, TRBJ2-5)
CASSQWDQYQETQYF

SEQ ID NO: 232855 - protein, 13 aa, Homo sapiens
  CDR3 for alpha chain variable domain of TCR clone 116428 (TRAV12-2, TRAJ20)
CAVYPSNDYKLSF

SEQ ID NO: 232856 - protein, 15 aa, Homo sapiens
  CDR3 for beta chain variable domain of TCR clone 116428 (TRBV7-2, TRBJ2-1)
CASTHGTGIYNEQFF

SEQ ID NO: 232857 - protein, 15 aa, Homo sapiens
  CDR3 for alpha chain variable domain of TCR clone 116429 (TRAV3, TRAJ22)
CAVRDRGGFARQLTF

SEQ ID NO: 232858 - protein, 13 aa, Homo sapiens
  CDR3 for beta chain variable domain of TCR clone 116429 (TRBV2, TRBJ1-5)
CATAGPGNQPQHF

SEQ ID NO: 232859 - protein, 14 aa, Homo sapiens
  CDR3 for alpha chain variable domain of TCR clone 116430 (TRAV3, TRAJ36)
CAVRDGTGANDLFF

SEQ ID NO: 232860 - protein, 16 aa, Homo sapiens
  CDR3 for beta chain variable domain of TCR clone 116430 (TRBV7-3, TRBJ2-5)
CASIQPGGSVQETQYF

SEQ ID NO: 232861 - protein, 14 aa, Homo sapiens
  CDR3 for alpha chain variable domain of TCR clone 116431 (TRAV2, TRAJ9)
CAVEDRSGGFKTIF

SEQ ID NO: 232862 - protein, 14 aa, Homo sapiens
  CDR3 for beta chain variable domain of TCR clone 116431 (TRBV11-2, TRBJ1-2)
CASSLYRGNYGYTF

SEQ ID NO: 232863 - protein, 10 aa, Homo sapiens
  CDR3 for alpha chain variable domain of TCR clone 116432 (TRAV23/DV6, TRAJ45)
TGGGADGLTF

SEQ ID NO: 232864 - protein, 14 aa, Homo sapiens
  CDR3 for beta chain variable domain of TCR clone 116432 (TRBV6-1, TRBJ1-3)
CASVQGGGGNTIYF

SEQ ID NO: 232865 - protein, 15 aa, Homo sapiens
  CDR3 for alpha chain variable domain of TCR clone 116433 (TRAV27, TRAJ38)
CAARRNVGNNRKLIW

SEQ ID NO: 232866 - protein, 13 aa, Homo sapiens
  CDR3 for beta chain variable domain of TCR clone 116433 (TRBV20-1, TRBJ1-1)
CSARGGGNTEAFF

SEQ ID NO: 232867 - protein, 11 aa, Homo sapiens
  CDR3 for alpha chain variable domain of TCR clone 116434 (TRAV2, TRAJ21)
CAVFNFNKFYF

SEQ ID NO: 232868 - protein, 14 aa, Homo sapiens
  CDR3 for beta chain variable domain of TCR clone 116434 (TRBV11-2, TRBJ2-7)
CASSSTGEGYEQYF

SEQ ID NO: 232869 - protein, 14 aa, Homo sapiens
  CDR3 for alpha chain variable domain of TCR clone 116435 (TRAV12-1, TRAJ43)
CVVNGQSNNNDMRF

SEQ ID NO: 232870 - protein, 13 aa, Homo sapiens
  CDR3 for beta chain variable domain of TCR clone 116435 (TRBV27, TRBJ1-1)
CASSLSIGAEAFF

SEQ ID NO: 232871 - protein, 16 aa, Homo sapiens
  CDR3 for alpha chain variable domain of TCR clone 116436 (TRAV8-3, TRAJ13)
CAVGAYPSGGYQKVTF

SEQ ID NO: 232872 - protein, 13 aa, Homo sapiens
  CDR3 for beta chain variable domain of TCR clone 116436 (TRBV7-9, TRBJ1-2)
CASSLKQNYGYAF

SEQ ID NO: 232873 - protein, 16 aa, Homo sapiens
  CDR3 for alpha chain variable domain of TCR clone 116437 (TRAV16, TRAJ4)
CITVLPFSGGYNKLIF

SEQ ID NO: 232874 - protein, 14 aa, Homo sapiens
  CDR3 for beta chain variable domain of TCR clone 116437 (TRBV11-2, TRBJ2-7)
CASSLGAGAYEQYF

SEQ ID NO: 232875 - protein, 17 aa, Homo sapiens
  CDR3 for alpha chain variable domain of TCR clone 116438 (TRAV17, TRAJ7)
CATLGRLAFGKGNQVVV

SEQ ID NO: 232876 - protein, 14 aa, Homo sapiens
  CDR3 for beta chain variable domain of TCR clone 116438 (TRBV6-1, TRBJ1-3)
CASVQGGGGNTIYF

SEQ ID NO: 232877 - protein, 10 aa, Homo sapiens
  CDR3 for alpha chain variable domain of TCR clone 116439 (TRAV8-2, TRAJ29)
CTGGNTPLVF

SEQ ID NO: 232878 - protein, 17 aa, Homo sapiens
  CDR3 for beta chain variable domain of TCR clone 116439 (TRBV2, TRBJ2-7)
CASSRALTGWDSYEQYF

SEQ ID NO: 232879 - protein, 12 aa, Homo sapiens
  CDR3 for alpha chain variable domain of TCR clone 116440 (TRAV29/DV5, TRAJ43)
CAALYNNNDMRF

SEQ ID NO: 232880 - protein, 17 aa, Homo sapiens
  CDR3 for beta chain variable domain of TCR clone 116440 (TRBV19, TRBJ2-6)
CASSTGQVFSGANVLTF

SEQ ID NO: 232881 - protein, 19 aa, Homo sapiens
  CDR3 for alpha chain variable domain of TCR clone 116441 (TRAV3, TRAJ6)
CAVRDGPGQEEATYLHLEE

SEQ ID NO: 232882 - protein, 19 aa, Homo sapiens
  CDR3 for beta chain variable domain of TCR clone 116441 (TRBV25-1, TRBJ2-2)
CAILVYRVDRGRKTGELFF

SEQ ID NO: 232883 - protein, 13 aa, Homo sapiens
  CDR3 for alpha chain variable domain of TCR clone 116442 (TRAV21, TRAJ27)
CAARPGNAGKSTF

SEQ ID NO: 232884 - protein, 14 aa, Homo sapiens
  CDR3 for beta chain variable domain of TCR clone 116442 (TRBV7-6, TRBJ2-3)
CASSLGEVTDTQYF

SEQ ID NO: 232885 - protein, 13 aa, Homo sapiens
  CDR3 for alpha chain variable domain of TCR clone 116443 (TRAV12-3, TRAJ21)
CAPGPHNFNKFYF

SEQ ID NO: 232886 - protein, 17 aa, Homo sapiens
  CDR3 for beta chain variable domain of TCR clone 116443 (TRBV20-1, TRBJ2-1)
CSAPPRLAGTRYNEQFF

SEQ ID NO: 232887 - protein, 16 aa, Homo sapiens
  CDR3 for alpha chain variable domain of TCR clone 116444 (TRAV8-3, TRAJ8)
CAVPRDGNTGFQKLVC

SEQ ID NO: 232888 - protein, 14 aa, Homo sapiens
  CDR3 for beta chain variable domain of TCR clone 116444 (TRBV4-1, TRBJ2-2)
CASSQAVNTGELFF

SEQ ID NO: 232889 - protein, 16 aa, Homo sapiens
  CDR3 for alpha chain variable domain of TCR clone 116445 (TRAV12-1, TRAJ28)
CVVIAYSGAGSYKLTF

SEQ ID NO: 232890 - protein, 15 aa, Homo sapiens
  CDR3 for beta chain variable domain of TCR clone 116445 (TRBV14, TRBJ1-1)
CASSQEGMGFTEAFF

SEQ ID NO: 232891 - protein, 13 aa, Homo sapiens
  CDR3 for alpha chain variable domain of TCR clone 116446 (TRAV35, TRAJ42)
CAGFPGSQGNLIF

SEQ ID NO: 232892 - protein, 13 aa, Homo sapiens
  CDR3 for beta chain variable domain of TCR clone 116446 (TRBV29-1, TRBJ2-1)
CSVEGGRVNEQFF

SEQ ID NO: 232893 - protein, 14 aa, Homo sapiens
  CDR3 for alpha chain variable domain of TCR clone 116447 (TRAV1-2, TRAJ16)
CAVNRFSDGQKLLF

SEQ ID NO: 232894 - protein, 12 aa, Homo sapiens
  CDR3 for beta chain variable domain of TCR clone 116447 (TRBV20-1, TRBJ1-1)
QCSTWGGTEAFF

SEQ ID NO: 232895 - protein, 13 aa, Homo sapiens
  CDR3 for alpha chain variable domain of TCR clone 116448 (TRAV20, TRAJ37)
CAGCSSNTGKLIF

SEQ ID NO: 232896 - protein, 11 aa, Homo sapiens
  CDR3 for beta chain variable domain of TCR clone 116448 (TRBV12-5, TRBJ2-3)
WASTATDTQYF

SEQ ID NO: 232897 - protein, 10 aa, Homo sapiens
  CDR3 for alpha chain variable domain of TCR clone 116449 (TRAV16, TRAJ22)
SAMYLRQLSF

SEQ ID NO: 232898 - protein, 15 aa, Homo sapiens
  CDR3 for beta chain variable domain of TCR clone 116449 (TRBV7-9, TRBJ1-6)
CASSSPGRGNSPLHF

SEQ ID NO: 232899 - protein, 13 aa, Homo sapiens
  CDR3 for alpha chain variable domain of TCR clone 116450 (TRAV13-1, TRAJ43)
CAASLSNNNDMRC

SEQ ID NO: 232900 - protein, 14 aa, Homo sapiens
  CDR3 for beta chain variable domain of TCR clone 116450 (TRBV5-1, TRBJ2-5)
CASSLAGKQETQYF

SEQ ID NO: 232901 - protein, 13 aa, Homo sapiens
  CDR3 for alpha chain variable domain of TCR clone 116451 (TRAV26-2, TRAJ43)
CILRAVNNNDMRF

SEQ ID NO: 232902 - protein, 16 aa, Homo sapiens
  CDR3 for beta chain variable domain of TCR clone 116451 (TRBV7-7, TRBJ2-1)
CASSLASGTSYNEQFF

SEQ ID NO: 232903 - protein, 16 aa, Homo sapiens
  CDR3 for alpha chain variable domain of TCR clone 116452 (TRAV23/DV6, TRAJ52)
CAARPSGGTSYGKLTF

SEQ ID NO: 232904 - protein, 13 aa, Homo sapiens
  CDR3 for beta chain variable domain of TCR clone 116452 (TRBV7-9, TRBJ1-1)
CARSLSGETEAFF

SEQ ID NO: 232905 - protein, 21 aa, Homo sapiens
  CDR3 for alpha chain variable domain of TCR clone 116453 (TRAV8-3, TRAJ6)
CAVGGEEATYLHLEEEPALLF

SEQ ID NO: 232906 - protein, 12 aa, Homo sapiens
  CDR3 for beta chain variable domain of TCR clone 116453 (TRBV11-2, TRBJ2-1)
CASSPGNNEQFF

SEQ ID NO: 232907 - protein, 16 aa, Homo sapiens
  CDR3 for alpha chain variable domain of TCR clone 116454 (TRAV30, TRAJ49)
SAAQRVGPDTGNQFYF

SEQ ID NO: 232908 - protein, 15 aa, Homo sapiens
  CDR3 for beta chain variable domain of TCR clone 116454 (TRBV2, TRBJ2-1)
CASSELAGSYNEQFF

SEQ ID NO: 232909 - protein, 16 aa, Homo sapiens
  CDR3 for alpha chain variable domain of TCR clone 116455 (TRAV30, TRAJ24)
CGTEIVDADSWGKFQF

SEQ ID NO: 232910 - protein, 14 aa, Homo sapiens
  CDR3 for beta chain variable domain of TCR clone 116455 (TRBV25-1, TRBJ1-2)
CASSDAGANYGYTF

SEQ ID NO: 232911 - protein, 14 aa, Homo sapiens
  CDR3 for alpha chain variable domain of TCR clone 116456 (TRAV3, TRAJ37)
CVVKESGNTGKLIF

SEQ ID NO: 232912 - protein, 14 aa, Homo sapiens
  CDR3 for beta chain variable domain of TCR clone 116456 (TRBV2, TRBJ1-5)
CASSENRGGQPQHF

SEQ ID NO: 232913 - protein, 13 aa, Homo sapiens
  CDR3 for alpha chain variable domain of TCR clone 116457 (TRAV2, TRAJ40)
CAVVTSGTYKYIF

SEQ ID NO: 232914 - protein, 15 aa, Homo sapiens
  CDR3 for beta chain variable domain of TCR clone 116457 (TRBV18, TRBJ2-5)
CASSPDPGLQETQYF

SEQ ID NO: 232915 - protein, 12 aa, Homo sapiens
  CDR3 for alpha chain variable domain of TCR clone 116458 (TRAV13-1, TRAJ21)
CAAKEGFNKFYF

SEQ ID NO: 232916 - protein, 13 aa, Homo sapiens
  CDR3 for beta chain variable domain of TCR clone 116458 (TRBV7-9, TRBJ1-2)
CASSPSNFWGYTF

SEQ ID NO: 232917 - protein, 13 aa, Homo sapiens
  CDR3 for alpha chain variable domain of TCR clone 116459 (TRAV8-3, TRAJ28)
CAVGAVGSYQLTF

SEQ ID NO: 232918 - protein, 15 aa, Homo sapiens
  CDR3 for beta chain variable domain of TCR clone 116459 (TRBV7-9, TRBJ1-5)
CSSSQGHQPNQPQHF

SEQ ID NO: 232919 - protein, 13 aa, Homo sapiens
  CDR3 for alpha chain variable domain of TCR clone 116460 (TRAV26-1, TRAJ34)
CIVRPWITDKLIF

SEQ ID NO: 232920 - protein, 14 aa, Homo sapiens
  CDR3 for beta chain variable domain of TCR clone 116460 (TRBV12-4, TRBJ1-4)
CASSRQGANEKPFF

SEQ ID NO: 232921 - protein, 14 aa, Homo sapiens
  CDR3 for alpha chain variable domain of TCR clone 116461 (TRAV8-1, TRAJ22)
CAAPSSGSARQLTF

SEQ ID NO: 232922 - protein, 13 aa, Homo sapiens
  CDR3 for beta chain variable domain of TCR clone 116461 (TRBV10-3, TRBJ2-7)
CASKLAVNYEQYF

SEQ ID NO: 232923 - protein, 13 aa, Homo sapiens
  CDR3 for alpha chain variable domain of TCR clone 116462 (TRAV8-6, TRAJ49)
CAVITNTGNQFYF

SEQ ID NO: 232924 - protein, 14 aa, Homo sapiens
  CDR3 for beta chain variable domain of TCR clone 116462 (TRBV5-1, TRBJ2-7)
CASSRVESLYEQYF

SEQ ID NO: 232925 - protein, 14 aa, Homo sapiens
  CDR3 for alpha chain variable domain of TCR clone 116463 (TRAV12-3, TRAJ10)
SHLPLTGGGNKLTF

SEQ ID NO: 232926 - protein, 13 aa, Homo sapiens
  CDR3 for beta chain variable domain of TCR clone 116463 (TRBV19, TRBJ1-2)
CASSVPGQDGYAF

SEQ ID NO: 232927 - protein, 18 aa, Homo sapiens
  CDR3 for alpha chain variable domain of TCR clone 116464 (TRAV13-1, TRAJ52)
CAAKNPNAGGTSNGKLTY

SEQ ID NO: 232928 - protein, 15 aa, Homo sapiens
  CDR3 for beta chain variable domain of TCR clone 116464 (TRBV6-1, TRBJ2-3)
CASSERGGITDTQYF

SEQ ID NO: 232929 - protein, 13 aa, Homo sapiens
  CDR3 for alpha chain variable domain of TCR clone 116465 (TRAV21, TRAJ27)
CAARPGNAGKSTF

SEQ ID NO: 232930 - protein, 12 aa, Homo sapiens
  CDR3 for beta chain variable domain of TCR clone 116465 (TRBV7-2, TRBJ2-5)
CASSQYQETQYF

SEQ ID NO: 232931 - protein, 11 aa, Homo sapiens
  CDR3 for alpha chain variable domain of TCR clone 116466 (TRAV29/DV5, TRAJ31)
CAASYRDRLMF

SEQ ID NO: 232932 - protein, 19 aa, Homo sapiens
  CDR3 for beta chain variable domain of TCR clone 116466 (TRBV19, TRBJ2-5)
CASSIGQVTDSFLGETQYF

SEQ ID NO: 232933 - protein, 15 aa, Homo sapiens
  CDR3 for alpha chain variable domain of TCR clone 116467 (TRAV35, TRAJ52)
CAGPRGGTSYGKLTF

SEQ ID NO: 232934 - protein, 15 aa, Homo sapiens
  CDR3 for beta chain variable domain of TCR clone 116467 (TRBV28, TRBJ2-4)
CAAGSGTLLMGIQYF

SEQ ID NO: 232935 - protein, 13 aa, Homo sapiens
  CDR3 for alpha chain variable domain of TCR clone 116468 (TRAV12-3, TRAJ9)
CAMRNTGGFKTIF

SEQ ID NO: 232936 - protein, 13 aa, Homo sapiens
  CDR3 for beta chain variable domain of TCR clone 116468 (TRBV2, TRBJ1-1)
CASRWTVNTEAFF

SEQ ID NO: 232937 - protein, 12 aa, Homo sapiens
  CDR3 for alpha chain variable domain of TCR clone 116469 (TRAV23/DV6, TRAJ33)
CAPMDSNYQLIW

SEQ ID NO: 232938 - protein, 14 aa, Homo sapiens
  CDR3 for beta chain variable domain of TCR clone 116469 (TRBV7-2, TRBJ2-7)
CASSPKTSFYEQYF

SEQ ID NO: 232939 - protein, 15 aa, Homo sapiens
  CDR3 for alpha chain variable domain of TCR clone 116470 (TRAV27, TRAJ38)
CAARRNAGNNRKLIW

SEQ ID NO: 232940 - protein, 14 aa, Homo sapiens
  CDR3 for beta chain variable domain of TCR clone 116470 (TRBV25-1, TRBJ1-1)
CASTHLGGNTEASF

SEQ ID NO: 232941 - protein, 13 aa, Homo sapiens
  CDR3 for alpha chain variable domain of TCR clone 116471 (TRAV13-1, TRAJ39)
CSKYSNAGNMLTF

SEQ ID NO: 232942 - protein, 17 aa, Homo sapiens
  CDR3 for beta chain variable domain of TCR clone 116471 (TRBV13, TRBJ2-3)
CASSLSRVAGGRNTQYF

SEQ ID NO: 232943 - protein, 17 aa, Homo sapiens
  CDR3 for alpha chain variable domain of TCR clone 116472 (TRAV3, TRAJ42)
CAVRDRDYGGSQGNLIF

SEQ ID NO: 232944 - protein, 11 aa, Homo sapiens
  CDR3 for beta chain variable domain of TCR clone 116472 (TRBV6-1, TRBJ2-5)
CASTGVETQYF

SEQ ID NO: 232945 - protein, 18 aa, Homo sapiens
  CDR3 for alpha chain variable domain of TCR clone 116473 (TRAV35, TRAJ52)
CAGLLRYPGGTSYGKLTF

SEQ ID NO: 232946 - protein, 15 aa, Homo sapiens
  CDR3 for beta chain variable domain of TCR clone 116473 (TRBV27, TRBJ2-1)
CASSNGGGSSNEQFF

SEQ ID NO: 232947 - protein, 15 aa, Homo sapiens
  CDR3 for alpha chain variable domain of TCR clone 116474 (TRAV4, TRAJ17)
CLVGDIGASGNKLTF

SEQ ID NO: 232948 - protein, 14 aa, Homo sapiens
  CDR3 for beta chain variable domain of TCR clone 116474 (TRBV6-3, TRBJ2-7)
CASSYSVRVYEQYF

SEQ ID NO: 232949 - protein, 16 aa, Homo sapiens
  CDR3 for alpha chain variable domain of TCR clone 116475 (TRAV3, TRAJ37)
CAVRGKGSGNTGKLIF

SEQ ID NO: 232950 - protein, 12 aa, Homo sapiens
  CDR3 for beta chain variable domain of TCR clone 116475 (TRBV11-2, TRBJ2-1)
CASSPGNNEQFF

SEQ ID NO: 232951 - protein, 12 aa, Homo sapiens
  CDR3 for alpha chain variable domain of TCR clone 116476 (TRAV13-2, TRAJ23)
CAERHRGGKLIF

SEQ ID NO: 232952 - protein, 14 aa, Homo sapiens
  CDR3 for beta chain variable domain of TCR clone 116476 (TRBV19, TRBJ1-2)
CASSVLGYNYGYTF

SEQ ID NO: 232953 - protein, 15 aa, Homo sapiens
  CDR3 for alpha chain variable domain of TCR clone 116477 (TRAV26-1, TRAJ44)
CIVRANTGTASKLTF

SEQ ID NO: 232954 - protein, 15 aa, Homo sapiens
  CDR3 for beta chain variable domain of TCR clone 116477 (TRBV7-9, TRBJ1-6)
CASSSPGRGNSPLHF

SEQ ID NO: 232955 - protein, 11 aa, Homo sapiens
  CDR3 for alpha chain variable domain of TCR clone 116478 (TRAV1-2, TRAJ31)
CAVNNNARLMF

SEQ ID NO: 232956 - protein, 17 aa, Homo sapiens
  CDR3 for beta chain variable domain of TCR clone 116478 (TRBV28, TRBJ2-1)
CASSLYPPGVEYNEQFF

SEQ ID NO: 232957 - protein, 14 aa, Homo sapiens
  CDR3 for alpha chain variable domain of TCR clone 116479 (TRAV12-2, TRAJ44)
CAVNPAGTASKLTF

SEQ ID NO: 232958 - protein, 17 aa, Homo sapiens
  CDR3 for beta chain variable domain of TCR clone 116479 (TRBV25-1, TRBJ2-7)
CASSDARVVFSSYEQYF

SEQ ID NO: 232959 - protein, 13 aa, Homo sapiens
  CDR3 for alpha chain variable domain of TCR clone 116480 (TRAV12-2, TRAJ42)
CAVKRGSQGNLIF

SEQ ID NO: 232960 - protein, 14 aa, Homo sapiens
  CDR3 for beta chain variable domain of TCR clone 116480 (TRBV4-1, TRBJ2-2)
CASSQAVNTGELFF

SEQ ID NO: 232961 - protein, 15 aa, Homo sapiens
  CDR3 for alpha chain variable domain of TCR clone 116481 (TRAV12-1, TRAJ44)
CVADLPTGTASKLTF

SEQ ID NO: 232962 - protein, 17 aa, Homo sapiens
  CDR3 for beta chain variable domain of TCR clone 116481 (TRBV20-1, TRBJ2-2)
CSASGSGQGGLTGELFF

SEQ ID NO: 232963 - protein, 16 aa, Homo sapiens
  CDR3 for alpha chain variable domain of TCR clone 116482 (TRAV8-2, TRAJ7)
CVVSEGPYYGNNRLAS

SEQ ID NO: 232964 - protein, 15 aa, Homo sapiens
  CDR3 for beta chain variable domain of TCR clone 116482 (TRBV27, TRBJ2-3)
CASSLGLAATDTQYF

SEQ ID NO: 232965 - protein, 13 aa, Homo sapiens
  CDR3 for alpha chain variable domain of TCR clone 116483 (TRAV23/DV6, TRAJ34)
CAAIENNTDKLIF

SEQ ID NO: 232966 - protein, 14 aa, Homo sapiens
  CDR3 for beta chain variable domain of TCR clone 116483 (TRBV11-2, TRBJ2-3)
CASSRLARADTQYF

SEQ ID NO: 232967 - protein, 17 aa, Homo sapiens
  CDR3 for alpha chain variable domain of TCR clone 116484 (TRAV3, TRAJ42)
CAVRDRDYGGSQGNLIL

SEQ ID NO: 232968 - protein, 12 aa, Homo sapiens
  CDR3 for beta chain variable domain of TCR clone 116484 (TRBV11-2, TRBJ2-1)
CASSPGNNEQFF

SEQ ID NO: 232969 - protein, 16 aa, Homo sapiens
  CDR3 for alpha chain variable domain of TCR clone 116485 (TRAV13-1, TRAJ37)
CAASIGGSSNTGKLIF

SEQ ID NO: 232970 - protein, 15 aa, Homo sapiens
  CDR3 for beta chain variable domain of TCR clone 116485 (TRBV6-1, TRBJ2-4)
CASSVLTGGGNIQYF

SEQ ID NO: 232971 - protein, 16 aa, Homo sapiens
  CDR3 for alpha chain variable domain of TCR clone 116486 (TRAV30, TRAJ24)
CGKEIVDADSWGKFQF

SEQ ID NO: 232972 - protein, 14 aa, Homo sapiens
  CDR3 for beta chain variable domain of TCR clone 116486 (TRBV7-2, TRBJ2-7)
CASSPKTSFYEQYF

SEQ ID NO: 232973 - protein, 16 aa, Homo sapiens
  CDR3 for alpha chain variable domain of TCR clone 116487 (TRAV4, TRAJ9)
CLVGDPNRPGGFKTIF

SEQ ID NO: 232974 - protein, 16 aa, Homo sapiens
  CDR3 for beta chain variable domain of TCR clone 116487 (TRBV28, TRBJ1-4)
CASRPPYRGRSEKLFF

SEQ ID NO: 232975 - protein, 14 aa, Homo sapiens
  CDR3 for alpha chain variable domain of TCR clone 116488 (TRAV2, TRAJ9)
CAVEDRSGGFKTIF

SEQ ID NO: 232976 - protein, 15 aa, Homo sapiens
  CDR3 for beta chain variable domain of TCR clone 116488 (TRBV6-6, TRBJ2-7)
CTSSYSYGGSYEQYF

SEQ ID NO: 232977 - protein, 12 aa, Homo sapiens
  CDR3 for alpha chain variable domain of TCR clone 116489 (TRAV12-2, TRAJ21)
CAPSDNFNKFYF

SEQ ID NO: 232978 - protein, 17 aa, Homo sapiens
  CDR3 for beta chain variable domain of TCR clone 116489 (TRBV7-8, TRBJ2-6)
CASSAGTGGAGANVLTF

SEQ ID NO: 232979 - protein, 15 aa, Homo sapiens
  CDR3 for alpha chain variable domain of TCR clone 116490 (TRAV20, TRAJ43)
CAVQAGKSSNNDMRF

SEQ ID NO: 232980 - protein, 16 aa, Homo sapiens
  CDR3 for beta chain variable domain of TCR clone 116490 (TRBV7-2, TRBJ2-1)
CASSLGRTSGDNEQFF

SEQ ID NO: 232981 - protein, 13 aa, Homo sapiens
  CDR3 for alpha chain variable domain of TCR clone 116491 (TRAV13-1, TRAJ12)
CAASPDSGYKLIF

SEQ ID NO: 232982 - protein, 16 aa, Homo sapiens
  CDR3 for beta chain variable domain of TCR clone 116491 (TRBV15, TRBJ2-1)
CATSRERLAGAYEQFF

SEQ ID NO: 232983 - protein, 16 aa, Homo sapiens
  CDR3 for alpha chain variable domain of TCR clone 116492 (TRAV22, TRAJ45)
CAVERGKRGGADGLTF

SEQ ID NO: 232984 - protein, 11 aa, Homo sapiens
  CDR3 for beta chain variable domain of TCR clone 116492 (TRBV19, TRBJ1-1)
CASSIGSEAFL

SEQ ID NO: 232985 - protein, 10 aa, Homo sapiens
  CDR3 for alpha chain variable domain of TCR clone 116493 (TRAV23/DV6, TRAJ57)
CAAGSTLSQG

SEQ ID NO: 232986 - protein, 14 aa, Homo sapiens
  CDR3 for beta chain variable domain of TCR clone 116493 (TRBV25-1, TRBJ1-1)
CASTHLGGSTEAFF

SEQ ID NO: 232987 - protein, 14 aa, Homo sapiens
  CDR3 for alpha chain variable domain of TCR clone 116494 (TRAV16, TRAJ15)
CALSGPQAGTSLIF

SEQ ID NO: 232988 - protein, 12 aa, Homo sapiens
  CDR3 for beta chain variable domain of TCR clone 116494 (TRBV18, TRBJ2-5)
CASSPSKETQYF

SEQ ID NO: 232989 - protein, 13 aa, Homo sapiens
  CDR3 for alpha chain variable domain of TCR clone 116495 (TRAV38-2/DV8, TRAJ34)
CAYMTWNTDKLIF

SEQ ID NO: 232990 - protein, 13 aa, Homo sapiens
  CDR3 for beta chain variable domain of TCR clone 116495 (TRBV7-2, TRBJ2-2)
CASSLAVTGELFF

SEQ ID NO: 232991 - protein, 16 aa, Homo sapiens
  CDR3 for alpha chain variable domain of TCR clone 116496 (TRAV30, TRAJ24)
CGTEIVDADSWGKFQV

SEQ ID NO: 232992 - protein, 15 aa, Homo sapiens
  CDR3 for beta chain variable domain of TCR clone 116496 (TRBV20-1, TRBJ2-4)
CSARDLTGGPNIQYF

SEQ ID NO: 232993 - protein, 13 aa, Homo sapiens
  CDR3 for alpha chain variable domain of TCR clone 116497 (TRAV8-1, TRAJ13)
CAVSKGGYQKVTF

SEQ ID NO: 232994 - protein, 11 aa, Homo sapiens
  CDR3 for beta chain variable domain of TCR clone 116497 (TRBV7-9, TRBJ2-3)
CASSGPDTQYF

SEQ ID NO: 232995 - protein, 16 aa, Homo sapiens
  CDR3 for alpha chain variable domain of TCR clone 116498 (TRAV3, TRAJ10)
CAVRDMRAGGGNKLTF

SEQ ID NO: 232996 - protein, 18 aa, Homo sapiens
  CDR3 for beta chain variable domain of TCR clone 116498 (TRBV5-1, TRBJ2-2)
CASSLVALGGRDTGELFF

SEQ ID NO: 232997 - protein, 19 aa, Homo sapiens
  CDR3 for alpha chain variable domain of TCR clone 116499 (TRAV1-2, TRAJ26)
CLLPLCCERPDNYGQNFVF

SEQ ID NO: 232998 - protein, 14 aa, Homo sapiens
  CDR3 for beta chain variable domain of TCR clone 116499 (TRBV7-2, TRBJ1-2)
CASSQTGSTYGYTF

SEQ ID NO: 232999 - protein, 15 aa, Homo sapiens
  CDR3 for alpha chain variable domain of TCR clone 116500 (TRAV17, TRAJ16)
CATALRFSDGQKLLF

SEQ ID NO: 233000 - protein, 12 aa, Homo sapiens
  CDR3 for beta chain variable domain of TCR clone 116500 (TRBV7-8, TRBJ2-7)
CASSLGDREQYF

SEQ ID NO: 233001 - protein, 16 aa, Homo sapiens
  CDR3 for alpha chain variable domain of TCR clone 116501 (TRAV20, TRAJ22)
CAVQASSSGSARQLTF

SEQ ID NO: 233002 - protein, 18 aa, Homo sapiens
  CDR3 for beta chain variable domain of TCR clone 116501 (TRBV20-1, TRBJ2-6)
CSAETTPTHGSGANVLTF

SEQ ID NO: 233003 - protein, 16 aa, Homo sapiens
  CDR3 for alpha chain variable domain of TCR clone 116502 (TRAV1-2, TRAJ10)
CAVRGVVTGGGNKLTF

SEQ ID NO: 233004 - protein, 12 aa, Homo sapiens
  CDR3 for beta chain variable domain of TCR clone 116502 (TRBV7-8, TRBJ2-7)
CASSLGDREQYF

SEQ ID NO: 233005 - protein, 17 aa, Homo sapiens
  CDR3 for alpha chain variable domain of TCR clone 116503 (TRAV4, )
CLVDIQNPDPAVYQLRD

SEQ ID NO: 233006 - protein, 15 aa, Homo sapiens
  CDR3 for beta chain variable domain of TCR clone 116503 (TRBV20-1, TRBJ1-5)
CSARVGGVVSQPQHF

SEQ ID NO: 233007 - protein, 14 aa, Homo sapiens
  CDR3 for alpha chain variable domain of TCR clone 116504 (TRAV4, TRAJ6)
CLVGEAGGSYIPTF

SEQ ID NO: 233008 - protein, 14 aa, Homo sapiens
  CDR3 for beta chain variable domain of TCR clone 116504 (TRBV7-9, TRBJ2-5)
CASSLDTAQETQYF

SEQ ID NO: 233009 - protein, 14 aa, Homo sapiens
  CDR3 for alpha chain variable domain of TCR clone 116505 (TRAV9-2, TRAJ39)
CALYIYNAGNMLTF

SEQ ID NO: 233010 - protein, 14 aa, Homo sapiens
  CDR3 for beta chain variable domain of TCR clone 116505 (TRBV7-2, TRBJ2-7)
CASSPRTSFYEQYF

SEQ ID NO: 233011 - protein, 17 aa, Homo sapiens
  CDR3 for alpha chain variable domain of TCR clone 116506 (TRAV3, TRAJ6)
CAVRDGPRAGGGYIPTF

SEQ ID NO: 233012 - protein, 14 aa, Homo sapiens
  CDR3 for beta chain variable domain of TCR clone 116506 (TRBV7-2, TRBJ2-7)
CASSPKTSFYERYF

SEQ ID NO: 233013 - protein, 14 aa, Homo sapiens
  CDR3 for alpha chain variable domain of TCR clone 116507 (TRAV38-1, TRAJ45)
CASHSGGGADGLTF

SEQ ID NO: 233014 - protein, 15 aa, Homo sapiens
  CDR3 for beta chain variable domain of TCR clone 116507 (TRBV7-9, TRBJ1-4)
CASSARTGGNEKLFF

SEQ ID NO: 233015 - protein, 14 aa, Homo sapiens
  CDR3 for alpha chain variable domain of TCR clone 116508 (TRAV12-2, TRAJ13)
CAVKKTGGYQKVTF

SEQ ID NO: 233016 - protein, 13 aa, Homo sapiens
  CDR3 for beta chain variable domain of TCR clone 116508 (TRBV4-2, TRBJ1-1)
CASSQAGNTEAFF

SEQ ID NO: 233017 - protein, 13 aa, Homo sapiens
  CDR3 for alpha chain variable domain of TCR clone 116509 (TRAV20, TRAJ40)
CAVPFSGTYKYIF

SEQ ID NO: 233018 - protein, 13 aa, Homo sapiens
  CDR3 for beta chain variable domain of TCR clone 116509 (TRBV15, TRBJ2-5)
CATSQIGEETQYS

SEQ ID NO: 233019 - protein, 15 aa, Homo sapiens
  CDR3 for alpha chain variable domain of TCR clone 116510 (TRAV27, TRAJ38)
CAGRFNAGNNRKLIW

SEQ ID NO: 233020 - protein, 16 aa, Homo sapiens
  CDR3 for beta chain variable domain of TCR clone 116510 (TRBV18, TRBJ1-4)
CASSLQTVAANEKLFF

SEQ ID NO: 233021 - protein, 19 aa, Homo sapiens
  CDR3 for alpha chain variable domain of TCR clone 116511 (TRAV9-2, )
CALIQIGDIQNPDPAVYQL

SEQ ID NO: 233022 - protein, 13 aa, Homo sapiens
  CDR3 for beta chain variable domain of TCR clone 116511 (TRBV20-1, TRBJ1-1)
CSARGGGNTEAFF

SEQ ID NO: 233023 - protein, 12 aa, Homo sapiens
  CDR3 for alpha chain variable domain of TCR clone 116512 (TRAV26-2, TRAJ47)
CILVEYGNKLVF

SEQ ID NO: 233024 - protein, 14 aa, Homo sapiens
  CDR3 for beta chain variable domain of TCR clone 116512 (TRBV28, TRBJ2-2)
CASRIRSGTGELFF

SEQ ID NO: 233025 - protein, 14 aa, Homo sapiens
  CDR3 for alpha chain variable domain of TCR clone 116513 (TRAV21, TRAJ35)
CAVMPIGFGNVLHC

SEQ ID NO: 233026 - protein, 16 aa, Homo sapiens
  CDR3 for beta chain variable domain of TCR clone 116513 (TRBV5-1, TRBJ2-3)
CASSLGLAVYTDTQYF

SEQ ID NO: 233027 - protein, 11 aa, Homo sapiens
  CDR3 for alpha chain variable domain of TCR clone 116514 (TRAV1-2, TRAJ20)
CAVSNDYKLSF

SEQ ID NO: 233028 - protein, 17 aa, Homo sapiens
  CDR3 for beta chain variable domain of TCR clone 116514 (TRBV13, TRBJ2-3)
CASSLSGVAGGRNTQYF

SEQ ID NO: 233029 - protein, 17 aa, Homo sapiens
  CDR3 for alpha chain variable domain of TCR clone 116515 (TRAV3, TRAJ6)
CAVRDGPRAGESYTPTF

SEQ ID NO: 233030 - protein, 14 aa, Homo sapiens
  CDR3 for beta chain variable domain of TCR clone 116515 (TRBV7-2, TRBJ2-7)
CASSPKTSFYEQYF

SEQ ID NO: 233031 - protein, 14 aa, Homo sapiens
  CDR3 for alpha chain variable domain of TCR clone 116516 (TRAV12-3, TRAJ10)
SHLPLTGGGNKLTF

SEQ ID NO: 233032 - protein, 13 aa, Homo sapiens
  CDR3 for beta chain variable domain of TCR clone 116516 (TRBV6-1, TRBJ1-1)
CASSRQGNTEAFF

SEQ ID NO: 233033 - protein, 16 aa, Homo sapiens
  CDR3 for alpha chain variable domain of TCR clone 116517 (TRAV3, TRAJ37)
CAVRGRGSGNTGKLIF

SEQ ID NO: 233034 - protein, 13 aa, Homo sapiens
  CDR3 for beta chain variable domain of TCR clone 116517 (TRBV7-3, TRBJ1-1)
CASSQDWGAEAFF

SEQ ID NO: 233035 - protein, 15 aa, Homo sapiens
  CDR3 for alpha chain variable domain of TCR clone 116518 (TRAV3, TRAJ30)
CAVRDEYGRDDKITF

SEQ ID NO: 233036 - protein, 16 aa, Homo sapiens
  CDR3 for beta chain variable domain of TCR clone 116518 (TRBV5-1, TRBJ2-5)
CASSLANHRGRETQYF

SEQ ID NO: 233037 - protein, 16 aa, Homo sapiens
  CDR3 for alpha chain variable domain of TCR clone 116519 (TRAV8-6, TRAJ53)
CAVSVSSGGSNYKLTF

SEQ ID NO: 233038 - protein, 16 aa, Homo sapiens
  CDR3 for beta chain variable domain of TCR clone 116519 (TRBV12-4, TRBJ1-5)
CASSRPVGGSNQPQHF

SEQ ID NO: 233039 - protein, 14 aa, Homo sapiens
  CDR3 for alpha chain variable domain of TCR clone 116520 (TRAV2, TRAJ9)
CAVDPNTGGFRTIF

SEQ ID NO: 233040 - protein, 13 aa, Homo sapiens
  CDR3 for beta chain variable domain of TCR clone 116520 (TRBV20-1, TRBJ2-1)
CSASTGTSNEQFF

SEQ ID NO: 233041 - protein, 13 aa, Homo sapiens
  CDR3 for alpha chain variable domain of TCR clone 116521 (TRAV1-2, TRAJ9)
CAALNTGGFTTIF

SEQ ID NO: 233042 - protein, 15 aa, Homo sapiens
  CDR3 for beta chain variable domain of TCR clone 116521 (TRBV6-3, TRBJ2-7)
CASSSPGTVFYEQYF

SEQ ID NO: 233043 - protein, 11 aa, Homo sapiens
  CDR3 for alpha chain variable domain of TCR clone 116522 (TRAV21, TRAJ9)
CAVPGGFKTIF

SEQ ID NO: 233044 - protein, 12 aa, Homo sapiens
  CDR3 for beta chain variable domain of TCR clone 116522 (TRBV20-1, TRBJ2-3)
SAVRVGTDTQYF

SEQ ID NO: 233045 - protein, 15 aa, Homo sapiens
  CDR3 for alpha chain variable domain of TCR clone 116523 (TRAV4, TRAJ39)
CLVGPNNNAGNVLTF

SEQ ID NO: 233046 - protein, 15 aa, Homo sapiens
  CDR3 for beta chain variable domain of TCR clone 116523 (TRBV5-1, TRBJ2-1)
CASSPPRAPYNEQFF

SEQ ID NO: 233047 - protein, 14 aa, Homo sapiens
  CDR3 for alpha chain variable domain of TCR clone 116524 (TRAV16, TRAJ15)
CALSGPQAGTALIF

SEQ ID NO: 233048 - protein, 12 aa, Homo sapiens
  CDR3 for beta chain variable domain of TCR clone 116524 (TRBV18, TRBJ2-5)
RASSPSKETQYF

SEQ ID NO: 233049 - protein, 13 aa, Homo sapiens
  CDR3 for alpha chain variable domain of TCR clone 116525 (TRAV35, TRAJ57)
CAGTQGGSEKLVF

SEQ ID NO: 233050 - protein, 14 aa, Homo sapiens
  CDR3 for beta chain variable domain of TCR clone 116525 (TRBV5-1, TRBJ2-2)
CASSLVLGAGELFF

SEQ ID NO: 233051 - protein, 13 aa, Homo sapiens
  CDR3 for alpha chain variable domain of TCR clone 116526 (TRAV21, TRAJ27)
CAARPGNPGKSTF

SEQ ID NO: 233052 - protein, 13 aa, Homo sapiens
  CDR3 for beta chain variable domain of TCR clone 116526 (TRBV18, TRBJ2-7)
CASQSGGGYEQYF

SEQ ID NO: 233053 - protein, 16 aa, Homo sapiens
  CDR3 for alpha chain variable domain of TCR clone 116527 (TRAV12-2, TRAJ50)
CAVGTATKTFYDKVIF

SEQ ID NO: 233054 - protein, 12 aa, Homo sapiens
  CDR3 for beta chain variable domain of TCR clone 116527 (TRBV12-4, TRBJ1-5)
CASSLGRQPQHF

SEQ ID NO: 233055 - protein, 16 aa, Homo sapiens
  CDR3 for alpha chain variable domain of TCR clone 116528 (TRAV30, TRAJ24)
CGTEIVDADGWGKFQF

SEQ ID NO: 233056 - protein, 15 aa, Homo sapiens
  CDR3 for beta chain variable domain of TCR clone 116528 (TRBV7-2, TRBJ2-3)
CASSLRGGSTDTQYF

SEQ ID NO: 233057 - protein, 14 aa, Homo sapiens
  CDR3 for alpha chain variable domain of TCR clone 116529 (TRAV8-4, TRAJ54)
CAVSEGLGAQKLVF

SEQ ID NO: 233058 - protein, 17 aa, Homo sapiens
  CDR3 for beta chain variable domain of TCR clone 116529 (TRBV4-1, TRBJ1-4)
CASSQEGPRGVEEKLFF

SEQ ID NO: 233059 - protein, 23 aa, Homo sapiens
  CDR3 for alpha chain variable domain of TCR clone 116530 (TRAV26-1, TRAJ38)
CIADNAGNNHIQNPDPAVYQLRD

SEQ ID NO: 233060 - protein, 14 aa, Homo sapiens
  CDR3 for beta chain variable domain of TCR clone 116530 (TRBV20-1, TRBJ2-3)
CSARVRGSTDTQYF

SEQ ID NO: 233061 - protein, 15 aa, Homo sapiens
  CDR3 for alpha chain variable domain of TCR clone 116531 (TRAV13-1, TRAJ50)
CAARGSETSYDKVIF

SEQ ID NO: 233062 - protein, 13 aa, Homo sapiens
  CDR3 for beta chain variable domain of TCR clone 116531 (TRBV20-1, TRBJ2-3)
CSARAGGRDTQYF

SEQ ID NO: 233063 - protein, 13 aa, Homo sapiens
  CDR3 for alpha chain variable domain of TCR clone 116532 (TRAV25, TRAJ26)
CAGMDNYGKNFVF

SEQ ID NO: 233064 - protein, 15 aa, Homo sapiens
  CDR3 for beta chain variable domain of TCR clone 116532 (TRBV10-3, TRBJ2-1)
CAIRNGTSGHNEQFF

SEQ ID NO: 233065 - protein, 12 aa, Homo sapiens
  CDR3 for alpha chain variable domain of TCR clone 116533 (TRAV13-1, TRAJ21)
CAAKEGFNKFYF

SEQ ID NO: 233066 - protein, 18 aa, Homo sapiens
  CDR3 for beta chain variable domain of TCR clone 116533 (TRBV20-1, TRBJ2-6)
CSAETTTTHGSGANVLTF

SEQ ID NO: 233067 - protein, 13 aa, Homo sapiens
  CDR3 for alpha chain variable domain of TCR clone 116534 (TRAV35, TRAJ33)
CAGLMDSNYQLIW

SEQ ID NO: 233068 - protein, 13 aa, Homo sapiens
  CDR3 for beta chain variable domain of TCR clone 116534 (TRBV10-3, TRBJ2-1)
CAISEFSGWEQFF

SEQ ID NO: 233069 - protein, 16 aa, Homo sapiens
  CDR3 for alpha chain variable domain of TCR clone 116535 (TRAV30, TRAJ24)
CGTEIVDADSWGKFQF

SEQ ID NO: 233070 - protein, 16 aa, Homo sapiens
  CDR3 for beta chain variable domain of TCR clone 116535 (TRBV11-2, TRBJ2-1)
CASARGSYSHHNEQFF

SEQ ID NO: 233071 - protein, 16 aa, Homo sapiens
  CDR3 for alpha chain variable domain of TCR clone 116536 (TRAV12-2, TRAJ45)
CAVKRNPGGGADGLTC

SEQ ID NO: 233072 - protein, 12 aa, Homo sapiens
  CDR3 for beta chain variable domain of TCR clone 116536 (TRBV6-1, TRBJ2-5)
CASSEGRETQYF

SEQ ID NO: 233073 - protein, 14 aa, Homo sapiens
  CDR3 for alpha chain variable domain of TCR clone 116537 (TRAV8-3, TRAJ4)
CAVGAAGGYNKLIF

SEQ ID NO: 233074 - protein, 16 aa, Homo sapiens
  CDR3 for beta chain variable domain of TCR clone 116537 (TRBV9, TRBJ2-7)
CASSAGPDRSPYEQYF

SEQ ID NO: 233075 - protein, 17 aa, Homo sapiens
  CDR3 for alpha chain variable domain of TCR clone 116538 (TRAV3, TRAJ6)
CAVRDGPRAGGSYIPTF

SEQ ID NO: 233076 - protein, 12 aa, Homo sapiens
  CDR3 for beta chain variable domain of TCR clone 116538 (TRBV7-9, TRBJ2-7)
CASSFGSYEQYF

SEQ ID NO: 233077 - protein, 11 aa, Homo sapiens
  CDR3 for alpha chain variable domain of TCR clone 116539 (TRAV12-1, TRAJ34)
CVVDKGRELIF

SEQ ID NO: 233078 - protein, 12 aa, Homo sapiens
  CDR3 for beta chain variable domain of TCR clone 116539 (TRBV2, TRBJ2-1)
CAYGPPGNEQFF

SEQ ID NO: 233079 - protein, 14 aa, Homo sapiens
  CDR3 for alpha chain variable domain of TCR clone 116540 (TRAV38-1, TRAJ45)
CAYYSGGGADGLTF

SEQ ID NO: 233080 - protein, 20 aa, Homo sapiens
  CDR3 for beta chain variable domain of TCR clone 116540 (TRBV28, TRBJ2-1)
CASTPIGRSPGLAGGNEQFV

SEQ ID NO: 233081 - protein, 15 aa, Homo sapiens
  CDR3 for alpha chain variable domain of TCR clone 116541 (TRAV8-3, TRAJ27)
CAVGPSKTNAGKSTL

SEQ ID NO: 233082 - protein, 13 aa, Homo sapiens
  CDR3 for beta chain variable domain of TCR clone 116541 (TRBV12-5, TRBJ1-2)
CASGVRTGNGYTF

SEQ ID NO: 233083 - protein, 13 aa, Homo sapiens
  CDR3 for alpha chain variable domain of TCR clone 116542 (TRAV35, TRAJ42)
CAGFPGSQGNLIV

SEQ ID NO: 233084 - protein, 13 aa, Homo sapiens
  CDR3 for beta chain variable domain of TCR clone 116542 (TRBV29-1, TRBJ2-1)
CSVEGGRVNEQFF

SEQ ID NO: 233085 - protein, 16 aa, Homo sapiens
  CDR3 for alpha chain variable domain of TCR clone 116543 (TRAV14/DV4, TRAJ38)
CAMREVNAGNNRKLIW

SEQ ID NO: 233086 - protein, 17 aa, Homo sapiens
  CDR3 for beta chain variable domain of TCR clone 116543 (TRBV19, TRBJ2-6)
CASSTGQVFSGANVLTF

SEQ ID NO: 233087 - protein, 13 aa, Homo sapiens
  CDR3 for alpha chain variable domain of TCR clone 116544 (TRAV13-1, TRAJ39)
CSKYSNAGNMLTF

SEQ ID NO: 233088 - protein, 11 aa, Homo sapiens
  CDR3 for beta chain variable domain of TCR clone 116544 (TRBV6-3, TRBJ2-3)
CATGQADTQYF

SEQ ID NO: 233089 - protein, 15 aa, Homo sapiens
  CDR3 for alpha chain variable domain of TCR clone 116545 (TRAV29/DV5, TRAJ44)
CAASAGTGTASTLTF

SEQ ID NO: 233090 - protein, 12 aa, Homo sapiens
  CDR3 for beta chain variable domain of TCR clone 116545 (TRBV11-2, TRBJ2-2)
CASSLGGGELFF

SEQ ID NO: 233091 - protein, 14 aa, Homo sapiens
  CDR3 for alpha chain variable domain of TCR clone 116546 (TRAV27, TRAJ22)
CAGLPSGSARQLTF

SEQ ID NO: 233092 - protein, 14 aa, Homo sapiens
  CDR3 for beta chain variable domain of TCR clone 116546 (TRBV7-2, TRBJ2-3)
CASSQTGSSYTQYF

SEQ ID NO: 233093 - protein, 13 aa, Homo sapiens
  CDR3 for alpha chain variable domain of TCR clone 116547 (TRAV27, TRAJ27)
CAGGITNAGKSTF

SEQ ID NO: 233094 - protein, 13 aa, Homo sapiens
  CDR3 for beta chain variable domain of TCR clone 116547 (TRBV20-1, TRBJ1-2)
CIASLGVGYGYTF

SEQ ID NO: 233095 - protein, 17 aa, Homo sapiens
  CDR3 for alpha chain variable domain of TCR clone 116548 (TRAV23/DV6, TRAJ58)
CAARLLRGETSGSRLTF

SEQ ID NO: 233096 - protein, 13 aa, Homo sapiens
  CDR3 for beta chain variable domain of TCR clone 116548 (TRBV18, TRBJ1-1)
CASSPNGDTEAFF

SEQ ID NO: 233097 - protein, 15 aa, Homo sapiens
  CDR3 for alpha chain variable domain of TCR clone 116549 (TRAV17, TRAJ56)
CATDANTEANSKLTF

SEQ ID NO: 233098 - protein, 12 aa, Homo sapiens
  CDR3 for beta chain variable domain of TCR clone 116549 (TRBV7-8, TRBJ2-7)
CASSLGDREQYF

SEQ ID NO: 233099 - protein, 14 aa, Homo sapiens
  CDR3 for alpha chain variable domain of TCR clone 116550 (TRAV3, TRAJ34)
CAVRDINNNDKLIF

SEQ ID NO: 233100 - protein, 15 aa, Homo sapiens
  CDR3 for beta chain variable domain of TCR clone 116550 (TRBV20-1, TRBJ2-7)
CSARDRVSGMDEQYF

SEQ ID NO: 233101 - protein, 12 aa, Homo sapiens
  CDR3 for alpha chain variable domain of TCR clone 116551 (TRAV26-2, TRAJ21)
CILKGHFNKFYF

SEQ ID NO: 233102 - protein, 14 aa, Homo sapiens
  CDR3 for beta chain variable domain of TCR clone 116551 (TRBV7-9, TRBJ1-1)
CASTPLQSYTEAFF

SEQ ID NO: 233103 - protein, 10 aa, Homo sapiens
  CDR3 for alpha chain variable domain of TCR clone 116552 (TRAV12-1, TRAJ43)
CVVHNNDMRF

SEQ ID NO: 233104 - protein, 14 aa, Homo sapiens
  CDR3 for beta chain variable domain of TCR clone 116552 (TRBV19, TRBJ2-1)
CASPTFVLSGEQFF

SEQ ID NO: 233105 - protein, 13 aa, Homo sapiens
  CDR3 for alpha chain variable domain of TCR clone 116553 (TRAV3, TRAJ36)
CAVSLGGANNLFF

SEQ ID NO: 233106 - protein, 15 aa, Homo sapiens
  CDR3 for beta chain variable domain of TCR clone 116553 (TRBV5-1, TRBJ2-3)
CASSVTSGSTDTQYF

SEQ ID NO: 233107 - protein, 14 aa, Homo sapiens
  CDR3 for alpha chain variable domain of TCR clone 116554 (TRAV35, TRAJ42)
CAGRYGGSQGNLIF

SEQ ID NO: 233108 - protein, 15 aa, Homo sapiens
  CDR3 for beta chain variable domain of TCR clone 116554 (TRBV7-9, TRBJ2-1)
CASSLGWGRANKQFF

SEQ ID NO: 233109 - protein, 14 aa, Homo sapiens
  CDR3 for alpha chain variable domain of TCR clone 116555 (TRAV17, TRAJ37)
CATVGSSNTGKLIF

SEQ ID NO: 233110 - protein, 13 aa, Homo sapiens
  CDR3 for beta chain variable domain of TCR clone 116555 (TRBV11-2, TRBJ2-1)
CASSLDLVNEQFF

SEQ ID NO: 233111 - protein, 11 aa, Homo sapiens
  CDR3 for alpha chain variable domain of TCR clone 116556 (TRAV27, TRAJ34)
CRSKNTDKLIF

SEQ ID NO: 233112 - protein, 13 aa, Homo sapiens
  CDR3 for beta chain variable domain of TCR clone 116556 (TRBV4-1, TRBJ2-1)
CASSQEVQYEQFF

SEQ ID NO: 233113 - protein, 16 aa, Homo sapiens
  CDR3 for alpha chain variable domain of TCR clone 116557 (TRAV3, TRAJ37)
CAVRGKGSGNTGKLIF

SEQ ID NO: 233114 - protein, 16 aa, Homo sapiens
  CDR3 for beta chain variable domain of TCR clone 116557 (TRBV12-4, TRBJ1-5)
CASSRPVRGSNQPQHF

SEQ ID NO: 233115 - protein, 14 aa, Homo sapiens
  CDR3 for alpha chain variable domain of TCR clone 116558 (TRAV2, TRAJ37)
CAVEDQGNTGKLIS

SEQ ID NO: 233116 - protein, 14 aa, Homo sapiens
  CDR3 for beta chain variable domain of TCR clone 116558 (TRBV18, TRBJ2-1)
CASSPQGRFNEQFF

SEQ ID NO: 233117 - protein, 13 aa, Homo sapiens
  CDR3 for alpha chain variable domain of TCR clone 116559 (TRAV21, TRAJ17)
CAPVKAAGNKLTF

SEQ ID NO: 233118 - protein, 13 aa, Homo sapiens
  CDR3 for beta chain variable domain of TCR clone 116559 (TRBV20-1, TRBJ1-1)
CSAVDGTLNESFF

SEQ ID NO: 233119 - protein, 14 aa, Homo sapiens
  CDR3 for alpha chain variable domain of TCR clone 116560 (TRAV12-3, TRAJ10)
SHLPLTGGGNKLTF

SEQ ID NO: 233120 - protein, 12 aa, Homo sapiens
  CDR3 for beta chain variable domain of TCR clone 116560 (TRBV3-1, TRBJ2-2)
CASSLFPGELFF

SEQ ID NO: 233121 - protein, 17 aa, Homo sapiens
  CDR3 for alpha chain variable domain of TCR clone 116561 (TRAV3, TRAJ6)
CAVRDGPRAGGSCIPTF

SEQ ID NO: 233122 - protein, 16 aa, Homo sapiens
  CDR3 for beta chain variable domain of TCR clone 116561 (TRBV7-8, TRBJ2-3)
CASSTEGQRETDTQYF

SEQ ID NO: 233123 - protein, 14 aa, Homo sapiens
  CDR3 for alpha chain variable domain of TCR clone 116562 (TRAV21, TRAJ12)
CAVRNGDSSYKLIF

SEQ ID NO: 233124 - protein, 17 aa, Homo sapiens
  CDR3 for beta chain variable domain of TCR clone 116562 (TRBV7-6, TRBJ2-5)
CASSSPQAGDPSETQYF

SEQ ID NO: 233125 - protein, 13 aa, Homo sapiens
  CDR3 for alpha chain variable domain of TCR clone 116563 (TRAV30, TRAJ34)
CGTVGYNTDKLIF

SEQ ID NO: 233126 - protein, 16 aa, Homo sapiens
  CDR3 for beta chain variable domain of TCR clone 116563 (TRBV7-9, TRBJ1-2)
CASSLGFSLGEDGYTF

SEQ ID NO: 233127 - protein, 15 aa, Homo sapiens
  CDR3 for alpha chain variable domain of TCR clone 116564 (TRAV21, TRAJ45)
CSVSYSGGGADGLTF

SEQ ID NO: 233128 - protein, 13 aa, Homo sapiens
  CDR3 for beta chain variable domain of TCR clone 116564 (TRBV20-1, TRBJ2-5)
CSAATELQETQYF

SEQ ID NO: 233129 - protein, 20 aa, Homo sapiens
  CDR3 for alpha chain variable domain of TCR clone 116565 (TRAV12-1, TRAJ42)
SSVIQPPTSVKGGSQGNLIF

SEQ ID NO: 233130 - protein, 11 aa, Homo sapiens
  CDR3 for beta chain variable domain of TCR clone 116565 (TRBV11-2, TRBJ2-2)
CASSLPGELFF

SEQ ID NO: 233131 - protein, 14 aa, Homo sapiens
  CDR3 for alpha chain variable domain of TCR clone 116566 (TRAV1-2, TRAJ8)
CAVREDTGFQKLVF

SEQ ID NO: 233132 - protein, 16 aa, Homo sapiens
  CDR3 for beta chain variable domain of TCR clone 116566 (TRBV15, TRBJ2-3)
CATRLSGGRAPDTQYF

SEQ ID NO: 233133 - protein, 12 aa, Homo sapiens
  CDR3 for alpha chain variable domain of TCR clone 116567 (TRAV21, TRAJ11)
CAVRGGHSTLTF

SEQ ID NO: 233134 - protein, 15 aa, Homo sapiens
  CDR3 for beta chain variable domain of TCR clone 116567 (TRBV6-1, TRBJ2-7)
CASSEPIAATTEQYF

SEQ ID NO: 233135 - protein, 17 aa, Homo sapiens
  CDR3 for alpha chain variable domain of TCR clone 116568 (TRAV17, TRAJ28)
CATDPRRGGAGSYQLTF

SEQ ID NO: 233136 - protein, 16 aa, Homo sapiens
  CDR3 for beta chain variable domain of TCR clone 116568 (TRBV25-1, TRBJ1-1)
CASSGDRDMGRIEAFF

SEQ ID NO: 233137 - protein, 14 aa, Homo sapiens
  CDR3 for alpha chain variable domain of TCR clone 116569 (TRAV29/DV5, TRAJ36)
CAARRKTGANNLFF

SEQ ID NO: 233138 - protein, 15 aa, Homo sapiens
  CDR3 for beta chain variable domain of TCR clone 116569 (TRBV7-2, TRBJ2-3)
CASSSTGLETDTQYF

SEQ ID NO: 233139 - protein, 11 aa, Homo sapiens
  CDR3 for alpha chain variable domain of TCR clone 116570 (TRAV21, TRAJ11)
CAVNGYSTLTF

SEQ ID NO: 233140 - protein, 14 aa, Homo sapiens
  CDR3 for beta chain variable domain of TCR clone 116570 (TRBV7-2, TRBJ2-7)
CASSPKTSFYEQYF

SEQ ID NO: 233141 - protein, 12 aa, Homo sapiens
  CDR3 for alpha chain variable domain of TCR clone 116571 (TRAV12-1, TRAJ40)
CVFYSGTYKYIF

SEQ ID NO: 233142 - protein, 18 aa, Homo sapiens
  CDR3 for beta chain variable domain of TCR clone 116571 (TRBV12-4, TRBJ2-2)
CASSLVSGTRGRTGELFF

SEQ ID NO: 233143 - protein, 10 aa, Homo sapiens
  CDR3 for alpha chain variable domain of TCR clone 116572 (TRAV13-2, TRAJ20)
CAENICRLQA

SEQ ID NO: 233144 - protein, 15 aa, Homo sapiens
  CDR3 for beta chain variable domain of TCR clone 116572 (TRBV18, TRBJ1-2)
CASSTGNGLGYGYTF

SEQ ID NO: 233145 - protein, 17 aa, Homo sapiens
  CDR3 for alpha chain variable domain of TCR clone 116573 (TRAV4, TRAJ13)
CIVGVQGSSGGYQKATF

SEQ ID NO: 233146 - protein, 18 aa, Homo sapiens
  CDR3 for beta chain variable domain of TCR clone 116573 (TRBV15, TRBJ2-3)
CATSRDGARSWDTDTQYF

SEQ ID NO: 233147 - protein, 11 aa, Homo sapiens
  CDR3 for alpha chain variable domain of TCR clone 116574 (TRAV1-2, TRAJ40)
CAVPGTYKYIF

SEQ ID NO: 233148 - protein, 16 aa, Homo sapiens
  CDR3 for beta chain variable domain of TCR clone 116574 (TRBV27, TRBJ2-5)
CASSYGPGGQKETQYF

SEQ ID NO: 233149 - protein, 12 aa, Homo sapiens
  CDR3 for alpha chain variable domain of TCR clone 116575 (TRAV13-1, TRAJ53)
AASGGSKYKLTF

SEQ ID NO: 233150 - protein, 12 aa, Homo sapiens
  CDR3 for beta chain variable domain of TCR clone 116575 (TRBV18, TRBJ1-4)
CASSPSREKLFF

SEQ ID NO: 233151 - protein, 14 aa, Homo sapiens
  CDR3 for alpha chain variable domain of TCR clone 116576 (TRAV1-1, TRAJ27)
CAVIYNTNAGKSTF

SEQ ID NO: 233152 - protein, 15 aa, Homo sapiens
  CDR3 for beta chain variable domain of TCR clone 116576 (TRBV6-3, TRBJ2-7)
CASSSPVTVFYEQYF

SEQ ID NO: 233153 - protein, 15 aa, Homo sapiens
  CDR3 for alpha chain variable domain of TCR clone 116577 (TRAV3, TRAJ30)
CAVRDEYGRDDKVIF

SEQ ID NO: 233154 - protein, 16 aa, Homo sapiens
  CDR3 for beta chain variable domain of TCR clone 116577 (TRBV5-1, TRBJ2-5)
CASSLANHRGRETQYF

SEQ ID NO: 233155 - protein, 13 aa, Homo sapiens
  CDR3 for alpha chain variable domain of TCR clone 116578 (TRAV13-2, TRAJ13)
CAETAGGYPKVTF

SEQ ID NO: 233156 - protein, 15 aa, Homo sapiens
  CDR3 for beta chain variable domain of TCR clone 116578 (TRBV20-1, TRBJ1-5)
CSARVGRVVSQPQHF

SEQ ID NO: 233157 - protein, 11 aa, Homo sapiens
  CDR3 for alpha chain variable domain of TCR clone 116579 (TRAV2, TRAJ13)
CASGGYQKVTF

SEQ ID NO: 233158 - protein, 16 aa, Homo sapiens
  CDR3 for beta chain variable domain of TCR clone 116579 (TRBV2, TRBJ2-1)
WASSVGGSLSYNEQFF

SEQ ID NO: 233159 - protein, 17 aa, Homo sapiens
  CDR3 for alpha chain variable domain of TCR clone 116580 (TRAV4, TRAJ42)
CLVGVLNYGGSQGNLIF

SEQ ID NO: 233160 - protein, 12 aa, Homo sapiens
  CDR3 for beta chain variable domain of TCR clone 116580 (TRBV20-1, TRBJ2-1)
CSAQYTYNEQLF

SEQ ID NO: 233161 - protein, 13 aa, Homo sapiens
  CDR3 for alpha chain variable domain of TCR clone 116581 (TRAV12-2, TRAJ26)
CAVNENYGQNFVF

SEQ ID NO: 233162 - protein, 13 aa, Homo sapiens
  CDR3 for beta chain variable domain of TCR clone 116581 (TRBV18, TRBJ2-2)
CASSPTRGGELLF

SEQ ID NO: 233163 - protein, 14 aa, Homo sapiens
  CDR3 for alpha chain variable domain of TCR clone 116582 (TRAV1-2, TRAJ16)
CAVNRFSDGQKLLF

SEQ ID NO: 233164 - protein, 14 aa, Homo sapiens
  CDR3 for beta chain variable domain of TCR clone 116582 (TRBV6-1, TRBJ2-2)
CASTWQGSTGELFF

SEQ ID NO: 233165 - protein, 10 aa, Homo sapiens
  CDR3 for alpha chain variable domain of TCR clone 116583 (TRAV26-1, TRAJ40)
CIAGTYKYIF

SEQ ID NO: 233166 - protein, 14 aa, Homo sapiens
  CDR3 for beta chain variable domain of TCR clone 116583 (TRBV7-2, TRBJ2-7)
CASSPKTSFYEQYF

SEQ ID NO: 233167 - protein, 13 aa, Homo sapiens
  CDR3 for alpha chain variable domain of TCR clone 116584 (TRAV21, TRAJ37)
CAVSSGNTGKLIF

SEQ ID NO: 233168 - protein, 13 aa, Homo sapiens
  CDR3 for beta chain variable domain of TCR clone 116584 (TRBV4-1, TRBJ2-1)
CASSQEVQYEQFF

SEQ ID NO: 233169 - protein, 17 aa, Homo sapiens
  CDR3 for alpha chain variable domain of TCR clone 116585 (TRAV3, TRAJ42)
CAVRDRDYGGSQGNIIF

SEQ ID NO: 233170 - protein, 14 aa, Homo sapiens
  CDR3 for beta chain variable domain of TCR clone 116585 (TRBV7-3, TRBJ2-2)
CASSLNSNTGELFF

SEQ ID NO: 233171 - protein, 14 aa, Homo sapiens
  CDR3 for alpha chain variable domain of TCR clone 116586 (TRAV21, TRAJ35)
CAVMPIGFGNVLHC

SEQ ID NO: 233172 - protein, 12 aa, Homo sapiens
  CDR3 for beta chain variable domain of TCR clone 116586 (TRBV7-9, TRBJ2-7)
CATSIKREEQYF

SEQ ID NO: 233173 - protein, 12 aa, Homo sapiens
  CDR3 for alpha chain variable domain of TCR clone 116587 (TRAV36/DV7, TRAJ54)
CAVVRGAQKLVF

SEQ ID NO: 233174 - protein, 13 aa, Homo sapiens
  CDR3 for beta chain variable domain of TCR clone 116587 (TRBV19, TRBJ1-2)
CASSQGQVYGYTF

SEQ ID NO: 233175 - protein, 14 aa, Homo sapiens
  CDR3 for alpha chain variable domain of TCR clone 116588 (TRAV3, TRAJ37)
CAVKASGNTGKLIF

SEQ ID NO: 233176 - protein, 14 aa, Homo sapiens
  CDR3 for beta chain variable domain of TCR clone 116588 (TRBV2, TRBJ1-5)
CASSENRGGQPQHF

SEQ ID NO: 233177 - protein, 13 aa, Homo sapiens
  CDR3 for alpha chain variable domain of TCR clone 116589 (TRAV13-2, TRAJ48)
CAEMDFGNEKLTF

SEQ ID NO: 233178 - protein, 13 aa, Homo sapiens
  CDR3 for beta chain variable domain of TCR clone 116589 (TRBV4-1, TRBJ2-2)
CASSQENTGELFF

SEQ ID NO: 233179 - protein, 15 aa, Homo sapiens
  CDR3 for alpha chain variable domain of TCR clone 116590 (TRAV8-3, TRAJ40)
CAAPSLGSGTYKYIF

SEQ ID NO: 233180 - protein, 15 aa, Homo sapiens
  CDR3 for beta chain variable domain of TCR clone 116590 (TRBV19, TRBJ1-2)
CASSVGQVLNYGYTF

SEQ ID NO: 233181 - protein, 14 aa, Homo sapiens
  CDR3 for alpha chain variable domain of TCR clone 116591 (TRAV20, TRAJ4)
CAVRLGGGYNKLIF

SEQ ID NO: 233182 - protein, 16 aa, Homo sapiens
  CDR3 for beta chain variable domain of TCR clone 116591 (TRBV13, TRBJ2-2)
CASSPRTGEHTGELFF

SEQ ID NO: 233183 - protein, 11 aa, Homo sapiens
  CDR3 for alpha chain variable domain of TCR clone 116592 (TRAV2, TRAJ13)
CASGGYQKVTF

SEQ ID NO: 233184 - protein, 17 aa, Homo sapiens
  CDR3 for beta chain variable domain of TCR clone 116592 (TRBV7-3, TRBJ2-3)
CASSLIKRMRGADTQYF

SEQ ID NO: 233185 - protein, 14 aa, Homo sapiens
  CDR3 for alpha chain variable domain of TCR clone 116593 (TRAV2, TRAJ37)
CAVDFTSNTGKLIF

SEQ ID NO: 233186 - protein, 15 aa, Homo sapiens
  CDR3 for beta chain variable domain of TCR clone 116593 (TRBV19, TRBJ1-1)
CASSRGGALNTEAFF

SEQ ID NO: 233187 - protein, 18 aa, Homo sapiens
  CDR3 for alpha chain variable domain of TCR clone 116594 (TRAV12-3, TRAJ52)
CAMSVGGAGGTSYGKLTF

SEQ ID NO: 233188 - protein, 13 aa, Homo sapiens
  CDR3 for beta chain variable domain of TCR clone 116594 (TRBV7-7, TRBJ2-5)
CASSRSGQETQYF

SEQ ID NO: 233189 - protein, 16 aa, Homo sapiens
  CDR3 for alpha chain variable domain of TCR clone 116595 (TRAV26-2, TRAJ48)
CILRPPFNFGNEKLTF

SEQ ID NO: 233190 - protein, 15 aa, Homo sapiens
  CDR3 for beta chain variable domain of TCR clone 116595 (TRBV20-1, TRBJ2-3)
CSARVEGTYTDTQDF

SEQ ID NO: 233191 - protein, 17 aa, Homo sapiens
  CDR3 for alpha chain variable domain of TCR clone 116596 (TRAV3, TRAJ6)
CAVRDGPRAGGSYIPTF

SEQ ID NO: 233192 - protein, 13 aa, Homo sapiens
  CDR3 for beta chain variable domain of TCR clone 116596 (TRBV7-7, TRBJ2-3)
CASSLSRADTQYF

SEQ ID NO: 233193 - protein, 14 aa, Homo sapiens
  CDR3 for alpha chain variable domain of TCR clone 116597 (TRAV12-2, TRAJ40)
CAVKIPSGTYKYIF

SEQ ID NO: 233194 - protein, 14 aa, Homo sapiens
  CDR3 for beta chain variable domain of TCR clone 116597 (TRBV12-4, TRBJ1-1)
CASSLPPGVKEAFF

SEQ ID NO: 233195 - protein, 17 aa, Homo sapiens
  CDR3 for alpha chain variable domain of TCR clone 116598 (TRAV13-1, TRAJ52)
CAASIGAGGTSYGKLTF

SEQ ID NO: 233196 - protein, 15 aa, Homo sapiens
  CDR3 for beta chain variable domain of TCR clone 116598 (TRBV27, TRBJ2-1)
CASSLARGAYNEQFF

SEQ ID NO: 233197 - protein, 11 aa, Homo sapiens
  CDR3 for alpha chain variable domain of TCR clone 116599 (TRAV1-2, TRAJ20)
CAVANDYKLSF

SEQ ID NO: 233198 - protein, 16 aa, Homo sapiens
  CDR3 for beta chain variable domain of TCR clone 116599 (TRBV28, TRBJ2-7)
CASSLFFETGGPEQYF

SEQ ID NO: 233199 - protein, 14 aa, Homo sapiens
  CDR3 for alpha chain variable domain of TCR clone 116600 (TRAV17, TRAJ34)
CATDSLEGTDKLIF

SEQ ID NO: 233200 - protein, 14 aa, Homo sapiens
  CDR3 for beta chain variable domain of TCR clone 116600 (TRBV7-9, TRBJ2-1)
CASSPRDSLYEQFF

SEQ ID NO: 233201 - protein, 18 aa, Homo sapiens
  CDR3 for alpha chain variable domain of TCR clone 116601 (TRAV26-1, TRAJ52)
CIVRVEGAGGTSYGKLTF

SEQ ID NO: 233202 - protein, 14 aa, Homo sapiens
  CDR3 for beta chain variable domain of TCR clone 116601 (TRBV18, TRBJ2-5)
CASSPGVSQETQYF

SEQ ID NO: 233203 - protein, 15 aa, Homo sapiens
  CDR3 for alpha chain variable domain of TCR clone 116602 (TRAV35, TRAJ38)
CAGFSNAGNNRKLIW

SEQ ID NO: 233204 - protein, 18 aa, Homo sapiens
  CDR3 for beta chain variable domain of TCR clone 116602 (TRBV3-1, TRBJ1-2)
CASSQDVIGWNGDYGYTF

SEQ ID NO: 233205 - protein, 14 aa, Homo sapiens
  CDR3 for alpha chain variable domain of TCR clone 116603 (TRAV12-3, TRAJ10)
SHLPLTGGGNKLTF

SEQ ID NO: 233206 - protein, 13 aa, Homo sapiens
  CDR3 for beta chain variable domain of TCR clone 116603 (TRBV29-1, TRBJ2-3)
CGATRGGRDTQYF

SEQ ID NO: 233207 - protein, 13 aa, Homo sapiens
  CDR3 for alpha chain variable domain of TCR clone 116604 (TRAV3, TRAJ21)
CAVREPDFNKFYF

SEQ ID NO: 233208 - protein, 13 aa, Homo sapiens
  CDR3 for beta chain variable domain of TCR clone 116604 (TRBV9, TRBJ2-1)
CANSPSGGNEQFF

SEQ ID NO: 233209 - protein, 14 aa, Homo sapiens
  CDR3 for alpha chain variable domain of TCR clone 116605 (TRAV8-3, TRAJ16)
CAVDRFSDGQKLLF

SEQ ID NO: 233210 - protein, 15 aa, Homo sapiens
  CDR3 for beta chain variable domain of TCR clone 116605 (TRBV7-6, TRBJ2-1)
CASSPGQGPYNERFF

SEQ ID NO: 233211 - protein, 15 aa, Homo sapiens
  CDR3 for alpha chain variable domain of TCR clone 116606 (TRAV13-1, TRAJ45)
CAASGSGGGADGLTF

SEQ ID NO: 233212 - protein, 14 aa, Homo sapiens
  CDR3 for beta chain variable domain of TCR clone 116606 (TRBV12-4, TRBJ1-2)
CASSVVGTAYGYTF

SEQ ID NO: 233213 - protein, 13 aa, Homo sapiens
  CDR3 for alpha chain variable domain of TCR clone 116607 (TRAV1-1, TRAJ9)
CAAKNTGGFKTIF

SEQ ID NO: 233214 - protein, 14 aa, Homo sapiens
  CDR3 for beta chain variable domain of TCR clone 116607 (TRBV20-1, TRBJ2-1)
CSAQIGGSANEQVF

SEQ ID NO: 233215 - protein, 13 aa, Homo sapiens
  CDR3 for alpha chain variable domain of TCR clone 116608 (TRAV35, TRAJ36)
CAGPRIGANNLFF

SEQ ID NO: 233216 - protein, 15 aa, Homo sapiens
  CDR3 for beta chain variable domain of TCR clone 116608 (TRBV28, TRBJ2-5)
CASSPPWSYQETQYF

SEQ ID NO: 233217 - protein, 13 aa, Homo sapiens
  CDR3 for alpha chain variable domain of TCR clone 116609 (TRAV3, TRAJ15)
CAVRDQAGIALIF

SEQ ID NO: 233218 - protein, 15 aa, Homo sapiens
  CDR3 for beta chain variable domain of TCR clone 116609 (TRBV11-1, TRBJ2-7)
CASSLNYGASYEQYF

SEQ ID NO: 233219 - protein, 12 aa, Homo sapiens
  CDR3 for alpha chain variable domain of TCR clone 116610 (TRAV26-2, TRAJ48)
CILRKGSEKLTF

SEQ ID NO: 233220 - protein, 14 aa, Homo sapiens
  CDR3 for beta chain variable domain of TCR clone 116610 (TRBV28, TRBJ2-7)
CASSTLRGRFEQYF

SEQ ID NO: 233221 - protein, 12 aa, Homo sapiens
  CDR3 for alpha chain variable domain of TCR clone 116611 (TRAV12-3, TRAJ40)
CAVTSGTYKYIF

SEQ ID NO: 233222 - protein, 16 aa, Homo sapiens
  CDR3 for beta chain variable domain of TCR clone 116611 (TRBV5-4, TRBJ2-3)
CASQQPGAGGADTQYF

SEQ ID NO: 233223 - protein, 14 aa, Homo sapiens
  CDR3 for alpha chain variable domain of TCR clone 116612 (TRAV35, TRAJ22)
CAGLRPGSARQLTF

SEQ ID NO: 233224 - protein, 12 aa, Homo sapiens
  CDR3 for beta chain variable domain of TCR clone 116612 (TRBV4-2, TRBJ2-5)
CASGGAQETQYF

SEQ ID NO: 233225 - protein, 13 aa, Homo sapiens
  CDR3 for alpha chain variable domain of TCR clone 116613 (TRAV2, TRAJ40)
CAVVTSGAYKYIF

SEQ ID NO: 233226 - protein, 15 aa, Homo sapiens
  CDR3 for beta chain variable domain of TCR clone 116613 (TRBV28, TRBJ2-1)
CASSGLAEVDNEQFF

SEQ ID NO: 233227 - protein, 15 aa, Homo sapiens
  CDR3 for alpha chain variable domain of TCR clone 116614 (TRAV4, TRAJ39)
CLVGPNNNASNMLTF

SEQ ID NO: 233228 - protein, 15 aa, Homo sapiens
  CDR3 for beta chain variable domain of TCR clone 116614 (TRBV7-9, TRBJ1-6)
CASSSPGRGNSPLHF

SEQ ID NO: 233229 - protein, 15 aa, Homo sapiens
  CDR3 for alpha chain variable domain of TCR clone 116615 (TRAV14/DV4, TRAJ10)
CAMRELTGGGNKLTF

SEQ ID NO: 233230 - protein, 18 aa, Homo sapiens
  CDR3 for beta chain variable domain of TCR clone 116615 (TRBV7-9, TRBJ2-7)
CASSLTTSGSSTWYEQYF

SEQ ID NO: 233231 - protein, 12 aa, Homo sapiens
  CDR3 for alpha chain variable domain of TCR clone 116616 (TRAV2, TRAJ5)
CALDTGRRALTF

SEQ ID NO: 233232 - protein, 12 aa, Homo sapiens
  CDR3 for beta chain variable domain of TCR clone 116616 (TRBV11-2, TRBJ2-2)
CASSLGGGELFF

SEQ ID NO: 233233 - protein, 13 aa, Homo sapiens
  CDR3 for alpha chain variable domain of TCR clone 116617 (TRAV13-1, TRAJ6)
CAAIGGGSYIPTF

SEQ ID NO: 233234 - protein, 15 aa, Homo sapiens
  CDR3 for beta chain variable domain of TCR clone 116617 (TRBV5-1, TRBJ2-2)
CASSSQGGNTGELFF

SEQ ID NO: 233235 - protein, 14 aa, Homo sapiens
  CDR3 for alpha chain variable domain of TCR clone 116618 (TRAV8-3, TRAJ26)
CAVAPGNYGQNFVF

SEQ ID NO: 233236 - protein, 19 aa, Homo sapiens
  CDR3 for beta chain variable domain of TCR clone 116618 (TRBV25-1, TRBJ2-2)
CAILVYRVDRGRKTGELFF

SEQ ID NO: 233237 - protein, 12 aa, Homo sapiens
  CDR3 for alpha chain variable domain of TCR clone 116619 (TRAV17, TRAJ39)
CATGAAGNMHTF

SEQ ID NO: 233238 - protein, 14 aa, Homo sapiens
  CDR3 for beta chain variable domain of TCR clone 116619 (TRBV7-9, TRBJ1-2)
CASSRQGANYGYTF

SEQ ID NO: 233239 - protein, 11 aa, Homo sapiens
  CDR3 for alpha chain variable domain of TCR clone 116620 (TRAV1-1, TRAJ23)
CALRQGGKLIF

SEQ ID NO: 233240 - protein, 12 aa, Homo sapiens
  CDR3 for beta chain variable domain of TCR clone 116620 (TRBV19, TRBJ1-5)
CASSIAQQPQHF

SEQ ID NO: 233241 - protein, 13 aa, Homo sapiens
  CDR3 for alpha chain variable domain of TCR clone 116621 (TRAV29/DV5, TRAJ31)
CAASRNNNARLMF

SEQ ID NO: 233242 - protein, 15 aa, Homo sapiens
  CDR3 for beta chain variable domain of TCR clone 116621 (TRBV12-4, TRBJ1-2)
CASSKTAGAIYGYTF

SEQ ID NO: 233243 - protein, 16 aa, Homo sapiens
  CDR3 for alpha chain variable domain of TCR clone 116622 (TRAV30, TRAJ24)
CGTEIVDADSWGKFQF

SEQ ID NO: 233244 - protein, 14 aa, Homo sapiens
  CDR3 for beta chain variable domain of TCR clone 116622 (TRBV19, TRBJ2-1)
CASPTLVLSGEQFF

SEQ ID NO: 233245 - protein, 15 aa, Homo sapiens
  CDR3 for alpha chain variable domain of TCR clone 116623 (TRAV3, TRAJ22)
CAVRDRGGSARQLTF

SEQ ID NO: 233246 - protein, 13 aa, Homo sapiens
  CDR3 for beta chain variable domain of TCR clone 116623 (TRBV7-7, TRBJ2-3)
CASSLSRADTQYF

SEQ ID NO: 233247 - protein, 12 aa, Homo sapiens
  CDR3 for alpha chain variable domain of TCR clone 116624 (TRAV3, TRAJ43)
CAVRDPNNDMRF

SEQ ID NO: 233248 - protein, 15 aa, Homo sapiens
  CDR3 for beta chain variable domain of TCR clone 116624 (TRBV27, TRBJ1-5)
CASSLGTGFDQPHHF

SEQ ID NO: 233249 - protein, 13 aa, Homo sapiens
  CDR3 for alpha chain variable domain of TCR clone 116625 (TRAV12-2, TRAJ6)
CAVNVSRKLHTYI

SEQ ID NO: 233250 - protein, 12 aa, Homo sapiens
  CDR3 for beta chain variable domain of TCR clone 116625 (TRBV29-1, TRBJ2-3)
CRVTGGADTQYF

SEQ ID NO: 233251 - protein, 13 aa, Homo sapiens
  CDR3 for alpha chain variable domain of TCR clone 116626 (TRAV8-4, TRAJ30)
CAVNRNRDDKIIF

SEQ ID NO: 233252 - protein, 16 aa, Homo sapiens
  CDR3 for beta chain variable domain of TCR clone 116626 (TRBV28, TRBJ2-2)
CASSLEGGSNTGELFF

SEQ ID NO: 233253 - protein, 13 aa, Homo sapiens
  CDR3 for alpha chain variable domain of TCR clone 116627 (TRAV1-2, TRAJ9)
YAALNTGGFKTIF

SEQ ID NO: 233254 - protein, 13 aa, Homo sapiens
  CDR3 for beta chain variable domain of TCR clone 116627 (TRBV19, TRBJ1-2)
CASSVPGQDGYAF

SEQ ID NO: 233255 - protein, 15 aa, Homo sapiens
  CDR3 for alpha chain variable domain of TCR clone 116628 (TRAV13-2, TRAJ16)
CAENDRFSDGQKLLF

SEQ ID NO: 233256 - protein, 14 aa, Homo sapiens
  CDR3 for beta chain variable domain of TCR clone 116628 (TRBV4-2, TRBJ1-5)
CASSRDRGKQPQHF

SEQ ID NO: 233257 - protein, 14 aa, Homo sapiens
  CDR3 for alpha chain variable domain of TCR clone 116629 (TRAV1-2, TRAJ8)
CAVREDTGFQKLVF

SEQ ID NO: 233258 - protein, 14 aa, Homo sapiens
  CDR3 for beta chain variable domain of TCR clone 116629 (TRBV24-1, TRBJ1-1)
CATASGGGATEAFF

SEQ ID NO: 233259 - protein, 17 aa, Homo sapiens
  CDR3 for alpha chain variable domain of TCR clone 116630 (TRAV26-1, TRAJ28)
CIVRALYSGAGSYQLTF

SEQ ID NO: 233260 - protein, 12 aa, Homo sapiens
  CDR3 for beta chain variable domain of TCR clone 116630 (TRBV12-4, TRBJ2-1)
CASRQTENEQFL

SEQ ID NO: 233261 - protein, 17 aa, Homo sapiens
  CDR3 for alpha chain variable domain of TCR clone 116631 (TRAV3, TRAJ42)
CAVRDRDYGGSQGNLIF

SEQ ID NO: 233262 - protein, 13 aa, Homo sapiens
  CDR3 for beta chain variable domain of TCR clone 116631 (TRBV7-9, TRBJ2-1)
CASSLDVGNEQFF

SEQ ID NO: 233263 - protein, 16 aa, Homo sapiens
  CDR3 for alpha chain variable domain of TCR clone 116632 (TRAV30, TRAJ24)
CGTEIVDADSWGKFPF

SEQ ID NO: 233264 - protein, 14 aa, Homo sapiens
  CDR3 for beta chain variable domain of TCR clone 116632 (TRBV12-5, TRBJ2-5)
CASGSRTHQETQYF

SEQ ID NO: 233265 - protein, 15 aa, Homo sapiens
  CDR3 for alpha chain variable domain of TCR clone 116633 (TRAV13-1, TRAJ8)
CAASIPNTGFQKLVF

SEQ ID NO: 233266 - protein, 14 aa, Homo sapiens
  CDR3 for beta chain variable domain of TCR clone 116633 (TRBV19, TRBJ2-5)
CASSMTGQQETQYF

SEQ ID NO: 233267 - protein, 11 aa, Homo sapiens
  CDR3 for alpha chain variable domain of TCR clone 116634 (TRAV21, TRAJ41)
CAVMSGYALNF

SEQ ID NO: 233268 - protein, 13 aa, Homo sapiens
  CDR3 for beta chain variable domain of TCR clone 116634 (TRBV7-2, TRBJ2-5)
CASSQTSVETQYF

SEQ ID NO: 233269 - protein, 14 aa, Homo sapiens
  CDR3 for alpha chain variable domain of TCR clone 116635 (TRAV35, TRAJ50)
CASHRKTSYDKVIF

SEQ ID NO: 233270 - protein, 13 aa, Homo sapiens
  CDR3 for beta chain variable domain of TCR clone 116635 (TRBV7-7, TRBJ2-3)
CASSLSRADTQYF

SEQ ID NO: 233271 - protein, 15 aa, Homo sapiens
  CDR3 for alpha chain variable domain of TCR clone 116636 (TRAV12-1, TRAJ44)
CVVFVNTGTASKLTF

SEQ ID NO: 233272 - protein, 12 aa, Homo sapiens
  CDR3 for beta chain variable domain of TCR clone 116636 (TRBV11-2, TRBJ2-5)
CASSLDTQTQYF

SEQ ID NO: 233273 - protein, 13 aa, Homo sapiens
  CDR3 for alpha chain variable domain of TCR clone 116637 (TRAV30, TRAJ49)
CGTEPNTSNQFYF

SEQ ID NO: 233274 - protein, 14 aa, Homo sapiens
  CDR3 for beta chain variable domain of TCR clone 116637 (TRBV29-1, TRBJ2-1)
CSVEFRGIPFEQFF

SEQ ID NO: 233275 - protein, 15 aa, Homo sapiens
  CDR3 for alpha chain variable domain of TCR clone 116638 (TRAV1-2, TRAJ17)
CAVSGYGAAGNKLTF

SEQ ID NO: 233276 - protein, 23 aa, Homo sapiens
  CDR3 for beta chain variable domain of TCR clone 116638 (TRBV11-2, TRBJ2-5)
CASSSPGGEGAASRDPVLRARHA

SEQ ID NO: 233277 - protein, 12 aa, Homo sapiens
  CDR3 for alpha chain variable domain of TCR clone 116639 (TRAV25, TRAJ50)
CAGGTSYDKVIF

SEQ ID NO: 233278 - protein, 14 aa, Homo sapiens
  CDR3 for beta chain variable domain of TCR clone 116639 (TRBV19, TRBJ2-1)
CASPTFVLSGEQFF

SEQ ID NO: 233279 - protein, 12 aa, Homo sapiens
  CDR3 for alpha chain variable domain of TCR clone 116640 (TRAV21, TRAJ48)
PGPSGGYQKVTF

SEQ ID NO: 233280 - protein, 14 aa, Homo sapiens
  CDR3 for beta chain variable domain of TCR clone 116640 (TRBV20-1, TRBJ2-7)
CSAKDRKGAYEQYF

SEQ ID NO: 233281 - protein, 16 aa, Homo sapiens
  CDR3 for alpha chain variable domain of TCR clone 116641 (TRAV8-3, TRAJ8)
CAVPRDGNTGLQKLVF

SEQ ID NO: 233282 - protein, 14 aa, Homo sapiens
  CDR3 for beta chain variable domain of TCR clone 116641 (TRBV28, TRBJ1-1)
CASSESGRGTEAFF

SEQ ID NO: 233283 - protein, 16 aa, Homo sapiens
  CDR3 for alpha chain variable domain of TCR clone 116642 (TRAV13-1, TRAJ48)
CAASTFGNFGNEKLTF

SEQ ID NO: 233284 - protein, 12 aa, Homo sapiens
  CDR3 for beta chain variable domain of TCR clone 116642 (TRBV14, TRBJ2-4)
CASSNLKSIQYF

SEQ ID NO: 233285 - protein, 15 aa, Homo sapiens
  CDR3 for alpha chain variable domain of TCR clone 116643 (TRAV26-1, TRAJ29)
CIVRVEGSGNTPLVF

SEQ ID NO: 233286 - protein, 15 aa, Homo sapiens
  CDR3 for beta chain variable domain of TCR clone 116643 (TRBV20-1, TRBJ2-5)
CSASPLAGGQETQYF

SEQ ID NO: 233287 - protein, 14 aa, Homo sapiens
  CDR3 for alpha chain variable domain of TCR clone 116644 (TRAV21, TRAJ22)
CAVRSSGSARQLTF

SEQ ID NO: 233288 - protein, 13 aa, Homo sapiens
  CDR3 for beta chain variable domain of TCR clone 116644 (TRBV27, TRBJ2-7)
CASSFPQGYEQYF

SEQ ID NO: 233289 - protein, 12 aa, Homo sapiens
  CDR3 for alpha chain variable domain of TCR clone 116645 (TRAV20, TRAJ45)
CAVRGGADGLTF

SEQ ID NO: 233290 - protein, 12 aa, Homo sapiens
  CDR3 for beta chain variable domain of TCR clone 116645 (TRBV7-8, TRBJ2-1)
CASSLGHNEQFF

SEQ ID NO: 233291 - protein, 19 aa, Homo sapiens
  CDR3 for alpha chain variable domain of TCR clone 116646 (TRAV27, TRAJ53)
ASTSVQSRNSGGSNYKLTF

SEQ ID NO: 233292 - protein, 14 aa, Homo sapiens
  CDR3 for beta chain variable domain of TCR clone 116646 (TRBV11-1, TRBJ2-7)
CASTFAVPSYEQYV

SEQ ID NO: 233293 - protein, 18 aa, Homo sapiens
  CDR3 for alpha chain variable domain of TCR clone 116647 (TRAV13-1, TRAJ52)
CAADFPNAGGTSYGKLTF

SEQ ID NO: 233294 - protein, 17 aa, Homo sapiens
  CDR3 for beta chain variable domain of TCR clone 116647 (TRBV7-3, TRBJ2-3)
CASSPRGQGYGTDTQYF

SEQ ID NO: 233295 - protein, 11 aa, Homo sapiens
  CDR3 for alpha chain variable domain of TCR clone 116648 (TRAV2, TRAJ13)
CASGGYQKVTF

SEQ ID NO: 233296 - protein, 16 aa, Homo sapiens
  CDR3 for beta chain variable domain of TCR clone 116648 (TRBV7-3, TRBJ2-2)
CASSLKRGTLSWELFF

SEQ ID NO: 233297 - protein, 16 aa, Homo sapiens
  CDR3 for alpha chain variable domain of TCR clone 116649 (TRAV27, TRAJ13)
CAGAKSDSGGYQKVTF

SEQ ID NO: 233298 - protein, 14 aa, Homo sapiens
  CDR3 for beta chain variable domain of TCR clone 116649 (TRBV7-2, TRBJ2-7)
CASSPKTSFYEQYF

SEQ ID NO: 233299 - protein, 16 aa, Homo sapiens
  CDR3 for alpha chain variable domain of TCR clone 116650 (TRAV4, TRAJ9)
CLAGDPNRPGGFKTIF

SEQ ID NO: 233300 - protein, 16 aa, Homo sapiens
  CDR3 for beta chain variable domain of TCR clone 116650 (TRBV28, TRBJ1-4)
CASSPPYRGRSEKLFF

SEQ ID NO: 233301 - protein, 12 aa, Homo sapiens
  CDR3 for alpha chain variable domain of TCR clone 116651 (TRAV2, TRAJ13)
CAVTGGYQKVTF

SEQ ID NO: 233302 - protein, 17 aa, Homo sapiens
  CDR3 for beta chain variable domain of TCR clone 116651 (TRBV19, TRBJ2-7)
CASSISFYDSYPYEQYF

SEQ ID NO: 233303 - protein, 15 aa, Homo sapiens
  CDR3 for alpha chain variable domain of TCR clone 116652 (TRAV12-1, TRAJ9)
CVVSFGDTGGFKTIF

SEQ ID NO: 233304 - protein, 15 aa, Homo sapiens
  CDR3 for beta chain variable domain of TCR clone 116652 (TRBV12-4, TRBJ2-5)
CASSPPTGLQETQYF

SEQ ID NO: 233305 - protein, 18 aa, Homo sapiens
  CDR3 for alpha chain variable domain of TCR clone 116653 (TRAV21, TRAJ52)
CAVRPSPAGGTSYGKLTF

SEQ ID NO: 233306 - protein, 15 aa, Homo sapiens
  CDR3 for beta chain variable domain of TCR clone 116653 (TRBV9, TRBJ2-1)
CASSLAGSSYNEQFF

SEQ ID NO: 233307 - protein, 17 aa, Homo sapiens
  CDR3 for alpha chain variable domain of TCR clone 116654 (TRAV3, TRAJ6)
CAVRDGPRAGGSYIPTF

SEQ ID NO: 233308 - protein, 20 aa, Homo sapiens
  CDR3 for beta chain variable domain of TCR clone 116654 (TRBV28, TRBJ2-1)
CSSTPIGRSPGLAGGNEQFF

SEQ ID NO: 233309 - protein, 15 aa, Homo sapiens
  CDR3 for alpha chain variable domain of TCR clone 116655 (TRAV12-1, TRAJ10)
CVVNKPTGGGNKLTF

SEQ ID NO: 233310 - protein, 17 aa, Homo sapiens
  CDR3 for beta chain variable domain of TCR clone 116655 (TRBV5-1, TRBJ1-6)
CASSPSLQGSDNSPLHF

SEQ ID NO: 233311 - protein, 16 aa, Homo sapiens
  CDR3 for alpha chain variable domain of TCR clone 116656 (TRAV19, TRAJ24)
CSSPLSTTDSWGKLQF

SEQ ID NO: 233312 - protein, 14 aa, Homo sapiens
  CDR3 for beta chain variable domain of TCR clone 116656 (TRBV27, TRBJ1-5)
CASSLDRSNQPQHF

SEQ ID NO: 233313 - protein, 13 aa, Homo sapiens
  CDR3 for alpha chain variable domain of TCR clone 116657 (TRAV29/DV5, TRAJ48)
CAASLFGNEKLTF

SEQ ID NO: 233314 - protein, 15 aa, Homo sapiens
  CDR3 for beta chain variable domain of TCR clone 116657 (TRBV20-1, TRBJ1-1)
CSAKPEQKMNTEAFF

SEQ ID NO: 233315 - protein, 12 aa, Homo sapiens
  CDR3 for alpha chain variable domain of TCR clone 116658 (TRAV16, TRAJ10)
CSRTGGGNKLTF

SEQ ID NO: 233316 - protein, 15 aa, Homo sapiens
  CDR3 for beta chain variable domain of TCR clone 116658 (TRBV11-2, TRBJ2-1)
CASSLGTSGLNEQFF

SEQ ID NO: 233317 - protein, 15 aa, Homo sapiens
  CDR3 for alpha chain variable domain of TCR clone 116659 (TRAV20, TRAJ6)
CAVRLQSGGSYIPTF

SEQ ID NO: 233318 - protein, 14 aa, Homo sapiens
  CDR3 for beta chain variable domain of TCR clone 116659 (TRBV19, TRBJ2-1)
CASPTFVLSGEQFF

SEQ ID NO: 233319 - protein, 14 aa, Homo sapiens
  CDR3 for alpha chain variable domain of TCR clone 116660 (TRAV13-1, TRAJ48)
CAASRSFGNEKLTL

SEQ ID NO: 233320 - protein, 12 aa, Homo sapiens
  CDR3 for beta chain variable domain of TCR clone 116660 (TRBV6-6, TRBJ2-5)
CASNRQSGTQYF

SEQ ID NO: 233321 - protein, 17 aa, Homo sapiens
  CDR3 for alpha chain variable domain of TCR clone 116661 (TRAV38-2/DV8, TRAJ45)
CAYRSMYSGGGADGLTF

SEQ ID NO: 233322 - protein, 17 aa, Homo sapiens
  CDR3 for beta chain variable domain of TCR clone 116661 (TRBV7-9, TRBJ1-1)
CASSLGIAGAENTEAFF

SEQ ID NO: 233323 - protein, 13 aa, Homo sapiens
  CDR3 for alpha chain variable domain of TCR clone 116662 (TRAV8-3, TRAJ21)
CAVGAYNFNKFYF

SEQ ID NO: 233324 - protein, 12 aa, Homo sapiens
  CDR3 for beta chain variable domain of TCR clone 116662 (TRBV7-8, TRBJ2-7)
CASSLGDREQYF

SEQ ID NO: 233325 - protein, 14 aa, Homo sapiens
  CDR3 for alpha chain variable domain of TCR clone 116663 (TRAV12-2, TRAJ5)
CAVNRSTGRRALTF

SEQ ID NO: 233326 - protein, 13 aa, Homo sapiens
  CDR3 for beta chain variable domain of TCR clone 116663 (TRBV19, TRBJ1-2)
CASSVPGQDGYTF

SEQ ID NO: 233327 - protein, 11 aa, Homo sapiens
  CDR3 for alpha chain variable domain of TCR clone 116664 (TRAV2, TRAJ13)
CASGGYQKVTF

SEQ ID NO: 233328 - protein, 16 aa, Homo sapiens
  CDR3 for beta chain variable domain of TCR clone 116664 (TRBV12-4, TRBJ2-3)
CASSFISGSGTDTQYF

SEQ ID NO: 233329 - protein, 11 aa, Homo sapiens
  CDR3 for alpha chain variable domain of TCR clone 116665 (TRAV1-2, TRAJ20)
CAVANDYKLSF

SEQ ID NO: 233330 - protein, 15 aa, Homo sapiens
  CDR3 for beta chain variable domain of TCR clone 116665 (TRBV4-2, TRBJ1-2)
CASSQRTGGRDGYTF

SEQ ID NO: 233331 - protein, 17 aa, Homo sapiens
  CDR3 for alpha chain variable domain of TCR clone 116666 (TRAV38-2/DV8, TRAJ23)
CALSRKLIFGQGTELSA

SEQ ID NO: 233332 - protein, 17 aa, Homo sapiens
  CDR3 for beta chain variable domain of TCR clone 116666 (TRBV5-4, TRBJ2-1)
CASSSAGGRGPYNEQFF

SEQ ID NO: 233333 - protein, 12 aa, Homo sapiens
  CDR3 for alpha chain variable domain of TCR clone 116667 (TRAV12-3, TRAJ17)
CAMTLTGNKLTF

SEQ ID NO: 233334 - protein, 13 aa, Homo sapiens
  CDR3 for beta chain variable domain of TCR clone 116667 (TRBV7-3, TRBJ1-1)
CASRQDWGAEAFF

SEQ ID NO: 233335 - protein, 13 aa, Homo sapiens
  CDR3 for alpha chain variable domain of TCR clone 116668 (TRAV27, TRAJ40)
CAGPPSGAYKYIF

SEQ ID NO: 233336 - protein, 13 aa, Homo sapiens
  CDR3 for beta chain variable domain of TCR clone 116668 (TRBV28, TRBJ1-2)
CAGRDRGNYGYTF

SEQ ID NO: 233337 - protein, 14 aa, Homo sapiens
  CDR3 for alpha chain variable domain of TCR clone 116669 (TRAV23/DV6, TRAJ37)
CAARTSSNTGKLIF

SEQ ID NO: 233338 - protein, 13 aa, Homo sapiens
  CDR3 for beta chain variable domain of TCR clone 116669 (TRBV7-7, TRBJ1-1)
CASSLGANTEAFF

SEQ ID NO: 233339 - protein, 15 aa, Homo sapiens
  CDR3 for alpha chain variable domain of TCR clone 116670 (TRAV3, TRAJ22)
CAVRDRGGSARQLTF

SEQ ID NO: 233340 - protein, 13 aa, Homo sapiens
  CDR3 for beta chain variable domain of TCR clone 116670 (TRBV11-1, TRBJ1-1)
CASSKQGRTEAFF

SEQ ID NO: 233341 - protein, 12 aa, Homo sapiens
  CDR3 for alpha chain variable domain of TCR clone 116671 (TRAV12-3, TRAJ4)
CAMTGAGTRLAV

SEQ ID NO: 233342 - protein, 14 aa, Homo sapiens
  CDR3 for beta chain variable domain of TCR clone 116671 (TRBV10-3, TRBJ1-1)
CAISDTDRGVEDFF

SEQ ID NO: 233343 - protein, 12 aa, Homo sapiens
  CDR3 for alpha chain variable domain of TCR clone 116672 (TRAV3, TRAJ26)
CAVRDYGQNFVF

SEQ ID NO: 233344 - protein, 12 aa, Homo sapiens
  CDR3 for beta chain variable domain of TCR clone 116672 (TRBV5-1, TRBJ2-7)
CASSFRGYEQYF

SEQ ID NO: 233345 - protein, 14 aa, Homo sapiens
  CDR3 for alpha chain variable domain of TCR clone 116673 (TRAV13-2, TRAJ43)
CAEIPTYNNNAMRF

SEQ ID NO: 233346 - protein, 15 aa, Homo sapiens
  CDR3 for beta chain variable domain of TCR clone 116673 (TRBV7-9, TRBJ2-2)
CASGPLDTFPGELFF

SEQ ID NO: 233347 - protein, 11 aa, Homo sapiens
  CDR3 for alpha chain variable domain of TCR clone 116674 (TRAV23/DV6, TRAJ9)
CFHTGGFKTIF

SEQ ID NO: 233348 - protein, 16 aa, Homo sapiens
  CDR3 for beta chain variable domain of TCR clone 116674 (TRBV7-3, TRBJ2-3)
CASSPTGYQSTDTQYF

SEQ ID NO: 233349 - protein, 16 aa, Homo sapiens
  CDR3 for alpha chain variable domain of TCR clone 116675 (TRAV3, TRAJ17)
CAVRDGSPAAGNKLTF

SEQ ID NO: 233350 - protein, 14 aa, Homo sapiens
  CDR3 for beta chain variable domain of TCR clone 116675 (TRBV15, TRBJ2-1)
CATNHGGRHNEQFL

SEQ ID NO: 233351 - protein, 14 aa, Homo sapiens
  CDR3 for alpha chain variable domain of TCR clone 116676 (TRAV21, TRAJ9)
CCGGGGTGGCKTIF

SEQ ID NO: 233352 - protein, 13 aa, Homo sapiens
  CDR3 for beta chain variable domain of TCR clone 116676 (TRBV12-4, TRBJ1-2)
CASSSGLTVISTF

SEQ ID NO: 233353 - protein, 16 aa, Homo sapiens
  CDR3 for alpha chain variable domain of TCR clone 116677 (TRAV4, TRAJ5)
CLVGPDHGHGQGSTYF

SEQ ID NO: 233354 - protein, 15 aa, Homo sapiens
  CDR3 for beta chain variable domain of TCR clone 116677 (TRBV27, TRBJ2-5)
CASSLIPSGGETQYF

SEQ ID NO: 233355 - protein, 11 aa, Homo sapiens
  CDR3 for alpha chain variable domain of TCR clone 116678 (TRAV12-1, TRAJ43)
CVEYDNNDMRF

SEQ ID NO: 233356 - protein, 16 aa, Homo sapiens
  CDR3 for beta chain variable domain of TCR clone 116678 (TRBV5-4, TRBJ2-1)
CASSLVGSGKDNEQFF

SEQ ID NO: 233357 - protein, 14 aa, Homo sapiens
  CDR3 for alpha chain variable domain of TCR clone 116679 (TRAV12-2, TRAJ44)
CAVNKAGTASKLTF

SEQ ID NO: 233358 - protein, 17 aa, Homo sapiens
  CDR3 for beta chain variable domain of TCR clone 116679 (TRBV2, TRBJ1-5)
CASSVGTGMRGYQPQHF

SEQ ID NO: 233359 - protein, 15 aa, Homo sapiens
  CDR3 for alpha chain variable domain of TCR clone 116680 (TRAV38-1, TRAJ37)
CAFIHGSGNTGKLIF

SEQ ID NO: 233360 - protein, 12 aa, Homo sapiens
  CDR3 for beta chain variable domain of TCR clone 116680 (TRBV7-9, TRBJ2-7)
CPSSFGSYEQYF

SEQ ID NO: 233361 - protein, 15 aa, Homo sapiens
  CDR3 for alpha chain variable domain of TCR clone 116681 (TRAV8-3, TRAJ45)
CASSYSGGGADGLTF

SEQ ID NO: 233362 - protein, 12 aa, Homo sapiens
  CDR3 for beta chain variable domain of TCR clone 116681 (TRBV7-8, TRBJ2-7)
CASEGGPHGQYF

SEQ ID NO: 233363 - protein, 15 aa, Homo sapiens
  CDR3 for alpha chain variable domain of TCR clone 116682 (TRAV3, TRAJ22)
CAVRDRGGSARQLTF

SEQ ID NO: 233364 - protein, 14 aa, Homo sapiens
  CDR3 for beta chain variable domain of TCR clone 116682 (TRBV24-1, TRBJ1-1)
CATSIPRGDTEAFF

SEQ ID NO: 233365 - protein, 16 aa, Homo sapiens
  CDR3 for alpha chain variable domain of TCR clone 116683 (TRAV30, TRAJ24)
CGTEIVDADSWGKFQF

SEQ ID NO: 233366 - protein, 14 aa, Homo sapiens
  CDR3 for beta chain variable domain of TCR clone 116683 (TRBV12-5, TRBJ2-5)
CASVSRTHQGTQYF

SEQ ID NO: 233367 - protein, 12 aa, Homo sapiens
  CDR3 for alpha chain variable domain of TCR clone 116684 (TRAV8-3, TRAJ20)
CAVGANDYKLSF

SEQ ID NO: 233368 - protein, 13 aa, Homo sapiens
  CDR3 for beta chain variable domain of TCR clone 116684 (TRBV12-4, TRBJ1-2)
CASSLRQGKGYTF

SEQ ID NO: 233369 - protein, 12 aa, Homo sapiens
  CDR3 for alpha chain variable domain of TCR clone 116685 (TRAV3, TRAJ20)
CAVRDPDYKLSF

SEQ ID NO: 233370 - protein, 15 aa, Homo sapiens
  CDR3 for beta chain variable domain of TCR clone 116685 (TRBV19, TRBJ2-1)
CASSTGTSSYNEQFF

SEQ ID NO: 233371 - protein, 13 aa, Homo sapiens
  CDR3 for alpha chain variable domain of TCR clone 116686 (TRAV2, TRAJ15)
CAVVSQAGTALIF

SEQ ID NO: 233372 - protein, 15 aa, Homo sapiens
  CDR3 for beta chain variable domain of TCR clone 116686 (TRBV20-1, TRBJ2-7)
CSARDRVSGMDEQYF

SEQ ID NO: 233373 - protein, 18 aa, Homo sapiens
  CDR3 for alpha chain variable domain of TCR clone 116687 (TRAV26-2, TRAJ54)
CILRVVEVGIQGAQKLVF

SEQ ID NO: 233374 - protein, 17 aa, Homo sapiens
  CDR3 for beta chain variable domain of TCR clone 116687 (TRBV20-1, TRBJ1-5)
CSASLSPGQGGNQPQHF

SEQ ID NO: 233375 - protein, 16 aa, Homo sapiens
  CDR3 for alpha chain variable domain of TCR clone 116688 (TRAV12-1, TRAJ48)
CLVNMVSNFGNEKLTF

SEQ ID NO: 233376 - protein, 18 aa, Homo sapiens
  CDR3 for beta chain variable domain of TCR clone 116688 (TRBV11-2, TRBJ2-6)
CASSLNPFLGTGANVLTF

SEQ ID NO: 233377 - protein, 14 aa, Homo sapiens
  CDR3 for alpha chain variable domain of TCR clone 116689 (TRAV38-1, TRAJ39)
CAFAYNNAGNMLTF

SEQ ID NO: 233378 - protein, 15 aa, Homo sapiens
  CDR3 for beta chain variable domain of TCR clone 116689 (TRBV19, TRBJ2-6)
CASSIGPSGANGLTF

SEQ ID NO: 233379 - protein, 14 aa, Homo sapiens
  CDR3 for alpha chain variable domain of TCR clone 116690 (TRAV1-2, TRAJ16)
CAVNRFSDVQKLLF

SEQ ID NO: 233380 - protein, 13 aa, Homo sapiens
  CDR3 for beta chain variable domain of TCR clone 116690 (TRBV29-1, TRBJ1-1)
CSVGDSRNTEAFF

SEQ ID NO: 233381 - protein, 15 aa, Homo sapiens
  CDR3 for alpha chain variable domain of TCR clone 116691 (TRAV17, TRAJ4)
CATGTWSGGYNKLIF

SEQ ID NO: 233382 - protein, 13 aa, Homo sapiens
  CDR3 for beta chain variable domain of TCR clone 116691 (TRBV10-1, TRBJ2-1)
CASSAGPDNEQFF

SEQ ID NO: 233383 - protein, 13 aa, Homo sapiens
  CDR3 for alpha chain variable domain of TCR clone 116692 (TRAV12-3, TRAJ13)
CAMTSGGYQKVTF

SEQ ID NO: 233384 - protein, 18 aa, Homo sapiens
  CDR3 for beta chain variable domain of TCR clone 116692 (TRBV7-9, TRBJ2-2)
CASSFRDLNAGNTGELFF

SEQ ID NO: 233385 - protein, 14 aa, Homo sapiens
  CDR3 for alpha chain variable domain of TCR clone 116693 (TRAV12-3, TRAJ10)
SHLPLTGGGNKLTF

SEQ ID NO: 233386 - protein, 15 aa, Homo sapiens
  CDR3 for beta chain variable domain of TCR clone 116693 (TRBV11-2, TRBJ1-3)
CASSLDRTVGNTIYF

SEQ ID NO: 233387 - protein, 12 aa, Homo sapiens
  CDR3 for alpha chain variable domain of TCR clone 116694 (TRAV26-1, TRAJ43)
CIVRGNNNDMRF

SEQ ID NO: 233388 - protein, 13 aa, Homo sapiens
  CDR3 for beta chain variable domain of TCR clone 116694 (TRBV20-1, TRBJ2-3)
CSAIYPGADTRYF

SEQ ID NO: 233389 - protein, 14 aa, Homo sapiens
  CDR3 for alpha chain variable domain of TCR clone 116695 (TRAV16, TRAJ42)
CALLAGGSQGNLLF

SEQ ID NO: 233390 - protein, 15 aa, Homo sapiens
  CDR3 for beta chain variable domain of TCR clone 116695 (TRBV2, TRBJ2-7)
CASSEGLARSYEQYF

SEQ ID NO: 233391 - protein, 15 aa, Homo sapiens
  CDR3 for alpha chain variable domain of TCR clone 116696 (TRAV21, TRAJ53)
CATLNSGGSNYKLTF

SEQ ID NO: 233392 - protein, 16 aa, Homo sapiens
  CDR3 for beta chain variable domain of TCR clone 116696 (TRBV4-2, TRBJ2-7)
CASSQDRGTSSYEQYF

SEQ ID NO: 233393 - protein, 14 aa, Homo sapiens
  CDR3 for alpha chain variable domain of TCR clone 116697 (TRAV12-2, TRAJ13)
CAVKKTGGYLKVTF

SEQ ID NO: 233394 - protein, 12 aa, Homo sapiens
  CDR3 for beta chain variable domain of TCR clone 116697 (TRBV29-1, TRBJ1-1)
CSESDGNTEAFF

SEQ ID NO: 233395 - protein, 14 aa, Homo sapiens
  CDR3 for alpha chain variable domain of TCR clone 116698 (TRAV35, TRAJ33)
CAGSFQDSNYQLIW

SEQ ID NO: 233396 - protein, 15 aa, Homo sapiens
  CDR3 for beta chain variable domain of TCR clone 116698 (TRBV5-1, TRBJ1-4)
FAPAAWKDGNEKLFF

SEQ ID NO: 233397 - protein, 15 aa, Homo sapiens
  CDR3 for alpha chain variable domain of TCR clone 116699 (TRAV8-6, TRAJ26)
CAVSDQSPGGQNFVF

SEQ ID NO: 233398 - protein, 14 aa, Homo sapiens
  CDR3 for beta chain variable domain of TCR clone 116699 (TRBV19, TRBJ2-1)
CASPTFVLSGEQFF

SEQ ID NO: 233399 - protein, 19 aa, Homo sapiens
  CDR3 for alpha chain variable domain of TCR clone 116700 (TRAV2, TRAJ20)
ILQVREADAAVYRDCKLRF

SEQ ID NO: 233400 - protein, 16 aa, Homo sapiens
  CDR3 for beta chain variable domain of TCR clone 116700 (TRBV19, TRBJ2-1)
CASSKAGPSSYNEQFF

SEQ ID NO: 233401 - protein, 12 aa, Homo sapiens
  CDR3 for alpha chain variable domain of TCR clone 116701 (TRAV21, TRAJ37)
CAVRGNTGKLIF

SEQ ID NO: 233402 - protein, 14 aa, Homo sapiens
  CDR3 for beta chain variable domain of TCR clone 116701 (TRBV19, TRBJ2-1)
CASEVTGARNEQFC

SEQ ID NO: 233403 - protein, 13 aa, Homo sapiens
  CDR3 for alpha chain variable domain of TCR clone 116702 (TRAV20, TRAJ21)
CAVEGYNFNKFYF

SEQ ID NO: 233404 - protein, 14 aa, Homo sapiens
  CDR3 for beta chain variable domain of TCR clone 116702 (TRBV12-5, TRBJ2-5)
CASGSRTHHETQYF

SEQ ID NO: 233405 - protein, 14 aa, Homo sapiens
  CDR3 for alpha chain variable domain of TCR clone 116703 (TRAV1-2, TRAJ16)
CAVNRFSVGQKLLF

SEQ ID NO: 233406 - protein, 15 aa, Homo sapiens
  CDR3 for beta chain variable domain of TCR clone 116703 (TRBV6-1, TRBJ2-3)
CASSERGGITDTQYF

SEQ ID NO: 233407 - protein, 16 aa, Homo sapiens
  CDR3 for alpha chain variable domain of TCR clone 116704 (TRAV8-3, TRAJ18)
CAVGARRGSTLGRLYF

SEQ ID NO: 233408 - protein, 15 aa, Homo sapiens
  CDR3 for beta chain variable domain of TCR clone 116704 (TRBV7-9, TRBJ1-5)
CASSQGHQPNQPQHF

SEQ ID NO: 233409 - protein, 11 aa, Homo sapiens
  CDR3 for alpha chain variable domain of TCR clone 116705 (TRAV12-2, TRAJ49)
CAVHTGNQLYF

SEQ ID NO: 233410 - protein, 15 aa, Homo sapiens
  CDR3 for beta chain variable domain of TCR clone 116705 (TRBV4-2, TRBJ1-1)
CASSQQGAGDTEAFF

SEQ ID NO: 233411 - protein, 12 aa, Homo sapiens
  CDR3 for alpha chain variable domain of TCR clone 116706 (TRAV1-1, TRAJ15)
CAVGQAGTALIF

SEQ ID NO: 233412 - protein, 14 aa, Homo sapiens
  CDR3 for beta chain variable domain of TCR clone 116706 (TRBV11-2, TRBJ1-2)
CASSLYRGNYGYTF

SEQ ID NO: 233413 - protein, 18 aa, Homo sapiens
  CDR3 for alpha chain variable domain of TCR clone 116707 (TRAV14/DV4, TRAJ11)
CAMREAHHRNSGYSTLTF

SEQ ID NO: 233414 - protein, 13 aa, Homo sapiens
  CDR3 for beta chain variable domain of TCR clone 116707 (TRBV4-1, TRBJ2-1)
CASSQAGGDEQFF

SEQ ID NO: 233415 - protein, 18 aa, Homo sapiens
  CDR3 for alpha chain variable domain of TCR clone 116708 (TRAV12-3, TRAJ52)
CAMSRTNAGGTSYGKLTF

SEQ ID NO: 233416 - protein, 11 aa, Homo sapiens
  CDR3 for beta chain variable domain of TCR clone 116708 (TRBV6-3, TRBJ2-3)
CATGQADTQYF

SEQ ID NO: 233417 - protein, 12 aa, Homo sapiens
  CDR3 for alpha chain variable domain of TCR clone 116709 (TRAV1-1, TRAJ39)
CAVPVVGNMLTF

SEQ ID NO: 233418 - protein, 13 aa, Homo sapiens
  CDR3 for beta chain variable domain of TCR clone 116709 (TRBV4-1, TRBJ1-1)
CAGSRKMNTEAFF

SEQ ID NO: 233419 - protein, 12 aa, Homo sapiens
  CDR3 for alpha chain variable domain of TCR clone 116710 (TRAV26-1, TRAJ36)
CIVRVRVDNLFF

SEQ ID NO: 233420 - protein, 13 aa, Homo sapiens
  CDR3 for beta chain variable domain of TCR clone 116710 (TRBV11-2, TRBJ2-5)
CASSRGPSETQYF

SEQ ID NO: 233421 - protein, 11 aa, Homo sapiens
  CDR3 for alpha chain variable domain of TCR clone 116711 (TRAV12-2, TRAJ31)
CAILNNARLMF

SEQ ID NO: 233422 - protein, 14 aa, Homo sapiens
  CDR3 for beta chain variable domain of TCR clone 116711 (TRBV12-4, TRBJ2-5)
CASSFGASGGTQYF

SEQ ID NO: 233423 - protein, 12 aa, Homo sapiens
  CDR3 for alpha chain variable domain of TCR clone 116712 (TRAV12-3, TRAJ17)
CAMTLTGDKLTF

SEQ ID NO: 233424 - protein, 15 aa, Homo sapiens
  CDR3 for beta chain variable domain of TCR clone 116712 (TRBV11-3, TRBJ2-3)
CASLKDGREGDTQYF

SEQ ID NO: 233425 - protein, 14 aa, Homo sapiens
  CDR3 for alpha chain variable domain of TCR clone 116713 (TRAV12-2, TRAJ40)
CAVKIPSGTYKYIF

SEQ ID NO: 233426 - protein, 13 aa, Homo sapiens
  CDR3 for beta chain variable domain of TCR clone 116713 (TRBV6-5, TRBJ2-7)
CASSYSGQYEQYF

SEQ ID NO: 233427 - protein, 13 aa, Homo sapiens
  CDR3 for alpha chain variable domain of TCR clone 116714 (TRAV12-2, TRAJ9)
CAVKWAGGLKTIF

SEQ ID NO: 233428 - protein, 13 aa, Homo sapiens
  CDR3 for beta chain variable domain of TCR clone 116714 (TRBV7-3, TRBJ1-1)
CASSQDWGAEAFF

SEQ ID NO: 233429 - protein, 14 aa, Homo sapiens
  CDR3 for alpha chain variable domain of TCR clone 116715 (TRAV8-3, TRAJ39)
CAVGANNAGNMLTF

SEQ ID NO: 233430 - protein, 16 aa, Homo sapiens
  CDR3 for beta chain variable domain of TCR clone 116715 (TRBV2, TRBJ2-3)
CASSTSVEGVTDTQYF

SEQ ID NO: 233431 - protein, 14 aa, Homo sapiens
  CDR3 for alpha chain variable domain of TCR clone 116716 (TRAV20, TRAJ26)
CAVQAAIYGQNFFF

SEQ ID NO: 233432 - protein, 14 aa, Homo sapiens
  CDR3 for beta chain variable domain of TCR clone 116716 (TRBV27, TRBJ2-2)
CASSLGDTTGELFF

SEQ ID NO: 233433 - protein, 15 aa, Homo sapiens
  CDR3 for alpha chain variable domain of TCR clone 116717 (TRAV8-2, TRAJ16)
CVVSDGFSDGQKLLF

SEQ ID NO: 233434 - protein, 14 aa, Homo sapiens
  CDR3 for beta chain variable domain of TCR clone 116717 (TRBV7-3, TRBJ1-1)
CASSLGTGYTESFF

SEQ ID NO: 233435 - protein, 11 aa, Homo sapiens
  CDR3 for alpha chain variable domain of TCR clone 116718 (TRAV12-2, TRAJ33)
CAVTSTYQLIW

SEQ ID NO: 233436 - protein, 14 aa, Homo sapiens
  CDR3 for beta chain variable domain of TCR clone 116718 (TRBV12-4, TRBJ2-2)
CASNQGANTGELFF

SEQ ID NO: 233437 - protein, 19 aa, Homo sapiens
  CDR3 for alpha chain variable domain of TCR clone 116719 (TRAV1-2, TRAJ18)
CLLPPCSERRGSTLGRLYF

SEQ ID NO: 233438 - protein, 19 aa, Homo sapiens
  CDR3 for beta chain variable domain of TCR clone 116719 (TRBV6-3, TRBJ1-2)
CASSYSKGRTGPPNYGYTF

SEQ ID NO: 233439 - protein, 14 aa, Homo sapiens
  CDR3 for alpha chain variable domain of TCR clone 116720 (TRAV1-2, TRAJ8)
CAVREDTGFQKLVF

SEQ ID NO: 233440 - protein, 15 aa, Homo sapiens
  CDR3 for beta chain variable domain of TCR clone 116720 (TRBV7-9, TRBJ1-1)
CASSHRGTVSTEAFF

SEQ ID NO: 233441 - protein, 13 aa, Homo sapiens
  CDR3 for alpha chain variable domain of TCR clone 116721 (TRAV12-1, TRAJ9)
CVVLNTGGSKTIF

SEQ ID NO: 233442 - protein, 13 aa, Homo sapiens
  CDR3 for beta chain variable domain of TCR clone 116721 (TRBV20-1, TRBJ1-1)
CSARGGGNTEAFF

SEQ ID NO: 233443 - protein, 13 aa, Homo sapiens
  CDR3 for alpha chain variable domain of TCR clone 116722 (TRAV17, TRAJ40)
CARALGGTYKYIF

SEQ ID NO: 233444 - protein, 16 aa, Homo sapiens
  CDR3 for beta chain variable domain of TCR clone 116722 (TRBV7-2, TRBJ1-4)
CASSLAPGRRDEKLFF

SEQ ID NO: 233445 - protein, 12 aa, Homo sapiens
  CDR3 for alpha chain variable domain of TCR clone 116723 (TRAV12-3, TRAJ41)
CAMSYSGYALNF

SEQ ID NO: 233446 - protein, 13 aa, Homo sapiens
  CDR3 for beta chain variable domain of TCR clone 116723 (TRBV7-3, TRBJ2-1)
CASSLDSYNGQFF

SEQ ID NO: 233447 - protein, 14 aa, Homo sapiens
  CDR3 for alpha chain variable domain of TCR clone 116724 (TRAV12-2, TRAJ15)
CAPRTGQAGTALIF

SEQ ID NO: 233448 - protein, 14 aa, Homo sapiens
  CDR3 for beta chain variable domain of TCR clone 116724 (TRBV7-2, TRBJ2-7)
CASSPKTSFYEQYF

SEQ ID NO: 233449 - protein, 13 aa, Homo sapiens
  CDR3 for alpha chain variable domain of TCR clone 116725 (TRAV2, TRAJ21)
CAVEDLNFNKFYF

SEQ ID NO: 233450 - protein, 16 aa, Homo sapiens
  CDR3 for beta chain variable domain of TCR clone 116725 (TRBV11-2, TRBJ1-1)
CASSLRQGGEHSKAFF

SEQ ID NO: 233451 - protein, 16 aa, Homo sapiens
  CDR3 for alpha chain variable domain of TCR clone 116726 (TRAV23/DV6, TRAJ52)
CAARPSGGTSYGKLTF

SEQ ID NO: 233452 - protein, 13 aa, Homo sapiens
  CDR3 for beta chain variable domain of TCR clone 116726 (TRBV7-9, TRBJ1-1)
CASSVSGETEAFF

SEQ ID NO: 233453 - protein, 12 aa, Homo sapiens
  CDR3 for alpha chain variable domain of TCR clone 116727 (TRAV41, TRAJ58)
CAVETSGSRLTF

SEQ ID NO: 233454 - protein, 15 aa, Homo sapiens
  CDR3 for beta chain variable domain of TCR clone 116727 (TRBV29-1, TRBJ2-6)
CSVGDRGSGANGLTF

SEQ ID NO: 233455 - protein, 17 aa, Homo sapiens
  CDR3 for alpha chain variable domain of TCR clone 116728 (TRAV13-1, TRAJ52)
CASSSGAGGTSYGKLTF

SEQ ID NO: 233456 - protein, 15 aa, Homo sapiens
  CDR3 for beta chain variable domain of TCR clone 116728 (TRBV28, TRBJ2-4)
CAAGSGTLLMGIQYF

SEQ ID NO: 233457 - protein, 10 aa, Homo sapiens
  CDR3 for alpha chain variable domain of TCR clone 116729 (TRAV1-2, TRAJ31)
CVSEDARLMF

SEQ ID NO: 233458 - protein, 14 aa, Homo sapiens
  CDR3 for beta chain variable domain of TCR clone 116729 (TRBV19, TRBJ2-1)
CARPTFVLSGEQFF

SEQ ID NO: 233459 - protein, 11 aa, Homo sapiens
  CDR3 for alpha chain variable domain of TCR clone 116730 (TRAV35, TRAJ30)
CAGPGDDKIIF

SEQ ID NO: 233460 - protein, 13 aa, Homo sapiens
  CDR3 for beta chain variable domain of TCR clone 116730 (TRBV19, TRBJ1-2)
CASSVPGQDGYTF

SEQ ID NO: 233461 - protein, 12 aa, Homo sapiens
  CDR3 for alpha chain variable domain of TCR clone 116731 (TRAV21, TRAJ23)
CAVMLQGGKLIF

SEQ ID NO: 233462 - protein, 13 aa, Homo sapiens
  CDR3 for beta chain variable domain of TCR clone 116731 (TRBV20-1, TRBJ1-1)
CSARGGGNTEAFF

SEQ ID NO: 233463 - protein, 13 aa, Homo sapiens
  CDR3 for alpha chain variable domain of TCR clone 116732 (TRAV8-3, TRAJ48)
CCGCNFGNEKLTF

SEQ ID NO: 233464 - protein, 11 aa, Homo sapiens
  CDR3 for beta chain variable domain of TCR clone 116732 (TRBV19, TRBJ1-1)
CASSIGSEAFF

SEQ ID NO: 233465 - protein, 14 aa, Homo sapiens
  CDR3 for alpha chain variable domain of TCR clone 116733 (TRAV8-6, TRAJ39)
CAVSDHSAGNMLTF

SEQ ID NO: 233466 - protein, 15 aa, Homo sapiens
  CDR3 for beta chain variable domain of TCR clone 116733 (TRBV5-1, TRBJ2-1)
CASSPPRAPYNEQFF

SEQ ID NO: 233467 - protein, 13 aa, Homo sapiens
  CDR3 for alpha chain variable domain of TCR clone 116734 (TRAV20, TRAJ40)
CAVPFSGTYEYIF

SEQ ID NO: 233468 - protein, 13 aa, Homo sapiens
  CDR3 for beta chain variable domain of TCR clone 116734 (TRBV15, TRBJ2-5)
CATSQIGEETQYF

SEQ ID NO: 233469 - protein, 12 aa, Homo sapiens
  CDR3 for alpha chain variable domain of TCR clone 116735 (TRAV12-3, TRAJ17)
CAMTLTGNKLTS

SEQ ID NO: 233470 - protein, 12 aa, Homo sapiens
  CDR3 for beta chain variable domain of TCR clone 116735 (TRBV11-2, TRBJ2-7)
CASSLPTYEQYF

SEQ ID NO: 233471 - protein, 14 aa, Homo sapiens
  CDR3 for alpha chain variable domain of TCR clone 116736 (TRAV12-1, TRAJ30)
CVVNIGGRDDKIIF

SEQ ID NO: 233472 - protein, 13 aa, Homo sapiens
  CDR3 for beta chain variable domain of TCR clone 116736 (TRBV12-5, TRBJ2-1)
CASGLGRGNEQCF

SEQ ID NO: 233473 - protein, 16 aa, Homo sapiens
  CDR3 for alpha chain variable domain of TCR clone 116737 (TRAV17, TRAJ17)
CAMALQEEAAGNKLTF

SEQ ID NO: 233474 - protein, 12 aa, Homo sapiens
  CDR3 for beta chain variable domain of TCR clone 116737 (TRBV4-2, TRBJ2-5)
CASGGAQETQYF

SEQ ID NO: 233475 - protein, 15 aa, Homo sapiens
  CDR3 for alpha chain variable domain of TCR clone 116738 (TRAV17, TRAJ16)
CATALRLSDGQKLLF

SEQ ID NO: 233476 - protein, 12 aa, Homo sapiens
  CDR3 for beta chain variable domain of TCR clone 116738 (TRBV2, TRBJ2-7)
CASSDPDYEQYF

SEQ ID NO: 233477 - protein, 10 aa, Homo sapiens
  CDR3 for alpha chain variable domain of TCR clone 116739 (TRAV1-2, TRAJ23)
CAGQGGKLIF

SEQ ID NO: 233478 - protein, 16 aa, Homo sapiens
  CDR3 for beta chain variable domain of TCR clone 116739 (TRBV11-2, TRBJ1-1)
CASSSRQGGEHSKAFF

SEQ ID NO: 233479 - protein, 10 aa, Homo sapiens
  CDR3 for alpha chain variable domain of TCR clone 116740 (TRAV30, TRAJ48)
CGIGNEKLTF

SEQ ID NO: 233480 - protein, 16 aa, Homo sapiens
  CDR3 for beta chain variable domain of TCR clone 116740 (TRBV19, TRBJ2-1)
CASSKAVPSSYNEQFF

SEQ ID NO: 233481 - protein, 18 aa, Homo sapiens
  CDR3 for alpha chain variable domain of TCR clone 116741 (TRAV12-3, TRAJ52)
CAMSVGGAGGTSYGKLTF

SEQ ID NO: 233482 - protein, 15 aa, Homo sapiens
  CDR3 for beta chain variable domain of TCR clone 116741 (TRBV27, TRBJ1-6)
CASSFERGLGSPLHF

SEQ ID NO: 233483 - protein, 14 aa, Homo sapiens
  CDR3 for alpha chain variable domain of TCR clone 116742 (TRAV12-2, TRAJ11)
CVVEGGSGYSTLTF

SEQ ID NO: 233484 - protein, 14 aa, Homo sapiens
  CDR3 for beta chain variable domain of TCR clone 116742 (TRBV19, TRBJ2-1)
CASPTFVLSGEQFF

SEQ ID NO: 233485 - protein, 15 aa, Homo sapiens
  CDR3 for alpha chain variable domain of TCR clone 116743 (TRAV4, TRAJ8)
CLVGEQHTGFQKLGF

SEQ ID NO: 233486 - protein, 15 aa, Homo sapiens
  CDR3 for beta chain variable domain of TCR clone 116743 (TRBV7-9, TRBJ2-5)
CASSNRDYLQETQYF

SEQ ID NO: 233487 - protein, 11 aa, Homo sapiens
  CDR3 for alpha chain variable domain of TCR clone 116744 (TRAV23/DV6, TRAJ49)
CAVAPVTSSVL

SEQ ID NO: 233488 - protein, 13 aa, Homo sapiens
  CDR3 for beta chain variable domain of TCR clone 116744 (TRBV6-1, TRBJ1-1)
CASSRQGNTEAFF

SEQ ID NO: 233489 - protein, 15 aa, Homo sapiens
  CDR3 for alpha chain variable domain of TCR clone 116745 (TRAV12-1, TRAJ6)
CVVNCPLRRKLHTYI

SEQ ID NO: 233490 - protein, 15 aa, Homo sapiens
  CDR3 for beta chain variable domain of TCR clone 116745 (TRBV11-3, TRBJ2-3)
CASLKDGREGDTQYF

SEQ ID NO: 233491 - protein, 11 aa, Homo sapiens
  CDR3 for alpha chain variable domain of TCR clone 116746 (TRAV1-2, TRAJ20)
CAVSNDYKLSF

SEQ ID NO: 233492 - protein, 16 aa, Homo sapiens
  CDR3 for beta chain variable domain of TCR clone 116746 (TRBV29-1, TRBJ2-6)
CGVEDITYSGANVLTF

SEQ ID NO: 233493 - protein, 16 aa, Homo sapiens
  CDR3 for alpha chain variable domain of TCR clone 116747 (TRAV3, TRAJ37)
CAVRGKGSGNTGKLIF

SEQ ID NO: 233494 - protein, 15 aa, Homo sapiens
  CDR3 for beta chain variable domain of TCR clone 116747 (TRBV11-2, TRBJ2-1)
CASSRNRGLMYEQFF

SEQ ID NO: 233495 - protein, 14 aa, Homo sapiens
  CDR3 for alpha chain variable domain of TCR clone 116748 (TRAV20, TRAJ4)
CAVRLGGGYNKLIF

SEQ ID NO: 233496 - protein, 21 aa, Homo sapiens
  CDR3 for beta chain variable domain of TCR clone 116748 (TRBV15, TRBJ2-1)
AWGTQPCTCVPPAEVDTAQFF

SEQ ID NO: 233497 - protein, 15 aa, Homo sapiens
  CDR3 for alpha chain variable domain of TCR clone 116749 (TRAV12-2, TRAJ8)
CAVREENTGFQKLVF

SEQ ID NO: 233498 - protein, 14 aa, Homo sapiens
  CDR3 for beta chain variable domain of TCR clone 116749 (TRBV9, TRBJ1-3)
CASSVVGDGNTMYF

SEQ ID NO: 233499 - protein, 14 aa, Homo sapiens
  CDR3 for alpha chain variable domain of TCR clone 116750 (TRAV2, TRAJ9)
CAVEDRRGGFKTIF

SEQ ID NO: 233500 - protein, 14 aa, Homo sapiens
  CDR3 for beta chain variable domain of TCR clone 116750 (TRBV12-5, TRBJ2-5)
CASGSRTHQETQYF

SEQ ID NO: 233501 - protein, 16 aa, Homo sapiens
  CDR3 for alpha chain variable domain of TCR clone 116751 (TRAV16, TRAJ52)
CALSAAGGTSYGKLTF

SEQ ID NO: 233502 - protein, 14 aa, Homo sapiens
  CDR3 for beta chain variable domain of TCR clone 116751 (TRBV7-6, TRBJ2-3)
CASSLGTVTDTQYF

SEQ ID NO: 233503 - protein, 19 aa, Homo sapiens
  CDR3 for alpha chain variable domain of TCR clone 116752 (TRAV26-1, TRAJ52)
CIVRAHRNAGGTSYGKLTF

SEQ ID NO: 233504 - protein, 15 aa, Homo sapiens
  CDR3 for beta chain variable domain of TCR clone 116752 (TRBV20-1, TRBJ2-7)
CSARDRVSGMDEQYF

SEQ ID NO: 233505 - protein, 13 aa, Homo sapiens
  CDR3 for alpha chain variable domain of TCR clone 116753 (TRAV1-2, TRAJ9)
CAALNTGGFKTIF

SEQ ID NO: 233506 - protein, 17 aa, Homo sapiens
  CDR3 for beta chain variable domain of TCR clone 116753 (TRBV28, TRBJ2-5)
CASSRQGGLAGAETQYF

SEQ ID NO: 233507 - protein, 15 aa, Homo sapiens
  CDR3 for alpha chain variable domain of TCR clone 116754 (TRAV26-1, TRAJ22)
CIVRVSFWFCKATDL

SEQ ID NO: 233508 - protein, 15 aa, Homo sapiens
  CDR3 for beta chain variable domain of TCR clone 116754 (TRBV29-1, TRBJ2-1)
CSGRDRRSSYNEQFF

SEQ ID NO: 233509 - protein, 12 aa, Homo sapiens
  CDR3 for alpha chain variable domain of TCR clone 116755 (TRAV1-1, TRAJ9)
CAVDTGVFKTIF

SEQ ID NO: 233510 - protein, 14 aa, Homo sapiens
  CDR3 for beta chain variable domain of TCR clone 116755 (TRBV7-8, TRBJ2-5)
CASSATGGQETQYF

SEQ ID NO: 233511 - protein, 13 aa, Homo sapiens
  CDR3 for alpha chain variable domain of TCR clone 116756 (TRAV12-1, TRAJ11)
CVVNRAGYSTLTF

SEQ ID NO: 233512 - protein, 15 aa, Homo sapiens
  CDR3 for beta chain variable domain of TCR clone 116756 (TRBV7-3, TRBJ2-2)
CASSEKGQGTGELFF

SEQ ID NO: 233513 - protein, 10 aa, Homo sapiens
  CDR3 for alpha chain variable domain of TCR clone 116757 (TRAV1-2, TRAJ20)
CAVTDYKLSF

SEQ ID NO: 233514 - protein, 15 aa, Homo sapiens
  CDR3 for beta chain variable domain of TCR clone 116757 (TRBV5-1, TRBJ2-3)
CASSVTSGSTDTQYF

SEQ ID NO: 233515 - protein, 14 aa, Homo sapiens
  CDR3 for alpha chain variable domain of TCR clone 116758 (TRAV1-2, TRAJ16)
RAVNRFSDGQKLLF

SEQ ID NO: 233516 - protein, 15 aa, Homo sapiens
  CDR3 for beta chain variable domain of TCR clone 116758 (TRBV7-2, TRBJ2-1)
CASSSGLAGGNEQFF

SEQ ID NO: 233517 - protein, 12 aa, Homo sapiens
  CDR3 for alpha chain variable domain of TCR clone 116759 (TRAV12-3, TRAJ20)
CAMVRGDYKLSF

SEQ ID NO: 233518 - protein, 16 aa, Homo sapiens
  CDR3 for beta chain variable domain of TCR clone 116759 (TRBV25-1, TRBJ2-7)
CASSELTGGGIYEQYF

SEQ ID NO: 233519 - protein, 19 aa, Homo sapiens
  CDR3 for alpha chain variable domain of TCR clone 116760 (TRAV26-1, TRAJ28)
CIVRVAHAYSGAGRYQLTF

SEQ ID NO: 233520 - protein, 17 aa, Homo sapiens
  CDR3 for beta chain variable domain of TCR clone 116760 (TRBV4-1, TRBJ1-4)
CASSQEGPRGVEEKLFF

SEQ ID NO: 233521 - protein, 15 aa, Homo sapiens
  CDR3 for alpha chain variable domain of TCR clone 116761 (TRAV2, TRAJ24)
CAVEVLTDSWGKFQF

SEQ ID NO: 233522 - protein, 16 aa, Homo sapiens
  CDR3 for beta chain variable domain of TCR clone 116761 (TRBV20-1, TRBJ1-4)
CSAPGQGLLTNEKLFF

SEQ ID NO: 233523 - protein, 13 aa, Homo sapiens
  CDR3 for alpha chain variable domain of TCR clone 116762 (TRAV21, TRAJ27)
CAARPGNAGKSTL

SEQ ID NO: 233524 - protein, 17 aa, Homo sapiens
  CDR3 for beta chain variable domain of TCR clone 116762 (TRBV4-1, TRBJ1-4)
CASSQEGPRGVEEKLFF

SEQ ID NO: 233525 - protein, 16 aa, Homo sapiens
  CDR3 for alpha chain variable domain of TCR clone 116763 (TRAV12-3, TRAJ53)
CAMSPGSGGSHYKLTF

SEQ ID NO: 233526 - protein, 16 aa, Homo sapiens
  CDR3 for beta chain variable domain of TCR clone 116763 (TRBV4-2, TRBJ1-1)
CASSQAGFGMNTEAVF

SEQ ID NO: 233527 - protein, 15 aa, Homo sapiens
  CDR3 for alpha chain variable domain of TCR clone 116764 (TRAV8-3, TRAJ15)
CAVGAPNQAGTALIF

SEQ ID NO: 233528 - protein, 14 aa, Homo sapiens
  CDR3 for beta chain variable domain of TCR clone 116764 (TRBV20-1, TRBJ2-1)
CSPNYEASYNEQFF

SEQ ID NO: 233529 - protein, 11 aa, Homo sapiens
  CDR3 for alpha chain variable domain of TCR clone 116765 (TRAV17, TRAJ9)
CGFTGGFKTIF

SEQ ID NO: 233530 - protein, 13 aa, Homo sapiens
  CDR3 for beta chain variable domain of TCR clone 116765 (TRBV7-2, TRBJ2-2)
CASSLAVTGELFF

SEQ ID NO: 233531 - protein, 13 aa, Homo sapiens
  CDR3 for alpha chain variable domain of TCR clone 116766 (TRAV2, TRAJ40)
CAVVTSGTYKYIF

SEQ ID NO: 233532 - protein, 13 aa, Homo sapiens
  CDR3 for beta chain variable domain of TCR clone 116766 (TRBV19, TRBJ1-5)
CASSEGSNQPQHF

SEQ ID NO: 233533 - protein, 16 aa, Homo sapiens
  CDR3 for alpha chain variable domain of TCR clone 116767 (TRAV12-2, TRAJ40)
CAVIRGGTSGTYKYIF

SEQ ID NO: 233534 - protein, 14 aa, Homo sapiens
  CDR3 for beta chain variable domain of TCR clone 116767 (TRBV25-1, TRBJ1-1)
CASTHLGGNTEAFF

SEQ ID NO: 233535 - protein, 15 aa, Homo sapiens
  CDR3 for alpha chain variable domain of TCR clone 116768 (TRAV21, TRAJ53)
CATLNSGGSNDKLTF

SEQ ID NO: 233536 - protein, 13 aa, Homo sapiens
  CDR3 for beta chain variable domain of TCR clone 116768 (TRBV4-1, TRBJ2-2)
CASSQENTGELFF

SEQ ID NO: 233537 - protein, 16 aa, Homo sapiens
  CDR3 for alpha chain variable domain of TCR clone 116769 (TRAV16, TRAJ37)
CSKWPDGSSNTGKLIF

SEQ ID NO: 233538 - protein, 13 aa, Homo sapiens
  CDR3 for beta chain variable domain of TCR clone 116769 (TRBV7-2, TRBJ2-2)
CASSVAVTGELFF

SEQ ID NO: 233539 - protein, 12 aa, Homo sapiens
  CDR3 for alpha chain variable domain of TCR clone 116770 (TRAV21, TRAJ22)
CAVSGSARQLTF

SEQ ID NO: 233540 - protein, 13 aa, Homo sapiens
  CDR3 for beta chain variable domain of TCR clone 116770 (TRBV7-3, TRBJ2-5)
CASSFRGGETQYF

SEQ ID NO: 233541 - protein, 14 aa, Homo sapiens
  CDR3 for alpha chain variable domain of TCR clone 116771 (TRAV1-2, TRAJ6)
CAVRDSGGSYIPTF

SEQ ID NO: 233542 - protein, 14 aa, Homo sapiens
  CDR3 for beta chain variable domain of TCR clone 116771 (TRBV19, TRBJ2-1)
CASPTFVLSGEQFF

SEQ ID NO: 233543 - protein, 19 aa, Homo sapiens
  CDR3 for alpha chain variable domain of TCR clone 116772 (TRAV13-1, TRAJ52)
CAASPYQNAGGTSYGKLTF

SEQ ID NO: 233544 - protein, 13 aa, Homo sapiens
  CDR3 for beta chain variable domain of TCR clone 116772 (TRBV15, TRBJ2-7)
CATSTTGNYEQYF

SEQ ID NO: 233545 - protein, 13 aa, Homo sapiens
  CDR3 for alpha chain variable domain of TCR clone 116773 (TRAV12-3, TRAJ7)
CAMTPYGNNRLAF

SEQ ID NO: 233546 - protein, 16 aa, Homo sapiens
  CDR3 for beta chain variable domain of TCR clone 116773 (TRBV20-1, TRBJ1-4)
CSARPYGGELKEKLFF

SEQ ID NO: 233547 - protein, 14 aa, Homo sapiens
  CDR3 for alpha chain variable domain of TCR clone 116774 (TRAV17, TRAJ12)
CATDEKDSSYKLIF

SEQ ID NO: 233548 - protein, 16 aa, Homo sapiens
  CDR3 for beta chain variable domain of TCR clone 116774 (TRBV11-2, TRBJ2-1)
CASSPRIAGVYNEQFF

SEQ ID NO: 233549 - protein, 14 aa, Homo sapiens
  CDR3 for alpha chain variable domain of TCR clone 116775 (TRAV26-1, TRAJ39)
CIVFTNNAGNMLTF

SEQ ID NO: 233550 - protein, 15 aa, Homo sapiens
  CDR3 for beta chain variable domain of TCR clone 116775 (TRBV19, TRBJ2-4)
CASSLTGLTKNIQFF

SEQ ID NO: 233551 - protein, 12 aa, Homo sapiens
  CDR3 for alpha chain variable domain of TCR clone 116776 (TRAV2, TRAJ9)
CAVGAGGFKTIF

SEQ ID NO: 233552 - protein, 12 aa, Homo sapiens
  CDR3 for beta chain variable domain of TCR clone 116776 (TRBV11-2, TRBJ2-2)
CASSLPTGELFF

SEQ ID NO: 233553 - protein, 12 aa, Homo sapiens
  CDR3 for alpha chain variable domain of TCR clone 116777 (TRAV12-3, TRAJ17)
CAMTLTGNKLTF

SEQ ID NO: 233554 - protein, 17 aa, Homo sapiens
  CDR3 for beta chain variable domain of TCR clone 116777 (TRBV4-3, TRBJ2-2)
CASSQDTSARSPGELFF

SEQ ID NO: 233555 - protein, 12 aa, Homo sapiens
  CDR3 for alpha chain variable domain of TCR clone 116778 (TRAV2, TRAJ9)
CAVGAGGFKTIF

SEQ ID NO: 233556 - protein, 13 aa, Homo sapiens
  CDR3 for beta chain variable domain of TCR clone 116778 (TRBV2, TRBJ1-1)
CASSEGGNTEAFF

SEQ ID NO: 233557 - protein, 13 aa, Homo sapiens
  CDR3 for alpha chain variable domain of TCR clone 116779 (TRAV13-1, TRAJ33)
CAASRAGNYQLIC

SEQ ID NO: 233558 - protein, 12 aa, Homo sapiens
  CDR3 for beta chain variable domain of TCR clone 116779 (TRBV11-2, TRBJ1-2)
CASSREGDGYTF

SEQ ID NO: 233559 - protein, 14 aa, Homo sapiens
  CDR3 for alpha chain variable domain of TCR clone 116780 (TRAV3, TRAJ36)
CAVRDGTGANNRFF

SEQ ID NO: 233560 - protein, 16 aa, Homo sapiens
  CDR3 for beta chain variable domain of TCR clone 116780 (TRBV20-1, TRBJ2-6)
CSAREGPGVGANVLTF

SEQ ID NO: 233561 - protein, 11 aa, Homo sapiens
  CDR3 for alpha chain variable domain of TCR clone 116781 (TRAV21, TRAJ41)
CAVRSGYALNF

SEQ ID NO: 233562 - protein, 18 aa, Homo sapiens
  CDR3 for beta chain variable domain of TCR clone 116781 (TRBV11-2, TRBJ1-3)
CASTPRVTTLGSGNTIYF

SEQ ID NO: 233563 - protein, 13 aa, Homo sapiens
  CDR3 for alpha chain variable domain of TCR clone 116782 (TRAV36/DV7, TRAJ37)
CAVFSSNTGKLIF

SEQ ID NO: 233564 - protein, 10 aa, Homo sapiens
  CDR3 for beta chain variable domain of TCR clone 116782 (TRBV2, TRBJ2-5)
CASSAATQYF

SEQ ID NO: 233565 - protein, 18 aa, Homo sapiens
  CDR3 for alpha chain variable domain of TCR clone 116783 (TRAV26-2, TRAJ45)
CILRVDKYSGGGADGLTF

SEQ ID NO: 233566 - protein, 16 aa, Homo sapiens
  CDR3 for beta chain variable domain of TCR clone 116783 (TRBV2, TRBJ1-4)
CASNLLQGATDEKLFF

SEQ ID NO: 233567 - protein, 16 aa, Homo sapiens
  CDR3 for alpha chain variable domain of TCR clone 116784 (TRAV3, TRAJ10)
CAVRDMRAGGGNKLTL

SEQ ID NO: 233568 - protein, 16 aa, Homo sapiens
  CDR3 for beta chain variable domain of TCR clone 116784 (TRBV5-7, TRBJ1-5)
CASSLQQDREYQPQHF

SEQ ID NO: 233569 - protein, 16 aa, Homo sapiens
  CDR3 for alpha chain variable domain of TCR clone 116785 (TRAV30, TRAJ24)
CGTEIVDADSWGKFQF

SEQ ID NO: 233570 - protein, 16 aa, Homo sapiens
  CDR3 for beta chain variable domain of TCR clone 116785 (TRBV15, TRBJ1-2)
CATSRGPRTGGGGYAF

SEQ ID NO: 233571 - protein, 13 aa, Homo sapiens
  CDR3 for alpha chain variable domain of TCR clone 116786 (TRAV13-1, TRAJ39)
CTASIWAGNMLTF

SEQ ID NO: 233572 - protein, 15 aa, Homo sapiens
  CDR3 for beta chain variable domain of TCR clone 116786 (TRBV7-9, TRBJ1-1)
CASSLLEQGGTEAFF

SEQ ID NO: 233573 - protein, 13 aa, Homo sapiens
  CDR3 for alpha chain variable domain of TCR clone 116787 (TRAV13-1, TRAJ9)
CAARGTGGFKTIF

SEQ ID NO: 233574 - protein, 12 aa, Homo sapiens
  CDR3 for beta chain variable domain of TCR clone 116787 (TRBV2, TRBJ2-1)
CAYGPTGNEQFF

SEQ ID NO: 233575 - protein, 15 aa, Homo sapiens
  CDR3 for alpha chain variable domain of TCR clone 116788 (TRAV4, TRAJ8)
CLGGEQHTGFQKLVF

SEQ ID NO: 233576 - protein, 15 aa, Homo sapiens
  CDR3 for beta chain variable domain of TCR clone 116788 (TRBV7-9, TRBJ2-5)
CASSNRDYLQETQYF

SEQ ID NO: 233577 - protein, 14 aa, Homo sapiens
  CDR3 for alpha chain variable domain of TCR clone 116789 (TRAV23/DV6, TRAJ11)
CAASLESGYSTLPF

SEQ ID NO: 233578 - protein, 15 aa, Homo sapiens
  CDR3 for beta chain variable domain of TCR clone 116789 (TRBV28, TRBJ2-7)
CASSSPGTEPFEQYF

SEQ ID NO: 233579 - protein, 15 aa, Homo sapiens
  CDR3 for alpha chain variable domain of TCR clone 116790 (TRAV17, TRAJ45)
CATAYSGGGADGLTF

SEQ ID NO: 233580 - protein, 11 aa, Homo sapiens
  CDR3 for beta chain variable domain of TCR clone 116790 (TRBV7-8, TRBJ2-7)
CASGLSLEQYF

SEQ ID NO: 233581 - protein, 11 aa, Homo sapiens
  CDR3 for alpha chain variable domain of TCR clone 116791 (TRAV27, TRAJ47)
PIVEYGNKPVF

SEQ ID NO: 233582 - protein, 18 aa, Homo sapiens
  CDR3 for beta chain variable domain of TCR clone 116791 (TRBV2, TRBJ2-1)
CASRGLAGGPRTYNEQFF

SEQ ID NO: 233583 - protein, 12 aa, Homo sapiens
  CDR3 for alpha chain variable domain of TCR clone 116792 (TRAV21, TRAJ33)
CAKMDSNYQLIW

SEQ ID NO: 233584 - protein, 15 aa, Homo sapiens
  CDR3 for beta chain variable domain of TCR clone 116792 (TRBV7-2, TRBJ2-7)
CASSLGGAKSGEQYF

SEQ ID NO: 233585 - protein, 13 aa, Homo sapiens
  CDR3 for alpha chain variable domain of TCR clone 116793 (TRAV12-1, TRAJ33)
CGDAPDSNYQLIW

SEQ ID NO: 233586 - protein, 12 aa, Homo sapiens
  CDR3 for beta chain variable domain of TCR clone 116793 (TRBV11-2, TRBJ2-2)
CSSSLGGGELFF

SEQ ID NO: 233587 - protein, 13 aa, Homo sapiens
  CDR3 for alpha chain variable domain of TCR clone 116794 (TRAV12-1, TRAJ33)
CGDAPDSNYQLIW

SEQ ID NO: 233588 - protein, 12 aa, Homo sapiens
  CDR3 for beta chain variable domain of TCR clone 116794 (TRBV11-2, TRBJ2-2)
CAGSLGGGELFF

SEQ ID NO: 233589 - protein, 14 aa, Homo sapiens
  CDR3 for alpha chain variable domain of TCR clone 116795 (TRAV23/DV6, TRAJ13)
CAAMYSGGYRKVTF

SEQ ID NO: 233590 - protein, 14 aa, Homo sapiens
  CDR3 for beta chain variable domain of TCR clone 116795 (TRBV7-9, TRBJ2-1)
CASSPRDSLYEQFF

SEQ ID NO: 233591 - protein, 13 aa, Homo sapiens
  CDR3 for alpha chain variable domain of TCR clone 116796 (TRAV8-3, TRAJ50)
CAVDQTSYDKVIF

SEQ ID NO: 233592 - protein, 15 aa, Homo sapiens
  CDR3 for beta chain variable domain of TCR clone 116796 (TRBV7-2, TRBJ2-7)
CASSLKGALTYEQYF

SEQ ID NO: 233593 - protein, 14 aa, Homo sapiens
  CDR3 for alpha chain variable domain of TCR clone 116797 (TRAV13-2, TRAJ17)
CAENSKATGNKLTF

SEQ ID NO: 233594 - protein, 15 aa, Homo sapiens
  CDR3 for beta chain variable domain of TCR clone 116797 (TRBV5-7, TRBJ1-5)
CASSYGKLWDQPQHF

SEQ ID NO: 233595 - protein, 13 aa, Homo sapiens
  CDR3 for alpha chain variable domain of TCR clone 116798 (TRAV20, TRAJ54)
CAVHAGGAQKLVF

SEQ ID NO: 233596 - protein, 14 aa, Homo sapiens
  CDR3 for beta chain variable domain of TCR clone 116798 (TRBV20-1, TRBJ2-7)
CSAKTGTGGYEQYF

SEQ ID NO: 233597 - protein, 13 aa, Homo sapiens
  CDR3 for alpha chain variable domain of TCR clone 116799 (TRAV21, TRAJ27)
CAARPGNAGKSTF

SEQ ID NO: 233598 - protein, 13 aa, Homo sapiens
  CDR3 for beta chain variable domain of TCR clone 116799 (TRBV20-1, TRBJ2-2)
CSALSGGAGELFF

SEQ ID NO: 233599 - protein, 14 aa, Homo sapiens
  CDR3 for alpha chain variable domain of TCR clone 116800 (TRAV12-3, TRAJ10)
SHLPLTGGGNKLTF

SEQ ID NO: 233600 - protein, 15 aa, Homo sapiens
  CDR3 for beta chain variable domain of TCR clone 116800 (TRBV3-1, TRBJ1-2)
CASSPTRLPEGGYTF

SEQ ID NO: 233601 - protein, 14 aa, Homo sapiens
  CDR3 for alpha chain variable domain of TCR clone 116801 (TRAV1-2, TRAJ16)
CAFNRFSDGQKLLF

SEQ ID NO: 233602 - protein, 15 aa, Homo sapiens
  CDR3 for beta chain variable domain of TCR clone 116801 (TRBV19, TRBJ1-5)
CASSIVWADNQPQHF

SEQ ID NO: 233603 - protein, 13 aa, Homo sapiens
  CDR3 for alpha chain variable domain of TCR clone 116802 (TRAV35, TRAJ48)
CAGHEFGNERLTF

SEQ ID NO: 233604 - protein, 13 aa, Homo sapiens
  CDR3 for beta chain variable domain of TCR clone 116802 (TRBV7-2, TRBJ1-6)
CASSLVGSSPLHF

SEQ ID NO: 233605 - protein, 12 aa, Homo sapiens
  CDR3 for alpha chain variable domain of TCR clone 116803 (TRAV23/DV6, TRAJ30)
CAARKGDDKIIF

SEQ ID NO: 233606 - protein, 18 aa, Homo sapiens
  CDR3 for beta chain variable domain of TCR clone 116803 (TRBV10-3, TRBJ2-3)
CAISESRVGPMRGDTQYF

SEQ ID NO: 233607 - protein, 17 aa, Homo sapiens
  CDR3 for alpha chain variable domain of TCR clone 116804 (TRAV3, TRAJ42)
CAVRDRDYGGSQGNLIF

SEQ ID NO: 233608 - protein, 13 aa, Homo sapiens
  CDR3 for beta chain variable domain of TCR clone 116804 (TRBV10-3, TRBJ1-2)
CAISERDSYGYTF

SEQ ID NO: 233609 - protein, 15 aa, Homo sapiens
  CDR3 for alpha chain variable domain of TCR clone 116805 (TRAV17, TRAJ35)
CATAFVIGFGNVLHC

SEQ ID NO: 233610 - protein, 12 aa, Homo sapiens
  CDR3 for beta chain variable domain of TCR clone 116805 (TRBV11-2, TRBJ2-1)
CASSVQREGQFF

SEQ ID NO: 233611 - protein, 15 aa, Homo sapiens
  CDR3 for alpha chain variable domain of TCR clone 116806 (TRAV2, TRAJ9)
CAVEDRGTGGFKTIF

SEQ ID NO: 233612 - protein, 12 aa, Homo sapiens
  CDR3 for beta chain variable domain of TCR clone 116806 (TRBV29-1, TRBJ2-3)
CSVTGGADTQYF

SEQ ID NO: 233613 - protein, 12 aa, Homo sapiens
  CDR3 for alpha chain variable domain of TCR clone 116807 (TRAV23/DV6, TRAJ26)
CAASKFGQNFVF

SEQ ID NO: 233614 - protein, 13 aa, Homo sapiens
  CDR3 for beta chain variable domain of TCR clone 116807 (TRBV11-2, TRBJ1-5)
CASSLDRNQTQHF

SEQ ID NO: 233615 - protein, 12 aa, Homo sapiens
  CDR3 for alpha chain variable domain of TCR clone 116808 (TRAV3, TRAJ34)
CSVLGNTDKLIF

SEQ ID NO: 233616 - protein, 13 aa, Homo sapiens
  CDR3 for beta chain variable domain of TCR clone 116808 (TRBV19, TRBJ2-1)
CASSIGTGNEQFF

SEQ ID NO: 233617 - protein, 15 aa, Homo sapiens
  CDR3 for alpha chain variable domain of TCR clone 116809 (TRAV20, TRAJ4)
CAVQVFSGGYNKLIF

SEQ ID NO: 233618 - protein, 12 aa, Homo sapiens
  CDR3 for beta chain variable domain of TCR clone 116809 (TRBV7-8, TRBJ2-7)
CASSLGDREQYF

SEQ ID NO: 233619 - protein, 13 aa, Homo sapiens
  CDR3 for alpha chain variable domain of TCR clone 116810 (TRAV16, TRAJ31)
CALSAHNNARLMF

SEQ ID NO: 233620 - protein, 16 aa, Homo sapiens
  CDR3 for beta chain variable domain of TCR clone 116810 (TRBV19, TRBJ2-1)
CASSKAGPSSYNEQFF

SEQ ID NO: 233621 - protein, 13 aa, Homo sapiens
  CDR3 for alpha chain variable domain of TCR clone 116811 (TRAV13-1, TRAJ11)
CAAVLAGYSTLTF

SEQ ID NO: 233622 - protein, 20 aa, Homo sapiens
  CDR3 for beta chain variable domain of TCR clone 116811 (TRBV28, TRBJ2-1)
CASTPIGRSPGLAGGNEQFF

SEQ ID NO: 233623 - protein, 17 aa, Homo sapiens
  CDR3 for alpha chain variable domain of TCR clone 116812 (TRAV13-1, TRAJ31)
CAPRDRLMVGDGTQLVV

SEQ ID NO: 233624 - protein, 12 aa, Homo sapiens
  CDR3 for beta chain variable domain of TCR clone 116812 (TRBV7-9, TRBJ2-7)
CASSLEGYEQYF

SEQ ID NO: 233625 - protein, 15 aa, Homo sapiens
  CDR3 for alpha chain variable domain of TCR clone 116813 (TRAV27, TRAJ38)
CVARRNAGNNRKLIW

SEQ ID NO: 233626 - protein, 17 aa, Homo sapiens
  CDR3 for beta chain variable domain of TCR clone 116813 (TRBV20-1, TRBJ2-2)
CSASGSGQGGLTGELFF

SEQ ID NO: 233627 - protein, 14 aa, Homo sapiens
  CDR3 for alpha chain variable domain of TCR clone 116814 (TRAV2, TRAJ9)
CAVEDRSGGFKTIF

SEQ ID NO: 233628 - protein, 19 aa, Homo sapiens
  CDR3 for beta chain variable domain of TCR clone 116814 (TRBV18, TRBJ2-7)
CASSPRGGGLRAVLRAGHQ

SEQ ID NO: 233629 - protein, 14 aa, Homo sapiens
  CDR3 for alpha chain variable domain of TCR clone 116815 (TRAV12-3, TRAJ54)
CAMRGIQGAQKPVF

SEQ ID NO: 233630 - protein, 13 aa, Homo sapiens
  CDR3 for beta chain variable domain of TCR clone 116815 (TRBV19, TRBJ1-1)
CASSPSNGGEAFF

SEQ ID NO: 233631 - protein, 15 aa, Homo sapiens
  CDR3 for alpha chain variable domain of TCR clone 116816 (TRAV25, TRAJ52)
CAGTSGGTSYGKLTF

SEQ ID NO: 233632 - protein, 13 aa, Homo sapiens
  CDR3 for beta chain variable domain of TCR clone 116816 (TRBV7-2, TRBJ2-7)
CASSSPSGSEQYF

SEQ ID NO: 233633 - protein, 13 aa, Homo sapiens
  CDR3 for alpha chain variable domain of TCR clone 116817 (TRAV34, TRAJ22)
CGAGAGSARQLTF

SEQ ID NO: 233634 - protein, 16 aa, Homo sapiens
  CDR3 for beta chain variable domain of TCR clone 116817 (TRBV7-3, TRBJ2-1)
CASSNPLAGGYNEQFF

SEQ ID NO: 233635 - protein, 15 aa, Homo sapiens
  CDR3 for alpha chain variable domain of TCR clone 116818 (TRAV8-3, TRAJ45)
CALSYSGGGADGLTF

SEQ ID NO: 233636 - protein, 17 aa, Homo sapiens
  CDR3 for beta chain variable domain of TCR clone 116818 (TRBV7-8, TRBJ1-2)
CASSLRPLQGHLYGYTF

SEQ ID NO: 233637 - protein, 15 aa, Homo sapiens
  CDR3 for alpha chain variable domain of TCR clone 116819 (TRAV21, TRAJ53)
CATLNSGGSNYKLTF

SEQ ID NO: 233638 - protein, 15 aa, Homo sapiens
  CDR3 for beta chain variable domain of TCR clone 116819 (TRBV5-8, TRBJ2-2)
CASSLDRGATGELFF

SEQ ID NO: 233639 - protein, 15 aa, Homo sapiens
  CDR3 for alpha chain variable domain of TCR clone 116820 (TRAV12-2, TRAJ53)
CSVNGGGGSNYKLTF

SEQ ID NO: 233640 - protein, 17 aa, Homo sapiens
  CDR3 for beta chain variable domain of TCR clone 116820 (TRBV7-3, TRBJ2-3)
CASSLMKRMRGADTQYF

SEQ ID NO: 233641 - protein, 12 aa, Homo sapiens
  CDR3 for alpha chain variable domain of TCR clone 116821 (TRAV2, TRAJ9)
CAVGAGGFKTIF

SEQ ID NO: 233642 - protein, 15 aa, Homo sapiens
  CDR3 for beta chain variable domain of TCR clone 116821 (TRBV28, TRBJ1-2)
CASSSHSIANYGYTF

SEQ ID NO: 233643 - protein, 13 aa, Homo sapiens
  CDR3 for alpha chain variable domain of TCR clone 116822 (TRAV8-6, TRAJ8)
CAVSNTGFQKLVF

SEQ ID NO: 233644 - protein, 15 aa, Homo sapiens
  CDR3 for beta chain variable domain of TCR clone 116822 (TRBV28, TRBJ2-5)
CASSSGRTIRETQYF

SEQ ID NO: 233645 - protein, 16 aa, Homo sapiens
  CDR3 for alpha chain variable domain of TCR clone 116823 (TRAV21, TRAJ52)
CAVANAGGTSYGKLTF

SEQ ID NO: 233646 - protein, 13 aa, Homo sapiens
  CDR3 for beta chain variable domain of TCR clone 116823 (TRBV20-1, TRBJ2-3)
CSARLAGTDTQYF

SEQ ID NO: 233647 - protein, 12 aa, Homo sapiens
  CDR3 for alpha chain variable domain of TCR clone 116824 (TRAV8-3, TRAJ20)
CAVDFNDYKLSF

SEQ ID NO: 233648 - protein, 12 aa, Homo sapiens
  CDR3 for beta chain variable domain of TCR clone 116824 (TRBV12-4, TRBJ1-3)
CASSFSGNTMYF

SEQ ID NO: 233649 - protein, 14 aa, Homo sapiens
  CDR3 for alpha chain variable domain of TCR clone 116825 (TRAV13-1, TRAJ13)
CAASRVGGYQKVTF

SEQ ID NO: 233650 - protein, 17 aa, Homo sapiens
  CDR3 for beta chain variable domain of TCR clone 116825 (TRBV15, TRBJ1-5)
YATSRAPPGTRNQPQHF

SEQ ID NO: 233651 - protein, 10 aa, Homo sapiens
  CDR3 for alpha chain variable domain of TCR clone 116826 (TRAV36/DV7, TRAJ49)
CALTGNQFYF

SEQ ID NO: 233652 - protein, 14 aa, Homo sapiens
  CDR3 for beta chain variable domain of TCR clone 116826 (TRBV2, TRBJ2-1)
CASSDRAYYNEQFF

SEQ ID NO: 233653 - protein, 11 aa, Homo sapiens
  CDR3 for alpha chain variable domain of TCR clone 116827 (TRAV2, TRAJ13)
CASGGYQKVTF

SEQ ID NO: 233654 - protein, 16 aa, Homo sapiens
  CDR3 for beta chain variable domain of TCR clone 116827 (TRBV6-1, TRBJ2-1)
CASSETLDRGAETQYF

SEQ ID NO: 233655 - protein, 22 aa, Homo sapiens
  CDR3 for alpha chain variable domain of TCR clone 116828 (TRAV3, )
CAVRDCLSAGNNHIQNPDPAVY

SEQ ID NO: 233656 - protein, 19 aa, Homo sapiens
  CDR3 for beta chain variable domain of TCR clone 116828 (TRBV7-2, TRBJ2-3)
CASSFLSRNWGGGTDTQYF

SEQ ID NO: 233657 - protein, 12 aa, Homo sapiens
  CDR3 for alpha chain variable domain of TCR clone 116829 (TRAV12-1, TRAJ40)
CVFYSGTYKYIF

SEQ ID NO: 233658 - protein, 13 aa, Homo sapiens
  CDR3 for beta chain variable domain of TCR clone 116829 (TRBV25-1, TRBJ2-5)
CASSESGRETQYF

SEQ ID NO: 233659 - protein, 13 aa, Homo sapiens
  CDR3 for alpha chain variable domain of TCR clone 116830 (TRAV8-3, TRAJ28)
CAVGAVGSYQLTF

SEQ ID NO: 233660 - protein, 14 aa, Homo sapiens
  CDR3 for beta chain variable domain of TCR clone 116830 (TRBV7-9, TRBJ1-5)
CQQTRSPAQSAQHF

SEQ ID NO: 233661 - protein, 11 aa, Homo sapiens
  CDR3 for alpha chain variable domain of TCR clone 116831 (TRAV3, TRAJ21)
CAVGNFNKFYF

SEQ ID NO: 233662 - protein, 14 aa, Homo sapiens
  CDR3 for beta chain variable domain of TCR clone 116831 (TRBV5-1, TRBJ1-6)
CASARDRNNSPLHF

SEQ ID NO: 233663 - protein, 15 aa, Homo sapiens
  CDR3 for alpha chain variable domain of TCR clone 116832 (TRAV4, TRAJ12)
CLVGDLMDSSYKLIF

SEQ ID NO: 233664 - protein, 14 aa, Homo sapiens
  CDR3 for beta chain variable domain of TCR clone 116832 (TRBV7-2, TRBJ1-1)
CASSHRQGRTEAIF

SEQ ID NO: 233665 - protein, 21 aa, Homo sapiens
  CDR3 for alpha chain variable domain of TCR clone 116833 (TRAV3, TRAJ17)
CAVRARRGGRSCRQQAHFWRR

SEQ ID NO: 233666 - protein, 14 aa, Homo sapiens
  CDR3 for beta chain variable domain of TCR clone 116833 (TRBV4-1, TRBJ2-2)
CASSQAVNTGELFF

SEQ ID NO: 233667 - protein, 13 aa, Homo sapiens
  CDR3 for alpha chain variable domain of TCR clone 116834 (TRAV3, TRAJ21)
CAVREPDFNKFYF

SEQ ID NO: 233668 - protein, 14 aa, Homo sapiens
  CDR3 for beta chain variable domain of TCR clone 116834 (TRBV7-3, TRBJ2-1)
CASSLAGGTNEQFF

SEQ ID NO: 233669 - protein, 14 aa, Homo sapiens
  CDR3 for alpha chain variable domain of TCR clone 116835 (TRAV38-1, TRAJ40)
CALRPTSGTYKYIF

SEQ ID NO: 233670 - protein, 14 aa, Homo sapiens
  CDR3 for beta chain variable domain of TCR clone 116835 (TRBV5-4, TRBJ1-1)
CASSLDSRRGEAFF

SEQ ID NO: 233671 - protein, 14 aa, Homo sapiens
  CDR3 for alpha chain variable domain of TCR clone 116836 (TRAV8-4, TRAJ13)
CAVTLSGGYQKVTF

SEQ ID NO: 233672 - protein, 13 aa, Homo sapiens
  CDR3 for beta chain variable domain of TCR clone 116836 (TRBV7-2, TRBJ1-2)
CSSQTGSTYGYTF

SEQ ID NO: 233673 - protein, 11 aa, Homo sapiens
  CDR3 for alpha chain variable domain of TCR clone 116837 (TRAV3, TRAJ17)
PRGAAGNKLTF

SEQ ID NO: 233674 - protein, 16 aa, Homo sapiens
  CDR3 for beta chain variable domain of TCR clone 116837 (TRBV7-6, TRBJ2-1)
CASSAPGPSSCNEQFF

SEQ ID NO: 233675 - protein, 12 aa, Homo sapiens
  CDR3 for alpha chain variable domain of TCR clone 116838 (TRAV23/DV6, TRAJ30)
CAASKWDDKIIF

SEQ ID NO: 233676 - protein, 18 aa, Homo sapiens
  CDR3 for beta chain variable domain of TCR clone 116838 (TRBV10-3, TRBJ2-3)
CAISESRVGPMRGDTQYF

SEQ ID NO: 233677 - protein, 12 aa, Homo sapiens
  CDR3 for alpha chain variable domain of TCR clone 116839 (TRAV20, TRAJ54)
CAVQKGAQKLVF

SEQ ID NO: 233678 - protein, 17 aa, Homo sapiens
  CDR3 for beta chain variable domain of TCR clone 116839 (TRBV13, TRBJ2-3)
CASSLSRVAGGRNTQYF

SEQ ID NO: 233679 - protein, 14 aa, Homo sapiens
  CDR3 for alpha chain variable domain of TCR clone 116840 (TRAV8-3, TRAJ30)
CAVGDMNRDDKIIF

SEQ ID NO: 233680 - protein, 17 aa, Homo sapiens
  CDR3 for beta chain variable domain of TCR clone 116840 (TRBV19, TRBJ2-2)
CASSSNPGGFGTGELFF

SEQ ID NO: 233681 - protein, 10 aa, Homo sapiens
  CDR3 for alpha chain variable domain of TCR clone 116841 (TRAV21, TRAJ43)
CAVRIGDMRF

SEQ ID NO: 233682 - protein, 18 aa, Homo sapiens
  CDR3 for beta chain variable domain of TCR clone 116841 (TRBV11-2, TRBJ2-3)
CASSLGGASRGAPNTQYF

SEQ ID NO: 233683 - protein, 15 aa, Homo sapiens
  CDR3 for alpha chain variable domain of TCR clone 116842 (TRAV2, TRAJ22)
CAVPSRGGSARQLTF

SEQ ID NO: 233684 - protein, 11 aa, Homo sapiens
  CDR3 for beta chain variable domain of TCR clone 116842 (TRBV27, TRBJ2-3)
CARSLGDTQYF

SEQ ID NO: 233685 - protein, 11 aa, Homo sapiens
  CDR3 for alpha chain variable domain of TCR clone 116843 (TRAV4, TRAJ28)
CLVGYNRAETL

SEQ ID NO: 233686 - protein, 14 aa, Homo sapiens
  CDR3 for beta chain variable domain of TCR clone 116843 (TRBV20-1, TRBJ2-7)
CSAKTGTGGYEQYF

SEQ ID NO: 233687 - protein, 16 aa, Homo sapiens
  CDR3 for alpha chain variable domain of TCR clone 116844 (TRAV17, TRAJ35)
CATAEGGIGFGNVLHC

SEQ ID NO: 233688 - protein, 19 aa, Homo sapiens
  CDR3 for beta chain variable domain of TCR clone 116844 (TRBV19, TRBJ2-5)
CASSVGQVTDFFLGETQYF

SEQ ID NO: 233689 - protein, 13 aa, Homo sapiens
  CDR3 for alpha chain variable domain of TCR clone 116845 (TRAV41, TRAJ57)
CAVKEGGSEKLVF

SEQ ID NO: 233690 - protein, 16 aa, Homo sapiens
  CDR3 for beta chain variable domain of TCR clone 116845 (TRBV12-5, TRBJ2-5)
CASGPRTSGNQETQYF

SEQ ID NO: 233691 - protein, 14 aa, Homo sapiens
  CDR3 for alpha chain variable domain of TCR clone 116846 (TRAV13-1, TRAJ35)
CAASKGGFGNVLHC

SEQ ID NO: 233692 - protein, 13 aa, Homo sapiens
  CDR3 for beta chain variable domain of TCR clone 116846 (TRBV24-1, TRBJ2-1)
CATSAGPYNEQFF

SEQ ID NO: 233693 - protein, 15 aa, Homo sapiens
  CDR3 for alpha chain variable domain of TCR clone 116847 (TRAV26-1, TRAJ40)
CIDRYATSGIYKYIF

SEQ ID NO: 233694 - protein, 11 aa, Homo sapiens
  CDR3 for beta chain variable domain of TCR clone 116847 (TRBV7-9, TRBJ2-1)
CASSSQNEQFF

SEQ ID NO: 233695 - protein, 14 aa, Homo sapiens
  CDR3 for alpha chain variable domain of TCR clone 116848 (TRAV26-1, TRAJ11)
CIVPLYSGYSTLTF

SEQ ID NO: 233696 - protein, 16 aa, Homo sapiens
  CDR3 for beta chain variable domain of TCR clone 116848 (TRBV12-5, TRBJ2-5)
CASGPRTSGNRETQYF

SEQ ID NO: 233697 - protein, 14 aa, Homo sapiens
  CDR3 for alpha chain variable domain of TCR clone 116849 (TRAV35, TRAJ33)
CAGSSQGSNYQLIW

SEQ ID NO: 233698 - protein, 15 aa, Homo sapiens
  CDR3 for beta chain variable domain of TCR clone 116849 (TRBV28, TRBJ2-5)
CASSPGQGSIETQYF

SEQ ID NO: 233699 - protein, 15 aa, Homo sapiens
  CDR3 for alpha chain variable domain of TCR clone 116850 (TRAV21, TRAJ32)
CATAPYGGATNKLIF

SEQ ID NO: 233700 - protein, 17 aa, Homo sapiens
  CDR3 for beta chain variable domain of TCR clone 116850 (TRBV18, TRBJ2-3)
CASSPFGDGGFTDTQYF

SEQ ID NO: 233701 - protein, 17 aa, Homo sapiens
  CDR3 for alpha chain variable domain of TCR clone 116851 (TRAV26-1, TRAJ37)
CIVRVITVSSNTGKLIF

SEQ ID NO: 233702 - protein, 17 aa, Homo sapiens
  CDR3 for beta chain variable domain of TCR clone 116851 (TRBV6-3, TRBJ2-1)
CASSYSSGTRGLDEQFF

SEQ ID NO: 233703 - protein, 16 aa, Homo sapiens
  CDR3 for alpha chain variable domain of TCR clone 116852 (TRAV16, TRAJ4)
CALSRMFSGGYNKLIF

SEQ ID NO: 233704 - protein, 14 aa, Homo sapiens
  CDR3 for beta chain variable domain of TCR clone 116852 (TRBV13, TRBJ2-5)
CASSLERVGETQYF

SEQ ID NO: 233705 - protein, 13 aa, Homo sapiens
  CDR3 for alpha chain variable domain of TCR clone 116853 (TRAV1-2, TRAJ9)
CAALNTGGFKTIF

SEQ ID NO: 233706 - protein, 13 aa, Homo sapiens
  CDR3 for beta chain variable domain of TCR clone 116853 (TRBV19, TRBJ1-2)
CASSVPGQDGDAF

SEQ ID NO: 233707 - protein, 15 aa, Homo sapiens
  CDR3 for alpha chain variable domain of TCR clone 116854 (TRAV13-1, TRAJ57)
CAASNTQGGSEKLVF

SEQ ID NO: 233708 - protein, 13 aa, Homo sapiens
  CDR3 for beta chain variable domain of TCR clone 116854 (TRBV7-9, TRBJ1-2)
CASSLKQNYGYTF

SEQ ID NO: 233709 - protein, 13 aa, Homo sapiens
  CDR3 for alpha chain variable domain of TCR clone 116855 (TRAV1-1, TRAJ9)
CAAKNTGGFKTIF

SEQ ID NO: 233710 - protein, 14 aa, Homo sapiens
  CDR3 for beta chain variable domain of TCR clone 116855 (TRBV20-1, TRBJ2-1)
YSAQIGGSANEQFF

SEQ ID NO: 233711 - protein, 13 aa, Homo sapiens
  CDR3 for alpha chain variable domain of TCR clone 116856 (TRAV13-1, TRAJ43)
CAARKNNNNDMRF

SEQ ID NO: 233712 - protein, 14 aa, Homo sapiens
  CDR3 for beta chain variable domain of TCR clone 116856 (TRBV14, TRBJ2-1)
CASSQVQGRGEQFF

SEQ ID NO: 233713 - protein, 16 aa, Homo sapiens
  CDR3 for alpha chain variable domain of TCR clone 116857 (TRAV3, TRAJ6)
CTVRDGMGRRKLHTYI

SEQ ID NO: 233714 - protein, 15 aa, Homo sapiens
  CDR3 for beta chain variable domain of TCR clone 116857 (TRBV9, TRBJ2-1)
CASSLAGSSYNEQFF

SEQ ID NO: 233715 - protein, 16 aa, Homo sapiens
  CDR3 for alpha chain variable domain of TCR clone 116858 (TRAV8-6, TRAJ22)
CAVSPISSGSARQLTF

SEQ ID NO: 233716 - protein, 16 aa, Homo sapiens
  CDR3 for beta chain variable domain of TCR clone 116858 (TRBV27, TRBJ2-5)
CASSSQTSGFQETQYF

SEQ ID NO: 233717 - protein, 14 aa, Homo sapiens
  CDR3 for alpha chain variable domain of TCR clone 116859 (TRAV16, TRAJ37)
CALDISCNTGKLIF

SEQ ID NO: 233718 - protein, 14 aa, Homo sapiens
  CDR3 for beta chain variable domain of TCR clone 116859 (TRBV7-6, TRBJ2-7)
CASSFRQGADEQYF

SEQ ID NO: 233719 - protein, 13 aa, Homo sapiens
  CDR3 for alpha chain variable domain of TCR clone 116860 (TRAV13-1, TRAJ10)
CAALEGGGNKLTF

SEQ ID NO: 233720 - protein, 13 aa, Homo sapiens
  CDR3 for beta chain variable domain of TCR clone 116860 (TRBV10-3, TRBJ1-2)
CAISERDSYGYTF

SEQ ID NO: 233721 - protein, 18 aa, Homo sapiens
  CDR3 for alpha chain variable domain of TCR clone 116861 (TRAV8-3, TRAJ4)
WVRDPTSNDPGGHNKLIF

SEQ ID NO: 233722 - protein, 13 aa, Homo sapiens
  CDR3 for beta chain variable domain of TCR clone 116861 (TRBV20-1, TRBJ1-2)
CSATGIQGSGYTF

SEQ ID NO: 233723 - protein, 12 aa, Homo sapiens
  CDR3 for alpha chain variable domain of TCR clone 116862 (TRAV29/DV5, TRAJ49)
CAATDTGHQFYF

SEQ ID NO: 233724 - protein, 12 aa, Homo sapiens
  CDR3 for beta chain variable domain of TCR clone 116862 (TRBV12-4, TRBJ2-7)
CASSLGGYEQYF

SEQ ID NO: 233725 - protein, 14 aa, Homo sapiens
  CDR3 for alpha chain variable domain of TCR clone 116863 (TRAV1-2, TRAJ16)
CAVNRFSYGQKLLF

SEQ ID NO: 233726 - protein, 18 aa, Homo sapiens
  CDR3 for beta chain variable domain of TCR clone 116863 (TRBV20-1, TRBJ2-6)
CSAETTPTHGSGANVLTF

SEQ ID NO: 233727 - protein, 16 aa, Homo sapiens
  CDR3 for alpha chain variable domain of TCR clone 116864 (TRAV16, TRAJ52)
CALSAAGGTSYGKLTF

SEQ ID NO: 233728 - protein, 15 aa, Homo sapiens
  CDR3 for beta chain variable domain of TCR clone 116864 (TRBV5-8, TRBJ2-3)
CASSPNFGGRDTQYF

SEQ ID NO: 233729 - protein, 14 aa, Homo sapiens
  CDR3 for alpha chain variable domain of TCR clone 116865 (TRAV1-2, TRAJ16)
CAVNRFSDGQNLLF

SEQ ID NO: 233730 - protein, 16 aa, Homo sapiens
  CDR3 for beta chain variable domain of TCR clone 116865 (TRBV19, TRBJ2-3)
CASSPEWDRGTDTQYF

SEQ ID NO: 233731 - protein, 21 aa, Homo sapiens
  CDR3 for alpha chain variable domain of TCR clone 116866 (TRAV25, TRAJ53)
TATQTTDVGTGSGGSSYKLTF

SEQ ID NO: 233732 - protein, 16 aa, Homo sapiens
  CDR3 for beta chain variable domain of TCR clone 116866 (TRBV4-2, TRBJ2-3)
CASSLSSGGHTDTQYF

SEQ ID NO: 233733 - protein, 16 aa, Homo sapiens
  CDR3 for alpha chain variable domain of TCR clone 116867 (TRAV26-1, TRAJ36)
CIVRVPDQTGANTLFF

SEQ ID NO: 233734 - protein, 15 aa, Homo sapiens
  CDR3 for beta chain variable domain of TCR clone 116867 (TRBV19, TRBJ2-4)
CASRGPRRGENIQYF

SEQ ID NO: 233735 - protein, 12 aa, Homo sapiens
  CDR3 for alpha chain variable domain of TCR clone 116868 (TRAV3, TRAJ20)
CAVRDGDYKLRF

SEQ ID NO: 233736 - protein, 13 aa, Homo sapiens
  CDR3 for beta chain variable domain of TCR clone 116868 (TRBV9, TRBJ2-1)
CASSVGQGGEQFF

SEQ ID NO: 233737 - protein, 16 aa, Homo sapiens
  CDR3 for alpha chain variable domain of TCR clone 116869 (TRAV27, TRAJ13)
CAGAKSDSGGYQKVTF

SEQ ID NO: 233738 - protein, 17 aa, Homo sapiens
  CDR3 for beta chain variable domain of TCR clone 116869 (TRBV7-8, TRBJ2-6)
CASSAGTGGAGANVLTF

SEQ ID NO: 233739 - protein, 14 aa, Homo sapiens
  CDR3 for alpha chain variable domain of TCR clone 116870 (TRAV8-6, TRAJ43)
CAVSDRVGNNDMRF

SEQ ID NO: 233740 - protein, 14 aa, Homo sapiens
  CDR3 for beta chain variable domain of TCR clone 116870 (TRBV19, TRBJ2-1)
CASPTFVLSGEQFF

SEQ ID NO: 233741 - protein, 17 aa, Homo sapiens
  CDR3 for alpha chain variable domain of TCR clone 116871 (TRAV3, TRAJ38)
CAVRDCLNAGNNRKLIW

SEQ ID NO: 233742 - protein, 14 aa, Homo sapiens
  CDR3 for beta chain variable domain of TCR clone 116871 (TRBV20-1, TRBJ1-5)
CSARDDRGNQPQHF

SEQ ID NO: 233743 - protein, 16 aa, Homo sapiens
  CDR3 for alpha chain variable domain of TCR clone 116872 (TRAV12-2, TRAJ43)
CAGDDMRFRAGTRLTV

SEQ ID NO: 233744 - protein, 16 aa, Homo sapiens
  CDR3 for beta chain variable domain of TCR clone 116872 (TRBV2, TRBJ2-4)
CASSEAPGGEQNIQYF

SEQ ID NO: 233745 - protein, 13 aa, Homo sapiens
  CDR3 for alpha chain variable domain of TCR clone 116873 (TRAV16, TRAJ9)
CALRATGGFKTIF

SEQ ID NO: 233746 - protein, 15 aa, Homo sapiens
  CDR3 for beta chain variable domain of TCR clone 116873 (TRBV20-1, TRBJ2-7)
CSARDRVSGMDEQYF

SEQ ID NO: 233747 - protein, 14 aa, Homo sapiens
  CDR3 for alpha chain variable domain of TCR clone 116874 (TRAV8-3, TRAJ27)
CAGGRNNNAGKSTF

SEQ ID NO: 233748 - protein, 15 aa, Homo sapiens
  CDR3 for beta chain variable domain of TCR clone 116874 (TRBV11-3, TRBJ2-5)
CASSLRGRVQETQYF

SEQ ID NO: 233749 - protein, 14 aa, Homo sapiens
  CDR3 for alpha chain variable domain of TCR clone 116875 (TRAV12-2, TRAJ45)
CAVNKGGGADGLTF

SEQ ID NO: 233750 - protein, 19 aa, Homo sapiens
  CDR3 for beta chain variable domain of TCR clone 116875 (TRBV7-2, TRBJ2-3)
CASSLVLSAYISRPDTQYS

SEQ ID NO: 233751 - protein, 10 aa, Homo sapiens
  CDR3 for alpha chain variable domain of TCR clone 116876 (TRAV8-2, TRAJ29)
CTGGNTPLVF

SEQ ID NO: 233752 - protein, 17 aa, Homo sapiens
  CDR3 for beta chain variable domain of TCR clone 116876 (TRBV2, TRBJ2-7)
CASSQALTGWDSYEQYV

SEQ ID NO: 233753 - protein, 16 aa, Homo sapiens
  CDR3 for alpha chain variable domain of TCR clone 116877 (TRAV12-3, TRAJ53)
CAMSPGSGVSNYKLTF

SEQ ID NO: 233754 - protein, 12 aa, Homo sapiens
  CDR3 for beta chain variable domain of TCR clone 116877 (TRBV7-8, TRBJ2-7)
CASSLGDREQYF

SEQ ID NO: 233755 - protein, 11 aa, Homo sapiens
  CDR3 for alpha chain variable domain of TCR clone 116878 (TRAV2, TRAJ13)
CASGGYQKVTF

SEQ ID NO: 233756 - protein, 12 aa, Homo sapiens
  CDR3 for beta chain variable domain of TCR clone 116878 (TRBV14, TRBJ2-7)
CASSLYKDEQYF

SEQ ID NO: 233757 - protein, 17 aa, Homo sapiens
  CDR3 for alpha chain variable domain of TCR clone 116879 (TRAV13-1, TRAJ52)
WSASSGAGGTSYGKLTF

SEQ ID NO: 233758 - protein, 15 aa, Homo sapiens
  CDR3 for beta chain variable domain of TCR clone 116879 (TRBV2, TRBJ2-1)
CASSELAGSYNEQFF

SEQ ID NO: 233759 - protein, 12 aa, Homo sapiens
  CDR3 for alpha chain variable domain of TCR clone 116880 (TRAV12-3, TRAJ17)
CAMTLTGNELTF

SEQ ID NO: 233760 - protein, 14 aa, Homo sapiens
  CDR3 for beta chain variable domain of TCR clone 116880 (TRBV2, TRBJ1-1)
CASRDTIRNTEAFF

SEQ ID NO: 233761 - protein, 14 aa, Homo sapiens
  CDR3 for alpha chain variable domain of TCR clone 116881 (TRAV21, TRAJ45)
CAVVAGGGADGLTF

SEQ ID NO: 233762 - protein, 14 aa, Homo sapiens
  CDR3 for beta chain variable domain of TCR clone 116881 (TRBV20-1, TRBJ2-3)
CSALGLEGADTQYF

SEQ ID NO: 233763 - protein, 11 aa, Homo sapiens
  CDR3 for alpha chain variable domain of TCR clone 116882 (TRAV2, TRAJ13)
SASGGYQKVTF

SEQ ID NO: 233764 - protein, 17 aa, Homo sapiens
  CDR3 for beta chain variable domain of TCR clone 116882 (TRBV7-3, TRBJ2-3)
CASSLMKRMRGADTQYF

SEQ ID NO: 233765 - protein, 14 aa, Homo sapiens
  CDR3 for alpha chain variable domain of TCR clone 116883 (TRAV12-3, TRAJ9)
CAMSPNTGGFKTIF

SEQ ID NO: 233766 - protein, 15 aa, Homo sapiens
  CDR3 for beta chain variable domain of TCR clone 116883 (TRBV7-2, TRBJ2-1)
CASSSGLAGGNEQFF

SEQ ID NO: 233767 - protein, 16 aa, Homo sapiens
  CDR3 for alpha chain variable domain of TCR clone 116884 (TRAV16, TRAJ57)
CAPYLITQGGSEKLVF

SEQ ID NO: 233768 - protein, 18 aa, Homo sapiens
  CDR3 for beta chain variable domain of TCR clone 116884 (TRBV11-2, TRBJ2-3)
CASSLGGASRGAPNTQYF

SEQ ID NO: 233769 - protein, 17 aa, Homo sapiens
  CDR3 for alpha chain variable domain of TCR clone 116885 (TRAV4, TRAJ18)
CLVGERSVGSTPGRLYF

SEQ ID NO: 233770 - protein, 14 aa, Homo sapiens
  CDR3 for beta chain variable domain of TCR clone 116885 (TRBV6-5, TRBJ1-2)
CASSYDGTGGGYTF

SEQ ID NO: 233771 - protein, 15 aa, Homo sapiens
  CDR3 for alpha chain variable domain of TCR clone 116886 (TRAV25, TRAJ52)
CAGTSGCTSYGKLTF

SEQ ID NO: 233772 - protein, 13 aa, Homo sapiens
  CDR3 for beta chain variable domain of TCR clone 116886 (TRBV6-5, TRBJ2-5)
CASSPQGGETQYF

SEQ ID NO: 233773 - protein, 12 aa, Homo sapiens
  CDR3 for alpha chain variable domain of TCR clone 116887 (TRAV26-1, TRAJ31)
CIVRNNNARLMF

SEQ ID NO: 233774 - protein, 14 aa, Homo sapiens
  CDR3 for beta chain variable domain of TCR clone 116887 (TRBV25-1, TRBJ1-1)
CASTHLGGNTEAFF

SEQ ID NO: 233775 - protein, 14 aa, Homo sapiens
  CDR3 for alpha chain variable domain of TCR clone 116888 (TRAV12-3, TRAJ13)
CAMRNSGGYQKVTF

SEQ ID NO: 233776 - protein, 14 aa, Homo sapiens
  CDR3 for beta chain variable domain of TCR clone 116888 (TRBV4-1, TRBJ1-6)
CASSTGSDSSPLHF

SEQ ID NO: 233777 - protein, 15 aa, Homo sapiens
  CDR3 for alpha chain variable domain of TCR clone 116889 (TRAV17, TRAJ54)
CATTRSEQGAQKLVF

SEQ ID NO: 233778 - protein, 13 aa, Homo sapiens
  CDR3 for beta chain variable domain of TCR clone 116889 (TRBV4-1, TRBJ2-2)
CASSQENTGELFF

SEQ ID NO: 233779 - protein, 12 aa, Homo sapiens
  CDR3 for alpha chain variable domain of TCR clone 116890 (TRAV29/DV5, TRAJ49)
CASTDTGNQFYF

SEQ ID NO: 233780 - protein, 19 aa, Homo sapiens
  CDR3 for beta chain variable domain of TCR clone 116890 (TRBV25-1, TRBJ2-2)
CAILVYRVDRGRKTGELFF

SEQ ID NO: 233781 - protein, 14 aa, Homo sapiens
  CDR3 for alpha chain variable domain of TCR clone 116891 (TRAV13-1, TRAJ35)
CAASKGGLGNVLHC

SEQ ID NO: 233782 - protein, 11 aa, Homo sapiens
  CDR3 for beta chain variable domain of TCR clone 116891 (TRBV12-4, TRBJ2-3)
CASTATDTQYF

SEQ ID NO: 233783 - protein, 14 aa, Homo sapiens
  CDR3 for alpha chain variable domain of TCR clone 116892 (TRAV12-2, TRAJ17)
CAVNIKAAGNKLTF

SEQ ID NO: 233784 - protein, 14 aa, Homo sapiens
  CDR3 for beta chain variable domain of TCR clone 116892 (TRBV7-2, TRBJ2-7)
CASSPKTSFYEQYF

SEQ ID NO: 233785 - protein, 13 aa, Homo sapiens
  CDR3 for alpha chain variable domain of TCR clone 116893 (TRAV8-1, TRAJ23)
CAVTGGQGGKLIF

SEQ ID NO: 233786 - protein, 15 aa, Homo sapiens
  CDR3 for beta chain variable domain of TCR clone 116893 (TRBV20-1, TRBJ2-2)
CSASPGHSNTGELFF

SEQ ID NO: 233787 - protein, 14 aa, Homo sapiens
  CDR3 for alpha chain variable domain of TCR clone 116894 (TRAV2, TRAJ9)
CAVEDRSGGFKTIF

SEQ ID NO: 233788 - protein, 13 aa, Homo sapiens
  CDR3 for beta chain variable domain of TCR clone 116894 (TRBV6-1, TRBJ1-1)
CASSRQGNTEAFF

SEQ ID NO: 233789 - protein, 14 aa, Homo sapiens
  CDR3 for alpha chain variable domain of TCR clone 116895 (TRAV12-3, TRAJ10)
SHLPLTGGGNKLTF

SEQ ID NO: 233790 - protein, 15 aa, Homo sapiens
  CDR3 for beta chain variable domain of TCR clone 116895 (TRBV4-1, TRBJ2-7)
CASSQQGQGFDEQYF

SEQ ID NO: 233791 - protein, 16 aa, Homo sapiens
  CDR3 for alpha chain variable domain of TCR clone 116896 (TRAV21, TRAJ37)
CAVRTAGSSNTGKLIF

SEQ ID NO: 233792 - protein, 13 aa, Homo sapiens
  CDR3 for beta chain variable domain of TCR clone 116896 (TRBV7-9, TRBJ2-5)
CASPLSGRETQYF

SEQ ID NO: 233793 - protein, 16 aa, Homo sapiens
  CDR3 for alpha chain variable domain of TCR clone 116897 (TRAV12-2, TRAJ6)
CAAPLAGSGGSYIPTF

SEQ ID NO: 233794 - protein, 14 aa, Homo sapiens
  CDR3 for beta chain variable domain of TCR clone 116897 (TRBV7-9, TRBJ2-7)
CASSLSQGSYEQYF

SEQ ID NO: 233795 - protein, 17 aa, Homo sapiens
  CDR3 for alpha chain variable domain of TCR clone 116898 (TRAV13-1, TRAJ31)
CAPRDRLMFGDGTQLVV

SEQ ID NO: 233796 - protein, 15 aa, Homo sapiens
  CDR3 for beta chain variable domain of TCR clone 116898 (TRBV6-5, TRBJ2-1)
CASSYDAGAGNEQFF

SEQ ID NO: 233797 - protein, 17 aa, Homo sapiens
  CDR3 for alpha chain variable domain of TCR clone 116899 (TRAV3, TRAJ6)
CAVRDGPRAGGSYIPTF

SEQ ID NO: 233798 - protein, 14 aa, Homo sapiens
  CDR3 for beta chain variable domain of TCR clone 116899 (TRBV19, TRBJ2-3)
CASSAPRGTDTQYF

SEQ ID NO: 233799 - protein, 14 aa, Homo sapiens
  CDR3 for alpha chain variable domain of TCR clone 116900 (TRAV12-2, TRAJ17)
CAVNIKAAGNQLTF

SEQ ID NO: 233800 - protein, 16 aa, Homo sapiens
  CDR3 for beta chain variable domain of TCR clone 116900 (TRBV20-1, TRBJ2-6)
CSASSQGYDGANVLTF

SEQ ID NO: 233801 - protein, 16 aa, Homo sapiens
  CDR3 for alpha chain variable domain of TCR clone 116901 (TRAV27, TRAJ13)
CAGAKSDSGGYQKVTF

SEQ ID NO: 233802 - protein, 16 aa, Homo sapiens
  CDR3 for beta chain variable domain of TCR clone 116901 (TRBV4-3, TRBJ1-6)
CASSQDPGVYNSPLHF

SEQ ID NO: 233803 - protein, 13 aa, Homo sapiens
  CDR3 for alpha chain variable domain of TCR clone 116902 (TRAV16, TRAJ9)
CALSNTGGFKTIF

SEQ ID NO: 233804 - protein, 15 aa, Homo sapiens
  CDR3 for beta chain variable domain of TCR clone 116902 (TRBV28, TRBJ2-4)
CAAGSGTLLMGIQYF

SEQ ID NO: 233805 - protein, 13 aa, Homo sapiens
  CDR3 for alpha chain variable domain of TCR clone 116903 (TRAV2, TRAJ15)
CAVASQAGTALIF

SEQ ID NO: 233806 - protein, 17 aa, Homo sapiens
  CDR3 for beta chain variable domain of TCR clone 116903 (TRBV28, TRBJ2-5)
CASSTPEGDALQETQYF

SEQ ID NO: 233807 - protein, 13 aa, Homo sapiens
  CDR3 for alpha chain variable domain of TCR clone 116904 (TRAV12-3, TRAJ7)
CAMTPYGNNRLAF

SEQ ID NO: 233808 - protein, 15 aa, Homo sapiens
  CDR3 for beta chain variable domain of TCR clone 116904 (TRBV20-1, TRBJ1-4)
QCSGTGLITNEKLFF

SEQ ID NO: 233809 - protein, 12 aa, Homo sapiens
  CDR3 for alpha chain variable domain of TCR clone 116905 (TRAV1-2, TRAJ29)
CAVPSGNTPLVF

SEQ ID NO: 233810 - protein, 14 aa, Homo sapiens
  CDR3 for beta chain variable domain of TCR clone 116905 (TRBV25-1, TRBJ1-2)
CASSDTTGVVGYTF

SEQ ID NO: 233811 - protein, 14 aa, Homo sapiens
  CDR3 for alpha chain variable domain of TCR clone 116906 (TRAV38-1, TRAJ40)
CALRPTSGTYKYIF

SEQ ID NO: 233812 - protein, 14 aa, Homo sapiens
  CDR3 for beta chain variable domain of TCR clone 116906 (TRBV23-1, TRBJ2-5)
CASSFLRSQETQYF

SEQ ID NO: 233813 - protein, 12 aa, Homo sapiens
  CDR3 for alpha chain variable domain of TCR clone 116907 (TRAV16, TRAJ15)
CARWQAGTALIF

SEQ ID NO: 233814 - protein, 14 aa, Homo sapiens
  CDR3 for beta chain variable domain of TCR clone 116907 (TRBV7-2, TRBJ2-7)
CASSPKTSFYEQYF

SEQ ID NO: 233815 - protein, 14 aa, Homo sapiens
  CDR3 for alpha chain variable domain of TCR clone 116908 (TRAV1-2, TRAJ8)
CAVREDTGFQKLVF

SEQ ID NO: 233816 - protein, 15 aa, Homo sapiens
  CDR3 for beta chain variable domain of TCR clone 116908 (TRBV28, TRBJ2-4)
CAAGSGTLLMGTQYF

SEQ ID NO: 233817 - protein, 17 aa, Homo sapiens
  CDR3 for alpha chain variable domain of TCR clone 116909 (TRAV12-2, TRAJ52)
CAVNHYAGGTSYGKLTF

SEQ ID NO: 233818 - protein, 16 aa, Homo sapiens
  CDR3 for beta chain variable domain of TCR clone 116909 (TRBV5-5, TRBJ2-2)
CASSGRREGATGELFF

SEQ ID NO: 233819 - protein, 12 aa, Homo sapiens
  CDR3 for alpha chain variable domain of TCR clone 116910 (TRAV21, TRAJ39)
CAADNAGNMLTF

SEQ ID NO: 233820 - protein, 12 aa, Homo sapiens
  CDR3 for beta chain variable domain of TCR clone 116910 (TRBV5-4, TRBJ2-7)
CASSWAGQGEIF

SEQ ID NO: 233821 - protein, 18 aa, Homo sapiens
  CDR3 for alpha chain variable domain of TCR clone 116911 (TRAV29/DV5, TRAJ52)
CAAGFRGAGGTSYGKLTF

SEQ ID NO: 233822 - protein, 16 aa, Homo sapiens
  CDR3 for beta chain variable domain of TCR clone 116911 (TRBV7-3, TRBJ2-2)
CVSSLKRGTLSGELFF

SEQ ID NO: 233823 - protein, 14 aa, Homo sapiens
  CDR3 for alpha chain variable domain of TCR clone 116912 (TRAV12-2, TRAJ13)
CAVKKTGGYQKVTF

SEQ ID NO: 233824 - protein, 12 aa, Homo sapiens
  CDR3 for beta chain variable domain of TCR clone 116912 (TRBV12-4, TRBJ1-2)
CASSFIWLHRRF

SEQ ID NO: 233825 - protein, 14 aa, Homo sapiens
  CDR3 for alpha chain variable domain of TCR clone 116913 (TRAV12-2, TRAJ17)
CAVNIKAAGNKLTF

SEQ ID NO: 233826 - protein, 16 aa, Homo sapiens
  CDR3 for beta chain variable domain of TCR clone 116913 (TRBV20-1, TRBJ1-4)
CSAPGQGLLTNEKLFF

SEQ ID NO: 233827 - protein, 14 aa, Homo sapiens
  CDR3 for alpha chain variable domain of TCR clone 116914 (TRAV1-2, TRAJ8)
CAVREDTGFRKLVF

SEQ ID NO: 233828 - protein, 15 aa, Homo sapiens
  CDR3 for beta chain variable domain of TCR clone 116914 (TRBV29-1, TRBJ2-1)
CSVPTGLALYNEQFF

SEQ ID NO: 233829 - protein, 16 aa, Homo sapiens
  CDR3 for alpha chain variable domain of TCR clone 116915 (TRAV8-3, TRAJ44)
CAVGTLMTGTASKLTF

SEQ ID NO: 233830 - protein, 15 aa, Homo sapiens
  CDR3 for beta chain variable domain of TCR clone 116915 (TRBV10-2, TRBJ2-6)
CASSEQGTGANDLTF

SEQ ID NO: 233831 - protein, 18 aa, Homo sapiens
  CDR3 for alpha chain variable domain of TCR clone 116916 (TRAV12-3, TRAJ52)
CAMSVGGPGGTSYGKLTF

SEQ ID NO: 233832 - protein, 15 aa, Homo sapiens
  CDR3 for beta chain variable domain of TCR clone 116916 (TRBV27, TRBJ1-6)
CASSFDRGLGSPLHF

SEQ ID NO: 233833 - protein, 14 aa, Homo sapiens
  CDR3 for alpha chain variable domain of TCR clone 116917 (TRAV17, TRAJ16)
CATADFSDGQKLLF

SEQ ID NO: 233834 - protein, 15 aa, Homo sapiens
  CDR3 for beta chain variable domain of TCR clone 116917 (TRBV18, TRBJ2-1)
CASSPPSVSYNEQFF

SEQ ID NO: 233835 - protein, 11 aa, Homo sapiens
  CDR3 for alpha chain variable domain of TCR clone 116918 (TRAV1-2, TRAJ20)
CAMANDYKLSF

SEQ ID NO: 233836 - protein, 14 aa, Homo sapiens
  CDR3 for beta chain variable domain of TCR clone 116918 (TRBV19, TRBJ1-4)
CASSMGRHNEKLFF

SEQ ID NO: 233837 - protein, 14 aa, Homo sapiens
  CDR3 for alpha chain variable domain of TCR clone 116919 (TRAV12-2, TRAJ40)
CAVKIPLGTYKYIF

SEQ ID NO: 233838 - protein, 14 aa, Homo sapiens
  CDR3 for beta chain variable domain of TCR clone 116919 (TRBV7-8, TRBJ2-7)
CASSPRDRVYEQYF

SEQ ID NO: 233839 - protein, 15 aa, Homo sapiens
  CDR3 for alpha chain variable domain of TCR clone 116920 (TRAV4, TRAJ8)
CLVGEQHTGFQKLVF

SEQ ID NO: 233840 - protein, 15 aa, Homo sapiens
  CDR3 for beta chain variable domain of TCR clone 116920 (TRBV7-9, TRBJ2-5)
CANSNRDYLQETQYF

SEQ ID NO: 233841 - protein, 15 aa, Homo sapiens
  CDR3 for alpha chain variable domain of TCR clone 116921 (TRAV21, TRAJ24)
CAARSSTDSWGKLQF

SEQ ID NO: 233842 - protein, 13 aa, Homo sapiens
  CDR3 for beta chain variable domain of TCR clone 116921 (TRBV7-9, TRBJ1-2)
CASSLKQNYGHTF

SEQ ID NO: 233843 - protein, 13 aa, Homo sapiens
  CDR3 for alpha chain variable domain of TCR clone 116922 (TRAV36/DV7, TRAJ37)
CAVFSSNTGKLIF

SEQ ID NO: 233844 - protein, 16 aa, Homo sapiens
  CDR3 for beta chain variable domain of TCR clone 116922 (TRBV7-9, TRBJ1-2)
CASSLGFSSGEDGYTF

SEQ ID NO: 233845 - protein, 16 aa, Homo sapiens
  CDR3 for alpha chain variable domain of TCR clone 116923 (TRAV30, TRAJ24)
CGTEIVDADSWGKFQF

SEQ ID NO: 233846 - protein, 14 aa, Homo sapiens
  CDR3 for beta chain variable domain of TCR clone 116923 (TRBV14, TRBJ2-1)
CASSQVQGRGEQFF

SEQ ID NO: 233847 - protein, 11 aa, Homo sapiens
  CDR3 for alpha chain variable domain of TCR clone 116924 (TRAV21, TRAJ31)
CAVRNNARLMF

SEQ ID NO: 233848 - protein, 17 aa, Homo sapiens
  CDR3 for beta chain variable domain of TCR clone 116924 (TRBV11-2, TRBJ2-1)
CASSLYPPGVEYNEQFF

SEQ ID NO: 233849 - protein, 16 aa, Homo sapiens
  CDR3 for alpha chain variable domain of TCR clone 116925 (TRAV13-1, TRAJ48)
CAASIFGNFGNEKLTF

SEQ ID NO: 233850 - protein, 15 aa, Homo sapiens
  CDR3 for beta chain variable domain of TCR clone 116925 (TRBV7-9, TRBJ1-4)
CASSRTGGFNEKLFF

SEQ ID NO: 233851 - protein, 14 aa, Homo sapiens
  CDR3 for alpha chain variable domain of TCR clone 116926 (TRAV3, TRAJ34)
CAVRAPGNTDRLIF

SEQ ID NO: 233852 - protein, 16 aa, Homo sapiens
  CDR3 for beta chain variable domain of TCR clone 116926 (TRBV19, TRBJ1-6)
CASSVAPVAGNSPLHF

SEQ ID NO: 233853 - protein, 12 aa, Homo sapiens
  CDR3 for alpha chain variable domain of TCR clone 116927 (TRAV3, TRAJ43)
CAVRDPNNDMRF

SEQ ID NO: 233854 - protein, 15 aa, Homo sapiens
  CDR3 for beta chain variable domain of TCR clone 116927 (TRBV27, TRBJ1-5)
CASSLGTVFDQPQHF

SEQ ID NO: 233855 - protein, 13 aa, Homo sapiens
  CDR3 for alpha chain variable domain of TCR clone 116928 (TRAV26-1, TRAJ45)
CIVEGGGADGLTF

SEQ ID NO: 233856 - protein, 15 aa, Homo sapiens
  CDR3 for beta chain variable domain of TCR clone 116928 (TRBV7-9, TRBJ1-5)
CASSQGHQPNQPQHF

SEQ ID NO: 233857 - protein, 12 aa, Homo sapiens
  CDR3 for alpha chain variable domain of TCR clone 116929 (TRAV8-4, TRAJ31)
CAVSDSNARLMF

SEQ ID NO: 233858 - protein, 15 aa, Homo sapiens
  CDR3 for beta chain variable domain of TCR clone 116929 (TRBV5-1, TRBJ2-3)
CASSVTSGSTDTQYF

SEQ ID NO: 233859 - protein, 13 aa, Homo sapiens
  CDR3 for alpha chain variable domain of TCR clone 116930 (TRAV8-3, TRAJ44)
CSVVPGTASKLTF

SEQ ID NO: 233860 - protein, 14 aa, Homo sapiens
  CDR3 for beta chain variable domain of TCR clone 116930 (TRBV11-2, TRBJ2-3)
CASSRLARTDTQYF

SEQ ID NO: 233861 - protein, 17 aa, Homo sapiens
  CDR3 for alpha chain variable domain of TCR clone 116931 (TRAV3, TRAJ42)
CAVRYRDYGGSQGNLIF

SEQ ID NO: 233862 - protein, 20 aa, Homo sapiens
  CDR3 for beta chain variable domain of TCR clone 116931 (TRBV28, TRBJ2-1)
CASTPIGRSPGLAGGNEQFF

SEQ ID NO: 233863 - protein, 14 aa, Homo sapiens
  CDR3 for alpha chain variable domain of TCR clone 116932 (TRAV12-1, TRAJ13)
CVLIDSGGYQKVTF

SEQ ID NO: 233864 - protein, 12 aa, Homo sapiens
  CDR3 for beta chain variable domain of TCR clone 116932 (TRBV29-1, TRBJ2-3)
CSVTGGADTQYF

SEQ ID NO: 233865 - protein, 18 aa, Homo sapiens
  CDR3 for alpha chain variable domain of TCR clone 116933 (TRAV12-3, TRAJ52)
CAMSVGGAGGTSYGKLTF

SEQ ID NO: 233866 - protein, 16 aa, Homo sapiens
  CDR3 for beta chain variable domain of TCR clone 116933 (TRBV7-9, TRBJ1-2)
CASSLGFSSGEDGYTF

SEQ ID NO: 233867 - protein, 15 aa, Homo sapiens
  CDR3 for alpha chain variable domain of TCR clone 116934 (TRAV27, TRAJ38)
CAGRFNAGNNRKLIW

SEQ ID NO: 233868 - protein, 15 aa, Homo sapiens
  CDR3 for beta chain variable domain of TCR clone 116934 (TRBV18, TRBJ2-3)
CASSPLAGETDTQYF

SEQ ID NO: 233869 - protein, 13 aa, Homo sapiens
  CDR3 for alpha chain variable domain of TCR clone 116935 (TRAV16, TRAJ34)
CALRTWNTDKLIF

SEQ ID NO: 233870 - protein, 16 aa, Homo sapiens
  CDR3 for beta chain variable domain of TCR clone 116935 (TRBV15, TRBJ2-3)
CATSRDLGIVTDTQYF

SEQ ID NO: 233871 - protein, 15 aa, Homo sapiens
  CDR3 for alpha chain variable domain of TCR clone 116936 (TRAV8-3, TRAJ45)
CASSCSGGGADGLTF

SEQ ID NO: 233872 - protein, 15 aa, Homo sapiens
  CDR3 for beta chain variable domain of TCR clone 116936 (TRBV18, TRBJ1-1)
CASSPRQGENTEAFF

SEQ ID NO: 233873 - protein, 13 aa, Homo sapiens
  CDR3 for alpha chain variable domain of TCR clone 116937 (TRAV8-3, TRAJ4)
WVFYSGGYNKLIF

SEQ ID NO: 233874 - protein, 16 aa, Homo sapiens
  CDR3 for beta chain variable domain of TCR clone 116937 (TRBV7-3, TRBJ2-2)
CASSLKRGTLSGELFF

SEQ ID NO: 233875 - protein, 14 aa, Homo sapiens
  CDR3 for alpha chain variable domain of TCR clone 116938 (TRAV16, TRAJ3)
CALSQYSSASKIIF

SEQ ID NO: 233876 - protein, 14 aa, Homo sapiens
  CDR3 for beta chain variable domain of TCR clone 116938 (TRBV19, TRBJ2-1)
CASPTFVLSGEQFF

SEQ ID NO: 233877 - protein, 14 aa, Homo sapiens
  CDR3 for alpha chain variable domain of TCR clone 116939 (TRAV1-2, TRAJ8)
CAVREDTGFQKLVF

SEQ ID NO: 233878 - protein, 16 aa, Homo sapiens
  CDR3 for beta chain variable domain of TCR clone 116939 (TRBV29-1, TRBJ2-6)
CSVEDITYSGANVLAF

SEQ ID NO: 233879 - protein, 22 aa, Homo sapiens
  CDR3 for alpha chain variable domain of TCR clone 116940 (TRAV3, )
CAVRDCLNAGDNHIQNPDPAVY

SEQ ID NO: 233880 - protein, 14 aa, Homo sapiens
  CDR3 for beta chain variable domain of TCR clone 116940 (TRBV5-5, TRBJ1-5)
CASSGQGVDQPQHF

SEQ ID NO: 233881 - protein, 14 aa, Homo sapiens
  CDR3 for alpha chain variable domain of TCR clone 116941 (TRAV12-1, TRAJ3)
RGAARYSSASKIIF

SEQ ID NO: 233882 - protein, 15 aa, Homo sapiens
  CDR3 for beta chain variable domain of TCR clone 116941 (TRBV7-2, TRBJ2-6)
CASSREGSGANVLTF

SEQ ID NO: 233883 - protein, 13 aa, Homo sapiens
  CDR3 for alpha chain variable domain of TCR clone 116942 (TRAV21, TRAJ27)
CAARPGNAGTSTL

SEQ ID NO: 233884 - protein, 14 aa, Homo sapiens
  CDR3 for beta chain variable domain of TCR clone 116942 (TRBV7-6, TRBJ2-3)
CASSLGTVTDTQYF

SEQ ID NO: 233885 - protein, 14 aa, Homo sapiens
  CDR3 for alpha chain variable domain of TCR clone 116943 (TRAV39, TRAJ54)
CAVVLIQGAQKLVF

SEQ ID NO: 233886 - protein, 16 aa, Homo sapiens
  CDR3 for beta chain variable domain of TCR clone 116943 (TRBV3-1, TRBJ2-7)
CASSQGATGVAYGQYF

SEQ ID NO: 233887 - protein, 15 aa, Homo sapiens
  CDR3 for alpha chain variable domain of TCR clone 116944 (TRAV2, TRAJ42)
CAVEVYGGSQGNLIF

SEQ ID NO: 233888 - protein, 14 aa, Homo sapiens
  CDR3 for beta chain variable domain of TCR clone 116944 (TRBV7-2, TRBJ2-5)
CASSFTQGQETQYF

SEQ ID NO: 233889 - protein, 12 aa, Homo sapiens
  CDR3 for alpha chain variable domain of TCR clone 116945 (TRAV2, TRAJ29)
CFPNSGNTPLVF

SEQ ID NO: 233890 - protein, 14 aa, Homo sapiens
  CDR3 for beta chain variable domain of TCR clone 116945 (TRBV7-2, TRBJ1-1)
CASSFLTGTTEAFF

SEQ ID NO: 233891 - protein, 14 aa, Homo sapiens
  CDR3 for alpha chain variable domain of TCR clone 116946 (TRAV9-2, TRAJ39)
CALYIYNAGNMLTF

SEQ ID NO: 233892 - protein, 15 aa, Homo sapiens
  CDR3 for beta chain variable domain of TCR clone 116946 (TRBV10-3, TRBJ2-1)
CAISDVQDRAYEQFF

SEQ ID NO: 233893 - protein, 14 aa, Homo sapiens
  CDR3 for alpha chain variable domain of TCR clone 116947 (TRAV1-2, TRAJ8)
CAVREDTGFQKLVF

SEQ ID NO: 233894 - protein, 15 aa, Homo sapiens
  CDR3 for beta chain variable domain of TCR clone 116947 (TRBV19, TRBJ2-1)
CASSIGLAGWDEQFF

SEQ ID NO: 233895 - protein, 14 aa, Homo sapiens
  CDR3 for alpha chain variable domain of TCR clone 116948 (TRAV13-1, TRAJ35)
CAASKGGFGNVLHC

SEQ ID NO: 233896 - protein, 13 aa, Homo sapiens
  CDR3 for beta chain variable domain of TCR clone 116948 (TRBV12-4, TRBJ1-2)
CASSLRQGKGYTF

SEQ ID NO: 233897 - protein, 14 aa, Homo sapiens
  CDR3 for alpha chain variable domain of TCR clone 116949 (TRAV29/DV5, TRAJ44)
CAAFLVGTASNLTF

SEQ ID NO: 233898 - protein, 15 aa, Homo sapiens
  CDR3 for beta chain variable domain of TCR clone 116949 (TRBV7-3, TRBJ2-2)
CASSETGQGTGELFF

SEQ ID NO: 233899 - protein, 14 aa, Homo sapiens
  CDR3 for alpha chain variable domain of TCR clone 116950 (TRAV8-3, TRAJ39)
CAVGANNAGNMLPF

SEQ ID NO: 233900 - protein, 12 aa, Homo sapiens
  CDR3 for beta chain variable domain of TCR clone 116950 (TRBV11-3, TRBJ1-1)
CASSHRQGEAFF

SEQ ID NO: 233901 - protein, 16 aa, Homo sapiens
  CDR3 for alpha chain variable domain of TCR clone 116951 (TRAV23/DV6, TRAJ9)
CAASIGGNTGGFKTIF

SEQ ID NO: 233902 - protein, 15 aa, Homo sapiens
  CDR3 for beta chain variable domain of TCR clone 116951 (TRBV29-1, TRBJ2-1)
CSGRDRKSSYNEQFF

SEQ ID NO: 233903 - protein, 11 aa, Homo sapiens
  CDR3 for alpha chain variable domain of TCR clone 116952 (TRAV26-1, TRAJ37)
CIVRVGRKLIF

SEQ ID NO: 233904 - protein, 17 aa, Homo sapiens
  CDR3 for beta chain variable domain of TCR clone 116952 (TRBV11-2, TRBJ2-1)
CASSLYPPGVEYNEQFF

SEQ ID NO: 233905 - protein, 10 aa, Homo sapiens
  CDR3 for alpha chain variable domain of TCR clone 116953 (TRAV1-2, TRAJ23)
CAGQGGKLIF

SEQ ID NO: 233906 - protein, 16 aa, Homo sapiens
  CDR3 for beta chain variable domain of TCR clone 116953 (TRBV11-2, TRBJ1-1)
CASSLRQGGEHSKAVF

SEQ ID NO: 233907 - protein, 15 aa, Homo sapiens
  CDR3 for alpha chain variable domain of TCR clone 116954 (TRAV14/DV4, TRAJ33)
CAMREGRDSNCQLIW

SEQ ID NO: 233908 - protein, 15 aa, Homo sapiens
  CDR3 for beta chain variable domain of TCR clone 116954 (TRBV5-5, TRBJ1-5)
CASSSTPGSNQPQHF

SEQ ID NO: 233909 - protein, 12 aa, Homo sapiens
  CDR3 for alpha chain variable domain of TCR clone 116955 (TRAV4, TRAJ26)
CLVGDCGQNFVF

SEQ ID NO: 233910 - protein, 12 aa, Homo sapiens
  CDR3 for beta chain variable domain of TCR clone 116955 (TRBV11-2, TRBJ2-2)
CASSLGGGELFF

SEQ ID NO: 233911 - protein, 11 aa, Homo sapiens
  CDR3 for alpha chain variable domain of TCR clone 116956 (TRAV1-2, TRAJ40)
CAVPGTYKYIF

SEQ ID NO: 233912 - protein, 13 aa, Homo sapiens
  CDR3 for beta chain variable domain of TCR clone 116956 (TRBV25-1, TRBJ2-7)
CASSEDGDYEQYF

SEQ ID NO: 233913 - protein, 16 aa, Homo sapiens
  CDR3 for alpha chain variable domain of TCR clone 116957 (TRAV12-3, TRAJ53)
CAMSPGSGGSNYKLTF

SEQ ID NO: 233914 - protein, 15 aa, Homo sapiens
  CDR3 for beta chain variable domain of TCR clone 116957 (TRBV28, TRBJ2-7)
CASSLISGGSYEQYF

SEQ ID NO: 233915 - protein, 17 aa, Homo sapiens
  CDR3 for alpha chain variable domain of TCR clone 116958 (TRAV3, TRAJ6)
CAVRDGPRAGGSYIPTF

SEQ ID NO: 233916 - protein, 16 aa, Homo sapiens
  CDR3 for beta chain variable domain of TCR clone 116958 (TRBV28, TRBJ2-1)
CASSSPEYPRDNEQFF

SEQ ID NO: 233917 - protein, 12 aa, Homo sapiens
  CDR3 for alpha chain variable domain of TCR clone 116959 (TRAV27, TRAJ9)
CAGESGGFKTIF

SEQ ID NO: 233918 - protein, 18 aa, Homo sapiens
  CDR3 for beta chain variable domain of TCR clone 116959 (TRBV10-2, TRBJ2-2)
CIAAPAVHRQADAGELFF

SEQ ID NO: 233919 - protein, 15 aa, Homo sapiens
  CDR3 for alpha chain variable domain of TCR clone 116960 (TRAV21, TRAJ53)
CATLTSGGSNYKLTF

SEQ ID NO: 233920 - protein, 16 aa, Homo sapiens
  CDR3 for beta chain variable domain of TCR clone 116960 (TRBV20-1, TRBJ1-4)
CSAPGQGLLTNEKLFF

SEQ ID NO: 233921 - protein, 13 aa, Homo sapiens
  CDR3 for alpha chain variable domain of TCR clone 116961 (TRAV26-2, TRAJ43)
CILRAVNNNDMRF

SEQ ID NO: 233922 - protein, 15 aa, Homo sapiens
  CDR3 for beta chain variable domain of TCR clone 116961 (TRBV6-3, TRBJ2-7)
CASSSPGTVFYEQYF

SEQ ID NO: 233923 - protein, 15 aa, Homo sapiens
  CDR3 for alpha chain variable domain of TCR clone 116962 (TRAV12-2, TRAJ57)
CAVSRGQGGSEKLVF

SEQ ID NO: 233924 - protein, 18 aa, Homo sapiens
  CDR3 for beta chain variable domain of TCR clone 116962 (TRBV11-2, TRBJ2-3)
CASSLGGASRGAPNTQYF

SEQ ID NO: 233925 - protein, 11 aa, Homo sapiens
  CDR3 for alpha chain variable domain of TCR clone 116963 (TRAV2, TRAJ13)
CGSGGYQKVTF

SEQ ID NO: 233926 - protein, 16 aa, Homo sapiens
  CDR3 for beta chain variable domain of TCR clone 116963 (TRBV6-1, TRBJ2-5)
CASSETLDRGAETQYF

SEQ ID NO: 233927 - protein, 13 aa, Homo sapiens
  CDR3 for alpha chain variable domain of TCR clone 116964 (TRAV30, TRAJ24)
CVTVTDSWGKLQF

SEQ ID NO: 233928 - protein, 14 aa, Homo sapiens
  CDR3 for beta chain variable domain of TCR clone 116964 (TRBV6-3, TRBJ2-2)
CASTYTPDTGELFF

SEQ ID NO: 233929 - protein, 17 aa, Homo sapiens
  CDR3 for alpha chain variable domain of TCR clone 116965 (TRAV3, TRAJ6)
CAVRDGPRAGGSDVPTF

SEQ ID NO: 233930 - protein, 14 aa, Homo sapiens
  CDR3 for beta chain variable domain of TCR clone 116965 (TRBV7-2, TRBJ2-7)
CASSPKTSFYEQYF

SEQ ID NO: 233931 - protein, 12 aa, Homo sapiens
  CDR3 for alpha chain variable domain of TCR clone 116966 (TRAV6, TRAJ40)
CARTSGTYKYIF

SEQ ID NO: 233932 - protein, 12 aa, Homo sapiens
  CDR3 for beta chain variable domain of TCR clone 116966 (TRBV27, TRBJ2-5)
CASGPTGETQYF

SEQ ID NO: 233933 - protein, 14 aa, Homo sapiens
  CDR3 for alpha chain variable domain of TCR clone 116967 (TRAV13-1, TRAJ35)
CAASKGGFGNVLHC

SEQ ID NO: 233934 - protein, 13 aa, Homo sapiens
  CDR3 for beta chain variable domain of TCR clone 116967 (TRBV28, TRBJ2-7)
CASTPGLAGEQYF

SEQ ID NO: 233935 - protein, 13 aa, Homo sapiens
  CDR3 for alpha chain variable domain of TCR clone 116968 (TRAV3, TRAJ27)
CAVTNTNAGKSTF

SEQ ID NO: 233936 - protein, 13 aa, Homo sapiens
  CDR3 for beta chain variable domain of TCR clone 116968 (TRBV19, TRBJ2-7)
CASQSYGAGEQYS

SEQ ID NO: 233937 - protein, 15 aa, Homo sapiens
  CDR3 for alpha chain variable domain of TCR clone 116969 (TRAV12-2, TRAJ53)
CAVNGGGGSNYKLTF

SEQ ID NO: 233938 - protein, 13 aa, Homo sapiens
  CDR3 for beta chain variable domain of TCR clone 116969 (TRBV15, TRBJ2-7)
CATSTTGHYEQYF

SEQ ID NO: 233939 - protein, 14 aa, Homo sapiens
  CDR3 for alpha chain variable domain of TCR clone 116970 (TRAV12-3, TRAJ10)
SHLPLTGGGNKLTF

SEQ ID NO: 233940 - protein, 15 aa, Homo sapiens
  CDR3 for beta chain variable domain of TCR clone 116970 (TRBV4-2, TRBJ2-5)
CASSLSGQGEETQYF

SEQ ID NO: 233941 - protein, 15 aa, Homo sapiens
  CDR3 for alpha chain variable domain of TCR clone 116971 (TRAV8-4, TRAJ52)
CAVSDGGTSYGQLTF

SEQ ID NO: 233942 - protein, 12 aa, Homo sapiens
  CDR3 for beta chain variable domain of TCR clone 116971 (TRBV29-1, TRBJ2-3)
CSVTSGGDTQYF

SEQ ID NO: 233943 - protein, 14 aa, Homo sapiens
  CDR3 for alpha chain variable domain of TCR clone 116972 (TRAV1-2, TRAJ8)
CAVREDTGFPKLVF

SEQ ID NO: 233944 - protein, 12 aa, Homo sapiens
  CDR3 for beta chain variable domain of TCR clone 116972 (TRBV2, TRBJ2-1)
CAYGPPGNEQFF

SEQ ID NO: 233945 - protein, 12 aa, Homo sapiens
  CDR3 for alpha chain variable domain of TCR clone 116973 (TRAV12-1, TRAJ30)
CMVNPRDDKIIF

SEQ ID NO: 233946 - protein, 18 aa, Homo sapiens
  CDR3 for beta chain variable domain of TCR clone 116973 (TRBV5-1, TRBJ2-7)
CASSLAGFGGMSSYEQYF

SEQ ID NO: 233947 - protein, 14 aa, Homo sapiens
  CDR3 for alpha chain variable domain of TCR clone 116974 (TRAV9-2, TRAJ38)
CALRGAGNNRKLIW

SEQ ID NO: 233948 - protein, 15 aa, Homo sapiens
  CDR3 for beta chain variable domain of TCR clone 116974 (TRBV19, TRBJ2-1)
CASSTGTSSYNEQFF

SEQ ID NO: 233949 - protein, 13 aa, Homo sapiens
  CDR3 for alpha chain variable domain of TCR clone 116975 (TRAV1-2, TRAJ35)
CAVQIGFGNVLHC

SEQ ID NO: 233950 - protein, 13 aa, Homo sapiens
  CDR3 for beta chain variable domain of TCR clone 116975 (TRBV12-4, TRBJ1-2)
CASSLRQGKGYTF

SEQ ID NO: 233951 - protein, 13 aa, Homo sapiens
  CDR3 for alpha chain variable domain of TCR clone 116976 (TRAV12-3, TRAJ47)
CAMKKEYGNKLVF

SEQ ID NO: 233952 - protein, 16 aa, Homo sapiens
  CDR3 for beta chain variable domain of TCR clone 116976 (TRBV3-1, TRBJ2-6)
CASSLTWVAGANDLTF

SEQ ID NO: 233953 - protein, 14 aa, Homo sapiens
  CDR3 for alpha chain variable domain of TCR clone 116977 (TRAV12-2, TRAJ44)
CAVNPAGTASKLTF

SEQ ID NO: 233954 - protein, 16 aa, Homo sapiens
  CDR3 for beta chain variable domain of TCR clone 116977 (TRBV12-5, TRBJ2-5)
CASGPRTSGNQETQYF

SEQ ID NO: 233955 - protein, 14 aa, Homo sapiens
  CDR3 for alpha chain variable domain of TCR clone 116978 (TRAV3, TRAJ7)
CAVREEEREQQTGF

SEQ ID NO: 233956 - protein, 12 aa, Homo sapiens
  CDR3 for beta chain variable domain of TCR clone 116978 (TRBV7-8, TRBJ2-7)
CASSLGDREQYF

SEQ ID NO: 233957 - protein, 13 aa, Homo sapiens
  CDR3 for alpha chain variable domain of TCR clone 116979 (TRAV12-1, TRAJ37)
CVVNAGNTGKLIF

SEQ ID NO: 233958 - protein, 13 aa, Homo sapiens
  CDR3 for beta chain variable domain of TCR clone 116979 (TRBV7-8, TRBJ2-7)
RRVRLTEMGEQYF

SEQ ID NO: 233959 - protein, 15 aa, Homo sapiens
  CDR3 for alpha chain variable domain of TCR clone 116980 (TRAV3, TRAJ22)
CAVRDRGGAARQLTF

SEQ ID NO: 233960 - protein, 15 aa, Homo sapiens
  CDR3 for beta chain variable domain of TCR clone 116980 (TRBV20-1, TRBJ1-1)
CSASRGVTGNTEAFF

SEQ ID NO: 233961 - protein, 17 aa, Homo sapiens
  CDR3 for alpha chain variable domain of TCR clone 116981 (TRAV3, TRAJ6)
CAVRDGHRAGGSYIPTF

SEQ ID NO: 233962 - protein, 13 aa, Homo sapiens
  CDR3 for beta chain variable domain of TCR clone 116981 (TRBV27, TRBJ2-1)
CASRTLGVGEQFF

SEQ ID NO: 233963 - protein, 14 aa, Homo sapiens
  CDR3 for alpha chain variable domain of TCR clone 116982 (TRAV16, TRAJ39)
CALSKNNAGNMLTF

SEQ ID NO: 233964 - protein, 16 aa, Homo sapiens
  CDR3 for beta chain variable domain of TCR clone 116982 (TRBV6-6, TRBJ2-1)
CASSYSFSGSCNEQFF

SEQ ID NO: 233965 - protein, 14 aa, Homo sapiens
  CDR3 for alpha chain variable domain of TCR clone 116983 (TRAV13-1, TRAJ44)
CAAKATGTTSKLTF

SEQ ID NO: 233966 - protein, 17 aa, Homo sapiens
  CDR3 for beta chain variable domain of TCR clone 116983 (TRBV7-3, TRBJ2-3)
CASSLMKRMRGADTQYF

SEQ ID NO: 233967 - protein, 14 aa, Homo sapiens
  CDR3 for alpha chain variable domain of TCR clone 116984 (TRAV35, TRAJ46)
CAGPQKSSGDKLTF

SEQ ID NO: 233968 - protein, 16 aa, Homo sapiens
  CDR3 for beta chain variable domain of TCR clone 116984 (TRBV19, TRBJ2-4)
CATGGLAGGTKNIQYF

SEQ ID NO: 233969 - protein, 14 aa, Homo sapiens
  CDR3 for alpha chain variable domain of TCR clone 116985 (TRAV3, TRAJ21)
CALGRGPTNFTLDL

SEQ ID NO: 233970 - protein, 14 aa, Homo sapiens
  CDR3 for beta chain variable domain of TCR clone 116985 (TRBV7-9, TRBJ2-4)
CASSLAMGGNIQYF

SEQ ID NO: 233971 - protein, 16 aa, Homo sapiens
  CDR3 for alpha chain variable domain of TCR clone 116986 (TRAV26-1, TRAJ32)
CIVRTNYGGATHKLIF

SEQ ID NO: 233972 - protein, 14 aa, Homo sapiens
  CDR3 for beta chain variable domain of TCR clone 116986 (TRBV27, TRBJ1-1)
CASSLLSGLSEAFF

SEQ ID NO: 233973 - protein, 14 aa, Homo sapiens
  CDR3 for alpha chain variable domain of TCR clone 116987 (TRAV1-2, TRAJ8)
CAVREDTGFQELVF

SEQ ID NO: 233974 - protein, 17 aa, Homo sapiens
  CDR3 for beta chain variable domain of TCR clone 116987 (TRBV11-2, TRBJ2-1)
CASSLSPPGVEYNEQFF

SEQ ID NO: 233975 - protein, 15 aa, Homo sapiens
  CDR3 for alpha chain variable domain of TCR clone 116988 (TRAV26-1, TRAJ44)
CIARVPFGTASKRTF

SEQ ID NO: 233976 - protein, 17 aa, Homo sapiens
  CDR3 for beta chain variable domain of TCR clone 116988 (TRBV24-1, TRBJ2-4)
CATSDAEARGVRNIQYF

SEQ ID NO: 233977 - protein, 11 aa, Homo sapiens
  CDR3 for alpha chain variable domain of TCR clone 116989 (TRAV13-1, TRAJ52)
PGGTSYGKLTF

SEQ ID NO: 233978 - protein, 16 aa, Homo sapiens
  CDR3 for beta chain variable domain of TCR clone 116989 (TRBV28, TRBJ2-7)
CASGPWVATGDLSQYF

SEQ ID NO: 233979 - protein, 15 aa, Homo sapiens
  CDR3 for alpha chain variable domain of TCR clone 116990 (TRAV21, TRAJ53)
CATLNSGGSNYKLKF

SEQ ID NO: 233980 - protein, 15 aa, Homo sapiens
  CDR3 for beta chain variable domain of TCR clone 116990 (TRBV27, TRBJ2-1)
CASSNGGGSSNEQFF

SEQ ID NO: 233981 - protein, 15 aa, Homo sapiens
  CDR3 for alpha chain variable domain of TCR clone 116991 (TRAV17, TRAJ22)
CATVAPSGSARQLTF

SEQ ID NO: 233982 - protein, 18 aa, Homo sapiens
  CDR3 for beta chain variable domain of TCR clone 116991 (TRBV15, TRBJ2-3)
CATSRDGARSWDTDTQYF

SEQ ID NO: 233983 - protein, 14 aa, Homo sapiens
  CDR3 for alpha chain variable domain of TCR clone 116992 (TRAV21, TRAJ35)
CAVMPIGFGHVLHF

SEQ ID NO: 233984 - protein, 12 aa, Homo sapiens
  CDR3 for beta chain variable domain of TCR clone 116992 (TRBV7-9, TRBJ2-7)
CASSIKREEQYF

SEQ ID NO: 233985 - protein, 14 aa, Homo sapiens
  CDR3 for alpha chain variable domain of TCR clone 116993 (TRAV26-1, TRAJ48)
CIVRVGFGNENLTF

SEQ ID NO: 233986 - protein, 13 aa, Homo sapiens
  CDR3 for beta chain variable domain of TCR clone 116993 (TRBV11-3, TRBJ2-3)
CASSHDTKDTQYF

SEQ ID NO: 233987 - protein, 12 aa, Homo sapiens
  CDR3 for alpha chain variable domain of TCR clone 116994 (TRAV12-3, TRAJ17)
CAMTLTCNKLTF

SEQ ID NO: 233988 - protein, 15 aa, Homo sapiens
  CDR3 for beta chain variable domain of TCR clone 116994 (TRBV20-1, TRBJ2-7)
CSAGDRVSGMDEQYF

SEQ ID NO: 233989 - protein, 14 aa, Homo sapiens
  CDR3 for alpha chain variable domain of TCR clone 116995 (TRAV12-2, TRAJ53)
CAVKGGGSNYQLTF

SEQ ID NO: 233990 - protein, 14 aa, Homo sapiens
  CDR3 for beta chain variable domain of TCR clone 116995 (TRBV19, TRBJ2-1)
CASPTFVLSGEQFF

SEQ ID NO: 233991 - protein, 14 aa, Homo sapiens
  CDR3 for alpha chain variable domain of TCR clone 116996 (TRAV20, TRAJ33)
CAVLTRDSNYQLIW

SEQ ID NO: 233992 - protein, 14 aa, Homo sapiens
  CDR3 for beta chain variable domain of TCR clone 116996 (TRBV29-1, TRBJ2-5)
CSVETSGSGETQYF

SEQ ID NO: 233993 - protein, 15 aa, Homo sapiens
  CDR3 for alpha chain variable domain of TCR clone 116997 (TRAV3, TRAJ13)
CAVRVYSGGYQKVTF

SEQ ID NO: 233994 - protein, 15 aa, Homo sapiens
  CDR3 for beta chain variable domain of TCR clone 116997 (TRBV12-4, TRBJ2-5)
CASSPPTGLQETQYF

SEQ ID NO: 233995 - protein, 14 aa, Homo sapiens
  CDR3 for alpha chain variable domain of TCR clone 116998 (TRAV8-4, TRAJ9)
CAVRINIGGFKTIF

SEQ ID NO: 233996 - protein, 15 aa, Homo sapiens
  CDR3 for beta chain variable domain of TCR clone 116998 (TRBV10-2, TRBJ2-6)
CASSEQGTGANVLTF

SEQ ID NO: 233997 - protein, 15 aa, Homo sapiens
  CDR3 for alpha chain variable domain of TCR clone 116999 (TRAV26-1, TRAJ40)
CIVRVTTSGTNKYIF

SEQ ID NO: 233998 - protein, 12 aa, Homo sapiens
  CDR3 for beta chain variable domain of TCR clone 116999 (TRBV7-9, TRBJ1-4)
CASSTDREKLFF

SEQ ID NO: 233999 - protein, 16 aa, Homo sapiens
  CDR3 for alpha chain variable domain of TCR clone 117000 (TRAV26-1, TRAJ52)
CIVSNAGGTSYGRLTF

SEQ ID NO: 234000 - protein, 15 aa, Homo sapiens
  CDR3 for beta chain variable domain of TCR clone 117000 (TRBV7-3, TRBJ2-1)
CASSPTGGGEVEQFF

SEQ ID NO: 234001 - protein, 17 aa, Homo sapiens
  CDR3 for alpha chain variable domain of TCR clone 117001 (TRAV8-1, TRAJ43)
CAVTNDMRFGAGTRLTV

SEQ ID NO: 234002 - protein, 13 aa, Homo sapiens
  CDR3 for beta chain variable domain of TCR clone 117001 (TRBV24-1, TRBJ2-1)
CATSAGPYNEQFF

SEQ ID NO: 234003 - protein, 13 aa, Homo sapiens
  CDR3 for alpha chain variable domain of TCR clone 117002 (TRAV12-1, TRAJ39)
CVALNNAGNMLTF

SEQ ID NO: 234004 - protein, 17 aa, Homo sapiens
  CDR3 for beta chain variable domain of TCR clone 117002 (TRBV6-1, TRBJ2-3)
CASSAFVTGGPTDTQYF

SEQ ID NO: 234005 - protein, 16 aa, Homo sapiens
  CDR3 for alpha chain variable domain of TCR clone 117003 (TRAV12-3, TRAJ53)
CAMIPGSGGSNYKLAF

SEQ ID NO: 234006 - protein, 11 aa, Homo sapiens
  CDR3 for beta chain variable domain of TCR clone 117003 (TRBV29-1, TRBJ2-5)
CSEDRTGTQYF

SEQ ID NO: 234007 - protein, 15 aa, Homo sapiens
  CDR3 for alpha chain variable domain of TCR clone 117004 (TRAV26-1, TRAJ29)
CIVRVEGSGNTPLVF

SEQ ID NO: 234008 - protein, 14 aa, Homo sapiens
  CDR3 for beta chain variable domain of TCR clone 117004 (TRBV18, TRBJ2-5)
CASTPGVSQETQYF

SEQ ID NO: 234009 - protein, 12 aa, Homo sapiens
  CDR3 for alpha chain variable domain of TCR clone 117005 (TRAV13-1, TRAJ27)
CAAHTNAGKSTS

SEQ ID NO: 234010 - protein, 15 aa, Homo sapiens
  CDR3 for beta chain variable domain of TCR clone 117005 (TRBV7-9, TRBJ1-6)
CASSSPGRGNSPLHF

SEQ ID NO: 234011 - protein, 13 aa, Homo sapiens
  CDR3 for alpha chain variable domain of TCR clone 117006 (TRAV12-1, TRAJ7)
CVVNMRGNNRLAF

SEQ ID NO: 234012 - protein, 15 aa, Homo sapiens
  CDR3 for beta chain variable domain of TCR clone 117006 (TRBV27, TRBJ2-3)
CASSLGLAAKDTQYF

SEQ ID NO: 234013 - protein, 13 aa, Homo sapiens
  CDR3 for alpha chain variable domain of TCR clone 117007 (TRAV26-2, TRAJ43)
CILRAVNNNDMRF

SEQ ID NO: 234014 - protein, 15 aa, Homo sapiens
  CDR3 for beta chain variable domain of TCR clone 117007 (TRBV7-2, TRBJ2-1)
CASTHGTGIFNEQFF

SEQ ID NO: 234015 - protein, 13 aa, Homo sapiens
  CDR3 for alpha chain variable domain of TCR clone 117008 (TRAV21, TRAJ57)
CAVTQGGSEKLVF

SEQ ID NO: 234016 - protein, 15 aa, Homo sapiens
  CDR3 for beta chain variable domain of TCR clone 117008 (TRBV19, TRBJ2-1)
CASSIVRGEGREQFF

SEQ ID NO: 234017 - protein, 13 aa, Homo sapiens
  CDR3 for alpha chain variable domain of TCR clone 117009 (TRAV17, TRAJ5)
CAPMDTGRRALTF

SEQ ID NO: 234018 - protein, 14 aa, Homo sapiens
  CDR3 for beta chain variable domain of TCR clone 117009 (TRBV4-2, TRBJ2-1)
CASGLDRAYNEQFF

SEQ ID NO: 234019 - protein, 14 aa, Homo sapiens
  CDR3 for alpha chain variable domain of TCR clone 117010 (TRAV1-2, TRAJ8)
CAVREDTGFQKLVF

SEQ ID NO: 234020 - protein, 15 aa, Homo sapiens
  CDR3 for beta chain variable domain of TCR clone 117010 (TRBV28, TRBJ2-7)
CASKKPSGRAYEQYF

SEQ ID NO: 234021 - protein, 10 aa, Homo sapiens
  CDR3 for alpha chain variable domain of TCR clone 117011 (TRAV1-2, TRAJ20)
CACNDYKISF

SEQ ID NO: 234022 - protein, 16 aa, Homo sapiens
  CDR3 for beta chain variable domain of TCR clone 117011 (TRBV20-1, TRBJ2-1)
CSARDLKQGMNNEQFF

SEQ ID NO: 234023 - protein, 12 aa, Homo sapiens
  CDR3 for alpha chain variable domain of TCR clone 117012 (TRAV13-1, TRAJ21)
CAAKEGFNKFYF

SEQ ID NO: 234024 - protein, 14 aa, Homo sapiens
  CDR3 for beta chain variable domain of TCR clone 117012 (TRBV5-4, TRBJ1-1)
CASSLNSRRDEAFF

SEQ ID NO: 234025 - protein, 13 aa, Homo sapiens
  CDR3 for alpha chain variable domain of TCR clone 117013 (TRAV2, TRAJ29)
CAAGNSGNTPLVF

SEQ ID NO: 234026 - protein, 16 aa, Homo sapiens
  CDR3 for beta chain variable domain of TCR clone 117013 (TRBV7-9, TRBJ1-2)
CAGSPGGGAINYGYTF

SEQ ID NO: 234027 - protein, 13 aa, Homo sapiens
  CDR3 for alpha chain variable domain of TCR clone 117014 (TRAV27, TRAJ49)
CAPRPYTGNQFYF

SEQ ID NO: 234028 - protein, 17 aa, Homo sapiens
  CDR3 for beta chain variable domain of TCR clone 117014 (TRBV13, TRBJ2-3)
CASSLSRVAGGRNTQYF

SEQ ID NO: 234029 - protein, 14 aa, Homo sapiens
  CDR3 for alpha chain variable domain of TCR clone 117015 (TRAV21, TRAJ21)
CAVKGFGNFNKFYF

SEQ ID NO: 234030 - protein, 12 aa, Homo sapiens
  CDR3 for beta chain variable domain of TCR clone 117015 (TRBV7-3, TRBJ2-1)
CASSFINNEQFF

SEQ ID NO: 234031 - protein, 14 aa, Homo sapiens
  CDR3 for alpha chain variable domain of TCR clone 117016 (TRAV38-1, TRAJ45)
CAYYSGGGADGLTF

SEQ ID NO: 234032 - protein, 20 aa, Homo sapiens
  CDR3 for beta chain variable domain of TCR clone 117016 (TRBV28, TRBJ2-1)
CASSPIGRSPGLAGGNEQFF

SEQ ID NO: 234033 - protein, 12 aa, Homo sapiens
  CDR3 for alpha chain variable domain of TCR clone 117017 (TRAV23/DV6, TRAJ30)
RAASKGDDKIIF

SEQ ID NO: 234034 - protein, 15 aa, Homo sapiens
  CDR3 for beta chain variable domain of TCR clone 117017 (TRBV20-1, TRBJ2-7)
CSARDRVSGMDEQYF

SEQ ID NO: 234035 - protein, 12 aa, Homo sapiens
  CDR3 for alpha chain variable domain of TCR clone 117018 (TRAV4, TRAJ26)
YLVGDYGQNFVF

SEQ ID NO: 234036 - protein, 16 aa, Homo sapiens
  CDR3 for beta chain variable domain of TCR clone 117018 (TRBV7-2, TRBJ1-2)
CASSSNQDRRGHGYTF

SEQ ID NO: 234037 - protein, 12 aa, Homo sapiens
  CDR3 for alpha chain variable domain of TCR clone 117019 (TRAV20, TRAJ33)
CAVRGSNYKLIW

SEQ ID NO: 234038 - protein, 15 aa, Homo sapiens
  CDR3 for beta chain variable domain of TCR clone 117019 (TRBV11-3, TRBJ2-3)
CASLKDGREGDTQYF

SEQ ID NO: 234039 - protein, 13 aa, Homo sapiens
  CDR3 for alpha chain variable domain of TCR clone 117020 (TRAV8-4, TRAJ9)
CAVSETGGFKTIF

SEQ ID NO: 234040 - protein, 14 aa, Homo sapiens
  CDR3 for beta chain variable domain of TCR clone 117020 (TRBV18, TRBJ2-3)
RASSGLADTDTQYF

SEQ ID NO: 234041 - protein, 19 aa, Homo sapiens
  CDR3 for alpha chain variable domain of TCR clone 117021 (TRAV2, TRAJ20)
ILQVREADVAVYRDCKLSF

SEQ ID NO: 234042 - protein, 12 aa, Homo sapiens
  CDR3 for beta chain variable domain of TCR clone 117021 (TRBV11-2, TRBJ2-1)
CASSPGNNEQFF

SEQ ID NO: 234043 - protein, 14 aa, Homo sapiens
  CDR3 for alpha chain variable domain of TCR clone 117022 (TRAV12-2, TRAJ11)
CAVNRESGYSTITF

SEQ ID NO: 234044 - protein, 10 aa, Homo sapiens
  CDR3 for beta chain variable domain of TCR clone 117022 (TRBV20-1, TRBJ2-5)
CSARFETQYF

SEQ ID NO: 234045 - protein, 15 aa, Homo sapiens
  CDR3 for alpha chain variable domain of TCR clone 117023 (TRAV2, TRAJ9)
CAVAALNTGGFKTIF

SEQ ID NO: 234046 - protein, 13 aa, Homo sapiens
  CDR3 for beta chain variable domain of TCR clone 117023 (TRBV4-2, TRBJ1-1)
CASSQAGNTEAFF

SEQ ID NO: 234047 - protein, 12 aa, Homo sapiens
  CDR3 for alpha chain variable domain of TCR clone 117024 (TRAV26-2, TRAJ21)
CILKGNFNKFYF

SEQ ID NO: 234048 - protein, 14 aa, Homo sapiens
  CDR3 for beta chain variable domain of TCR clone 117024 (TRBV7-9, TRBJ1-1)
CASTPLQSYTEAFI

SEQ ID NO: 234049 - protein, 14 aa, Homo sapiens
  CDR3 for alpha chain variable domain of TCR clone 117025 (TRAV3, TRAJ7)
CAVREEEREQQTRF

SEQ ID NO: 234050 - protein, 15 aa, Homo sapiens
  CDR3 for beta chain variable domain of TCR clone 117025 (TRBV12-4, TRBJ1-2)
CASSPITGGGYGYTF

SEQ ID NO: 234051 - protein, 13 aa, Homo sapiens
  CDR3 for alpha chain variable domain of TCR clone 117026 (TRAV8-4, TRAJ47)
CAVTALYGSKLVF

SEQ ID NO: 234052 - protein, 12 aa, Homo sapiens
  CDR3 for beta chain variable domain of TCR clone 117026 (TRBV28, TRBJ2-1)
CASSFRGNEQFF

SEQ ID NO: 234053 - protein, 16 aa, Homo sapiens
  CDR3 for alpha chain variable domain of TCR clone 117027 (TRAV30, TRAJ24)
CDTEIVDADSWGKFQF

SEQ ID NO: 234054 - protein, 13 aa, Homo sapiens
  CDR3 for beta chain variable domain of TCR clone 117027 (TRBV10-3, TRBJ2-7)
CASKLAVNYEQYF

SEQ ID NO: 234055 - protein, 21 aa, Homo sapiens
  CDR3 for alpha chain variable domain of TCR clone 117028 (TRAV12-1, TRAJ32)
SSVIQPPTSMTYGGATNKLIF

SEQ ID NO: 234056 - protein, 15 aa, Homo sapiens
  CDR3 for beta chain variable domain of TCR clone 117028 (TRBV7-9, TRBJ2-2)
CASGPLDTFPGELFF

SEQ ID NO: 234057 - protein, 14 aa, Homo sapiens
  CDR3 for alpha chain variable domain of TCR clone 117029 (TRAV12-3, TRAJ29)
CAMSPYSGNPPLVF

SEQ ID NO: 234058 - protein, 15 aa, Homo sapiens
  CDR3 for beta chain variable domain of TCR clone 117029 (TRBV27, TRBJ2-1)
CASSNGGGSSNEQFF

SEQ ID NO: 234059 - protein, 13 aa, Homo sapiens
  CDR3 for alpha chain variable domain of TCR clone 117030 (TRAV3, TRAJ27)
CAVRPLGAGKSTF

SEQ ID NO: 234060 - protein, 15 aa, Homo sapiens
  CDR3 for beta chain variable domain of TCR clone 117030 (TRBV20-1, TRBJ2-7)
CSARDRVAGMDEQYF

SEQ ID NO: 234061 - protein, 13 aa, Homo sapiens
  CDR3 for alpha chain variable domain of TCR clone 117031 (TRAV13-1, TRAJ5)
CAARVTGSRALTF

SEQ ID NO: 234062 - protein, 15 aa, Homo sapiens
  CDR3 for beta chain variable domain of TCR clone 117031 (TRBV7-9, TRBJ2-7)
CASSPGGGLTYEQYF

SEQ ID NO: 234063 - protein, 15 aa, Homo sapiens
  CDR3 for alpha chain variable domain of TCR clone 117032 (TRAV12-1, TRAJ44)
CVADLPTGTASKLTF

SEQ ID NO: 234064 - protein, 13 aa, Homo sapiens
  CDR3 for beta chain variable domain of TCR clone 117032 (TRBV6-5, TRBJ2-7)
CASSPQGGETQYF

SEQ ID NO: 234065 - protein, 14 aa, Homo sapiens
  CDR3 for alpha chain variable domain of TCR clone 117033 (TRAV12-3, TRAJ29)
CAMSPYSGNTPLVF

SEQ ID NO: 234066 - protein, 17 aa, Homo sapiens
  CDR3 for beta chain variable domain of TCR clone 117033 (TRBV20-1, TRBJ2-1)
CSASSSGLAGSYNEQFF

SEQ ID NO: 234067 - protein, 17 aa, Homo sapiens
  CDR3 for alpha chain variable domain of TCR clone 117034 (TRAV8-6, TRAJ44)
CAVRLIYRHCQYTHLWD

SEQ ID NO: 234068 - protein, 13 aa, Homo sapiens
  CDR3 for beta chain variable domain of TCR clone 117034 (TRBV27, TRBJ2-7)
CASSFSQGYEQYF

SEQ ID NO: 234069 - protein, 17 aa, Homo sapiens
  CDR3 for alpha chain variable domain of TCR clone 117035 (TRAV26-1, TRAJ22)
CIARVPSHSGSARQLTF

SEQ ID NO: 234070 - protein, 16 aa, Homo sapiens
  CDR3 for beta chain variable domain of TCR clone 117035 (TRBV28, TRBJ2-1)
CASRRSGRVVGNEQFF

SEQ ID NO: 234071 - protein, 13 aa, Homo sapiens
  CDR3 for alpha chain variable domain of TCR clone 117036 (TRAV17, TRAJ5)
CALRGTGRRALTF

SEQ ID NO: 234072 - protein, 15 aa, Homo sapiens
  CDR3 for beta chain variable domain of TCR clone 117036 (TRBV9, TRBJ1-6)
CASRVAGTGDSPLHF

SEQ ID NO: 234073 - protein, 16 aa, Homo sapiens
  CDR3 for alpha chain variable domain of TCR clone 117037 (TRAV30, TRAJ24)
CGAEIVDADSWGKFQF

SEQ ID NO: 234074 - protein, 12 aa, Homo sapiens
  CDR3 for beta chain variable domain of TCR clone 117037 (TRBV11-2, TRBJ2-1)
CASSPGNNEQFF

SEQ ID NO: 234075 - protein, 10 aa, Homo sapiens
  CDR3 for alpha chain variable domain of TCR clone 117038 (TRAV8-4, TRAJ43)
CAVSADDMCF

SEQ ID NO: 234076 - protein, 15 aa, Homo sapiens
  CDR3 for beta chain variable domain of TCR clone 117038 (TRBV5-1, TRBJ2-3)
CASSVTSGSTDTQYF

SEQ ID NO: 234077 - protein, 12 aa, Homo sapiens
  CDR3 for alpha chain variable domain of TCR clone 117039 (TRAV12-1, TRAJ40)
CVVPSGTYKYIF

SEQ ID NO: 234078 - protein, 15 aa, Homo sapiens
  CDR3 for beta chain variable domain of TCR clone 117039 (TRBV12-4, TRBJ2-1)
CASSTLSGRNNEQFF

SEQ ID NO: 234079 - protein, 14 aa, Homo sapiens
  CDR3 for alpha chain variable domain of TCR clone 117040 (TRAV13-1, TRAJ35)
CAASKGGFGNVLHC

SEQ ID NO: 234080 - protein, 13 aa, Homo sapiens
  CDR3 for beta chain variable domain of TCR clone 117040 (TRBV2, TRBJ1-1)
CARNPTGGFHAFF

SEQ ID NO: 234081 - protein, 19 aa, Homo sapiens
  CDR3 for alpha chain variable domain of TCR clone 117041 (TRAV26-1, TRAJ22)
CCVLLHRWVFSGSARQLTF

SEQ ID NO: 234082 - protein, 19 aa, Homo sapiens
  CDR3 for beta chain variable domain of TCR clone 117041 (TRBV19, TRBJ2-5)
CASSIGQVTDFVLGETQYF

SEQ ID NO: 234083 - protein, 13 aa, Homo sapiens
  CDR3 for alpha chain variable domain of TCR clone 117042 (TRAV21, TRAJ57)
CAVTQGGSEKLVF

SEQ ID NO: 234084 - protein, 17 aa, Homo sapiens
  CDR3 for beta chain variable domain of TCR clone 117042 (TRBV10-3, TRBJ2-6)
CAISELAESSGANDLTF

SEQ ID NO: 234085 - protein, 15 aa, Homo sapiens
  CDR3 for alpha chain variable domain of TCR clone 117043 (TRAV26-1, TRAJ22)
CIVRVAFWFCKATDL

SEQ ID NO: 234086 - protein, 13 aa, Homo sapiens
  CDR3 for beta chain variable domain of TCR clone 117043 (TRBV7-9, TRBJ1-2)
CASSLKQNYGYTF

SEQ ID NO: 234087 - protein, 13 aa, Homo sapiens
  CDR3 for alpha chain variable domain of TCR clone 117044 (TRAV35, TRAJ36)
RAGPRIGANNLFF

SEQ ID NO: 234088 - protein, 15 aa, Homo sapiens
  CDR3 for beta chain variable domain of TCR clone 117044 (TRBV28, TRBJ2-5)
CASSPPWSYQETQYF

SEQ ID NO: 234089 - protein, 12 aa, Homo sapiens
  CDR3 for alpha chain variable domain of TCR clone 117045 (TRAV21, TRAJ13)
PGPSGGYQKVTF

SEQ ID NO: 234090 - protein, 15 aa, Homo sapiens
  CDR3 for beta chain variable domain of TCR clone 117045 (TRBV10-3, TRBJ1-3)
CAISDSQGAGNTIYF

SEQ ID NO: 234091 - protein, 13 aa, Homo sapiens
  CDR3 for alpha chain variable domain of TCR clone 117046 (TRAV12-1, TRAJ37)
CVVNAGNTGNLIF

SEQ ID NO: 234092 - protein, 14 aa, Homo sapiens
  CDR3 for beta chain variable domain of TCR clone 117046 (TRBV7-2, TRBJ2-3)
CASRRGLAADTQYF

SEQ ID NO: 234093 - protein, 10 aa, Homo sapiens
  CDR3 for alpha chain variable domain of TCR clone 117047 (TRAV13-1, TRAJ52)
CAAKTPMLVV

SEQ ID NO: 234094 - protein, 14 aa, Homo sapiens
  CDR3 for beta chain variable domain of TCR clone 117047 (TRBV6-5, TRBJ1-1)
CASSFGQGLTEAFC

SEQ ID NO: 234095 - protein, 18 aa, Homo sapiens
  CDR3 for alpha chain variable domain of TCR clone 117048 (TRAV13-1, TRAJ52)
CAAKNHNAGGTSYGKLTF

SEQ ID NO: 234096 - protein, 15 aa, Homo sapiens
  CDR3 for beta chain variable domain of TCR clone 117048 (TRBV28, TRBJ2-1)
CASSIIAGGRSEQFF

SEQ ID NO: 234097 - protein, 15 aa, Homo sapiens
  CDR3 for alpha chain variable domain of TCR clone 117049 (TRAV38-2/DV8, TRAJ31)
CAYRTETRNNARLMF

SEQ ID NO: 234098 - protein, 13 aa, Homo sapiens
  CDR3 for beta chain variable domain of TCR clone 117049 (TRBV15, TRBJ1-6)
CATSGGLNSPLHF

SEQ ID NO: 234099 - protein, 13 aa, Homo sapiens
  CDR3 for alpha chain variable domain of TCR clone 117050 (TRAV16, TRAJ26)
CITVLCLGQNFVF

SEQ ID NO: 234100 - protein, 12 aa, Homo sapiens
  CDR3 for beta chain variable domain of TCR clone 117050 (TRBV11-2, TRBJ2-1)
CASSPGSNEQFF

SEQ ID NO: 234101 - protein, 15 aa, Homo sapiens
  CDR3 for alpha chain variable domain of TCR clone 117051 (TRAV8-1, TRAJ6)
CAVNTPPGGSNIPTF

SEQ ID NO: 234102 - protein, 14 aa, Homo sapiens
  CDR3 for beta chain variable domain of TCR clone 117051 (TRBV12-4, TRBJ2-1)
CASSLGQGASEQFF

SEQ ID NO: 234103 - protein, 16 aa, Homo sapiens
  CDR3 for alpha chain variable domain of TCR clone 117052 (TRAV20, TRAJ10)
CAVLRGLTGGGNKLTF

SEQ ID NO: 234104 - protein, 14 aa, Homo sapiens
  CDR3 for beta chain variable domain of TCR clone 117052 (TRBV7-2, TRBJ2-7)
CASRSQGAAYEQYF

SEQ ID NO: 234105 - protein, 14 aa, Homo sapiens
  CDR3 for alpha chain variable domain of TCR clone 117053 (TRAV12-2, TRAJ6)
CASKWGGGSYIPTF

SEQ ID NO: 234106 - protein, 15 aa, Homo sapiens
  CDR3 for beta chain variable domain of TCR clone 117053 (TRBV2, TRBJ1-1)
CASSEGGTLKLSLDK

SEQ ID NO: 234107 - protein, 16 aa, Homo sapiens
  CDR3 for alpha chain variable domain of TCR clone 117054 (TRAV12-3, TRAJ53)
RAMSPGSGGSNYKLTF

SEQ ID NO: 234108 - protein, 13 aa, Homo sapiens
  CDR3 for beta chain variable domain of TCR clone 117054 (TRBV10-3, TRBJ2-7)
CASKLAVNYEQYF

SEQ ID NO: 234109 - protein, 14 aa, Homo sapiens
  CDR3 for alpha chain variable domain of TCR clone 117055 (TRAV1-2, TRAJ8)
CAVREDTGFQKLVF

SEQ ID NO: 234110 - protein, 10 aa, Homo sapiens
  CDR3 for beta chain variable domain of TCR clone 117055 (TRBV6-3, TRBJ1-2)
CASGRVGYTF

SEQ ID NO: 234111 - protein, 14 aa, Homo sapiens
  CDR3 for alpha chain variable domain of TCR clone 117056 (TRAV13-1, TRAJ44)
CAAKATGTASKLTF

SEQ ID NO: 234112 - protein, 15 aa, Homo sapiens
  CDR3 for beta chain variable domain of TCR clone 117056 (TRBV4-1, TRBJ2-5)
CASSQSRGDQETQYF

SEQ ID NO: 234113 - protein, 14 aa, Homo sapiens
  CDR3 for alpha chain variable domain of TCR clone 117057 (TRAV26-1, TRAJ38)
CIADNAGNNRKLIL

SEQ ID NO: 234114 - protein, 15 aa, Homo sapiens
  CDR3 for beta chain variable domain of TCR clone 117057 (TRBV20-1, TRBJ1-1)
CSARGGGTLKLSLDK

SEQ ID NO: 234115 - protein, 14 aa, Homo sapiens
  CDR3 for alpha chain variable domain of TCR clone 117058 (TRAV1-2, TRAJ16)
CAVNRFSDGQKLLF

SEQ ID NO: 234116 - protein, 18 aa, Homo sapiens
  CDR3 for beta chain variable domain of TCR clone 117058 (TRBV20-1, TRBJ2-6)
CSAETTPTHGPGANVLTF

SEQ ID NO: 234117 - protein, 17 aa, Homo sapiens
  CDR3 for alpha chain variable domain of TCR clone 117059 (TRAV3, TRAJ6)
CAVRDGPRAGGSYIPAF

SEQ ID NO: 234118 - protein, 14 aa, Homo sapiens
  CDR3 for beta chain variable domain of TCR clone 117059 (TRBV6-1, TRBJ1-3)
CASVQGGGGNTIYF

SEQ ID NO: 234119 - protein, 14 aa, Homo sapiens
  CDR3 for alpha chain variable domain of TCR clone 117060 (TRAV8-3, TRAJ4)
CAVGAAGGYNKLIF

SEQ ID NO: 234120 - protein, 15 aa, Homo sapiens
  CDR3 for beta chain variable domain of TCR clone 117060 (TRBV11-2, TRBJ2-1)
CASSSPSTRYNEQFF

SEQ ID NO: 234121 - protein, 14 aa, Homo sapiens
  CDR3 for alpha chain variable domain of TCR clone 117061 (TRAV1-1, TRAJ23)
CAVSIYNQGGKLIF

SEQ ID NO: 234122 - protein, 14 aa, Homo sapiens
  CDR3 for beta chain variable domain of TCR clone 117061 (TRBV20-1, TRBJ1-1)
CSAQTRIGGTEAFF

SEQ ID NO: 234123 - protein, 13 aa, Homo sapiens
  CDR3 for alpha chain variable domain of TCR clone 117062 (TRAV41, TRAJ48)
SVPVNFGNEKLTF

SEQ ID NO: 234124 - protein, 12 aa, Homo sapiens
  CDR3 for beta chain variable domain of TCR clone 117062 (TRBV6-1, TRBJ2-5)
CAHGGAVETQYF

SEQ ID NO: 234125 - protein, 21 aa, Homo sapiens
  CDR3 for alpha chain variable domain of TCR clone 117063 (TRAV12-1, TRAJ32)
SSVIQPPTSMNYGGATNKLIF

SEQ ID NO: 234126 - protein, 15 aa, Homo sapiens
  CDR3 for beta chain variable domain of TCR clone 117063 (TRBV7-9, TRBJ2-2)
CASGPLDTFHGELFF

SEQ ID NO: 234127 - protein, 16 aa, Homo sapiens
  CDR3 for alpha chain variable domain of TCR clone 117064 (TRAV30, TRAJ24)
CGTEIADADSWGKFQF

SEQ ID NO: 234128 - protein, 14 aa, Homo sapiens
  CDR3 for beta chain variable domain of TCR clone 117064 (TRBV12-5, TRBJ2-5)
CAGGSRTHQETQYF

SEQ ID NO: 234129 - protein, 14 aa, Homo sapiens
  CDR3 for alpha chain variable domain of TCR clone 117065 (TRAV12-2, TRAJ24)
CAVTPADSWGILQF

SEQ ID NO: 234130 - protein, 12 aa, Homo sapiens
  CDR3 for beta chain variable domain of TCR clone 117065 (TRBV3-1, TRBJ2-1)
CASSQGSSGQFF

SEQ ID NO: 234131 - protein, 14 aa, Homo sapiens
  CDR3 for alpha chain variable domain of TCR clone 117066 (TRAV12-3, TRAJ10)
SHLPLTGGGNKLTF

SEQ ID NO: 234132 - protein, 15 aa, Homo sapiens
  CDR3 for beta chain variable domain of TCR clone 117066 (TRBV7-3, TRBJ2-1)
CASSLGQGPFGEQFF

SEQ ID NO: 234133 - protein, 13 aa, Homo sapiens
  CDR3 for alpha chain variable domain of TCR clone 117067 (TRAV12-1, TRAJ6)
CVVNSGGSYIPTF

SEQ ID NO: 234134 - protein, 16 aa, Homo sapiens
  CDR3 for beta chain variable domain of TCR clone 117067 (TRBV28, TRBJ1-5)
CASRTGLQGEGQPQHF

SEQ ID NO: 234135 - protein, 14 aa, Homo sapiens
  CDR3 for alpha chain variable domain of TCR clone 117068 (TRAV1-2, TRAJ8)
CAVREDTGFQKLGF

SEQ ID NO: 234136 - protein, 15 aa, Homo sapiens
  CDR3 for beta chain variable domain of TCR clone 117068 (TRBV20-1, TRBJ2-7)
CSARDRVSGMDEQYF

SEQ ID NO: 234137 - protein, 18 aa, Homo sapiens
  CDR3 for alpha chain variable domain of TCR clone 117069 (TRAV26-1, TRAJ22)
CIVRVALISSGSARKLTF

SEQ ID NO: 234138 - protein, 13 aa, Homo sapiens
  CDR3 for beta chain variable domain of TCR clone 117069 (TRBV13, TRBJ2-5)
CASSPEVGETQYF

SEQ ID NO: 234139 - protein, 12 aa, Homo sapiens
  CDR3 for alpha chain variable domain of TCR clone 117070 (TRAV12-3, TRAJ17)
CAMTLTGNKLTF

SEQ ID NO: 234140 - protein, 13 aa, Homo sapiens
  CDR3 for beta chain variable domain of TCR clone 117070 (TRBV7-9, TRBJ1-2)
CASSLKQNYGDTF

SEQ ID NO: 234141 - protein, 13 aa, Homo sapiens
  CDR3 for alpha chain variable domain of TCR clone 117071 (TRAV12-3, TRAJ9)
CAMSADGGFKPIF

SEQ ID NO: 234142 - protein, 14 aa, Homo sapiens
  CDR3 for beta chain variable domain of TCR clone 117071 (TRBV6-1, TRBJ2-7)
CASSERVNPYEQYF

SEQ ID NO: 234143 - protein, 12 aa, Homo sapiens
  CDR3 for alpha chain variable domain of TCR clone 117072 (TRAV29/DV5, TRAJ49)
CAATDTGTQFYF

SEQ ID NO: 234144 - protein, 19 aa, Homo sapiens
  CDR3 for beta chain variable domain of TCR clone 117072 (TRBV25-1, TRBJ2-2)
CAILVYRVDRGRKTGELFF

SEQ ID NO: 234145 - protein, 16 aa, Homo sapiens
  CDR3 for alpha chain variable domain of TCR clone 117073 (TRAV26-1, TRAJ32)
CIVRTHYGGATNKLIF

SEQ ID NO: 234146 - protein, 14 aa, Homo sapiens
  CDR3 for beta chain variable domain of TCR clone 117073 (TRBV27, TRBJ1-1)
CASSLLSGLSEAFF

SEQ ID NO: 234147 - protein, 12 aa, Homo sapiens
  CDR3 for alpha chain variable domain of TCR clone 117074 (TRAV36/DV7, TRAJ54)
CAVVRGAQKLVF

SEQ ID NO: 234148 - protein, 18 aa, Homo sapiens
  CDR3 for beta chain variable domain of TCR clone 117074 (TRBV7-9, TRBJ2-7)
CASSLTTSGSRTWYEQYF

SEQ ID NO: 234149 - protein, 14 aa, Homo sapiens
  CDR3 for alpha chain variable domain of TCR clone 117075 (TRAV21, TRAJ35)
CAVMPIGFGNVLHF

SEQ ID NO: 234150 - protein, 12 aa, Homo sapiens
  CDR3 for beta chain variable domain of TCR clone 117075 (TRBV7-9, TRBJ2-7)
CASSIKREEQYF

SEQ ID NO: 234151 - protein, 16 aa, Homo sapiens
  CDR3 for alpha chain variable domain of TCR clone 117076 (TRAV30, TRAJ24)
CGTESVDADSWGKFQF

SEQ ID NO: 234152 - protein, 13 aa, Homo sapiens
  CDR3 for beta chain variable domain of TCR clone 117076 (TRBV20-1, TRBJ1-1)
CSARGGGNTEAFF

SEQ ID NO: 234153 - protein, 13 aa, Homo sapiens
  CDR3 for alpha chain variable domain of TCR clone 117077 (TRAV8-6, TRAJ54)
CAVEAQGAQKLGF

SEQ ID NO: 234154 - protein, 13 aa, Homo sapiens
  CDR3 for beta chain variable domain of TCR clone 117077 (TRBV6-5, TRBJ2-2)
CASRTVNTGELFF

SEQ ID NO: 234155 - protein, 14 aa, Homo sapiens
  CDR3 for alpha chain variable domain of TCR clone 117078 (TRAV23/DV6, TRAJ22)
CADISSGSARQLTF

SEQ ID NO: 234156 - protein, 13 aa, Homo sapiens
  CDR3 for beta chain variable domain of TCR clone 117078 (TRBV7-9, TRBJ1-2)
CASSLKQNYGYTF

SEQ ID NO: 234157 - protein, 12 aa, Homo sapiens
  CDR3 for alpha chain variable domain of TCR clone 117079 (TRAV13-1, TRAJ21)
FAAKEGFNKFYF

SEQ ID NO: 234158 - protein, 14 aa, Homo sapiens
  CDR3 for beta chain variable domain of TCR clone 117079 (TRBV7-2, TRBJ2-7)
CASSPKTSFYEQYF

SEQ ID NO: 234159 - protein, 16 aa, Homo sapiens
  CDR3 for alpha chain variable domain of TCR clone 117080 (TRAV26-1, TRAJ37)
CIVRGDGSGNTGKLIF

SEQ ID NO: 234160 - protein, 19 aa, Homo sapiens
  CDR3 for beta chain variable domain of TCR clone 117080 (TRBV4-1, TRBJ2-7)
CASSRDPLGSVGGSSTSGR

SEQ ID NO: 234161 - protein, 15 aa, Homo sapiens
  CDR3 for alpha chain variable domain of TCR clone 117081 (TRAV13-1, TRAJ17)
CAASIERAAGNKLTF

SEQ ID NO: 234162 - protein, 12 aa, Homo sapiens
  CDR3 for beta chain variable domain of TCR clone 117081 (TRBV5-7, TRBJ1-1)
CASSLGRGKDFF

SEQ ID NO: 234163 - protein, 15 aa, Homo sapiens
  CDR3 for alpha chain variable domain of TCR clone 117082 (TRAV21, TRAJ53)
CATLNSGGSNYTLTF

SEQ ID NO: 234164 - protein, 16 aa, Homo sapiens
  CDR3 for beta chain variable domain of TCR clone 117082 (TRBV9, TRBJ2-1)
CASSVGGGGNYNEQFF

SEQ ID NO: 234165 - protein, 10 aa, Homo sapiens
  CDR3 for alpha chain variable domain of TCR clone 117083 (TRAV12-3, TRAJ49)
CAMNDDQFYF

SEQ ID NO: 234166 - protein, 12 aa, Homo sapiens
  CDR3 for beta chain variable domain of TCR clone 117083 (TRBV12-4, TRBJ1-1)
CQQSGDRLEAFF

SEQ ID NO: 234167 - protein, 15 aa, Homo sapiens
  CDR3 for alpha chain variable domain of TCR clone 117084 (TRAV12-3, TRAJ11)
CAMSEENSGYSTLTF

SEQ ID NO: 234168 - protein, 16 aa, Homo sapiens
  CDR3 for beta chain variable domain of TCR clone 117084 (TRBV5-1, TRBJ2-7)
CASSVEGLAGLYEQYF

SEQ ID NO: 234169 - protein, 12 aa, Homo sapiens
  CDR3 for alpha chain variable domain of TCR clone 117085 (TRAV12-3, TRAJ17)
CAMTLTGNKLTF

SEQ ID NO: 234170 - protein, 17 aa, Homo sapiens
  CDR3 for beta chain variable domain of TCR clone 117085 (TRBV4-3, TRBJ2-1)
CASSQFSSGRASGEQFF

SEQ ID NO: 234171 - protein, 15 aa, Homo sapiens
  CDR3 for alpha chain variable domain of TCR clone 117086 (TRAV26-1, TRAJ17)
CIVRVVKAAGNKLTF

SEQ ID NO: 234172 - protein, 16 aa, Homo sapiens
  CDR3 for beta chain variable domain of TCR clone 117086 (TRBV7-9, TRBJ2-1)
CASSLLSGPSYNEQFF

SEQ ID NO: 234173 - protein, 13 aa, Homo sapiens
  CDR3 for alpha chain variable domain of TCR clone 117087 (TRAV21, TRAJ27)
CAARPGNAGKSTF

SEQ ID NO: 234174 - protein, 13 aa, Homo sapiens
  CDR3 for beta chain variable domain of TCR clone 117087 (TRBV15, TRBJ1-6)
CATSGGLNSPLHF

SEQ ID NO: 234175 - protein, 14 aa, Homo sapiens
  CDR3 for alpha chain variable domain of TCR clone 117088 (TRAV8-6, TRAJ17)
CCDPPAAAGNKLTF

SEQ ID NO: 234176 - protein, 13 aa, Homo sapiens
  CDR3 for beta chain variable domain of TCR clone 117088 (TRBV12-4, TRBJ2-7)
CASSPTETYEQYF

SEQ ID NO: 234177 - protein, 14 aa, Homo sapiens
  CDR3 for alpha chain variable domain of TCR clone 117089 (TRAV8-4, TRAJ9)
CAVRINTGGFTTIF

SEQ ID NO: 234178 - protein, 15 aa, Homo sapiens
  CDR3 for beta chain variable domain of TCR clone 117089 (TRBV10-2, TRBJ2-6)
CASSEQGTGANVLTF

SEQ ID NO: 234179 - protein, 13 aa, Homo sapiens
  CDR3 for alpha chain variable domain of TCR clone 117090 (TRAV27, TRAJ45)
CRSSGGGADGLTF

SEQ ID NO: 234180 - protein, 17 aa, Homo sapiens
  CDR3 for beta chain variable domain of TCR clone 117090 (TRBV11-2, TRBJ2-1)
CASSIYPPGVEYNEQFF

SEQ ID NO: 234181 - protein, 12 aa, Homo sapiens
  CDR3 for alpha chain variable domain of TCR clone 117091 (TRAV12-3, TRAJ17)
CAITLTGNKLTF

SEQ ID NO: 234182 - protein, 15 aa, Homo sapiens
  CDR3 for beta chain variable domain of TCR clone 117091 (TRBV4-1, TRBJ1-4)
CASSDTGGTNEKLFF

SEQ ID NO: 234183 - protein, 14 aa, Homo sapiens
  CDR3 for alpha chain variable domain of TCR clone 117092 (TRAV12-2, TRAJ15)
CAPHTGQAGTALIF

SEQ ID NO: 234184 - protein, 13 aa, Homo sapiens
  CDR3 for beta chain variable domain of TCR clone 117092 (TRBV7-3, TRBJ1-1)
CASSQDWGAEAFF

SEQ ID NO: 234185 - protein, 12 aa, Homo sapiens
  CDR3 for alpha chain variable domain of TCR clone 117093 (TRAV8-3, TRAJ26)
CAGDSYGQNSVF

SEQ ID NO: 234186 - protein, 13 aa, Homo sapiens
  CDR3 for beta chain variable domain of TCR clone 117093 (TRBV27, TRBJ1-1)
CASSVSIGAEAFF

SEQ ID NO: 234187 - protein, 17 aa, Homo sapiens
  CDR3 for alpha chain variable domain of TCR clone 117094 (TRAV3, TRAJ6)
CAVRDGPRAGGGYIPPF

SEQ ID NO: 234188 - protein, 14 aa, Homo sapiens
  CDR3 for beta chain variable domain of TCR clone 117094 (TRBV7-2, TRBJ2-7)
CASSPKTSFYEQYF

SEQ ID NO: 234189 - protein, 13 aa, Homo sapiens
  CDR3 for alpha chain variable domain of TCR clone 117095 (TRAV38-1, TRAJ42)
CARGGGSQGNLIF

SEQ ID NO: 234190 - protein, 14 aa, Homo sapiens
  CDR3 for beta chain variable domain of TCR clone 117095 (TRBV12-4, TRBJ2-1)
CASSLGQGASEQFF

SEQ ID NO: 234191 - protein, 14 aa, Homo sapiens
  CDR3 for alpha chain variable domain of TCR clone 117096 (TRAV20, TRAJ29)
CAVQAWVGNTPLVF

SEQ ID NO: 234192 - protein, 15 aa, Homo sapiens
  CDR3 for beta chain variable domain of TCR clone 117096 (TRBV29-1, TRBJ2-7)
CSVEFFDRGYYEQYF

SEQ ID NO: 234193 - protein, 12 aa, Homo sapiens
  CDR3 for alpha chain variable domain of TCR clone 117097 (TRAV1-2, TRAJ33)
FAALDSNYQLIW

SEQ ID NO: 234194 - protein, 16 aa, Homo sapiens
  CDR3 for beta chain variable domain of TCR clone 117097 (TRBV6-4, TRBJ1-2)
CASSEAVGDPNYGYTF

SEQ ID NO: 234195 - protein, 13 aa, Homo sapiens
  CDR3 for alpha chain variable domain of TCR clone 117098 (TRAV2, TRAJ15)
CAVASQAGTALIF

SEQ ID NO: 234196 - protein, 15 aa, Homo sapiens
  CDR3 for beta chain variable domain of TCR clone 117098 (TRBV20-1, TRBJ2-5)
CSAEGTGGLQETQYF

SEQ ID NO: 234197 - protein, 13 aa, Homo sapiens
  CDR3 for alpha chain variable domain of TCR clone 117099 (TRAV3, TRAJ43)
CAVKARNNNDMRF

SEQ ID NO: 234198 - protein, 12 aa, Homo sapiens
  CDR3 for beta chain variable domain of TCR clone 117099 (TRBV20-1, TRBJ1-2)
CSASHPSGGYTF

SEQ ID NO: 234199 - protein, 11 aa, Homo sapiens
  CDR3 for alpha chain variable domain of TCR clone 117100 (TRAV2, TRAJ13)
CASVGYQKVTF

SEQ ID NO: 234200 - protein, 18 aa, Homo sapiens
  CDR3 for beta chain variable domain of TCR clone 117100 (TRBV11-2, TRBJ2-3)
CASSLGGASRGAPNTQYF

SEQ ID NO: 234201 - protein, 15 aa, Homo sapiens
  CDR3 for alpha chain variable domain of TCR clone 117101 (TRAV38-1, TRAJ57)
FAFMDSQGGSEKLVF

SEQ ID NO: 234202 - protein, 16 aa, Homo sapiens
  CDR3 for beta chain variable domain of TCR clone 117101 (TRBV10-3, TRBJ2-1)
CAIRGGGRGDYNEQFF

SEQ ID NO: 234203 - protein, 17 aa, Homo sapiens
  CDR3 for alpha chain variable domain of TCR clone 117102 (TRAV3, TRAJ42)
CAVRDRDYGGSQGNLIF

SEQ ID NO: 234204 - protein, 15 aa, Homo sapiens
  CDR3 for beta chain variable domain of TCR clone 117102 (TRBV7-6, TRBJ1-5)
CASSQSSGINQPQHF

SEQ ID NO: 234205 - protein, 14 aa, Homo sapiens
  CDR3 for alpha chain variable domain of TCR clone 117103 (TRAV8-3, TRAJ16)
CAVDRFSDGQKLLF

SEQ ID NO: 234206 - protein, 15 aa, Homo sapiens
  CDR3 for beta chain variable domain of TCR clone 117103 (TRBV28, TRBJ1-5)
CASSPNGHSNQPQHF

SEQ ID NO: 234207 - protein, 13 aa, Homo sapiens
  CDR3 for alpha chain variable domain of TCR clone 117104 (TRAV27, TRAJ17)
CAGAANAGNKLTF

SEQ ID NO: 234208 - protein, 15 aa, Homo sapiens
  CDR3 for beta chain variable domain of TCR clone 117104 (TRBV5-1, TRBJ2-3)
CASRNQAGSTDTQYF

SEQ ID NO: 234209 - protein, 14 aa, Homo sapiens
  CDR3 for alpha chain variable domain of TCR clone 117105 (TRAV1-2, TRAJ16)
CAVNRFSDGQKLLF

SEQ ID NO: 234210 - protein, 15 aa, Homo sapiens
  CDR3 for beta chain variable domain of TCR clone 117105 (TRBV20-1, TRBJ1-1)
CSASRGVMGNTEAFF

SEQ ID NO: 234211 - protein, 16 aa, Homo sapiens
  CDR3 for alpha chain variable domain of TCR clone 117106 (TRAV1-1, TRAJ28)
CAVRDDSGAGCYQLTF

SEQ ID NO: 234212 - protein, 12 aa, Homo sapiens
  CDR3 for beta chain variable domain of TCR clone 117106 (TRBV11-2, TRBJ2-5)
CASSLDTQTQYF

SEQ ID NO: 234213 - protein, 12 aa, Homo sapiens
  CDR3 for alpha chain variable domain of TCR clone 117107 (TRAV2, TRAJ31)
CAVEDNNARLMF

SEQ ID NO: 234214 - protein, 16 aa, Homo sapiens
  CDR3 for beta chain variable domain of TCR clone 117107 (TRBV10-3, TRBJ2-1)
CAIRGVGDGGGGEQFF

SEQ ID NO: 234215 - protein, 14 aa, Homo sapiens
  CDR3 for alpha chain variable domain of TCR clone 117108 (TRAV2, TRAJ9)
CAVEDRSGGFKTIF

SEQ ID NO: 234216 - protein, 15 aa, Homo sapiens
  CDR3 for beta chain variable domain of TCR clone 117108 (TRBV7-9, TRBJ1-6)
CASSSPGHGNSPLHF

SEQ ID NO: 234217 - protein, 12 aa, Homo sapiens
  CDR3 for alpha chain variable domain of TCR clone 117109 (TRAV2, TRAJ34)
CAVERNTDKLIF

SEQ ID NO: 234218 - protein, 14 aa, Homo sapiens
  CDR3 for beta chain variable domain of TCR clone 117109 (TRBV7-9, TRBJ2-1)
CASSDNSGYNEQLF

SEQ ID NO: 234219 - protein, 13 aa, Homo sapiens
  CDR3 for alpha chain variable domain of TCR clone 117110 (TRAV8-2, TRAJ36)
CVVSHLPTNNLFF

SEQ ID NO: 234220 - protein, 18 aa, Homo sapiens
  CDR3 for beta chain variable domain of TCR clone 117110 (TRBV7-9, TRBJ2-6)
CASSFPGAEISGANVLTF

SEQ ID NO: 234221 - protein, 12 aa, Homo sapiens
  CDR3 for alpha chain variable domain of TCR clone 117111 (TRAV26-1, TRAJ17)
CIVRSAGNKLTF

SEQ ID NO: 234222 - protein, 16 aa, Homo sapiens
  CDR3 for beta chain variable domain of TCR clone 117111 (TRBV4-1, TRBJ2-3)
CASSQSTSGAEDTQYF

SEQ ID NO: 234223 - protein, 14 aa, Homo sapiens
  CDR3 for alpha chain variable domain of TCR clone 117112 (TRAV34, TRAJ22)
CGADTSGSARQLTL

SEQ ID NO: 234224 - protein, 16 aa, Homo sapiens
  CDR3 for beta chain variable domain of TCR clone 117112 (TRBV2, TRBJ2-3)
CQHRGAPRRWTDTQYF

SEQ ID NO: 234225 - protein, 12 aa, Homo sapiens
  CDR3 for alpha chain variable domain of TCR clone 117113 (TRAV12-2, TRAJ16)
CAVNLDGPKLLF

SEQ ID NO: 234226 - protein, 12 aa, Homo sapiens
  CDR3 for beta chain variable domain of TCR clone 117113 (TRBV5-7, TRBJ2-7)
CASSVQGGEQYF

SEQ ID NO: 234227 - protein, 12 aa, Homo sapiens
  CDR3 for alpha chain variable domain of TCR clone 117114 (TRAV12-3, TRAJ40)
CAMSSGTYKYIF

SEQ ID NO: 234228 - protein, 15 aa, Homo sapiens
  CDR3 for beta chain variable domain of TCR clone 117114 (TRBV7-3, TRBJ2-2)
CASSETGKGTGELFF

SEQ ID NO: 234229 - protein, 14 aa, Homo sapiens
  CDR3 for alpha chain variable domain of TCR clone 117115 (TRAV35, TRAJ24)
CAGPRRDSWGKLQV

SEQ ID NO: 234230 - protein, 12 aa, Homo sapiens
  CDR3 for beta chain variable domain of TCR clone 117115 (TRBV12-4, TRBJ2-3)
CASSLGQDTQYF

SEQ ID NO: 234231 - protein, 15 aa, Homo sapiens
  CDR3 for alpha chain variable domain of TCR clone 117116 (TRAV8-3, TRAJ45)
CASSYSGGGADGLTF

SEQ ID NO: 234232 - protein, 16 aa, Homo sapiens
  CDR3 for beta chain variable domain of TCR clone 117116 (TRBV4-1, TRBJ2-7)
CASSLTAGQATYEQYF

SEQ ID NO: 234233 - protein, 16 aa, Homo sapiens
  CDR3 for alpha chain variable domain of TCR clone 117117 (TRAV30, TRAJ24)
CGTEIVDADSWGKFQF

SEQ ID NO: 234234 - protein, 13 aa, Homo sapiens
  CDR3 for beta chain variable domain of TCR clone 117117 (TRBV6-3, TRBJ2-5)
CASSWAGEETQYF

SEQ ID NO: 234235 - protein, 14 aa, Homo sapiens
  CDR3 for alpha chain variable domain of TCR clone 117118 (TRAV20, TRAJ42)
CAVQAGGSQGNLIF

SEQ ID NO: 234236 - protein, 14 aa, Homo sapiens
  CDR3 for beta chain variable domain of TCR clone 117118 (TRBV28, TRBJ1-2)
CASRIPGANYGYTF

SEQ ID NO: 234237 - protein, 17 aa, Homo sapiens
  CDR3 for alpha chain variable domain of TCR clone 117119 (TRAV3, TRAJ6)
CAARDGPRAGGSYIPPF

SEQ ID NO: 234238 - protein, 14 aa, Homo sapiens
  CDR3 for beta chain variable domain of TCR clone 117119 (TRBV7-2, TRBJ2-7)
CASSPKTSFYEQYF

SEQ ID NO: 234239 - protein, 13 aa, Homo sapiens
  CDR3 for alpha chain variable domain of TCR clone 117120 (TRAV12-2, TRAJ39)
CAVNNNAGNMLTF

SEQ ID NO: 234240 - protein, 16 aa, Homo sapiens
  CDR3 for beta chain variable domain of TCR clone 117120 (TRBV7-7, TRBJ2-3)
CASSPGTSGSTDTQYF

SEQ ID NO: 234241 - protein, 13 aa, Homo sapiens
  CDR3 for alpha chain variable domain of TCR clone 117121 (TRAV21, TRAJ36)
CAVIKTGANNLVF

SEQ ID NO: 234242 - protein, 13 aa, Homo sapiens
  CDR3 for beta chain variable domain of TCR clone 117121 (TRBV29-1, TRBJ2-3)
CSATRGGRDTQYF

SEQ ID NO: 234243 - protein, 14 aa, Homo sapiens
  CDR3 for alpha chain variable domain of TCR clone 117122 (TRAV26-1, TRAJ45)
CIEVTGGGVDGLTF

SEQ ID NO: 234244 - protein, 13 aa, Homo sapiens
  CDR3 for beta chain variable domain of TCR clone 117122 (TRBV7-6, TRBJ1-2)
CASSLVADYGYTF

SEQ ID NO: 234245 - protein, 18 aa, Homo sapiens
  CDR3 for alpha chain variable domain of TCR clone 117123 (TRAV12-3, TRAJ52)
CAMSVGGAGGTSYGKLTF

SEQ ID NO: 234246 - protein, 12 aa, Homo sapiens
  CDR3 for beta chain variable domain of TCR clone 117123 (TRBV10-3, TRBJ2-2)
CAIRENTGELFF

SEQ ID NO: 234247 - protein, 14 aa, Homo sapiens
  CDR3 for alpha chain variable domain of TCR clone 117124 (TRAV2, TRAJ37)
CAVDFTSNTGKLIF

SEQ ID NO: 234248 - protein, 15 aa, Homo sapiens
  CDR3 for beta chain variable domain of TCR clone 117124 (TRBV10-1, TRBJ2-3)
CASSRAGTLGDTQYF

SEQ ID NO: 234249 - protein, 11 aa, Homo sapiens
  CDR3 for alpha chain variable domain of TCR clone 117125 (TRAV12-3, TRAJ27)
CAMANAGKSTF

SEQ ID NO: 234250 - protein, 14 aa, Homo sapiens
  CDR3 for beta chain variable domain of TCR clone 117125 (TRBV11-2, TRBJ2-3)
CASSRLARTDTQYF

SEQ ID NO: 234251 - protein, 21 aa, Homo sapiens
  CDR3 for alpha chain variable domain of TCR clone 117126 (TRAV34, TRAJ44)
PAMQASTSVEQTTGTASKLTF

SEQ ID NO: 234252 - protein, 15 aa, Homo sapiens
  CDR3 for beta chain variable domain of TCR clone 117126 (TRBV7-2, TRBJ2-1)
CASSFSGGIYNEQFF

SEQ ID NO: 234253 - protein, 17 aa, Homo sapiens
  CDR3 for alpha chain variable domain of TCR clone 117127 (TRAV14/DV4, TRAJ4)
CAMREASGRGGYNKLIF

SEQ ID NO: 234254 - protein, 15 aa, Homo sapiens
  CDR3 for beta chain variable domain of TCR clone 117127 (TRBV5-1, TRBJ2-2)
CASRQDTGDTGELFF

SEQ ID NO: 234255 - protein, 15 aa, Homo sapiens
  CDR3 for alpha chain variable domain of TCR clone 117128 (TRAV26-1, TRAJ42)
SIVRVKGGSQGNLIF

SEQ ID NO: 234256 - protein, 14 aa, Homo sapiens
  CDR3 for beta chain variable domain of TCR clone 117128 (TRBV19, TRBJ2-2)
CATTGHANTGELFF

SEQ ID NO: 234257 - protein, 11 aa, Homo sapiens
  CDR3 for alpha chain variable domain of TCR clone 117129 (TRAV12-2, TRAJ21)
CAVRNFNKFYF

SEQ ID NO: 234258 - protein, 15 aa, Homo sapiens
  CDR3 for beta chain variable domain of TCR clone 117129 (TRBV6-3, TRBJ2-7)
CASSSPGTVFYEQYF

SEQ ID NO: 234259 - protein, 16 aa, Homo sapiens
  CDR3 for alpha chain variable domain of TCR clone 117130 (TRAV26-1, TRAJ38)
CIVRVELGGNNRKLIW

SEQ ID NO: 234260 - protein, 14 aa, Homo sapiens
  CDR3 for beta chain variable domain of TCR clone 117130 (TRBV5-1, TRBJ2-3)
CASSPGLAADTQYF

SEQ ID NO: 234261 - protein, 12 aa, Homo sapiens
  CDR3 for alpha chain variable domain of TCR clone 117131 (TRAV21, TRAJ31)
CVLAGNNARLMF

SEQ ID NO: 234262 - protein, 16 aa, Homo sapiens
  CDR3 for beta chain variable domain of TCR clone 117131 (TRBV27, TRBJ2-5)
CASSFGPGGTKETQYC

SEQ ID NO: 234263 - protein, 16 aa, Homo sapiens
  CDR3 for alpha chain variable domain of TCR clone 117132 (TRAV29/DV5, TRAJ39)
CAASLLFNNAGNMLTF

SEQ ID NO: 234264 - protein, 16 aa, Homo sapiens
  CDR3 for beta chain variable domain of TCR clone 117132 (TRBV19, TRBJ2-6)
CASIMSGLSGANVLTF

SEQ ID NO: 234265 - protein, 15 aa, Homo sapiens
  CDR3 for alpha chain variable domain of TCR clone 117133 (TRAV36/DV7, TRAJ21)
CALKFYFGSGTRLNV

SEQ ID NO: 234266 - protein, 13 aa, Homo sapiens
  CDR3 for beta chain variable domain of TCR clone 117133 (TRBV11-3, TRBJ2-5)
CASSSGLQETQYF

SEQ ID NO: 234267 - protein, 14 aa, Homo sapiens
  CDR3 for alpha chain variable domain of TCR clone 117134 (TRAV16, TRAJ54)
CALSLIQGAQKLVF

SEQ ID NO: 234268 - protein, 17 aa, Homo sapiens
  CDR3 for beta chain variable domain of TCR clone 117134 (TRBV11-2, TRBJ2-4)
CASSSVGPGGHRNSQYF

SEQ ID NO: 234269 - protein, 14 aa, Homo sapiens
  CDR3 for alpha chain variable domain of TCR clone 117135 (TRAV35, TRAJ39)
CAGQLGNAGNMLTF

SEQ ID NO: 234270 - protein, 13 aa, Homo sapiens
  CDR3 for beta chain variable domain of TCR clone 117135 (TRBV7-3, TRBJ1-1)
CASSQDWGAEAFF

SEQ ID NO: 234271 - protein, 13 aa, Homo sapiens
  CDR3 for alpha chain variable domain of TCR clone 117136 (TRAV8-3, TRAJ6)
CAVEKGGSYIPTF

SEQ ID NO: 234272 - protein, 15 aa, Homo sapiens
  CDR3 for beta chain variable domain of TCR clone 117136 (TRBV28, TRBJ2-5)
CASGADRGRGETQYF

SEQ ID NO: 234273 - protein, 13 aa, Homo sapiens
  CDR3 for alpha chain variable domain of TCR clone 117137 (TRAV27, TRAJ49)
CAPRPYTGNQFYF

SEQ ID NO: 234274 - protein, 13 aa, Homo sapiens
  CDR3 for beta chain variable domain of TCR clone 117137 (TRBV7-9, TRBJ2-5)
CASLPSGRETQYF

SEQ ID NO: 234275 - protein, 15 aa, Homo sapiens
  CDR3 for alpha chain variable domain of TCR clone 117138 (TRAV26-1, TRAJ56)
CIVRVATGANSKLTF

SEQ ID NO: 234276 - protein, 11 aa, Homo sapiens
  CDR3 for beta chain variable domain of TCR clone 117138 (TRBV12-4, TRBJ2-3)
CASTATDTQYF

SEQ ID NO: 234277 - protein, 17 aa, Homo sapiens
  CDR3 for alpha chain variable domain of TCR clone 117139 (TRAV23/DV6, TRAJ57)
CAASSALSQGGSEKLVF

SEQ ID NO: 234278 - protein, 14 aa, Homo sapiens
  CDR3 for beta chain variable domain of TCR clone 117139 (TRBV7-8, TRBJ2-5)
CASSATGGQETQYF

SEQ ID NO: 234279 - protein, 18 aa, Homo sapiens
  CDR3 for alpha chain variable domain of TCR clone 117140 (TRAV26-1, TRAJ27)
CIVRPSFNYNTNAGKSTF

SEQ ID NO: 234280 - protein, 14 aa, Homo sapiens
  CDR3 for beta chain variable domain of TCR clone 117140 (TRBV10-3, TRBJ1-6)
CAISVDGGESPLHF

SEQ ID NO: 234281 - protein, 11 aa, Homo sapiens
  CDR3 for alpha chain variable domain of TCR clone 117141 (TRAV12-2, TRAJ29)
CAVTLRSPLVF

SEQ ID NO: 234282 - protein, 16 aa, Homo sapiens
  CDR3 for beta chain variable domain of TCR clone 117141 (TRBV19, TRBJ1-5)
CASSIDRGGARQPQHF

SEQ ID NO: 234283 - protein, 11 aa, Homo sapiens
  CDR3 for alpha chain variable domain of TCR clone 117142 (TRAV1-2, TRAJ11)
CAVRGYSTLTF

SEQ ID NO: 234284 - protein, 13 aa, Homo sapiens
  CDR3 for beta chain variable domain of TCR clone 117142 (TRBV12-4, TRBJ2-2)
CASSITGSGELFF

SEQ ID NO: 234285 - protein, 15 aa, Homo sapiens
  CDR3 for alpha chain variable domain of TCR clone 117143 (TRAV25, TRAJ52)
CAGTSGGTSYGKLTF

SEQ ID NO: 234286 - protein, 16 aa, Homo sapiens
  CDR3 for beta chain variable domain of TCR clone 117143 (TRBV15, TRBJ1-2)
CATSRGPRTRGGGYTF

SEQ ID NO: 234287 - protein, 14 aa, Homo sapiens
  CDR3 for alpha chain variable domain of TCR clone 117144 (TRAV12-2, TRAJ40)
CVVKIPSGTYKYIF

SEQ ID NO: 234288 - protein, 15 aa, Homo sapiens
  CDR3 for beta chain variable domain of TCR clone 117144 (TRBV20-1, TRBJ1-4)
CSARREWGVNEKLFF

SEQ ID NO: 234289 - protein, 12 aa, Homo sapiens
  CDR3 for alpha chain variable domain of TCR clone 117145 (TRAV12-3, TRAJ17)
CAMTLTGNKITF

SEQ ID NO: 234290 - protein, 15 aa, Homo sapiens
  CDR3 for beta chain variable domain of TCR clone 117145 (TRBV20-1, TRBJ2-7)
CSTRDRVSGMDEQYF

SEQ ID NO: 234291 - protein, 14 aa, Homo sapiens
  CDR3 for alpha chain variable domain of TCR clone 117146 (TRAV12-1, TRAJ30)
CVVNIGGRDDKIIF

SEQ ID NO: 234292 - protein, 14 aa, Homo sapiens
  CDR3 for beta chain variable domain of TCR clone 117146 (TRBV20-1, TRBJ2-1)
CSAQIGGSANEQFL

SEQ ID NO: 234293 - protein, 12 aa, Homo sapiens
  CDR3 for alpha chain variable domain of TCR clone 117147 (TRAV1-1, TRAJ8)
CAGGTGFQKRVF

SEQ ID NO: 234294 - protein, 15 aa, Homo sapiens
  CDR3 for beta chain variable domain of TCR clone 117147 (TRBV7-9, TRBJ1-4)
CASSRTGGFNEKLFF

SEQ ID NO: 234295 - protein, 19 aa, Homo sapiens
  CDR3 for alpha chain variable domain of TCR clone 117148 (TRAV1-2, TRAJ26)
CLLPLCCERPDNYGQNFVF

SEQ ID NO: 234296 - protein, 15 aa, Homo sapiens
  CDR3 for beta chain variable domain of TCR clone 117148 (TRBV9, TRBJ1-6)
CASSVAGTGDSTLHF

SEQ ID NO: 234297 - protein, 14 aa, Homo sapiens
  CDR3 for alpha chain variable domain of TCR clone 117149 (TRAV1-2, TRAJ8)
CAVREDTGFQKLVF

SEQ ID NO: 234298 - protein, 10 aa, Homo sapiens
  CDR3 for beta chain variable domain of TCR clone 117149 (TRBV6-3, TRBJ2-7)
CASSPPGQFS

SEQ ID NO: 234299 - protein, 13 aa, Homo sapiens
  CDR3 for alpha chain variable domain of TCR clone 117150 (TRAV12-3, TRAJ49)
CAMLSNTGNQFYF

SEQ ID NO: 234300 - protein, 14 aa, Homo sapiens
  CDR3 for beta chain variable domain of TCR clone 117150 (TRBV19, TRBJ2-1)
CASPTFVLSGEQFF

SEQ ID NO: 234301 - protein, 21 aa, Homo sapiens
  CDR3 for alpha chain variable domain of TCR clone 117151 (TRAV29/DV5, TRAJ52)
CSVLLCSKREAGGTSYGKLTF

SEQ ID NO: 234302 - protein, 13 aa, Homo sapiens
  CDR3 for beta chain variable domain of TCR clone 117151 (TRBV10-3, TRBJ2-7)
CASKLAVNYEQYF

SEQ ID NO: 234303 - protein, 11 aa, Homo sapiens
  CDR3 for alpha chain variable domain of TCR clone 117152 (TRAV2, TRAJ33)
CAVESNCQLIW

SEQ ID NO: 234304 - protein, 15 aa, Homo sapiens
  CDR3 for beta chain variable domain of TCR clone 117152 (TRBV19, TRBJ1-1)
CASTSGQIQNTEAFF

SEQ ID NO: 234305 - protein, 16 aa, Homo sapiens
  CDR3 for alpha chain variable domain of TCR clone 117153 (TRAV8-3, TRAJ8)
CAVHRDGNTGFQKLVF

SEQ ID NO: 234306 - protein, 15 aa, Homo sapiens
  CDR3 for beta chain variable domain of TCR clone 117153 (TRBV6-1, TRBJ2-6)
CASSSRPSGANVLTF

SEQ ID NO: 234307 - protein, 14 aa, Homo sapiens
  CDR3 for alpha chain variable domain of TCR clone 117154 (TRAV16, TRAJ37)
CALEISGNTGKLIF

SEQ ID NO: 234308 - protein, 14 aa, Homo sapiens
  CDR3 for beta chain variable domain of TCR clone 117154 (TRBV7-6, TRBJ2-7)
CASSFRQGADEQYF

SEQ ID NO: 234309 - protein, 12 aa, Homo sapiens
  CDR3 for alpha chain variable domain of TCR clone 117155 (TRAV17, TRAJ57)
CATDGGSEKLVF

SEQ ID NO: 234310 - protein, 19 aa, Homo sapiens
  CDR3 for beta chain variable domain of TCR clone 117155 (TRBV7-2, TRBJ2-3)
CASSFLSRNWGGGTDTQYF

SEQ ID NO: 234311 - protein, 14 aa, Homo sapiens
  CDR3 for alpha chain variable domain of TCR clone 117156 (TRAV20, TRAJ22)
CAVALGGSARQLTF

SEQ ID NO: 234312 - protein, 15 aa, Homo sapiens
  CDR3 for beta chain variable domain of TCR clone 117156 (TRBV7-2, TRBJ1-1)
CASSFAGDRDTEDFF

SEQ ID NO: 234313 - protein, 16 aa, Homo sapiens
  CDR3 for alpha chain variable domain of TCR clone 117157 (TRAV4, TRAJ22)
CLVGDLYSGSARQLTF

SEQ ID NO: 234314 - protein, 15 aa, Homo sapiens
  CDR3 for beta chain variable domain of TCR clone 117157 (TRBV10-2, TRBJ2-5)
CASRGSGGPQETQYF

SEQ ID NO: 234315 - protein, 13 aa, Homo sapiens
  CDR3 for alpha chain variable domain of TCR clone 117158 (TRAV17, TRAJ26)
CATVDNYGQNFVF

SEQ ID NO: 234316 - protein, 13 aa, Homo sapiens
  CDR3 for beta chain variable domain of TCR clone 117158 (TRBV7-9, TRBJ2-3)
CASSPGSTDTQYF

SEQ ID NO: 234317 - protein, 14 aa, Homo sapiens
  CDR3 for alpha chain variable domain of TCR clone 117159 (TRAV8-1, TRAJ34)
CAVNPSYNTDKLIS

SEQ ID NO: 234318 - protein, 16 aa, Homo sapiens
  CDR3 for beta chain variable domain of TCR clone 117159 (TRBV7-2, TRBJ2-6)
CASSLAGRSGANVLTF

SEQ ID NO: 234319 - protein, 21 aa, Homo sapiens
  CDR3 for alpha chain variable domain of TCR clone 117160 (TRAV1-1, TRAJ6)
CLLLLRCERLERTGGSYIPTF

SEQ ID NO: 234320 - protein, 16 aa, Homo sapiens
  CDR3 for beta chain variable domain of TCR clone 117160 (TRBV7-3, TRBJ2-2)
CASSLKRGTLSGELFF

SEQ ID NO: 234321 - protein, 15 aa, Homo sapiens
  CDR3 for alpha chain variable domain of TCR clone 117161 (TRAV12-1, TRAJ44)
CVVFVNTGTASKLTF

SEQ ID NO: 234322 - protein, 14 aa, Homo sapiens
  CDR3 for beta chain variable domain of TCR clone 117161 (TRBV4-1, TRBJ2-7)
CASSPVAGGDEQYF

SEQ ID NO: 234323 - protein, 13 aa, Homo sapiens
  CDR3 for alpha chain variable domain of TCR clone 117162 (TRAV27, TRAJ49)
CAPRPYTGNQFYF

SEQ ID NO: 234324 - protein, 18 aa, Homo sapiens
  CDR3 for beta chain variable domain of TCR clone 117162 (TRBV7-3, TRBJ2-5)
CASGLGGAAQGRWETQYF

SEQ ID NO: 234325 - protein, 13 aa, Homo sapiens
  CDR3 for alpha chain variable domain of TCR clone 117163 (TRAV21, TRAJ24)
GLMTTDSWGKLQF

SEQ ID NO: 234326 - protein, 14 aa, Homo sapiens
  CDR3 for beta chain variable domain of TCR clone 117163 (TRBV7-2, TRBJ1-1)
CASSFLTGTTEAFF

SEQ ID NO: 234327 - protein, 14 aa, Homo sapiens
  CDR3 for alpha chain variable domain of TCR clone 117164 (TRAV26-1, TRAJ34)
CIVRVAYNTDKLIF

SEQ ID NO: 234328 - protein, 16 aa, Homo sapiens
  CDR3 for beta chain variable domain of TCR clone 117164 (TRBV7-2, TRBJ2-7)
CASSLGLAGGAYEQYF

SEQ ID NO: 234329 - protein, 14 aa, Homo sapiens
  CDR3 for alpha chain variable domain of TCR clone 117165 (TRAV8-3, TRAJ39)
CAAGANNAGNMLTF

SEQ ID NO: 234330 - protein, 16 aa, Homo sapiens
  CDR3 for beta chain variable domain of TCR clone 117165 (TRBV12-5, TRBJ2-5)
CASGPRTSGNQETQYF

SEQ ID NO: 234331 - protein, 12 aa, Homo sapiens
  CDR3 for alpha chain variable domain of TCR clone 117166 (TRAV8-3, TRAJ20)
CAVGANDYKLSF

SEQ ID NO: 234332 - protein, 15 aa, Homo sapiens
  CDR3 for beta chain variable domain of TCR clone 117166 (TRBV7-2, TRBJ2-3)
CASSSTGLETDTQYF

SEQ ID NO: 234333 - protein, 17 aa, Homo sapiens
  CDR3 for alpha chain variable domain of TCR clone 117167 (TRAV4, TRAJ18)
CLVGERSVGSTLGRLYF

SEQ ID NO: 234334 - protein, 15 aa, Homo sapiens
  CDR3 for beta chain variable domain of TCR clone 117167 (TRBV20-1, TRBJ2-7)
CSARDRVSGMDEQYF

SEQ ID NO: 234335 - protein, 14 aa, Homo sapiens
  CDR3 for alpha chain variable domain of TCR clone 117168 (TRAV35, TRAJ50)
CAGHRKTSYDKVIC

SEQ ID NO: 234336 - protein, 13 aa, Homo sapiens
  CDR3 for beta chain variable domain of TCR clone 117168 (TRBV7-7, TRBJ2-3)
CASSLSRADTQYF

SEQ ID NO: 234337 - protein, 12 aa, Homo sapiens
  CDR3 for alpha chain variable domain of TCR clone 117169 (TRAV16, TRAJ22)
CALEVSARQLTF

SEQ ID NO: 234338 - protein, 14 aa, Homo sapiens
  CDR3 for beta chain variable domain of TCR clone 117169 (TRBV11-2, TRBJ2-3)
CASSAIASTDTQYF

SEQ ID NO: 234339 - protein, 15 aa, Homo sapiens
  CDR3 for alpha chain variable domain of TCR clone 117170 (TRAV21, TRAJ53)
CATLNSGSSNYKLTF

SEQ ID NO: 234340 - protein, 16 aa, Homo sapiens
  CDR3 for beta chain variable domain of TCR clone 117170 (TRBV9, TRBJ2-1)
CASSVGGGGNYNEQFF

SEQ ID NO: 234341 - protein, 16 aa, Homo sapiens
  CDR3 for alpha chain variable domain of TCR clone 117171 (TRAV16, TRAJ4)
CALSRMFTGGYNKLIF

SEQ ID NO: 234342 - protein, 16 aa, Homo sapiens
  CDR3 for beta chain variable domain of TCR clone 117171 (TRBV24-1, TRBJ2-3)
CATSDPGTGATDTQYF

SEQ ID NO: 234343 - protein, 14 aa, Homo sapiens
  CDR3 for alpha chain variable domain of TCR clone 117172 (TRAV13-1, TRAJ24)
CAASRTDSWGKLPF

SEQ ID NO: 234344 - protein, 15 aa, Homo sapiens
  CDR3 for beta chain variable domain of TCR clone 117172 (TRBV7-9, TRBJ1-5)
CASSQGHQPNQPQHF

SEQ ID NO: 234345 - protein, 13 aa, Homo sapiens
  CDR3 for alpha chain variable domain of TCR clone 117173 (TRAV4, TRAJ12)
CLVGGDSSYKLIF

SEQ ID NO: 234346 - protein, 14 aa, Homo sapiens
  CDR3 for beta chain variable domain of TCR clone 117173 (TRBV7-8, TRBJ2-3)
CASSLEAGTDTQYF

SEQ ID NO: 234347 - protein, 11 aa, Homo sapiens
  CDR3 for alpha chain variable domain of TCR clone 117174 (TRAV21, TRAJ34)
CAVTNTDKLIF

SEQ ID NO: 234348 - protein, 12 aa, Homo sapiens
  CDR3 for beta chain variable domain of TCR clone 117174 (TRBV7-9, TRBJ1-1)
CASSLVRGEDFF

SEQ ID NO: 234349 - protein, 11 aa, Homo sapiens
  CDR3 for alpha chain variable domain of TCR clone 117175 (TRAV21, TRAJ10)
CSPGGGNKLTF

SEQ ID NO: 234350 - protein, 14 aa, Homo sapiens
  CDR3 for beta chain variable domain of TCR clone 117175 (TRBV6-1, TRBJ1-3)
CASVQGGGGNTIYF

SEQ ID NO: 234351 - protein, 14 aa, Homo sapiens
  CDR3 for alpha chain variable domain of TCR clone 117176 (TRAV12-1, TRAJ17)
CVVNFKAAGNKLTF

SEQ ID NO: 234352 - protein, 17 aa, Homo sapiens
  CDR3 for beta chain variable domain of TCR clone 117176 (TRBV20-1, TRBJ2-1)
SSASASGLAGSYNEQFF

SEQ ID NO: 234353 - protein, 16 aa, Homo sapiens
  CDR3 for alpha chain variable domain of TCR clone 117177 (TRAV1-2, TRAJ10)
CAVRGVLTGGGNKLTF

SEQ ID NO: 234354 - protein, 11 aa, Homo sapiens
  CDR3 for beta chain variable domain of TCR clone 117177 (TRBV6-3, TRBJ2-3)
CATGQADTQYF

SEQ ID NO: 234355 - protein, 16 aa, Homo sapiens
  CDR3 for alpha chain variable domain of TCR clone 117178 (TRAV3, TRAJ21)
CAVRDIERGNFNKFYF

SEQ ID NO: 234356 - protein, 15 aa, Homo sapiens
  CDR3 for beta chain variable domain of TCR clone 117178 (TRBV2, TRBJ2-1)
CASSEEREGDNEQFF

SEQ ID NO: 234357 - protein, 12 aa, Homo sapiens
  CDR3 for alpha chain variable domain of TCR clone 117179 (TRAV12-1, TRAJ9)
CVVNPASFKTIF

SEQ ID NO: 234358 - protein, 15 aa, Homo sapiens
  CDR3 for beta chain variable domain of TCR clone 117179 (TRBV4-3, TRBJ2-2)
CASSQGTGGTGELFL

SEQ ID NO: 234359 - protein, 15 aa, Homo sapiens
  CDR3 for alpha chain variable domain of TCR clone 117180 (TRAV29/DV5, TRAJ42)
CAAKTDGGSQGTLIF

SEQ ID NO: 234360 - protein, 15 aa, Homo sapiens
  CDR3 for beta chain variable domain of TCR clone 117180 (TRBV5-1, TRBJ2-2)
CASSSQGGNTGELFF

SEQ ID NO: 234361 - protein, 12 aa, Homo sapiens
  CDR3 for alpha chain variable domain of TCR clone 117181 (TRAV12-1, TRAJ41)
CVVGNSGYALNF

SEQ ID NO: 234362 - protein, 15 aa, Homo sapiens
  CDR3 for beta chain variable domain of TCR clone 117181 (TRBV7-9, TRBJ1-6)
CASSSPGRGNSPLHF

SEQ ID NO: 234363 - protein, 10 aa, Homo sapiens
  CDR3 for alpha chain variable domain of TCR clone 117182 (TRAV8-3, TRAJ43)
CAVAPADMRF

SEQ ID NO: 234364 - protein, 17 aa, Homo sapiens
  CDR3 for beta chain variable domain of TCR clone 117182 (TRBV10-1, TRBJ2-1)
CASSPQRAGGPFNEQFF

SEQ ID NO: 234365 - protein, 14 aa, Homo sapiens
  CDR3 for alpha chain variable domain of TCR clone 117183 (TRAV12-3, TRAJ9)
CAIGPNTGGFKTIF

SEQ ID NO: 234366 - protein, 12 aa, Homo sapiens
  CDR3 for beta chain variable domain of TCR clone 117183 (TRBV19, TRBJ1-5)
CASSIAQQPQHF

SEQ ID NO: 234367 - protein, 15 aa, Homo sapiens
  CDR3 for alpha chain variable domain of TCR clone 117184 (TRAV13-1, TRAJ36)
CAASIRQTGANNLFF

SEQ ID NO: 234368 - protein, 13 aa, Homo sapiens
  CDR3 for beta chain variable domain of TCR clone 117184 (TRBV12-4, TRBJ2-7)
CASSPTETYEQYF

SEQ ID NO: 234369 - protein, 16 aa, Homo sapiens
  CDR3 for alpha chain variable domain of TCR clone 117185 (TRAV12-1, TRAJ22)
CVVNTISSGSARQLTF

SEQ ID NO: 234370 - protein, 13 aa, Homo sapiens
  CDR3 for beta chain variable domain of TCR clone 117185 (TRBV19, TRBJ2-1)
CASNGGCLVSSSS

SEQ ID NO: 234371 - protein, 13 aa, Homo sapiens
  CDR3 for alpha chain variable domain of TCR clone 117186 (TRAV8-3, TRAJ44)
CAVVPGTASKLTF

SEQ ID NO: 234372 - protein, 13 aa, Homo sapiens
  CDR3 for beta chain variable domain of TCR clone 117186 (TRBV7-2, TRBJ2-5)
CASSQTSVETQYF

SEQ ID NO: 234373 - protein, 15 aa, Homo sapiens
  CDR3 for alpha chain variable domain of TCR clone 117187 (TRAV12-1, TRAJ44)
CVVDTPQGTASKLTV

SEQ ID NO: 234374 - protein, 13 aa, Homo sapiens
  CDR3 for beta chain variable domain of TCR clone 117187 (TRBV27, TRBJ2-1)
CASSSGSYNEQFF

SEQ ID NO: 234375 - protein, 13 aa, Homo sapiens
  CDR3 for alpha chain variable domain of TCR clone 117188 (TRAV30, TRAJ34)
CGTVGYNTDQLIF

SEQ ID NO: 234376 - protein, 16 aa, Homo sapiens
  CDR3 for beta chain variable domain of TCR clone 117188 (TRBV7-9, TRBJ1-2)
CASSLGFSSGEDGYTF

SEQ ID NO: 234377 - protein, 11 aa, Homo sapiens
  CDR3 for alpha chain variable domain of TCR clone 117189 (TRAV21, TRAJ34)
CAHYNTDKLIF

SEQ ID NO: 234378 - protein, 11 aa, Homo sapiens
  CDR3 for beta chain variable domain of TCR clone 117189 (TRBV29-1, TRBJ2-5)
CSEERTGTQYF

SEQ ID NO: 234379 - protein, 14 aa, Homo sapiens
  CDR3 for alpha chain variable domain of TCR clone 117190 (TRAV1-1, TRAJ35)
CAVRSIGFGNVLHC

SEQ ID NO: 234380 - protein, 19 aa, Homo sapiens
  CDR3 for beta chain variable domain of TCR clone 117190 (TRBV25-1, TRBJ2-2)
CAILVYRVDRGRKTGELFF

SEQ ID NO: 234381 - protein, 12 aa, Homo sapiens
  CDR3 for alpha chain variable domain of TCR clone 117191 (TRAV12-1, TRAJ40)
CVVYSGTYKYIF

SEQ ID NO: 234382 - protein, 16 aa, Homo sapiens
  CDR3 for beta chain variable domain of TCR clone 117191 (TRBV5-1, TRBJ1-1)
CASSSGGNSLNTEAFF

SEQ ID NO: 234383 - protein, 12 aa, Homo sapiens
  CDR3 for alpha chain variable domain of TCR clone 117192 (TRAV21, TRAJ39)
CAADNAGNMLTF

SEQ ID NO: 234384 - protein, 15 aa, Homo sapiens
  CDR3 for beta chain variable domain of TCR clone 117192 (TRBV24-1, TRBJ1-1)
CATSDSKTVNTEAFF

SEQ ID NO: 234385 - protein, 11 aa, Homo sapiens
  CDR3 for alpha chain variable domain of TCR clone 117193 (TRAV13-1, TRAJ39)
CASHAGNMLTF

SEQ ID NO: 234386 - protein, 15 aa, Homo sapiens
  CDR3 for beta chain variable domain of TCR clone 117193 (TRBV6-3, TRBJ2-7)
RASSSPGTVLYEQYF

SEQ ID NO: 234387 - protein, 15 aa, Homo sapiens
  CDR3 for alpha chain variable domain of TCR clone 117194 (TRAV14/DV4, TRAJ21)
CAMREGVYNFNKFYF

SEQ ID NO: 234388 - protein, 12 aa, Homo sapiens
  CDR3 for beta chain variable domain of TCR clone 117194 (TRBV6-1, TRBJ2-1)
CQQGGRGHEQFF

SEQ ID NO: 234389 - protein, 14 aa, Homo sapiens
  CDR3 for alpha chain variable domain of TCR clone 117195 (TRAV17, TRAJ6)
CATPAMGGSYIPTF

SEQ ID NO: 234390 - protein, 16 aa, Homo sapiens
  CDR3 for beta chain variable domain of TCR clone 117195 (TRBV4-3, TRBJ2-1)
CASSPALDRGVNEQFF

SEQ ID NO: 234391 - protein, 13 aa, Homo sapiens
  CDR3 for alpha chain variable domain of TCR clone 117196 (TRAV30, TRAJ24)
CGTVTDSWGKLQF

SEQ ID NO: 234392 - protein, 15 aa, Homo sapiens
  CDR3 for beta chain variable domain of TCR clone 117196 (TRBV19, TRBJ1-1)
CASTSGQIQNTEAVF

SEQ ID NO: 234393 - protein, 22 aa, Homo sapiens
  CDR3 for alpha chain variable domain of TCR clone 117197 (TRAV13-1, TRAJ35)
CAASKGGFGNVLHCGSGTPVIF

SEQ ID NO: 234394 - protein, 13 aa, Homo sapiens
  CDR3 for beta chain variable domain of TCR clone 117197 (TRBV7-3, TRBJ1-1)
CASSQDWGAEAFF

SEQ ID NO: 234395 - protein, 13 aa, Homo sapiens
  CDR3 for alpha chain variable domain of TCR clone 117198 (TRAV27, TRAJ45)
CRSSGGGADGLTF

SEQ ID NO: 234396 - protein, 17 aa, Homo sapiens
  CDR3 for beta chain variable domain of TCR clone 117198 (TRBV11-2, TRBJ2-1)
FASSLYPPGVEYNEQFF

SEQ ID NO: 234397 - protein, 16 aa, Homo sapiens
  CDR3 for alpha chain variable domain of TCR clone 117199 (TRAV38-1, TRAJ37)
CAFKGDGSSNTGKLIF

SEQ ID NO: 234398 - protein, 16 aa, Homo sapiens
  CDR3 for beta chain variable domain of TCR clone 117199 (TRBV28, TRBJ2-7)
CASSLFFETGGPEQYF

SEQ ID NO: 234399 - protein, 13 aa, Homo sapiens
  CDR3 for alpha chain variable domain of TCR clone 117200 (TRAV35, TRAJ44)
SAGLSGTASKLTF

SEQ ID NO: 234400 - protein, 17 aa, Homo sapiens
  CDR3 for beta chain variable domain of TCR clone 117200 (TRBV7-8, TRBJ1-2)
CASSLRPLQGHLYGYTF

SEQ ID NO: 234401 - protein, 19 aa, Homo sapiens
  CDR3 for alpha chain variable domain of TCR clone 117201 (TRAV16, TRAJ26)
CAPEELWSEFCLCSRNQIV

SEQ ID NO: 234402 - protein, 15 aa, Homo sapiens
  CDR3 for beta chain variable domain of TCR clone 117201 (TRBV7-2, TRBJ2-3)
CASSLTGTSTDTQYF

SEQ ID NO: 234403 - protein, 12 aa, Homo sapiens
  CDR3 for alpha chain variable domain of TCR clone 117202 (TRAV9-2, TRAJ31)
CALSSFDARLMF

SEQ ID NO: 234404 - protein, 13 aa, Homo sapiens
  CDR3 for beta chain variable domain of TCR clone 117202 (TRBV20-1, TRBJ1-5)
CSARILGNQPQHF

SEQ ID NO: 234405 - protein, 21 aa, Homo sapiens
  CDR3 for alpha chain variable domain of TCR clone 117203 (TRAV27, TRAJ38)
CAARRNAGNNHIQNPDPAVYQ

SEQ ID NO: 234406 - protein, 12 aa, Homo sapiens
  CDR3 for beta chain variable domain of TCR clone 117203 (TRBV11-2, TRBJ2-2)
CASSLGGGELFF

SEQ ID NO: 234407 - protein, 14 aa, Homo sapiens
  CDR3 for alpha chain variable domain of TCR clone 117204 (TRAV17, TRAJ57)
CATDPQGGSEKLVF

SEQ ID NO: 234408 - protein, 18 aa, Homo sapiens
  CDR3 for beta chain variable domain of TCR clone 117204 (TRBV25-1, TRBJ2-1)
CASSESRAEGPGYNEQFF

SEQ ID NO: 234409 - protein, 13 aa, Homo sapiens
  CDR3 for alpha chain variable domain of TCR clone 117205 (TRAV13-1, TRAJ6)
CAARRGGSYKPTF

SEQ ID NO: 234410 - protein, 16 aa, Homo sapiens
  CDR3 for beta chain variable domain of TCR clone 117205 (TRBV7-9, TRBJ2-2)
CASSLATGVGTGELFF

SEQ ID NO: 234411 - protein, 10 aa, Homo sapiens
  CDR3 for alpha chain variable domain of TCR clone 117206 (TRAV12-1, TRAJ49)
CVVNPNQFYF

SEQ ID NO: 234412 - protein, 14 aa, Homo sapiens
  CDR3 for beta chain variable domain of TCR clone 117206 (TRBV12-5, TRBJ2-5)
CASGSRTHQETQYF

SEQ ID NO: 234413 - protein, 16 aa, Homo sapiens
  CDR3 for alpha chain variable domain of TCR clone 117207 (TRAV16, TRAJ57)
CAPYLINQGGSEKLVF

SEQ ID NO: 234414 - protein, 17 aa, Homo sapiens
  CDR3 for beta chain variable domain of TCR clone 117207 (TRBV24-1, TRBJ2-4)
CATSDAEARGVRNIQYF

SEQ ID NO: 234415 - protein, 13 aa, Homo sapiens
  CDR3 for alpha chain variable domain of TCR clone 117208 (TRAV26-2, TRAJ43)
GILRAVNNNDMRF

SEQ ID NO: 234416 - protein, 15 aa, Homo sapiens
  CDR3 for beta chain variable domain of TCR clone 117208 (TRBV7-2, TRBJ2-1)
CASTHGTGIYNEQFF

SEQ ID NO: 234417 - protein, 12 aa, Homo sapiens
  CDR3 for alpha chain variable domain of TCR clone 117209 (TRAV13-1, TRAJ27)
CAAHTNSGKSTF

SEQ ID NO: 234418 - protein, 14 aa, Homo sapiens
  CDR3 for beta chain variable domain of TCR clone 117209 (TRBV19, TRBJ2-2)
CASSGQGIAGELFF

SEQ ID NO: 234419 - protein, 16 aa, Homo sapiens
  CDR3 for alpha chain variable domain of TCR clone 117210 (TRAV16, TRAJ52)
CALSGVGGTSYGKLTF

SEQ ID NO: 234420 - protein, 14 aa, Homo sapiens
  CDR3 for beta chain variable domain of TCR clone 117210 (TRBV19, TRBJ1-2)
CASSLQGQAYGYTV

SEQ ID NO: 234421 - protein, 22 aa, Homo sapiens
  CDR3 for alpha chain variable domain of TCR clone 117211 (TRAV4, TRAJ37)
CLVGDGRLWQHRQTNLWARGNF

SEQ ID NO: 234422 - protein, 15 aa, Homo sapiens
  CDR3 for beta chain variable domain of TCR clone 117211 (TRBV6-6, TRBJ1-1)
CASSYASGAGTEAFF

SEQ ID NO: 234423 - protein, 14 aa, Homo sapiens
  CDR3 for alpha chain variable domain of TCR clone 117212 (TRAV2, TRAJ16)
CAVERGSVGQKLLF

SEQ ID NO: 234424 - protein, 12 aa, Homo sapiens
  CDR3 for beta chain variable domain of TCR clone 117212 (TRBV6-5, TRBJ2-7)
CASYIYGYEQYF

SEQ ID NO: 234425 - protein, 17 aa, Homo sapiens
  CDR3 for alpha chain variable domain of TCR clone 117213 (TRAV3, TRAJ6)
CAVRDGPRAGGSYIPTF

SEQ ID NO: 234426 - protein, 17 aa, Homo sapiens
  CDR3 for beta chain variable domain of TCR clone 117213 (TRBV20-1, TRBJ2-1)
CSAPPRLAGTRYNEQFF

SEQ ID NO: 234427 - protein, 14 aa, Homo sapiens
  CDR3 for alpha chain variable domain of TCR clone 117214 (TRAV26-1, TRAJ39)
CIVRGSRAGNMLTF

SEQ ID NO: 234428 - protein, 12 aa, Homo sapiens
  CDR3 for beta chain variable domain of TCR clone 117214 (TRBV7-9, TRBJ2-2)
CASSLGGGELFF

SEQ ID NO: 234429 - protein, 12 aa, Homo sapiens
  CDR3 for alpha chain variable domain of TCR clone 117215 (TRAV1-1, TRAJ39)
CAVPVVGNMLTF

SEQ ID NO: 234430 - protein, 15 aa, Homo sapiens
  CDR3 for beta chain variable domain of TCR clone 117215 (TRBV25-1, TRBJ2-5)
CASSDTGTHQETQYF

SEQ ID NO: 234431 - protein, 14 aa, Homo sapiens
  CDR3 for alpha chain variable domain of TCR clone 117216 (TRAV16, TRAJ15)
CALRPNQAGTALIF

SEQ ID NO: 234432 - protein, 13 aa, Homo sapiens
  CDR3 for beta chain variable domain of TCR clone 117216 (TRBV11-2, TRBJ1-4)
CASSPGTLEKLFF

SEQ ID NO: 234433 - protein, 14 aa, Homo sapiens
  CDR3 for alpha chain variable domain of TCR clone 117217 (TRAV2, TRAJ9)
CAVEDRSGGFKTIF

SEQ ID NO: 234434 - protein, 15 aa, Homo sapiens
  CDR3 for beta chain variable domain of TCR clone 117217 (TRBV7-2, TRBJ2-3)
CASSSTGLETDTQYF

SEQ ID NO: 234435 - protein, 13 aa, Homo sapiens
  CDR3 for alpha chain variable domain of TCR clone 117218 (TRAV39, TRAJ40)
CAVYTSGTYKYIF

SEQ ID NO: 234436 - protein, 16 aa, Homo sapiens
  CDR3 for beta chain variable domain of TCR clone 117218 (TRBV18, TRBJ2-7)
CASSPLQSGTHYEQYF

SEQ ID NO: 234437 - protein, 12 aa, Homo sapiens
  CDR3 for alpha chain variable domain of TCR clone 117219 (TRAV12-1, TRAJ40)
CVVYSGTYKYIF

SEQ ID NO: 234438 - protein, 13 aa, Homo sapiens
  CDR3 for beta chain variable domain of TCR clone 117219 (TRBV11-2, TRBJ2-5)
CASSSTGEETQYF

SEQ ID NO: 234439 - protein, 13 aa, Homo sapiens
  CDR3 for alpha chain variable domain of TCR clone 117220 (TRAV6, TRAJ45)
SPFSGGGADGLTF

SEQ ID NO: 234440 - protein, 16 aa, Homo sapiens
  CDR3 for beta chain variable domain of TCR clone 117220 (TRBV5-4, TRBJ2-3)
CASQQPGAGGADTQYF

SEQ ID NO: 234441 - protein, 14 aa, Homo sapiens
  CDR3 for alpha chain variable domain of TCR clone 117221 (TRAV8-3, TRAJ20)
CAVGPCGNDYKLSF

SEQ ID NO: 234442 - protein, 11 aa, Homo sapiens
  CDR3 for beta chain variable domain of TCR clone 117221 (TRBV10-3, TRBJ2-2)
CATKGTGELFF

SEQ ID NO: 234443 - protein, 17 aa, Homo sapiens
  CDR3 for alpha chain variable domain of TCR clone 117222 (TRAV8-6, TRAJ58)
CAVSSWVGETSGSRLTF

SEQ ID NO: 234444 - protein, 12 aa, Homo sapiens
  CDR3 for beta chain variable domain of TCR clone 117222 (TRBV11-2, TRBJ2-1)
CASSPGNNEQFF

SEQ ID NO: 234445 - protein, 14 aa, Homo sapiens
  CDR3 for alpha chain variable domain of TCR clone 117223 (TRAV12-2, TRAJ17)
CAVLFKAAGNKLTF

SEQ ID NO: 234446 - protein, 16 aa, Homo sapiens
  CDR3 for beta chain variable domain of TCR clone 117223 (TRBV7-2, TRBJ1-2)
CASSSNQDRRGHGYTF

SEQ ID NO: 234447 - protein, 14 aa, Homo sapiens
  CDR3 for alpha chain variable domain of TCR clone 117224 (TRAV2, TRAJ41)
CAVGTANSGYALNF

SEQ ID NO: 234448 - protein, 13 aa, Homo sapiens
  CDR3 for beta chain variable domain of TCR clone 117224 (TRBV4-1, TRBJ2-1)
CASSQEVQYEQFF

SEQ ID NO: 234449 - protein, 13 aa, Homo sapiens
  CDR3 for alpha chain variable domain of TCR clone 117225 (TRAV2, TRAJ40)
CAVVTSGTYKYIF

SEQ ID NO: 234450 - protein, 13 aa, Homo sapiens
  CDR3 for beta chain variable domain of TCR clone 117225 (TRBV6-5, TRBJ2-5)
CASSYGGGETQYF

SEQ ID NO: 234451 - protein, 15 aa, Homo sapiens
  CDR3 for alpha chain variable domain of TCR clone 117226 (TRAV38-1, TRAJ26)
CAFMKHDGNGQNFVF

SEQ ID NO: 234452 - protein, 16 aa, Homo sapiens
  CDR3 for beta chain variable domain of TCR clone 117226 (TRBV7-3, TRBJ2-1)
CASSLEGYRSYNEQFF

SEQ ID NO: 234453 - protein, 15 aa, Homo sapiens
  CDR3 for alpha chain variable domain of TCR clone 117227 (TRAV25, TRAJ52)
CAGRPGGTSYGKLTF

SEQ ID NO: 234454 - protein, 15 aa, Homo sapiens
  CDR3 for beta chain variable domain of TCR clone 117227 (TRBV19, TRBJ1-1)
CASTSGQIQNTEAFF

SEQ ID NO: 234455 - protein, 12 aa, Homo sapiens
  CDR3 for alpha chain variable domain of TCR clone 117228 (TRAV8-3, TRAJ26)
CAGDNYGQNFVF

SEQ ID NO: 234456 - protein, 14 aa, Homo sapiens
  CDR3 for beta chain variable domain of TCR clone 117228 (TRBV20-1, TRBJ2-7)
CSAWTALSSYEQYF

SEQ ID NO: 234457 - protein, 17 aa, Homo sapiens
  CDR3 for alpha chain variable domain of TCR clone 117229 (TRAV3, TRAJ6)
CAVRDGPRAGGSYIPTF

SEQ ID NO: 234458 - protein, 16 aa, Homo sapiens
  CDR3 for beta chain variable domain of TCR clone 117229 (TRBV11-2, TRBJ1-2)
CASSLDTGGADYGYTF

SEQ ID NO: 234459 - protein, 18 aa, Homo sapiens
  CDR3 for alpha chain variable domain of TCR clone 117230 (TRAV21, TRAJ52)
CAVSPSPAGGTSYGKLTF

SEQ ID NO: 234460 - protein, 15 aa, Homo sapiens
  CDR3 for beta chain variable domain of TCR clone 117230 (TRBV19, TRBJ1-1)
CASTSGQIQNTEAFF

SEQ ID NO: 234461 - protein, 15 aa, Homo sapiens
  CDR3 for alpha chain variable domain of TCR clone 117231 (TRAV26-1, TRAJ3)
CIVRSGYSRASKIIF

SEQ ID NO: 234462 - protein, 14 aa, Homo sapiens
  CDR3 for beta chain variable domain of TCR clone 117231 (TRBV13, TRBJ2-5)
CASYRRLAEETQYF

SEQ ID NO: 234463 - protein, 13 aa, Homo sapiens
  CDR3 for alpha chain variable domain of TCR clone 117232 (TRAV20, TRAJ31)
CAVQAIGGARLMF

SEQ ID NO: 234464 - protein, 14 aa, Homo sapiens
  CDR3 for beta chain variable domain of TCR clone 117232 (TRBV2, TRBJ1-5)
CASSGTGSNQPQHF

SEQ ID NO: 234465 - protein, 14 aa, Homo sapiens
  CDR3 for alpha chain variable domain of TCR clone 117233 (TRAV1-2, TRAJ16)
YAVNRFSDGQKLLF

SEQ ID NO: 234466 - protein, 16 aa, Homo sapiens
  CDR3 for beta chain variable domain of TCR clone 117233 (TRBV11-2, TRBJ1-1)
CASSLRQGGEHSKAFF

SEQ ID NO: 234467 - protein, 14 aa, Homo sapiens
  CDR3 for alpha chain variable domain of TCR clone 117234 (TRAV35, TRAJ13)
CAGSPSGGYQKVTF

SEQ ID NO: 234468 - protein, 13 aa, Homo sapiens
  CDR3 for beta chain variable domain of TCR clone 117234 (TRBV29-1, TRBJ1-1)
CSVGDSRNTEDFF

SEQ ID NO: 234469 - protein, 12 aa, Homo sapiens
  CDR3 for alpha chain variable domain of TCR clone 117235 (TRAV29/DV5, TRAJ26)
CAAIPSGQNFFF

SEQ ID NO: 234470 - protein, 15 aa, Homo sapiens
  CDR3 for beta chain variable domain of TCR clone 117235 (TRBV19, TRBJ1-5)
CASSDSGPRNQPQHF

SEQ ID NO: 234471 - protein, 14 aa, Homo sapiens
  CDR3 for alpha chain variable domain of TCR clone 117236 (TRAV12-2, TRAJ53)
CAVKGVGSNYKLTF

SEQ ID NO: 234472 - protein, 14 aa, Homo sapiens
  CDR3 for beta chain variable domain of TCR clone 117236 (TRBV7-7, TRBJ2-2)
CATRQDSDTGELFF

SEQ ID NO: 234473 - protein, 13 aa, Homo sapiens
  CDR3 for alpha chain variable domain of TCR clone 117237 (TRAV2, TRAJ40)
CAVVTSGTYKYIF

SEQ ID NO: 234474 - protein, 15 aa, Homo sapiens
  CDR3 for beta chain variable domain of TCR clone 117237 (TRBV20-1, TRBJ2-7)
CSARVPAAYFYEQYF

SEQ ID NO: 234475 - protein, 14 aa, Homo sapiens
  CDR3 for alpha chain variable domain of TCR clone 117238 (TRAV1-2, TRAJ16)
SAVNRFSDGQKLLF

SEQ ID NO: 234476 - protein, 13 aa, Homo sapiens
  CDR3 for beta chain variable domain of TCR clone 117238 (TRBV7-9, TRBJ1-2)
CASSLKQNYGYTF

SEQ ID NO: 234477 - protein, 15 aa, Homo sapiens
  CDR3 for alpha chain variable domain of TCR clone 117239 (TRAV8-1, TRAJ6)
CAVNTPPGGSDIPTF

SEQ ID NO: 234478 - protein, 14 aa, Homo sapiens
  CDR3 for beta chain variable domain of TCR clone 117239 (TRBV12-4, TRBJ2-1)
CASSLGQGASEQFF

SEQ ID NO: 234479 - protein, 14 aa, Homo sapiens
  CDR3 for alpha chain variable domain of TCR clone 117240 (TRAV1-1, TRAJ23)
CAVSIYNQGGKLIF

SEQ ID NO: 234480 - protein, 13 aa, Homo sapiens
  CDR3 for beta chain variable domain of TCR clone 117240 (TRBV15, TRBJ2-7)
CATSTTGHYEQYF

SEQ ID NO: 234481 - protein, 14 aa, Homo sapiens
  CDR3 for alpha chain variable domain of TCR clone 117241 (TRAV13-1, TRAJ44)
CAAKATGTASKLTF

SEQ ID NO: 234482 - protein, 15 aa, Homo sapiens
  CDR3 for beta chain variable domain of TCR clone 117241 (TRBV10-3, TRBJ2-3)
CAISLTSGGTDTQYF

SEQ ID NO: 234483 - protein, 14 aa, Homo sapiens
  CDR3 for alpha chain variable domain of TCR clone 117242 (TRAV29/DV5, TRAJ32)
CAAAYGGATNKLIF

SEQ ID NO: 234484 - protein, 18 aa, Homo sapiens
  CDR3 for beta chain variable domain of TCR clone 117242 (TRBV4-1, TRBJ2-3)
CASSHQLAGGRSTDTQYF

SEQ ID NO: 234485 - protein, 12 aa, Homo sapiens
  CDR3 for alpha chain variable domain of TCR clone 117243 (TRAV26-2, TRAJ48)
CILSKGNEKLTF

SEQ ID NO: 234486 - protein, 14 aa, Homo sapiens
  CDR3 for beta chain variable domain of TCR clone 117243 (TRBV28, TRBJ2-7)
CASSTLRGRFEQYF

SEQ ID NO: 234487 - protein, 10 aa, Homo sapiens
  CDR3 for alpha chain variable domain of TCR clone 117244 (TRAV1-2, TRAJ31)
CAFFDARLMF

SEQ ID NO: 234488 - protein, 14 aa, Homo sapiens
  CDR3 for beta chain variable domain of TCR clone 117244 (TRBV5-1, TRBJ2-3)
CASSLFGPTDTQYF

SEQ ID NO: 234489 - protein, 12 aa, Homo sapiens
  CDR3 for alpha chain variable domain of TCR clone 117245 (TRAV13-1, TRAJ49)
CAASPMGNQFYF

SEQ ID NO: 234490 - protein, 13 aa, Homo sapiens
  CDR3 for beta chain variable domain of TCR clone 117245 (TRBV12-4, TRBJ2-7)
CASSPTETYEQYF

SEQ ID NO: 234491 - protein, 16 aa, Homo sapiens
  CDR3 for alpha chain variable domain of TCR clone 117246 (TRAV30, TRAJ24)
CGTAIVDADSWGKFQF

SEQ ID NO: 234492 - protein, 14 aa, Homo sapiens
  CDR3 for beta chain variable domain of TCR clone 117246 (TRBV12-5, TRBJ2-5)
CASGSRTHQGTQYF

SEQ ID NO: 234493 - protein, 15 aa, Homo sapiens
  CDR3 for alpha chain variable domain of TCR clone 117247 (TRAV12-1, TRAJ10)
CVVNKLTGGVNKLTF

SEQ ID NO: 234494 - protein, 17 aa, Homo sapiens
  CDR3 for beta chain variable domain of TCR clone 117247 (TRBV5-1, TRBJ1-6)
CASSPSLQGSDNSPLHF

SEQ ID NO: 234495 - protein, 13 aa, Homo sapiens
  CDR3 for alpha chain variable domain of TCR clone 117248 (TRAV3, TRAJ20)
CAVRDTGDYKLSF

SEQ ID NO: 234496 - protein, 14 aa, Homo sapiens
  CDR3 for beta chain variable domain of TCR clone 117248 (TRBV7-2, TRBJ2-7)
CASSLRRGFGEQYF

SEQ ID NO: 234497 - protein, 14 aa, Homo sapiens
  CDR3 for alpha chain variable domain of TCR clone 117249 (TRAV23/DV6, TRAJ49)
CAASKSFVGNQFYF

SEQ ID NO: 234498 - protein, 11 aa, Homo sapiens
  CDR3 for beta chain variable domain of TCR clone 117249 (TRBV7-3, TRBJ2-5)
CASSLSETQYF

SEQ ID NO: 234499 - protein, 12 aa, Homo sapiens
  CDR3 for alpha chain variable domain of TCR clone 117250 (TRAV2, TRAJ9)
CAVGAGGFKTIF

SEQ ID NO: 234500 - protein, 18 aa, Homo sapiens
  CDR3 for beta chain variable domain of TCR clone 117250 (TRBV12-4, TRBJ2-2)
CASSLVAGTRGRTGELFF

SEQ ID NO: 234501 - protein, 13 aa, Homo sapiens
  CDR3 for alpha chain variable domain of TCR clone 117251 (TRAV2, TRAJ15)
CAVASQAGTALIF

SEQ ID NO: 234502 - protein, 13 aa, Homo sapiens
  CDR3 for beta chain variable domain of TCR clone 117251 (TRBV5-5, TRBJ2-2)
CASTLGGAGELFF

SEQ ID NO: 234503 - protein, 10 aa, Homo sapiens
  CDR3 for alpha chain variable domain of TCR clone 117252 (TRAV1-2, TRAJ23)
CAGQGGKLIF

SEQ ID NO: 234504 - protein, 16 aa, Homo sapiens
  CDR3 for beta chain variable domain of TCR clone 117252 (TRBV11-2, TRBJ1-1)
CASSVRQGGEHSKAFF

SEQ ID NO: 234505 - protein, 12 aa, Homo sapiens
  CDR3 for alpha chain variable domain of TCR clone 117253 (TRAV17, TRAJ57)
CATDGGSEKLVF

SEQ ID NO: 234506 - protein, 15 aa, Homo sapiens
  CDR3 for beta chain variable domain of TCR clone 117253 (TRBV5-1, TRBJ2-3)
CASSLGQGGGDTQYF

SEQ ID NO: 234507 - protein, 14 aa, Homo sapiens
  CDR3 for alpha chain variable domain of TCR clone 117254 (TRAV12-3, TRAJ58)
CAMSTETSGSRLAF

SEQ ID NO: 234508 - protein, 15 aa, Homo sapiens
  CDR3 for beta chain variable domain of TCR clone 117254 (TRBV4-1, TRBJ1-4)
CASSDTGGTNEKLFF

SEQ ID NO: 234509 - protein, 13 aa, Homo sapiens
  CDR3 for alpha chain variable domain of TCR clone 117255 (TRAV21, TRAJ45)
CAAPGGGADGLTF

SEQ ID NO: 234510 - protein, 12 aa, Homo sapiens
  CDR3 for beta chain variable domain of TCR clone 117255 (TRBV7-9, TRBJ1-5)
CASSPQGQPQHF

SEQ ID NO: 234511 - protein, 15 aa, Homo sapiens
  CDR3 for alpha chain variable domain of TCR clone 117256 (TRAV26-1, TRAJ40)
CIVRAVPTGTYKYIF

SEQ ID NO: 234512 - protein, 14 aa, Homo sapiens
  CDR3 for beta chain variable domain of TCR clone 117256 (TRBV19, TRBJ2-1)
CASKDPGLANEQFF

SEQ ID NO: 234513 - protein, 13 aa, Homo sapiens
  CDR3 for alpha chain variable domain of TCR clone 117257 (TRAV38-1, TRAJ42)
CARWGGSQGNLIF

SEQ ID NO: 234514 - protein, 15 aa, Homo sapiens
  CDR3 for beta chain variable domain of TCR clone 117257 (TRBV20-1, TRBJ2-7)
CSARDRVSGMDEQYF

SEQ ID NO: 234515 - protein, 12 aa, Homo sapiens
  CDR3 for alpha chain variable domain of TCR clone 117258 (TRAV1-1, TRAJ43)
CAPRVSSNDMRF

SEQ ID NO: 234516 - protein, 14 aa, Homo sapiens
  CDR3 for beta chain variable domain of TCR clone 117258 (TRBV7-2, TRBJ2-7)
CASSPKTSFYEQYF

SEQ ID NO: 234517 - protein, 13 aa, Homo sapiens
  CDR3 for alpha chain variable domain of TCR clone 117259 (TRAV27, TRAJ11)
CAGARSGYSTLTF

SEQ ID NO: 234518 - protein, 16 aa, Homo sapiens
  CDR3 for beta chain variable domain of TCR clone 117259 (TRBV10-2, TRBJ2-2)
RASSESRDRGSGELFF

SEQ ID NO: 234519 - protein, 16 aa, Homo sapiens
  CDR3 for alpha chain variable domain of TCR clone 117260 (TRAV23/DV6, TRAJ52)
CAARPSGGTSYGKLTF

SEQ ID NO: 234520 - protein, 13 aa, Homo sapiens
  CDR3 for beta chain variable domain of TCR clone 117260 (TRBV7-9, TRBJ1-1)
CASSLAGETEAFF

SEQ ID NO: 234521 - protein, 12 aa, Homo sapiens
  CDR3 for alpha chain variable domain of TCR clone 117261 (TRAV29/DV5, TRAJ43)
CAAPYNNNDMRF

SEQ ID NO: 234522 - protein, 15 aa, Homo sapiens
  CDR3 for beta chain variable domain of TCR clone 117261 (TRBV7-3, TRBJ2-1)
CASSLDGNSYNEQFF

SEQ ID NO: 234523 - protein, 15 aa, Homo sapiens
  CDR3 for alpha chain variable domain of TCR clone 117262 (TRAV20, TRAJ45)
CAVQETGGGADGLTF

SEQ ID NO: 234524 - protein, 16 aa, Homo sapiens
  CDR3 for beta chain variable domain of TCR clone 117262 (TRBV29-1, TRBJ2-7)
CSVEDAEDGTAYEQYF

SEQ ID NO: 234525 - protein, 14 aa, Homo sapiens
  CDR3 for alpha chain variable domain of TCR clone 117263 (TRAV1-2, TRAJ15)
CAVRDRQAGTALIF

SEQ ID NO: 234526 - protein, 13 aa, Homo sapiens
  CDR3 for beta chain variable domain of TCR clone 117263 (TRBV19, TRBJ2-5)
CASSMGGAGTQYF

SEQ ID NO: 234527 - protein, 13 aa, Homo sapiens
  CDR3 for alpha chain variable domain of TCR clone 117264 (TRAV8-3, TRAJ44)
CAVVPGTASKLTF

SEQ ID NO: 234528 - protein, 13 aa, Homo sapiens
  CDR3 for beta chain variable domain of TCR clone 117264 (TRBV7-8, TRBJ2-7)
CASSLTGGREQYF

SEQ ID NO: 234529 - protein, 15 aa, Homo sapiens
  CDR3 for alpha chain variable domain of TCR clone 117265 (TRAV25, TRAJ52)
CAGTSGGTSYGKLTF

SEQ ID NO: 234530 - protein, 16 aa, Homo sapiens
  CDR3 for beta chain variable domain of TCR clone 117265 (TRBV15, TRBJ1-2)
CATSRGPRTVGGGYTF

SEQ ID NO: 234531 - protein, 14 aa, Homo sapiens
  CDR3 for alpha chain variable domain of TCR clone 117266 (TRAV23/DV6, TRAJ3)
CAASMASSAPKIIF

SEQ ID NO: 234532 - protein, 13 aa, Homo sapiens
  CDR3 for beta chain variable domain of TCR clone 117266 (TRBV27, TRBJ2-5)
CASFSRGLETQYF

SEQ ID NO: 234533 - protein, 14 aa, Homo sapiens
  CDR3 for alpha chain variable domain of TCR clone 117267 (TRAV2, TRAJ9)
CAVEDRSGGFKTIF

SEQ ID NO: 234534 - protein, 12 aa, Homo sapiens
  CDR3 for beta chain variable domain of TCR clone 117267 (TRBV7-3, TRBJ2-1)
CASSFINNEQFF

SEQ ID NO: 234535 - protein, 16 aa, Homo sapiens
  CDR3 for alpha chain variable domain of TCR clone 117268 (TRAV3, TRAJ37)
CAVRGKGPGNTGKLIF

SEQ ID NO: 234536 - protein, 16 aa, Homo sapiens
  CDR3 for beta chain variable domain of TCR clone 117268 (TRBV12-5, TRBJ2-5)
CASGPRTSGSQETQYF

SEQ ID NO: 234537 - protein, 15 aa, Homo sapiens
  CDR3 for alpha chain variable domain of TCR clone 117269 (TRAV12-3, TRAJ6)
CAMSATSGGSYIPTF

SEQ ID NO: 234538 - protein, 16 aa, Homo sapiens
  CDR3 for beta chain variable domain of TCR clone 117269 (TRBV20-1, TRBJ1-2)
CSASTFGGAENYGYTF

SEQ ID NO: 234539 - protein, 14 aa, Homo sapiens
  CDR3 for alpha chain variable domain of TCR clone 117270 (TRAV12-2, TRAJ11)
CAVEGGSGYSTLTF

SEQ ID NO: 234540 - protein, 15 aa, Homo sapiens
  CDR3 for beta chain variable domain of TCR clone 117270 (TRBV7-9, TRBJ1-5)
CASSQGHQPNQPQHF

SEQ ID NO: 234541 - protein, 20 aa, Homo sapiens
  CDR3 for alpha chain variable domain of TCR clone 117271 (TRAV12-1, TRAJ42)
SSVIQPPTSVKGGSQGNLIF

SEQ ID NO: 234542 - protein, 13 aa, Homo sapiens
  CDR3 for beta chain variable domain of TCR clone 117271 (TRBV11-2, TRBJ1-1)
CASSLETSTEAFF

SEQ ID NO: 234543 - protein, 15 aa, Homo sapiens
  CDR3 for alpha chain variable domain of TCR clone 117272 (TRAV27, TRAJ38)
CAARRNAGNNRTLIW

SEQ ID NO: 234544 - protein, 13 aa, Homo sapiens
  CDR3 for beta chain variable domain of TCR clone 117272 (TRBV28, TRBJ2-5)
CAGVSRGEETQYF

SEQ ID NO: 234545 - protein, 16 aa, Homo sapiens
  CDR3 for alpha chain variable domain of TCR clone 117273 (TRAV12-1, TRAJ42)
CVVTPYYGGSQGSLIF

SEQ ID NO: 234546 - protein, 15 aa, Homo sapiens
  CDR3 for beta chain variable domain of TCR clone 117273 (TRBV4-3, TRBJ2-7)
CASSQGGRGIYEQYF

SEQ ID NO: 234547 - protein, 12 aa, Homo sapiens
  CDR3 for alpha chain variable domain of TCR clone 117274 (TRAV13-1, TRAJ53)
AASGGSNYKLTF

SEQ ID NO: 234548 - protein, 15 aa, Homo sapiens
  CDR3 for beta chain variable domain of TCR clone 117274 (TRBV5-1, TRBJ2-1)
CASSPPRAPYNEQFL

SEQ ID NO: 234549 - protein, 12 aa, Homo sapiens
  CDR3 for alpha chain variable domain of TCR clone 117275 (TRAV13-1, TRAJ15)
CAASQAGTALIF

SEQ ID NO: 234550 - protein, 14 aa, Homo sapiens
  CDR3 for beta chain variable domain of TCR clone 117275 (TRBV19, TRBJ2-1)
CASPTFVLSGGQFF

SEQ ID NO: 234551 - protein, 14 aa, Homo sapiens
  CDR3 for alpha chain variable domain of TCR clone 117276 (TRAV12-3, TRAJ12)
CAMSALDSSYKLIF

SEQ ID NO: 234552 - protein, 16 aa, Homo sapiens
  CDR3 for beta chain variable domain of TCR clone 117276 (TRBV7-9, TRBJ2-3)
CASSLQGSPGTDTQYF

SEQ ID NO: 234553 - protein, 13 aa, Homo sapiens
  CDR3 for alpha chain variable domain of TCR clone 117277 (TRAV12-1, TRAJ40)
CVVPTSGTYKYIF

SEQ ID NO: 234554 - protein, 18 aa, Homo sapiens
  CDR3 for beta chain variable domain of TCR clone 117277 (TRBV7-6, TRBJ2-1)
CASSPRTSGMSSYKEQFF

SEQ ID NO: 234555 - protein, 13 aa, Homo sapiens
  CDR3 for alpha chain variable domain of TCR clone 117278 (TRAV30, TRAJ24)
CGTVTDSWGKLQF

SEQ ID NO: 234556 - protein, 14 aa, Homo sapiens
  CDR3 for beta chain variable domain of TCR clone 117278 (TRBV12-4, TRBJ1-6)
CASSPGQGNSPLHF

SEQ ID NO: 234557 - protein, 14 aa, Homo sapiens
  CDR3 for alpha chain variable domain of TCR clone 117279 (TRAV1-2, TRAJ8)
CAVREDTGFQKLVF

SEQ ID NO: 234558 - protein, 15 aa, Homo sapiens
  CDR3 for beta chain variable domain of TCR clone 117279 (TRBV7-3, TRBJ2-1)
CASSLGQGPFGEQFF

SEQ ID NO: 234559 - protein, 14 aa, Homo sapiens
  CDR3 for alpha chain variable domain of TCR clone 117280 (TRAV1-2, TRAJ8)
CAVREDTGFQKLVF

SEQ ID NO: 234560 - protein, 15 aa, Homo sapiens
  CDR3 for beta chain variable domain of TCR clone 117280 (TRBV19, TRBJ2-7)
CASRPTPGLSIEQYF

SEQ ID NO: 234561 - protein, 19 aa, Homo sapiens
  CDR3 for alpha chain variable domain of TCR clone 117281 (TRAV26-1, TRAJ52)
CIVRAHRNAGGTSYGKLTF

SEQ ID NO: 234562 - protein, 15 aa, Homo sapiens
  CDR3 for beta chain variable domain of TCR clone 117281 (TRBV12-4, TRBJ2-5)
CASSPPTCLQETQYF

SEQ ID NO: 234563 - protein, 16 aa, Homo sapiens
  CDR3 for alpha chain variable domain of TCR clone 117282 (TRAV20, TRAJ10)
CAVLRGLTGGGNKLTF

SEQ ID NO: 234564 - protein, 14 aa, Homo sapiens
  CDR3 for beta chain variable domain of TCR clone 117282 (TRBV19, TRBJ1-5)
CASRAPDSFLSQHC

SEQ ID NO: 234565 - protein, 13 aa, Homo sapiens
  CDR3 for alpha chain variable domain of TCR clone 117283 (TRAV12-2, TRAJ30)
CAVNLNRDDKIIF

SEQ ID NO: 234566 - protein, 13 aa, Homo sapiens
  CDR3 for beta chain variable domain of TCR clone 117283 (TRBV24-1, TRBJ1-5)
CATSDRGDQPQHF

SEQ ID NO: 234567 - protein, 14 aa, Homo sapiens
  CDR3 for alpha chain variable domain of TCR clone 117284 (TRAV26-1, TRAJ45)
CIEVTGGGGDGLTF

SEQ ID NO: 234568 - protein, 13 aa, Homo sapiens
  CDR3 for beta chain variable domain of TCR clone 117284 (TRBV7-6, TRBJ1-2)
CASSLVADYGYTF

SEQ ID NO: 234569 - protein, 14 aa, Homo sapiens
  CDR3 for alpha chain variable domain of TCR clone 117285 (TRAV4, TRAJ9)
FLVGSGTGGFKTIF

SEQ ID NO: 234570 - protein, 15 aa, Homo sapiens
  CDR3 for beta chain variable domain of TCR clone 117285 (TRBV7-2, TRBJ2-1)
CASSLASGRVNEQFF

SEQ ID NO: 234571 - protein, 16 aa, Homo sapiens
  CDR3 for alpha chain variable domain of TCR clone 117286 (TRAV26-1, TRAJ37)
CIVRGDGSGNTGKLIF

SEQ ID NO: 234572 - protein, 17 aa, Homo sapiens
  CDR3 for beta chain variable domain of TCR clone 117286 (TRBV4-1, TRBJ2-7)
CTSSRDPLGVRGGEQYF

SEQ ID NO: 234573 - protein, 14 aa, Homo sapiens
  CDR3 for alpha chain variable domain of TCR clone 117287 (TRAV8-3, TRAJ35)
CAVVPQGFGNVLHC

SEQ ID NO: 234574 - protein, 14 aa, Homo sapiens
  CDR3 for beta chain variable domain of TCR clone 117287 (TRBV18, TRBJ2-5)
CASSPGVSQETQYF

SEQ ID NO: 234575 - protein, 14 aa, Homo sapiens
  CDR3 for alpha chain variable domain of TCR clone 117288 (TRAV13-1, TRAJ35)
CAASKGGFGNVWHC

SEQ ID NO: 234576 - protein, 13 aa, Homo sapiens
  CDR3 for beta chain variable domain of TCR clone 117288 (TRBV7-3, TRBJ1-1)
CASSQDWGAEAFF

SEQ ID NO: 234577 - protein, 14 aa, Homo sapiens
  CDR3 for alpha chain variable domain of TCR clone 117289 (TRAV12-1, TRAJ17)
CVVNYKAAGNKLTF

SEQ ID NO: 234578 - protein, 15 aa, Homo sapiens
  CDR3 for beta chain variable domain of TCR clone 117289 (TRBV7-9, TRBJ1-4)
CASSARTGGNEKLFF

SEQ ID NO: 234579 - protein, 16 aa, Homo sapiens
  CDR3 for alpha chain variable domain of TCR clone 117290 (TRAV30, TRAJ24)
CGTAIVDADSWGKFQF

SEQ ID NO: 234580 - protein, 15 aa, Homo sapiens
  CDR3 for beta chain variable domain of TCR clone 117290 (TRBV28, TRBJ2-1)
CASSIIAGGRSEQFF

SEQ ID NO: 234581 - protein, 14 aa, Homo sapiens
  CDR3 for alpha chain variable domain of TCR clone 117291 (TRAV12-1, TRAJ32)
CVVRWKGCYKQAHL

SEQ ID NO: 234582 - protein, 13 aa, Homo sapiens
  CDR3 for beta chain variable domain of TCR clone 117291 (TRBV18, TRBJ2-7)
CASSPGRNYEQYL

SEQ ID NO: 234583 - protein, 12 aa, Homo sapiens
  CDR3 for alpha chain variable domain of TCR clone 117292 (TRAV17, TRAJ20)
CATDSNDYKLSF

SEQ ID NO: 234584 - protein, 17 aa, Homo sapiens
  CDR3 for beta chain variable domain of TCR clone 117292 (TRBV5-1, TRBJ2-2)
CASSLAGLGGGTGELFF

SEQ ID NO: 234585 - protein, 13 aa, Homo sapiens
  CDR3 for alpha chain variable domain of TCR clone 117293 (TRAV23/DV6, TRAJ22)
CAPNSGSARQLTF

SEQ ID NO: 234586 - protein, 13 aa, Homo sapiens
  CDR3 for beta chain variable domain of TCR clone 117293 (TRBV6-1, TRBJ1-1)
CASSRQGNTEAFF

SEQ ID NO: 234587 - protein, 16 aa, Homo sapiens
  CDR3 for alpha chain variable domain of TCR clone 117294 (TRAV35, TRAJ28)
CAGYLYSGAGSYHLTF

SEQ ID NO: 234588 - protein, 16 aa, Homo sapiens
  CDR3 for beta chain variable domain of TCR clone 117294 (TRBV5-1, TRBJ2-1)
CASSHGLAGPQNEQFF

SEQ ID NO: 234589 - protein, 12 aa, Homo sapiens
  CDR3 for alpha chain variable domain of TCR clone 117295 (TRAV17, TRAJ12)
CATLRSSYKLIF

SEQ ID NO: 234590 - protein, 18 aa, Homo sapiens
  CDR3 for beta chain variable domain of TCR clone 117295 (TRBV28, TRBJ2-7)
CASSLFLRQGAPSSNSGR

SEQ ID NO: 234591 - protein, 12 aa, Homo sapiens
  CDR3 for alpha chain variable domain of TCR clone 117296 (TRAV8-4, TRAJ54)
CCDRGGAQKLVF

SEQ ID NO: 234592 - protein, 16 aa, Homo sapiens
  CDR3 for beta chain variable domain of TCR clone 117296 (TRBV2, TRBJ2-6)
CASSEVGGAGANVLTF

SEQ ID NO: 234593 - protein, 18 aa, Homo sapiens
  CDR3 for alpha chain variable domain of TCR clone 117297 (TRAV21, TRAJ53)
CAVKGGENSGGSNNKLTF

SEQ ID NO: 234594 - protein, 13 aa, Homo sapiens
  CDR3 for beta chain variable domain of TCR clone 117297 (TRBV9, TRBJ2-1)
CASSPSGGSEQFF

SEQ ID NO: 234595 - protein, 15 aa, Homo sapiens
  CDR3 for alpha chain variable domain of TCR clone 117298 (TRAV3, TRAJ5)
CAVRDRKTGRRALTF

SEQ ID NO: 234596 - protein, 14 aa, Homo sapiens
  CDR3 for beta chain variable domain of TCR clone 117298 (TRBV19, TRBJ2-1)
CASPTFVLSGEQFF

SEQ ID NO: 234597 - protein, 11 aa, Homo sapiens
  CDR3 for alpha chain variable domain of TCR clone 117299 (TRAV12-3, TRAJ49)
CAMSSGNQFYF

SEQ ID NO: 234598 - protein, 17 aa, Homo sapiens
  CDR3 for beta chain variable domain of TCR clone 117299 (TRBV5-7, TRBJ2-7)
CASSLWRVLAGSYGQYF

SEQ ID NO: 234599 - protein, 14 aa, Homo sapiens
  CDR3 for alpha chain variable domain of TCR clone 117300 (TRAV1-2, TRAJ8)
CAVREDTGFQKLVF

SEQ ID NO: 234600 - protein, 14 aa, Homo sapiens
  CDR3 for beta chain variable domain of TCR clone 117300 (TRBV19, TRBJ1-2)
CASSLQGQAYGYTF

SEQ ID NO: 234601 - protein, 15 aa, Homo sapiens
  CDR3 for alpha chain variable domain of TCR clone 117301 (TRAV1-1, TRAJ20)
CAVSDNVANDYKLSF

SEQ ID NO: 234602 - protein, 13 aa, Homo sapiens
  CDR3 for beta chain variable domain of TCR clone 117301 (TRBV4-1, TRBJ2-2)
CASSQENTGELFF

SEQ ID NO: 234603 - protein, 13 aa, Homo sapiens
  CDR3 for alpha chain variable domain of TCR clone 117302 (TRAV1-2, TRAJ20)
CAVPRSNDYRLSF

SEQ ID NO: 234604 - protein, 14 aa, Homo sapiens
  CDR3 for beta chain variable domain of TCR clone 117302 (TRBV20-1, TRBJ2-7)
CSARYGTTYYEQYF

SEQ ID NO: 234605 - protein, 13 aa, Homo sapiens
  CDR3 for alpha chain variable domain of TCR clone 117303 (TRAV8-3, TRAJ43)
CAVGPDNNNGMRC

SEQ ID NO: 234606 - protein, 14 aa, Homo sapiens
  CDR3 for beta chain variable domain of TCR clone 117303 (TRBV19, TRBJ2-1)
CASPTFVLSGEQFF

SEQ ID NO: 234607 - protein, 11 aa, Homo sapiens
  CDR3 for alpha chain variable domain of TCR clone 117304 (TRAV35, TRAJ30)
CAPGGDDKIIF

SEQ ID NO: 234608 - protein, 14 aa, Homo sapiens
  CDR3 for beta chain variable domain of TCR clone 117304 (TRBV7-7, TRBJ2-1)
CASSLGGGADEQFF

SEQ ID NO: 234609 - protein, 13 aa, Homo sapiens
  CDR3 for alpha chain variable domain of TCR clone 117305 (TRAV8-4, TRAJ10)
CAAFTGGGNKLTF

SEQ ID NO: 234610 - protein, 12 aa, Homo sapiens
  CDR3 for beta chain variable domain of TCR clone 117305 (TRBV12-5, TRBJ2-5)
RASGQGVETQYF

SEQ ID NO: 234611 - protein, 16 aa, Homo sapiens
  CDR3 for alpha chain variable domain of TCR clone 117306 (TRAV26-1, TRAJ53)
CNVRVAMGGSNYKLTF

SEQ ID NO: 234612 - protein, 12 aa, Homo sapiens
  CDR3 for beta chain variable domain of TCR clone 117306 (TRBV7-9, TRBJ1-5)
CASSPQGQPQHF

SEQ ID NO: 234613 - protein, 13 aa, Homo sapiens
  CDR3 for alpha chain variable domain of TCR clone 117307 (TRAV8-6, TRAJ9)
CAVKNTGGFKTIF

SEQ ID NO: 234614 - protein, 14 aa, Homo sapiens
  CDR3 for beta chain variable domain of TCR clone 117307 (TRBV19, TRBJ2-1)
CASPTFALSGEQFF

SEQ ID NO: 234615 - protein, 20 aa, Homo sapiens
  CDR3 for alpha chain variable domain of TCR clone 117308 (TRAV8-3, TRAJ44)
LSTSVLWVRLYTGTASKLPF

SEQ ID NO: 234616 - protein, 15 aa, Homo sapiens
  CDR3 for beta chain variable domain of TCR clone 117308 (TRBV6-5, TRBJ1-2)
CASSYSQAFNYGYTF

SEQ ID NO: 234617 - protein, 13 aa, Homo sapiens
  CDR3 for alpha chain variable domain of TCR clone 117309 (TRAV17, TRAJ9)
CATAITVGFKTIF

SEQ ID NO: 234618 - protein, 16 aa, Homo sapiens
  CDR3 for beta chain variable domain of TCR clone 117309 (TRBV15, TRBJ2-1)
CATSRNLAGGYNEQFF

SEQ ID NO: 234619 - protein, 15 aa, Homo sapiens
  CDR3 for alpha chain variable domain of TCR clone 117310 (TRAV36/DV7, TRAJ53)
CAVEGSGGSNYKLTF

SEQ ID NO: 234620 - protein, 16 aa, Homo sapiens
  CDR3 for beta chain variable domain of TCR clone 117310 (TRBV27, TRBJ2-2)
CASSLSGFRVTGELFF

SEQ ID NO: 234621 - protein, 16 aa, Homo sapiens
  CDR3 for alpha chain variable domain of TCR clone 117311 (TRAV3, TRAJ37)
CAVIPHGSGNTGKLIF

SEQ ID NO: 234622 - protein, 16 aa, Homo sapiens
  CDR3 for beta chain variable domain of TCR clone 117311 (TRBV20-1, TRBJ1-4)
CSAPGQGLLTNEKLFF

SEQ ID NO: 234623 - protein, 16 aa, Homo sapiens
  CDR3 for alpha chain variable domain of TCR clone 117312 (TRAV30, TRAJ24)
CGTEIVDADSWGKFQF

SEQ ID NO: 234624 - protein, 15 aa, Homo sapiens
  CDR3 for beta chain variable domain of TCR clone 117312 (TRBV3-1, TRBJ2-5)
CASSRGQASWKTQYF

SEQ ID NO: 234625 - protein, 14 aa, Homo sapiens
  CDR3 for alpha chain variable domain of TCR clone 117313 (TRAV14/DV4, TRAJ20)
CAMRESLNDYKLSF

SEQ ID NO: 234626 - protein, 14 aa, Homo sapiens
  CDR3 for beta chain variable domain of TCR clone 117313 (TRBV4-2, TRBJ2-1)
CASGLDRAYNEQFF

SEQ ID NO: 234627 - protein, 12 aa, Homo sapiens
  CDR3 for alpha chain variable domain of TCR clone 117314 (TRAV13-1, TRAJ21)
CAAKEGFNKFYF

SEQ ID NO: 234628 - protein, 13 aa, Homo sapiens
  CDR3 for beta chain variable domain of TCR clone 117314 (TRBV7-9, TRBJ1-4)
CASSLPGIEKLFF

SEQ ID NO: 234629 - protein, 12 aa, Homo sapiens
  CDR3 for alpha chain variable domain of TCR clone 117315 (TRAV3, TRAJ7)
CADLPWEQQTRF

SEQ ID NO: 234630 - protein, 13 aa, Homo sapiens
  CDR3 for beta chain variable domain of TCR clone 117315 (TRBV7-3, TRBJ2-5)
CASSFRGGETQYF

SEQ ID NO: 234631 - protein, 15 aa, Homo sapiens
  CDR3 for alpha chain variable domain of TCR clone 117316 (TRAV12-3, TRAJ44)
CAMSGLTGTASKLTF

SEQ ID NO: 234632 - protein, 15 aa, Homo sapiens
  CDR3 for beta chain variable domain of TCR clone 117316 (TRBV20-1, TRBJ2-7)
CSARTPGTITYEQYL

SEQ ID NO: 234633 - protein, 15 aa, Homo sapiens
  CDR3 for alpha chain variable domain of TCR clone 117317 (TRAV2, TRAJ9)
CAVEDRGTGGFKTIF

SEQ ID NO: 234634 - protein, 16 aa, Homo sapiens
  CDR3 for beta chain variable domain of TCR clone 117317 (TRBV7-3, TRBJ2-5)
CASSLMGGASQETQYF

SEQ ID NO: 234635 - protein, 15 aa, Homo sapiens
  CDR3 for alpha chain variable domain of TCR clone 117318 (TRAV3, TRAJ22)
CAVRDRGGSARQLTF

SEQ ID NO: 234636 - protein, 15 aa, Homo sapiens
  CDR3 for beta chain variable domain of TCR clone 117318 (TRBV7-9, TRBJ2-7)
CASSSSGLAVYEQYF

SEQ ID NO: 234637 - protein, 16 aa, Homo sapiens
  CDR3 for alpha chain variable domain of TCR clone 117319 (TRAV30, TRAJ26)
CGTESVGDNYGQNFAF

SEQ ID NO: 234638 - protein, 13 aa, Homo sapiens
  CDR3 for beta chain variable domain of TCR clone 117319 (TRBV19, TRBJ1-2)
CASSISEDYGYTF

SEQ ID NO: 234639 - protein, 16 aa, Homo sapiens
  CDR3 for alpha chain variable domain of TCR clone 117320 (TRAV12-1, TRAJ43)
CVVNPHRFGAGTRLTV

SEQ ID NO: 234640 - protein, 13 aa, Homo sapiens
  CDR3 for beta chain variable domain of TCR clone 117320 (TRBV12-4, TRBJ1-2)
CASSAGPNYGYTF

SEQ ID NO: 234641 - protein, 15 aa, Homo sapiens
  CDR3 for alpha chain variable domain of TCR clone 117321 (TRAV1-2, TRAJ10)
CAVRGFTGGGNKLTF

SEQ ID NO: 234642 - protein, 15 aa, Homo sapiens
  CDR3 for beta chain variable domain of TCR clone 117321 (TRBV3-1, TRBJ2-1)
CASSQQPSGGNEQFF

SEQ ID NO: 234643 - protein, 14 aa, Homo sapiens
  CDR3 for alpha chain variable domain of TCR clone 117322 (TRAV27, TRAJ22)
CAGLPSGSARQLTF

SEQ ID NO: 234644 - protein, 15 aa, Homo sapiens
  CDR3 for beta chain variable domain of TCR clone 117322 (TRBV4-1, TRBJ2-5)
CASSQWDLYQETQYF

SEQ ID NO: 234645 - protein, 13 aa, Homo sapiens
  CDR3 for alpha chain variable domain of TCR clone 117323 (TRAV2, TRAJ29)
CAAGNSGNTPLVF

SEQ ID NO: 234646 - protein, 16 aa, Homo sapiens
  CDR3 for beta chain variable domain of TCR clone 117323 (TRBV7-9, TRBJ1-2)
CASSPGGGAINYGNTF

SEQ ID NO: 234647 - protein, 18 aa, Homo sapiens
  CDR3 for alpha chain variable domain of TCR clone 117324 (TRAV12-3, TRAJ52)
GAMSVGGAGGTSYGKLTF

SEQ ID NO: 234648 - protein, 15 aa, Homo sapiens
  CDR3 for beta chain variable domain of TCR clone 117324 (TRBV27, TRBJ1-6)
CASSFDRGLGSPLHF

SEQ ID NO: 234649 - protein, 15 aa, Homo sapiens
  CDR3 for alpha chain variable domain of TCR clone 117325 (TRAV14/DV4, TRAJ26)
CAMREVQNYGQNFVF

SEQ ID NO: 234650 - protein, 13 aa, Homo sapiens
  CDR3 for beta chain variable domain of TCR clone 117325 (TRBV24-1, TRBJ2-2)
CATSDWSTGELFF

SEQ ID NO: 234651 - protein, 20 aa, Homo sapiens
  CDR3 for alpha chain variable domain of TCR clone 117326 (TRAV26-1, TRAJ30)
CIVRVEMTRSSLEKGHDFIF

SEQ ID NO: 234652 - protein, 18 aa, Homo sapiens
  CDR3 for beta chain variable domain of TCR clone 117326 (TRBV28, TRBJ2-1)
CASSSTSGRANSYNEQFF

SEQ ID NO: 234653 - protein, 13 aa, Homo sapiens
  CDR3 for alpha chain variable domain of TCR clone 117327 (TRAV12-3, TRAJ7)
CAMTPYGNNRLAF

SEQ ID NO: 234654 - protein, 12 aa, Homo sapiens
  CDR3 for beta chain variable domain of TCR clone 117327 (TRBV2, TRBJ2-1)
CAYGPPGNEQFF

SEQ ID NO: 234655 - protein, 19 aa, Homo sapiens
  CDR3 for alpha chain variable domain of TCR clone 117328 (TRAV26-1, TRAJ52)
CIVRAHRNAGGTSYGKLTF

SEQ ID NO: 234656 - protein, 13 aa, Homo sapiens
  CDR3 for beta chain variable domain of TCR clone 117328 (TRBV20-1, TRBJ1-6)
CSAPLGVGSPLHS

SEQ ID NO: 234657 - protein, 12 aa, Homo sapiens
  CDR3 for alpha chain variable domain of TCR clone 117329 (TRAV13-1, TRAJ40)
CAASWATYKYIF

SEQ ID NO: 234658 - protein, 14 aa, Homo sapiens
  CDR3 for beta chain variable domain of TCR clone 117329 (TRBV12-4, TRBJ1-1)
CASSLGTGGTEAFF

SEQ ID NO: 234659 - protein, 14 aa, Homo sapiens
  CDR3 for alpha chain variable domain of TCR clone 117330 (TRAV8-3, TRAJ4)
CAVGAAGGFNKLIF

SEQ ID NO: 234660 - protein, 15 aa, Homo sapiens
  CDR3 for beta chain variable domain of TCR clone 117330 (TRBV6-5, TRBJ2-1)
CASSYDAGAGNEQFF

SEQ ID NO: 234661 - protein, 16 aa, Homo sapiens
  CDR3 for alpha chain variable domain of TCR clone 117331 (TRAV3, TRAJ37)
CAVRPHGSGNTGRLIF

SEQ ID NO: 234662 - protein, 16 aa, Homo sapiens
  CDR3 for beta chain variable domain of TCR clone 117331 (TRBV9, TRBJ1-2)
CASSVEEKVSPYGYTF

SEQ ID NO: 234663 - protein, 13 aa, Homo sapiens
  CDR3 for alpha chain variable domain of TCR clone 117332 (TRAV12-1, TRAJ16)
CEVNGPDGQKLLF

SEQ ID NO: 234664 - protein, 13 aa, Homo sapiens
  CDR3 for beta chain variable domain of TCR clone 117332 (TRBV2, TRBJ1-1)
CARNPTGGFHAFF

SEQ ID NO: 234665 - protein, 16 aa, Homo sapiens
  CDR3 for alpha chain variable domain of TCR clone 117333 (TRAV12-3, TRAJ53)
CAMSPGSGGSNYKLTF

SEQ ID NO: 234666 - protein, 15 aa, Homo sapiens
  CDR3 for beta chain variable domain of TCR clone 117333 (TRBV19, TRBJ2-7)
CASSPAGSGEALRYF

SEQ ID NO: 234667 - protein, 14 aa, Homo sapiens
  CDR3 for alpha chain variable domain of TCR clone 117334 (TRAV12-2, TRAJ33)
CAVKRARSNYQLIW

SEQ ID NO: 234668 - protein, 12 aa, Homo sapiens
  CDR3 for beta chain variable domain of TCR clone 117334 (TRBV24-1, TRBJ2-3)
CATSDFTDTQYF

SEQ ID NO: 234669 - protein, 11 aa, Homo sapiens
  CDR3 for alpha chain variable domain of TCR clone 117335 (TRAV12-1, TRAJ30)
CVVNGQDTIIF

SEQ ID NO: 234670 - protein, 12 aa, Homo sapiens
  CDR3 for beta chain variable domain of TCR clone 117335 (TRBV27, TRBJ2-2)
CASKLFTGELFF

SEQ ID NO: 234671 - protein, 14 aa, Homo sapiens
  CDR3 for alpha chain variable domain of TCR clone 117336 (TRAV8-1, TRAJ34)
CAVNPSHNTDKLIF

SEQ ID NO: 234672 - protein, 16 aa, Homo sapiens
  CDR3 for beta chain variable domain of TCR clone 117336 (TRBV7-2, TRBJ2-6)
CASSLAGRSGANVLTF

SEQ ID NO: 234673 - protein, 15 aa, Homo sapiens
  CDR3 for alpha chain variable domain of TCR clone 117337 (TRAV3, TRAJ5)
CAVRDLDTGRRALTF

SEQ ID NO: 234674 - protein, 19 aa, Homo sapiens
  CDR3 for beta chain variable domain of TCR clone 117337 (TRBV4-3, TRBJ2-7)
CASSQEFIGWQVTPYEQYF

SEQ ID NO: 234675 - protein, 14 aa, Homo sapiens
  CDR3 for alpha chain variable domain of TCR clone 117338 (TRAV12-2, TRAJ36)
CAVNPPTGASNLFF

SEQ ID NO: 234676 - protein, 13 aa, Homo sapiens
  CDR3 for beta chain variable domain of TCR clone 117338 (TRBV20-1, TRBJ1-6)
CSAPTGLGSPLHF

SEQ ID NO: 234677 - protein, 17 aa, Homo sapiens
  CDR3 for alpha chain variable domain of TCR clone 117339 (TRAV3, TRAJ6)
CAVRDGPRAGGSYIPTF

SEQ ID NO: 234678 - protein, 20 aa, Homo sapiens
  CDR3 for beta chain variable domain of TCR clone 117339 (TRBV28, TRBJ2-1)
CASTPIGRSPGLGGGNEQFF

SEQ ID NO: 234679 - protein, 14 aa, Homo sapiens
  CDR3 for alpha chain variable domain of TCR clone 117340 (TRAV1-2, TRAJ8)
CAVREDTGFQKLVF

SEQ ID NO: 234680 - protein, 16 aa, Homo sapiens
  CDR3 for beta chain variable domain of TCR clone 117340 (TRBV28, TRBJ1-5)
CASSLTGQGWNQPQHF

SEQ ID NO: 234681 - protein, 12 aa, Homo sapiens
  CDR3 for alpha chain variable domain of TCR clone 117341 (TRAV3, TRAJ43)
CAVRDPNNDMRF

SEQ ID NO: 234682 - protein, 13 aa, Homo sapiens
  CDR3 for beta chain variable domain of TCR clone 117341 (TRBV7-2, TRBJ1-6)
CASSLVGSSPLHF

SEQ ID NO: 234683 - protein, 12 aa, Homo sapiens
  CDR3 for alpha chain variable domain of TCR clone 117342 (TRAV13-1, TRAJ49)
CAAPNTGNQIYF

SEQ ID NO: 234684 - protein, 17 aa, Homo sapiens
  CDR3 for beta chain variable domain of TCR clone 117342 (TRBV25-1, TRBJ2-7)
CASSDARVVFSSYEQYF

SEQ ID NO: 234685 - protein, 14 aa, Homo sapiens
  CDR3 for alpha chain variable domain of TCR clone 117343 (TRAV26-1, TRAJ24)
CIVRRVGGWGKFQF

SEQ ID NO: 234686 - protein, 13 aa, Homo sapiens
  CDR3 for beta chain variable domain of TCR clone 117343 (TRBV7-2, TRBJ2-7)
CASSSPSGSEQYF

SEQ ID NO: 234687 - protein, 12 aa, Homo sapiens
  CDR3 for alpha chain variable domain of TCR clone 117344 (TRAV26-1, TRAJ11)
CIVRVGYSTLTF

SEQ ID NO: 234688 - protein, 14 aa, Homo sapiens
  CDR3 for beta chain variable domain of TCR clone 117344 (TRBV7-6, TRBJ2-3)
CASSLGTVTDTQYF

SEQ ID NO: 234689 - protein, 15 aa, Homo sapiens
  CDR3 for alpha chain variable domain of TCR clone 117345 (TRAV40, TRAJ45)
CLLGDLGGGADGLTF

SEQ ID NO: 234690 - protein, 13 aa, Homo sapiens
  CDR3 for beta chain variable domain of TCR clone 117345 (TRBV7-9, TRBJ1-2)
CASSLKQNYVYTF

SEQ ID NO: 234691 - protein, 13 aa, Homo sapiens
  CDR3 for alpha chain variable domain of TCR clone 117346 (TRAV25, TRAJ26)
CAGMDNYGQNFVF

SEQ ID NO: 234692 - protein, 14 aa, Homo sapiens
  CDR3 for beta chain variable domain of TCR clone 117346 (TRBV25-1, TRBJ1-1)
CASTHLGGNTEAFF

SEQ ID NO: 234693 - protein, 16 aa, Homo sapiens
  CDR3 for alpha chain variable domain of TCR clone 117347 (TRAV3, TRAJ37)
CAVRGKGSGNTGKLIF

SEQ ID NO: 234694 - protein, 16 aa, Homo sapiens
  CDR3 for beta chain variable domain of TCR clone 117347 (TRBV2, TRBJ2-1)
CASSVGGSLSYNEQFF

SEQ ID NO: 234695 - protein, 14 aa, Homo sapiens
  CDR3 for alpha chain variable domain of TCR clone 117348 (TRAV2, TRAJ37)
CAVDFTSNTGKLIF

SEQ ID NO: 234696 - protein, 15 aa, Homo sapiens
  CDR3 for beta chain variable domain of TCR clone 117348 (TRBV5-1, TRBJ1-1)
CASSLAPRGNTEAFF

SEQ ID NO: 234697 - protein, 13 aa, Homo sapiens
  CDR3 for alpha chain variable domain of TCR clone 117349 (TRAV21, TRAJ15)
CAVANQAGTALIF

SEQ ID NO: 234698 - protein, 15 aa, Homo sapiens
  CDR3 for beta chain variable domain of TCR clone 117349 (TRBV6-3, TRBJ2-2)
CASSFLATLTGELFF

SEQ ID NO: 234699 - protein, 13 aa, Homo sapiens
  CDR3 for alpha chain variable domain of TCR clone 117350 (TRAV12-2, TRAJ40)
CAVKRTGTYKYIF

SEQ ID NO: 234700 - protein, 15 aa, Homo sapiens
  CDR3 for beta chain variable domain of TCR clone 117350 (TRBV12-4, TRBJ1-2)
CASSPITGGGYGYAF

SEQ ID NO: 234701 - protein, 16 aa, Homo sapiens
  CDR3 for alpha chain variable domain of TCR clone 117351 (TRAV12-1, TRAJ43)
CEVNPHRFGAGTRLTV

SEQ ID NO: 234702 - protein, 16 aa, Homo sapiens
  CDR3 for beta chain variable domain of TCR clone 117351 (TRBV27, TRBJ2-2)
CASSSTGGGDTGELFF

SEQ ID NO: 234703 - protein, 14 aa, Homo sapiens
  CDR3 for alpha chain variable domain of TCR clone 117352 (TRAV17, TRAJ34)
CATDSLEGTDKLIV

SEQ ID NO: 234704 - protein, 13 aa, Homo sapiens
  CDR3 for beta chain variable domain of TCR clone 117352 (TRBV11-2, TRBJ2-7)
CASSGTRPYEQYF

SEQ ID NO: 234705 - protein, 14 aa, Homo sapiens
  CDR3 for alpha chain variable domain of TCR clone 117353 (TRAV8-4, TRAJ15)
CAVTIREAGTALIL

SEQ ID NO: 234706 - protein, 16 aa, Homo sapiens
  CDR3 for beta chain variable domain of TCR clone 117353 (TRBV29-1, TRBJ2-6)
CSVEDITYSGANVLTF

SEQ ID NO: 234707 - protein, 13 aa, Homo sapiens
  CDR3 for alpha chain variable domain of TCR clone 117354 (TRAV12-3, TRAJ40)
CAMSARGTYKYIF

SEQ ID NO: 234708 - protein, 16 aa, Homo sapiens
  CDR3 for beta chain variable domain of TCR clone 117354 (TRBV20-1, TRBJ2-3)
CSGEAGRAGGQDTQYF

SEQ ID NO: 234709 - protein, 11 aa, Homo sapiens
  CDR3 for alpha chain variable domain of TCR clone 117355 (TRAV21, TRAJ34)
CAVTNTDKLIF

SEQ ID NO: 234710 - protein, 14 aa, Homo sapiens
  CDR3 for beta chain variable domain of TCR clone 117355 (TRBV7-2, TRBJ2-7)
CASRSQGAAYEQYF

SEQ ID NO: 234711 - protein, 15 aa, Homo sapiens
  CDR3 for alpha chain variable domain of TCR clone 117356 (TRAV12-1, TRAJ9)
CVVSFGDTGGFKTLF

SEQ ID NO: 234712 - protein, 13 aa, Homo sapiens
  CDR3 for beta chain variable domain of TCR clone 117356 (TRBV2, TRBJ1-4)
CASSERAGEKLFF

SEQ ID NO: 234713 - protein, 17 aa, Homo sapiens
  CDR3 for alpha chain variable domain of TCR clone 117357 (TRAV3, TRAJ6)
CAVRDGPRAGGSYIPTF

SEQ ID NO: 234714 - protein, 15 aa, Homo sapiens
  CDR3 for beta chain variable domain of TCR clone 117357 (TRBV9, TRBJ2-1)
CASSLAGSSYNEQFF

SEQ ID NO: 234715 - protein, 11 aa, Homo sapiens
  CDR3 for alpha chain variable domain of TCR clone 117358 (TRAV2, TRAJ33)
CAVESNYQLIW

SEQ ID NO: 234716 - protein, 14 aa, Homo sapiens
  CDR3 for beta chain variable domain of TCR clone 117358 (TRBV7-2, TRBJ2-7)
CASRSQGAAYEQYL

SEQ ID NO: 234717 - protein, 12 aa, Homo sapiens
  CDR3 for alpha chain variable domain of TCR clone 117359 (TRAV6, TRAJ9)
CALVTGGFKTIF

SEQ ID NO: 234718 - protein, 16 aa, Homo sapiens
  CDR3 for beta chain variable domain of TCR clone 117359 (TRBV7-3, TRBJ2-2)
RGTQPCIQWNTGELFF

SEQ ID NO: 234719 - protein, 15 aa, Homo sapiens
  CDR3 for alpha chain variable domain of TCR clone 117360 (TRAV3, TRAJ22)
CAVRDRGGSARQLTF

SEQ ID NO: 234720 - protein, 14 aa, Homo sapiens
  CDR3 for beta chain variable domain of TCR clone 117360 (TRBV5-4, TRBJ1-1)
CASSLDSRRDEAFF

SEQ ID NO: 234721 - protein, 16 aa, Homo sapiens
  CDR3 for alpha chain variable domain of TCR clone 117361 (TRAV30, TRAJ24)
CGTEIVDAASWGKFQF

SEQ ID NO: 234722 - protein, 16 aa, Homo sapiens
  CDR3 for beta chain variable domain of TCR clone 117361 (TRBV6-1, TRBJ2-1)
CASILRQGSSYNEQFF

SEQ ID NO: 234723 - protein, 13 aa, Homo sapiens
  CDR3 for alpha chain variable domain of TCR clone 117362 (TRAV26-2, TRAJ43)
CILRAVNNNDMRF

SEQ ID NO: 234724 - protein, 15 aa, Homo sapiens
  CDR3 for beta chain variable domain of TCR clone 117362 (TRBV7-2, TRBJ2-1)
CASTQGTGIYNEQFF

SEQ ID NO: 234725 - protein, 14 aa, Homo sapiens
  CDR3 for alpha chain variable domain of TCR clone 117363 (TRAV8-3, TRAJ39)
CAVGANNAGNMLTF

SEQ ID NO: 234726 - protein, 16 aa, Homo sapiens
  CDR3 for beta chain variable domain of TCR clone 117363 (TRBV6-1, TRBJ2-5)
CASSETLDRGAETQCF

SEQ ID NO: 234727 - protein, 12 aa, Homo sapiens
  CDR3 for alpha chain variable domain of TCR clone 117364 (TRAV1-2, TRAJ29)
CAVNSGNTPLVF

SEQ ID NO: 234728 - protein, 14 aa, Homo sapiens
  CDR3 for beta chain variable domain of TCR clone 117364 (TRBV5-4, TRBJ1-1)
CASSLDSRRDEAFF

SEQ ID NO: 234729 - protein, 13 aa, Homo sapiens
  CDR3 for alpha chain variable domain of TCR clone 117365 (TRAV13-2, TRAJ48)
CAEMDFANEKLTF

SEQ ID NO: 234730 - protein, 15 aa, Homo sapiens
  CDR3 for beta chain variable domain of TCR clone 117365 (TRBV7-9, TRBJ1-6)
CASSSPGRGNSPLHF

SEQ ID NO: 234731 - protein, 12 aa, Homo sapiens
  CDR3 for alpha chain variable domain of TCR clone 117366 (TRAV12-3, TRAJ17)
CAMTLTGNKLTF

SEQ ID NO: 234732 - protein, 16 aa, Homo sapiens
  CDR3 for beta chain variable domain of TCR clone 117366 (TRBV7-3, TRBJ2-1)
CASSLEGDRSYNEQFF

SEQ ID NO: 234733 - protein, 15 aa, Homo sapiens
  CDR3 for alpha chain variable domain of TCR clone 117367 (TRAV3, TRAJ5)
CAVRDLDTGRRALTF

SEQ ID NO: 234734 - protein, 13 aa, Homo sapiens
  CDR3 for beta chain variable domain of TCR clone 117367 (TRBV12-4, TRBJ2-7)
CASSPTATYEQYF

SEQ ID NO: 234735 - protein, 14 aa, Homo sapiens
  CDR3 for alpha chain variable domain of TCR clone 117368 (TRAV2, TRAJ37)
CAVDFTSNTGKLIF

SEQ ID NO: 234736 - protein, 14 aa, Homo sapiens
  CDR3 for beta chain variable domain of TCR clone 117368 (TRBV7-2, TRBJ1-2)
CASSQTGSTYGYTF

SEQ ID NO: 234737 - protein, 13 aa, Homo sapiens
  CDR3 for alpha chain variable domain of TCR clone 117369 (TRAV8-3, TRAJ43)
CAVVPYNNNEMRF

SEQ ID NO: 234738 - protein, 16 aa, Homo sapiens
  CDR3 for beta chain variable domain of TCR clone 117369 (TRBV7-2, TRBJ2-5)
CASSPFPTGGEETQYF

SEQ ID NO: 234739 - protein, 15 aa, Homo sapiens
  CDR3 for alpha chain variable domain of TCR clone 117370 (TRAV29/DV5, TRAJ57)
CAASLLRGGSEKPVF

SEQ ID NO: 234740 - protein, 15 aa, Homo sapiens
  CDR3 for beta chain variable domain of TCR clone 117370 (TRBV5-1, TRBJ1-3)
CASSLEGGSGNTIYF

SEQ ID NO: 234741 - protein, 16 aa, Homo sapiens
  CDR3 for alpha chain variable domain of TCR clone 117371 (TRAV13-1, TRAJ18)
CAASRMRGSTLGRLYF

SEQ ID NO: 234742 - protein, 15 aa, Homo sapiens
  CDR3 for beta chain variable domain of TCR clone 117371 (TRBV29-1, TRBJ2-1)
CSVGRHALFYNDQFF

SEQ ID NO: 234743 - protein, 16 aa, Homo sapiens
  CDR3 for alpha chain variable domain of TCR clone 117372 (TRAV8-2, TRAJ7)
CVVSEGPYYGNNRLAL

SEQ ID NO: 234744 - protein, 15 aa, Homo sapiens
  CDR3 for beta chain variable domain of TCR clone 117372 (TRBV27, TRBJ2-3)
CASSLGLAATDTQYF

SEQ ID NO: 234745 - protein, 15 aa, Homo sapiens
  CDR3 for alpha chain variable domain of TCR clone 117373 (TRAV12-1, TRAJ41)
CVVNGASNSGYALNF

SEQ ID NO: 234746 - protein, 15 aa, Homo sapiens
  CDR3 for beta chain variable domain of TCR clone 117373 (TRBV7-2, TRBJ1-5)
CARGSTGVDNQPQHF

SEQ ID NO: 234747 - protein, 14 aa, Homo sapiens
  CDR3 for alpha chain variable domain of TCR clone 117374 (TRAV12-2, TRAJ13)
CAVKKTGGYQKVTF

SEQ ID NO: 234748 - protein, 14 aa, Homo sapiens
  CDR3 for beta chain variable domain of TCR clone 117374 (TRBV7-8, TRBJ2-5)
CASSATGGQETQYF

SEQ ID NO: 234749 - protein, 13 aa, Homo sapiens
  CDR3 for alpha chain variable domain of TCR clone 117375 (TRAV12-1, TRAJ7)
CVVNMRGNNRLAF

SEQ ID NO: 234750 - protein, 14 aa, Homo sapiens
  CDR3 for beta chain variable domain of TCR clone 117375 (TRBV28, TRBJ2-1)
CASSLLQGTNEQFF

SEQ ID NO: 234751 - protein, 13 aa, Homo sapiens
  CDR3 for alpha chain variable domain of TCR clone 117376 (TRAV17, TRAJ5)
CALRGTGRRALTF

SEQ ID NO: 234752 - protein, 14 aa, Homo sapiens
  CDR3 for beta chain variable domain of TCR clone 117376 (TRBV7-2, TRBJ2-7)
CASRSQGAAYEQYF

SEQ ID NO: 234753 - protein, 16 aa, Homo sapiens
  CDR3 for alpha chain variable domain of TCR clone 117377 (TRAV26-1, TRAJ32)
CIVRTNYGGATNKLIF

SEQ ID NO: 234754 - protein, 14 aa, Homo sapiens
  CDR3 for beta chain variable domain of TCR clone 117377 (TRBV27, TRBJ1-1)
CASSVLSGLSEAFF

SEQ ID NO: 234755 - protein, 13 aa, Homo sapiens
  CDR3 for alpha chain variable domain of TCR clone 117378 (TRAV2, TRAJ40)
CAVVTSGTYKYIF

SEQ ID NO: 234756 - protein, 16 aa, Homo sapiens
  CDR3 for beta chain variable domain of TCR clone 117378 (TRBV7-9, TRBJ2-3)
CASSPWREVGTDTQYF

SEQ ID NO: 234757 - protein, 11 aa, Homo sapiens
  CDR3 for alpha chain variable domain of TCR clone 117379 (TRAV1-2, TRAJ20)
YAVANDYKLSF

SEQ ID NO: 234758 - protein, 18 aa, Homo sapiens
  CDR3 for beta chain variable domain of TCR clone 117379 (TRBV20-1, TRBJ2-6)
CSAETTPTHGSGANVLTF

SEQ ID NO: 234759 - protein, 11 aa, Homo sapiens
  CDR3 for alpha chain variable domain of TCR clone 117380 (TRAV21, TRAJ11)
CAVNGYSTLTF

SEQ ID NO: 234760 - protein, 15 aa, Homo sapiens
  CDR3 for beta chain variable domain of TCR clone 117380 (TRBV12-4, TRBJ2-5)
CASSPPTGLQETQYF

SEQ ID NO: 234761 - protein, 11 aa, Homo sapiens
  CDR3 for alpha chain variable domain of TCR clone 117381 (TRAV12-2, TRAJ49)
CALQGSNQFYF

SEQ ID NO: 234762 - protein, 14 aa, Homo sapiens
  CDR3 for beta chain variable domain of TCR clone 117381 (TRBV7-2, TRBJ2-7)
CASSPKTSFYEQYF

SEQ ID NO: 234763 - protein, 11 aa, Homo sapiens
  CDR3 for alpha chain variable domain of TCR clone 117382 (TRAV3, TRAJ21)
CAVGNFNKFYF

SEQ ID NO: 234764 - protein, 17 aa, Homo sapiens
  CDR3 for beta chain variable domain of TCR clone 117382 (TRBV28, TRBJ2-1)
CASSSARQALTYNEQFF

SEQ ID NO: 234765 - protein, 11 aa, Homo sapiens
  CDR3 for alpha chain variable domain of TCR clone 117383 (TRAV8-3, TRAJ4)
CAVGARPDFKR

SEQ ID NO: 234766 - protein, 13 aa, Homo sapiens
  CDR3 for beta chain variable domain of TCR clone 117383 (TRBV20-1, TRBJ1-2)
CGATGIQGSGYTF

SEQ ID NO: 234767 - protein, 14 aa, Homo sapiens
  CDR3 for alpha chain variable domain of TCR clone 117384 (TRAV12-3, TRAJ9)
CAMSPNTGGFKTIF

SEQ ID NO: 234768 - protein, 12 aa, Homo sapiens
  CDR3 for beta chain variable domain of TCR clone 117384 (TRBV7-9, TRBJ1-1)
CASSLVRGEAFF

SEQ ID NO: 234769 - protein, 13 aa, Homo sapiens
  CDR3 for alpha chain variable domain of TCR clone 117385 (TRAV12-2, TRAJ20)
CAVYPSNDYKLSF

SEQ ID NO: 234770 - protein, 17 aa, Homo sapiens
  CDR3 for beta chain variable domain of TCR clone 117385 (TRBV28, TRBJ2-5)
CASSTPEGDALQETQYF

SEQ ID NO: 234771 - protein, 13 aa, Homo sapiens
  CDR3 for alpha chain variable domain of TCR clone 117386 (TRAV8-4, TRAJ10)
CAAVTGGGNKLTF

SEQ ID NO: 234772 - protein, 15 aa, Homo sapiens
  CDR3 for beta chain variable domain of TCR clone 117386 (TRBV2, TRBJ2-3)
CASSDFEKATDTQYF

SEQ ID NO: 234773 - protein, 14 aa, Homo sapiens
  CDR3 for alpha chain variable domain of TCR clone 117387 (TRAV1-2, TRAJ8)
CAVREETGFQKLVF

SEQ ID NO: 234774 - protein, 15 aa, Homo sapiens
  CDR3 for beta chain variable domain of TCR clone 117387 (TRBV6-3, TRBJ2-7)
CASSSPGTVFYEQYL

SEQ ID NO: 234775 - protein, 14 aa, Homo sapiens
  CDR3 for alpha chain variable domain of TCR clone 117388 (TRAV29/DV5, TRAJ36)
CAARRKTGANNLFF

SEQ ID NO: 234776 - protein, 14 aa, Homo sapiens
  CDR3 for beta chain variable domain of TCR clone 117388 (TRBV12-4, TRBJ2-5)
CASSLWQKQETQYF

SEQ ID NO: 234777 - protein, 19 aa, Homo sapiens
  CDR3 for alpha chain variable domain of TCR clone 117389 (TRAV3, TRAJ6)
CAVRDRNPSRSGGSYIPTF

SEQ ID NO: 234778 - protein, 15 aa, Homo sapiens
  CDR3 for beta chain variable domain of TCR clone 117389 (TRBV7-2, TRBJ2-1)
CASSSRTSREDEQFF

SEQ ID NO: 234779 - protein, 15 aa, Homo sapiens
  CDR3 for alpha chain variable domain of TCR clone 117390 (TRAV3, TRAJ3)
CAVRDRDSSASKKIF

SEQ ID NO: 234780 - protein, 18 aa, Homo sapiens
  CDR3 for beta chain variable domain of TCR clone 117390 (TRBV25-1, TRBJ1-2)
CASSGLQNGQGLIFGYTF

SEQ ID NO: 234781 - protein, 20 aa, Homo sapiens
  CDR3 for alpha chain variable domain of TCR clone 117391 (TRAV21, TRAJ22)
SLVTQPPTLKSSGSARQLTF

SEQ ID NO: 234782 - protein, 16 aa, Homo sapiens
  CDR3 for beta chain variable domain of TCR clone 117391 (TRBV7-3, TRBJ2-2)
CASSLKRGSLSGELFF

SEQ ID NO: 234783 - protein, 15 aa, Homo sapiens
  CDR3 for alpha chain variable domain of TCR clone 117392 (TRAV21, TRAJ53)
CATLNSGGSNYKLTF

SEQ ID NO: 234784 - protein, 13 aa, Homo sapiens
  CDR3 for beta chain variable domain of TCR clone 117392 (TRBV7-2, TRBJ2-2)
CASSVAVTGELFF

SEQ ID NO: 234785 - protein, 15 aa, Homo sapiens
  CDR3 for alpha chain variable domain of TCR clone 117393 (TRAV25, TRAJ53)
CAATGGGGSNYKLTF

SEQ ID NO: 234786 - protein, 13 aa, Homo sapiens
  CDR3 for beta chain variable domain of TCR clone 117393 (TRBV12-4, TRBJ1-1)
CASSPGTGFEAFF

SEQ ID NO: 234787 - protein, 14 aa, Homo sapiens
  CDR3 for alpha chain variable domain of TCR clone 117394 (TRAV8-2, TRAJ11)
CVVSEKSGYSTLTF

SEQ ID NO: 234788 - protein, 16 aa, Homo sapiens
  CDR3 for beta chain variable domain of TCR clone 117394 (TRBV28, TRBJ2-1)
CASSSPEYPRDNEQFV

SEQ ID NO: 234789 - protein, 11 aa, Homo sapiens
  CDR3 for alpha chain variable domain of TCR clone 117395 (TRAV17, TRAJ9)
CATTGGFQTIF

SEQ ID NO: 234790 - protein, 14 aa, Homo sapiens
  CDR3 for beta chain variable domain of TCR clone 117395 (TRBV7-9, TRBJ2-2)
CASSGLADTGELFF

SEQ ID NO: 234791 - protein, 13 aa, Homo sapiens
  CDR3 for alpha chain variable domain of TCR clone 117396 (TRAV13-2, TRAJ53)
CAENKGSNYKLTF

SEQ ID NO: 234792 - protein, 13 aa, Homo sapiens
  CDR3 for beta chain variable domain of TCR clone 117396 (TRBV4-1, TRBJ2-2)
CASSQENTGELFF

SEQ ID NO: 234793 - protein, 17 aa, Homo sapiens
  CDR3 for alpha chain variable domain of TCR clone 117397 (TRAV29/DV5, TRAJ42)
CAASAGNYGGSQGNPIF

SEQ ID NO: 234794 - protein, 16 aa, Homo sapiens
  CDR3 for beta chain variable domain of TCR clone 117397 (TRBV27, TRBJ2-2)
CASSFRGLVRTGELFF

SEQ ID NO: 234795 - protein, 10 aa, Homo sapiens
  CDR3 for alpha chain variable domain of TCR clone 117398 (TRAV23/DV6, TRAJ57)
CAASSTLSQG

SEQ ID NO: 234796 - protein, 14 aa, Homo sapiens
  CDR3 for beta chain variable domain of TCR clone 117398 (TRBV25-1, TRBJ1-1)
CASTLLGGNTEAFF

SEQ ID NO: 234797 - protein, 12 aa, Homo sapiens
  CDR3 for alpha chain variable domain of TCR clone 117399 (TRAV3, TRAJ43)
CAVRDPNNDMRF

SEQ ID NO: 234798 - protein, 16 aa, Homo sapiens
  CDR3 for beta chain variable domain of TCR clone 117399 (TRBV12-5, TRBJ2-5)
CASGPRTSGNQETQYF

SEQ ID NO: 234799 - protein, 13 aa, Homo sapiens
  CDR3 for alpha chain variable domain of TCR clone 117400 (TRAV12-1, TRAJ11)
CVVNRAGYSTLTF

SEQ ID NO: 234800 - protein, 14 aa, Homo sapiens
  CDR3 for beta chain variable domain of TCR clone 117400 (TRBV11-2, TRBJ1-2)
CASSLGTANYGYTF

SEQ ID NO: 234801 - protein, 13 aa, Homo sapiens
  CDR3 for alpha chain variable domain of TCR clone 117401 (TRAV21, TRAJ27)
CAARPGNAGESTL

SEQ ID NO: 234802 - protein, 14 aa, Homo sapiens
  CDR3 for beta chain variable domain of TCR clone 117401 (TRBV7-6, TRBJ2-3)
CASSLGTVTDTQYF

SEQ ID NO: 234803 - protein, 12 aa, Homo sapiens
  CDR3 for alpha chain variable domain of TCR clone 117402 (TRAV16, TRAJ26)
CALRSYGQNFVF

SEQ ID NO: 234804 - protein, 14 aa, Homo sapiens
  CDR3 for beta chain variable domain of TCR clone 117402 (TRBV10-3, TRBJ2-1)
CSISSDLAYNEQFF

SEQ ID NO: 234805 - protein, 13 aa, Homo sapiens
  CDR3 for alpha chain variable domain of TCR clone 117403 (TRAV8-3, TRAJ43)
CAVGPDNNNDMRF

SEQ ID NO: 234806 - protein, 14 aa, Homo sapiens
  CDR3 for beta chain variable domain of TCR clone 117403 (TRBV20-1, TRBJ1-3)
CSASPTGAGNTMYF

SEQ ID NO: 234807 - protein, 15 aa, Homo sapiens
  CDR3 for alpha chain variable domain of TCR clone 117404 (TRAV3, TRAJ5)
CAVRDLDTGRRALTF

SEQ ID NO: 234808 - protein, 16 aa, Homo sapiens
  CDR3 for beta chain variable domain of TCR clone 117404 (TRBV9, TRBJ2-2)
CASSAMGKGNTGELFF

SEQ ID NO: 234809 - protein, 13 aa, Homo sapiens
  CDR3 for alpha chain variable domain of TCR clone 117405 (TRAV12-3, TRAJ33)
CPMSVNSNYQLIW

SEQ ID NO: 234810 - protein, 13 aa, Homo sapiens
  CDR3 for beta chain variable domain of TCR clone 117405 (TRBV7-2, TRBJ2-2)
CASSLAVTGELFF

SEQ ID NO: 234811 - protein, 13 aa, Homo sapiens
  CDR3 for alpha chain variable domain of TCR clone 117406 (TRAV6, TRAJ33)
CALPMDSKYQLIW

SEQ ID NO: 234812 - protein, 15 aa, Homo sapiens
  CDR3 for beta chain variable domain of TCR clone 117406 (TRBV11-2, TRBJ2-2)
CASRGLAANTGELFF

SEQ ID NO: 234813 - protein, 14 aa, Homo sapiens
  CDR3 for alpha chain variable domain of TCR clone 117407 (TRAV20, TRAJ40)
CAVQAVPGTYKYIF

SEQ ID NO: 234814 - protein, 15 aa, Homo sapiens
  CDR3 for beta chain variable domain of TCR clone 117407 (TRBV11-3, TRBJ2-3)
CASLKDGREGDTQYF

SEQ ID NO: 234815 - protein, 15 aa, Homo sapiens
  CDR3 for alpha chain variable domain of TCR clone 117408 (TRAV13-2, TRAJ37)
CREYEDPGNTGKLIF

SEQ ID NO: 234816 - protein, 13 aa, Homo sapiens
  CDR3 for beta chain variable domain of TCR clone 117408 (TRBV20-1, TRBJ2-7)
CSARSGHPYEQHF

SEQ ID NO: 234817 - protein, 14 aa, Homo sapiens
  CDR3 for alpha chain variable domain of TCR clone 117409 (TRAV17, TRAJ45)
CATASGGGDDGLTF

SEQ ID NO: 234818 - protein, 15 aa, Homo sapiens
  CDR3 for beta chain variable domain of TCR clone 117409 (TRBV11-2, TRBJ2-1)
CASSRNRGLMYEQFF

SEQ ID NO: 234819 - protein, 13 aa, Homo sapiens
  CDR3 for alpha chain variable domain of TCR clone 117410 (TRAV35, TRAJ42)
CAGFPGSQGNLIF

SEQ ID NO: 234820 - protein, 14 aa, Homo sapiens
  CDR3 for beta chain variable domain of TCR clone 117410 (TRBV19, TRBJ2-1)
CASPTFVLSGEKFF

SEQ ID NO: 234821 - protein, 13 aa, Homo sapiens
  CDR3 for alpha chain variable domain of TCR clone 117411 (TRAV17, TRAJ22)
CAHHSGSARQLTF

SEQ ID NO: 234822 - protein, 14 aa, Homo sapiens
  CDR3 for beta chain variable domain of TCR clone 117411 (TRBV25-1, TRBJ1-1)
CASTHLGGNTEAFF

SEQ ID NO: 234823 - protein, 14 aa, Homo sapiens
  CDR3 for alpha chain variable domain of TCR clone 117412 (TRAV26-1, TRAJ38)
CIADNAGDNRKLIW

SEQ ID NO: 234824 - protein, 13 aa, Homo sapiens
  CDR3 for beta chain variable domain of TCR clone 117412 (TRBV2, TRBJ1-5)
CATAGPGNQPQHF

SEQ ID NO: 234825 - protein, 20 aa, Homo sapiens
  CDR3 for alpha chain variable domain of TCR clone 117413 (TRAV12-1, TRAJ42)
SSVIQPPTSVEGGSQGNLIF

SEQ ID NO: 234826 - protein, 18 aa, Homo sapiens
  CDR3 for beta chain variable domain of TCR clone 117413 (TRBV11-2, TRBJ2-3)
CASSLGGASRGAPNTQYF

SEQ ID NO: 234827 - protein, 13 aa, Homo sapiens
  CDR3 for alpha chain variable domain of TCR clone 117414 (TRAV1-1, TRAJ33)
FAVRRDSNYQLIW

SEQ ID NO: 234828 - protein, 16 aa, Homo sapiens
  CDR3 for beta chain variable domain of TCR clone 117414 (TRBV6-1, TRBJ2-2)
CASSAFRGGDTGELFF

SEQ ID NO: 234829 - protein, 15 aa, Homo sapiens
  CDR3 for alpha chain variable domain of TCR clone 117415 (TRAV13-1, TRAJ37)
CAASRTLATQANYSL

SEQ ID NO: 234830 - protein, 15 aa, Homo sapiens
  CDR3 for beta chain variable domain of TCR clone 117415 (TRBV2, TRBJ2-1)
CASSEEREGDNEQFF

SEQ ID NO: 234831 - protein, 15 aa, Homo sapiens
  CDR3 for alpha chain variable domain of TCR clone 117416 (TRAV20, TRAJ6)
CAVRRQSGGSYIPTF

SEQ ID NO: 234832 - protein, 14 aa, Homo sapiens
  CDR3 for beta chain variable domain of TCR clone 117416 (TRBV12-4, TRBJ2-7)
CASSASGGWYEQYF

SEQ ID NO: 234833 - protein, 14 aa, Homo sapiens
  CDR3 for alpha chain variable domain of TCR clone 117417 (TRAV13-1, TRAJ44)
CAAKATGTASKLTF

SEQ ID NO: 234834 - protein, 13 aa, Homo sapiens
  CDR3 for beta chain variable domain of TCR clone 117417 (TRBV2, TRBJ2-7)
CASSVGGSGEQYF

SEQ ID NO: 234835 - protein, 13 aa, Homo sapiens
  CDR3 for alpha chain variable domain of TCR clone 117418 (TRAV12-1, TRAJ49)
CVVNTNTGNQFYF

SEQ ID NO: 234836 - protein, 17 aa, Homo sapiens
  CDR3 for beta chain variable domain of TCR clone 117418 (TRBV4-1, TRBJ1-4)
CASSQEGPRGVEEKLFF

SEQ ID NO: 234837 - protein, 13 aa, Homo sapiens
  CDR3 for alpha chain variable domain of TCR clone 117419 (TRAV12-3, TRAJ13)
CAMSSGGYQKVNF

SEQ ID NO: 234838 - protein, 13 aa, Homo sapiens
  CDR3 for beta chain variable domain of TCR clone 117419 (TRBV20-1, TRBJ1-1)
CSAPPGGHTEAFF

SEQ ID NO: 234839 - protein, 14 aa, Homo sapiens
  CDR3 for alpha chain variable domain of TCR clone 117420 (TRAV1-2, TRAJ16)
CAVNRFSDGQKLLF

SEQ ID NO: 234840 - protein, 16 aa, Homo sapiens
  CDR3 for beta chain variable domain of TCR clone 117420 (TRBV2, TRBJ2-1)
CASRPRSGGPYGEQFF

SEQ ID NO: 234841 - protein, 13 aa, Homo sapiens
  CDR3 for alpha chain variable domain of TCR clone 117421 (TRAV30, TRAJ6)
CGFIEGGSYIPTF

SEQ ID NO: 234842 - protein, 13 aa, Homo sapiens
  CDR3 for beta chain variable domain of TCR clone 117421 (TRBV5-4, TRBJ2-5)
CDSSPVSQETQYF

SEQ ID NO: 234843 - protein, 12 aa, Homo sapiens
  CDR3 for alpha chain variable domain of TCR clone 117422 (TRAV36/DV7, TRAJ50)
CAVEPENLLRQG

SEQ ID NO: 234844 - protein, 14 aa, Homo sapiens
  CDR3 for beta chain variable domain of TCR clone 117422 (TRBV6-1, TRBJ1-3)
CASVQGGGGNTIYF

SEQ ID NO: 234845 - protein, 14 aa, Homo sapiens
  CDR3 for alpha chain variable domain of TCR clone 117423 (TRAV12-3, TRAJ22)
CAMSLFGSARQLTF

SEQ ID NO: 234846 - protein, 14 aa, Homo sapiens
  CDR3 for beta chain variable domain of TCR clone 117423 (TRBV11-1, TRBJ2-7)
CASSFRQGSYEQYF

SEQ ID NO: 234847 - protein, 12 aa, Homo sapiens
  CDR3 for alpha chain variable domain of TCR clone 117424 (TRAV13-2, TRAJ16)
GGGPLGGQKLLF

SEQ ID NO: 234848 - protein, 12 aa, Homo sapiens
  CDR3 for beta chain variable domain of TCR clone 117424 (TRBV24-1, TRBJ2-7)
CATSDPGYEQYF

SEQ ID NO: 234849 - protein, 12 aa, Homo sapiens
  CDR3 for alpha chain variable domain of TCR clone 117425 (TRAV25, TRAJ11)
CAGVSGYSTLTF

SEQ ID NO: 234850 - protein, 14 aa, Homo sapiens
  CDR3 for beta chain variable domain of TCR clone 117425 (TRBV5-8, TRBJ2-3)
CASSLGQGTDTQYF

SEQ ID NO: 234851 - protein, 17 aa, Homo sapiens
  CDR3 for alpha chain variable domain of TCR clone 117426 (TRAV3, TRAJ6)
CAVRDGPRAGGSYIPTF

SEQ ID NO: 234852 - protein, 13 aa, Homo sapiens
  CDR3 for beta chain variable domain of TCR clone 117426 (TRBV12-4, TRBJ1-2)
CASSLDSNYGYTF

SEQ ID NO: 234853 - protein, 12 aa, Homo sapiens
  CDR3 for alpha chain variable domain of TCR clone 117427 (TRAV21, TRAJ42)
CAVGGSQGNLLF

SEQ ID NO: 234854 - protein, 14 aa, Homo sapiens
  CDR3 for beta chain variable domain of TCR clone 117427 (TRBV12-4, TRBJ1-1)
CASSLGTGGTEAFF

SEQ ID NO: 234855 - protein, 18 aa, Homo sapiens
  CDR3 for alpha chain variable domain of TCR clone 117428 (TRAV21, TRAJ52)
CAVRPSPAGGTSYGKLTF

SEQ ID NO: 234856 - protein, 16 aa, Homo sapiens
  CDR3 for beta chain variable domain of TCR clone 117428 (TRBV7-3, TRBJ2-3)
CASSSLGGGSRDTQYF

SEQ ID NO: 234857 - protein, 17 aa, Homo sapiens
  CDR3 for alpha chain variable domain of TCR clone 117429 (TRAV8-1, TRAJ42)
CAVKWGNYGGSQGKLIF

SEQ ID NO: 234858 - protein, 15 aa, Homo sapiens
  CDR3 for beta chain variable domain of TCR clone 117429 (TRBV9, TRBJ1-6)
CASSVAGTGDSPLHF

SEQ ID NO: 234859 - protein, 12 aa, Homo sapiens
  CDR3 for alpha chain variable domain of TCR clone 117430 (TRAV2, TRAJ31)
CAVEDNNARLMF

SEQ ID NO: 234860 - protein, 17 aa, Homo sapiens
  CDR3 for beta chain variable domain of TCR clone 117430 (TRBV20-1, TRBJ2-2)
CSASGSGQGGLTGELFF

SEQ ID NO: 234861 - protein, 11 aa, Homo sapiens
  CDR3 for alpha chain variable domain of TCR clone 117431 (TRAV17, TRAJ9)
CGFTGGFKTIF

SEQ ID NO: 234862 - protein, 14 aa, Homo sapiens
  CDR3 for beta chain variable domain of TCR clone 117431 (TRBV7-9, TRBJ2-2)
CASSLVQDTRELFF

SEQ ID NO: 234863 - protein, 12 aa, Homo sapiens
  CDR3 for alpha chain variable domain of TCR clone 117432 (TRAV30, TRAJ43)
CGTEERGNDMRF

SEQ ID NO: 234864 - protein, 15 aa, Homo sapiens
  CDR3 for beta chain variable domain of TCR clone 117432 (TRBV7-9, TRBJ1-5)
CASSQGHQPNQPQHF

SEQ ID NO: 234865 - protein, 14 aa, Homo sapiens
  CDR3 for alpha chain variable domain of TCR clone 117433 (TRAV1-2, TRAJ8)
CAVREDTGFQKLVF

SEQ ID NO: 234866 - protein, 15 aa, Homo sapiens
  CDR3 for beta chain variable domain of TCR clone 117433 (TRBV14, TRBJ1-1)
CASSQEGMGFTEAFF

SEQ ID NO: 234867 - protein, 14 aa, Homo sapiens
  CDR3 for alpha chain variable domain of TCR clone 117434 (TRAV12-3, TRAJ7)
CAMSEIGGNNRLAF

SEQ ID NO: 234868 - protein, 13 aa, Homo sapiens
  CDR3 for beta chain variable domain of TCR clone 117434 (TRBV11-2, TRBJ2-5)
CASSFSSQETQYF

SEQ ID NO: 234869 - protein, 16 aa, Homo sapiens
  CDR3 for alpha chain variable domain of TCR clone 117435 (TRAV26-1, TRAJ38)
CIVRVELGGNNSKLIW

SEQ ID NO: 234870 - protein, 14 aa, Homo sapiens
  CDR3 for beta chain variable domain of TCR clone 117435 (TRBV5-1, TRBJ2-3)
CASSPGLAADTQYF

SEQ ID NO: 234871 - protein, 13 aa, Homo sapiens
  CDR3 for alpha chain variable domain of TCR clone 117436 (TRAV8-1, TRAJ34)
CAVRPYNTDKLIF

SEQ ID NO: 234872 - protein, 15 aa, Homo sapiens
  CDR3 for beta chain variable domain of TCR clone 117436 (TRBV7-9, TRBJ1-3)
CASSLRSSSGNTIYF

SEQ ID NO: 234873 - protein, 13 aa, Homo sapiens
  CDR3 for alpha chain variable domain of TCR clone 117437 (TRAV23/DV6, TRAJ16)
CAASISDGQKLIF

SEQ ID NO: 234874 - protein, 15 aa, Homo sapiens
  CDR3 for beta chain variable domain of TCR clone 117437 (TRBV2, TRBJ2-2)
CASSRETVGTGELFF

SEQ ID NO: 234875 - protein, 16 aa, Homo sapiens
  CDR3 for alpha chain variable domain of TCR clone 117438 (TRAV26-2, TRAJ45)
CTTASPIGGGADGLIF

SEQ ID NO: 234876 - protein, 20 aa, Homo sapiens
  CDR3 for beta chain variable domain of TCR clone 117438 (TRBV28, TRBJ2-1)
CASTPIGRSPGLAGGDEQFF

SEQ ID NO: 234877 - protein, 14 aa, Homo sapiens
  CDR3 for alpha chain variable domain of TCR clone 117439 (TRAV12-3, TRAJ10)
SHLPLTGGGNKLTF

SEQ ID NO: 234878 - protein, 17 aa, Homo sapiens
  CDR3 for beta chain variable domain of TCR clone 117439 (TRBV20-1, TRBJ2-2)
CSARGSGQGGLTGELFF

SEQ ID NO: 234879 - protein, 12 aa, Homo sapiens
  CDR3 for alpha chain variable domain of TCR clone 117440 (TRAV22, TRAJ29)
CAPPSGNTPFVF

SEQ ID NO: 234880 - protein, 14 aa, Homo sapiens
  CDR3 for beta chain variable domain of TCR clone 117440 (TRBV11-2, TRBJ2-7)
CASSLGAGAYEQYF

SEQ ID NO: 234881 - protein, 15 aa, Homo sapiens
  CDR3 for alpha chain variable domain of TCR clone 117441 (TRAV12-3, TRAJ49)
CAMAVTPNTGNQFYF

SEQ ID NO: 234882 - protein, 18 aa, Homo sapiens
  CDR3 for beta chain variable domain of TCR clone 117441 (TRBV4-1, TRBJ1-5)
CASSQDPRGQGLNQPQRF

SEQ ID NO: 234883 - protein, 15 aa, Homo sapiens
  CDR3 for alpha chain variable domain of TCR clone 117442 (TRAV14/DV4, TRAJ12)
CAMREERDSSYKLIF

SEQ ID NO: 234884 - protein, 16 aa, Homo sapiens
  CDR3 for beta chain variable domain of TCR clone 117442 (TRBV11-2, TRBJ1-2)
CASSMDTGGADYGYTF

SEQ ID NO: 234885 - protein, 14 aa, Homo sapiens
  CDR3 for alpha chain variable domain of TCR clone 117443 (TRAV35, TRAJ56)
CAGQLTGANSKLTF

SEQ ID NO: 234886 - protein, 12 aa, Homo sapiens
  CDR3 for beta chain variable domain of TCR clone 117443 (TRBV11-2, TRBJ2-2)
CASSLGGGELFF

SEQ ID NO: 234887 - protein, 17 aa, Homo sapiens
  CDR3 for alpha chain variable domain of TCR clone 117444 (TRAV12-3, TRAJ26)
CAMSGGRWDNYGRNFVF

SEQ ID NO: 234888 - protein, 12 aa, Homo sapiens
  CDR3 for beta chain variable domain of TCR clone 117444 (TRBV19, TRBJ1-1)
CASSTTGIEAFF

SEQ ID NO: 234889 - protein, 14 aa, Homo sapiens
  CDR3 for alpha chain variable domain of TCR clone 117445 (TRAV1-2, TRAJ16)
CAVNRFSDGQKMLF

SEQ ID NO: 234890 - protein, 14 aa, Homo sapiens
  CDR3 for beta chain variable domain of TCR clone 117445 (TRBV7-2, TRBJ2-7)
CASSPKTSFYEQYF

SEQ ID NO: 234891 - protein, 11 aa, Homo sapiens
  CDR3 for alpha chain variable domain of TCR clone 117446 (TRAV1-2, TRAJ8)
CAVSSFQKLVF

SEQ ID NO: 234892 - protein, 16 aa, Homo sapiens
  CDR3 for beta chain variable domain of TCR clone 117446 (TRBV4-3, TRBJ2-2)
CASSHLQGSGTGELFF

SEQ ID NO: 234893 - protein, 14 aa, Homo sapiens
  CDR3 for alpha chain variable domain of TCR clone 117447 (TRAV13-2, TRAJ43)
CAEIPTYNNNDMRF

SEQ ID NO: 234894 - protein, 15 aa, Homo sapiens
  CDR3 for beta chain variable domain of TCR clone 117447 (TRBV7-9, TRBJ2-2)
CASGALDTFPGELFF

SEQ ID NO: 234895 - protein, 11 aa, Homo sapiens
  CDR3 for alpha chain variable domain of TCR clone 117448 (TRAV2, TRAJ20)
AAVYRDCKLSF

SEQ ID NO: 234896 - protein, 12 aa, Homo sapiens
  CDR3 for beta chain variable domain of TCR clone 117448 (TRBV11-2, TRBJ2-2)
CASSLGGGELFF

SEQ ID NO: 234897 - protein, 12 aa, Homo sapiens
  CDR3 for alpha chain variable domain of TCR clone 117449 (TRAV13-2, TRAJ8)
CAPWLGFQKLVF

SEQ ID NO: 234898 - protein, 13 aa, Homo sapiens
  CDR3 for beta chain variable domain of TCR clone 117449 (TRBV10-3, TRBJ2-7)
CASKLAVNYEQYF

SEQ ID NO: 234899 - protein, 12 aa, Homo sapiens
  CDR3 for alpha chain variable domain of TCR clone 117450 (TRAV1-1, TRAJ23)
CAVTNQGGKLIF

SEQ ID NO: 234900 - protein, 15 aa, Homo sapiens
  CDR3 for beta chain variable domain of TCR clone 117450 (TRBV27, TRBJ2-1)
CASSNGGGSSNEQFF

SEQ ID NO: 234901 - protein, 13 aa, Homo sapiens
  CDR3 for alpha chain variable domain of TCR clone 117451 (TRAV23/DV6, TRAJ58)
CAATGTSGSRLTF

SEQ ID NO: 234902 - protein, 13 aa, Homo sapiens
  CDR3 for beta chain variable domain of TCR clone 117451 (TRBV5-5, TRBJ1-2)
CASSFWRGEDYAF

SEQ ID NO: 234903 - protein, 16 aa, Homo sapiens
  CDR3 for alpha chain variable domain of TCR clone 117452 (TRAV30, TRAJ24)
RGTEIVDADSWGKLQF

SEQ ID NO: 234904 - protein, 14 aa, Homo sapiens
  CDR3 for beta chain variable domain of TCR clone 117452 (TRBV12-5, TRBJ2-5)
CASGSRTHQETQYF

SEQ ID NO: 234905 - protein, 13 aa, Homo sapiens
  CDR3 for alpha chain variable domain of TCR clone 117453 (TRAV27, TRAJ57)
CRSAQGGSEKLVF

SEQ ID NO: 234906 - protein, 11 aa, Homo sapiens
  CDR3 for beta chain variable domain of TCR clone 117453 (TRBV11-2, TRBJ1-1)
CASSINTEAFC

SEQ ID NO: 234907 - protein, 12 aa, Homo sapiens
  CDR3 for alpha chain variable domain of TCR clone 117454 (TRAV13-1, TRAJ53)
AASGGSNYKLTF

SEQ ID NO: 234908 - protein, 15 aa, Homo sapiens
  CDR3 for beta chain variable domain of TCR clone 117454 (TRBV5-1, TRBJ2-1)
CANSPPRAPYNEQFF

SEQ ID NO: 234909 - protein, 13 aa, Homo sapiens
  CDR3 for alpha chain variable domain of TCR clone 117455 (TRAV8-3, TRAJ28)
CAVGAVGSYQLTF

SEQ ID NO: 234910 - protein, 15 aa, Homo sapiens
  CDR3 for beta chain variable domain of TCR clone 117455 (TRBV7-9, TRBJ1-5)
CASSQGHQHDQPQHF

SEQ ID NO: 234911 - protein, 15 aa, Homo sapiens
  CDR3 for alpha chain variable domain of TCR clone 117456 (TRAV23/DV6, TRAJ18)
CAARYRGSTLGRLYL

SEQ ID NO: 234912 - protein, 15 aa, Homo sapiens
  CDR3 for beta chain variable domain of TCR clone 117456 (TRBV7-8, TRBJ2-1)
CASSLADSLYNEQFF

SEQ ID NO: 234913 - protein, 12 aa, Homo sapiens
  CDR3 for alpha chain variable domain of TCR clone 117457 (TRAV17, TRAJ43)
CATDAFPADMRF

SEQ ID NO: 234914 - protein, 17 aa, Homo sapiens
  CDR3 for beta chain variable domain of TCR clone 117457 (TRBV28, TRBJ2-5)
CASSTPEGDALQETQYF

SEQ ID NO: 234915 - protein, 13 aa, Homo sapiens
  CDR3 for alpha chain variable domain of TCR clone 117458 (TRAV12-2, TRAJ4)
CAGFSGGYNKLIF

SEQ ID NO: 234916 - protein, 16 aa, Homo sapiens
  CDR3 for beta chain variable domain of TCR clone 117458 (TRBV2, TRBJ1-3)
CASSRTGGSTGNTIYF

SEQ ID NO: 234917 - protein, 14 aa, Homo sapiens
  CDR3 for alpha chain variable domain of TCR clone 117459 (TRAV1-2, TRAJ8)
CAVREDTGFQKLVL

SEQ ID NO: 234918 - protein, 16 aa, Homo sapiens
  CDR3 for beta chain variable domain of TCR clone 117459 (TRBV12-4, TRBJ1-5)
CASSRPVGGSNQPQHF

SEQ ID NO: 234919 - protein, 11 aa, Homo sapiens
  CDR3 for alpha chain variable domain of TCR clone 117460 (TRAV21, TRAJ9)
CAVPGGFKTIF

SEQ ID NO: 234920 - protein, 17 aa, Homo sapiens
  CDR3 for beta chain variable domain of TCR clone 117460 (TRBV7-9, TRBJ2-5)
CAASGGARDPVLRARHA

SEQ ID NO: 234921 - protein, 14 aa, Homo sapiens
  CDR3 for alpha chain variable domain of TCR clone 117461 (TRAV8-4, TRAJ39)
CAVSEGNAGNMLTF

SEQ ID NO: 234922 - protein, 16 aa, Homo sapiens
  CDR3 for beta chain variable domain of TCR clone 117461 (TRBV9, TRBJ1-2)
CASSVEEKVSPYGYTF

SEQ ID NO: 234923 - protein, 15 aa, Homo sapiens
  CDR3 for alpha chain variable domain of TCR clone 117462 (TRAV21, TRAJ53)
CAVKQSGGSNYKLTF

SEQ ID NO: 234924 - protein, 12 aa, Homo sapiens
  CDR3 for beta chain variable domain of TCR clone 117462 (TRBV11-2, TRBJ2-2)
CASSLPTGELFF

SEQ ID NO: 234925 - protein, 14 aa, Homo sapiens
  CDR3 for alpha chain variable domain of TCR clone 117463 (TRAV12-1, TRAJ17)
CVVNFKAAGNKLTF

SEQ ID NO: 234926 - protein, 15 aa, Homo sapiens
  CDR3 for beta chain variable domain of TCR clone 117463 (TRBV20-1, TRBJ2-7)
CSARDRVSGMDEQYF

SEQ ID NO: 234927 - protein, 13 aa, Homo sapiens
  CDR3 for alpha chain variable domain of TCR clone 117464 (TRAV3, TRAJ20)
CCEAFCNDYKLSF

SEQ ID NO: 234928 - protein, 15 aa, Homo sapiens
  CDR3 for beta chain variable domain of TCR clone 117464 (TRBV6-3, TRBJ2-7)
CASSSPGTVFYEQYF

SEQ ID NO: 234929 - protein, 15 aa, Homo sapiens
  CDR3 for alpha chain variable domain of TCR clone 117465 (TRAV12-1, TRAJ44)
CVVDTPQGTASKLTF

SEQ ID NO: 234930 - protein, 16 aa, Homo sapiens
  CDR3 for beta chain variable domain of TCR clone 117465 (TRBV4-1, TRBJ1-1)
CASSQDAGMGKTEAFF

SEQ ID NO: 234931 - protein, 16 aa, Homo sapiens
  CDR3 for alpha chain variable domain of TCR clone 117466 (TRAV4, TRAJ5)
CLVGPDHGHGQESTYF

SEQ ID NO: 234932 - protein, 13 aa, Homo sapiens
  CDR3 for beta chain variable domain of TCR clone 117466 (TRBV4-2, TRBJ1-2)
CASSLSASGSYTF

SEQ ID NO: 234933 - protein, 11 aa, Homo sapiens
  CDR3 for alpha chain variable domain of TCR clone 117467 (TRAV8-4, TRAJ34)
CAVSWIDKLIF

SEQ ID NO: 234934 - protein, 14 aa, Homo sapiens
  CDR3 for beta chain variable domain of TCR clone 117467 (TRBV7-9, TRBJ2-3)
CASSLEDGTDTQYF

SEQ ID NO: 234935 - protein, 12 aa, Homo sapiens
  CDR3 for alpha chain variable domain of TCR clone 117468 (TRAV8-3, TRAJ41)
CAVALSGYALNF

SEQ ID NO: 234936 - protein, 14 aa, Homo sapiens
  CDR3 for beta chain variable domain of TCR clone 117468 (TRBV7-9, TRBJ2-1)
CASSPWDSLYEQFF

SEQ ID NO: 234937 - protein, 14 aa, Homo sapiens
  CDR3 for alpha chain variable domain of TCR clone 117469 (TRAV1-2, TRAJ8)
SAVREDTGFQKLVF

SEQ ID NO: 234938 - protein, 17 aa, Homo sapiens
  CDR3 for beta chain variable domain of TCR clone 117469 (TRBV11-2, TRBJ2-1)
CASSLYPPGVEYNEQFF

SEQ ID NO: 234939 - protein, 14 aa, Homo sapiens
  CDR3 for alpha chain variable domain of TCR clone 117470 (TRAV23/DV6, TRAJ39)
CAASIGNAGNMPTF

SEQ ID NO: 234940 - protein, 14 aa, Homo sapiens
  CDR3 for beta chain variable domain of TCR clone 117470 (TRBV7-3, TRBJ1-1)
CASSLKGGNTEAFF

SEQ ID NO: 234941 - protein, 12 aa, Homo sapiens
  CDR3 for alpha chain variable domain of TCR clone 117471 (TRAV12-3, TRAJ17)
CAMTLTGNKLNF

SEQ ID NO: 234942 - protein, 13 aa, Homo sapiens
  CDR3 for beta chain variable domain of TCR clone 117471 (TRBV12-4, TRBJ1-1)
CASSPGTGFEAFF

SEQ ID NO: 234943 - protein, 12 aa, Homo sapiens
  CDR3 for alpha chain variable domain of TCR clone 117472 (TRAV13-1, TRAJ15)
CAASQAGTALIF

SEQ ID NO: 234944 - protein, 13 aa, Homo sapiens
  CDR3 for beta chain variable domain of TCR clone 117472 (TRBV29-1, TRBJ2-1)
CSVEGGRVNEQFF

SEQ ID NO: 234945 - protein, 13 aa, Homo sapiens
  CDR3 for alpha chain variable domain of TCR clone 117473 (TRAV21, TRAJ27)
CAARPGNAGKSTF

SEQ ID NO: 234946 - protein, 11 aa, Homo sapiens
  CDR3 for beta chain variable domain of TCR clone 117473 (TRBV27, TRBJ2-3)
CASSLGDTQYF

SEQ ID NO: 234947 - protein, 11 aa, Homo sapiens
  CDR3 for alpha chain variable domain of TCR clone 117474 (TRAV3, TRAJ21)
CAVGNFNKFYF

SEQ ID NO: 234948 - protein, 16 aa, Homo sapiens
  CDR3 for beta chain variable domain of TCR clone 117474 (TRBV20-1, TRBJ2-2)
CSASASGIPGAGELFF

SEQ ID NO: 234949 - protein, 10 aa, Homo sapiens
  CDR3 for alpha chain variable domain of TCR clone 117475 (TRAV26-1, TRAJ22)
CIVSLNFFWF

SEQ ID NO: 234950 - protein, 16 aa, Homo sapiens
  CDR3 for beta chain variable domain of TCR clone 117475 (TRBV28, TRBJ2-7)
CASSPWVATGDLSQYF

SEQ ID NO: 234951 - protein, 13 aa, Homo sapiens
  CDR3 for alpha chain variable domain of TCR clone 117476 (TRAV21, TRAJ27)
CAARPGNAGKSTF

SEQ ID NO: 234952 - protein, 15 aa, Homo sapiens
  CDR3 for beta chain variable domain of TCR clone 117476 (TRBV20-1, TRBJ2-7)
CSATDRVSGMDEQYF

SEQ ID NO: 234953 - protein, 15 aa, Homo sapiens
  CDR3 for alpha chain variable domain of TCR clone 117477 (TRAV12-3, TRAJ6)
CAMSATTGGSYIPTF

SEQ ID NO: 234954 - protein, 15 aa, Homo sapiens
  CDR3 for beta chain variable domain of TCR clone 117477 (TRBV7-3, TRBJ2-2)
CASSETGQGTGELFF

SEQ ID NO: 234955 - protein, 15 aa, Homo sapiens
  CDR3 for alpha chain variable domain of TCR clone 117478 (TRAV13-1, TRAJ17)
CAASIERAAGNKLTF

SEQ ID NO: 234956 - protein, 16 aa, Homo sapiens
  CDR3 for beta chain variable domain of TCR clone 117478 (TRBV7-2, TRBJ1-2)
CASSSNQDRRGHGYTS

SEQ ID NO: 234957 - protein, 14 aa, Homo sapiens
  CDR3 for alpha chain variable domain of TCR clone 117479 (TRAV38-1, TRAJ45)
CASHSGGGADGHTF

SEQ ID NO: 234958 - protein, 13 aa, Homo sapiens
  CDR3 for beta chain variable domain of TCR clone 117479 (TRBV10-3, TRBJ1-2)
CAISERDSYGYTF

SEQ ID NO: 234959 - protein, 16 aa, Homo sapiens
  CDR3 for alpha chain variable domain of TCR clone 117480 (TRAV30, TRAJ24)
CGTEIVDADSWGKFQF

SEQ ID NO: 234960 - protein, 13 aa, Homo sapiens
  CDR3 for beta chain variable domain of TCR clone 117480 (TRBV14, TRBJ2-1)
CASSREGGTEQFF

SEQ ID NO: 234961 - protein, 11 aa, Homo sapiens
  CDR3 for alpha chain variable domain of TCR clone 117481 (TRAV21, TRAJ11)
CAVNGYSTLTF

SEQ ID NO: 234962 - protein, 14 aa, Homo sapiens
  CDR3 for beta chain variable domain of TCR clone 117481 (TRBV12-5, TRBJ2-5)
CASGSRTHQETQYF

SEQ ID NO: 234963 - protein, 14 aa, Homo sapiens
  CDR3 for alpha chain variable domain of TCR clone 117482 (TRAV12-2, TRAJ13)
CAVKKTGGYQKVTF

SEQ ID NO: 234964 - protein, 16 aa, Homo sapiens
  CDR3 for beta chain variable domain of TCR clone 117482 (TRBV24-1, TRBJ2-3)
CATSGYRDRDTDTQYF

SEQ ID NO: 234965 - protein, 15 aa, Homo sapiens
  CDR3 for alpha chain variable domain of TCR clone 117483 (TRAV8-3, TRAJ11)
CAVGLLNSGYSTLTF

SEQ ID NO: 234966 - protein, 16 aa, Homo sapiens
  CDR3 for beta chain variable domain of TCR clone 117483 (TRBV7-9, TRBJ1-2)
CASSLGFSSGEDGFTF

SEQ ID NO: 234967 - protein, 12 aa, Homo sapiens
  CDR3 for alpha chain variable domain of TCR clone 117484 (TRAV16, TRAJ9)
CALGSGGFKTIF

SEQ ID NO: 234968 - protein, 14 aa, Homo sapiens
  CDR3 for beta chain variable domain of TCR clone 117484 (TRBV7-9, TRBJ2-1)
CASSLAGPYNEQFF

SEQ ID NO: 234969 - protein, 16 aa, Homo sapiens
  CDR3 for alpha chain variable domain of TCR clone 117485 (TRAV3, TRAJ37)
CAVRGKGSGNTGKLIV

SEQ ID NO: 234970 - protein, 15 aa, Homo sapiens
  CDR3 for beta chain variable domain of TCR clone 117485 (TRBV7-9, TRBJ2-2)
CASGPLDTFPGELFF

SEQ ID NO: 234971 - protein, 13 aa, Homo sapiens
  CDR3 for alpha chain variable domain of TCR clone 117486 (TRAV13-2, TRAJ54)
CAENYQGAQKLVF

SEQ ID NO: 234972 - protein, 14 aa, Homo sapiens
  CDR3 for beta chain variable domain of TCR clone 117486 (TRBV18, TRBJ2-5)
CASSPGVSQETQYF

SEQ ID NO: 234973 - protein, 12 aa, Homo sapiens
  CDR3 for alpha chain variable domain of TCR clone 117487 (TRAV23/DV6, TRAJ49)
CSATYTGNQFYF

SEQ ID NO: 234974 - protein, 17 aa, Homo sapiens
  CDR3 for beta chain variable domain of TCR clone 117487 (TRBV4-1, TRBJ2-3)
CASSQVLQGGGTDTQYF

SEQ ID NO: 234975 - protein, 12 aa, Homo sapiens
  CDR3 for alpha chain variable domain of TCR clone 117488 (TRAV12-1, TRAJ40)
CVVYSGTYKYMF

SEQ ID NO: 234976 - protein, 18 aa, Homo sapiens
  CDR3 for beta chain variable domain of TCR clone 117488 (TRBV11-2, TRBJ2-3)
CASSLGGASRGAPNTQYF

SEQ ID NO: 234977 - protein, 12 aa, Homo sapiens
  CDR3 for alpha chain variable domain of TCR clone 117489 (TRAV1-1, TRAJ8)
CAGGTGFQKLVF

SEQ ID NO: 234978 - protein, 17 aa, Homo sapiens
  CDR3 for beta chain variable domain of TCR clone 117489 (TRBV18, TRBJ2-2)
CASSQRSSGQGPGELFF

SEQ ID NO: 234979 - protein, 14 aa, Homo sapiens
  CDR3 for alpha chain variable domain of TCR clone 117490 (TRAV12-2, TRAJ20)
CAVNVGGNDYKLSF

SEQ ID NO: 234980 - protein, 13 aa, Homo sapiens
  CDR3 for beta chain variable domain of TCR clone 117490 (TRBV19, TRBJ2-7)
CASTARGRDEQYF

SEQ ID NO: 234981 - protein, 16 aa, Homo sapiens
  CDR3 for alpha chain variable domain of TCR clone 117491 (TRAV27, TRAJ13)
CAGAKSDSGDYQKVTF

SEQ ID NO: 234982 - protein, 15 aa, Homo sapiens
  CDR3 for beta chain variable domain of TCR clone 117491 (TRBV29-1, TRBJ2-1)
CSVGRHALFYNEQFF

SEQ ID NO: 234983 - protein, 12 aa, Homo sapiens
  CDR3 for alpha chain variable domain of TCR clone 117492 (TRAV26-2, TRAJ21)
CILKGNFNKFYF

SEQ ID NO: 234984 - protein, 12 aa, Homo sapiens
  CDR3 for beta chain variable domain of TCR clone 117492 (TRBV7-8, TRBJ2-7)
CASSLGDREQYF

SEQ ID NO: 234985 - protein, 13 aa, Homo sapiens
  CDR3 for alpha chain variable domain of TCR clone 117493 (TRAV8-3, TRAJ36)
CAVGATGANNLFF

SEQ ID NO: 234986 - protein, 17 aa, Homo sapiens
  CDR3 for beta chain variable domain of TCR clone 117493 (TRBV20-1, TRBJ2-1)
CSASSSGLAGSYNEQFF

SEQ ID NO: 234987 - protein, 19 aa, Homo sapiens
  CDR3 for alpha chain variable domain of TCR clone 117494 (TRAV8-3, TRAJ4)
LNTSVLWVFYSGGYNKLIF

SEQ ID NO: 234988 - protein, 14 aa, Homo sapiens
  CDR3 for beta chain variable domain of TCR clone 117494 (TRBV7-9, TRBJ2-3)
CASSLEDGTDTQYF

SEQ ID NO: 234989 - protein, 13 aa, Homo sapiens
  CDR3 for alpha chain variable domain of TCR clone 117495 (TRAV2, TRAJ40)
CAVVTSGTYKYIF

SEQ ID NO: 234990 - protein, 16 aa, Homo sapiens
  CDR3 for beta chain variable domain of TCR clone 117495 (TRBV7-7, TRBJ2-1)
CASSLASGTSYNEQFF

SEQ ID NO: 234991 - protein, 15 aa, Homo sapiens
  CDR3 for alpha chain variable domain of TCR clone 117496 (TRAV8-3, TRAJ40)
CAAPSLGSGTYKYIF

SEQ ID NO: 234992 - protein, 15 aa, Homo sapiens
  CDR3 for beta chain variable domain of TCR clone 117496 (TRBV19, TRBJ1-1)
CASTSGQIQNTEAFF

SEQ ID NO: 234993 - protein, 12 aa, Homo sapiens
  CDR3 for alpha chain variable domain of TCR clone 117497 (TRAV12-3, TRAJ17)
CAMTLTGNKLTF

SEQ ID NO: 234994 - protein, 14 aa, Homo sapiens
  CDR3 for beta chain variable domain of TCR clone 117497 (TRBV20-1, TRBJ2-7)
CSAKRGRSSYEQYF

SEQ ID NO: 234995 - protein, 14 aa, Homo sapiens
  CDR3 for alpha chain variable domain of TCR clone 117498 (TRAV8-3, TRAJ39)
CAVGANNAGNMLTF

SEQ ID NO: 234996 - protein, 14 aa, Homo sapiens
  CDR3 for beta chain variable domain of TCR clone 117498 (TRBV7-3, TRBJ2-1)
CASSLAGGTNEQFF

SEQ ID NO: 234997 - protein, 14 aa, Homo sapiens
  CDR3 for alpha chain variable domain of TCR clone 117499 (TRAV12-2, TRAJ13)
CAVKQTGGYQKVTF

SEQ ID NO: 234998 - protein, 14 aa, Homo sapiens
  CDR3 for beta chain variable domain of TCR clone 117499 (TRBV12-5, TRBJ2-5)
CASGSRTHQETQYF

SEQ ID NO: 234999 - protein, 18 aa, Homo sapiens
  CDR3 for alpha chain variable domain of TCR clone 117500 (TRAV21, TRAJ52)
CAVRPSPAGGTSYGKLTF

SEQ ID NO: 235000 - protein, 17 aa, Homo sapiens
  CDR3 for beta chain variable domain of TCR clone 117500 (TRBV13, TRBJ2-3)
CASSRSRVAGGKNTQYF

SEQ ID NO: 235001 - protein, 17 aa, Homo sapiens
  CDR3 for alpha chain variable domain of TCR clone 117501 (TRAV3, TRAJ42)
CAVRDRDYGGSQGNFIF

SEQ ID NO: 235002 - protein, 20 aa, Homo sapiens
  CDR3 for beta chain variable domain of TCR clone 117501 (TRBV28, TRBJ2-1)
CASTPIGRSPGLAGGNEQFF

SEQ ID NO: 235003 - protein, 18 aa, Homo sapiens
  CDR3 for alpha chain variable domain of TCR clone 117502 (TRAV1-2, TRAJ10)
CAVRALTPVTGGGNKLTF

SEQ ID NO: 235004 - protein, 14 aa, Homo sapiens
  CDR3 for beta chain variable domain of TCR clone 117502 (TRBV4-1, TRBJ1-1)
CASSQQGNGNEAFS

SEQ ID NO: 235005 - protein, 18 aa, Homo sapiens
  CDR3 for alpha chain variable domain of TCR clone 117503 (TRAV26-2, TRAJ54)
CILRDVEVGIQGAPKLVF

SEQ ID NO: 235006 - protein, 16 aa, Homo sapiens
  CDR3 for beta chain variable domain of TCR clone 117503 (TRBV6-1, TRBJ2-5)
CASSETLDRGAETQYF

SEQ ID NO: 235007 - protein, 16 aa, Homo sapiens
  CDR3 for alpha chain variable domain of TCR clone 117504 (TRAV3, TRAJ37)
CAVRPHGSGNTGKLIF

SEQ ID NO: 235008 - protein, 11 aa, Homo sapiens
  CDR3 for beta chain variable domain of TCR clone 117504 (TRBV12-4, TRBJ2-3)
CASTATDTQYF

SEQ ID NO: 235009 - protein, 14 aa, Homo sapiens
  CDR3 for alpha chain variable domain of TCR clone 117505 (TRAV2, TRAJ23)
CAVGLRHQGGKLIF

SEQ ID NO: 235010 - protein, 13 aa, Homo sapiens
  CDR3 for beta chain variable domain of TCR clone 117505 (TRBV12-4, TRBJ2-5)
CASSPGTEETQYF

SEQ ID NO: 235011 - protein, 14 aa, Homo sapiens
  CDR3 for alpha chain variable domain of TCR clone 117506 (TRAV3, TRAJ33)
CAARDMDSNYQLTW

SEQ ID NO: 235012 - protein, 19 aa, Homo sapiens
  CDR3 for beta chain variable domain of TCR clone 117506 (TRBV7-3, TRBJ1-2)
CASSFPQGNDGELWLHLRF

SEQ ID NO: 235013 - protein, 13 aa, Homo sapiens
  CDR3 for alpha chain variable domain of TCR clone 117507 (TRAV16, TRAJ22)
SAMLAGSARQLTF

SEQ ID NO: 235014 - protein, 18 aa, Homo sapiens
  CDR3 for beta chain variable domain of TCR clone 117507 (TRBV7-2, TRBJ2-3)
CASSLETSRGRKADKQYF

SEQ ID NO: 235015 - protein, 15 aa, Homo sapiens
  CDR3 for alpha chain variable domain of TCR clone 117508 (TRAV25, TRAJ52)
CAGTSGGTSSGKLTF

SEQ ID NO: 235016 - protein, 16 aa, Homo sapiens
  CDR3 for beta chain variable domain of TCR clone 117508 (TRBV15, TRBJ1-2)
CATSRGPRTGGGGYTF

SEQ ID NO: 235017 - protein, 12 aa, Homo sapiens
  CDR3 for alpha chain variable domain of TCR clone 117509 (TRAV1-1, TRAJ49)
CASWNTGNQFYF

SEQ ID NO: 235018 - protein, 16 aa, Homo sapiens
  CDR3 for beta chain variable domain of TCR clone 117509 (TRBV7-2, TRBJ2-6)
CAILSGVSSGANVLTF

SEQ ID NO: 235019 - protein, 11 aa, Homo sapiens
  CDR3 for alpha chain variable domain of TCR clone 117510 (TRAV2, TRAJ21)
CAVFNINKFYF

SEQ ID NO: 235020 - protein, 14 aa, Homo sapiens
  CDR3 for beta chain variable domain of TCR clone 117510 (TRBV15, TRBJ2-3)
CATRSGTSTDTQYF

SEQ ID NO: 235021 - protein, 14 aa, Homo sapiens
  CDR3 for alpha chain variable domain of TCR clone 117511 (TRAV12-2, TRAJ5)
CAVNRSTGRRALTF

SEQ ID NO: 235022 - protein, 15 aa, Homo sapiens
  CDR3 for beta chain variable domain of TCR clone 117511 (TRBV28, TRBJ2-1)
CASRVGLDEYNEQFF

SEQ ID NO: 235023 - protein, 15 aa, Homo sapiens
  CDR3 for alpha chain variable domain of TCR clone 117512 (TRAV8-3, TRAJ27)
FAVGPSKTNAGKSTF

SEQ ID NO: 235024 - protein, 14 aa, Homo sapiens
  CDR3 for beta chain variable domain of TCR clone 117512 (TRBV11-2, TRBJ2-3)
CASSRLARTDTQYF

SEQ ID NO: 235025 - protein, 15 aa, Homo sapiens
  CDR3 for alpha chain variable domain of TCR clone 117513 (TRAV38-1, TRAJ37)
CAFIHGSGNTGKLIF

SEQ ID NO: 235026 - protein, 12 aa, Homo sapiens
  CDR3 for beta chain variable domain of TCR clone 117513 (TRBV7-9, TRBJ2-7)
CASSFGSYEKYF

SEQ ID NO: 235027 - protein, 15 aa, Homo sapiens
  CDR3 for alpha chain variable domain of TCR clone 117514 (TRAV4, TRAJ39)
CLVGPNNNAGNMLTF

SEQ ID NO: 235028 - protein, 16 aa, Homo sapiens
  CDR3 for beta chain variable domain of TCR clone 117514 (TRBV11-2, TRBJ2-7)
CASSPTTGGVSYEQYF

SEQ ID NO: 235029 - protein, 18 aa, Homo sapiens
  CDR3 for alpha chain variable domain of TCR clone 117515 (TRAV26-1, TRAJ30)
CCVLLHRQSTNRDDKIIF

SEQ ID NO: 235030 - protein, 18 aa, Homo sapiens
  CDR3 for beta chain variable domain of TCR clone 117515 (TRBV4-1, TRBJ1-5)
YASSQDPRGQGLNQPQHF

SEQ ID NO: 235031 - protein, 16 aa, Homo sapiens
  CDR3 for alpha chain variable domain of TCR clone 117516 (TRAV16, TRAJ4)
SALSRMFSGGYNKLIF

SEQ ID NO: 235032 - protein, 16 aa, Homo sapiens
  CDR3 for beta chain variable domain of TCR clone 117516 (TRBV24-1, TRBJ2-3)
CATSDPGTGATDTQYF

SEQ ID NO: 235033 - protein, 17 aa, Homo sapiens
  CDR3 for alpha chain variable domain of TCR clone 117517 (TRAV4, TRAJ10)
CLVQRRKQTHPWDRHSA

SEQ ID NO: 235034 - protein, 16 aa, Homo sapiens
  CDR3 for beta chain variable domain of TCR clone 117517 (TRBV6-1, TRBJ2-1)
CASILRQGSSYNEQFF

SEQ ID NO: 235035 - protein, 14 aa, Homo sapiens
  CDR3 for alpha chain variable domain of TCR clone 117518 (TRAV12-2, TRAJ40)
CAVKIPSGNYKYIF

SEQ ID NO: 235036 - protein, 20 aa, Homo sapiens
  CDR3 for beta chain variable domain of TCR clone 117518 (TRBV28, TRBJ2-1)
CASTPIGRSPGLAGGNEQFF

SEQ ID NO: 235037 - protein, 13 aa, Homo sapiens
  CDR3 for alpha chain variable domain of TCR clone 117519 (TRAV21, TRAJ15)
CAVANQAGTALIF

SEQ ID NO: 235038 - protein, 14 aa, Homo sapiens
  CDR3 for beta chain variable domain of TCR clone 117519 (TRBV7-2, TRBJ1-1)
CASSFLTGTTEAFF

SEQ ID NO: 235039 - protein, 12 aa, Homo sapiens
  CDR3 for alpha chain variable domain of TCR clone 117520 (TRAV1-1, TRAJ9)
CAVDTGGFTTIF

SEQ ID NO: 235040 - protein, 14 aa, Homo sapiens
  CDR3 for beta chain variable domain of TCR clone 117520 (TRBV7-8, TRBJ2-5)
CASSATGGQETQYF

SEQ ID NO: 235041 - protein, 13 aa, Homo sapiens
  CDR3 for alpha chain variable domain of TCR clone 117521 (TRAV35, TRAJ36)
CAGPRVGANNLFF

SEQ ID NO: 235042 - protein, 15 aa, Homo sapiens
  CDR3 for beta chain variable domain of TCR clone 117521 (TRBV20-1, TRBJ2-7)
CSARDRVSGMDEQYF

SEQ ID NO: 235043 - protein, 16 aa, Homo sapiens
  CDR3 for alpha chain variable domain of TCR clone 117522 (TRAV8-3, TRAJ13)
CAVGAEVSGGYQKVTF

SEQ ID NO: 235044 - protein, 13 aa, Homo sapiens
  CDR3 for beta chain variable domain of TCR clone 117522 (TRBV5-1, TRBJ1-5)
CASSLAQDQPQHF

SEQ ID NO: 235045 - protein, 13 aa, Homo sapiens
  CDR3 for alpha chain variable domain of TCR clone 117523 (TRAV35, TRAJ36)
CAGPRIGANNLFF

SEQ ID NO: 235046 - protein, 15 aa, Homo sapiens
  CDR3 for beta chain variable domain of TCR clone 117523 (TRBV28, TRBJ2-5)
CASSPPGSYQETQYF

SEQ ID NO: 235047 - protein, 14 aa, Homo sapiens
  CDR3 for alpha chain variable domain of TCR clone 117524 (TRAV14/DV4, TRAJ32)
SNVLPLTPTNKLIF

SEQ ID NO: 235048 - protein, 14 aa, Homo sapiens
  CDR3 for beta chain variable domain of TCR clone 117524 (TRBV24-1, TRBJ1-5)
CATSDGQPGQPQHF

SEQ ID NO: 235049 - protein, 13 aa, Homo sapiens
  CDR3 for alpha chain variable domain of TCR clone 117525 (TRAV21, TRAJ27)
CAALNTNAGKSTF

SEQ ID NO: 235050 - protein, 14 aa, Homo sapiens
  CDR3 for beta chain variable domain of TCR clone 117525 (TRBV7-2, TRBJ2-7)
CASSPKTSFYEQYF

SEQ ID NO: 235051 - protein, 18 aa, Homo sapiens
  CDR3 for alpha chain variable domain of TCR clone 117526 (TRAV12-3, TRAJ52)
CAMSRTNAGGTSVGKLTF

SEQ ID NO: 235052 - protein, 17 aa, Homo sapiens
  CDR3 for beta chain variable domain of TCR clone 117526 (TRBV7-3, TRBJ2-3)
CASSLMKRMRGADTQYF

SEQ ID NO: 235053 - protein, 17 aa, Homo sapiens
  CDR3 for alpha chain variable domain of TCR clone 117527 (TRAV3, TRAJ42)
CAVRDRDYGGSQENLIF

SEQ ID NO: 235054 - protein, 14 aa, Homo sapiens
  CDR3 for beta chain variable domain of TCR clone 117527 (TRBV7-2, TRBJ2-5)
CASSPRGSSETQYF

SEQ ID NO: 235055 - protein, 11 aa, Homo sapiens
  CDR3 for alpha chain variable domain of TCR clone 117528 (TRAV1-1, TRAJ23)
CAVRQGGKLIF

SEQ ID NO: 235056 - protein, 15 aa, Homo sapiens
  CDR3 for beta chain variable domain of TCR clone 117528 (TRBV4-1, TRBJ2-7)
CASSQNTGRLYEQYF

SEQ ID NO: 235057 - protein, 16 aa, Homo sapiens
  CDR3 for alpha chain variable domain of TCR clone 117529 (TRAV1-2, TRAJ10)
CAVRGVLTGGGNKLTF

SEQ ID NO: 235058 - protein, 20 aa, Homo sapiens
  CDR3 for beta chain variable domain of TCR clone 117529 (TRBV7-8, TRBJ2-2)
CAGSHLFPGPTIHITGELFF

SEQ ID NO: 235059 - protein, 15 aa, Homo sapiens
  CDR3 for alpha chain variable domain of TCR clone 117530 (TRAV12-3, TRAJ6)
CAMSATSGGSYIPTV

SEQ ID NO: 235060 - protein, 13 aa, Homo sapiens
  CDR3 for beta chain variable domain of TCR clone 117530 (TRBV7-9, TRBJ1-2)
CASSLKQNYGYTF

SEQ ID NO: 235061 - protein, 14 aa, Homo sapiens
  CDR3 for alpha chain variable domain of TCR clone 117531 (TRAV1-2, TRAJ16)
CAVNRFSDGQKLLF

SEQ ID NO: 235062 - protein, 14 aa, Homo sapiens
  CDR3 for beta chain variable domain of TCR clone 117531 (TRBV20-1, TRBJ1-1)
CSAQTRIGCTEAFF

SEQ ID NO: 235063 - protein, 15 aa, Homo sapiens
  CDR3 for alpha chain variable domain of TCR clone 117532 (TRAV12-2, TRAJ43)
CAFDMRFGAGTRLTV

SEQ ID NO: 235064 - protein, 18 aa, Homo sapiens
  CDR3 for beta chain variable domain of TCR clone 117532 (TRBV20-1, TRBJ2-3)
CSASGLAGGPRTTDTQYF

SEQ ID NO: 235065 - protein, 15 aa, Homo sapiens
  CDR3 for alpha chain variable domain of TCR clone 117533 (TRAV3, TRAJ22)
CAVGDRGGSARQLTF

SEQ ID NO: 235066 - protein, 15 aa, Homo sapiens
  CDR3 for beta chain variable domain of TCR clone 117533 (TRBV7-3, TRBJ2-2)
CASSETGQGTGELFF

SEQ ID NO: 235067 - protein, 14 aa, Homo sapiens
  CDR3 for alpha chain variable domain of TCR clone 117534 (TRAV12-1, TRAJ9)
CVVTGYTGVFKTIF

SEQ ID NO: 235068 - protein, 13 aa, Homo sapiens
  CDR3 for beta chain variable domain of TCR clone 117534 (TRBV20-1, TRBJ1-1)
CSARAGGNTEAFF

SEQ ID NO: 235069 - protein, 15 aa, Homo sapiens
  CDR3 for alpha chain variable domain of TCR clone 117535 (TRAV3, TRAJ39)
CAVRDRYNAGNMLTF

SEQ ID NO: 235070 - protein, 13 aa, Homo sapiens
  CDR3 for beta chain variable domain of TCR clone 117535 (TRBV12-4, TRBJ2-7)
CASSFVPTAEQYF

SEQ ID NO: 235071 - protein, 17 aa, Homo sapiens
  CDR3 for alpha chain variable domain of TCR clone 117536 (TRAV3, TRAJ6)
CAVRDGPRAGGSYIPAF

SEQ ID NO: 235072 - protein, 13 aa, Homo sapiens
  CDR3 for beta chain variable domain of TCR clone 117536 (TRBV12-4, TRBJ2-7)
CASSPTETYEQYF

SEQ ID NO: 235073 - protein, 15 aa, Homo sapiens
  CDR3 for alpha chain variable domain of TCR clone 117537 (TRAV2, TRAJ15)
CAVEDREQAGTALIV

SEQ ID NO: 235074 - protein, 13 aa, Homo sapiens
  CDR3 for beta chain variable domain of TCR clone 117537 (TRBV10-2, TRBJ2-3)
CASSESGDHTQYF

SEQ ID NO: 235075 - protein, 14 aa, Homo sapiens
  CDR3 for alpha chain variable domain of TCR clone 117538 (TRAV12-3, TRAJ57)
CARALEGGSEKLVF

SEQ ID NO: 235076 - protein, 17 aa, Homo sapiens
  CDR3 for beta chain variable domain of TCR clone 117538 (TRBV11-3, TRBJ2-3)
CASSLGPTGGGTDTQYF

SEQ ID NO: 235077 - protein, 13 aa, Homo sapiens
  CDR3 for alpha chain variable domain of TCR clone 117539 (TRAV21, TRAJ45)
CAVMGGGADGLTF

SEQ ID NO: 235078 - protein, 12 aa, Homo sapiens
  CDR3 for beta chain variable domain of TCR clone 117539 (TRBV11-2, TRBJ2-1)
CASSPGNNEQFF

SEQ ID NO: 235079 - protein, 20 aa, Homo sapiens
  CDR3 for alpha chain variable domain of TCR clone 117540 (TRAV27, TRAJ38)
CAARRNAGNNRKLIWDWEQA

SEQ ID NO: 235080 - protein, 13 aa, Homo sapiens
  CDR3 for beta chain variable domain of TCR clone 117540 (TRBV12-5, TRBJ2-3)
CASGDRQSDTQYF

SEQ ID NO: 235081 - protein, 18 aa, Homo sapiens
  CDR3 for alpha chain variable domain of TCR clone 117541 (TRAV12-2, )
CAVEDIQNPDPAVYQLRD

SEQ ID NO: 235082 - protein, 16 aa, Homo sapiens
  CDR3 for beta chain variable domain of TCR clone 117541 (TRBV6-1, TRBJ1-2)
CASSGAWQGKSHGYTF

SEQ ID NO: 235083 - protein, 13 aa, Homo sapiens
  CDR3 for alpha chain variable domain of TCR clone 117542 (TRAV3, TRAJ16)
CAVRDRNGQKPLF

SEQ ID NO: 235084 - protein, 15 aa, Homo sapiens
  CDR3 for beta chain variable domain of TCR clone 117542 (TRBV5-1, TRBJ2-1)
CASSPPRAPYNEQFF

SEQ ID NO: 235085 - protein, 11 aa, Homo sapiens
  CDR3 for alpha chain variable domain of TCR clone 117543 (TRAV2, TRAJ13)
CASGGYQKVTF

SEQ ID NO: 235086 - protein, 14 aa, Homo sapiens
  CDR3 for beta chain variable domain of TCR clone 117543 (TRBV19, TRBJ2-1)
CASSSGRDYNEQFF

SEQ ID NO: 235087 - protein, 15 aa, Homo sapiens
  CDR3 for alpha chain variable domain of TCR clone 117544 (TRAV21, TRAJ53)
CATLNSGGSNYKLTF

SEQ ID NO: 235088 - protein, 13 aa, Homo sapiens
  CDR3 for beta chain variable domain of TCR clone 117544 (TRBV11-2, TRBJ1-1)
CASSFTENTEAFF

SEQ ID NO: 235089 - protein, 12 aa, Homo sapiens
  CDR3 for alpha chain variable domain of TCR clone 117545 (TRAV29/DV5, TRAJ49)
CAATDTGNQFYF

SEQ ID NO: 235090 - protein, 15 aa, Homo sapiens
  CDR3 for beta chain variable domain of TCR clone 117545 (TRBV12-4, TRBJ2-1)
CASSGSGGTLGEQFF

SEQ ID NO: 235091 - protein, 14 aa, Homo sapiens
  CDR3 for alpha chain variable domain of TCR clone 117546 (TRAV8-4, TRAJ15)
CAVTIREAGTALIF

SEQ ID NO: 235092 - protein, 12 aa, Homo sapiens
  CDR3 for beta chain variable domain of TCR clone 117546 (TRBV11-2, TRBJ2-2)
CASSLGGGGLFF

SEQ ID NO: 235093 - protein, 15 aa, Homo sapiens
  CDR3 for alpha chain variable domain of TCR clone 117547 (TRAV17, TRAJ23)
CATDAEDNQGGNLIF

SEQ ID NO: 235094 - protein, 12 aa, Homo sapiens
  CDR3 for beta chain variable domain of TCR clone 117547 (TRBV2, TRBJ2-1)
CAKREGYNEQFF

SEQ ID NO: 235095 - protein, 15 aa, Homo sapiens
  CDR3 for alpha chain variable domain of TCR clone 117548 (TRAV2, TRAJ15)
CAVEGRNQAGTALIF

SEQ ID NO: 235096 - protein, 13 aa, Homo sapiens
  CDR3 for beta chain variable domain of TCR clone 117548 (TRBV10-2, TRBJ2-7)
CASSESGVYEQYF

SEQ ID NO: 235097 - protein, 13 aa, Homo sapiens
  CDR3 for alpha chain variable domain of TCR clone 117549 (TRAV13-1, TRAJ9)
CAASGTGGFKTIF

SEQ ID NO: 235098 - protein, 19 aa, Homo sapiens
  CDR3 for beta chain variable domain of TCR clone 117549 (TRBV25-1, TRBJ2-2)
CAILVYRVDRGRKTGELFF

SEQ ID NO: 235099 - protein, 12 aa, Homo sapiens
  CDR3 for alpha chain variable domain of TCR clone 117550 (TRAV12-3, TRAJ17)
CAMTLTGNKLTF

SEQ ID NO: 235100 - protein, 11 aa, Homo sapiens
  CDR3 for beta chain variable domain of TCR clone 117550 (TRBV20-1, TRBJ2-7)
CSARTSYEQYF

SEQ ID NO: 235101 - protein, 14 aa, Homo sapiens
  CDR3 for alpha chain variable domain of TCR clone 117551 (TRAV23/DV6, TRAJ37)
CAASTSSNTGKLIF

SEQ ID NO: 235102 - protein, 11 aa, Homo sapiens
  CDR3 for beta chain variable domain of TCR clone 117551 (TRBV29-1, TRBJ2-5)
CSEDRTGTQYF

SEQ ID NO: 235103 - protein, 11 aa, Homo sapiens
  CDR3 for alpha chain variable domain of TCR clone 117552 (TRAV2, TRAJ13)
CASGGYQKVTF

SEQ ID NO: 235104 - protein, 14 aa, Homo sapiens
  CDR3 for beta chain variable domain of TCR clone 117552 (TRBV7-8, TRBJ2-3)
CASSFPDGQDTQYF

SEQ ID NO: 235105 - protein, 13 aa, Homo sapiens
  CDR3 for alpha chain variable domain of TCR clone 117553 (TRAV17, TRAJ7)
CATDNYGNNRLAF

SEQ ID NO: 235106 - protein, 15 aa, Homo sapiens
  CDR3 for beta chain variable domain of TCR clone 117553 (TRBV7-8, TRBJ2-7)
CASSLERAGSYEQYF

SEQ ID NO: 235107 - protein, 10 aa, Homo sapiens
  CDR3 for alpha chain variable domain of TCR clone 117554 (TRAV4, TRAJ33)
TLDSNYQLIW

SEQ ID NO: 235108 - protein, 15 aa, Homo sapiens
  CDR3 for beta chain variable domain of TCR clone 117554 (TRBV20-1, TRBJ2-7)
CSARDRVSGMDEQYF

SEQ ID NO: 235109 - protein, 15 aa, Homo sapiens
  CDR3 for alpha chain variable domain of TCR clone 117555 (TRAV17, TRAJ57)
CATGPSQGGAEKLDF

SEQ ID NO: 235110 - protein, 14 aa, Homo sapiens
  CDR3 for beta chain variable domain of TCR clone 117555 (TRBV12-5, TRBJ2-5)
CASGSRTHQETQYF

SEQ ID NO: 235111 - protein, 10 aa, Homo sapiens
  CDR3 for alpha chain variable domain of TCR clone 117556 (TRAV8-4, TRAJ43)
CAVSADHMRF

SEQ ID NO: 235112 - protein, 15 aa, Homo sapiens
  CDR3 for beta chain variable domain of TCR clone 117556 (TRBV5-1, TRBJ2-3)
CASSVTSGSTDTQYF

SEQ ID NO: 235113 - protein, 14 aa, Homo sapiens
  CDR3 for alpha chain variable domain of TCR clone 117557 (TRAV13-1, TRAJ3)
CAASKSSSASKIIL

SEQ ID NO: 235114 - protein, 13 aa, Homo sapiens
  CDR3 for beta chain variable domain of TCR clone 117557 (TRBV25-1, TRBJ2-5)
CASSEIGRETQYF

SEQ ID NO: 235115 - protein, 15 aa, Homo sapiens
  CDR3 for alpha chain variable domain of TCR clone 117558 (TRAV4, TRAJ36)
CLVGDRRTGANNLFF

SEQ ID NO: 235116 - protein, 15 aa, Homo sapiens
  CDR3 for beta chain variable domain of TCR clone 117558 (TRBV7-6, TRBJ2-1)
CASSSLAGEGNEQFF

SEQ ID NO: 235117 - protein, 12 aa, Homo sapiens
  CDR3 for alpha chain variable domain of TCR clone 117559 (TRAV2, TRAJ10)
CASTGGGNKLTF

SEQ ID NO: 235118 - protein, 13 aa, Homo sapiens
  CDR3 for beta chain variable domain of TCR clone 117559 (TRBV11-3, TRBJ2-7)
CASSLDKLYEQYF

SEQ ID NO: 235119 - protein, 16 aa, Homo sapiens
  CDR3 for alpha chain variable domain of TCR clone 117560 (TRAV30, TRAJ24)
CGTEIVDADSWGKFKF

SEQ ID NO: 235120 - protein, 14 aa, Homo sapiens
  CDR3 for beta chain variable domain of TCR clone 117560 (TRBV12-5, TRBJ2-5)
CASGSRTRQETQYF

SEQ ID NO: 235121 - protein, 16 aa, Homo sapiens
  CDR3 for alpha chain variable domain of TCR clone 117561 (TRAV1-2, TRAJ17)
CAVRDGFKAAGNKLTF

SEQ ID NO: 235122 - protein, 17 aa, Homo sapiens
  CDR3 for beta chain variable domain of TCR clone 117561 (TRBV13, TRBJ2-3)
CASSLSRVAGGRNTQYF

SEQ ID NO: 235123 - protein, 14 aa, Homo sapiens
  CDR3 for alpha chain variable domain of TCR clone 117562 (TRAV1-1, TRAJ28)
CAAPSGAGSYQLTF

SEQ ID NO: 235124 - protein, 14 aa, Homo sapiens
  CDR3 for beta chain variable domain of TCR clone 117562 (TRBV11-3, TRBJ2-7)
CASSPDRNTYEQYF

SEQ ID NO: 235125 - protein, 14 aa, Homo sapiens
  CDR3 for alpha chain variable domain of TCR clone 117563 (TRAV26-2, TRAJ32)
CILFRGGATNKPIF

SEQ ID NO: 235126 - protein, 15 aa, Homo sapiens
  CDR3 for beta chain variable domain of TCR clone 117563 (TRBV2, TRBJ2-2)
CASSGFGAGTGELFF

SEQ ID NO: 235127 - protein, 14 aa, Homo sapiens
  CDR3 for alpha chain variable domain of TCR clone 117564 (TRAV35, TRAJ22)
CAGLRPGSARQLTF

SEQ ID NO: 235128 - protein, 15 aa, Homo sapiens
  CDR3 for beta chain variable domain of TCR clone 117564 (TRBV11-3, TRBJ2-3)
CASLKDGREGDTQYF

SEQ ID NO: 235129 - protein, 12 aa, Homo sapiens
  CDR3 for alpha chain variable domain of TCR clone 117565 (TRAV21, TRAJ20)
CAVRGNDYKLSF

SEQ ID NO: 235130 - protein, 14 aa, Homo sapiens
  CDR3 for beta chain variable domain of TCR clone 117565 (TRBV7-8, TRBJ2-7)
CASSQTQGADERYF

SEQ ID NO: 235131 - protein, 13 aa, Homo sapiens
  CDR3 for alpha chain variable domain of TCR clone 117566 (TRAV12-1, TRAJ33)
CGDAPDSNYQLIW

SEQ ID NO: 235132 - protein, 15 aa, Homo sapiens
  CDR3 for beta chain variable domain of TCR clone 117566 (TRBV27, TRBJ2-1)
CASSNGGGSSNEQFS

SEQ ID NO: 235133 - protein, 14 aa, Homo sapiens
  CDR3 for alpha chain variable domain of TCR clone 117567 (TRAV8-2, TRAJ11)
CVMSEKSGYSTLTF

SEQ ID NO: 235134 - protein, 16 aa, Homo sapiens
  CDR3 for beta chain variable domain of TCR clone 117567 (TRBV28, TRBJ2-1)
CASSSPEYPRDNEQFF

SEQ ID NO: 235135 - protein, 12 aa, Homo sapiens
  CDR3 for alpha chain variable domain of TCR clone 117568 (TRAV12-1, TRAJ40)
CVVKVRTYKYIF

SEQ ID NO: 235136 - protein, 15 aa, Homo sapiens
  CDR3 for beta chain variable domain of TCR clone 117568 (TRBV19, TRBJ1-2)
CASSVGQVLNYGYTF

SEQ ID NO: 235137 - protein, 12 aa, Homo sapiens
  CDR3 for alpha chain variable domain of TCR clone 117569 (TRAV13-2, TRAJ22)
CAERDSARQLTF

SEQ ID NO: 235138 - protein, 11 aa, Homo sapiens
  CDR3 for beta chain variable domain of TCR clone 117569 (TRBV28, TRBJ2-7)
CASSWDCEQYF

SEQ ID NO: 235139 - protein, 14 aa, Homo sapiens
  CDR3 for alpha chain variable domain of TCR clone 117570 (TRAV1-2, TRAJ8)
CAVREDTGFQKLVF

SEQ ID NO: 235140 - protein, 15 aa, Homo sapiens
  CDR3 for beta chain variable domain of TCR clone 117570 (TRBV20-1, TRBJ2-7)
CSARDRVSGMDEHYF

SEQ ID NO: 235141 - protein, 14 aa, Homo sapiens
  CDR3 for alpha chain variable domain of TCR clone 117571 (TRAV2, TRAJ9)
CAVNPNTGGFKTIF

SEQ ID NO: 235142 - protein, 13 aa, Homo sapiens
  CDR3 for beta chain variable domain of TCR clone 117571 (TRBV20-1, TRBJ2-1)
CSASTGTSNEQFF

SEQ ID NO: 235143 - protein, 18 aa, Homo sapiens
  CDR3 for alpha chain variable domain of TCR clone 117572 (TRAV21, TRAJ52)
CAVRPSPAGGTSYGKLTF

SEQ ID NO: 235144 - protein, 17 aa, Homo sapiens
  CDR3 for beta chain variable domain of TCR clone 117572 (TRBV19, TRBJ1-1)
CASSTRGLGTSNTEAFF

SEQ ID NO: 235145 - protein, 13 aa, Homo sapiens
  CDR3 for alpha chain variable domain of TCR clone 117573 (TRAV17, TRAJ9)
CATDYTGGFKTIF

SEQ ID NO: 235146 - protein, 16 aa, Homo sapiens
  CDR3 for beta chain variable domain of TCR clone 117573 (TRBV7-7, TRBJ2-1)
WASSLASGTSYNEQFF

SEQ ID NO: 235147 - protein, 13 aa, Homo sapiens
  CDR3 for alpha chain variable domain of TCR clone 117574 (TRAV8-6, TRAJ49)
CAVITNTGNQFYF

SEQ ID NO: 235148 - protein, 14 aa, Homo sapiens
  CDR3 for beta chain variable domain of TCR clone 117574 (TRBV5-1, TRBJ2-7)
CASSRGESLYEQYS

SEQ ID NO: 235149 - protein, 11 aa, Homo sapiens
  CDR3 for alpha chain variable domain of TCR clone 117575 (TRAV23/DV6, TRAJ58)
CAARLLRGETS

SEQ ID NO: 235150 - protein, 15 aa, Homo sapiens
  CDR3 for beta chain variable domain of TCR clone 117575 (TRBV11-3, TRBJ2-3)
CASLKDGREGDTQYF

SEQ ID NO: 235151 - protein, 16 aa, Homo sapiens
  CDR3 for alpha chain variable domain of TCR clone 117576 (TRAV3, TRAJ37)
CAVRPHGSGNPGKLIF

SEQ ID NO: 235152 - protein, 15 aa, Homo sapiens
  CDR3 for beta chain variable domain of TCR clone 117576 (TRBV10-3, TRBJ2-3)
CAISLTSGGTDTQYF

SEQ ID NO: 235153 - protein, 14 aa, Homo sapiens
  CDR3 for alpha chain variable domain of TCR clone 117577 (TRAV12-3, TRAJ10)
SHPPLTGGGNKLTF

SEQ ID NO: 235154 - protein, 14 aa, Homo sapiens
  CDR3 for beta chain variable domain of TCR clone 117577 (TRBV12-5, TRBJ2-5)
CASGSRTHQETQYF

SEQ ID NO: 235155 - protein, 17 aa, Homo sapiens
  CDR3 for alpha chain variable domain of TCR clone 117578 (TRAV3, TRAJ6)
CAVRDGPRAGGSYIPTF

SEQ ID NO: 235156 - protein, 16 aa, Homo sapiens
  CDR3 for beta chain variable domain of TCR clone 117578 (TRBV10-2, TRBJ2-7)
CASSESPGSSGFEQYF

SEQ ID NO: 235157 - protein, 11 aa, Homo sapiens
  CDR3 for alpha chain variable domain of TCR clone 117579 (TRAV12-1, TRAJ8)
CVVTGFQKLLF

SEQ ID NO: 235158 - protein, 14 aa, Homo sapiens
  CDR3 for beta chain variable domain of TCR clone 117579 (TRBV19, TRBJ2-1)
CASGKSTQYNEQFF

SEQ ID NO: 235159 - protein, 13 aa, Homo sapiens
  CDR3 for alpha chain variable domain of TCR clone 117580 (TRAV3, TRAJ27)
CAVRPLGAGKSTF

SEQ ID NO: 235160 - protein, 14 aa, Homo sapiens
  CDR3 for beta chain variable domain of TCR clone 117580 (TRBV7-8, TRBJ2-3)
CASSFKSSTDTQYF

SEQ ID NO: 235161 - protein, 13 aa, Homo sapiens
  CDR3 for alpha chain variable domain of TCR clone 117581 (TRAV3, TRAJ27)
CAVRPLGAGKSTF

SEQ ID NO: 235162 - protein, 13 aa, Homo sapiens
  CDR3 for beta chain variable domain of TCR clone 117581 (TRBV7-9, TRBJ2-3)
CASSPGSTNTQYF

SEQ ID NO: 235163 - protein, 13 aa, Homo sapiens
  CDR3 for alpha chain variable domain of TCR clone 117582 (TRAV38-1, TRAJ42)
CARWGGSQGNLIF

SEQ ID NO: 235164 - protein, 15 aa, Homo sapiens
  CDR3 for beta chain variable domain of TCR clone 117582 (TRBV7-3, TRBJ2-2)
CASSETGQGTGELFF

SEQ ID NO: 235165 - protein, 19 aa, Homo sapiens
  CDR3 for alpha chain variable domain of TCR clone 117583 (TRAV2, TRAJ20)
ILQVREADAAVYRDCKLSF

SEQ ID NO: 235166 - protein, 16 aa, Homo sapiens
  CDR3 for beta chain variable domain of TCR clone 117583 (TRBV20-1, TRBJ1-4)
CSARPYGGELNEKLFF

SEQ ID NO: 235167 - protein, 12 aa, Homo sapiens
  CDR3 for alpha chain variable domain of TCR clone 117584 (TRAV24, TRAJ40)
CAFMPGTYQYIF

SEQ ID NO: 235168 - protein, 11 aa, Homo sapiens
  CDR3 for beta chain variable domain of TCR clone 117584 (TRBV10-1, TRBJ2-3)
CASSDSDTQYF

SEQ ID NO: 235169 - protein, 14 aa, Homo sapiens
  CDR3 for alpha chain variable domain of TCR clone 117585 (TRAV5, TRAJ23)
CAVPYYNQGGKLIF

SEQ ID NO: 235170 - protein, 14 aa, Homo sapiens
  CDR3 for beta chain variable domain of TCR clone 117585 (TRBV4-1, TRBJ2-5)
CASSRSGSGETQYF

SEQ ID NO: 235171 - protein, 11 aa, Homo sapiens
  CDR3 for alpha chain variable domain of TCR clone 117586 (TRAV1-2, TRAJ40)
CAVPATYKYIF

SEQ ID NO: 235172 - protein, 16 aa, Homo sapiens
  CDR3 for beta chain variable domain of TCR clone 117586 (TRBV29-1, TRBJ2-7)
CSVEVVGTSGSYEQYF

SEQ ID NO: 235173 - protein, 16 aa, Homo sapiens
  CDR3 for alpha chain variable domain of TCR clone 117587 (TRAV17, TRAJ22)
CATGPISSGSARQLTF

SEQ ID NO: 235174 - protein, 14 aa, Homo sapiens
  CDR3 for beta chain variable domain of TCR clone 117587 (TRBV7-2, TRBJ2-5)
CASSPRGSSETQYF

SEQ ID NO: 235175 - protein, 14 aa, Homo sapiens
  CDR3 for alpha chain variable domain of TCR clone 117588 (TRAV13-1, TRAJ35)
CAASKGGFGNVLHC

SEQ ID NO: 235176 - protein, 15 aa, Homo sapiens
  CDR3 for beta chain variable domain of TCR clone 117588 (TRBV7-9, TRBJ1-4)
CASSARTGGNEKLFF

SEQ ID NO: 235177 - protein, 13 aa, Homo sapiens
  CDR3 for alpha chain variable domain of TCR clone 117589 (TRAV3, TRAJ29)
RAVRDIIDTPLVF

SEQ ID NO: 235178 - protein, 14 aa, Homo sapiens
  CDR3 for beta chain variable domain of TCR clone 117589 (TRBV27, TRBJ2-1)
CASSATGGYNEQFF

SEQ ID NO: 235179 - protein, 14 aa, Homo sapiens
  CDR3 for alpha chain variable domain of TCR clone 117590 (TRAV22, TRAJ6)
CAGVGPGVSYIPTF

SEQ ID NO: 235180 - protein, 14 aa, Homo sapiens
  CDR3 for beta chain variable domain of TCR clone 117590 (TRBV9, TRBJ2-7)
CASSVGVGSYEQYF

SEQ ID NO: 235181 - protein, 12 aa, Homo sapiens
  CDR3 for alpha chain variable domain of TCR clone 117591 (TRAV13-1, TRAJ49)
CAAMSTGNQFYF

SEQ ID NO: 235182 - protein, 16 aa, Homo sapiens
  CDR3 for beta chain variable domain of TCR clone 117591 (TRBV19, TRBJ1-2)
CASSKFRDTTNYGYTF

SEQ ID NO: 235183 - protein, 14 aa, Homo sapiens
  CDR3 for alpha chain variable domain of TCR clone 117592 (TRAV2, TRAJ9)
CAVEEGTGGFKTIF

SEQ ID NO: 235184 - protein, 14 aa, Homo sapiens
  CDR3 for beta chain variable domain of TCR clone 117592 (TRBV6-3, TRBJ1-1)
CASSNLLPGAEAFF

SEQ ID NO: 235185 - protein, 12 aa, Homo sapiens
  CDR3 for alpha chain variable domain of TCR clone 117593 (TRAV17, TRAJ12)
CATLRSSYKLIF

SEQ ID NO: 235186 - protein, 14 aa, Homo sapiens
  CDR3 for beta chain variable domain of TCR clone 117593 (TRBV19, TRBJ2-1)
CAWGARSFQWEQFF

SEQ ID NO: 235187 - protein, 23 aa, Homo sapiens
  CDR3 for alpha chain variable domain of TCR clone 117594 (TRAV12-2, TRAJ36)
SLLIRDSQPSDSATLERANNLFF

SEQ ID NO: 235188 - protein, 17 aa, Homo sapiens
  CDR3 for beta chain variable domain of TCR clone 117594 (TRBV7-8, TRBJ2-6)
CASSAGTGGAGANVLTF

SEQ ID NO: 235189 - protein, 20 aa, Homo sapiens
  CDR3 for alpha chain variable domain of TCR clone 117595 (TRAV8-3, TRAJ44)
LSTSVLWVRLYTGTASKLTF

SEQ ID NO: 235190 - protein, 14 aa, Homo sapiens
  CDR3 for beta chain variable domain of TCR clone 117595 (TRBV7-2, TRBJ2-7)
CASSPKTSFYEQYF

SEQ ID NO: 235191 - protein, 14 aa, Homo sapiens
  CDR3 for alpha chain variable domain of TCR clone 117596 (TRAV12-1, TRAJ30)
CVVNIGGRDDKIIF

SEQ ID NO: 235192 - protein, 15 aa, Homo sapiens
  CDR3 for beta chain variable domain of TCR clone 117596 (TRBV18, TRBJ1-2)
CASSPSNTPNYGYSF

SEQ ID NO: 235193 - protein, 12 aa, Homo sapiens
  CDR3 for alpha chain variable domain of TCR clone 117597 (TRAV12-2, TRAJ45)
CASGGGSDGLTF

SEQ ID NO: 235194 - protein, 16 aa, Homo sapiens
  CDR3 for beta chain variable domain of TCR clone 117597 (TRBV19, TRBJ2-3)
CASSPGLLASTDTQYF

SEQ ID NO: 235195 - protein, 12 aa, Homo sapiens
  CDR3 for alpha chain variable domain of TCR clone 117598 (TRAV12-3, TRAJ17)
CAMTLTGNKLTF

SEQ ID NO: 235196 - protein, 14 aa, Homo sapiens
  CDR3 for beta chain variable domain of TCR clone 117598 (TRBV20-1, TRBJ2-5)
CSARYRGLQETQYF

SEQ ID NO: 235197 - protein, 14 aa, Homo sapiens
  CDR3 for alpha chain variable domain of TCR clone 117599 (TRAV21, TRAJ37)
CAVKGSSKTGKLIF

SEQ ID NO: 235198 - protein, 14 aa, Homo sapiens
  CDR3 for beta chain variable domain of TCR clone 117599 (TRBV7-2, TRBJ2-1)
CASSRGGARNEQFF

SEQ ID NO: 235199 - protein, 12 aa, Homo sapiens
  CDR3 for alpha chain variable domain of TCR clone 117600 (TRAV27, TRAJ35)
CAGADFGNVLHC

SEQ ID NO: 235200 - protein, 12 aa, Homo sapiens
  CDR3 for beta chain variable domain of TCR clone 117600 (TRBV24-1, TRBJ1-1)
CATLYPDTEAFF

SEQ ID NO: 235201 - protein, 11 aa, Homo sapiens
  CDR3 for alpha chain variable domain of TCR clone 117601 (TRAV12-3, TRAJ17)
CAMTLTGKANF

SEQ ID NO: 235202 - protein, 15 aa, Homo sapiens
  CDR3 for beta chain variable domain of TCR clone 117601 (TRBV20-1, TRBJ2-7)
CSARDRVSGMDEQYF

SEQ ID NO: 235203 - protein, 13 aa, Homo sapiens
  CDR3 for alpha chain variable domain of TCR clone 117602 (TRAV8-1, TRAJ45)
CAVIMNRDDKITF

SEQ ID NO: 235204 - protein, 13 aa, Homo sapiens
  CDR3 for beta chain variable domain of TCR clone 117602 (TRBV10-3, TRBJ2-7)
CASKLAVNYEQYF

SEQ ID NO: 235205 - protein, 16 aa, Homo sapiens
  CDR3 for alpha chain variable domain of TCR clone 117603 (TRAV30, TRAJ24)
CGTEIVDADGWGKFQF

SEQ ID NO: 235206 - protein, 12 aa, Homo sapiens
  CDR3 for beta chain variable domain of TCR clone 117603 (TRBV11-2, TRBJ2-2)
CASSLGGGELFF

SEQ ID NO: 235207 - protein, 14 aa, Homo sapiens
  CDR3 for alpha chain variable domain of TCR clone 117604 (TRAV2, TRAJ22)
CAVPSRGGSKATDL

SEQ ID NO: 235208 - protein, 14 aa, Homo sapiens
  CDR3 for beta chain variable domain of TCR clone 117604 (TRBV7-6, TRBJ2-3)
CASSLGTVTDTQYF

SEQ ID NO: 235209 - protein, 14 aa, Homo sapiens
  CDR3 for alpha chain variable domain of TCR clone 117605 (TRAV26-1, TRAJ38)
CIADNAGNIRKLIW

SEQ ID NO: 235210 - protein, 13 aa, Homo sapiens
  CDR3 for beta chain variable domain of TCR clone 117605 (TRBV20-1, TRBJ1-1)
CSARGGGNTEAFF

SEQ ID NO: 235211 - protein, 15 aa, Homo sapiens
  CDR3 for alpha chain variable domain of TCR clone 117606 (TRAV26-1, TRAJ18)
CIVRVMSSTLGRLYF

SEQ ID NO: 235212 - protein, 14 aa, Homo sapiens
  CDR3 for beta chain variable domain of TCR clone 117606 (TRBV7-2, TRBJ2-5)
CASSPRGSSETQYF

SEQ ID NO: 235213 - protein, 12 aa, Homo sapiens
  CDR3 for alpha chain variable domain of TCR clone 117607 (TRAV12-1, TRAJ40)
CVVYSGTYKYIF

SEQ ID NO: 235214 - protein, 14 aa, Homo sapiens
  CDR3 for beta chain variable domain of TCR clone 117607 (TRBV7-9, TRBJ2-5)
CASSLDTAKETQYF

SEQ ID NO: 235215 - protein, 11 aa, Homo sapiens
  CDR3 for alpha chain variable domain of TCR clone 117608 (TRAV12-2, TRAJ31)
CAVTRWARRMF

SEQ ID NO: 235216 - protein, 15 aa, Homo sapiens
  CDR3 for beta chain variable domain of TCR clone 117608 (TRBV19, TRBJ2-7)
CASSIGGGLVNEQYF

SEQ ID NO: 235217 - protein, 14 aa, Homo sapiens
  CDR3 for alpha chain variable domain of TCR clone 117609 (TRAV5, TRAJ21)
CAESILDNFNKFYF

SEQ ID NO: 235218 - protein, 14 aa, Homo sapiens
  CDR3 for beta chain variable domain of TCR clone 117609 (TRBV7-2, TRBJ1-1)
CASSFLTGTTEAFF

SEQ ID NO: 235219 - protein, 14 aa, Homo sapiens
  CDR3 for alpha chain variable domain of TCR clone 117610 (TRAV38-1, TRAJ29)
CAFITPSGNTPLVF

SEQ ID NO: 235220 - protein, 15 aa, Homo sapiens
  CDR3 for beta chain variable domain of TCR clone 117610 (TRBV15, TRBJ1-1)
CATSLQGGRNTEAFF

SEQ ID NO: 235221 - protein, 13 aa, Homo sapiens
  CDR3 for alpha chain variable domain of TCR clone 117611 (TRAV29/DV5, TRAJ31)
CAASRNNNARLMF

SEQ ID NO: 235222 - protein, 12 aa, Homo sapiens
  CDR3 for beta chain variable domain of TCR clone 117611 (TRBV14, TRBJ2-5)
CASSQLKETQYF

SEQ ID NO: 235223 - protein, 15 aa, Homo sapiens
  CDR3 for alpha chain variable domain of TCR clone 117612 (TRAV21, TRAJ24)
CAARSSTDSWGKLQF

SEQ ID NO: 235224 - protein, 13 aa, Homo sapiens
  CDR3 for beta chain variable domain of TCR clone 117612 (TRBV11-2, TRBJ2-5)
YASSSTGEETQYF

SEQ ID NO: 235225 - protein, 15 aa, Homo sapiens
  CDR3 for alpha chain variable domain of TCR clone 117613 (TRAV8-3, TRAJ27)
CAVGPSKTNAGKSTF

SEQ ID NO: 235226 - protein, 14 aa, Homo sapiens
  CDR3 for beta chain variable domain of TCR clone 117613 (TRBV11-2, TRBJ2-3)
CASSRLARTDTQHF

SEQ ID NO: 235227 - protein, 14 aa, Homo sapiens
  CDR3 for alpha chain variable domain of TCR clone 117614 (TRAV2, TRAJ29)
CAGPFQYGNTPLVF

SEQ ID NO: 235228 - protein, 13 aa, Homo sapiens
  CDR3 for beta chain variable domain of TCR clone 117614 (TRBV7-3, TRBJ1-1)
CASSQDWGAEAFF

SEQ ID NO: 235229 - protein, 12 aa, Homo sapiens
  CDR3 for alpha chain variable domain of TCR clone 117615 (TRAV12-2, TRAJ49)
CAVLNTGNQFYF

SEQ ID NO: 235230 - protein, 15 aa, Homo sapiens
  CDR3 for beta chain variable domain of TCR clone 117615 (TRBV5-8, TRBJ2-3)
CASSLRAGSTDTQYF

SEQ ID NO: 235231 - protein, 13 aa, Homo sapiens
  CDR3 for alpha chain variable domain of TCR clone 117616 (TRAV3, TRAJ3)
CAVADSSASKIIF

SEQ ID NO: 235232 - protein, 12 aa, Homo sapiens
  CDR3 for beta chain variable domain of TCR clone 117616 (TRBV14, TRBJ2-7)
CASSRLKGEQYF

SEQ ID NO: 235233 - protein, 12 aa, Homo sapiens
  CDR3 for alpha chain variable domain of TCR clone 117617 (TRAV8-3, TRAJ20)
CAVGANDYKLSF

SEQ ID NO: 235234 - protein, 16 aa, Homo sapiens
  CDR3 for beta chain variable domain of TCR clone 117617 (TRBV4-2, TRBJ2-1)
CASSQETATPYNEQFF

SEQ ID NO: 235235 - protein, 12 aa, Homo sapiens
  CDR3 for alpha chain variable domain of TCR clone 117618 (TRAV8-3, TRAJ27)
CAVGAEAGKSTF

SEQ ID NO: 235236 - protein, 14 aa, Homo sapiens
  CDR3 for beta chain variable domain of TCR clone 117618 (TRBV2, TRBJ2-1)
CASRLIVGHDGQFF

SEQ ID NO: 235237 - protein, 13 aa, Homo sapiens
  CDR3 for alpha chain variable domain of TCR clone 117619 (TRAV8-3, TRAJ20)
CAVGRPNDYKLSF

SEQ ID NO: 235238 - protein, 14 aa, Homo sapiens
  CDR3 for beta chain variable domain of TCR clone 117619 (TRBV12-5, TRBJ2-5)
CASGSRTHQETRYF

SEQ ID NO: 235239 - protein, 14 aa, Homo sapiens
  CDR3 for alpha chain variable domain of TCR clone 117620 (TRAV12-1, TRAJ17)
CVVNYKAAGNKLTF

SEQ ID NO: 235240 - protein, 13 aa, Homo sapiens
  CDR3 for beta chain variable domain of TCR clone 117620 (TRBV12-4, TRBJ1-2)
CASSSGLTVISTF

SEQ ID NO: 235241 - protein, 14 aa, Homo sapiens
  CDR3 for alpha chain variable domain of TCR clone 117621 (TRAV23/DV6, TRAJ57)
CAASNRGGSEKLVF

SEQ ID NO: 235242 - protein, 13 aa, Homo sapiens
  CDR3 for beta chain variable domain of TCR clone 117621 (TRBV11-2, TRBJ2-7)
CASSSYPSYEQYF

SEQ ID NO: 235243 - protein, 12 aa, Homo sapiens
  CDR3 for alpha chain variable domain of TCR clone 117622 (TRAV12-1, TRAJ40)
CVVNGETYKYIF

SEQ ID NO: 235244 - protein, 13 aa, Homo sapiens
  CDR3 for beta chain variable domain of TCR clone 117622 (TRBV4-2, TRBJ1-1)
CASSQAGNTEAFF

SEQ ID NO: 235245 - protein, 14 aa, Homo sapiens
  CDR3 for alpha chain variable domain of TCR clone 117623 (TRAV17, TRAJ57)
CATDPQGGTEKLVF

SEQ ID NO: 235246 - protein, 18 aa, Homo sapiens
  CDR3 for beta chain variable domain of TCR clone 117623 (TRBV20-1, TRBJ2-3)
CSASGLAGGPGTTDTQYF

SEQ ID NO: 235247 - protein, 14 aa, Homo sapiens
  CDR3 for alpha chain variable domain of TCR clone 117624 (TRAV1-2, TRAJ16)
CAVNRVSDGQKLLF

SEQ ID NO: 235248 - protein, 16 aa, Homo sapiens
  CDR3 for beta chain variable domain of TCR clone 117624 (TRBV7-2, TRBJ2-7)
CASSLDLSGGAYEQYF

SEQ ID NO: 235249 - protein, 12 aa, Homo sapiens
  CDR3 for alpha chain variable domain of TCR clone 117625 (TRAV29/DV5, TRAJ15)
CASNQAGTALIF

SEQ ID NO: 235250 - protein, 14 aa, Homo sapiens
  CDR3 for beta chain variable domain of TCR clone 117625 (TRBV19, TRBJ2-1)
CASPTFVLSGEQFL

SEQ ID NO: 235251 - protein, 13 aa, Homo sapiens
  CDR3 for alpha chain variable domain of TCR clone 117626 (TRAV21, TRAJ20)
CAVGLRVDYKLSF

SEQ ID NO: 235252 - protein, 15 aa, Homo sapiens
  CDR3 for beta chain variable domain of TCR clone 117626 (TRBV4-1, TRBJ2-7)
CASSQNTGRLYEQYF

SEQ ID NO: 235253 - protein, 14 aa, Homo sapiens
  CDR3 for alpha chain variable domain of TCR clone 117627 (TRAV17, TRAJ15)
CATSPNQAGTALIF

SEQ ID NO: 235254 - protein, 15 aa, Homo sapiens
  CDR3 for beta chain variable domain of TCR clone 117627 (TRBV11-2, TRBJ2-2)
CASSSDRVNAGELFF

SEQ ID NO: 235255 - protein, 15 aa, Homo sapiens
  CDR3 for alpha chain variable domain of TCR clone 117628 (TRAV3, TRAJ13)
CAVRDIGGGYQKVTF

SEQ ID NO: 235256 - protein, 13 aa, Homo sapiens
  CDR3 for beta chain variable domain of TCR clone 117628 (TRBV10-3, TRBJ2-7)
CASKLAVNYEQYF

SEQ ID NO: 235257 - protein, 14 aa, Homo sapiens
  CDR3 for alpha chain variable domain of TCR clone 117629 (TRAV29/DV5, TRAJ30)
CAARLMNRDDKIIF

SEQ ID NO: 235258 - protein, 17 aa, Homo sapiens
  CDR3 for beta chain variable domain of TCR clone 117629 (TRBV12-4, TRBJ2-3)
CASSGPGPAGGADTQYF

SEQ ID NO: 235259 - protein, 15 aa, Homo sapiens
  CDR3 for alpha chain variable domain of TCR clone 117630 (TRAV3, TRAJ22)
CAVRDRGGSARQLTF

SEQ ID NO: 235260 - protein, 15 aa, Homo sapiens
  CDR3 for beta chain variable domain of TCR clone 117630 (TRBV19, TRBJ2-3)
CASSIAGGSTDTQYF

SEQ ID NO: 235261 - protein, 15 aa, Homo sapiens
  CDR3 for alpha chain variable domain of TCR clone 117631 (TRAV26-1, TRAJ29)
CIVRVEGSGKPPLVF

SEQ ID NO: 235262 - protein, 15 aa, Homo sapiens
  CDR3 for beta chain variable domain of TCR clone 117631 (TRBV7-9, TRBJ1-5)
CASSQGHQPNQPQHF

SEQ ID NO: 235263 - protein, 16 aa, Homo sapiens
  CDR3 for alpha chain variable domain of TCR clone 117632 (TRAV9-2, TRAJ10)
CALSEGGTGGGNKLNF

SEQ ID NO: 235264 - protein, 16 aa, Homo sapiens
  CDR3 for beta chain variable domain of TCR clone 117632 (TRBV7-2, TRBJ1-4)
CASSPVGRFDREKLFF

SEQ ID NO: 235265 - protein, 16 aa, Homo sapiens
  CDR3 for alpha chain variable domain of TCR clone 117633 (TRAV13-1, TRAJ17)
CAASKGVKAAGNKLTF

SEQ ID NO: 235266 - protein, 15 aa, Homo sapiens
  CDR3 for beta chain variable domain of TCR clone 117633 (TRBV20-1, TRBJ1-5)
CSAREGGYRNQPQHF

SEQ ID NO: 235267 - protein, 12 aa, Homo sapiens
  CDR3 for alpha chain variable domain of TCR clone 117634 (TRAV12-2, TRAJ17)
CAMTLTGNKLTF

SEQ ID NO: 235268 - protein, 17 aa, Homo sapiens
  CDR3 for beta chain variable domain of TCR clone 117634 (TRBV7-3, TRBJ2-3)
CASSLMKRMRGADTQYF

SEQ ID NO: 235269 - protein, 14 aa, Homo sapiens
  CDR3 for alpha chain variable domain of TCR clone 117635 (TRAV1-2, TRAJ16)
CVVNRFSDGQKLLF

SEQ ID NO: 235270 - protein, 13 aa, Homo sapiens
  CDR3 for beta chain variable domain of TCR clone 117635 (TRBV5-5, TRBJ1-2)
CASSFRRGEDYTF

SEQ ID NO: 235271 - protein, 14 aa, Homo sapiens
  CDR3 for alpha chain variable domain of TCR clone 117636 (TRAV9-2, TRAJ39)
CALYIYNAGNMLTF

SEQ ID NO: 235272 - protein, 15 aa, Homo sapiens
  CDR3 for beta chain variable domain of TCR clone 117636 (TRBV5-7, TRBJ1-2)
CASSLGVAANYGYTF

SEQ ID NO: 235273 - protein, 12 aa, Homo sapiens
  CDR3 for alpha chain variable domain of TCR clone 117637 (TRAV21, TRAJ29)
CAVTSGTTPLVF

SEQ ID NO: 235274 - protein, 15 aa, Homo sapiens
  CDR3 for beta chain variable domain of TCR clone 117637 (TRBV12-4, TRBJ1-2)
CASRLGVAGNYGYTF

SEQ ID NO: 235275 - protein, 10 aa, Homo sapiens
  CDR3 for alpha chain variable domain of TCR clone 117638 (TRAV13-1, TRAJ49)
CAVPGNQFYF

SEQ ID NO: 235276 - protein, 13 aa, Homo sapiens
  CDR3 for beta chain variable domain of TCR clone 117638 (TRBV5-1, TRBJ1-5)
CASSLAQDQPQHF

SEQ ID NO: 235277 - protein, 12 aa, Homo sapiens
  CDR3 for alpha chain variable domain of TCR clone 117639 (TRAV1-1, TRAJ29)
CAVEFRKHTSCL

SEQ ID NO: 235278 - protein, 15 aa, Homo sapiens
  CDR3 for beta chain variable domain of TCR clone 117639 (TRBV19, TRBJ2-1)
CASSSPGVPLDEQLF

SEQ ID NO: 235279 - protein, 15 aa, Homo sapiens
  CDR3 for alpha chain variable domain of TCR clone 117640 (TRAV26-1, TRAJ29)
CIVRVEGAGNTPLVF

SEQ ID NO: 235280 - protein, 14 aa, Homo sapiens
  CDR3 for beta chain variable domain of TCR clone 117640 (TRBV25-1, TRBJ1-1)
CASTHLGGNTEAFF

SEQ ID NO: 235281 - protein, 12 aa, Homo sapiens
  CDR3 for alpha chain variable domain of TCR clone 117641 (TRAV3, TRAJ20)
CAVRDPDYKLSF

SEQ ID NO: 235282 - protein, 15 aa, Homo sapiens
  CDR3 for beta chain variable domain of TCR clone 117641 (TRBV5-7, TRBJ2-1)
CASSRRLAGDNEQFF

SEQ ID NO: 235283 - protein, 15 aa, Homo sapiens
  CDR3 for alpha chain variable domain of TCR clone 117642 (TRAV27, TRAJ38)
CAGRFNAGNNRKLIW

SEQ ID NO: 235284 - protein, 13 aa, Homo sapiens
  CDR3 for beta chain variable domain of TCR clone 117642 (TRBV7-3, TRBJ1-1)
CASSQDWGAEAFF

SEQ ID NO: 235285 - protein, 11 aa, Homo sapiens
  CDR3 for alpha chain variable domain of TCR clone 117643 (TRAV1-2, TRAJ40)
CAVPGTYRYIF

SEQ ID NO: 235286 - protein, 13 aa, Homo sapiens
  CDR3 for beta chain variable domain of TCR clone 117643 (TRBV12-4, TRBJ1-2)
CASSLRQGKGYTF

SEQ ID NO: 235287 - protein, 14 aa, Homo sapiens
  CDR3 for alpha chain variable domain of TCR clone 117644 (TRAV29/DV5, TRAJ4)
CAATVLGGYNKLIF

SEQ ID NO: 235288 - protein, 12 aa, Homo sapiens
  CDR3 for beta chain variable domain of TCR clone 117644 (TRBV28, TRBJ2-6)
CAIQAGANVLTF

SEQ ID NO: 235289 - protein, 16 aa, Homo sapiens
  CDR3 for alpha chain variable domain of TCR clone 117645 (TRAV30, TRAJ24)
CGTEIVDADSWGKFQF

SEQ ID NO: 235290 - protein, 16 aa, Homo sapiens
  CDR3 for beta chain variable domain of TCR clone 117645 (TRBV6-5, TRBJ2-6)
CASSYPLSSGANVLTF

SEQ ID NO: 235291 - protein, 14 aa, Homo sapiens
  CDR3 for alpha chain variable domain of TCR clone 117646 (TRAV17, TRAJ4)
CATAPLGGYNKLIF

SEQ ID NO: 235292 - protein, 13 aa, Homo sapiens
  CDR3 for beta chain variable domain of TCR clone 117646 (TRBV12-4, TRBJ1-3)
CASSLASGDTIYF

SEQ ID NO: 235293 - protein, 12 aa, Homo sapiens
  CDR3 for alpha chain variable domain of TCR clone 117647 (TRAV12-3, TRAJ17)
CAMTLTGNKLTF

SEQ ID NO: 235294 - protein, 15 aa, Homo sapiens
  CDR3 for beta chain variable domain of TCR clone 117647 (TRBV7-2, TRBJ2-1)
CASSSGLAGGNERFF

SEQ ID NO: 235295 - protein, 14 aa, Homo sapiens
  CDR3 for alpha chain variable domain of TCR clone 117648 (TRAV3, TRAJ21)
CAVRDAYNYNKFYF

SEQ ID NO: 235296 - protein, 17 aa, Homo sapiens
  CDR3 for beta chain variable domain of TCR clone 117648 (TRBV20-1, TRBJ1-6)
CSARGGYTFSYNSPLHF

SEQ ID NO: 235297 - protein, 17 aa, Homo sapiens
  CDR3 for alpha chain variable domain of TCR clone 117649 (TRAV8-1, TRAJ42)
CAVKWGDYGGSQGNLIF

SEQ ID NO: 235298 - protein, 15 aa, Homo sapiens
  CDR3 for beta chain variable domain of TCR clone 117649 (TRBV9, TRBJ1-6)
CASSVAGTGDSPLHF

SEQ ID NO: 235299 - protein, 14 aa, Homo sapiens
  CDR3 for alpha chain variable domain of TCR clone 117650 (TRAV13-2, TRAJ11)
CAETGNSGYSTLTF

SEQ ID NO: 235300 - protein, 17 aa, Homo sapiens
  CDR3 for beta chain variable domain of TCR clone 117650 (TRBV19, TRBJ2-7)
CASSISFYDSYPYEQYF

SEQ ID NO: 235301 - protein, 17 aa, Homo sapiens
  CDR3 for alpha chain variable domain of TCR clone 117651 (TRAV3, TRAJ38)
CAVRDCLNAGNNRKLIW

SEQ ID NO: 235302 - protein, 11 aa, Homo sapiens
  CDR3 for beta chain variable domain of TCR clone 117651 (TRBV19, TRBJ1-1)
CASSIGSEAFF

SEQ ID NO: 235303 - protein, 15 aa, Homo sapiens
  CDR3 for alpha chain variable domain of TCR clone 117652 (TRAV25, TRAJ52)
CAGTSGGTSYGTLTF

SEQ ID NO: 235304 - protein, 16 aa, Homo sapiens
  CDR3 for beta chain variable domain of TCR clone 117652 (TRBV15, TRBJ1-2)
CATSRGPRTGGGGYTF

SEQ ID NO: 235305 - protein, 14 aa, Homo sapiens
  CDR3 for alpha chain variable domain of TCR clone 117653 (TRAV1-2, TRAJ6)
CAVSLSGGSYIPTV

SEQ ID NO: 235306 - protein, 15 aa, Homo sapiens
  CDR3 for beta chain variable domain of TCR clone 117653 (TRBV28, TRBJ2-7)
CASSPGGRGFYEQYF

SEQ ID NO: 235307 - protein, 14 aa, Homo sapiens
  CDR3 for alpha chain variable domain of TCR clone 117654 (TRAV13-1, TRAJ44)
CAAKATGTASKLTF

SEQ ID NO: 235308 - protein, 16 aa, Homo sapiens
  CDR3 for beta chain variable domain of TCR clone 117654 (TRBV7-2, TRBJ2-5)
CASSSKWLSGQETQYF

SEQ ID NO: 235309 - protein, 14 aa, Homo sapiens
  CDR3 for alpha chain variable domain of TCR clone 117655 (TRAV12-2, TRAJ40)
CAVKIPPGTYKYIF

SEQ ID NO: 235310 - protein, 14 aa, Homo sapiens
  CDR3 for beta chain variable domain of TCR clone 117655 (TRBV7-2, TRBJ2-7)
CASSPKTSFYEQYS

SEQ ID NO: 235311 - protein, 16 aa, Homo sapiens
  CDR3 for alpha chain variable domain of TCR clone 117656 (TRAV8-2, TRAJ45)
CVVSEGTGGGADGLTF

SEQ ID NO: 235312 - protein, 15 aa, Homo sapiens
  CDR3 for beta chain variable domain of TCR clone 117656 (TRBV7-9, TRBJ2-5)
CVSSLVAGGLETQYF

SEQ ID NO: 235313 - protein, 13 aa, Homo sapiens
  CDR3 for alpha chain variable domain of TCR clone 117657 (TRAV3, TRAJ21)
CAVREPDFNKFYF

SEQ ID NO: 235314 - protein, 14 aa, Homo sapiens
  CDR3 for beta chain variable domain of TCR clone 117657 (TRBV4-1, TRBJ2-2)
CASSQAVNTGELFS

SEQ ID NO: 235315 - protein, 15 aa, Homo sapiens
  CDR3 for alpha chain variable domain of TCR clone 117658 (TRAV8-3, TRAJ6)
CAVGEDRGGSYIPTF

SEQ ID NO: 235316 - protein, 12 aa, Homo sapiens
  CDR3 for beta chain variable domain of TCR clone 117658 (TRBV7-8, TRBJ2-7)
CASSLGDREQYF

SEQ ID NO: 235317 - protein, 15 aa, Homo sapiens
  CDR3 for alpha chain variable domain of TCR clone 117659 (TRAV12-3, TRAJ49)
CAMAVTPNTGNHFYF

SEQ ID NO: 235318 - protein, 14 aa, Homo sapiens
  CDR3 for beta chain variable domain of TCR clone 117659 (TRBV7-8, TRBJ2-3)
CASSLEAGTDTQYF

SEQ ID NO: 235319 - protein, 15 aa, Homo sapiens
  CDR3 for alpha chain variable domain of TCR clone 117660 (TRAV13-2, TRAJ45)
CAESDSGGGADGLTF

SEQ ID NO: 235320 - protein, 13 aa, Homo sapiens
  CDR3 for beta chain variable domain of TCR clone 117660 (TRBV12-4, TRBJ1-1)
CASSPGTGFEAFF

SEQ ID NO: 235321 - protein, 11 aa, Homo sapiens
  CDR3 for alpha chain variable domain of TCR clone 117661 (TRAV26-2, TRAJ13)
CASGGYQKVTF

SEQ ID NO: 235322 - protein, 16 aa, Homo sapiens
  CDR3 for beta chain variable domain of TCR clone 117661 (TRBV6-1, TRBJ2-5)
CASSETLDRGAETQYF

SEQ ID NO: 235323 - protein, 16 aa, Homo sapiens
  CDR3 for alpha chain variable domain of TCR clone 117662 (TRAV3, TRAJ10)
CAVRDMRAGGGNKLTF

SEQ ID NO: 235324 - protein, 14 aa, Homo sapiens
  CDR3 for beta chain variable domain of TCR clone 117662 (TRBV25-1, TRBJ1-1)
CASIHLGGNTEAFF

SEQ ID NO: 235325 - protein, 12 aa, Homo sapiens
  CDR3 for alpha chain variable domain of TCR clone 117663 (TRAV8-4, TRAJ37)
CAVRRNTGKLIF

SEQ ID NO: 235326 - protein, 16 aa, Homo sapiens
  CDR3 for beta chain variable domain of TCR clone 117663 (TRBV7-2, TRBJ2-3)
CASSLVGDASTDTQYF

SEQ ID NO: 235327 - protein, 16 aa, Homo sapiens
  CDR3 for alpha chain variable domain of TCR clone 117664 (TRAV4, TRAJ22)
CLVGDLYSGSARQLTF

SEQ ID NO: 235328 - protein, 12 aa, Homo sapiens
  CDR3 for beta chain variable domain of TCR clone 117664 (TRBV11-2, TRBJ2-5)
CASSLVGETQYF

SEQ ID NO: 235329 - protein, 13 aa, Homo sapiens
  CDR3 for alpha chain variable domain of TCR clone 117665 (TRAV21, TRAJ27)
CAALNTNAGKSTF

SEQ ID NO: 235330 - protein, 12 aa, Homo sapiens
  CDR3 for beta chain variable domain of TCR clone 117665 (TRBV11-2, TRBJ2-2)
CASSLGGGELFF

SEQ ID NO: 235331 - protein, 14 aa, Homo sapiens
  CDR3 for alpha chain variable domain of TCR clone 117666 (TRAV12-2, TRAJ13)
CAVKMTGGYQKVTF

SEQ ID NO: 235332 - protein, 18 aa, Homo sapiens
  CDR3 for beta chain variable domain of TCR clone 117666 (TRBV24-1, TRBJ2-2)
CATSDSGQGTANTGELFF

SEQ ID NO: 235333 - protein, 13 aa, Homo sapiens
  CDR3 for alpha chain variable domain of TCR clone 117667 (TRAV13-1, TRAJ43)
CAASKNNNNDMRF

SEQ ID NO: 235334 - protein, 13 aa, Homo sapiens
  CDR3 for beta chain variable domain of TCR clone 117667 (TRBV4-2, TRBJ1-1)
CASSQDGNTEAFF

SEQ ID NO: 235335 - protein, 13 aa, Homo sapiens
  CDR3 for alpha chain variable domain of TCR clone 117668 (TRAV20, TRAJ37)
CAGCSSNTGKLIF

SEQ ID NO: 235336 - protein, 21 aa, Homo sapiens
  CDR3 for beta chain variable domain of TCR clone 117668 (TRBV4-2, TRBJ2-3)
PWSQKTRPCISVPAAPDTQYF

SEQ ID NO: 235337 - protein, 13 aa, Homo sapiens
  CDR3 for alpha chain variable domain of TCR clone 117669 (TRAV2, TRAJ15)
CAVASQAGTALIF

SEQ ID NO: 235338 - protein, 16 aa, Homo sapiens
  CDR3 for beta chain variable domain of TCR clone 117669 (TRBV5-1, TRBJ1-1)
CASSSGGNSLNTEDFF

SEQ ID NO: 235339 - protein, 14 aa, Homo sapiens
  CDR3 for alpha chain variable domain of TCR clone 117670 (TRAV12-2, TRAJ13)
CAVKETGGYQKVTF

SEQ ID NO: 235340 - protein, 16 aa, Homo sapiens
  CDR3 for beta chain variable domain of TCR clone 117670 (TRBV12-5, TRBJ2-5)
CASGPRTSGNQETQYF

SEQ ID NO: 235341 - protein, 11 aa, Homo sapiens
  CDR3 for alpha chain variable domain of TCR clone 117671 (TRAV2, TRAJ21)
CAVFNFNKFYF

SEQ ID NO: 235342 - protein, 14 aa, Homo sapiens
  CDR3 for beta chain variable domain of TCR clone 117671 (TRBV15, TRBJ2-3)
CATRSGTSTDTQYC

SEQ ID NO: 235343 - protein, 15 aa, Homo sapiens
  CDR3 for alpha chain variable domain of TCR clone 117672 (TRAV8-3, TRAJ4)
CAVGARIGGYNKLIF

SEQ ID NO: 235344 - protein, 11 aa, Homo sapiens
  CDR3 for beta chain variable domain of TCR clone 117672 (TRBV29-1, TRBJ2-5)
CSEDRTGTQYF

SEQ ID NO: 235345 - protein, 14 aa, Homo sapiens
  CDR3 for alpha chain variable domain of TCR clone 117673 (TRAV8-1, TRAJ22)
CAAPSSGSARQLTF

SEQ ID NO: 235346 - protein, 14 aa, Homo sapiens
  CDR3 for beta chain variable domain of TCR clone 117673 (TRBV19, TRBJ2-1)
CASPTFVLSGEQFF

SEQ ID NO: 235347 - protein, 14 aa, Homo sapiens
  CDR3 for alpha chain variable domain of TCR clone 117674 (TRAV8-3, TRAJ39)
CAVGANNAGNMLTF

SEQ ID NO: 235348 - protein, 12 aa, Homo sapiens
  CDR3 for beta chain variable domain of TCR clone 117674 (TRBV11-2, TRBJ2-1)
CASSPGNNEQFF

SEQ ID NO: 235349 - protein, 11 aa, Homo sapiens
  CDR3 for alpha chain variable domain of TCR clone 117675 (TRAV4, TRAJ31)
CLVGVNARLMF

SEQ ID NO: 235350 - protein, 14 aa, Homo sapiens
  CDR3 for beta chain variable domain of TCR clone 117675 (TRBV4-1, TRBJ2-2)
CASSQAVNTGELFF

SEQ ID NO: 235351 - protein, 11 aa, Homo sapiens
  CDR3 for alpha chain variable domain of TCR clone 117676 (TRAV21, TRAJ34)
CAVTNTDKLIF

SEQ ID NO: 235352 - protein, 14 aa, Homo sapiens
  CDR3 for beta chain variable domain of TCR clone 117676 (TRBV11-2, TRBJ2-7)
CASSSLADGYEQYF

SEQ ID NO: 235353 - protein, 11 aa, Homo sapiens
  CDR3 for alpha chain variable domain of TCR clone 117677 (TRAV1-2, TRAJ31)
CAVNNNARLMF

SEQ ID NO: 235354 - protein, 15 aa, Homo sapiens
  CDR3 for beta chain variable domain of TCR clone 117677 (TRBV28, TRBJ2-1)
CASSIIPGGRSEQFF

SEQ ID NO: 235355 - protein, 15 aa, Homo sapiens
  CDR3 for alpha chain variable domain of TCR clone 117678 (TRAV3, TRAJ47)
CVVRDIGEYGNKLVF

SEQ ID NO: 235356 - protein, 14 aa, Homo sapiens
  CDR3 for beta chain variable domain of TCR clone 117678 (TRBV13, TRBJ2-5)
CASSLERVGEAQYF

SEQ ID NO: 235357 - protein, 13 aa, Homo sapiens
  CDR3 for alpha chain variable domain of TCR clone 117679 (TRAV30, TRAJ24)
CGTVTDSWGKLQF

SEQ ID NO: 235358 - protein, 14 aa, Homo sapiens
  CDR3 for beta chain variable domain of TCR clone 117679 (TRBV6-3, TRBJ2-2)
CASTYTPDIGELFF

SEQ ID NO: 235359 - protein, 12 aa, Homo sapiens
  CDR3 for alpha chain variable domain of TCR clone 117680 (TRAV3, TRAJ20)
CAVRDPDYKLSF

SEQ ID NO: 235360 - protein, 17 aa, Homo sapiens
  CDR3 for beta chain variable domain of TCR clone 117680 (TRBV5-4, TRBJ2-1)
CASSSAGGRGPYNEQFF

SEQ ID NO: 235361 - protein, 14 aa, Homo sapiens
  CDR3 for alpha chain variable domain of TCR clone 117681 (TRAV23/DV6, TRAJ27)
CAASRDTNAGKSTF

SEQ ID NO: 235362 - protein, 16 aa, Homo sapiens
  CDR3 for beta chain variable domain of TCR clone 117681 (TRBV7-2, TRBJ2-7)
CASSLEAGGPWYEQYF

SEQ ID NO: 235363 - protein, 10 aa, Homo sapiens
  CDR3 for alpha chain variable domain of TCR clone 117682 (TRAV20, TRAJ22)
CAAPARQLTF

SEQ ID NO: 235364 - protein, 14 aa, Homo sapiens
  CDR3 for beta chain variable domain of TCR clone 117682 (TRBV18, TRBJ2-7)
CASSPRGGAYEQYF

SEQ ID NO: 235365 - protein, 11 aa, Homo sapiens
  CDR3 for alpha chain variable domain of TCR clone 117683 (TRAV23/DV6, TRAJ58)
CAARLLRGETS

SEQ ID NO: 235366 - protein, 15 aa, Homo sapiens
  CDR3 for beta chain variable domain of TCR clone 117683 (TRBV25-1, TRBJ1-4)
CASSPGDSTNEKLFF

SEQ ID NO: 235367 - protein, 14 aa, Homo sapiens
  CDR3 for alpha chain variable domain of TCR clone 117684 (TRAV17, TRAJ54)
CATDANQGSQKLVF

SEQ ID NO: 235368 - protein, 12 aa, Homo sapiens
  CDR3 for beta chain variable domain of TCR clone 117684 (TRBV6-3, TRBJ2-1)
CASSGSYNEQFF

SEQ ID NO: 235369 - protein, 15 aa, Homo sapiens
  CDR3 for alpha chain variable domain of TCR clone 117685 (TRAV8-3, TRAJ27)
CAVGPSKTNAGKSTF

SEQ ID NO: 235370 - protein, 12 aa, Homo sapiens
  CDR3 for beta chain variable domain of TCR clone 117685 (TRBV24-1, TRBJ1-1)
CATLYPDTEAFF

SEQ ID NO: 235371 - protein, 15 aa, Homo sapiens
  CDR3 for alpha chain variable domain of TCR clone 117686 (TRAV12-3, TRAJ6)
CAMSAASGGSYIPTF

SEQ ID NO: 235372 - protein, 13 aa, Homo sapiens
  CDR3 for beta chain variable domain of TCR clone 117686 (TRBV20-1, TRBJ1-2)
RSASPEFNYGYTF

SEQ ID NO: 235373 - protein, 23 aa, Homo sapiens
  CDR3 for alpha chain variable domain of TCR clone 117687 (TRAV4, TRAJ26)
IPADRKSSTLSLPRVYYGQNFVL

SEQ ID NO: 235374 - protein, 16 aa, Homo sapiens
  CDR3 for beta chain variable domain of TCR clone 117687 (TRBV7-2, TRBJ1-2)
CASSSNQDRRGHGYTF

SEQ ID NO: 235375 - protein, 14 aa, Homo sapiens
  CDR3 for alpha chain variable domain of TCR clone 117688 (TRAV12-2, TRAJ40)
CAVKIPSGTYKYIF

SEQ ID NO: 235376 - protein, 20 aa, Homo sapiens
  CDR3 for beta chain variable domain of TCR clone 117688 (TRBV28, TRBJ2-1)
CASTPIGRSPELAGGNEQFF

SEQ ID NO: 235377 - protein, 14 aa, Homo sapiens
  CDR3 for alpha chain variable domain of TCR clone 117689 (TRAV23/DV6, TRAJ4)
CAAPSSGGYNKLIF

SEQ ID NO: 235378 - protein, 13 aa, Homo sapiens
  CDR3 for beta chain variable domain of TCR clone 117689 (TRBV7-2, TRBJ2-2)
CASSLAVTGELFF

SEQ ID NO: 235379 - protein, 13 aa, Homo sapiens
  CDR3 for alpha chain variable domain of TCR clone 117690 (TRAV8-4, TRAJ49)
CAVRTLTGNQFYF

SEQ ID NO: 235380 - protein, 13 aa, Homo sapiens
  CDR3 for beta chain variable domain of TCR clone 117690 (TRBV19, TRBJ1-5)
CASSIGGEQPQHF

SEQ ID NO: 235381 - protein, 16 aa, Homo sapiens
  CDR3 for alpha chain variable domain of TCR clone 117691 (TRAV12-3, TRAJ53)
CAMSPGSGGSNYKMTF

SEQ ID NO: 235382 - protein, 14 aa, Homo sapiens
  CDR3 for beta chain variable domain of TCR clone 117691 (TRBV4-2, TRBJ2-1)
CASGLDRAYNEQFF

SEQ ID NO: 235383 - protein, 14 aa, Homo sapiens
  CDR3 for alpha chain variable domain of TCR clone 117692 (TRAV13-1, TRAJ12)
CAASYMDSSYELIF

SEQ ID NO: 235384 - protein, 13 aa, Homo sapiens
  CDR3 for beta chain variable domain of TCR clone 117692 (TRBV2, TRBJ2-5)
CASSDGIQETQYF

SEQ ID NO: 235385 - protein, 13 aa, Homo sapiens
  CDR3 for alpha chain variable domain of TCR clone 117693 (TRAV35, TRAJ43)
CAGYPYNNNDMRF

SEQ ID NO: 235386 - protein, 15 aa, Homo sapiens
  CDR3 for beta chain variable domain of TCR clone 117693 (TRBV25-1, TRBJ1-4)
CASSKRIATNDKLFF

SEQ ID NO: 235387 - protein, 21 aa, Homo sapiens
  CDR3 for alpha chain variable domain of TCR clone 117694 (TRAV1-2, TRAJ37)
CVLPLCCERFHGSGNTGKLIF

SEQ ID NO: 235388 - protein, 14 aa, Homo sapiens
  CDR3 for beta chain variable domain of TCR clone 117694 (TRBV2, TRBJ2-5)
CASSEVLAQETQYF

SEQ ID NO: 235389 - protein, 14 aa, Homo sapiens
  CDR3 for alpha chain variable domain of TCR clone 117695 (TRAV1-2, TRAJ8)
CAVREDTGFQKLVF

SEQ ID NO: 235390 - protein, 16 aa, Homo sapiens
  CDR3 for beta chain variable domain of TCR clone 117695 (TRBV2, TRBJ1-1)
CASSPPNRGMNTEAFF

SEQ ID NO: 235391 - protein, 14 aa, Homo sapiens
  CDR3 for alpha chain variable domain of TCR clone 117696 (TRAV1-2, TRAJ8)
CAVREDTGFQKLVF

SEQ ID NO: 235392 - protein, 15 aa, Homo sapiens
  CDR3 for beta chain variable domain of TCR clone 117696 (TRBV7-9, TRBJ1-6)
CASSSPGRGNSPLHC

SEQ ID NO: 235393 - protein, 15 aa, Homo sapiens
  CDR3 for alpha chain variable domain of TCR clone 117697 (TRAV35, TRAJ40)
CAGQLGQAGTYKYIF

SEQ ID NO: 235394 - protein, 12 aa, Homo sapiens
  CDR3 for beta chain variable domain of TCR clone 117697 (TRBV11-2, TRBJ2-2)
CASSLGGGELFF

SEQ ID NO: 235395 - protein, 13 aa, Homo sapiens
  CDR3 for alpha chain variable domain of TCR clone 117698 (TRAV8-3, TRAJ12)
WVLRMDSSYKLIF

SEQ ID NO: 235396 - protein, 15 aa, Homo sapiens
  CDR3 for beta chain variable domain of TCR clone 117698 (TRBV6-5, TRBJ1-5)
CASSYSWGSNQPQHF

SEQ ID NO: 235397 - protein, 12 aa, Homo sapiens
  CDR3 for alpha chain variable domain of TCR clone 117699 (TRAV13-2, TRAJ8)
CAPWLGFQKLAF

SEQ ID NO: 235398 - protein, 12 aa, Homo sapiens
  CDR3 for beta chain variable domain of TCR clone 117699 (TRBV7-3, TRBJ2-1)
CASSFQSGPQFF

SEQ ID NO: 235399 - protein, 16 aa, Homo sapiens
  CDR3 for alpha chain variable domain of TCR clone 117700 (TRAV3, TRAJ37)
CAVRPHGSGNTGTLIF

SEQ ID NO: 235400 - protein, 14 aa, Homo sapiens
  CDR3 for beta chain variable domain of TCR clone 117700 (TRBV2, TRBJ2-1)
CASSDRAYYNEQFF

SEQ ID NO: 235401 - protein, 14 aa, Homo sapiens
  CDR3 for alpha chain variable domain of TCR clone 117701 (TRAV2, TRAJ9)
CAAEDRSGGFKTIF

SEQ ID NO: 235402 - protein, 17 aa, Homo sapiens
  CDR3 for beta chain variable domain of TCR clone 117701 (TRBV20-1, TRBJ2-7)
CSATRAGGVAGVEEQYF

SEQ ID NO: 235403 - protein, 13 aa, Homo sapiens
  CDR3 for alpha chain variable domain of TCR clone 117702 (TRAV23/DV6, TRAJ16)
CAASIPDGQKLLF

SEQ ID NO: 235404 - protein, 15 aa, Homo sapiens
  CDR3 for beta chain variable domain of TCR clone 117702 (TRBV2, TRBJ2-2)
CASSRETVGTGELFF

SEQ ID NO: 235405 - protein, 14 aa, Homo sapiens
  CDR3 for alpha chain variable domain of TCR clone 117703 (TRAV12-2, TRAJ13)
CAVKKTGGDQKVTF

SEQ ID NO: 235406 - protein, 17 aa, Homo sapiens
  CDR3 for beta chain variable domain of TCR clone 117703 (TRBV13, TRBJ2-3)
CASSLSRVAGGRNTQYF

SEQ ID NO: 235407 - protein, 15 aa, Homo sapiens
  CDR3 for alpha chain variable domain of TCR clone 117704 (TRAV1-2, TRAJ26)
CAVRDLITMVRILSL

SEQ ID NO: 235408 - protein, 18 aa, Homo sapiens
  CDR3 for beta chain variable domain of TCR clone 117704 (TRBV11-2, TRBJ2-3)
CASSLGGASRGAPNTQYF

SEQ ID NO: 235409 - protein, 14 aa, Homo sapiens
  CDR3 for alpha chain variable domain of TCR clone 117705 (TRAV38-1, TRAJ45)
CAYYSGGGADGLTV

SEQ ID NO: 235410 - protein, 20 aa, Homo sapiens
  CDR3 for beta chain variable domain of TCR clone 117705 (TRBV28, TRBJ2-1)
CASTPIGRSPGLAGGNEQFF

SEQ ID NO: 235411 - protein, 12 aa, Homo sapiens
  CDR3 for alpha chain variable domain of TCR clone 117706 (TRAV21, TRAJ11)
CAVRGGNSTLTV

SEQ ID NO: 235412 - protein, 15 aa, Homo sapiens
  CDR3 for beta chain variable domain of TCR clone 117706 (TRBV6-1, TRBJ2-7)
CASSEPIAATTEQYF

SEQ ID NO: 235413 - protein, 13 aa, Homo sapiens
  CDR3 for alpha chain variable domain of TCR clone 117707 (TRAV12-3, TRAJ13)
CAMTSGGYQKVTF

SEQ ID NO: 235414 - protein, 15 aa, Homo sapiens
  CDR3 for beta chain variable domain of TCR clone 117707 (TRBV20-1, TRBJ2-7)
CSARDRVSGMDEQYF

SEQ ID NO: 235415 - protein, 21 aa, Homo sapiens
  CDR3 for alpha chain variable domain of TCR clone 117708 (TRAV16, TRAJ22)
HLKKPFAQKEDSAMYLRQLTF

SEQ ID NO: 235416 - protein, 15 aa, Homo sapiens
  CDR3 for beta chain variable domain of TCR clone 117708 (TRBV7-9, TRBJ1-6)
CASSSPGRGNSPLHF

SEQ ID NO: 235417 - protein, 16 aa, Homo sapiens
  CDR3 for alpha chain variable domain of TCR clone 117709 (TRAV12-3, TRAJ53)
CAMSPGSGGSNYKLTF

SEQ ID NO: 235418 - protein, 16 aa, Homo sapiens
  CDR3 for beta chain variable domain of TCR clone 117709 (TRBV19, TRBJ2-1)
CASSKAGTSSYNEQFF

SEQ ID NO: 235419 - protein, 16 aa, Homo sapiens
  CDR3 for alpha chain variable domain of TCR clone 117710 (TRAV13-2, TRAJ32)
FAENMNYGGATNKLIF

SEQ ID NO: 235420 - protein, 14 aa, Homo sapiens
  CDR3 for beta chain variable domain of TCR clone 117710 (TRBV15, TRBJ2-5)
CATSSTGYQETQYF

SEQ ID NO: 235421 - protein, 13 aa, Homo sapiens
  CDR3 for alpha chain variable domain of TCR clone 117711 (TRAV17, TRAJ5)
CALRGTGRRALTF

SEQ ID NO: 235422 - protein, 13 aa, Homo sapiens
  CDR3 for beta chain variable domain of TCR clone 117711 (TRBV20-1, TRBJ1-1)
CSAPLGGGTEAFF

SEQ ID NO: 235423 - protein, 16 aa, Homo sapiens
  CDR3 for alpha chain variable domain of TCR clone 117712 (TRAV1-2, TRAJ27)
RAVREPQTPMQANQPL

SEQ ID NO: 235424 - protein, 13 aa, Homo sapiens
  CDR3 for beta chain variable domain of TCR clone 117712 (TRBV6-1, TRBJ1-2)
CASSAREGYGYTF

SEQ ID NO: 235425 - protein, 13 aa, Homo sapiens
  CDR3 for alpha chain variable domain of TCR clone 117713 (TRAV3, TRAJ20)
CCEAFCNDYKLSF

SEQ ID NO: 235426 - protein, 18 aa, Homo sapiens
  CDR3 for beta chain variable domain of TCR clone 117713 (TRBV11-2, TRBJ2-3)
CASSLGGASRGAPNTQYF

SEQ ID NO: 235427 - protein, 16 aa, Homo sapiens
  CDR3 for alpha chain variable domain of TCR clone 117714 (TRAV30, TRAJ24)
CGTEIVDADSWGKFQF

SEQ ID NO: 235428 - protein, 13 aa, Homo sapiens
  CDR3 for beta chain variable domain of TCR clone 117714 (TRBV27, TRBJ2-1)
CASRTPGVGEQFF

SEQ ID NO: 235429 - protein, 12 aa, Homo sapiens
  CDR3 for alpha chain variable domain of TCR clone 117715 (TRAV12-3, TRAJ17)
CAMTLTGNKLTF

SEQ ID NO: 235430 - protein, 16 aa, Homo sapiens
  CDR3 for beta chain variable domain of TCR clone 117715 (TRBV7-3, TRBJ2-1)
CASSLEGYRSYNEQLF

SEQ ID NO: 235431 - protein, 14 aa, Homo sapiens
  CDR3 for alpha chain variable domain of TCR clone 117716 (TRAV12-2, TRAJ44)
CAVNKAGTASKLTF

SEQ ID NO: 235432 - protein, 15 aa, Homo sapiens
  CDR3 for beta chain variable domain of TCR clone 117716 (TRBV10-2, TRBJ2-7)
CASWNRGQATYEQYF

SEQ ID NO: 235433 - protein, 11 aa, Homo sapiens
  CDR3 for alpha chain variable domain of TCR clone 117717 (TRAV21, TRAJ34)
CAHYNTDKLIF

SEQ ID NO: 235434 - protein, 15 aa, Homo sapiens
  CDR3 for beta chain variable domain of TCR clone 117717 (TRBV5-1, TRBJ2-1)
CASSLVANSYNEQFF

SEQ ID NO: 235435 - protein, 14 aa, Homo sapiens
  CDR3 for alpha chain variable domain of TCR clone 117718 (TRAV35, TRAJ22)
CAGLRPGSARQLTF

SEQ ID NO: 235436 - protein, 16 aa, Homo sapiens
  CDR3 for beta chain variable domain of TCR clone 117718 (TRBV12-4, TRBJ2-5)
CASGPRTSGNQETQYF

SEQ ID NO: 235437 - protein, 14 aa, Homo sapiens
  CDR3 for alpha chain variable domain of TCR clone 117719 (TRAV26-1, TRAJ38)
CIADNAGNNRKLNW

SEQ ID NO: 235438 - protein, 13 aa, Homo sapiens
  CDR3 for beta chain variable domain of TCR clone 117719 (TRBV20-1, TRBJ1-1)
CSARGEGNTEAFF

SEQ ID NO: 235439 - protein, 12 aa, Homo sapiens
  CDR3 for alpha chain variable domain of TCR clone 117720 (TRAV12-3, TRAJ20)
RAMVRGDYKLSF

SEQ ID NO: 235440 - protein, 15 aa, Homo sapiens
  CDR3 for beta chain variable domain of TCR clone 117720 (TRBV5-1, TRBJ1-4)
FAPAAWKDGNEKLFF

SEQ ID NO: 235441 - protein, 17 aa, Homo sapiens
  CDR3 for alpha chain variable domain of TCR clone 117721 (TRAV26-1, TRAJ53)
CIVSVDDSGGSNYKLTF

SEQ ID NO: 235442 - protein, 15 aa, Homo sapiens
  CDR3 for beta chain variable domain of TCR clone 117721 (TRBV20-1, TRBJ2-7)
CSARVPAAYFYEQYF

SEQ ID NO: 235443 - protein, 16 aa, Homo sapiens
  CDR3 for alpha chain variable domain of TCR clone 117722 (TRAV27, TRAJ13)
GAGAKSDSGGYQKVTF

SEQ ID NO: 235444 - protein, 15 aa, Homo sapiens
  CDR3 for beta chain variable domain of TCR clone 117722 (TRBV29-1, TRBJ2-1)
CSVGRHALFYNEQFF

SEQ ID NO: 235445 - protein, 10 aa, Homo sapiens
  CDR3 for alpha chain variable domain of TCR clone 117723 (TRAV1-2, TRAJ31)
CAFFDARLMF

SEQ ID NO: 235446 - protein, 14 aa, Homo sapiens
  CDR3 for beta chain variable domain of TCR clone 117723 (TRBV18, TRBJ2-5)
CASSPGVSQETQYF

SEQ ID NO: 235447 - protein, 14 aa, Homo sapiens
  CDR3 for alpha chain variable domain of TCR clone 117724 (TRAV4, TRAJ20)
CLVGRRSNDYKLSF

SEQ ID NO: 235448 - protein, 18 aa, Homo sapiens
  CDR3 for beta chain variable domain of TCR clone 117724 (TRBV2, TRBJ2-5)
CASSGDPQGRGAQETQYL

SEQ ID NO: 235449 - protein, 12 aa, Homo sapiens
  CDR3 for alpha chain variable domain of TCR clone 117725 (TRAV16, TRAJ26)
CALRSYGKNFVF

SEQ ID NO: 235450 - protein, 14 aa, Homo sapiens
  CDR3 for beta chain variable domain of TCR clone 117725 (TRBV10-3, TRBJ2-1)
CAISSDLAYNEQFF

SEQ ID NO: 235451 - protein, 13 aa, Homo sapiens
  CDR3 for alpha chain variable domain of TCR clone 117726 (TRAV25, TRAJ40)
CAGSASGTYNYIF

SEQ ID NO: 235452 - protein, 14 aa, Homo sapiens
  CDR3 for beta chain variable domain of TCR clone 117726 (TRBV7-2, TRBJ2-7)
CASRSQGAAYEQYF

SEQ ID NO: 235453 - protein, 14 aa, Homo sapiens
  CDR3 for alpha chain variable domain of TCR clone 117727 (TRAV2, TRAJ9)
CAVEDRSGGVKTIF

SEQ ID NO: 235454 - protein, 14 aa, Homo sapiens
  CDR3 for beta chain variable domain of TCR clone 117727 (TRBV7-3, TRBJ2-1)
CASSLAGGTNEQFF

SEQ ID NO: 235455 - protein, 14 aa, Homo sapiens
  CDR3 for alpha chain variable domain of TCR clone 117728 (TRAV12-1, TRAJ23)
CVVIAYNQGGKLIF

SEQ ID NO: 235456 - protein, 15 aa, Homo sapiens
  CDR3 for beta chain variable domain of TCR clone 117728 (TRBV20-1, TRBJ2-7)
CSARDRVSGMDEQYF

SEQ ID NO: 235457 - protein, 14 aa, Homo sapiens
  CDR3 for alpha chain variable domain of TCR clone 117729 (TRAV29/DV5, TRAJ36)
CAARRKTGANNPFF

SEQ ID NO: 235458 - protein, 16 aa, Homo sapiens
  CDR3 for beta chain variable domain of TCR clone 117729 (TRBV12-5, TRBJ2-5)
CASGPRTSGNQETQYF

SEQ ID NO: 235459 - protein, 17 aa, Homo sapiens
  CDR3 for alpha chain variable domain of TCR clone 117730 (TRAV3, TRAJ28)
CAVREAYSGAGSYQLPF

SEQ ID NO: 235460 - protein, 17 aa, Homo sapiens
  CDR3 for beta chain variable domain of TCR clone 117730 (TRBV20-1, TRBJ2-1)
CSASSSGLAGSYNEQFF

SEQ ID NO: 235461 - protein, 14 aa, Homo sapiens
  CDR3 for alpha chain variable domain of TCR clone 117731 (TRAV23/DV6, TRAJ9)
CAASIGGKYWRLQN

SEQ ID NO: 235462 - protein, 14 aa, Homo sapiens
  CDR3 for beta chain variable domain of TCR clone 117731 (TRBV18, TRBJ2-5)
CASSPGVSQETQYF

SEQ ID NO: 235463 - protein, 13 aa, Homo sapiens
  CDR3 for alpha chain variable domain of TCR clone 117732 (TRAV26-1, TRAJ48)
RIVLRVRNEKLTF

SEQ ID NO: 235464 - protein, 14 aa, Homo sapiens
  CDR3 for beta chain variable domain of TCR clone 117732 (TRBV20-1, TRBJ1-5)
CSARDISKNQPQHF

SEQ ID NO: 235465 - protein, 12 aa, Homo sapiens
  CDR3 for alpha chain variable domain of TCR clone 117733 (TRAV2, TRAJ9)
CAVGAGGFKTIF

SEQ ID NO: 235466 - protein, 13 aa, Homo sapiens
  CDR3 for beta chain variable domain of TCR clone 117733 (TRBV20-1, TRBJ2-2)
CSASAAGTGELFF

SEQ ID NO: 235467 - protein, 16 aa, Homo sapiens
  CDR3 for alpha chain variable domain of TCR clone 117734 (TRAV27, TRAJ13)
CAGATSDSGGYQKVTF

SEQ ID NO: 235468 - protein, 15 aa, Homo sapiens
  CDR3 for beta chain variable domain of TCR clone 117734 (TRBV29-1, TRBJ2-1)
CSVGRHALFYNEQFF

SEQ ID NO: 235469 - protein, 13 aa, Homo sapiens
  CDR3 for alpha chain variable domain of TCR clone 117735 (TRAV27, TRAJ42)
CAGARGSQGNLIF

SEQ ID NO: 235470 - protein, 15 aa, Homo sapiens
  CDR3 for beta chain variable domain of TCR clone 117735 (TRBV6-3, TRBJ2-7)
CASSSPGTVFYEQYF

SEQ ID NO: 235471 - protein, 16 aa, Homo sapiens
  CDR3 for alpha chain variable domain of TCR clone 117736 (TRAV8-3, TRAJ22)
CAVDLLGPGSARQLTF

SEQ ID NO: 235472 - protein, 15 aa, Homo sapiens
  CDR3 for beta chain variable domain of TCR clone 117736 (TRBV9, TRBJ1-6)
CASSVAGTGDSPLHF

SEQ ID NO: 235473 - protein, 14 aa, Homo sapiens
  CDR3 for alpha chain variable domain of TCR clone 117737 (TRAV26-1, TRAJ21)
CIVRPPYNFNKFYF

SEQ ID NO: 235474 - protein, 15 aa, Homo sapiens
  CDR3 for beta chain variable domain of TCR clone 117737 (TRBV7-7, TRBJ2-2)
CATSKLAKNTGELFF

SEQ ID NO: 235475 - protein, 15 aa, Homo sapiens
  CDR3 for alpha chain variable domain of TCR clone 117738 (TRAV21, TRAJ37)
CAVRPTLSNTGNLIF

SEQ ID NO: 235476 - protein, 16 aa, Homo sapiens
  CDR3 for beta chain variable domain of TCR clone 117738 (TRBV24-1, TRBJ2-3)
CATSDRRQDLTDTQYF

SEQ ID NO: 235477 - protein, 13 aa, Homo sapiens
  CDR3 for alpha chain variable domain of TCR clone 117739 (TRAV21, TRAJ20)
CAVGVFADYKLSF

SEQ ID NO: 235478 - protein, 16 aa, Homo sapiens
  CDR3 for beta chain variable domain of TCR clone 117739 (TRBV20-1, TRBJ1-2)
CSASMGQGVANYGYTF

SEQ ID NO: 235479 - protein, 16 aa, Homo sapiens
  CDR3 for alpha chain variable domain of TCR clone 117740 (TRAV22, TRAJ45)
CAVERGKRGGADGLTF

SEQ ID NO: 235480 - protein, 13 aa, Homo sapiens
  CDR3 for beta chain variable domain of TCR clone 117740 (TRBV27, TRBJ1-1)
CASSVSIGAEAFF

SEQ ID NO: 235481 - protein, 14 aa, Homo sapiens
  CDR3 for alpha chain variable domain of TCR clone 117741 (TRAV26-1, TRAJ16)
CIVRVPSEGQKLLF

SEQ ID NO: 235482 - protein, 17 aa, Homo sapiens
  CDR3 for beta chain variable domain of TCR clone 117741 (TRBV20-1, TRBJ2-1)
CSASSSGLAGSYNEQFF

SEQ ID NO: 235483 - protein, 14 aa, Homo sapiens
  CDR3 for alpha chain variable domain of TCR clone 117742 (TRAV3, TRAJ37)
CAVKESGNTGKLIF

SEQ ID NO: 235484 - protein, 14 aa, Homo sapiens
  CDR3 for beta chain variable domain of TCR clone 117742 (TRBV7-2, TRBJ2-5)
CASSFGGAQETQYF

SEQ ID NO: 235485 - protein, 14 aa, Homo sapiens
  CDR3 for alpha chain variable domain of TCR clone 117743 (TRAV20, TRAJ32)
CCGRYGGATTKLIF

SEQ ID NO: 235486 - protein, 16 aa, Homo sapiens
  CDR3 for beta chain variable domain of TCR clone 117743 (TRBV19, TRBJ2-2)
CASRSPGTGATGELFF

SEQ ID NO: 235487 - protein, 15 aa, Homo sapiens
  CDR3 for alpha chain variable domain of TCR clone 117744 (TRAV17, TRAJ57)
CSTGPSQGGSEKLVF

SEQ ID NO: 235488 - protein, 18 aa, Homo sapiens
  CDR3 for beta chain variable domain of TCR clone 117744 (TRBV7-9, TRBJ2-7)
CASSLTTSGSRTWYEQYF

SEQ ID NO: 235489 - protein, 18 aa, Homo sapiens
  CDR3 for alpha chain variable domain of TCR clone 117745 (TRAV21, TRAJ52)
CAVRPSPAGGTSYGKLTF

SEQ ID NO: 235490 - protein, 16 aa, Homo sapiens
  CDR3 for beta chain variable domain of TCR clone 117745 (TRBV15, TRBJ1-2)
CATSRGPRTGGGGYTF

SEQ ID NO: 235491 - protein, 15 aa, Homo sapiens
  CDR3 for alpha chain variable domain of TCR clone 117746 (TRAV3, TRAJ5)
CAVRDRKTGRRALTF

SEQ ID NO: 235492 - protein, 15 aa, Homo sapiens
  CDR3 for beta chain variable domain of TCR clone 117746 (TRBV28, TRBJ2-1)
CASSIIAGGRSEQFF

SEQ ID NO: 235493 - protein, 18 aa, Homo sapiens
  CDR3 for alpha chain variable domain of TCR clone 117747 (TRAV9-2, TRAJ52)
CAMSRHNAGGTSYGKLTF

SEQ ID NO: 235494 - protein, 13 aa, Homo sapiens
  CDR3 for beta chain variable domain of TCR clone 117747 (TRBV7-9, TRBJ1-2)
CASSLKQNYGYTF

SEQ ID NO: 235495 - protein, 15 aa, Homo sapiens
  CDR3 for alpha chain variable domain of TCR clone 117748 (TRAV20, TRAJ53)
CAVQASGGSNYELTF

SEQ ID NO: 235496 - protein, 12 aa, Homo sapiens
  CDR3 for beta chain variable domain of TCR clone 117748 (TRBV7-8, TRBJ2-7)
CASSLGDREQYF

SEQ ID NO: 235497 - protein, 11 aa, Homo sapiens
  CDR3 for alpha chain variable domain of TCR clone 117749 (TRAV1-2, TRAJ40)
CAVPGTYKYIF

SEQ ID NO: 235498 - protein, 12 aa, Homo sapiens
  CDR3 for beta chain variable domain of TCR clone 117749 (TRBV29-1, TRBJ2-3)
CSVTGGADTQYF

SEQ ID NO: 235499 - protein, 14 aa, Homo sapiens
  CDR3 for alpha chain variable domain of TCR clone 117750 (TRAV12-1, TRAJ26)
YVVKGSNYGQNFVF

SEQ ID NO: 235500 - protein, 13 aa, Homo sapiens
  CDR3 for beta chain variable domain of TCR clone 117750 (TRBV24-1, TRBJ2-2)
CATSDWSTGELFF

SEQ ID NO: 235501 - protein, 18 aa, Homo sapiens
  CDR3 for alpha chain variable domain of TCR clone 117751 (TRAV13-1, TRAJ52)
CAAKNPNAGGTSYGKLIF

SEQ ID NO: 235502 - protein, 14 aa, Homo sapiens
  CDR3 for beta chain variable domain of TCR clone 117751 (TRBV7-8, TRBJ2-3)
CASSLEAGTDTQYF

SEQ ID NO: 235503 - protein, 13 aa, Homo sapiens
  CDR3 for alpha chain variable domain of TCR clone 117752 (TRAV12-1, TRAJ16)
CVVNGPDGQKLLF

SEQ ID NO: 235504 - protein, 15 aa, Homo sapiens
  CDR3 for beta chain variable domain of TCR clone 117752 (TRBV2, TRBJ2-7)
CASSEGLARSYEQYF

SEQ ID NO: 235505 - protein, 13 aa, Homo sapiens
  CDR3 for alpha chain variable domain of TCR clone 117753 (TRAV1-1, TRAJ9)
CAAKNTGGFKTIF

SEQ ID NO: 235506 - protein, 14 aa, Homo sapiens
  CDR3 for beta chain variable domain of TCR clone 117753 (TRBV19, TRBJ1-5)
CASSLGLIGQPQHF

SEQ ID NO: 235507 - protein, 13 aa, Homo sapiens
  CDR3 for alpha chain variable domain of TCR clone 117754 (TRAV20, TRAJ37)
CAGCSSNTGKLIF

SEQ ID NO: 235508 - protein, 11 aa, Homo sapiens
  CDR3 for beta chain variable domain of TCR clone 117754 (TRBV12-4, TRBJ2-3)
CGSTATDTQYF

SEQ ID NO: 235509 - protein, 16 aa, Homo sapiens
  CDR3 for alpha chain variable domain of TCR clone 117755 (TRAV12-3, TRAJ53)
CAMSPGSGGSDYKLIF

SEQ ID NO: 235510 - protein, 11 aa, Homo sapiens
  CDR3 for beta chain variable domain of TCR clone 117755 (TRBV29-1, TRBJ2-5)
CSEDRTGTQYF

SEQ ID NO: 235511 - protein, 11 aa, Homo sapiens
  CDR3 for alpha chain variable domain of TCR clone 117756 (TRAV23/DV6, TRAJ58)
CAARLLRGETS

SEQ ID NO: 235512 - protein, 15 aa, Homo sapiens
  CDR3 for beta chain variable domain of TCR clone 117756 (TRBV27, TRBJ2-5)
CASSLYPRGGETQYF

SEQ ID NO: 235513 - protein, 17 aa, Homo sapiens
  CDR3 for alpha chain variable domain of TCR clone 117757 (TRAV3, TRAJ38)
CAVRDCLNAGNNRKLIW

SEQ ID NO: 235514 - protein, 16 aa, Homo sapiens
  CDR3 for beta chain variable domain of TCR clone 117757 (TRBV18, TRBJ2-7)
CASSPGRAGGAYEQYF

SEQ ID NO: 235515 - protein, 12 aa, Homo sapiens
  CDR3 for alpha chain variable domain of TCR clone 117758 (TRAV25, TRAJ5)
CAGGGGGRALTF

SEQ ID NO: 235516 - protein, 15 aa, Homo sapiens
  CDR3 for beta chain variable domain of TCR clone 117758 (TRBV20-1, TRBJ2-7)
CSARDRVSGMDEQYF

SEQ ID NO: 235517 - protein, 13 aa, Homo sapiens
  CDR3 for alpha chain variable domain of TCR clone 117759 (TRAV2, TRAJ20)
CAVEDPSESKLSF

SEQ ID NO: 235518 - protein, 16 aa, Homo sapiens
  CDR3 for beta chain variable domain of TCR clone 117759 (TRBV25-1, TRBJ2-7)
CASSELTGGGIYEQYF

SEQ ID NO: 235519 - protein, 16 aa, Homo sapiens
  CDR3 for alpha chain variable domain of TCR clone 117760 (TRAV1-2, TRAJ10)
CAVRGVLTGGGNKLTF

SEQ ID NO: 235520 - protein, 14 aa, Homo sapiens
  CDR3 for beta chain variable domain of TCR clone 117760 (TRBV7-3, TRBJ2-1)
CASSLAGGTNEQFF

SEQ ID NO: 235521 - protein, 13 aa, Homo sapiens
  CDR3 for alpha chain variable domain of TCR clone 117761 (TRAV17, TRAJ9)
CATDYTGGFKTIF

SEQ ID NO: 235522 - protein, 15 aa, Homo sapiens
  CDR3 for beta chain variable domain of TCR clone 117761 (TRBV11-3, TRBJ2-7)
CASSPGPASSYEQYF

SEQ ID NO: 235523 - protein, 12 aa, Homo sapiens
  CDR3 for alpha chain variable domain of TCR clone 117762 (TRAV13-1, TRAJ21)
CAAKEGFNKFYF

SEQ ID NO: 235524 - protein, 16 aa, Homo sapiens
  CDR3 for beta chain variable domain of TCR clone 117762 (TRBV11-2, TRBJ1-1)
CASSLRQGGEHSKAFF

SEQ ID NO: 235525 - protein, 14 aa, Homo sapiens
  CDR3 for alpha chain variable domain of TCR clone 117763 (TRAV12-2, TRAJ45)
CAVNIGGGADGLTV

SEQ ID NO: 235526 - protein, 13 aa, Homo sapiens
  CDR3 for beta chain variable domain of TCR clone 117763 (TRBV19, TRBJ2-2)
CASSIWSTGELFF

SEQ ID NO: 235527 - protein, 13 aa, Homo sapiens
  CDR3 for alpha chain variable domain of TCR clone 117764 (TRAV2, TRAJ12)
CAVGADSSDKLIF

SEQ ID NO: 235528 - protein, 13 aa, Homo sapiens
  CDR3 for beta chain variable domain of TCR clone 117764 (TRBV20-1, TRBJ2-1)
CSARSSPRDEQFF

SEQ ID NO: 235529 - protein, 20 aa, Homo sapiens
  CDR3 for alpha chain variable domain of TCR clone 117765 (TRAV26-1, TRAJ42)
CCVLLHRQTYYGGSQGNLNF

SEQ ID NO: 235530 - protein, 16 aa, Homo sapiens
  CDR3 for beta chain variable domain of TCR clone 117765 (TRBV7-3, TRBJ2-2)
CASSLKRGTLSGELFF

SEQ ID NO: 235531 - protein, 13 aa, Homo sapiens
  CDR3 for alpha chain variable domain of TCR clone 117766 (TRAV21, TRAJ34)
CAVSEGDTDKLIF

SEQ ID NO: 235532 - protein, 13 aa, Homo sapiens
  CDR3 for beta chain variable domain of TCR clone 117766 (TRBV7-2, TRBJ2-2)
CASSLAVTGELFF

SEQ ID NO: 235533 - protein, 13 aa, Homo sapiens
  CDR3 for alpha chain variable domain of TCR clone 117767 (TRAV3, TRAJ31)
CAVREGNNARLMF

SEQ ID NO: 235534 - protein, 14 aa, Homo sapiens
  CDR3 for beta chain variable domain of TCR clone 117767 (TRBV7-2, TRBJ2-7)
CASRSQGAAYEQYF

SEQ ID NO: 235535 - protein, 11 aa, Homo sapiens
  CDR3 for alpha chain variable domain of TCR clone 117768 (TRAV3, TRAJ21)
CALGNFNKFYF

SEQ ID NO: 235536 - protein, 16 aa, Homo sapiens
  CDR3 for beta chain variable domain of TCR clone 117768 (TRBV19, TRBJ2-1)
CASSKAGPSSYNEQFF

SEQ ID NO: 235537 - protein, 14 aa, Homo sapiens
  CDR3 for alpha chain variable domain of TCR clone 117769 (TRAV12-2, TRAJ44)
CAVNPAGTASKLTF

SEQ ID NO: 235538 - protein, 10 aa, Homo sapiens
  CDR3 for beta chain variable domain of TCR clone 117769 (TRBV24-1, TRBJ2-2)
CATSEADLER

SEQ ID NO: 235539 - protein, 18 aa, Homo sapiens
  CDR3 for alpha chain variable domain of TCR clone 117770 (TRAV26-2, TRAJ45)
CILRVDKYSGGGADGLTF

SEQ ID NO: 235540 - protein, 16 aa, Homo sapiens
  CDR3 for beta chain variable domain of TCR clone 117770 (TRBV7-2, TRBJ1-3)
CASSLALTGSGNTIYF

SEQ ID NO: 235541 - protein, 11 aa, Homo sapiens
  CDR3 for alpha chain variable domain of TCR clone 117771 (TRAV35, TRAJ34)
CWARNTDKLIF

SEQ ID NO: 235542 - protein, 14 aa, Homo sapiens
  CDR3 for beta chain variable domain of TCR clone 117771 (TRBV5-1, TRBJ2-7)
CAGSRGESLYEQYF

SEQ ID NO: 235543 - protein, 13 aa, Homo sapiens
  CDR3 for alpha chain variable domain of TCR clone 117772 (TRAV30, TRAJ24)
CGTVTDSWGKLQF

SEQ ID NO: 235544 - protein, 14 aa, Homo sapiens
  CDR3 for beta chain variable domain of TCR clone 117772 (TRBV6-3, TRBJ2-2)
CASTYRPDTGELFF

SEQ ID NO: 235545 - protein, 13 aa, Homo sapiens
  CDR3 for alpha chain variable domain of TCR clone 117773 (TRAV2, TRAJ40)
CAVVTSGTYKYIF

SEQ ID NO: 235546 - protein, 15 aa, Homo sapiens
  CDR3 for beta chain variable domain of TCR clone 117773 (TRBV11-3, TRBJ2-3)
CAILKDGREGDTQYF

SEQ ID NO: 235547 - protein, 14 aa, Homo sapiens
  CDR3 for alpha chain variable domain of TCR clone 117774 (TRAV1-2, TRAJ8)
CAVREDTGFQKLVF

SEQ ID NO: 235548 - protein, 11 aa, Homo sapiens
  CDR3 for beta chain variable domain of TCR clone 117774 (TRBV7-8, TRBJ2-7)
CASSLSREQYF

SEQ ID NO: 235549 - protein, 15 aa, Homo sapiens
  CDR3 for alpha chain variable domain of TCR clone 117775 (TRAV12-3, TRAJ6)
RAMSATSGGSYIPTF

SEQ ID NO: 235550 - protein, 11 aa, Homo sapiens
  CDR3 for beta chain variable domain of TCR clone 117775 (TRBV20-1, TRBJ1-5)
CSAQGDQPQHF

SEQ ID NO: 235551 - protein, 16 aa, Homo sapiens
  CDR3 for alpha chain variable domain of TCR clone 117776 (TRAV30, TRAJ24)
CGTEIVDADSWGKFQF

SEQ ID NO: 235552 - protein, 13 aa, Homo sapiens
  CDR3 for beta chain variable domain of TCR clone 117776 (TRBV18, TRBJ2-7)
CASSPGRNYEQYF

SEQ ID NO: 235553 - protein, 15 aa, Homo sapiens
  CDR3 for alpha chain variable domain of TCR clone 117777 (TRAV25, TRAJ52)
CAGRPGGTSYGKLTF

SEQ ID NO: 235554 - protein, 17 aa, Homo sapiens
  CDR3 for beta chain variable domain of TCR clone 117777 (TRBV7-8, TRBJ2-6)
SASSAGTGGAGANVLTF

SEQ ID NO: 235555 - protein, 14 aa, Homo sapiens
  CDR3 for alpha chain variable domain of TCR clone 117778 (TRAV8-6, TRAJ49)
CAVSGRYTGNQFYF

SEQ ID NO: 235556 - protein, 19 aa, Homo sapiens
  CDR3 for beta chain variable domain of TCR clone 117778 (TRBV28, TRBJ2-1)
CASSFSIRGSGRTRYEQFF

SEQ ID NO: 235557 - protein, 13 aa, Homo sapiens
  CDR3 for alpha chain variable domain of TCR clone 117779 (TRAV36/DV7, TRAJ34)
CAVGEVNTDKLIF

SEQ ID NO: 235558 - protein, 17 aa, Homo sapiens
  CDR3 for beta chain variable domain of TCR clone 117779 (TRBV13, TRBJ2-3)
CASSLSRVAGGRNTQYF

SEQ ID NO: 235559 - protein, 16 aa, Homo sapiens
  CDR3 for alpha chain variable domain of TCR clone 117780 (TRAV30, TRAJ24)
CGTEIVDADSWGKFQF

SEQ ID NO: 235560 - protein, 14 aa, Homo sapiens
  CDR3 for beta chain variable domain of TCR clone 117780 (TRBV19, TRBJ2-1)
CASPTFVLSGEQFL

SEQ ID NO: 235561 - protein, 10 aa, Homo sapiens
  CDR3 for alpha chain variable domain of TCR clone 117781 (TRAV23/DV6, TRAJ57)
CAASSTLSQG

SEQ ID NO: 235562 - protein, 13 aa, Homo sapiens
  CDR3 for beta chain variable domain of TCR clone 117781 (TRBV11-2, TRBJ2-7)
CASSSYPSYEQYF

SEQ ID NO: 235563 - protein, 13 aa, Homo sapiens
  CDR3 for alpha chain variable domain of TCR clone 117782 (TRAV26-2, TRAJ43)
CILRAVNNNDMRF

SEQ ID NO: 235564 - protein, 13 aa, Homo sapiens
  CDR3 for beta chain variable domain of TCR clone 117782 (TRBV27, TRBJ1-1)
CASSLSIGAEAFF

SEQ ID NO: 235565 - protein, 13 aa, Homo sapiens
  CDR3 for alpha chain variable domain of TCR clone 117783 (TRAV13-2, TRAJ48)
CAEMDFGNEKLTF

SEQ ID NO: 235566 - protein, 16 aa, Homo sapiens
  CDR3 for beta chain variable domain of TCR clone 117783 (TRBV5-1, TRBJ2-3)
CASSLGLAVYTDTQYF

SEQ ID NO: 235567 - protein, 15 aa, Homo sapiens
  CDR3 for alpha chain variable domain of TCR clone 117784 (TRAV12-1, TRAJ44)
CVVFVNSGTASKLTF

SEQ ID NO: 235568 - protein, 17 aa, Homo sapiens
  CDR3 for beta chain variable domain of TCR clone 117784 (TRBV7-8, TRBJ2-6)
CASSAGTGGAGANVLTF

SEQ ID NO: 235569 - protein, 14 aa, Homo sapiens
  CDR3 for alpha chain variable domain of TCR clone 117785 (TRAV12-2, TRAJ17)
CAVLFKAAGNKLTF

SEQ ID NO: 235570 - protein, 15 aa, Homo sapiens
  CDR3 for beta chain variable domain of TCR clone 117785 (TRBV19, TRBJ1-2)
CASSVGQVLNYGYTF

SEQ ID NO: 235571 - protein, 16 aa, Homo sapiens
  CDR3 for alpha chain variable domain of TCR clone 117786 (TRAV12-3, TRAJ53)
CAMSPGSGGGNYKLTF

SEQ ID NO: 235572 - protein, 15 aa, Homo sapiens
  CDR3 for beta chain variable domain of TCR clone 117786 (TRBV28, TRBJ2-5)
CASSSGRVIQETQYF

SEQ ID NO: 235573 - protein, 15 aa, Homo sapiens
  CDR3 for alpha chain variable domain of TCR clone 117787 (TRAV8-3, TRAJ27)
CAVGSSKTNAGKSTF

SEQ ID NO: 235574 - protein, 12 aa, Homo sapiens
  CDR3 for beta chain variable domain of TCR clone 117787 (TRBV11-2, TRBJ2-2)
CASSLGGGELFF

SEQ ID NO: 235575 - protein, 10 aa, Homo sapiens
  CDR3 for alpha chain variable domain of TCR clone 117788 (TRAV36/DV7, TRAJ49)
CALTGNQFYF

SEQ ID NO: 235576 - protein, 14 aa, Homo sapiens
  CDR3 for beta chain variable domain of TCR clone 117788 (TRBV4-2, TRBJ2-5)
CASSQDRGRETQCF

SEQ ID NO: 235577 - protein, 13 aa, Homo sapiens
  CDR3 for alpha chain variable domain of TCR clone 117789 (TRAV26-2, TRAJ43)
CILRAVNNNDMSF

SEQ ID NO: 235578 - protein, 17 aa, Homo sapiens
  CDR3 for beta chain variable domain of TCR clone 117789 (TRBV20-1, TRBJ2-2)
CSASGSGQGGLTGELFF

SEQ ID NO: 235579 - protein, 12 aa, Homo sapiens
  CDR3 for alpha chain variable domain of TCR clone 117790 (TRAV12-2, TRAJ42)
CAVGGSQGNLIF

SEQ ID NO: 235580 - protein, 15 aa, Homo sapiens
  CDR3 for beta chain variable domain of TCR clone 117790 (TRBV10-2, TRBJ2-6)
CASSEQGTGANVLTF

SEQ ID NO: 235581 - protein, 14 aa, Homo sapiens
  CDR3 for alpha chain variable domain of TCR clone 117791 (TRAV17, TRAJ57)
CATDASGGSEKLVF

SEQ ID NO: 235582 - protein, 14 aa, Homo sapiens
  CDR3 for beta chain variable domain of TCR clone 117791 (TRBV4-2, TRBJ2-1)
CAGGLDRAYNEQFF

SEQ ID NO: 235583 - protein, 13 aa, Homo sapiens
  CDR3 for alpha chain variable domain of TCR clone 117792 (TRAV12-2, TRAJ6)
CAVNVSRKLHTYI

SEQ ID NO: 235584 - protein, 12 aa, Homo sapiens
  CDR3 for beta chain variable domain of TCR clone 117792 (TRBV12-4, TRBJ2-7)
CASSLGGYEQYF

SEQ ID NO: 235585 - protein, 19 aa, Homo sapiens
  CDR3 for alpha chain variable domain of TCR clone 117793 (TRAV2, TRAJ20)
ILQVREADAAVYRDCKLSF

SEQ ID NO: 235586 - protein, 13 aa, Homo sapiens
  CDR3 for beta chain variable domain of TCR clone 117793 (TRBV15, TRBJ1-6)
CATSGGLNSPLHL

SEQ ID NO: 235587 - protein, 16 aa, Homo sapiens
  CDR3 for alpha chain variable domain of TCR clone 117794 (TRAV30, TRAJ24)
CGTEIVDADSWGKFQF

SEQ ID NO: 235588 - protein, 15 aa, Homo sapiens
  CDR3 for beta chain variable domain of TCR clone 117794 (TRBV12-4, TRBJ2-2)
CASSPNDSGTGGLFF

SEQ ID NO: 235589 - protein, 10 aa, Homo sapiens
  CDR3 for alpha chain variable domain of TCR clone 117795 (TRAV5, TRAJ34)
CAEDTDKLIF

SEQ ID NO: 235590 - protein, 14 aa, Homo sapiens
  CDR3 for beta chain variable domain of TCR clone 117795 (TRBV18, TRBJ2-7)
CASSPRGGAYEQYF

SEQ ID NO: 235591 - protein, 16 aa, Homo sapiens
  CDR3 for alpha chain variable domain of TCR clone 117796 (TRAV4, TRAJ18)
CCVLLIGGSTLGRLYF

SEQ ID NO: 235592 - protein, 15 aa, Homo sapiens
  CDR3 for beta chain variable domain of TCR clone 117796 (TRBV27, TRBJ2-1)
CASSNGGGSSNEQFF

SEQ ID NO: 235593 - protein, 12 aa, Homo sapiens
  CDR3 for alpha chain variable domain of TCR clone 117797 (TRAV12-3, TRAJ17)
CAMTLTGNKLTF

SEQ ID NO: 235594 - protein, 13 aa, Homo sapiens
  CDR3 for beta chain variable domain of TCR clone 117797 (TRBV9, TRBJ2-2)
CASSPRPAGELCF

SEQ ID NO: 235595 - protein, 14 aa, Homo sapiens
  CDR3 for alpha chain variable domain of TCR clone 117798 (TRAV1-2, TRAJ16)
CAVNRFSDGQKLLF

SEQ ID NO: 235596 - protein, 13 aa, Homo sapiens
  CDR3 for beta chain variable domain of TCR clone 117798 (TRBV11-2, TRBJ1-1)
CASSLGNGAEAFF

SEQ ID NO: 235597 - protein, 13 aa, Homo sapiens
  CDR3 for alpha chain variable domain of TCR clone 117799 (TRAV1-2, TRAJ9)
CAALNTGGFKTIF

SEQ ID NO: 235598 - protein, 17 aa, Homo sapiens
  CDR3 for beta chain variable domain of TCR clone 117799 (TRBV5-4, TRBJ2-3)
CISVPAVLTASTDTQYF

SEQ ID NO: 235599 - protein, 14 aa, Homo sapiens
  CDR3 for alpha chain variable domain of TCR clone 117800 (TRAV9-2, TRAJ39)
CALYIYNAGNMLTF

SEQ ID NO: 235600 - protein, 12 aa, Homo sapiens
  CDR3 for beta chain variable domain of TCR clone 117800 (TRBV14, TRBJ2-7)
CASSRLKGEQYF

SEQ ID NO: 235601 - protein, 22 aa, Homo sapiens
  CDR3 for alpha chain variable domain of TCR clone 117801 (TRAV21, )
CAVRQDAGDNHIQNPDPAVYQL

SEQ ID NO: 235602 - protein, 16 aa, Homo sapiens
  CDR3 for beta chain variable domain of TCR clone 117801 (TRBV4-2, TRBJ1-1)
CASRPLDGGGDTEAFF

SEQ ID NO: 235603 - protein, 18 aa, Homo sapiens
  CDR3 for alpha chain variable domain of TCR clone 117802 (TRAV26-2, TRAJ45)
CILGVDKYSGGGADGLTF

SEQ ID NO: 235604 - protein, 11 aa, Homo sapiens
  CDR3 for beta chain variable domain of TCR clone 117802 (TRBV29-1, TRBJ2-5)
CSEDRTGTQYF

SEQ ID NO: 235605 - protein, 14 aa, Homo sapiens
  CDR3 for alpha chain variable domain of TCR clone 117803 (TRAV12-1, TRAJ23)
CVVIVYNQGGKLIF

SEQ ID NO: 235606 - protein, 16 aa, Homo sapiens
  CDR3 for beta chain variable domain of TCR clone 117803 (TRBV7-3, TRBJ2-2)
CASSLKRGTLSGELFF

SEQ ID NO: 235607 - protein, 12 aa, Homo sapiens
  CDR3 for alpha chain variable domain of TCR clone 117804 (TRAV16, TRAJ56)
CAPTGANSKLTF

SEQ ID NO: 235608 - protein, 17 aa, Homo sapiens
  CDR3 for beta chain variable domain of TCR clone 117804 (TRBV27, TRBJ2-6)
CASSLTGFASGANVLSF

SEQ ID NO: 235609 - protein, 14 aa, Homo sapiens
  CDR3 for alpha chain variable domain of TCR clone 117805 (TRAV12-2, TRAJ17)
CAVLFKAAGTKLTF

SEQ ID NO: 235610 - protein, 14 aa, Homo sapiens
  CDR3 for beta chain variable domain of TCR clone 117805 (TRBV12-5, TRBJ2-5)
CASGSRTHQETQYF

SEQ ID NO: 235611 - protein, 14 aa, Homo sapiens
  CDR3 for alpha chain variable domain of TCR clone 117806 (TRAV1-2, TRAJ8)
CAVRGDTGFQKLVF

SEQ ID NO: 235612 - protein, 14 aa, Homo sapiens
  CDR3 for beta chain variable domain of TCR clone 117806 (TRBV19, TRBJ2-1)
CASPTFVLSGEQFF

SEQ ID NO: 235613 - protein, 16 aa, Homo sapiens
  CDR3 for alpha chain variable domain of TCR clone 117807 (TRAV26-1, TRAJ23)
CIVRGANSNQGGKLIF

SEQ ID NO: 235614 - protein, 16 aa, Homo sapiens
  CDR3 for beta chain variable domain of TCR clone 117807 (TRBV10-3, TRBJ2-1)
CAISGVGDGGGGEQFF

SEQ ID NO: 235615 - protein, 15 aa, Homo sapiens
  CDR3 for alpha chain variable domain of TCR clone 117808 (TRAV14/DV4, TRAJ37)
CAMRAPSSNTGKLIF

SEQ ID NO: 235616 - protein, 14 aa, Homo sapiens
  CDR3 for beta chain variable domain of TCR clone 117808 (TRBV11-2, TRBJ2-7)
CASSLGAGAYEQYF

SEQ ID NO: 235617 - protein, 11 aa, Homo sapiens
  CDR3 for alpha chain variable domain of TCR clone 117809 (TRAV3, TRAJ17)
PIGAAGNKLTF

SEQ ID NO: 235618 - protein, 16 aa, Homo sapiens
  CDR3 for beta chain variable domain of TCR clone 117809 (TRBV7-6, TRBJ2-1)
CASSAPGPSSYNEQFF

SEQ ID NO: 235619 - protein, 14 aa, Homo sapiens
  CDR3 for alpha chain variable domain of TCR clone 117810 (TRAV2, TRAJ37)
CAVEDKGNTGKLIF

SEQ ID NO: 235620 - protein, 14 aa, Homo sapiens
  CDR3 for beta chain variable domain of TCR clone 117810 (TRBV18, TRBJ2-1)
CASSPQGRFNEQFF

SEQ ID NO: 235621 - protein, 13 aa, Homo sapiens
  CDR3 for alpha chain variable domain of TCR clone 117811 (TRAV20, TRAJ37)
CAGCSSNTGKLIF

SEQ ID NO: 235622 - protein, 12 aa, Homo sapiens
  CDR3 for beta chain variable domain of TCR clone 117811 (TRBV11-2, TRBJ2-1)
CASSPGNNEQFF

SEQ ID NO: 235623 - protein, 17 aa, Homo sapiens
  CDR3 for alpha chain variable domain of TCR clone 117812 (TRAV8-6, TRAJ58)
CAVSSWVGETSGSRWTF

SEQ ID NO: 235624 - protein, 17 aa, Homo sapiens
  CDR3 for beta chain variable domain of TCR clone 117812 (TRBV11-2, TRBJ2-1)
CASSLYPPGVEYNEQFF

SEQ ID NO: 235625 - protein, 13 aa, Homo sapiens
  CDR3 for alpha chain variable domain of TCR clone 117813 (TRAV8-6, TRAJ29)
CAVILFRKHTSCL

SEQ ID NO: 235626 - protein, 15 aa, Homo sapiens
  CDR3 for beta chain variable domain of TCR clone 117813 (TRBV6-1, TRBJ2-1)
CASSELRGQYNEQFF

SEQ ID NO: 235627 - protein, 15 aa, Homo sapiens
  CDR3 for alpha chain variable domain of TCR clone 117814 (TRAV8-3, TRAJ45)
CASSYSGGGADGLTF

SEQ ID NO: 235628 - protein, 13 aa, Homo sapiens
  CDR3 for beta chain variable domain of TCR clone 117814 (TRBV10-3, TRBJ2-7)
CASKLPVNYEHYF

SEQ ID NO: 235629 - protein, 13 aa, Homo sapiens
  CDR3 for alpha chain variable domain of TCR clone 117815 (TRAV8-6, TRAJ8)
CAVSNTGFQKLVF

SEQ ID NO: 235630 - protein, 15 aa, Homo sapiens
  CDR3 for beta chain variable domain of TCR clone 117815 (TRBV28, TRBJ2-5)
CASGSGRTIQETQYF

SEQ ID NO: 235631 - protein, 13 aa, Homo sapiens
  CDR3 for alpha chain variable domain of TCR clone 117816 (TRAV2, TRAJ40)
CAVVTSGTYKYIF

SEQ ID NO: 235632 - protein, 13 aa, Homo sapiens
  CDR3 for beta chain variable domain of TCR clone 117816 (TRBV2, TRBJ1-1)
CASSEGGNTEAFF

SEQ ID NO: 235633 - protein, 12 aa, Homo sapiens
  CDR3 for alpha chain variable domain of TCR clone 117817 (TRAV8-1, TRAJ26)
CAVSNYGQNFVF

SEQ ID NO: 235634 - protein, 15 aa, Homo sapiens
  CDR3 for beta chain variable domain of TCR clone 117817 (TRBV20-1, TRBJ1-1)
CSASWDRFLNTEAFF

SEQ ID NO: 235635 - protein, 16 aa, Homo sapiens
  CDR3 for alpha chain variable domain of TCR clone 117818 (TRAV16, TRAJ4)
CALSRMFSGGYNKLIF

SEQ ID NO: 235636 - protein, 16 aa, Homo sapiens
  CDR3 for beta chain variable domain of TCR clone 117818 (TRBV12-4, TRBJ2-7)
CASSLIGGTGTYEQYF

SEQ ID NO: 235637 - protein, 14 aa, Homo sapiens
  CDR3 for alpha chain variable domain of TCR clone 117819 (TRAV20, TRAJ9)
RAVQASTGGFKTIF

SEQ ID NO: 235638 - protein, 14 aa, Homo sapiens
  CDR3 for beta chain variable domain of TCR clone 117819 (TRBV12-5, TRBJ1-6)
CASRVGQINSPLHF

SEQ ID NO: 235639 - protein, 14 aa, Homo sapiens
  CDR3 for alpha chain variable domain of TCR clone 117820 (TRAV1-2, TRAJ8)
CAVREDTGFQKLVF

SEQ ID NO: 235640 - protein, 16 aa, Homo sapiens
  CDR3 for beta chain variable domain of TCR clone 117820 (TRBV4-2, TRBJ1-1)
CASSPSPGRAAPEAFF

SEQ ID NO: 235641 - protein, 13 aa, Homo sapiens
  CDR3 for alpha chain variable domain of TCR clone 117821 (TRAV12-3, TRAJ33)
CAMSVNSNYQLIW

SEQ ID NO: 235642 - protein, 20 aa, Homo sapiens
  CDR3 for beta chain variable domain of TCR clone 117821 (TRBV7-8, TRBJ2-2)
CASSHLFPGPTIHITGELFF

SEQ ID NO: 235643 - protein, 11 aa, Homo sapiens
  CDR3 for alpha chain variable domain of TCR clone 117822 (TRAV23/DV6, TRAJ48)
CASRWGEKLTF

SEQ ID NO: 235644 - protein, 13 aa, Homo sapiens
  CDR3 for beta chain variable domain of TCR clone 117822 (TRBV12-4, TRBJ2-5)
CASSPGTEETQYF

SEQ ID NO: 235645 - protein, 14 aa, Homo sapiens
  CDR3 for alpha chain variable domain of TCR clone 117823 (TRAV25, TRAJ22)
CAVRSSGSARQPTF

SEQ ID NO: 235646 - protein, 16 aa, Homo sapiens
  CDR3 for beta chain variable domain of TCR clone 117823 (TRBV4-2, TRBJ1-1)
CASSPSPGRAAPEAFF

SEQ ID NO: 235647 - protein, 12 aa, Homo sapiens
  CDR3 for alpha chain variable domain of TCR clone 117824 (TRAV30, TRAJ39)
CGRGNAGNMLTF

SEQ ID NO: 235648 - protein, 13 aa, Homo sapiens
  CDR3 for beta chain variable domain of TCR clone 117824 (TRBV27, TRBJ1-1)
CASSLSIGAEAFF

SEQ ID NO: 235649 - protein, 13 aa, Homo sapiens
  CDR3 for alpha chain variable domain of TCR clone 117825 (TRAV21, TRAJ27)
CAARPGNAGKSTF

SEQ ID NO: 235650 - protein, 13 aa, Homo sapiens
  CDR3 for beta chain variable domain of TCR clone 117825 (TRBV13, TRBJ2-1)
CASSLGGRGEQFF

SEQ ID NO: 235651 - protein, 14 aa, Homo sapiens
  CDR3 for alpha chain variable domain of TCR clone 117826 (TRAV1-2, TRAJ16)
CAVSRFSDGQKLLF

SEQ ID NO: 235652 - protein, 12 aa, Homo sapiens
  CDR3 for beta chain variable domain of TCR clone 117826 (TRBV28, TRBJ2-6)
CAIQAGANVLTF

SEQ ID NO: 235653 - protein, 12 aa, Homo sapiens
  CDR3 for alpha chain variable domain of TCR clone 117827 (TRAV16, TRAJ13)
CITLRGYQKVTF

SEQ ID NO: 235654 - protein, 17 aa, Homo sapiens
  CDR3 for beta chain variable domain of TCR clone 117827 (TRBV28, TRBJ2-5)
CASSRQGGLAGADTQYF

SEQ ID NO: 235655 - protein, 11 aa, Homo sapiens
  CDR3 for alpha chain variable domain of TCR clone 117828 (TRAV17, TRAJ9)
CGFTGGFKTIF

SEQ ID NO: 235656 - protein, 15 aa, Homo sapiens
  CDR3 for beta chain variable domain of TCR clone 117828 (TRBV7-9, TRBJ1-6)
CASSSPGRGNSPLHF

SEQ ID NO: 235657 - protein, 11 aa, Homo sapiens
  CDR3 for alpha chain variable domain of TCR clone 117829 (TRAV12-3, TRAJ43)
CAMSVSNDMRF

SEQ ID NO: 235658 - protein, 16 aa, Homo sapiens
  CDR3 for beta chain variable domain of TCR clone 117829 (TRBV12-4, TRBJ2-3)
CASSIPSGGGTDTQYF

SEQ ID NO: 235659 - protein, 11 aa, Homo sapiens
  CDR3 for alpha chain variable domain of TCR clone 117830 (TRAV3, TRAJ17)
CAEAAGNKLTF

SEQ ID NO: 235660 - protein, 15 aa, Homo sapiens
  CDR3 for beta chain variable domain of TCR clone 117830 (TRBV12-4, TRBJ2-7)
CASSLGSGGTYEQYF

SEQ ID NO: 235661 - protein, 13 aa, Homo sapiens
  CDR3 for alpha chain variable domain of TCR clone 117831 (TRAV3, TRAJ27)
CAVRPLAAGKSTF

SEQ ID NO: 235662 - protein, 13 aa, Homo sapiens
  CDR3 for beta chain variable domain of TCR clone 117831 (TRBV7-9, TRBJ2-3)
CASSPGSTDTQYF

SEQ ID NO: 235663 - protein, 13 aa, Homo sapiens
  CDR3 for alpha chain variable domain of TCR clone 117832 (TRAV12-3, TRAJ43)
CAMIRPNNNDLRF

SEQ ID NO: 235664 - protein, 12 aa, Homo sapiens
  CDR3 for beta chain variable domain of TCR clone 117832 (TRBV11-2, TRBJ2-5)
CASSLGQETQYF

SEQ ID NO: 235665 - protein, 16 aa, Homo sapiens
  CDR3 for alpha chain variable domain of TCR clone 117833 (TRAV30, TRAJ24)
CGTEIVDADSWGKFQF

SEQ ID NO: 235666 - protein, 14 aa, Homo sapiens
  CDR3 for beta chain variable domain of TCR clone 117833 (TRBV2, TRBJ1-5)
CASSGTVSNQPQHF

SEQ ID NO: 235667 - protein, 12 aa, Homo sapiens
  CDR3 for alpha chain variable domain of TCR clone 117834 (TRAV13-1, TRAJ27)
CAAHTHAGKSTF

SEQ ID NO: 235668 - protein, 14 aa, Homo sapiens
  CDR3 for beta chain variable domain of TCR clone 117834 (TRBV19, TRBJ2-2)
CASSGQGIAGELFF

SEQ ID NO: 235669 - protein, 12 aa, Homo sapiens
  CDR3 for alpha chain variable domain of TCR clone 117835 (TRAV20, TRAJ24)
CAVYNSWGKLQF

SEQ ID NO: 235670 - protein, 15 aa, Homo sapiens
  CDR3 for beta chain variable domain of TCR clone 117835 (TRBV20-1, TRBJ2-5)
YSARVPPSGRETQYF

SEQ ID NO: 235671 - protein, 14 aa, Homo sapiens
  CDR3 for alpha chain variable domain of TCR clone 117836 (TRAV12-2, TRAJ6)
CASKWGGGSYIPTV

SEQ ID NO: 235672 - protein, 13 aa, Homo sapiens
  CDR3 for beta chain variable domain of TCR clone 117836 (TRBV2, TRBJ1-1)
CASSEGGNTEAFF

SEQ ID NO: 235673 - protein, 15 aa, Homo sapiens
  CDR3 for alpha chain variable domain of TCR clone 117837 (TRAV12-1, TRAJ44)
CGVFVNTGTASKLTF

SEQ ID NO: 235674 - protein, 17 aa, Homo sapiens
  CDR3 for beta chain variable domain of TCR clone 117837 (TRBV7-8, TRBJ2-6)
CASSAGTGGAGANVLTF

SEQ ID NO: 235675 - protein, 16 aa, Homo sapiens
  CDR3 for alpha chain variable domain of TCR clone 117838 (TRAV21, TRAJ37)
SAVRTAGSSNTGKLIF

SEQ ID NO: 235676 - protein, 13 aa, Homo sapiens
  CDR3 for beta chain variable domain of TCR clone 117838 (TRBV7-9, TRBJ2-5)
CASLPSGRETQYF

SEQ ID NO: 235677 - protein, 12 aa, Homo sapiens
  CDR3 for alpha chain variable domain of TCR clone 117839 (TRAV3, TRAJ26)
CAVRDYGQNFVF

SEQ ID NO: 235678 - protein, 14 aa, Homo sapiens
  CDR3 for beta chain variable domain of TCR clone 117839 (TRBV7-6, TRBJ2-3)
CASSLGTVTDTQYF

SEQ ID NO: 235679 - protein, 12 aa, Homo sapiens
  CDR3 for alpha chain variable domain of TCR clone 117840 (TRAV17, TRAJ12)
CATLRSSYKLIF

SEQ ID NO: 235680 - protein, 16 aa, Homo sapiens
  CDR3 for beta chain variable domain of TCR clone 117840 (TRBV28, TRBJ2-7)
CASSLFFETGGPEQCF

SEQ ID NO: 235681 - protein, 15 aa, Homo sapiens
  CDR3 for alpha chain variable domain of TCR clone 117841 (TRAV17, TRAJ56)
CATEPFTGANSKLTF

SEQ ID NO: 235682 - protein, 15 aa, Homo sapiens
  CDR3 for beta chain variable domain of TCR clone 117841 (TRBV28, TRBJ1-5)
CASSKTGGYVQPQHF

SEQ ID NO: 235683 - protein, 14 aa, Homo sapiens
  CDR3 for alpha chain variable domain of TCR clone 117842 (TRAV38-1, TRAJ40)
CAIRPTSGTYKYIF

SEQ ID NO: 235684 - protein, 14 aa, Homo sapiens
  CDR3 for beta chain variable domain of TCR clone 117842 (TRBV25-1, TRBJ1-1)
CASTHLGGNTEAFF

SEQ ID NO: 235685 - protein, 12 aa, Homo sapiens
  CDR3 for alpha chain variable domain of TCR clone 117843 (TRAV4, TRAJ26)
CLVGDYGQNFVF

SEQ ID NO: 235686 - protein, 13 aa, Homo sapiens
  CDR3 for beta chain variable domain of TCR clone 117843 (TRBV20-1, TRBJ1-1)
CSARVGGNTEAFF

SEQ ID NO: 235687 - protein, 13 aa, Homo sapiens
  CDR3 for alpha chain variable domain of TCR clone 117844 (TRAV13-2, TRAJ40)
CAEFTSGTYKYIF

SEQ ID NO: 235688 - protein, 15 aa, Homo sapiens
  CDR3 for beta chain variable domain of TCR clone 117844 (TRBV10-2, TRBJ2-6)
CASSEQGTGANVLTF

SEQ ID NO: 235689 - protein, 18 aa, Homo sapiens
  CDR3 for alpha chain variable domain of TCR clone 117845 (TRAV29/DV5, TRAJ52)
CAPGFRGAGGTSYGKLTF

SEQ ID NO: 235690 - protein, 16 aa, Homo sapiens
  CDR3 for beta chain variable domain of TCR clone 117845 (TRBV7-3, TRBJ2-2)
CASSLKRGTLSGELFF

SEQ ID NO: 235691 - protein, 15 aa, Homo sapiens
  CDR3 for alpha chain variable domain of TCR clone 117846 (TRAV3, TRAJ5)
CAVRDLDTGRRALTF

SEQ ID NO: 235692 - protein, 13 aa, Homo sapiens
  CDR3 for beta chain variable domain of TCR clone 117846 (TRBV15, TRBJ1-6)
CATSGGLNSPLHF

SEQ ID NO: 235693 - protein, 14 aa, Homo sapiens
  CDR3 for alpha chain variable domain of TCR clone 117847 (TRAV8-3, TRAJ36)
CAVGPITGANNLFF

SEQ ID NO: 235694 - protein, 15 aa, Homo sapiens
  CDR3 for beta chain variable domain of TCR clone 117847 (TRBV4-1, TRBJ2-1)
CAGSQDPGNYNEQFF

SEQ ID NO: 235695 - protein, 15 aa, Homo sapiens
  CDR3 for alpha chain variable domain of TCR clone 117848 (TRAV17, TRAJ4)
CATGTWSGGYNKLIF

SEQ ID NO: 235696 - protein, 14 aa, Homo sapiens
  CDR3 for beta chain variable domain of TCR clone 117848 (TRBV7-2, TRBJ2-7)
CASSPKTSFYEQYF

SEQ ID NO: 235697 - protein, 12 aa, Homo sapiens
  CDR3 for alpha chain variable domain of TCR clone 117849 (TRAV12-2, TRAJ10)
WGVTGGGNNLTF

SEQ ID NO: 235698 - protein, 14 aa, Homo sapiens
  CDR3 for beta chain variable domain of TCR clone 117849 (TRBV27, TRBJ2-7)
CASATGTERREQYF

SEQ ID NO: 235699 - protein, 10 aa, Homo sapiens
  CDR3 for alpha chain variable domain of TCR clone 117850 (TRAV17, TRAJ52)
SATSYGKLTF

SEQ ID NO: 235700 - protein, 17 aa, Homo sapiens
  CDR3 for beta chain variable domain of TCR clone 117850 (TRBV11-2, TRBJ2-1)
CASSLYPPGVEYNEQFF

SEQ ID NO: 235701 - protein, 13 aa, Homo sapiens
  CDR3 for alpha chain variable domain of TCR clone 117851 (TRAV13-1, TRAJ6)
CARGSGGSYILTF

SEQ ID NO: 235702 - protein, 17 aa, Homo sapiens
  CDR3 for beta chain variable domain of TCR clone 117851 (TRBV7-8, TRBJ2-1)
CASSPPTGTLAYNEQFF

SEQ ID NO: 235703 - protein, 15 aa, Homo sapiens
  CDR3 for alpha chain variable domain of TCR clone 117852 (TRAV26-1, TRAJ29)
CIVRVEGSGKTPLVF

SEQ ID NO: 235704 - protein, 15 aa, Homo sapiens
  CDR3 for beta chain variable domain of TCR clone 117852 (TRBV28, TRBJ2-5)
CASSPGQGSIETQYF

SEQ ID NO: 235705 - protein, 16 aa, Homo sapiens
  CDR3 for alpha chain variable domain of TCR clone 117853 (TRAV30, TRAJ24)
CGTEIVDADSWGKFQF

SEQ ID NO: 235706 - protein, 15 aa, Homo sapiens
  CDR3 for beta chain variable domain of TCR clone 117853 (TRBV12-4, TRBJ2-1)
CASSGSGGTLGEQFF

SEQ ID NO: 235707 - protein, 16 aa, Homo sapiens
  CDR3 for alpha chain variable domain of TCR clone 117854 (TRAV26-1, TRAJ23)
CIVRVECYNQGGKLIF

SEQ ID NO: 235708 - protein, 15 aa, Homo sapiens
  CDR3 for beta chain variable domain of TCR clone 117854 (TRBV18, TRBJ2-7)
CASSPRGGKGYEQYF

SEQ ID NO: 235709 - protein, 15 aa, Homo sapiens
  CDR3 for alpha chain variable domain of TCR clone 117855 (TRAV26-1, TRAJ22)
CIVRVSFWFCKATDL

SEQ ID NO: 235710 - protein, 14 aa, Homo sapiens
  CDR3 for beta chain variable domain of TCR clone 117855 (TRBV5-4, TRBJ1-1)
CASSLDSRRDEAFF

SEQ ID NO: 235711 - protein, 13 aa, Homo sapiens
  CDR3 for alpha chain variable domain of TCR clone 117856 (TRAV27, TRAJ45)
CRSSGGGADGLTF

SEQ ID NO: 235712 - protein, 13 aa, Homo sapiens
  CDR3 for beta chain variable domain of TCR clone 117856 (TRBV10-2, TRBJ2-3)
CASSESGDHTQYF

SEQ ID NO: 235713 - protein, 14 aa, Homo sapiens
  CDR3 for alpha chain variable domain of TCR clone 117857 (TRAV20, TRAJ56)
CAVQFGGANSKLTF

SEQ ID NO: 235714 - protein, 14 aa, Homo sapiens
  CDR3 for beta chain variable domain of TCR clone 117857 (TRBV11-2, TRBJ2-3)
CASSRLARTDTQYF

SEQ ID NO: 235715 - protein, 17 aa, Homo sapiens
  CDR3 for alpha chain variable domain of TCR clone 117858 (TRAV4, TRAJ13)
CLVGVQGSSGGYQKVTF

SEQ ID NO: 235716 - protein, 14 aa, Homo sapiens
  CDR3 for beta chain variable domain of TCR clone 117858 (TRBV9, TRBJ2-1)
CASSVDPRGKEQFF

SEQ ID NO: 235717 - protein, 13 aa, Homo sapiens
  CDR3 for alpha chain variable domain of TCR clone 117859 (TRAV12-3, TRAJ8)
CAMSAGGFQKLVF

SEQ ID NO: 235718 - protein, 13 aa, Homo sapiens
  CDR3 for beta chain variable domain of TCR clone 117859 (TRBV7-9, TRBJ1-2)
CASSLKQNYGYTF

SEQ ID NO: 235719 - protein, 11 aa, Homo sapiens
  CDR3 for alpha chain variable domain of TCR clone 117860 (TRAV2, TRAJ21)
CALFNFNKFYF

SEQ ID NO: 235720 - protein, 14 aa, Homo sapiens
  CDR3 for beta chain variable domain of TCR clone 117860 (TRBV15, TRBJ2-3)
CATRSGTSTDTQYF

SEQ ID NO: 235721 - protein, 14 aa, Homo sapiens
  CDR3 for alpha chain variable domain of TCR clone 117861 (TRAV12-3, TRAJ10)
SHLPLTGGGNKLTF

SEQ ID NO: 235722 - protein, 15 aa, Homo sapiens
  CDR3 for beta chain variable domain of TCR clone 117861 (TRBV11-3, TRBJ2-3)
CASLKDGREGDTRYF

SEQ ID NO: 235723 - protein, 20 aa, Homo sapiens
  CDR3 for alpha chain variable domain of TCR clone 117862 (TRAV12-1, TRAJ42)
SSVIQPPTSVKGGSQGNLIF

SEQ ID NO: 235724 - protein, 18 aa, Homo sapiens
  CDR3 for beta chain variable domain of TCR clone 117862 (TRBV11-2, TRBJ2-3)
CASSLGGASLGAPNTQYF

SEQ ID NO: 235725 - protein, 14 aa, Homo sapiens
  CDR3 for alpha chain variable domain of TCR clone 117863 (TRAV12-2, TRAJ11)
CAVNRASGYSTLTF

SEQ ID NO: 235726 - protein, 10 aa, Homo sapiens
  CDR3 for beta chain variable domain of TCR clone 117863 (TRBV20-1, TRBJ2-5)
CSARFETQYF

SEQ ID NO: 235727 - protein, 13 aa, Homo sapiens
  CDR3 for alpha chain variable domain of TCR clone 117864 (TRAV23/DV6, TRAJ45)
CAARRGGADGLTL

SEQ ID NO: 235728 - protein, 14 aa, Homo sapiens
  CDR3 for beta chain variable domain of TCR clone 117864 (TRBV7-2, TRBJ2-3)
CASSLARGTDTQYF

SEQ ID NO: 235729 - protein, 16 aa, Homo sapiens
  CDR3 for alpha chain variable domain of TCR clone 117865 (TRAV35, TRAJ42)
GRMERYYGGSQGNLIF

SEQ ID NO: 235730 - protein, 15 aa, Homo sapiens
  CDR3 for beta chain variable domain of TCR clone 117865 (TRBV4-3, TRBJ2-1)
CASSQLGGSYNEQFF

SEQ ID NO: 235731 - protein, 14 aa, Homo sapiens
  CDR3 for alpha chain variable domain of TCR clone 117866 (TRAV29/DV5, TRAJ36)
CAARRKTGANNLFF

SEQ ID NO: 235732 - protein, 15 aa, Homo sapiens
  CDR3 for beta chain variable domain of TCR clone 117866 (TRBV7-2, TRBJ2-1)
CASTSASGDYNEQFF

SEQ ID NO: 235733 - protein, 14 aa, Homo sapiens
  CDR3 for alpha chain variable domain of TCR clone 117867 (TRAV12-2, TRAJ8)
CAVKENTGFQKLVF

SEQ ID NO: 235734 - protein, 13 aa, Homo sapiens
  CDR3 for beta chain variable domain of TCR clone 117867 (TRBV18, TRBJ1-2)
CASSASATEGYAF

SEQ ID NO: 235735 - protein, 14 aa, Homo sapiens
  CDR3 for alpha chain variable domain of TCR clone 117868 (TRAV12-2, TRAJ29)
CAVRRNSGNTPLVV

SEQ ID NO: 235736 - protein, 13 aa, Homo sapiens
  CDR3 for beta chain variable domain of TCR clone 117868 (TRBV12-4, TRBJ2-1)
CASSHYTDNEQFF

SEQ ID NO: 235737 - protein, 15 aa, Homo sapiens
  CDR3 for alpha chain variable domain of TCR clone 117869 (TRAV35, TRAJ58)
CAGRRQETSGSRLTF

SEQ ID NO: 235738 - protein, 13 aa, Homo sapiens
  CDR3 for beta chain variable domain of TCR clone 117869 (TRBV2, TRBJ2-7)
CASSVGGSGEQYF

SEQ ID NO: 235739 - protein, 11 aa, Homo sapiens
  CDR3 for alpha chain variable domain of TCR clone 117870 (TRAV8-3, TRAJ16)
CAVVPFQKLLF

SEQ ID NO: 235740 - protein, 12 aa, Homo sapiens
  CDR3 for beta chain variable domain of TCR clone 117870 (TRBV3-1, TRBJ1-1)
CASSQDPTEAFF

SEQ ID NO: 235741 - protein, 17 aa, Homo sapiens
  CDR3 for alpha chain variable domain of TCR clone 117871 (TRAV8-1, TRAJ43)
CAVTNDMRFGAGTRLTV

SEQ ID NO: 235742 - protein, 16 aa, Homo sapiens
  CDR3 for beta chain variable domain of TCR clone 117871 (TRBV19, TRBJ2-1)
CASSKAGPSSYNEQFF

SEQ ID NO: 235743 - protein, 14 aa, Homo sapiens
  CDR3 for alpha chain variable domain of TCR clone 117872 (TRAV4, TRAJ32)
CLVNYGGATNKLIF

SEQ ID NO: 235744 - protein, 14 aa, Homo sapiens
  CDR3 for beta chain variable domain of TCR clone 117872 (TRBV15, TRBJ2-5)
CATSGGTRTDTQYF

SEQ ID NO: 235745 - protein, 14 aa, Homo sapiens
  CDR3 for alpha chain variable domain of TCR clone 117873 (TRAV12-3, TRAJ53)
CATSGGGSNYKLTF

SEQ ID NO: 235746 - protein, 13 aa, Homo sapiens
  CDR3 for beta chain variable domain of TCR clone 117873 (TRBV3-1, TRBJ1-1)
CASSRQGETEAFF

SEQ ID NO: 235747 - protein, 13 aa, Homo sapiens
  CDR3 for alpha chain variable domain of TCR clone 117874 (TRAV8-3, TRAJ44)
CAVVPGTASKLTF

SEQ ID NO: 235748 - protein, 13 aa, Homo sapiens
  CDR3 for beta chain variable domain of TCR clone 117874 (TRBV27, TRBJ2-7)
CASSFSQGYEQYF

SEQ ID NO: 235749 - protein, 15 aa, Homo sapiens
  CDR3 for alpha chain variable domain of TCR clone 117875 (TRAV21, TRAJ52)
CAVRGGGTSYGKLTF

SEQ ID NO: 235750 - protein, 15 aa, Homo sapiens
  CDR3 for beta chain variable domain of TCR clone 117875 (TRBV18, TRBJ1-5)
CASSPSDRSNQAQHF

SEQ ID NO: 235751 - protein, 16 aa, Homo sapiens
  CDR3 for alpha chain variable domain of TCR clone 117876 (TRAV3, TRAJ37)
CAVRPHGSGNTGKLIF

SEQ ID NO: 235752 - protein, 14 aa, Homo sapiens
  CDR3 for beta chain variable domain of TCR clone 117876 (TRBV7-2, TRBJ2-7)
CASSSKTSFYEQYF

SEQ ID NO: 235753 - protein, 14 aa, Homo sapiens
  CDR3 for alpha chain variable domain of TCR clone 117877 (TRAV35, TRAJ50)
CAGHRKTSYEKVIF

SEQ ID NO: 235754 - protein, 13 aa, Homo sapiens
  CDR3 for beta chain variable domain of TCR clone 117877 (TRBV7-7, TRBJ2-3)
CASSLSRADTQYF

SEQ ID NO: 235755 - protein, 10 aa, Homo sapiens
  CDR3 for alpha chain variable domain of TCR clone 117878 (TRAV38-1, TRAJ53)
CAFMKHGLES

SEQ ID NO: 235756 - protein, 13 aa, Homo sapiens
  CDR3 for beta chain variable domain of TCR clone 117878 (TRBV19, TRBJ2-7)
YASSPRQSYEQYF

SEQ ID NO: 235757 - protein, 14 aa, Homo sapiens
  CDR3 for alpha chain variable domain of TCR clone 117879 (TRAV26-1, TRAJ38)
CIADNAGNNRKLIC

SEQ ID NO: 235758 - protein, 13 aa, Homo sapiens
  CDR3 for beta chain variable domain of TCR clone 117879 (TRBV20-1, TRBJ1-1)
CSARGGGNTEAFF

SEQ ID NO: 235759 - protein, 13 aa, Homo sapiens
  CDR3 for alpha chain variable domain of TCR clone 117880 (TRAV12-3, TRAJ7)
CAMTPYGNNRLAF

SEQ ID NO: 235760 - protein, 20 aa, Homo sapiens
  CDR3 for beta chain variable domain of TCR clone 117880 (TRBV7-8, TRBJ2-2)
CASSHLFPGPTIHITGELFF

SEQ ID NO: 235761 - protein, 13 aa, Homo sapiens
  CDR3 for alpha chain variable domain of TCR clone 117881 (TRAV8-4, TRAJ9)
CAVSETGGFKTIF

SEQ ID NO: 235762 - protein, 14 aa, Homo sapiens
  CDR3 for beta chain variable domain of TCR clone 117881 (TRBV18, TRBJ2-3)
CASSWLADTDTQYF

SEQ ID NO: 235763 - protein, 16 aa, Homo sapiens
  CDR3 for alpha chain variable domain of TCR clone 117882 (TRAV3, TRAJ38)
CAVRDCLNAGNNRKLI

SEQ ID NO: 235764 - protein, 14 aa, Homo sapiens
  CDR3 for beta chain variable domain of TCR clone 117882 (TRBV5-5, TRBJ1-5)
CASSGQGVDQPQHF

SEQ ID NO: 235765 - protein, 12 aa, Homo sapiens
  CDR3 for alpha chain variable domain of TCR clone 117883 (TRAV3, TRAJ43)
CVVRDPNNDMRF

SEQ ID NO: 235766 - protein, 15 aa, Homo sapiens
  CDR3 for beta chain variable domain of TCR clone 117883 (TRBV27, TRBJ1-5)
CASSLGTGFDQPQHF

SEQ ID NO: 235767 - protein, 17 aa, Homo sapiens
  CDR3 for alpha chain variable domain of TCR clone 117884 (TRAV13-1, TRAJ28)
CAASPPYSGAGSYQLTF

SEQ ID NO: 235768 - protein, 15 aa, Homo sapiens
  CDR3 for beta chain variable domain of TCR clone 117884 (TRBV6-3, TRBJ2-2)
SASSFLATLTGELFF

SEQ ID NO: 235769 - protein, 14 aa, Homo sapiens
  CDR3 for alpha chain variable domain of TCR clone 117885 (TRAV29/DV5, TRAJ45)
CAASFRGGADGLTF

SEQ ID NO: 235770 - protein, 13 aa, Homo sapiens
  CDR3 for beta chain variable domain of TCR clone 117885 (TRBV6-9, TRBJ2-5)
CASKGDGRRTQYF

SEQ ID NO: 235771 - protein, 13 aa, Homo sapiens
  CDR3 for alpha chain variable domain of TCR clone 117886 (TRAV8-3, TRAJ43)
WAVVPYNNNDMRF

SEQ ID NO: 235772 - protein, 17 aa, Homo sapiens
  CDR3 for beta chain variable domain of TCR clone 117886 (TRBV7-7, TRBJ1-1)
CASIGDRPNLGVTEAFF

SEQ ID NO: 235773 - protein, 14 aa, Homo sapiens
  CDR3 for alpha chain variable domain of TCR clone 117887 (TRAV1-2, TRAJ8)
CAVREDTGFQKLVF

SEQ ID NO: 235774 - protein, 14 aa, Homo sapiens
  CDR3 for beta chain variable domain of TCR clone 117887 (TRBV11-2, TRBJ2-3)
CASSRLARTDTKYF

SEQ ID NO: 235775 - protein, 14 aa, Homo sapiens
  CDR3 for alpha chain variable domain of TCR clone 117888 (TRAV12-1, TRAJ30)
CVVNIGGRDGKIIF

SEQ ID NO: 235776 - protein, 14 aa, Homo sapiens
  CDR3 for beta chain variable domain of TCR clone 117888 (TRBV7-7, TRBJ2-3)
CASSLGTVTDTQYF

SEQ ID NO: 235777 - protein, 17 aa, Homo sapiens
  CDR3 for alpha chain variable domain of TCR clone 117889 (TRAV3, TRAJ6)
CAVRDGPRAGGSFIPTF

SEQ ID NO: 235778 - protein, 18 aa, Homo sapiens
  CDR3 for beta chain variable domain of TCR clone 117889 (TRBV7-9, TRBJ2-7)
CASSLTTSGSRTWYEQYF

SEQ ID NO: 235779 - protein, 14 aa, Homo sapiens
  CDR3 for alpha chain variable domain of TCR clone 117890 (TRAV16, TRAJ32)
CALKSGGATNKLIF

SEQ ID NO: 235780 - protein, 13 aa, Homo sapiens
  CDR3 for beta chain variable domain of TCR clone 117890 (TRBV15, TRBJ1-6)
CTTSGGLNSPLHF

SEQ ID NO: 235781 - protein, 13 aa, Homo sapiens
  CDR3 for alpha chain variable domain of TCR clone 117891 (TRAV3, TRAJ15)
CAVRDQAGTALIF

SEQ ID NO: 235782 - protein, 15 aa, Homo sapiens
  CDR3 for beta chain variable domain of TCR clone 117891 (TRBV19, TRBJ1-6)
CASSTQGAVGSPLHF

SEQ ID NO: 235783 - protein, 13 aa, Homo sapiens
  CDR3 for alpha chain variable domain of TCR clone 117892 (TRAV8-1, TRAJ30)
CAGNGRRDDKIIF

SEQ ID NO: 235784 - protein, 15 aa, Homo sapiens
  CDR3 for beta chain variable domain of TCR clone 117892 (TRBV5-7, TRBJ1-5)
CASSYGKLWDQPQHF

SEQ ID NO: 235785 - protein, 13 aa, Homo sapiens
  CDR3 for alpha chain variable domain of TCR clone 117893 (TRAV21, TRAJ9)
CAVRRSGGFKTIF

SEQ ID NO: 235786 - protein, 15 aa, Homo sapiens
  CDR3 for beta chain variable domain of TCR clone 117893 (TRBV5-1, TRBJ2-1)
CASSPPRAPYNEQFF

SEQ ID NO: 235787 - protein, 14 aa, Homo sapiens
  CDR3 for alpha chain variable domain of TCR clone 117894 (TRAV1-2, TRAJ6)
CAVRSSGGSYIPTF

SEQ ID NO: 235788 - protein, 16 aa, Homo sapiens
  CDR3 for beta chain variable domain of TCR clone 117894 (TRBV7-3, TRBJ2-2)
CASSLKRGTLSGELFL

SEQ ID NO: 235789 - protein, 13 aa, Homo sapiens
  CDR3 for alpha chain variable domain of TCR clone 117895 (TRAV9-2, TRAJ53)
CALSGGSNYKLTF

SEQ ID NO: 235790 - protein, 16 aa, Homo sapiens
  CDR3 for beta chain variable domain of TCR clone 117895 (TRBV19, TRBJ2-2)
CASSFPGQGLAGELFF

SEQ ID NO: 235791 - protein, 15 aa, Homo sapiens
  CDR3 for alpha chain variable domain of TCR clone 117896 (TRAV26-1, TRAJ56)
CIVRVATGANSKLTF

SEQ ID NO: 235792 - protein, 15 aa, Homo sapiens
  CDR3 for beta chain variable domain of TCR clone 117896 (TRBV27, TRBJ2-7)
CASSPQREGEREQYF

SEQ ID NO: 235793 - protein, 15 aa, Homo sapiens
  CDR3 for alpha chain variable domain of TCR clone 117897 (TRAV3, TRAJ3)
CAVRGPYSSASKIIF

SEQ ID NO: 235794 - protein, 13 aa, Homo sapiens
  CDR3 for beta chain variable domain of TCR clone 117897 (TRBV7-9, TRBJ1-2)
CASSLKQNYGYTF

SEQ ID NO: 235795 - protein, 14 aa, Homo sapiens
  CDR3 for alpha chain variable domain of TCR clone 117898 (TRAV17, TRAJ12)
CATDDKDSSYKLIF

SEQ ID NO: 235796 - protein, 16 aa, Homo sapiens
  CDR3 for beta chain variable domain of TCR clone 117898 (TRBV11-2, TRBJ2-1)
CASSPRLAGVYNEQFF

SEQ ID NO: 235797 - protein, 14 aa, Homo sapiens
  CDR3 for alpha chain variable domain of TCR clone 117899 (TRAV1-2, TRAJ8)
CAVREDTGFQKLVF

SEQ ID NO: 235798 - protein, 13 aa, Homo sapiens
  CDR3 for beta chain variable domain of TCR clone 117899 (TRBV29-1, TRBJ1-1)
CSVGDSRNTEALF

SEQ ID NO: 235799 - protein, 12 aa, Homo sapiens
  CDR3 for alpha chain variable domain of TCR clone 117900 (TRAV8-3, TRAJ26)
CAGDNYGQNFVF

SEQ ID NO: 235800 - protein, 15 aa, Homo sapiens
  CDR3 for beta chain variable domain of TCR clone 117900 (TRBV9, TRBJ2-1)
CASSLAGSSYNEKFF

SEQ ID NO: 235801 - protein, 16 aa, Homo sapiens
  CDR3 for alpha chain variable domain of TCR clone 117901 (TRAV35, TRAJ20)
CWADPSSGFNDYKLSF

SEQ ID NO: 235802 - protein, 16 aa, Homo sapiens
  CDR3 for beta chain variable domain of TCR clone 117901 (TRBV4-3, TRBJ1-6)
CASSAQPRGEGSPLHF

SEQ ID NO: 235803 - protein, 18 aa, Homo sapiens
  CDR3 for alpha chain variable domain of TCR clone 117902 (TRAV26-1, TRAJ52)
CIVRVEGAGGTSYGKLTF

SEQ ID NO: 235804 - protein, 13 aa, Homo sapiens
  CDR3 for beta chain variable domain of TCR clone 117902 (TRBV7-3, TRBJ1-2)
CASSLRRGYGYTF

SEQ ID NO: 235805 - protein, 16 aa, Homo sapiens
  CDR3 for alpha chain variable domain of TCR clone 117903 (TRAV3, TRAJ37)
CAVRGKGSGNTGKLIF

SEQ ID NO: 235806 - protein, 16 aa, Homo sapiens
  CDR3 for beta chain variable domain of TCR clone 117903 (TRBV2, TRBJ2-4)
CASSEAPGGEQNIQYF

SEQ ID NO: 235807 - protein, 15 aa, Homo sapiens
  CDR3 for alpha chain variable domain of TCR clone 117904 (TRAV29/DV5, TRAJ44)
CAASAGTGTASKLTF

SEQ ID NO: 235808 - protein, 15 aa, Homo sapiens
  CDR3 for beta chain variable domain of TCR clone 117904 (TRBV28, TRBJ2-1)
CASSIIAGGRSEQFF

SEQ ID NO: 235809 - protein, 11 aa, Homo sapiens
  CDR3 for alpha chain variable domain of TCR clone 117905 (TRAV35, TRAJ34)
CWARDTDKLIF

SEQ ID NO: 235810 - protein, 14 aa, Homo sapiens
  CDR3 for beta chain variable domain of TCR clone 117905 (TRBV25-1, TRBJ1-1)
CASTHLGGNTEAFF

SEQ ID NO: 235811 - protein, 16 aa, Homo sapiens
  CDR3 for alpha chain variable domain of TCR clone 117906 (TRAV3, TRAJ32)
CAVRENYGGATNTLIF

SEQ ID NO: 235812 - protein, 12 aa, Homo sapiens
  CDR3 for beta chain variable domain of TCR clone 117906 (TRBV20-1, TRBJ1-2)
CSVTPEGYGYTF

SEQ ID NO: 235813 - protein, 13 aa, Homo sapiens
  CDR3 for alpha chain variable domain of TCR clone 117907 (TRAV14/DV4, TRAJ16)
CAMREGSGQKLPF

SEQ ID NO: 235814 - protein, 15 aa, Homo sapiens
  CDR3 for beta chain variable domain of TCR clone 117907 (TRBV7-9, TRBJ2-7)
CASSLDLDRGYEQYF

SEQ ID NO: 235815 - protein, 13 aa, Homo sapiens
  CDR3 for alpha chain variable domain of TCR clone 117908 (TRAV12-2, TRAJ34)
CAVRGYNTDKLIF

SEQ ID NO: 235816 - protein, 15 aa, Homo sapiens
  CDR3 for beta chain variable domain of TCR clone 117908 (TRBV28, TRBJ2-1)
RASRTGAGVIARQFF

SEQ ID NO: 235817 - protein, 12 aa, Homo sapiens
  CDR3 for alpha chain variable domain of TCR clone 117909 (TRAV21, TRAJ33)
CAKMDTNYQLIW

SEQ ID NO: 235818 - protein, 14 aa, Homo sapiens
  CDR3 for beta chain variable domain of TCR clone 117909 (TRBV2, TRBJ2-7)
CASSLTSGGYEQYF

SEQ ID NO: 235819 - protein, 14 aa, Homo sapiens
  CDR3 for alpha chain variable domain of TCR clone 117910 (TRAV1-2, TRAJ16)
CAVNRFSDGQKLLF

SEQ ID NO: 235820 - protein, 12 aa, Homo sapiens
  CDR3 for beta chain variable domain of TCR clone 117910 (TRBV11-2, TRBJ2-2)
CASSLGSGELFF

SEQ ID NO: 235821 - protein, 15 aa, Homo sapiens
  CDR3 for alpha chain variable domain of TCR clone 117911 (TRAV12-2, TRAJ53)
YAVNGGGGSNYKLTF

SEQ ID NO: 235822 - protein, 14 aa, Homo sapiens
  CDR3 for beta chain variable domain of TCR clone 117911 (TRBV6-1, TRBJ1-3)
CASVQGGGGNTIYF

SEQ ID NO: 235823 - protein, 16 aa, Homo sapiens
  CDR3 for alpha chain variable domain of TCR clone 117912 (TRAV4, TRAJ9)
CLVGDHNRPGGFKTIF

SEQ ID NO: 235824 - protein, 16 aa, Homo sapiens
  CDR3 for beta chain variable domain of TCR clone 117912 (TRBV28, TRBJ1-4)
CASSPPYRGRSEKLFF

SEQ ID NO: 235825 - protein, 23 aa, Homo sapiens
  CDR3 for alpha chain variable domain of TCR clone 117913 (TRAV12-2, TRAJ43)
SLLIRDSQPSDSATYLCAFDMRF

SEQ ID NO: 235826 - protein, 15 aa, Homo sapiens
  CDR3 for beta chain variable domain of TCR clone 117913 (TRBV5-1, TRBJ2-3)
CASSVTSGSTDTQYF

SEQ ID NO: 235827 - protein, 14 aa, Homo sapiens
  CDR3 for alpha chain variable domain of TCR clone 117914 (TRAV13-1, TRAJ13)
CAASRVGGYQKVTF

SEQ ID NO: 235828 - protein, 15 aa, Homo sapiens
  CDR3 for beta chain variable domain of TCR clone 117914 (TRBV9, TRBJ1-6)
CASSVAGTGDSPLHF

SEQ ID NO: 235829 - protein, 13 aa, Homo sapiens
  CDR3 for alpha chain variable domain of TCR clone 117915 (TRAV13-2, TRAJ13)
CADLSGGYQKVTF

SEQ ID NO: 235830 - protein, 15 aa, Homo sapiens
  CDR3 for beta chain variable domain of TCR clone 117915 (TRBV19, TRBJ1-1)
CASSIGGGRNTEALF

SEQ ID NO: 235831 - protein, 15 aa, Homo sapiens
  CDR3 for alpha chain variable domain of TCR clone 117916 (TRAV2, TRAJ9)
CAVEDRGTGGFKTIF

SEQ ID NO: 235832 - protein, 13 aa, Homo sapiens
  CDR3 for beta chain variable domain of TCR clone 117916 (TRBV2, TRBJ1-1)
CASSEGGNTEAFF

SEQ ID NO: 235833 - protein, 15 aa, Homo sapiens
  CDR3 for alpha chain variable domain of TCR clone 117917 (TRAV36/DV7, TRAJ54)
CAVEKPVQGAQKLGF

SEQ ID NO: 235834 - protein, 17 aa, Homo sapiens
  CDR3 for beta chain variable domain of TCR clone 117917 (TRBV6-5, TRBJ1-2)
CASSSPWEGAFDYGYTF

SEQ ID NO: 235835 - protein, 13 aa, Homo sapiens
  CDR3 for alpha chain variable domain of TCR clone 117918 (TRAV12-3, TRAJ16)
CAVQLSDGQKLLF

SEQ ID NO: 235836 - protein, 12 aa, Homo sapiens
  CDR3 for beta chain variable domain of TCR clone 117918 (TRBV12-4, TRBJ2-4)
CASSSSGNIQYF

SEQ ID NO: 235837 - protein, 15 aa, Homo sapiens
  CDR3 for alpha chain variable domain of TCR clone 117919 (TRAV26-1, TRAJ56)
CIVRVDNGANSRLTF

SEQ ID NO: 235838 - protein, 14 aa, Homo sapiens
  CDR3 for beta chain variable domain of TCR clone 117919 (TRBV5-1, TRBJ2-7)
CASSRGESLYEQYF

SEQ ID NO: 235839 - protein, 19 aa, Homo sapiens
  CDR3 for alpha chain variable domain of TCR clone 117920 (TRAV3, TRAJ37)
CAVRDIVGGYPSNTGTLIF

SEQ ID NO: 235840 - protein, 14 aa, Homo sapiens
  CDR3 for beta chain variable domain of TCR clone 117920 (TRBV7-8, TRBJ2-3)
CASSLEAGTDTQYF

SEQ ID NO: 235841 - protein, 13 aa, Homo sapiens
  CDR3 for alpha chain variable domain of TCR clone 117921 (TRAV13-1, TRAJ40)
CAARTSGTYKYIF

SEQ ID NO: 235842 - protein, 16 aa, Homo sapiens
  CDR3 for beta chain variable domain of TCR clone 117921 (TRBV19, TRBJ2-1)
CASSKAGPSSYNEQFF

SEQ ID NO: 235843 - protein, 11 aa, Homo sapiens
  CDR3 for alpha chain variable domain of TCR clone 117922 (TRAV21, TRAJ9)
CAVPGGFQTIF

SEQ ID NO: 235844 - protein, 12 aa, Homo sapiens
  CDR3 for beta chain variable domain of TCR clone 117922 (TRBV20-1, TRBJ2-3)
CSARVGTDTQYF

SEQ ID NO: 235845 - protein, 14 aa, Homo sapiens
  CDR3 for alpha chain variable domain of TCR clone 117923 (TRAV2, TRAJ37)
CAVGFTSNTGKLIF

SEQ ID NO: 235846 - protein, 14 aa, Homo sapiens
  CDR3 for beta chain variable domain of TCR clone 117923 (TRBV12-5, TRBJ2-5)
CASGSRTHQETQYF

SEQ ID NO: 235847 - protein, 15 aa, Homo sapiens
  CDR3 for alpha chain variable domain of TCR clone 117924 (TRAV34, TRAJ38)
CGADFAPGNNRKLIW

SEQ ID NO: 235848 - protein, 11 aa, Homo sapiens
  CDR3 for beta chain variable domain of TCR clone 117924 (TRBV29-1, TRBJ2-5)
CSEDRTGTQYF

SEQ ID NO: 235849 - protein, 15 aa, Homo sapiens
  CDR3 for alpha chain variable domain of TCR clone 117925 (TRAV8-3, TRAJ27)
CAVGPSKTNEGKSTF

SEQ ID NO: 235850 - protein, 14 aa, Homo sapiens
  CDR3 for beta chain variable domain of TCR clone 117925 (TRBV11-2, TRBJ2-3)
CASSRLARTDTQYF

SEQ ID NO: 235851 - protein, 12 aa, Homo sapiens
  CDR3 for alpha chain variable domain of TCR clone 117926 (TRAV17, TRAJ20)
CTTYSNDYKLSF

SEQ ID NO: 235852 - protein, 11 aa, Homo sapiens
  CDR3 for beta chain variable domain of TCR clone 117926 (TRBV4-1, TRBJ2-2)
CASEHTGELFF

SEQ ID NO: 235853 - protein, 13 aa, Homo sapiens
  CDR3 for alpha chain variable domain of TCR clone 117927 (TRAV3, TRAJ27)
CAVRPLGAGKSTF

SEQ ID NO: 235854 - protein, 13 aa, Homo sapiens
  CDR3 for beta chain variable domain of TCR clone 117927 (TRBV7-9, TRBJ2-3)
CASSPGSADAQYF

SEQ ID NO: 235855 - protein, 13 aa, Homo sapiens
  CDR3 for alpha chain variable domain of TCR clone 117928 (TRAV1-2, TRAJ20)
CAVPRSNDYKLSF

SEQ ID NO: 235856 - protein, 15 aa, Homo sapiens
  CDR3 for beta chain variable domain of TCR clone 117928 (TRBV20-1, TRBJ2-7)
CSARDRVSGMDEQYF

SEQ ID NO: 235857 - protein, 15 aa, Homo sapiens
  CDR3 for alpha chain variable domain of TCR clone 117929 (TRAV26-1, TRAJ44)
CIARVPFGTASKLTF

SEQ ID NO: 235858 - protein, 15 aa, Homo sapiens
  CDR3 for beta chain variable domain of TCR clone 117929 (TRBV25-1, TRBJ1-4)
CASSPGDSTNEKLFF

SEQ ID NO: 235859 - protein, 14 aa, Homo sapiens
  CDR3 for alpha chain variable domain of TCR clone 117930 (TRAV12-2, TRAJ40)
CAVKIPSGTYKYIF

SEQ ID NO: 235860 - protein, 12 aa, Homo sapiens
  CDR3 for beta chain variable domain of TCR clone 117930 (TRBV7-9, TRBJ2-7)
CASSFGSYEQYF

SEQ ID NO: 235861 - protein, 11 aa, Homo sapiens
  CDR3 for alpha chain variable domain of TCR clone 117931 (TRAV1-2, TRAJ31)
CAVNNNARLMI

SEQ ID NO: 235862 - protein, 15 aa, Homo sapiens
  CDR3 for beta chain variable domain of TCR clone 117931 (TRBV28, TRBJ2-1)
CASSIIAGGRSEQFF

SEQ ID NO: 235863 - protein, 14 aa, Homo sapiens
  CDR3 for alpha chain variable domain of TCR clone 117932 (TRAV17, TRAJ31)
FATVLRNNNARLMF

SEQ ID NO: 235864 - protein, 14 aa, Homo sapiens
  CDR3 for beta chain variable domain of TCR clone 117932 (TRBV12-4, TRBJ2-5)
CASSLWQKQETQYF

SEQ ID NO: 235865 - protein, 14 aa, Homo sapiens
  CDR3 for alpha chain variable domain of TCR clone 117933 (TRAV12-2, TRAJ17)
CAVNIKAAGNKLTF

SEQ ID NO: 235866 - protein, 13 aa, Homo sapiens
  CDR3 for beta chain variable domain of TCR clone 117933 (TRBV7-3, TRBJ1-1)
CASSQDWGAEAFF

SEQ ID NO: 235867 - protein, 16 aa, Homo sapiens
  CDR3 for alpha chain variable domain of TCR clone 117934 (TRAV22, TRAJ45)
CAVGRGKRGGADGLTF

SEQ ID NO: 235868 - protein, 13 aa, Homo sapiens
  CDR3 for beta chain variable domain of TCR clone 117934 (TRBV27, TRBJ1-1)
CASSLSIGVEAFF

SEQ ID NO: 235869 - protein, 14 aa, Homo sapiens
  CDR3 for alpha chain variable domain of TCR clone 117935 (TRAV9-2, TRAJ39)
CALYIYNAGNMLTF

SEQ ID NO: 235870 - protein, 16 aa, Homo sapiens
  CDR3 for beta chain variable domain of TCR clone 117935 (TRBV29-1, TRBJ2-6)
CSVEDITYSGANGLTF

SEQ ID NO: 235871 - protein, 14 aa, Homo sapiens
  CDR3 for alpha chain variable domain of TCR clone 117936 (TRAV16, TRAJ42)
CALLAGGSQGKLIF

SEQ ID NO: 235872 - protein, 15 aa, Homo sapiens
  CDR3 for beta chain variable domain of TCR clone 117936 (TRBV2, TRBJ2-7)
CASSEGLARSYEQYF

SEQ ID NO: 235873 - protein, 13 aa, Homo sapiens
  CDR3 for alpha chain variable domain of TCR clone 117937 (TRAV14/DV4, TRAJ4)
CAMKAGGYNKLIF

SEQ ID NO: 235874 - protein, 15 aa, Homo sapiens
  CDR3 for beta chain variable domain of TCR clone 117937 (TRBV11-3, TRBJ1-1)
CASSLGGPGDTEAYF

SEQ ID NO: 235875 - protein, 14 aa, Homo sapiens
  CDR3 for alpha chain variable domain of TCR clone 117938 (TRAV8-2, TRAJ4)
CVVSPSGGYNKLIF

SEQ ID NO: 235876 - protein, 17 aa, Homo sapiens
  CDR3 for beta chain variable domain of TCR clone 117938 (TRBV20-1, TRBJ2-2)
CSASGSGQGGLTGELFF

SEQ ID NO: 235877 - protein, 11 aa, Homo sapiens
  CDR3 for alpha chain variable domain of TCR clone 117939 (TRAV1-2, TRAJ40)
CAVPGTYKYIF

SEQ ID NO: 235878 - protein, 16 aa, Homo sapiens
  CDR3 for beta chain variable domain of TCR clone 117939 (TRBV13, TRBJ2-2)
CASSPRTGEHTGELFF

SEQ ID NO: 235879 - protein, 12 aa, Homo sapiens
  CDR3 for alpha chain variable domain of TCR clone 117940 (TRAV25, TRAJ11)
RAGASGYSTLTF

SEQ ID NO: 235880 - protein, 14 aa, Homo sapiens
  CDR3 for beta chain variable domain of TCR clone 117940 (TRBV5-8, TRBJ2-3)
CASSLGQGTDTQYF

SEQ ID NO: 235881 - protein, 15 aa, Homo sapiens
  CDR3 for alpha chain variable domain of TCR clone 117941 (TRAV27, TRAJ29)
CAGADRDSGNTPLVF

SEQ ID NO: 235882 - protein, 13 aa, Homo sapiens
  CDR3 for beta chain variable domain of TCR clone 117941 (TRBV10-3, TRBJ2-2)
CAISDLRAGELFF

SEQ ID NO: 235883 - protein, 13 aa, Homo sapiens
  CDR3 for alpha chain variable domain of TCR clone 117942 (TRAV21, TRAJ57)
CAVTQGGSEKLVF

SEQ ID NO: 235884 - protein, 12 aa, Homo sapiens
  CDR3 for beta chain variable domain of TCR clone 117942 (TRBV11-2, TRBJ2-1)
CASSPGNNEQFF

SEQ ID NO: 235885 - protein, 14 aa, Homo sapiens
  CDR3 for alpha chain variable domain of TCR clone 117943 (TRAV35, TRAJ33)
CAGSSQDSNYQLIW

SEQ ID NO: 235886 - protein, 15 aa, Homo sapiens
  CDR3 for beta chain variable domain of TCR clone 117943 (TRBV20-1, TRBJ2-7)
CSAESGTSGAYEKYF

SEQ ID NO: 235887 - protein, 11 aa, Homo sapiens
  CDR3 for alpha chain variable domain of TCR clone 117944 (TRAV12-2, TRAJ30)
CALGRDDKIIF

SEQ ID NO: 235888 - protein, 14 aa, Homo sapiens
  CDR3 for beta chain variable domain of TCR clone 117944 (TRBV6-1, TRBJ1-3)
CASVQGGGGNTIYF

SEQ ID NO: 235889 - protein, 14 aa, Homo sapiens
  CDR3 for alpha chain variable domain of TCR clone 117945 (TRAV12-1, TRAJ13)
CVVNYSGGYQKVTF

SEQ ID NO: 235890 - protein, 17 aa, Homo sapiens
  CDR3 for beta chain variable domain of TCR clone 117945 (TRBV7-3, TRBJ2-3)
RASSLMKRMRGADTQYF

SEQ ID NO: 235891 - protein, 15 aa, Homo sapiens
  CDR3 for alpha chain variable domain of TCR clone 117946 (TRAV13-2, TRAJ13)
CAERPGVTRKLPLEL

SEQ ID NO: 235892 - protein, 19 aa, Homo sapiens
  CDR3 for beta chain variable domain of TCR clone 117946 (TRBV4-1, TRBJ2-1)
CASSQGPLPGLGSRNEQFF

SEQ ID NO: 235893 - protein, 15 aa, Homo sapiens
  CDR3 for alpha chain variable domain of TCR clone 117947 (TRAV3, TRAJ30)
CAVRDRVERGDKIIF

SEQ ID NO: 235894 - protein, 12 aa, Homo sapiens
  CDR3 for beta chain variable domain of TCR clone 117947 (TRBV11-2, TRBJ2-2)
CASSLGGGELFF

SEQ ID NO: 235895 - protein, 13 aa, Homo sapiens
  CDR3 for alpha chain variable domain of TCR clone 117948 (TRAV8-3, TRAJ36)
CAVGATGANNLFF

SEQ ID NO: 235896 - protein, 20 aa, Homo sapiens
  CDR3 for beta chain variable domain of TCR clone 117948 (TRBV28, TRBJ2-1)
CASTPIGRSPGLAGGNEQFF

SEQ ID NO: 235897 - protein, 17 aa, Homo sapiens
  CDR3 for alpha chain variable domain of TCR clone 117949 (TRAV8-6, TRAJ58)
CAVSSWVGDTSGSRLTF

SEQ ID NO: 235898 - protein, 14 aa, Homo sapiens
  CDR3 for beta chain variable domain of TCR clone 117949 (TRBV20-1, TRBJ2-1)
CSAQIGGSANEQFF

SEQ ID NO: 235899 - protein, 16 aa, Homo sapiens
  CDR3 for alpha chain variable domain of TCR clone 117950 (TRAV12-2, TRAJ10)
CAVNRLLTGGGNKLTF

SEQ ID NO: 235900 - protein, 12 aa, Homo sapiens
  CDR3 for beta chain variable domain of TCR clone 117950 (TRBV28, TRBJ2-7)
CASSFSSYEQYF

SEQ ID NO: 235901 - protein, 16 aa, Homo sapiens
  CDR3 for alpha chain variable domain of TCR clone 117951 (TRAV21, TRAJ17)
CAVRQGEEAAGNKLTF

SEQ ID NO: 235902 - protein, 16 aa, Homo sapiens
  CDR3 for beta chain variable domain of TCR clone 117951 (TRBV2, TRBJ2-7)
CASSEPWTGPSYEQYF

SEQ ID NO: 235903 - protein, 13 aa, Homo sapiens
  CDR3 for alpha chain variable domain of TCR clone 117952 (TRAV8-6, TRAJ33)
CAVSEGSNYQLIW

SEQ ID NO: 235904 - protein, 16 aa, Homo sapiens
  CDR3 for beta chain variable domain of TCR clone 117952 (TRBV20-1, TRBJ1-4)
CSAPGQGLLTNEKLFF

SEQ ID NO: 235905 - protein, 14 aa, Homo sapiens
  CDR3 for alpha chain variable domain of TCR clone 117953 (TRAV26-1, TRAJ40)
CIVRLLSGTYKYIF

SEQ ID NO: 235906 - protein, 13 aa, Homo sapiens
  CDR3 for beta chain variable domain of TCR clone 117953 (TRBV10-3, TRBJ2-7)
CASKLAVNYEQYF

SEQ ID NO: 235907 - protein, 14 aa, Homo sapiens
  CDR3 for alpha chain variable domain of TCR clone 117954 (TRAV12-2, TRAJ17)
CAVNIKAADNKLTF

SEQ ID NO: 235908 - protein, 11 aa, Homo sapiens
  CDR3 for beta chain variable domain of TCR clone 117954 (TRBV19, TRBJ2-5)
CASSIKETQYF

SEQ ID NO: 235909 - protein, 12 aa, Homo sapiens
  CDR3 for alpha chain variable domain of TCR clone 117955 (TRAV12-3, TRAJ17)
CAMTLTGNKLTF

SEQ ID NO: 235910 - protein, 15 aa, Homo sapiens
  CDR3 for beta chain variable domain of TCR clone 117955 (TRBV15, TRBJ1-3)
CATSRDRGPGNTIYF

SEQ ID NO: 235911 - protein, 21 aa, Homo sapiens
  CDR3 for alpha chain variable domain of TCR clone 117956 (TRAV29/DV5, TRAJ52)
CSVLLCSKREAGGISYGKLTF

SEQ ID NO: 235912 - protein, 15 aa, Homo sapiens
  CDR3 for beta chain variable domain of TCR clone 117956 (TRBV6-1, TRBJ2-1)
CASSELRGQYNEQFF

SEQ ID NO: 235913 - protein, 12 aa, Homo sapiens
  CDR3 for alpha chain variable domain of TCR clone 117957 (TRAV12-3, TRAJ17)
CAMTLTGNKLTF

SEQ ID NO: 235914 - protein, 15 aa, Homo sapiens
  CDR3 for beta chain variable domain of TCR clone 117957 (TRBV12-4, TRBJ2-1)
CASSLLGRTYNEQFF

SEQ ID NO: 235915 - protein, 12 aa, Homo sapiens
  CDR3 for alpha chain variable domain of TCR clone 117958 (TRAV16, TRAJ10)
CSRTGGGNKLTF

SEQ ID NO: 235916 - protein, 12 aa, Homo sapiens
  CDR3 for beta chain variable domain of TCR clone 117958 (TRBV11-2, TRBJ2-1)
CASSPGNNEQFF

SEQ ID NO: 235917 - protein, 14 aa, Homo sapiens
  CDR3 for alpha chain variable domain of TCR clone 117959 (TRAV13-1, TRAJ40)
CAASMTSGTYKYIF

SEQ ID NO: 235918 - protein, 12 aa, Homo sapiens
  CDR3 for beta chain variable domain of TCR clone 117959 (TRBV11-2, TRBJ2-1)
CASSPGNNEQFF

SEQ ID NO: 235919 - protein, 13 aa, Homo sapiens
  CDR3 for alpha chain variable domain of TCR clone 117960 (TRAV40, TRAJ61)
SAVRYRVNRKLTF

SEQ ID NO: 235920 - protein, 14 aa, Homo sapiens
  CDR3 for beta chain variable domain of TCR clone 117960 (TRBV19, TRBJ2-1)
CASPTFVLSGEQFF

SEQ ID NO: 235921 - protein, 14 aa, Homo sapiens
  CDR3 for alpha chain variable domain of TCR clone 117961 (TRAV8-4, TRAJ54)
CAVSQVLGAQKLVF

SEQ ID NO: 235922 - protein, 13 aa, Homo sapiens
  CDR3 for beta chain variable domain of TCR clone 117961 (TRBV27, TRBJ2-7)
CASSFVSSYEQYF

SEQ ID NO: 235923 - protein, 14 aa, Homo sapiens
  CDR3 for alpha chain variable domain of TCR clone 117962 (TRAV12-3, TRAJ10)
SHLPLTGGGNKLTF

SEQ ID NO: 235924 - protein, 15 aa, Homo sapiens
  CDR3 for beta chain variable domain of TCR clone 117962 (TRBV7-9, TRBJ2-7)
CASSLALAEAYEQYF

SEQ ID NO: 235925 - protein, 12 aa, Homo sapiens
  CDR3 for alpha chain variable domain of TCR clone 117963 (TRAV13-2, TRAJ23)
CAERHRGGKLIF

SEQ ID NO: 235926 - protein, 12 aa, Homo sapiens
  CDR3 for beta chain variable domain of TCR clone 117963 (TRBV5-1, TRBJ2-7)
CASSLDSYEQYF

SEQ ID NO: 235927 - protein, 13 aa, Homo sapiens
  CDR3 for alpha chain variable domain of TCR clone 117964 (TRAV12-2, TRAJ6)
CAVNVSRKLHTYI

SEQ ID NO: 235928 - protein, 14 aa, Homo sapiens
  CDR3 for beta chain variable domain of TCR clone 117964 (TRBV19, TRBJ2-1)
CARGARSFQWEQFF

SEQ ID NO: 235929 - protein, 11 aa, Homo sapiens
  CDR3 for alpha chain variable domain of TCR clone 117965 (TRAV21, TRAJ48)
CAVDGNEKLTF

SEQ ID NO: 235930 - protein, 14 aa, Homo sapiens
  CDR3 for beta chain variable domain of TCR clone 117965 (TRBV7-2, TRBJ2-7)
CASSPKTSFYEQYF

SEQ ID NO: 235931 - protein, 14 aa, Homo sapiens
  CDR3 for alpha chain variable domain of TCR clone 117966 (TRAV12-3, TRAJ9)
CAMSPNTGGFKTIF

SEQ ID NO: 235932 - protein, 15 aa, Homo sapiens
  CDR3 for beta chain variable domain of TCR clone 117966 (TRBV19, TRBJ2-2)
CASSPRTGWTGELFF

SEQ ID NO: 235933 - protein, 16 aa, Homo sapiens
  CDR3 for alpha chain variable domain of TCR clone 117967 (TRAV30, TRAJ24)
CGTEIVDADSWGKFQF

SEQ ID NO: 235934 - protein, 14 aa, Homo sapiens
  CDR3 for beta chain variable domain of TCR clone 117967 (TRBV7-8, TRBJ2-3)
CASSLEAGTDTQYF

SEQ ID NO: 235935 - protein, 17 aa, Homo sapiens
  CDR3 for alpha chain variable domain of TCR clone 117968 (TRAV12-1, TRAJ32)
CVVNMQGYGGATNNLIF

SEQ ID NO: 235936 - protein, 13 aa, Homo sapiens
  CDR3 for beta chain variable domain of TCR clone 117968 (TRBV6-6, TRBJ2-1)
CASSLHQGDEQFF

SEQ ID NO: 235937 - protein, 17 aa, Homo sapiens
  CDR3 for alpha chain variable domain of TCR clone 117969 (TRAV3, TRAJ6)
CAVRDGPRAGGSYIPTP

SEQ ID NO: 235938 - protein, 20 aa, Homo sapiens
  CDR3 for beta chain variable domain of TCR clone 117969 (TRBV28, TRBJ2-1)
CASTPIGRSPGLAGGNEQFF

SEQ ID NO: 235939 - protein, 13 aa, Homo sapiens
  CDR3 for alpha chain variable domain of TCR clone 117970 (TRAV2, TRAJ29)
CAAQNSGNTPLVF

SEQ ID NO: 235940 - protein, 14 aa, Homo sapiens
  CDR3 for beta chain variable domain of TCR clone 117970 (TRBV7-9, TRBJ2-4)
CASSLAMGGNIQYL

SEQ ID NO: 235941 - protein, 15 aa, Homo sapiens
  CDR3 for alpha chain variable domain of TCR clone 117971 (TRAV21, TRAJ4)
CCEAPFSGGYNKLIF

SEQ ID NO: 235942 - protein, 16 aa, Homo sapiens
  CDR3 for beta chain variable domain of TCR clone 117971 (TRBV29-1, TRBJ2-6)
CSVEDITYSGANVLTF

SEQ ID NO: 235943 - protein, 11 aa, Homo sapiens
  CDR3 for alpha chain variable domain of TCR clone 117972 (TRAV26-1, TRAJ37)
CIVRVGRKLIF

SEQ ID NO: 235944 - protein, 14 aa, Homo sapiens
  CDR3 for beta chain variable domain of TCR clone 117972 (TRBV19, TRBJ2-7)
CASNFRDTFTGMYF

SEQ ID NO: 235945 - protein, 12 aa, Homo sapiens
  CDR3 for alpha chain variable domain of TCR clone 117973 (TRAV26-2, TRAJ21)
CILKGNFNKFYF

SEQ ID NO: 235946 - protein, 14 aa, Homo sapiens
  CDR3 for beta chain variable domain of TCR clone 117973 (TRBV12-4, TRBJ1-1)
CASSLGTGGTEAVF

SEQ ID NO: 235947 - protein, 14 aa, Homo sapiens
  CDR3 for alpha chain variable domain of TCR clone 117974 (TRAV12-3, TRAJ56)
CAMSVTGANSKLTF

SEQ ID NO: 235948 - protein, 17 aa, Homo sapiens
  CDR3 for beta chain variable domain of TCR clone 117974 (TRBV20-1, TRBJ2-3)
CSASLLGRGGGADTQYF

SEQ ID NO: 235949 - protein, 14 aa, Homo sapiens
  CDR3 for alpha chain variable domain of TCR clone 117975 (TRAV36/DV7, TRAJ32)
CAVGHVGATNKLIF

SEQ ID NO: 235950 - protein, 12 aa, Homo sapiens
  CDR3 for beta chain variable domain of TCR clone 117975 (TRBV11-3, TRBJ1-1)
CASSLRDSEAFF

SEQ ID NO: 235951 - protein, 14 aa, Homo sapiens
  CDR3 for alpha chain variable domain of TCR clone 117976 (TRAV35, TRAJ50)
RAGHRKTSYDKVIF

SEQ ID NO: 235952 - protein, 13 aa, Homo sapiens
  CDR3 for beta chain variable domain of TCR clone 117976 (TRBV7-7, TRBJ2-3)
CASSLSRADTQYF

SEQ ID NO: 235953 - protein, 16 aa, Homo sapiens
  CDR3 for alpha chain variable domain of TCR clone 117977 (TRAV3, TRAJ37)
CAVRGKGAGNTGKLIF

SEQ ID NO: 235954 - protein, 12 aa, Homo sapiens
  CDR3 for beta chain variable domain of TCR clone 117977 (TRBV12-4, TRBJ2-3)
CASSTLPDTQYF

SEQ ID NO: 235955 - protein, 15 aa, Homo sapiens
  CDR3 for alpha chain variable domain of TCR clone 117978 (TRAV8-2, TRAJ15)
CVVTMGNQAGTALIF

SEQ ID NO: 235956 - protein, 12 aa, Homo sapiens
  CDR3 for beta chain variable domain of TCR clone 117978 (TRBV29-1, TRBJ2-3)
CSVTGGADTQYF

SEQ ID NO: 235957 - protein, 13 aa, Homo sapiens
  CDR3 for alpha chain variable domain of TCR clone 117979 (TRAV36/DV7, TRAJ33)
CAVDMDSNYQLIW

SEQ ID NO: 235958 - protein, 16 aa, Homo sapiens
  CDR3 for beta chain variable domain of TCR clone 117979 (TRBV15, TRBJ2-3)
CATRLSGGRAPDTRYF

SEQ ID NO: 235959 - protein, 14 aa, Homo sapiens
  CDR3 for alpha chain variable domain of TCR clone 117980 (TRAV13-2, TRAJ43)
CAAIPTYNNNDMRF

SEQ ID NO: 235960 - protein, 15 aa, Homo sapiens
  CDR3 for beta chain variable domain of TCR clone 117980 (TRBV7-9, TRBJ2-2)
CASGPLDTFPGELFF

SEQ ID NO: 235961 - protein, 14 aa, Homo sapiens
  CDR3 for alpha chain variable domain of TCR clone 117981 (TRAV2, TRAJ39)
CAVEGDNAGNMLTF

SEQ ID NO: 235962 - protein, 14 aa, Homo sapiens
  CDR3 for beta chain variable domain of TCR clone 117981 (TRBV28, TRBJ2-7)
CASSLRARGDEQYF

SEQ ID NO: 235963 - protein, 13 aa, Homo sapiens
  CDR3 for alpha chain variable domain of TCR clone 117982 (TRAV8-2, TRAJ43)
CVVSDQGDTDMRF

SEQ ID NO: 235964 - protein, 12 aa, Homo sapiens
  CDR3 for beta chain variable domain of TCR clone 117982 (TRBV7-9, TRBJ2-7)
CASRTGFDEQYF

SEQ ID NO: 235965 - protein, 14 aa, Homo sapiens
  CDR3 for alpha chain variable domain of TCR clone 117983 (TRAV12-2, TRAJ33)
CAVKRARSNYQLIW

SEQ ID NO: 235966 - protein, 12 aa, Homo sapiens
  CDR3 for beta chain variable domain of TCR clone 117983 (TRBV24-1, TRBJ2-3)
CATSDSTETQYF

SEQ ID NO: 235967 - protein, 16 aa, Homo sapiens
  CDR3 for alpha chain variable domain of TCR clone 117984 (TRAV3, TRAJ37)
CAVRGKGSGNTGKLIF

SEQ ID NO: 235968 - protein, 14 aa, Homo sapiens
  CDR3 for beta chain variable domain of TCR clone 117984 (TRBV6-1, TRBJ1-3)
CASVQGGGGNTIYV

SEQ ID NO: 235969 - protein, 15 aa, Homo sapiens
  CDR3 for alpha chain variable domain of TCR clone 117985 (TRAV3, TRAJ13)
CAVRDIAGGYQKVTF

SEQ ID NO: 235970 - protein, 13 aa, Homo sapiens
  CDR3 for beta chain variable domain of TCR clone 117985 (TRBV2, TRBJ2-2)
RASSKKNTGELFF

SEQ ID NO: 235971 - protein, 20 aa, Homo sapiens
  CDR3 for alpha chain variable domain of TCR clone 117986 (TRAV1-1, TRAJ4)
CLLLLRCEGFLSCGYNKLIF

SEQ ID NO: 235972 - protein, 16 aa, Homo sapiens
  CDR3 for beta chain variable domain of TCR clone 117986 (TRBV28, TRBJ1-4)
CASSPPYRGRSEKLFF

SEQ ID NO: 235973 - protein, 15 aa, Homo sapiens
  CDR3 for alpha chain variable domain of TCR clone 117987 (TRAV21, TRAJ52)
CAVRGGGTSYGKLTF

SEQ ID NO: 235974 - protein, 15 aa, Homo sapiens
  CDR3 for beta chain variable domain of TCR clone 117987 (TRBV18, TRBJ1-5)
CDSSPSDRSNQPQHF

SEQ ID NO: 235975 - protein, 13 aa, Homo sapiens
  CDR3 for alpha chain variable domain of TCR clone 117988 (TRAV36/DV7, TRAJ37)
CAVFSSNTGKLIF

SEQ ID NO: 235976 - protein, 15 aa, Homo sapiens
  CDR3 for beta chain variable domain of TCR clone 117988 (TRBV5-1, TRBJ2-2)
RASSSQGGNTGELFF

SEQ ID NO: 235977 - protein, 12 aa, Homo sapiens
  CDR3 for alpha chain variable domain of TCR clone 117989 (TRAV12-3, TRAJ17)
CAMTLTGNKLTF

SEQ ID NO: 235978 - protein, 16 aa, Homo sapiens
  CDR3 for beta chain variable domain of TCR clone 117989 (TRBV5-1, TRBJ2-5)
CASSLALLRAGETQYF

SEQ ID NO: 235979 - protein, 14 aa, Homo sapiens
  CDR3 for alpha chain variable domain of TCR clone 117990 (TRAV8-3, TRAJ9)
CAVVYNTGGFKTIF

SEQ ID NO: 235980 - protein, 14 aa, Homo sapiens
  CDR3 for beta chain variable domain of TCR clone 117990 (TRBV7-3, TRBJ2-2)
CASSSGGYSGELFF

SEQ ID NO: 235981 - protein, 12 aa, Homo sapiens
  CDR3 for alpha chain variable domain of TCR clone 117991 (TRAV1-1, TRAJ43)
CAPRVSSNDMRF

SEQ ID NO: 235982 - protein, 17 aa, Homo sapiens
  CDR3 for beta chain variable domain of TCR clone 117991 (TRBV4-1, TRBJ1-4)
CASSQEGPRGVEEKLFF

SEQ ID NO: 235983 - protein, 18 aa, Homo sapiens
  CDR3 for alpha chain variable domain of TCR clone 117992 (TRAV21, TRAJ52)
CAVRPSPAGGTSYGKLTF

SEQ ID NO: 235984 - protein, 17 aa, Homo sapiens
  CDR3 for beta chain variable domain of TCR clone 117992 (TRBV4-1, TRBJ1-3)
CASSPQRGIRFGNTIYF

SEQ ID NO: 235985 - protein, 16 aa, Homo sapiens
  CDR3 for alpha chain variable domain of TCR clone 117993 (TRAV30, TRAJ24)
CGTVIVEADSWGKFQF

SEQ ID NO: 235986 - protein, 14 aa, Homo sapiens
  CDR3 for beta chain variable domain of TCR clone 117993 (TRBV12-5, TRBJ2-5)
CASGSRTHQETQYF

SEQ ID NO: 235987 - protein, 14 aa, Homo sapiens
  CDR3 for alpha chain variable domain of TCR clone 117994 (TRAV12-2, TRAJ40)
CAVKIPSGTSKSIF

SEQ ID NO: 235988 - protein, 14 aa, Homo sapiens
  CDR3 for beta chain variable domain of TCR clone 117994 (TRBV20-1, TRBJ1-1)
CSAQTRIGGTEAFF

SEQ ID NO: 235989 - protein, 12 aa, Homo sapiens
  CDR3 for alpha chain variable domain of TCR clone 117995 (TRAV8-3, TRAJ26)
CAGDNYGQNFVF

SEQ ID NO: 235990 - protein, 13 aa, Homo sapiens
  CDR3 for beta chain variable domain of TCR clone 117995 (TRBV7-9, TRBJ2-5)
CASTPVGQETQYF

SEQ ID NO: 235991 - protein, 11 aa, Homo sapiens
  CDR3 for alpha chain variable domain of TCR clone 117996 (TRAV13-1, TRAJ5)
CAPKGRRALTF

SEQ ID NO: 235992 - protein, 17 aa, Homo sapiens
  CDR3 for beta chain variable domain of TCR clone 117996 (TRBV20-1, TRBJ2-2)
CSASGSGQGGLTGELFF

SEQ ID NO: 235993 - protein, 17 aa, Homo sapiens
  CDR3 for alpha chain variable domain of TCR clone 117997 (TRAV26-1, TRAJ46)
IASSESEKKSSGDRLTF

SEQ ID NO: 235994 - protein, 13 aa, Homo sapiens
  CDR3 for beta chain variable domain of TCR clone 117997 (TRBV12-5, TRBJ2-3)
CASGDRQSDTQYF

SEQ ID NO: 235995 - protein, 14 aa, Homo sapiens
  CDR3 for alpha chain variable domain of TCR clone 117998 (TRAV12-3, TRAJ10)
SHLPLTGGGNKLTF

SEQ ID NO: 235996 - protein, 15 aa, Homo sapiens
  CDR3 for beta chain variable domain of TCR clone 117998 (TRBV7-2, TRBJ1-3)
CASSPQGGSGNTIYF

SEQ ID NO: 235997 - protein, 13 aa, Homo sapiens
  CDR3 for alpha chain variable domain of TCR clone 117999 (TRAV2, TRAJ15)
CAVASQAGTAPIF

SEQ ID NO: 235998 - protein, 15 aa, Homo sapiens
  CDR3 for beta chain variable domain of TCR clone 117999 (TRBV7-3, TRBJ2-2)
CASSETGQGTGELFF

SEQ ID NO: 235999 - protein, 14 aa, Homo sapiens
  CDR3 for alpha chain variable domain of TCR clone 118000 (TRAV12-1, TRAJ4)
CGEQRSGGYNKLIF

SEQ ID NO: 236000 - protein, 16 aa, Homo sapiens
  CDR3 for beta chain variable domain of TCR clone 118000 (TRBV11-3, TRBJ2-5)
CASSSVVAGSAETQYF

SEQ ID NO: 236001 - protein, 14 aa, Homo sapiens
  CDR3 for alpha chain variable domain of TCR clone 118001 (TRAV20, TRAJ42)
CAVQAGGSPGKLLF

SEQ ID NO: 236002 - protein, 14 aa, Homo sapiens
  CDR3 for beta chain variable domain of TCR clone 118001 (TRBV28, TRBJ1-2)
CASRIQGANYGYTF

SEQ ID NO: 236003 - protein, 15 aa, Homo sapiens
  CDR3 for alpha chain variable domain of TCR clone 118002 (TRAV38-1, TRAJ37)
CAFIFGSGNTGKLIF

SEQ ID NO: 236004 - protein, 12 aa, Homo sapiens
  CDR3 for beta chain variable domain of TCR clone 118002 (TRBV7-9, TRBJ2-7)
CASSLEGYEQYI

SEQ ID NO: 236005 - protein, 14 aa, Homo sapiens
  CDR3 for alpha chain variable domain of TCR clone 118003 (TRAV8-3, TRAJ35)
CAVVPQGFGNVLHC

SEQ ID NO: 236006 - protein, 13 aa, Homo sapiens
  CDR3 for beta chain variable domain of TCR clone 118003 (TRBV23-1, TRBJ1-4)
CASRGKFNEKLFF

SEQ ID NO: 236007 - protein, 12 aa, Homo sapiens
  CDR3 for alpha chain variable domain of TCR clone 118004 (TRAV38-2/DV8, TRAJ47)
CVLMEYGNKLVF

SEQ ID NO: 236008 - protein, 15 aa, Homo sapiens
  CDR3 for beta chain variable domain of TCR clone 118004 (TRBV20-1, TRBJ2-7)
CSARDRVSGMDEQYF

SEQ ID NO: 236009 - protein, 16 aa, Homo sapiens
  CDR3 for alpha chain variable domain of TCR clone 118005 (TRAV26-2, TRAJ45)
CTTASPIGGGADGLTF

SEQ ID NO: 236010 - protein, 17 aa, Homo sapiens
  CDR3 for beta chain variable domain of TCR clone 118005 (TRBV11-2, TRBJ2-3)
CQQLRGASRGAPNTQYF

SEQ ID NO: 236011 - protein, 13 aa, Homo sapiens
  CDR3 for alpha chain variable domain of TCR clone 118006 (TRAV8-4, TRAJ10)
CAAFTGGGNKLTF

SEQ ID NO: 236012 - protein, 13 aa, Homo sapiens
  CDR3 for beta chain variable domain of TCR clone 118006 (TRBV10-3, TRBJ2-7)
CASKLAVNYEQYF

SEQ ID NO: 236013 - protein, 13 aa, Homo sapiens
  CDR3 for alpha chain variable domain of TCR clone 118007 (TRAV27, TRAJ37)
CAGGPSNTGKLIF

SEQ ID NO: 236014 - protein, 14 aa, Homo sapiens
  CDR3 for beta chain variable domain of TCR clone 118007 (TRBV18, TRBJ2-5)
CASSPGVSQETQYF

SEQ ID NO: 236015 - protein, 15 aa, Homo sapiens
  CDR3 for alpha chain variable domain of TCR clone 118008 (TRAV16, TRAJ16)
CALQGGGSDGQKLLF

SEQ ID NO: 236016 - protein, 16 aa, Homo sapiens
  CDR3 for beta chain variable domain of TCR clone 118008 (TRBV28, TRBJ1-1)
CASSSGGQPVATEAFF

SEQ ID NO: 236017 - protein, 15 aa, Homo sapiens
  CDR3 for alpha chain variable domain of TCR clone 118009 (TRAV14/DV4, TRAJ48)
CAMTLSNFGNEKLTF

SEQ ID NO: 236018 - protein, 15 aa, Homo sapiens
  CDR3 for beta chain variable domain of TCR clone 118009 (TRBV28, TRBJ2-5)
CASSPGQGSIETQYF

SEQ ID NO: 236019 - protein, 14 aa, Homo sapiens
  CDR3 for alpha chain variable domain of TCR clone 118010 (TRAV1-2, TRAJ16)
FAVNRFSDGQKLLF

SEQ ID NO: 236020 - protein, 11 aa, Homo sapiens
  CDR3 for beta chain variable domain of TCR clone 118010 (TRBV29-1, TRBJ2-5)
CSEDRTGTQYF

SEQ ID NO: 236021 - protein, 14 aa, Homo sapiens
  CDR3 for alpha chain variable domain of TCR clone 118011 (TRAV35, TRAJ13)
CAGSPSGGYQKVTL

SEQ ID NO: 236022 - protein, 17 aa, Homo sapiens
  CDR3 for beta chain variable domain of TCR clone 118011 (TRBV7-6, TRBJ2-5)
CASSPGLADPWGETQYF

SEQ ID NO: 236023 - protein, 15 aa, Homo sapiens
  CDR3 for alpha chain variable domain of TCR clone 118012 (TRAV26-1, TRAJ48)
CIARWSWFGNEKLTF

SEQ ID NO: 236024 - protein, 16 aa, Homo sapiens
  CDR3 for beta chain variable domain of TCR clone 118012 (TRBV12-5, TRBJ2-5)
CASGPRTSGNQETQYF

SEQ ID NO: 236025 - protein, 13 aa, Homo sapiens
  CDR3 for alpha chain variable domain of TCR clone 118013 (TRAV8-3, TRAJ28)
CAVGAVGSYQLTF

SEQ ID NO: 236026 - protein, 16 aa, Homo sapiens
  CDR3 for beta chain variable domain of TCR clone 118013 (TRBV20-1, TRBJ1-2)
CSASMGQGVANYGYTF

SEQ ID NO: 236027 - protein, 13 aa, Homo sapiens
  CDR3 for alpha chain variable domain of TCR clone 118014 (TRAV38-2/DV8, TRAJ34)
CAYRTWNTDKLIF

SEQ ID NO: 236028 - protein, 16 aa, Homo sapiens
  CDR3 for beta chain variable domain of TCR clone 118014 (TRBV19, TRBJ2-2)
CASRSPGTGATGELFF

SEQ ID NO: 236029 - protein, 13 aa, Homo sapiens
  CDR3 for alpha chain variable domain of TCR clone 118015 (TRAV12-1, TRAJ35)
CVLDGGFGNVLHC

SEQ ID NO: 236030 - protein, 14 aa, Homo sapiens
  CDR3 for beta chain variable domain of TCR clone 118015 (TRBV7-3, TRBJ1-1)
CASSLKGGNTEAFF

SEQ ID NO: 236031 - protein, 14 aa, Homo sapiens
  CDR3 for alpha chain variable domain of TCR clone 118016 (TRAV13-1, TRAJ35)
CAASKGGFGNVLHC

SEQ ID NO: 236032 - protein, 14 aa, Homo sapiens
  CDR3 for beta chain variable domain of TCR clone 118016 (TRBV28, TRBJ2-1)
CASSLNGRNNEQFF

SEQ ID NO: 236033 - protein, 14 aa, Homo sapiens
  CDR3 for alpha chain variable domain of TCR clone 118017 (TRAV1-2, TRAJ16)
CAVNRFSDGQKLLF

SEQ ID NO: 236034 - protein, 16 aa, Homo sapiens
  CDR3 for beta chain variable domain of TCR clone 118017 (TRBV11-2, TRBJ1-2)
CASSLDTGGEDYGYTF

SEQ ID NO: 236035 - protein, 14 aa, Homo sapiens
  CDR3 for alpha chain variable domain of TCR clone 118018 (TRAV38-1, TRAJ40)
CALRPTSGTYKYIF

SEQ ID NO: 236036 - protein, 16 aa, Homo sapiens
  CDR3 for beta chain variable domain of TCR clone 118018 (TRBV10-3, TRBJ1-6)
CAISERRGQGNSPLHF

SEQ ID NO: 236037 - protein, 11 aa, Homo sapiens
  CDR3 for alpha chain variable domain of TCR clone 118019 (TRAV35, TRAJ30)
CAPGGDDKIIF

SEQ ID NO: 236038 - protein, 13 aa, Homo sapiens
  CDR3 for beta chain variable domain of TCR clone 118019 (TRBV11-3, TRBJ2-5)
CASSSTGEETQYF

SEQ ID NO: 236039 - protein, 15 aa, Homo sapiens
  CDR3 for alpha chain variable domain of TCR clone 118020 (TRAV8-3, TRAJ23)
CAVGDRYNQGGKLIF

SEQ ID NO: 236040 - protein, 22 aa, Homo sapiens
  CDR3 for beta chain variable domain of TCR clone 118020 (TRBV29-1, TRBJ2-5)
TVSNMSPENSSIYLCSAGTQYF

SEQ ID NO: 236041 - protein, 14 aa, Homo sapiens
  CDR3 for alpha chain variable domain of TCR clone 118021 (TRAV26-1, TRAJ21)
CIVRVAHNFNKFYF

SEQ ID NO: 236042 - protein, 15 aa, Homo sapiens
  CDR3 for beta chain variable domain of TCR clone 118021 (TRBV24-1, TRBJ2-4)
CATSDPRDRANIQYF

SEQ ID NO: 236043 - protein, 12 aa, Homo sapiens
  CDR3 for alpha chain variable domain of TCR clone 118022 (TRAV13-1, TRAJ21)
CAAKEGFNKFYF

SEQ ID NO: 236044 - protein, 15 aa, Homo sapiens
  CDR3 for beta chain variable domain of TCR clone 118022 (TRBV5-1, TRBJ1-2)
CASSLAGEGNYGYTF

SEQ ID NO: 236045 - protein, 13 aa, Homo sapiens
  CDR3 for alpha chain variable domain of TCR clone 118023 (TRAV12-1, TRAJ33)
CGDAPDSNYQLVW

SEQ ID NO: 236046 - protein, 14 aa, Homo sapiens
  CDR3 for beta chain variable domain of TCR clone 118023 (TRBV13, TRBJ2-7)
CASSLKGASYEQYF

SEQ ID NO: 236047 - protein, 16 aa, Homo sapiens
  CDR3 for alpha chain variable domain of TCR clone 118024 (TRAV3, TRAJ37)
CAVRPHGSGNTGKLIF

SEQ ID NO: 236048 - protein, 13 aa, Homo sapiens
  CDR3 for beta chain variable domain of TCR clone 118024 (TRBV19, TRBJ1-5)
CASSIDRDQPQHF

SEQ ID NO: 236049 - protein, 10 aa, Homo sapiens
  CDR3 for alpha chain variable domain of TCR clone 118025 (TRAV25, TRAJ17)
CQAAGNKLTF

SEQ ID NO: 236050 - protein, 13 aa, Homo sapiens
  CDR3 for beta chain variable domain of TCR clone 118025 (TRBV6-5, TRBJ2-2)
CARSLPGVGELFF

SEQ ID NO: 236051 - protein, 15 aa, Homo sapiens
  CDR3 for alpha chain variable domain of TCR clone 118026 (TRAV2, TRAJ15)
CAVEEREQAGTALIF

SEQ ID NO: 236052 - protein, 13 aa, Homo sapiens
  CDR3 for beta chain variable domain of TCR clone 118026 (TRBV10-2, TRBJ2-7)
CASGTSGGYEQYF

SEQ ID NO: 236053 - protein, 13 aa, Homo sapiens
  CDR3 for alpha chain variable domain of TCR clone 118027 (TRAV8-3, TRAJ34)
CAVGPYNTDKLIF

SEQ ID NO: 236054 - protein, 15 aa, Homo sapiens
  CDR3 for beta chain variable domain of TCR clone 118027 (TRBV2, TRBJ1-5)
CASSVNRPSNQPQHF

SEQ ID NO: 236055 - protein, 14 aa, Homo sapiens
  CDR3 for alpha chain variable domain of TCR clone 118028 (TRAV12-2, TRAJ40)
CAVKIPSGTYKYIF

SEQ ID NO: 236056 - protein, 15 aa, Homo sapiens
  CDR3 for beta chain variable domain of TCR clone 118028 (TRBV7-6, TRBJ2-5)
CASSKPTGPQETQYF

SEQ ID NO: 236057 - protein, 14 aa, Homo sapiens
  CDR3 for alpha chain variable domain of TCR clone 118029 (TRAV17, TRAJ45)
CATASGGGADGLTF

SEQ ID NO: 236058 - protein, 13 aa, Homo sapiens
  CDR3 for beta chain variable domain of TCR clone 118029 (TRBV7-9, TRBJ1-2)
CASSLKQNYGYTF

SEQ ID NO: 236059 - protein, 15 aa, Homo sapiens
  CDR3 for alpha chain variable domain of TCR clone 118030 (TRAV3, TRAJ4)
CAVRDGTGGYNKLLF

SEQ ID NO: 236060 - protein, 15 aa, Homo sapiens
  CDR3 for beta chain variable domain of TCR clone 118030 (TRBV27, TRBJ2-7)
CASSPDQGRLYEQYF

SEQ ID NO: 236061 - protein, 15 aa, Homo sapiens
  CDR3 for alpha chain variable domain of TCR clone 118031 (TRAV21, TRAJ53)
CATLNSGGSNYELTF

SEQ ID NO: 236062 - protein, 16 aa, Homo sapiens
  CDR3 for beta chain variable domain of TCR clone 118031 (TRBV20-1, TRBJ1-2)
CSASMGQGVANYGYTF

SEQ ID NO: 236063 - protein, 14 aa, Homo sapiens
  CDR3 for alpha chain variable domain of TCR clone 118032 (TRAV1-1, TRAJ28)
CAAPSGAGSYQLTF

SEQ ID NO: 236064 - protein, 14 aa, Homo sapiens
  CDR3 for beta chain variable domain of TCR clone 118032 (TRBV7-8, TRBJ2-3)
CASSLEAGTDTQYF

SEQ ID NO: 236065 - protein, 14 aa, Homo sapiens
  CDR3 for alpha chain variable domain of TCR clone 118033 (TRAV38-1, TRAJ45)
CAYYSGGGADGLTF

SEQ ID NO: 236066 - protein, 19 aa, Homo sapiens
  CDR3 for beta chain variable domain of TCR clone 118033 (TRBV28, TRBJ2-1)
CQHPIGRSPGLAGGNEQFF

SEQ ID NO: 236067 - protein, 12 aa, Homo sapiens
  CDR3 for alpha chain variable domain of TCR clone 118034 (TRAV13-2, TRAJ23)
CAERHRGGKLNF

SEQ ID NO: 236068 - protein, 13 aa, Homo sapiens
  CDR3 for beta chain variable domain of TCR clone 118034 (TRBV7-9, TRBJ1-2)
CASSLKQNYGYTF

SEQ ID NO: 236069 - protein, 13 aa, Homo sapiens
  CDR3 for alpha chain variable domain of TCR clone 118035 (TRAV27, TRAJ41)
CAGEGNSGYALNF

SEQ ID NO: 236070 - protein, 13 aa, Homo sapiens
  CDR3 for beta chain variable domain of TCR clone 118035 (TRBV12-4, TRBJ1-5)
CASRATGNQPQHF

SEQ ID NO: 236071 - protein, 14 aa, Homo sapiens
  CDR3 for alpha chain variable domain of TCR clone 118036 (TRAV16, TRAJ33)
CALSAMGSNYQLIW

SEQ ID NO: 236072 - protein, 14 aa, Homo sapiens
  CDR3 for beta chain variable domain of TCR clone 118036 (TRBV4-2, TRBJ1-1)
CASSQDDGNTEAFF

SEQ ID NO: 236073 - protein, 16 aa, Homo sapiens
  CDR3 for alpha chain variable domain of TCR clone 118037 (TRAV27, TRAJ13)
CAGAKSDSGGYQKVTF

SEQ ID NO: 236074 - protein, 20 aa, Homo sapiens
  CDR3 for beta chain variable domain of TCR clone 118037 (TRBV28, TRBJ2-1)
CASTPIGRSPGLAGGNEQFF

SEQ ID NO: 236075 - protein, 15 aa, Homo sapiens
  CDR3 for alpha chain variable domain of TCR clone 118038 (TRAV3, TRAJ3)
CAVGDMSSSASKIIF

SEQ ID NO: 236076 - protein, 14 aa, Homo sapiens
  CDR3 for beta chain variable domain of TCR clone 118038 (TRBV19, TRBJ2-1)
CASPTFVLSGEQFF

SEQ ID NO: 236077 - protein, 13 aa, Homo sapiens
  CDR3 for alpha chain variable domain of TCR clone 118039 (TRAV27, TRAJ6)
CAGGTIGSYIPTF

SEQ ID NO: 236078 - protein, 13 aa, Homo sapiens
  CDR3 for beta chain variable domain of TCR clone 118039 (TRBV4-1, TRBJ2-2)
CASSQENTGELFF

SEQ ID NO: 236079 - protein, 16 aa, Homo sapiens
  CDR3 for alpha chain variable domain of TCR clone 118040 (TRAV3, TRAJ37)
CAVRGKGSGNPGKLIF

SEQ ID NO: 236080 - protein, 20 aa, Homo sapiens
  CDR3 for beta chain variable domain of TCR clone 118040 (TRBV7-8, TRBJ2-2)
CASSHLFPGPTIHITGELFF

SEQ ID NO: 236081 - protein, 13 aa, Homo sapiens
  CDR3 for alpha chain variable domain of TCR clone 118041 (TRAV21, TRAJ27)
CAALNTNAGKSTS

SEQ ID NO: 236082 - protein, 14 aa, Homo sapiens
  CDR3 for beta chain variable domain of TCR clone 118041 (TRBV27, TRBJ1-1)
CASSLLSGLSEAFF

SEQ ID NO: 236083 - protein, 17 aa, Homo sapiens
  CDR3 for alpha chain variable domain of TCR clone 118042 (TRAV12-2, TRAJ4)
CAVNVRPVAGGYNKLIF

SEQ ID NO: 236084 - protein, 17 aa, Homo sapiens
  CDR3 for beta chain variable domain of TCR clone 118042 (TRBV6-3, TRBJ2-1)
CASSYSSGTRGLDEQFF

SEQ ID NO: 236085 - protein, 11 aa, Homo sapiens
  CDR3 for alpha chain variable domain of TCR clone 118043 (TRAV2, TRAJ13)
CASGGYQKVTF

SEQ ID NO: 236086 - protein, 14 aa, Homo sapiens
  CDR3 for beta chain variable domain of TCR clone 118043 (TRBV20-1, TRBJ2-5)
CSARYRGLQETQYF

SEQ ID NO: 236087 - protein, 14 aa, Homo sapiens
  CDR3 for alpha chain variable domain of TCR clone 118044 (TRAV16, TRAJ15)
CALSFNQAGTALIF

SEQ ID NO: 236088 - protein, 13 aa, Homo sapiens
  CDR3 for beta chain variable domain of TCR clone 118044 (TRBV4-1, TRBJ2-1)
CASSQAGGDEQFF

SEQ ID NO: 236089 - protein, 10 aa, Homo sapiens
  CDR3 for alpha chain variable domain of TCR clone 118045 (TRAV23/DV6, TRAJ57)
CAASSTLSQG

SEQ ID NO: 236090 - protein, 15 aa, Homo sapiens
  CDR3 for beta chain variable domain of TCR clone 118045 (TRBV10-3, TRBJ2-3)
CAISLTSGGTDTQYF

SEQ ID NO: 236091 - protein, 14 aa, Homo sapiens
  CDR3 for alpha chain variable domain of TCR clone 118046 (TRAV12-2, TRAJ24)
CAVTPADGWGKLQF

SEQ ID NO: 236092 - protein, 12 aa, Homo sapiens
  CDR3 for beta chain variable domain of TCR clone 118046 (TRBV3-1, TRBJ2-1)
CASSQGSSGQFF

SEQ ID NO: 236093 - protein, 12 aa, Homo sapiens
  CDR3 for alpha chain variable domain of TCR clone 118047 (TRAV29/DV5, TRAJ31)
CVASSHNARLMF

SEQ ID NO: 236094 - protein, 17 aa, Homo sapiens
  CDR3 for beta chain variable domain of TCR clone 118047 (TRBV18, TRBJ2-6)
CASSPRKGAVGANVLTF

SEQ ID NO: 236095 - protein, 13 aa, Homo sapiens
  CDR3 for alpha chain variable domain of TCR clone 118048 (TRAV12-2, TRAJ47)
CAVFMDYGNKLVF

SEQ ID NO: 236096 - protein, 14 aa, Homo sapiens
  CDR3 for beta chain variable domain of TCR clone 118048 (TRBV4-1, TRBJ1-5)
CASSQGPTNQPQHF

SEQ ID NO: 236097 - protein, 13 aa, Homo sapiens
  CDR3 for alpha chain variable domain of TCR clone 118049 (TRAV38-2/DV8, TRAJ34)
CAYRWGNTDKLIF

SEQ ID NO: 236098 - protein, 14 aa, Homo sapiens
  CDR3 for beta chain variable domain of TCR clone 118049 (TRBV7-2, TRBJ2-7)
CASSPKTSFYEQYF

SEQ ID NO: 236099 - protein, 15 aa, Homo sapiens
  CDR3 for alpha chain variable domain of TCR clone 118050 (TRAV3, TRAJ5)
CAVRDLYTGRRALTF

SEQ ID NO: 236100 - protein, 15 aa, Homo sapiens
  CDR3 for beta chain variable domain of TCR clone 118050 (TRBV2, TRBJ2-1)
CASSELAGSYNEQFF

SEQ ID NO: 236101 - protein, 14 aa, Homo sapiens
  CDR3 for alpha chain variable domain of TCR clone 118051 (TRAV13-1, TRAJ32)
CAARGSGATNKLIF

SEQ ID NO: 236102 - protein, 14 aa, Homo sapiens
  CDR3 for beta chain variable domain of TCR clone 118051 (TRBV7-6, TRBJ2-3)
CASSLGTVTDTQYF

SEQ ID NO: 236103 - protein, 11 aa, Homo sapiens
  CDR3 for alpha chain variable domain of TCR clone 118052 (TRAV2, TRAJ13)
CASGGYQKVTF

SEQ ID NO: 236104 - protein, 12 aa, Homo sapiens
  CDR3 for beta chain variable domain of TCR clone 118052 (TRBV6-3, TRBJ2-7)
CASSLTPYEQYF

SEQ ID NO: 236105 - protein, 12 aa, Homo sapiens
  CDR3 for alpha chain variable domain of TCR clone 118053 (TRAV26-1, TRAJ36)
CIVRVRADNLFF

SEQ ID NO: 236106 - protein, 13 aa, Homo sapiens
  CDR3 for beta chain variable domain of TCR clone 118053 (TRBV11-2, TRBJ2-5)
CASSRGPSETQFF

SEQ ID NO: 236107 - protein, 13 aa, Homo sapiens
  CDR3 for alpha chain variable domain of TCR clone 118054 (TRAV34, TRAJ33)
CGADMNSNYQLIW

SEQ ID NO: 236108 - protein, 15 aa, Homo sapiens
  CDR3 for beta chain variable domain of TCR clone 118054 (TRBV7-3, TRBJ2-1)
CASSPTGGGEVEQFF

SEQ ID NO: 236109 - protein, 15 aa, Homo sapiens
  CDR3 for alpha chain variable domain of TCR clone 118055 (TRAV8-2, TRAJ40)
CVVLGTTSGTYKDIF

SEQ ID NO: 236110 - protein, 16 aa, Homo sapiens
  CDR3 for beta chain variable domain of TCR clone 118055 (TRBV7-3, TRBJ2-1)
CASSLEGYRSYNEQFF

SEQ ID NO: 236111 - protein, 14 aa, Homo sapiens
  CDR3 for alpha chain variable domain of TCR clone 118056 (TRAV16, TRAJ17)
CALSGRAAGSKLTF

SEQ ID NO: 236112 - protein, 16 aa, Homo sapiens
  CDR3 for beta chain variable domain of TCR clone 118056 (TRBV7-3, TRBJ2-2)
CASSLKRGTLSGELFF

SEQ ID NO: 236113 - protein, 14 aa, Homo sapiens
  CDR3 for alpha chain variable domain of TCR clone 118057 (TRAV1-2, TRAJ16)
CAVNRFSDGQKLLF

SEQ ID NO: 236114 - protein, 16 aa, Homo sapiens
  CDR3 for beta chain variable domain of TCR clone 118057 (TRBV29-1, TRBJ2-7)
CSVEGVGTSGSYEQYF

SEQ ID NO: 236115 - protein, 11 aa, Homo sapiens
  CDR3 for alpha chain variable domain of TCR clone 118058 (TRAV16, TRAJ26)
CALTRWSEFCL

SEQ ID NO: 236116 - protein, 14 aa, Homo sapiens
  CDR3 for beta chain variable domain of TCR clone 118058 (TRBV11-2, TRBJ2-3)
CASSRLARTDTQYF

SEQ ID NO: 236117 - protein, 15 aa, Homo sapiens
  CDR3 for alpha chain variable domain of TCR clone 118059 (TRAV14/DV4, TRAJ12)
CAMREERDSSYQLIF

SEQ ID NO: 236118 - protein, 16 aa, Homo sapiens
  CDR3 for beta chain variable domain of TCR clone 118059 (TRBV11-2, TRBJ1-2)
CASSLDRGGNNYGYTF

SEQ ID NO: 236119 - protein, 13 aa, Homo sapiens
  CDR3 for alpha chain variable domain of TCR clone 118060 (TRAV2, TRAJ40)
CAVVTSGTYKYIF

SEQ ID NO: 236120 - protein, 18 aa, Homo sapiens
  CDR3 for beta chain variable domain of TCR clone 118060 (TRBV18, TRBJ2-3)
CASSYTSGAAGGTDTQYF

SEQ ID NO: 236121 - protein, 13 aa, Homo sapiens
  CDR3 for alpha chain variable domain of TCR clone 118061 (TRAV21, TRAJ27)
CAARPGNAGKSTF

SEQ ID NO: 236122 - protein, 20 aa, Homo sapiens
  CDR3 for beta chain variable domain of TCR clone 118061 (TRBV7-8, TRBJ2-2)
CASSHFFPGPTIHITGELFF

SEQ ID NO: 236123 - protein, 16 aa, Homo sapiens
  CDR3 for alpha chain variable domain of TCR clone 118062 (TRAV12-3, TRAJ53)
CVMSPGSGGSNYKLTL

SEQ ID NO: 236124 - protein, 15 aa, Homo sapiens
  CDR3 for beta chain variable domain of TCR clone 118062 (TRBV25-1, TRBJ1-4)
CASSPGDSTNEKLFF

SEQ ID NO: 236125 - protein, 14 aa, Homo sapiens
  CDR3 for alpha chain variable domain of TCR clone 118063 (TRAV3, TRAJ21)
CAVRDAYNFNKFYF

SEQ ID NO: 236126 - protein, 17 aa, Homo sapiens
  CDR3 for beta chain variable domain of TCR clone 118063 (TRBV20-1, TRBJ1-6)
CSARGGYTFSYNSALHF

SEQ ID NO: 236127 - protein, 11 aa, Homo sapiens
  CDR3 for alpha chain variable domain of TCR clone 118064 (TRAV2, TRAJ13)
CASGGYQKVTF

SEQ ID NO: 236128 - protein, 13 aa, Homo sapiens
  CDR3 for beta chain variable domain of TCR clone 118064 (TRBV20-1, TRBJ2-2)
CSALSGGAGELFF

SEQ ID NO: 236129 - protein, 14 aa, Homo sapiens
  CDR3 for alpha chain variable domain of TCR clone 118065 (TRAV8-3, TRAJ4)
CAVGAAGGYNKLIF

SEQ ID NO: 236130 - protein, 15 aa, Homo sapiens
  CDR3 for beta chain variable domain of TCR clone 118065 (TRBV5-1, TRBJ2-1)
CASSPPRAPCNEQFF

SEQ ID NO: 236131 - protein, 15 aa, Homo sapiens
  CDR3 for alpha chain variable domain of TCR clone 118066 (TRAV8-3, TRAJ27)
CAVGPSKTNAGKSTF

SEQ ID NO: 236132 - protein, 17 aa, Homo sapiens
  CDR3 for beta chain variable domain of TCR clone 118066 (TRBV5-3, TRBJ1-5)
CARSPRRDRRCTQPQHF

SEQ ID NO: 236133 - protein, 22 aa, Homo sapiens
  CDR3 for alpha chain variable domain of TCR clone 118067 (TRAV25, TRAJ13)
TATQTTDVGTFLDSGGYQKVTF

SEQ ID NO: 236134 - protein, 17 aa, Homo sapiens
  CDR3 for beta chain variable domain of TCR clone 118067 (TRBV2, TRBJ1-6)
CASSLRSGGLMTSPLSF

SEQ ID NO: 236135 - protein, 15 aa, Homo sapiens
  CDR3 for alpha chain variable domain of TCR clone 118068 (TRAV4, TRAJ39)
CLVGPNNNAGNMLTF

SEQ ID NO: 236136 - protein, 11 aa, Homo sapiens
  CDR3 for beta chain variable domain of TCR clone 118068 (TRBV7-9, TRBJ1-6)
CASSSNSPLHF

SEQ ID NO: 236137 - protein, 11 aa, Homo sapiens
  CDR3 for alpha chain variable domain of TCR clone 118069 (TRAV20, TRAJ31)
CAVQMRARLMF

SEQ ID NO: 236138 - protein, 12 aa, Homo sapiens
  CDR3 for beta chain variable domain of TCR clone 118069 (TRBV11-2, TRBJ2-2)
CASSLGGGELFF

SEQ ID NO: 236139 - protein, 12 aa, Homo sapiens
  CDR3 for alpha chain variable domain of TCR clone 118070 (TRAV17, TRAJ20)
CATDSNDYKLSF

SEQ ID NO: 236140 - protein, 17 aa, Homo sapiens
  CDR3 for beta chain variable domain of TCR clone 118070 (TRBV5-1, TRBJ2-2)
CASSLAGLRGGTGELFF

SEQ ID NO: 236141 - protein, 15 aa, Homo sapiens
  CDR3 for alpha chain variable domain of TCR clone 118071 (TRAV8-4, TRAJ37)
CAVTYGSSNTGKLIF

SEQ ID NO: 236142 - protein, 13 aa, Homo sapiens
  CDR3 for beta chain variable domain of TCR clone 118071 (TRBV12-4, TRBJ2-5)
CASSLGGARTQYF

SEQ ID NO: 236143 - protein, 12 aa, Homo sapiens
  CDR3 for alpha chain variable domain of TCR clone 118072 (TRAV25, TRAJ11)
CAGCSGYSTLTF

SEQ ID NO: 236144 - protein, 13 aa, Homo sapiens
  CDR3 for beta chain variable domain of TCR clone 118072 (TRBV7-9, TRBJ1-2)
CASSLKQNYGYTF

SEQ ID NO: 236145 - protein, 16 aa, Homo sapiens
  CDR3 for alpha chain variable domain of TCR clone 118073 (TRAV12-2, TRAJ18)
CAVTTDRGSTPGRLYF

SEQ ID NO: 236146 - protein, 13 aa, Homo sapiens
  CDR3 for beta chain variable domain of TCR clone 118073 (TRBV19, TRBJ2-3)
CATWDKITDTQYF

SEQ ID NO: 236147 - protein, 13 aa, Homo sapiens
  CDR3 for alpha chain variable domain of TCR clone 118074 (TRAV2, TRAJ21)
CAVEDLNFNKFYF

SEQ ID NO: 236148 - protein, 16 aa, Homo sapiens
  CDR3 for beta chain variable domain of TCR clone 118074 (TRBV20-1, TRBJ1-4)
CSAPGQGLLTNEKLFF

SEQ ID NO: 236149 - protein, 16 aa, Homo sapiens
  CDR3 for alpha chain variable domain of TCR clone 118075 (TRAV4, TRAJ9)
CLLGDPNRPGGFKTIF

SEQ ID NO: 236150 - protein, 16 aa, Homo sapiens
  CDR3 for beta chain variable domain of TCR clone 118075 (TRBV28, TRBJ1-4)
CASSPPYRGRSEKLFF

SEQ ID NO: 236151 - protein, 13 aa, Homo sapiens
  CDR3 for alpha chain variable domain of TCR clone 118076 (TRAV36/DV7, TRAJ37)
CAVFSNNTGKLIF

SEQ ID NO: 236152 - protein, 16 aa, Homo sapiens
  CDR3 for beta chain variable domain of TCR clone 118076 (TRBV3-1, TRBJ2-5)
CASSPGQFNGFGTQYF

SEQ ID NO: 236153 - protein, 12 aa, Homo sapiens
  CDR3 for alpha chain variable domain of TCR clone 118077 (TRAV35, TRAJ49)
CAGWNTGNQFYF

SEQ ID NO: 236154 - protein, 17 aa, Homo sapiens
  CDR3 for beta chain variable domain of TCR clone 118077 (TRBV5-1, TRBJ2-3)
CASSKIGLADRTDTQYF

SEQ ID NO: 236155 - protein, 12 aa, Homo sapiens
  CDR3 for alpha chain variable domain of TCR clone 118078 (TRAV12-3, TRAJ20)
YAMVRGDYKLSF

SEQ ID NO: 236156 - protein, 14 aa, Homo sapiens
  CDR3 for beta chain variable domain of TCR clone 118078 (TRBV5-5, TRBJ1-5)
CASSGQGVDQPQHF

SEQ ID NO: 236157 - protein, 17 aa, Homo sapiens
  CDR3 for alpha chain variable domain of TCR clone 118079 (TRAV3, TRAJ42)
CAVRDRDYGGSQGNLIF

SEQ ID NO: 236158 - protein, 16 aa, Homo sapiens
  CDR3 for beta chain variable domain of TCR clone 118079 (TRBV14, TRBJ2-2)
CASSRSLGDDTGELFF

SEQ ID NO: 236159 - protein, 16 aa, Homo sapiens
  CDR3 for alpha chain variable domain of TCR clone 118080 (TRAV30, TRAJ49)
SAAQRVGPNTGNQFYF

SEQ ID NO: 236160 - protein, 17 aa, Homo sapiens
  CDR3 for beta chain variable domain of TCR clone 118080 (TRBV11-2, TRBJ2-1)
CASSLYPPGVEYNEQFF

SEQ ID NO: 236161 - protein, 14 aa, Homo sapiens
  CDR3 for alpha chain variable domain of TCR clone 118081 (TRAV1-2, TRAJ16)
CALRGFSDGQKLLF

SEQ ID NO: 236162 - protein, 12 aa, Homo sapiens
  CDR3 for beta chain variable domain of TCR clone 118081 (TRBV14, TRBJ2-7)
CASSRLKGEQYF

SEQ ID NO: 236163 - protein, 16 aa, Homo sapiens
  CDR3 for alpha chain variable domain of TCR clone 118082 (TRAV38-1, TRAJ37)
CAFKGDGSSNTGKLIF

SEQ ID NO: 236164 - protein, 13 aa, Homo sapiens
  CDR3 for beta chain variable domain of TCR clone 118082 (TRBV12-4, TRBJ2-5)
CASSLFRREIQYF

SEQ ID NO: 236165 - protein, 14 aa, Homo sapiens
  CDR3 for alpha chain variable domain of TCR clone 118083 (TRAV29/DV5, TRAJ36)
CAARRKTGANNLFF

SEQ ID NO: 236166 - protein, 15 aa, Homo sapiens
  CDR3 for beta chain variable domain of TCR clone 118083 (TRBV19, TRBJ1-2)
CASSVGQVLNYGYTF

SEQ ID NO: 236167 - protein, 14 aa, Homo sapiens
  CDR3 for alpha chain variable domain of TCR clone 118084 (TRAV1-2, TRAJ16)
CAGNRFSDGQKLLF

SEQ ID NO: 236168 - protein, 13 aa, Homo sapiens
  CDR3 for beta chain variable domain of TCR clone 118084 (TRBV7-6, TRBJ1-2)
CASSLVADYGYTF

SEQ ID NO: 236169 - protein, 17 aa, Homo sapiens
  CDR3 for alpha chain variable domain of TCR clone 118085 (TRAV27, TRAJ18)
CAGLHRGRGSTPGRLYL

SEQ ID NO: 236170 - protein, 14 aa, Homo sapiens
  CDR3 for beta chain variable domain of TCR clone 118085 (TRBV20-1, TRBJ1-5)
CSARGRGSDQPQHF

SEQ ID NO: 236171 - protein, 15 aa, Homo sapiens
  CDR3 for alpha chain variable domain of TCR clone 118086 (TRAV8-2, TRAJ40)
CVVLGTTSGTYKYIF

SEQ ID NO: 236172 - protein, 16 aa, Homo sapiens
  CDR3 for beta chain variable domain of TCR clone 118086 (TRBV7-3, TRBJ2-1)
CASSLVSGSSNNEQFF

SEQ ID NO: 236173 - protein, 14 aa, Homo sapiens
  CDR3 for alpha chain variable domain of TCR clone 118087 (TRAV1-2, TRAJ6)
CAVSLLGGSYIPTF

SEQ ID NO: 236174 - protein, 15 aa, Homo sapiens
  CDR3 for beta chain variable domain of TCR clone 118087 (TRBV28, TRBJ2-7)
CASSPGGRGFYEQYF

SEQ ID NO: 236175 - protein, 16 aa, Homo sapiens
  CDR3 for alpha chain variable domain of TCR clone 118088 (TRAV38-2/DV8, TRAJ57)
CAYRSVGQGGSEKLVF

SEQ ID NO: 236176 - protein, 16 aa, Homo sapiens
  CDR3 for beta chain variable domain of TCR clone 118088 (TRBV19, TRBJ2-1)
CASSKAGPSSYNEQFF

SEQ ID NO: 236177 - protein, 14 aa, Homo sapiens
  CDR3 for alpha chain variable domain of TCR clone 118089 (TRAV8-3, TRAJ40)
CAVALTSGTYKYIF

SEQ ID NO: 236178 - protein, 14 aa, Homo sapiens
  CDR3 for beta chain variable domain of TCR clone 118089 (TRBV11-3, TRBJ1-1)
CASGPGAWNTEAFF

SEQ ID NO: 236179 - protein, 11 aa, Homo sapiens
  CDR3 for alpha chain variable domain of TCR clone 118090 (TRAV12-3, TRAJ27)
CAMANAGKSTF

SEQ ID NO: 236180 - protein, 13 aa, Homo sapiens
  CDR3 for beta chain variable domain of TCR clone 118090 (TRBV11-2, TRBJ2-5)
CASSSTGEETQYF

SEQ ID NO: 236181 - protein, 11 aa, Homo sapiens
  CDR3 for alpha chain variable domain of TCR clone 118091 (TRAV12-3, TRAJ49)
CAANTGNQFYF

SEQ ID NO: 236182 - protein, 12 aa, Homo sapiens
  CDR3 for beta chain variable domain of TCR clone 118091 (TRBV12-4, TRBJ2-7)
CASSLGGYEQYF

SEQ ID NO: 236183 - protein, 15 aa, Homo sapiens
  CDR3 for alpha chain variable domain of TCR clone 118092 (TRAV12-3, TRAJ49)
CAMAVTPNTGNQFYL

SEQ ID NO: 236184 - protein, 18 aa, Homo sapiens
  CDR3 for beta chain variable domain of TCR clone 118092 (TRBV4-1, TRBJ1-5)
CASSQDPRGQGLNQPQHF

SEQ ID NO: 236185 - protein, 10 aa, Homo sapiens
  CDR3 for alpha chain variable domain of TCR clone 118093 (TRAV30, TRAJ24)
CGTEIVMLTA

SEQ ID NO: 236186 - protein, 13 aa, Homo sapiens
  CDR3 for beta chain variable domain of TCR clone 118093 (TRBV7-2, TRBJ1-4)
CASSLAGLEKLFF

SEQ ID NO: 236187 - protein, 14 aa, Homo sapiens
  CDR3 for alpha chain variable domain of TCR clone 118094 (TRAV12-2, TRAJ13)
CAVKKTGGYQKVTF

SEQ ID NO: 236188 - protein, 15 aa, Homo sapiens
  CDR3 for beta chain variable domain of TCR clone 118094 (TRBV7-3, TRBJ2-1)
CASSLGQGPFGEQFF

SEQ ID NO: 236189 - protein, 13 aa, Homo sapiens
  CDR3 for alpha chain variable domain of TCR clone 118095 (TRAV13-2, TRAJ53)
CAEDMGSNYKLTF

SEQ ID NO: 236190 - protein, 13 aa, Homo sapiens
  CDR3 for beta chain variable domain of TCR clone 118095 (TRBV4-1, TRBJ2-2)
CASSQENTGELFF

SEQ ID NO: 236191 - protein, 11 aa, Homo sapiens
  CDR3 for alpha chain variable domain of TCR clone 118096 (TRAV17, TRAJ31)
CATSNNARLMF

SEQ ID NO: 236192 - protein, 16 aa, Homo sapiens
  CDR3 for beta chain variable domain of TCR clone 118096 (TRBV7-8, TRBJ2-4)
CASSAERTLAKNNQYF

SEQ ID NO: 236193 - protein, 13 aa, Homo sapiens
  CDR3 for alpha chain variable domain of TCR clone 118097 (TRAV13-1, TRAJ5)
CAARVTGRRALTF

SEQ ID NO: 236194 - protein, 15 aa, Homo sapiens
  CDR3 for beta chain variable domain of TCR clone 118097 (TRBV7-9, TRBJ2-7)
CTSSPGGGLTYEQYF

SEQ ID NO: 236195 - protein, 14 aa, Homo sapiens
  CDR3 for alpha chain variable domain of TCR clone 118098 (TRAV13-1, TRAJ39)
CAAPPNNAGNMPTF

SEQ ID NO: 236196 - protein, 14 aa, Homo sapiens
  CDR3 for beta chain variable domain of TCR clone 118098 (TRBV12-4, TRBJ1-1)
CASNSGDLNTEAFF

SEQ ID NO: 236197 - protein, 14 aa, Homo sapiens
  CDR3 for alpha chain variable domain of TCR clone 118099 (TRAV26-1, TRAJ38)
CIADNAGNNRKLIW

SEQ ID NO: 236198 - protein, 16 aa, Homo sapiens
  CDR3 for beta chain variable domain of TCR clone 118099 (TRBV20-1, TRBJ2-7)
CSASTSGRLSSYEKYF

SEQ ID NO: 236199 - protein, 14 aa, Homo sapiens
  CDR3 for alpha chain variable domain of TCR clone 118100 (TRAV26-1, TRAJ39)
CIVRGSRAGNMLTF

SEQ ID NO: 236200 - protein, 15 aa, Homo sapiens
  CDR3 for beta chain variable domain of TCR clone 118100 (TRBV20-1, TRBJ2-7)
CSARDRVSGMDEQYF

SEQ ID NO: 236201 - protein, 14 aa, Homo sapiens
  CDR3 for alpha chain variable domain of TCR clone 118101 (TRAV12-2, TRAJ13)
CAMKKTGGYQKVTF

SEQ ID NO: 236202 - protein, 14 aa, Homo sapiens
  CDR3 for beta chain variable domain of TCR clone 118101 (TRBV7-2, TRBJ2-7)
CASSPKTSFYEQYF

SEQ ID NO: 236203 - protein, 11 aa, Homo sapiens
  CDR3 for alpha chain variable domain of TCR clone 118102 (TRAV27, TRAJ45)
CAGAQEEVLTA

SEQ ID NO: 236204 - protein, 17 aa, Homo sapiens
  CDR3 for beta chain variable domain of TCR clone 118102 (TRBV11-2, TRBJ2-1)
CASSLYPPGVEYNEQFF

SEQ ID NO: 236205 - protein, 15 aa, Homo sapiens
  CDR3 for alpha chain variable domain of TCR clone 118103 (TRAV2, TRAJ22)
CAVPSRGGSARQLTF

SEQ ID NO: 236206 - protein, 14 aa, Homo sapiens
  CDR3 for beta chain variable domain of TCR clone 118103 (TRBV6-1, TRBJ1-3)
CASVQGGGGNTIYF

SEQ ID NO: 236207 - protein, 13 aa, Homo sapiens
  CDR3 for alpha chain variable domain of TCR clone 118104 (TRAV12-3, TRAJ7)
CAMSASGNNRLAF

SEQ ID NO: 236208 - protein, 14 aa, Homo sapiens
  CDR3 for beta chain variable domain of TCR clone 118104 (TRBV13, TRBJ2-5)
CASSLGPWGETQYF

SEQ ID NO: 236209 - protein, 14 aa, Homo sapiens
  CDR3 for alpha chain variable domain of TCR clone 118105 (TRAV13-1, TRAJ40)
CAASMTSGTYKYIF

SEQ ID NO: 236210 - protein, 15 aa, Homo sapiens
  CDR3 for beta chain variable domain of TCR clone 118105 (TRBV7-3, TRBJ2-1)
CASSPTGGREVEQFF

SEQ ID NO: 236211 - protein, 13 aa, Homo sapiens
  CDR3 for alpha chain variable domain of TCR clone 118106 (TRAV8-6, TRAJ8)
CAFMNTGFQKLVF

SEQ ID NO: 236212 - protein, 15 aa, Homo sapiens
  CDR3 for beta chain variable domain of TCR clone 118106 (TRBV28, TRBJ2-5)
CASSSGRVIQETQYS

SEQ ID NO: 236213 - protein, 13 aa, Homo sapiens
  CDR3 for alpha chain variable domain of TCR clone 118107 (TRAV8-4, TRAJ48)
CAVSLFGNEKLTF

SEQ ID NO: 236214 - protein, 15 aa, Homo sapiens
  CDR3 for beta chain variable domain of TCR clone 118107 (TRBV7-9, TRBJ1-6)
CASSSPGRGNSPLHF

SEQ ID NO: 236215 - protein, 15 aa, Homo sapiens
  CDR3 for alpha chain variable domain of TCR clone 118108 (TRAV26-1, TRAJ44)
CIVRIGTGTASKLTF

SEQ ID NO: 236216 - protein, 15 aa, Homo sapiens
  CDR3 for beta chain variable domain of TCR clone 118108 (TRBV7-2, TRBJ2-1)
CASSSGLAGGNEQFF

SEQ ID NO: 236217 - protein, 14 aa, Homo sapiens
  CDR3 for alpha chain variable domain of TCR clone 118109 (TRAV9-2, TRAJ39)
CALYIYNAGNMLTF

SEQ ID NO: 236218 - protein, 17 aa, Homo sapiens
  CDR3 for beta chain variable domain of TCR clone 118109 (TRBV5-1, TRBJ2-5)
CASSPVALGQNQETQYF

SEQ ID NO: 236219 - protein, 20 aa, Homo sapiens
  CDR3 for alpha chain variable domain of TCR clone 118110 (TRAV26-1, TRAJ53)
CCVLLHRQSRDGGSNYKLTF

SEQ ID NO: 236220 - protein, 12 aa, Homo sapiens
  CDR3 for beta chain variable domain of TCR clone 118110 (TRBV7-9, TRBJ1-5)
CASSPQGQPQHF

SEQ ID NO: 236221 - protein, 16 aa, Homo sapiens
  CDR3 for alpha chain variable domain of TCR clone 118111 (TRAV12-3, TRAJ58)
CAMTDTEEASGSRLTF

SEQ ID NO: 236222 - protein, 22 aa, Homo sapiens
  CDR3 for beta chain variable domain of TCR clone 118111 (TRBV23-1, TRBJ2-7)
CASSRRLDSGQGYVGGGYEQYF

SEQ ID NO: 236223 - protein, 14 aa, Homo sapiens
  CDR3 for alpha chain variable domain of TCR clone 118112 (TRAV8-3, TRAJ13)
CAVGAQEGYQKVTF

SEQ ID NO: 236224 - protein, 15 aa, Homo sapiens
  CDR3 for beta chain variable domain of TCR clone 118112 (TRBV29-1, TRBJ2-1)
CSVGRHALFYNEQFF

SEQ ID NO: 236225 - protein, 14 aa, Homo sapiens
  CDR3 for alpha chain variable domain of TCR clone 118113 (TRAV1-2, TRAJ8)
CAVREDTGFQKLVF

SEQ ID NO: 236226 - protein, 14 aa, Homo sapiens
  CDR3 for beta chain variable domain of TCR clone 118113 (TRBV7-9, TRBJ2-3)
CASSLEDGTDTQYF

SEQ ID NO: 236227 - protein, 14 aa, Homo sapiens
  CDR3 for alpha chain variable domain of TCR clone 118114 (TRAV34, TRAJ44)
CGADGTGTASKLTF

SEQ ID NO: 236228 - protein, 13 aa, Homo sapiens
  CDR3 for beta chain variable domain of TCR clone 118114 (TRBV19, TRBJ1-2)
CASSVPGQDGYTF

SEQ ID NO: 236229 - protein, 16 aa, Homo sapiens
  CDR3 for alpha chain variable domain of TCR clone 118115 (TRAV1-2, TRAJ10)
CAVRGVLTGGGNKLTF

SEQ ID NO: 236230 - protein, 20 aa, Homo sapiens
  CDR3 for beta chain variable domain of TCR clone 118115 (TRBV7-8, TRBJ2-2)
CASRHLFPGPTIHITGELFF

SEQ ID NO: 236231 - protein, 16 aa, Homo sapiens
  CDR3 for alpha chain variable domain of TCR clone 118116 (TRAV21, TRAJ45)
CAVSWGSGGGADGLTF

SEQ ID NO: 236232 - protein, 14 aa, Homo sapiens
  CDR3 for beta chain variable domain of TCR clone 118116 (TRBV4-2, TRBJ1-2)
CASSPGGSNYGYSF

SEQ ID NO: 236233 - protein, 14 aa, Homo sapiens
  CDR3 for alpha chain variable domain of TCR clone 118117 (TRAV26-1, TRAJ39)
CIVRGSRAGNMLTF

SEQ ID NO: 236234 - protein, 14 aa, Homo sapiens
  CDR3 for beta chain variable domain of TCR clone 118117 (TRBV11-2, TRBJ2-3)
CASSRLARTDTQYF

SEQ ID NO: 236235 - protein, 14 aa, Homo sapiens
  CDR3 for alpha chain variable domain of TCR clone 118118 (TRAV35, TRAJ22)
CAGLRPGSARQLTF

SEQ ID NO: 236236 - protein, 15 aa, Homo sapiens
  CDR3 for beta chain variable domain of TCR clone 118118 (TRBV12-4, TRBJ2-5)
CASCPPTGLQETQYF

SEQ ID NO: 236237 - protein, 17 aa, Homo sapiens
  CDR3 for alpha chain variable domain of TCR clone 118119 (TRAV3, TRAJ6)
CAVRDGPRAGGSYIPTF

SEQ ID NO: 236238 - protein, 16 aa, Homo sapiens
  CDR3 for beta chain variable domain of TCR clone 118119 (TRBV4-1, TRBJ2-7)
CASSLTAGQATYKQYF

SEQ ID NO: 236239 - protein, 15 aa, Homo sapiens
  CDR3 for alpha chain variable domain of TCR clone 118120 (TRAV12-1, TRAJ44)
CVVFVNTGTASTLTF

SEQ ID NO: 236240 - protein, 17 aa, Homo sapiens
  CDR3 for beta chain variable domain of TCR clone 118120 (TRBV7-8, TRBJ2-6)
CASSAGTGGAGANVLTF

SEQ ID NO: 236241 - protein, 13 aa, Homo sapiens
  CDR3 for alpha chain variable domain of TCR clone 118121 (TRAV30, TRAJ34)
CGTVGYNTDNLIF

SEQ ID NO: 236242 - protein, 16 aa, Homo sapiens
  CDR3 for beta chain variable domain of TCR clone 118121 (TRBV7-9, TRBJ1-2)
CASSLGFSSGEDGYTF

SEQ ID NO: 236243 - protein, 16 aa, Homo sapiens
  CDR3 for alpha chain variable domain of TCR clone 118122 (TRAV8-4, TRAJ9)
CAVTFNTGGFKNYLWS

SEQ ID NO: 236244 - protein, 15 aa, Homo sapiens
  CDR3 for beta chain variable domain of TCR clone 118122 (TRBV7-9, TRBJ2-2)
CTSSPETGAGGELFF

SEQ ID NO: 236245 - protein, 13 aa, Homo sapiens
  CDR3 for alpha chain variable domain of TCR clone 118123 (TRAV21, TRAJ20)
CAVGLRVDYKLSF

SEQ ID NO: 236246 - protein, 15 aa, Homo sapiens
  CDR3 for beta chain variable domain of TCR clone 118123 (TRBV29-1, TRBJ2-1)
CSVTTGLALYNEQFF

SEQ ID NO: 236247 - protein, 14 aa, Homo sapiens
  CDR3 for alpha chain variable domain of TCR clone 118124 (TRAV35, TRAJ33)
CWPRGRDSNYQLIW

SEQ ID NO: 236248 - protein, 16 aa, Homo sapiens
  CDR3 for beta chain variable domain of TCR clone 118124 (TRBV4-2, TRBJ2-3)
CASSQELAGDTDTQYF

SEQ ID NO: 236249 - protein, 14 aa, Homo sapiens
  CDR3 for alpha chain variable domain of TCR clone 118125 (TRAV12-2, TRAJ41)
CAVTLGLSGYALNS

SEQ ID NO: 236250 - protein, 13 aa, Homo sapiens
  CDR3 for beta chain variable domain of TCR clone 118125 (TRBV27, TRBJ2-3)
CASSLSQGDTQYF

SEQ ID NO: 236251 - protein, 12 aa, Homo sapiens
  CDR3 for alpha chain variable domain of TCR clone 118126 (TRAV13-1, TRAJ20)
SVQQVNDYKLSF

SEQ ID NO: 236252 - protein, 14 aa, Homo sapiens
  CDR3 for beta chain variable domain of TCR clone 118126 (TRBV7-6, TRBJ2-3)
CASRLTGGTDTQYF

SEQ ID NO: 236253 - protein, 15 aa, Homo sapiens
  CDR3 for alpha chain variable domain of TCR clone 118127 (TRAV2, TRAJ11)
CAVGGRNSGYSTLTF

SEQ ID NO: 236254 - protein, 14 aa, Homo sapiens
  CDR3 for beta chain variable domain of TCR clone 118127 (TRBV4-2, TRBJ2-1)
CASGLDRAYNEQFF

SEQ ID NO: 236255 - protein, 13 aa, Homo sapiens
  CDR3 for alpha chain variable domain of TCR clone 118128 (TRAV12-3, TRAJ13)
CAMSSGGYQKVTF

SEQ ID NO: 236256 - protein, 16 aa, Homo sapiens
  CDR3 for beta chain variable domain of TCR clone 118128 (TRBV7-3, TRBJ2-3)
CASSLSGYRPEDTQYF

SEQ ID NO: 236257 - protein, 16 aa, Homo sapiens
  CDR3 for alpha chain variable domain of TCR clone 118129 (TRAV16, TRAJ4)
CALSRMFSGGYNKLIF

SEQ ID NO: 236258 - protein, 14 aa, Homo sapiens
  CDR3 for beta chain variable domain of TCR clone 118129 (TRBV7-2, TRBJ1-1)
CASSFLTGTTEAFF

SEQ ID NO: 236259 - protein, 14 aa, Homo sapiens
  CDR3 for alpha chain variable domain of TCR clone 118130 (TRAV12-2, TRAJ24)
CAVTPADSWGKLQF

SEQ ID NO: 236260 - protein, 17 aa, Homo sapiens
  CDR3 for beta chain variable domain of TCR clone 118130 (TRBV20-1, TRBJ2-2)
CSASGSGQGGLTRELFF

SEQ ID NO: 236261 - protein, 12 aa, Homo sapiens
  CDR3 for alpha chain variable domain of TCR clone 118131 (TRAV21, TRAJ13)
PGPSGGYQKVTF

SEQ ID NO: 236262 - protein, 17 aa, Homo sapiens
  CDR3 for beta chain variable domain of TCR clone 118131 (TRBV7-3, TRBJ2-3)
CASSLMKRMRGADTQYF

SEQ ID NO: 236263 - protein, 15 aa, Homo sapiens
  CDR3 for alpha chain variable domain of TCR clone 118132 (TRAV16, TRAJ16)
CALQGGGSDDQKLLF

SEQ ID NO: 236264 - protein, 15 aa, Homo sapiens
  CDR3 for beta chain variable domain of TCR clone 118132 (TRBV20-1, TRBJ2-7)
CSARDRVSGMDEQYF

SEQ ID NO: 236265 - protein, 17 aa, Homo sapiens
  CDR3 for alpha chain variable domain of TCR clone 118133 (TRAV13-2, TRAJ42)
CAEKGKNYGGSQGNLIF

SEQ ID NO: 236266 - protein, 16 aa, Homo sapiens
  CDR3 for beta chain variable domain of TCR clone 118133 (TRBV7-9, TRBJ2-1)
CASSLGIGWDYNEQFF

SEQ ID NO: 236267 - protein, 13 aa, Homo sapiens
  CDR3 for alpha chain variable domain of TCR clone 118134 (TRAV13-1, TRAJ33)
CVASRAGNYQLIW

SEQ ID NO: 236268 - protein, 12 aa, Homo sapiens
  CDR3 for beta chain variable domain of TCR clone 118134 (TRBV11-2, TRBJ1-2)
CASSREGDGYTF

SEQ ID NO: 236269 - protein, 15 aa, Homo sapiens
  CDR3 for alpha chain variable domain of TCR clone 118135 (TRAV21, TRAJ53)
CATLNSGGSNYKLTF

SEQ ID NO: 236270 - protein, 12 aa, Homo sapiens
  CDR3 for beta chain variable domain of TCR clone 118135 (TRBV18, TRBJ2-1)
CASSSDEDEQFF

SEQ ID NO: 236271 - protein, 14 aa, Homo sapiens
  CDR3 for alpha chain variable domain of TCR clone 118136 (TRAV1-2, TRAJ16)
CAVNRFSDGPKLLF

SEQ ID NO: 236272 - protein, 12 aa, Homo sapiens
  CDR3 for beta chain variable domain of TCR clone 118136 (TRBV7-9, TRBJ2-7)
CASSLEGYEQYF

SEQ ID NO: 236273 - protein, 16 aa, Homo sapiens
  CDR3 for alpha chain variable domain of TCR clone 118137 (TRAV16, TRAJ4)
CALSRMFYGGYNKLIF

SEQ ID NO: 236274 - protein, 16 aa, Homo sapiens
  CDR3 for beta chain variable domain of TCR clone 118137 (TRBV24-1, TRBJ2-3)
CATSDPGTGATDTQYF

SEQ ID NO: 236275 - protein, 15 aa, Homo sapiens
  CDR3 for alpha chain variable domain of TCR clone 118138 (TRAV14/DV4, TRAJ12)
CAMREERDSSYKLIF

SEQ ID NO: 236276 - protein, 14 aa, Homo sapiens
  CDR3 for beta chain variable domain of TCR clone 118138 (TRBV19, TRBJ2-3)
CASSAPRGTDTQYF

SEQ ID NO: 236277 - protein, 16 aa, Homo sapiens
  CDR3 for alpha chain variable domain of TCR clone 118139 (TRAV17, TRAJ53)
CATDALSGGSNYKLTF

SEQ ID NO: 236278 - protein, 13 aa, Homo sapiens
  CDR3 for beta chain variable domain of TCR clone 118139 (TRBV10-3, TRBJ2-7)
CASKLAVNYEQYF

SEQ ID NO: 236279 - protein, 16 aa, Homo sapiens
  CDR3 for alpha chain variable domain of TCR clone 118140 (TRAV30, TRAJ24)
CGTEIVDADSWGKSQF

SEQ ID NO: 236280 - protein, 15 aa, Homo sapiens
  CDR3 for beta chain variable domain of TCR clone 118140 (TRBV27, TRBJ2-1)
CASSNGGGSSNEQFF

SEQ ID NO: 236281 - protein, 15 aa, Homo sapiens
  CDR3 for alpha chain variable domain of TCR clone 118141 (TRAV27, TRAJ53)
CRAINSGGSNYKLTF

SEQ ID NO: 236282 - protein, 11 aa, Homo sapiens
  CDR3 for beta chain variable domain of TCR clone 118141 (TRBV7-9, TRBJ2-3)
CASSGPDTQYF

SEQ ID NO: 236283 - protein, 16 aa, Homo sapiens
  CDR3 for alpha chain variable domain of TCR clone 118142 (TRAV8-3, TRAJ10)
CAVGPGVTGGGNKPTF

SEQ ID NO: 236284 - protein, 13 aa, Homo sapiens
  CDR3 for beta chain variable domain of TCR clone 118142 (TRBV18, TRBJ1-1)
CASSPGPSGEAFF

SEQ ID NO: 236285 - protein, 14 aa, Homo sapiens
  CDR3 for alpha chain variable domain of TCR clone 118143 (TRAV8-6, TRAJ5)
CAVSADTGRRALTF

SEQ ID NO: 236286 - protein, 14 aa, Homo sapiens
  CDR3 for beta chain variable domain of TCR clone 118143 (TRBV6-1, TRBJ1-3)
CASVQGGGGNTIYF

SEQ ID NO: 236287 - protein, 14 aa, Homo sapiens
  CDR3 for alpha chain variable domain of TCR clone 118144 (TRAV12-1, TRAJ17)
CVVNYKAAGNKLTF

SEQ ID NO: 236288 - protein, 17 aa, Homo sapiens
  CDR3 for beta chain variable domain of TCR clone 118144 (TRBV19, TRBJ2-1)
CASSIWSAQPTHNEQFF

SEQ ID NO: 236289 - protein, 14 aa, Homo sapiens
  CDR3 for alpha chain variable domain of TCR clone 118145 (TRAV35, TRAJ50)
CAGHRKTSYDKLIF

SEQ ID NO: 236290 - protein, 13 aa, Homo sapiens
  CDR3 for beta chain variable domain of TCR clone 118145 (TRBV7-7, TRBJ2-3)
CASSLSRADTQDF

SEQ ID NO: 236291 - protein, 14 aa, Homo sapiens
  CDR3 for alpha chain variable domain of TCR clone 118146 (TRAV1-2, TRAJ16)
CAVNRLSDGQKLLF

SEQ ID NO: 236292 - protein, 12 aa, Homo sapiens
  CDR3 for beta chain variable domain of TCR clone 118146 (TRBV7-6, TRBJ2-7)
CASSLADSEQYF

SEQ ID NO: 236293 - protein, 13 aa, Homo sapiens
  CDR3 for alpha chain variable domain of TCR clone 118147 (TRAV23/DV6, TRAJ22)
CAPYSGSARQLTF

SEQ ID NO: 236294 - protein, 18 aa, Homo sapiens
  CDR3 for beta chain variable domain of TCR clone 118147 (TRBV11-2, TRBJ2-3)
CASSLGGASRGAPNTQYF

SEQ ID NO: 236295 - protein, 15 aa, Homo sapiens
  CDR3 for alpha chain variable domain of TCR clone 118148 (TRAV8-3, TRAJ45)
CASSYAGGGADGLTF

SEQ ID NO: 236296 - protein, 14 aa, Homo sapiens
  CDR3 for beta chain variable domain of TCR clone 118148 (TRBV7-8, TRBJ2-3)
CASSLEAGTDTQYF

SEQ ID NO: 236297 - protein, 13 aa, Homo sapiens
  CDR3 for alpha chain variable domain of TCR clone 118149 (TRAV8-6, TRAJ9)
CAVWDTGGFKTIF

SEQ ID NO: 236298 - protein, 14 aa, Homo sapiens
  CDR3 for beta chain variable domain of TCR clone 118149 (TRBV2, TRBJ2-1)
CASSEALIYNEQVF

SEQ ID NO: 236299 - protein, 16 aa, Homo sapiens
  CDR3 for alpha chain variable domain of TCR clone 118150 (TRAV12-2, TRAJ18)
CAVTTDRGSTLGRLYF

SEQ ID NO: 236300 - protein, 14 aa, Homo sapiens
  CDR3 for beta chain variable domain of TCR clone 118150 (TRBV4-2, TRBJ1-5)
CASSQDSMNQPQHF

SEQ ID NO: 236301 - protein, 14 aa, Homo sapiens
  CDR3 for alpha chain variable domain of TCR clone 118151 (TRAV35, TRAJ22)
CAWLRPGSARQLTF

SEQ ID NO: 236302 - protein, 13 aa, Homo sapiens
  CDR3 for beta chain variable domain of TCR clone 118151 (TRBV20-1, TRBJ1-1)
CSARGGGNTEAFF

SEQ ID NO: 236303 - protein, 14 aa, Homo sapiens
  CDR3 for alpha chain variable domain of TCR clone 118152 (TRAV20, TRAJ56)
CAVQFGGANSKLTF

SEQ ID NO: 236304 - protein, 14 aa, Homo sapiens
  CDR3 for beta chain variable domain of TCR clone 118152 (TRBV20-1, TRBJ2-7)
CSAKRGRSFYEQYF

SEQ ID NO: 236305 - protein, 10 aa, Homo sapiens
  CDR3 for alpha chain variable domain of TCR clone 118153 (TRAV27, TRAJ43)
CRRGNNDMRF

SEQ ID NO: 236306 - protein, 14 aa, Homo sapiens
  CDR3 for beta chain variable domain of TCR clone 118153 (TRBV12-5, TRBJ2-5)
CASGSRTHQETQYF

SEQ ID NO: 236307 - protein, 12 aa, Homo sapiens
  CDR3 for alpha chain variable domain of TCR clone 118154 (TRAV3, TRAJ43)
CAVRDPNNDMRF

SEQ ID NO: 236308 - protein, 16 aa, Homo sapiens
  CDR3 for beta chain variable domain of TCR clone 118154 (TRBV19, TRBJ2-2)
CASRSPGTGATGELFF

SEQ ID NO: 236309 - protein, 13 aa, Homo sapiens
  CDR3 for alpha chain variable domain of TCR clone 118155 (TRAV27, TRAJ6)
CAGGTRGSYIPTF

SEQ ID NO: 236310 - protein, 15 aa, Homo sapiens
  CDR3 for beta chain variable domain of TCR clone 118155 (TRBV5-1, TRBJ2-3)
CASSVTSGSTDTQYF

SEQ ID NO: 236311 - protein, 12 aa, Homo sapiens
  CDR3 for alpha chain variable domain of TCR clone 118156 (TRAV4, TRAJ26)
CLVGDYGQNFVF

SEQ ID NO: 236312 - protein, 16 aa, Homo sapiens
  CDR3 for beta chain variable domain of TCR clone 118156 (TRBV7-2, TRBJ1-2)
CASSSNQNRRGHGYTF

SEQ ID NO: 236313 - protein, 13 aa, Homo sapiens
  CDR3 for alpha chain variable domain of TCR clone 118157 (TRAV12-2, TRAJ23)
CAVMGNQGGKLIF

SEQ ID NO: 236314 - protein, 14 aa, Homo sapiens
  CDR3 for beta chain variable domain of TCR clone 118157 (TRBV19, TRBJ2-1)
CASPTFVLSGEQFF

SEQ ID NO: 236315 - protein, 13 aa, Homo sapiens
  CDR3 for alpha chain variable domain of TCR clone 118158 (TRAV8-6, TRAJ49)
CAVITNTGNQFHF

SEQ ID NO: 236316 - protein, 15 aa, Homo sapiens
  CDR3 for beta chain variable domain of TCR clone 118158 (TRBV9, TRBJ1-6)
CASSVAGTGDSPLHF

SEQ ID NO: 236317 - protein, 14 aa, Homo sapiens
  CDR3 for alpha chain variable domain of TCR clone 118159 (TRAV8-2, TRAJ37)
CVVSISGNTGKLIF

SEQ ID NO: 236318 - protein, 14 aa, Homo sapiens
  CDR3 for beta chain variable domain of TCR clone 118159 (TRBV7-2, TRBJ2-7)
CASSPKTSFYEQYF

SEQ ID NO: 236319 - protein, 12 aa, Homo sapiens
  CDR3 for alpha chain variable domain of TCR clone 118160 (TRAV8-3, TRAJ41)
CAVALSGYALNF

SEQ ID NO: 236320 - protein, 17 aa, Homo sapiens
  CDR3 for beta chain variable domain of TCR clone 118160 (TRBV7-3, TRBJ2-2)
CASSLSGTSRGTGELFF

SEQ ID NO: 236321 - protein, 15 aa, Homo sapiens
  CDR3 for alpha chain variable domain of TCR clone 118161 (TRAV14/DV4, TRAJ15)
CAMREGWQAGTTLIF

SEQ ID NO: 236322 - protein, 14 aa, Homo sapiens
  CDR3 for beta chain variable domain of TCR clone 118161 (TRBV19, TRBJ2-5)
CASSMTGQQETQYF

SEQ ID NO: 236323 - protein, 12 aa, Homo sapiens
  CDR3 for alpha chain variable domain of TCR clone 118162 (TRAV20, TRAJ54)
CAVQEGVQKLVF

SEQ ID NO: 236324 - protein, 17 aa, Homo sapiens
  CDR3 for beta chain variable domain of TCR clone 118162 (TRBV13, TRBJ2-3)
CASSLSRVAGGRNTQYF

SEQ ID NO: 236325 - protein, 11 aa, Homo sapiens
  CDR3 for alpha chain variable domain of TCR clone 118163 (TRAV12-2, TRAJ33)
CAVTSNYQLIW

SEQ ID NO: 236326 - protein, 14 aa, Homo sapiens
  CDR3 for beta chain variable domain of TCR clone 118163 (TRBV28, TRBJ2-2)
CASRIRAGTGELFF

SEQ ID NO: 236327 - protein, 14 aa, Homo sapiens
  CDR3 for alpha chain variable domain of TCR clone 118164 (TRAV29/DV5, TRAJ37)
CAASGSGNTGKIIF

SEQ ID NO: 236328 - protein, 17 aa, Homo sapiens
  CDR3 for beta chain variable domain of TCR clone 118164 (TRBV4-1, TRBJ2-7)
CASSPFLTSGGVVEQYF

SEQ ID NO: 236329 - protein, 18 aa, Homo sapiens
  CDR3 for alpha chain variable domain of TCR clone 118165 (TRAV21, TRAJ52)
CAVRPSPAGGTSYGKLTF

SEQ ID NO: 236330 - protein, 15 aa, Homo sapiens
  CDR3 for beta chain variable domain of TCR clone 118165 (TRBV29-1, TRBJ2-1)
CSGRDRKSSYNEQFF

SEQ ID NO: 236331 - protein, 15 aa, Homo sapiens
  CDR3 for alpha chain variable domain of TCR clone 118166 (TRAV35, TRAJ40)
CAGQLGTSGTYKYIF

SEQ ID NO: 236332 - protein, 12 aa, Homo sapiens
  CDR3 for beta chain variable domain of TCR clone 118166 (TRBV11-2, TRBJ2-2)
CASSLGGGELFF

SEQ ID NO: 236333 - protein, 16 aa, Homo sapiens
  CDR3 for alpha chain variable domain of TCR clone 118167 (TRAV12-2, TRAJ32)
CAVNLGQGGATNKLIF

SEQ ID NO: 236334 - protein, 19 aa, Homo sapiens
  CDR3 for beta chain variable domain of TCR clone 118167 (TRBV25-1, TRBJ2-2)
CAILVYRVDRGRKTGELFF

SEQ ID NO: 236335 - protein, 13 aa, Homo sapiens
  CDR3 for alpha chain variable domain of TCR clone 118168 (TRAV8-6, TRAJ49)
CAVITNTGNQFYF

SEQ ID NO: 236336 - protein, 13 aa, Homo sapiens
  CDR3 for beta chain variable domain of TCR clone 118168 (TRBV10-3, TRBJ2-7)
CASKRAVNYEQYF

SEQ ID NO: 236337 - protein, 17 aa, Homo sapiens
  CDR3 for alpha chain variable domain of TCR clone 118169 (TRAV3, TRAJ12)
CAVRDGGRMDSSYKLIF

SEQ ID NO: 236338 - protein, 14 aa, Homo sapiens
  CDR3 for beta chain variable domain of TCR clone 118169 (TRBV24-1, TRBJ1-1)
CATSIPRGDTEAFF

SEQ ID NO: 236339 - protein, 12 aa, Homo sapiens
  CDR3 for alpha chain variable domain of TCR clone 118170 (TRAV12-2, TRAJ3)
CAVWGSASKIIF

SEQ ID NO: 236340 - protein, 12 aa, Homo sapiens
  CDR3 for beta chain variable domain of TCR clone 118170 (TRBV11-2, TRBJ2-1)
CASSPGNNEQFF

SEQ ID NO: 236341 - protein, 14 aa, Homo sapiens
  CDR3 for alpha chain variable domain of TCR clone 118171 (TRAV17, TRAJ37)
CATDGSSNTGKLIF

SEQ ID NO: 236342 - protein, 13 aa, Homo sapiens
  CDR3 for beta chain variable domain of TCR clone 118171 (TRBV11-2, TRBJ2-1)
CASSLALVNEQFF

SEQ ID NO: 236343 - protein, 13 aa, Homo sapiens
  CDR3 for alpha chain variable domain of TCR clone 118172 (TRAV9-2, TRAJ53)
CALSGGSNYKLTF

SEQ ID NO: 236344 - protein, 17 aa, Homo sapiens
  CDR3 for beta chain variable domain of TCR clone 118172 (TRBV11-2, TRBJ2-1)
CASSLYTPGVEYNEQFF

SEQ ID NO: 236345 - protein, 14 aa, Homo sapiens
  CDR3 for alpha chain variable domain of TCR clone 118173 (TRAV26-1, TRAJ38)
CIADNAGNNRKLIW

SEQ ID NO: 236346 - protein, 17 aa, Homo sapiens
  CDR3 for beta chain variable domain of TCR clone 118173 (TRBV7-8, TRBJ1-2)
CASSLRPLQGHLYGYTF

SEQ ID NO: 236347 - protein, 14 aa, Homo sapiens
  CDR3 for alpha chain variable domain of TCR clone 118174 (TRAV35, TRAJ22)
CAGLRPGSARQLTF

SEQ ID NO: 236348 - protein, 14 aa, Homo sapiens
  CDR3 for beta chain variable domain of TCR clone 118174 (TRBV11-2, TRBJ2-5)
CASRPLAGRETQYF

SEQ ID NO: 236349 - protein, 16 aa, Homo sapiens
  CDR3 for alpha chain variable domain of TCR clone 118175 (TRAV8-3, TRAJ45)
CAVGDGSGGGADGLTF

SEQ ID NO: 236350 - protein, 14 aa, Homo sapiens
  CDR3 for beta chain variable domain of TCR clone 118175 (TRBV7-9, TRBJ2-1)
CASSPRDSLYEQFF

SEQ ID NO: 236351 - protein, 14 aa, Homo sapiens
  CDR3 for alpha chain variable domain of TCR clone 118176 (TRAV1-1, TRAJ27)
CAVIYNTNAGKSTF

SEQ ID NO: 236352 - protein, 13 aa, Homo sapiens
  CDR3 for beta chain variable domain of TCR clone 118176 (TRBV12-5, TRBJ1-2)
CASSVRTGNGYTF

SEQ ID NO: 236353 - protein, 15 aa, Homo sapiens
  CDR3 for alpha chain variable domain of TCR clone 118177 (TRAV12-2, TRAJ20)
CAVKGGFGAGTTVTV

SEQ ID NO: 236354 - protein, 13 aa, Homo sapiens
  CDR3 for beta chain variable domain of TCR clone 118177 (TRBV12-4, TRBJ2-7)
CASAPGQLYEQYF

SEQ ID NO: 236355 - protein, 14 aa, Homo sapiens
  CDR3 for alpha chain variable domain of TCR clone 118178 (TRAV12-1, TRAJ29)
CVVNEGSGNTSLVF

SEQ ID NO: 236356 - protein, 13 aa, Homo sapiens
  CDR3 for beta chain variable domain of TCR clone 118178 (TRBV7-9, TRBJ2-2)
CASSLDPTGELFF

SEQ ID NO: 236357 - protein, 15 aa, Homo sapiens
  CDR3 for alpha chain variable domain of TCR clone 118179 (TRAV2, TRAJ9)
CAVEDRGTGGFKTIF

SEQ ID NO: 236358 - protein, 17 aa, Homo sapiens
  CDR3 for beta chain variable domain of TCR clone 118179 (TRBV5-4, TRBJ2-1)
CASSSAGGRGPYNEQFF

SEQ ID NO: 236359 - protein, 15 aa, Homo sapiens
  CDR3 for alpha chain variable domain of TCR clone 118180 (TRAV8-3, TRAJ11)
CAVGLLNSGYSTLTF

SEQ ID NO: 236360 - protein, 14 aa, Homo sapiens
  CDR3 for beta chain variable domain of TCR clone 118180 (TRBV19, TRBJ2-5)
CASSMTGQQETQYF

SEQ ID NO: 236361 - protein, 12 aa, Homo sapiens
  CDR3 for alpha chain variable domain of TCR clone 118181 (TRAV23/DV6, TRAJ18)
CAASMNHRGPTL

SEQ ID NO: 236362 - protein, 15 aa, Homo sapiens
  CDR3 for beta chain variable domain of TCR clone 118181 (TRBV27, TRBJ2-7)
CASSPDQGRLYEQYF

SEQ ID NO: 236363 - protein, 15 aa, Homo sapiens
  CDR3 for alpha chain variable domain of TCR clone 118182 (TRAV14/DV4, TRAJ10)
CAMRELTGGGNKLTF

SEQ ID NO: 236364 - protein, 18 aa, Homo sapiens
  CDR3 for beta chain variable domain of TCR clone 118182 (TRBV7-9, TRBJ2-7)
CASSLTTSGSRTWYEPYF

SEQ ID NO: 236365 - protein, 16 aa, Homo sapiens
  CDR3 for alpha chain variable domain of TCR clone 118183 (TRAV20, TRAJ10)
CAVLRGLTGGGNKITF

SEQ ID NO: 236366 - protein, 14 aa, Homo sapiens
  CDR3 for beta chain variable domain of TCR clone 118183 (TRBV19, TRBJ1-5)
CASRAPDSFLSQHF

SEQ ID NO: 236367 - protein, 15 aa, Homo sapiens
  CDR3 for alpha chain variable domain of TCR clone 118184 (TRAV12-2, TRAJ43)
CAFDMRFGAGTRLTV

SEQ ID NO: 236368 - protein, 17 aa, Homo sapiens
  CDR3 for beta chain variable domain of TCR clone 118184 (TRBV20-1, TRBJ2-2)
CSASGSGQGGLTGELFF

SEQ ID NO: 236369 - protein, 18 aa, Homo sapiens
  CDR3 for alpha chain variable domain of TCR clone 118185 (TRAV29/DV5, TRAJ53)
CSVLLCSKRGGSNYKLTF

SEQ ID NO: 236370 - protein, 13 aa, Homo sapiens
  CDR3 for beta chain variable domain of TCR clone 118185 (TRBV7-9, TRBJ1-2)
CASSLKQNYGYTF

SEQ ID NO: 236371 - protein, 16 aa, Homo sapiens
  CDR3 for alpha chain variable domain of TCR clone 118186 (TRAV23/DV6, TRAJ9)
CAASIGGNTGGFKTTF

SEQ ID NO: 236372 - protein, 12 aa, Homo sapiens
  CDR3 for beta chain variable domain of TCR clone 118186 (TRBV6-3, TRBJ2-7)
CASSEPGFEQYF

SEQ ID NO: 236373 - protein, 12 aa, Homo sapiens
  CDR3 for alpha chain variable domain of TCR clone 118187 (TRAV13-2, TRAJ8)
CAPWLGFQKLVF

SEQ ID NO: 236374 - protein, 13 aa, Homo sapiens
  CDR3 for beta chain variable domain of TCR clone 118187 (TRBV10-2, TRBJ2-7)
CASGASGGYEQYF

SEQ ID NO: 236375 - protein, 15 aa, Homo sapiens
  CDR3 for alpha chain variable domain of TCR clone 118188 (TRAV8-3, TRAJ45)
CASSYSGGGADGLTF

SEQ ID NO: 236376 - protein, 17 aa, Homo sapiens
  CDR3 for beta chain variable domain of TCR clone 118188 (TRBV7-8, TRBJ1-2)
CASSLRLLQGHLYGYTF

SEQ ID NO: 236377 - protein, 15 aa, Homo sapiens
  CDR3 for alpha chain variable domain of TCR clone 118189 (TRAV3, TRAJ3)
CAVSDRDSSASKIIF

SEQ ID NO: 236378 - protein, 18 aa, Homo sapiens
  CDR3 for beta chain variable domain of TCR clone 118189 (TRBV25-1, TRBJ1-2)
CASSGLQNGQGLIFGYTF

SEQ ID NO: 236379 - protein, 17 aa, Homo sapiens
  CDR3 for alpha chain variable domain of TCR clone 118190 (TRAV3, TRAJ6)
CAVRDGPRVGGSHIPTF

SEQ ID NO: 236380 - protein, 12 aa, Homo sapiens
  CDR3 for beta chain variable domain of TCR clone 118190 (TRBV11-2, TRBJ2-2)
CASSLGGGELFF

SEQ ID NO: 236381 - protein, 17 aa, Homo sapiens
  CDR3 for alpha chain variable domain of TCR clone 118191 (TRAV8-4, TRAJ11)
CAVSDRGENSGYSTLTF

SEQ ID NO: 236382 - protein, 14 aa, Homo sapiens
  CDR3 for beta chain variable domain of TCR clone 118191 (TRBV20-1, TRBJ2-1)
CSSNDEASYNEQFF

SEQ ID NO: 236383 - protein, 14 aa, Homo sapiens
  CDR3 for alpha chain variable domain of TCR clone 118192 (TRAV12-2, TRAJ44)
CAVNPAGTAGKLTF

SEQ ID NO: 236384 - protein, 13 aa, Homo sapiens
  CDR3 for beta chain variable domain of TCR clone 118192 (TRBV20-1, TRBJ1-6)
CSAPLGVGSPLHF

SEQ ID NO: 236385 - protein, 14 aa, Homo sapiens
  CDR3 for alpha chain variable domain of TCR clone 118193 (TRAV12-2, TRAJ15)
CAPHTGQAGTALIF

SEQ ID NO: 236386 - protein, 14 aa, Homo sapiens
  CDR3 for beta chain variable domain of TCR clone 118193 (TRBV7-2, TRBJ1-5)
CASSTQGAGQPQHF

SEQ ID NO: 236387 - protein, 13 aa, Homo sapiens
  CDR3 for alpha chain variable domain of TCR clone 118194 (TRAV1-1, TRAJ13)
CAVNSGGYQKVTF

SEQ ID NO: 236388 - protein, 12 aa, Homo sapiens
  CDR3 for beta chain variable domain of TCR clone 118194 (TRBV28, TRBJ2-1)
CASSVQISEQFF

SEQ ID NO: 236389 - protein, 13 aa, Homo sapiens
  CDR3 for alpha chain variable domain of TCR clone 118195 (TRAV2, TRAJ40)
CAVVTSGTYKYIF

SEQ ID NO: 236390 - protein, 18 aa, Homo sapiens
  CDR3 for beta chain variable domain of TCR clone 118195 (TRBV20-1, TRBJ2-6)
CSAETTPTHGSGANVLTF

SEQ ID NO: 236391 - protein, 14 aa, Homo sapiens
  CDR3 for alpha chain variable domain of TCR clone 118196 (TRAV12-2, TRAJ24)
CAVTPADSWGKLQF

SEQ ID NO: 236392 - protein, 14 aa, Homo sapiens
  CDR3 for beta chain variable domain of TCR clone 118196 (TRBV4-2, TRBJ2-1)
CASGLDRAYNEQFF

SEQ ID NO: 236393 - protein, 15 aa, Homo sapiens
  CDR3 for alpha chain variable domain of TCR clone 118197 (TRAV4, TRAJ4)
CLVGPLYGGYNKLIF

SEQ ID NO: 236394 - protein, 16 aa, Homo sapiens
  CDR3 for beta chain variable domain of TCR clone 118197 (TRBV7-8, TRBJ1-4)
CASSLGVGTSNEKLFF

SEQ ID NO: 236395 - protein, 16 aa, Homo sapiens
  CDR3 for alpha chain variable domain of TCR clone 118198 (TRAV12-1, TRAJ21)
CVVFSGYFGSGTKLNV

SEQ ID NO: 236396 - protein, 13 aa, Homo sapiens
  CDR3 for beta chain variable domain of TCR clone 118198 (TRBV7-3, TRBJ1-1)
CASSQDWGAEAFF

SEQ ID NO: 236397 - protein, 17 aa, Homo sapiens
  CDR3 for alpha chain variable domain of TCR clone 118199 (TRAV3, TRAJ6)
CAVRDGSRAGGSYIPTF

SEQ ID NO: 236398 - protein, 13 aa, Homo sapiens
  CDR3 for beta chain variable domain of TCR clone 118199 (TRBV19, TRBJ2-7)
CASSIDRTYEQYF

SEQ ID NO: 236399 - protein, 15 aa, Homo sapiens
  CDR3 for alpha chain variable domain of TCR clone 118200 (TRAV35, TRAJ40)
CAGPLGTSGTYKYIF

SEQ ID NO: 236400 - protein, 14 aa, Homo sapiens
  CDR3 for beta chain variable domain of TCR clone 118200 (TRBV7-3, TRBJ2-1)
CASSLAGGTNEQFF

SEQ ID NO: 236401 - protein, 16 aa, Homo sapiens
  CDR3 for alpha chain variable domain of TCR clone 118201 (TRAV38-1, TRAJ56)
CAFMKRQTGANSKLTF

SEQ ID NO: 236402 - protein, 16 aa, Homo sapiens
  CDR3 for beta chain variable domain of TCR clone 118201 (TRBV3-1, TRBJ1-2)
CASSQGQGVQRDGYTF

SEQ ID NO: 236403 - protein, 15 aa, Homo sapiens
  CDR3 for alpha chain variable domain of TCR clone 118202 (TRAV26-1, TRAJ22)
CIVRVSFWFCKATDL

SEQ ID NO: 236404 - protein, 16 aa, Homo sapiens
  CDR3 for beta chain variable domain of TCR clone 118202 (TRBV24-1, TRBJ2-3)
CATSDPGTGATDKQYF

SEQ ID NO: 236405 - protein, 13 aa, Homo sapiens
  CDR3 for alpha chain variable domain of TCR clone 118203 (TRAV13-1, TRAJ39)
CAASIWAGNMLTF

SEQ ID NO: 236406 - protein, 15 aa, Homo sapiens
  CDR3 for beta chain variable domain of TCR clone 118203 (TRBV7-9, TRBJ1-1)
CASSLLVQGGTEAFF

SEQ ID NO: 236407 - protein, 14 aa, Homo sapiens
  CDR3 for alpha chain variable domain of TCR clone 118204 (TRAV8-4, TRAJ16)
CAVSPVGRWPEASL

SEQ ID NO: 236408 - protein, 15 aa, Homo sapiens
  CDR3 for beta chain variable domain of TCR clone 118204 (TRBV11-3, TRBJ2-7)
CASSPGPASSYEQYF

SEQ ID NO: 236409 - protein, 13 aa, Homo sapiens
  CDR3 for alpha chain variable domain of TCR clone 118205 (TRAV2, TRAJ40)
CAVVTSGAYKYIF

SEQ ID NO: 236410 - protein, 12 aa, Homo sapiens
  CDR3 for beta chain variable domain of TCR clone 118205 (TRBV11-2, TRBJ2-1)
CASSPGNNEQFF

SEQ ID NO: 236411 - protein, 14 aa, Homo sapiens
  CDR3 for alpha chain variable domain of TCR clone 118206 (TRAV17, TRAJ56)
CATVPAGANSKLTF

SEQ ID NO: 236412 - protein, 14 aa, Homo sapiens
  CDR3 for beta chain variable domain of TCR clone 118206 (TRBV7-2, TRBJ2-7)
CASSPKTSFYEQYF

SEQ ID NO: 236413 - protein, 17 aa, Homo sapiens
  CDR3 for alpha chain variable domain of TCR clone 118207 (TRAV8-6, TRAJ58)
GAVSSWVGETSGSRLTF

SEQ ID NO: 236414 - protein, 14 aa, Homo sapiens
  CDR3 for beta chain variable domain of TCR clone 118207 (TRBV4-2, TRBJ2-1)
CASGLDRAYNEQFF

SEQ ID NO: 236415 - protein, 15 aa, Homo sapiens
  CDR3 for alpha chain variable domain of TCR clone 118208 (TRAV10, TRAJ10)
CVVSADTGGGNKLTF

SEQ ID NO: 236416 - protein, 15 aa, Homo sapiens
  CDR3 for beta chain variable domain of TCR clone 118208 (TRBV7-2, TRBJ2-3)
CASRLAGGSTDTQYF

SEQ ID NO: 236417 - protein, 16 aa, Homo sapiens
  CDR3 for alpha chain variable domain of TCR clone 118209 (TRAV20, TRAJ10)
CAVLRGLTGGGNKLTF

SEQ ID NO: 236418 - protein, 16 aa, Homo sapiens
  CDR3 for beta chain variable domain of TCR clone 118209 (TRBV19, TRBJ2-2)
CASSAAGTGGTGELFF

SEQ ID NO: 236419 - protein, 15 aa, Homo sapiens
  CDR3 for alpha chain variable domain of TCR clone 118210 (TRAV2, TRAJ37)
CAVEDGSSNTGELIF

SEQ ID NO: 236420 - protein, 11 aa, Homo sapiens
  CDR3 for beta chain variable domain of TCR clone 118210 (TRBV12-4, TRBJ2-3)
CASTATDTQYF

SEQ ID NO: 236421 - protein, 17 aa, Homo sapiens
  CDR3 for alpha chain variable domain of TCR clone 118211 (TRAV3, TRAJ38)
CAVRDCLNAGNNRKLIW

SEQ ID NO: 236422 - protein, 14 aa, Homo sapiens
  CDR3 for beta chain variable domain of TCR clone 118211 (TRBV19, TRBJ2-7)
CASSMGQGAIEQYF

SEQ ID NO: 236423 - protein, 11 aa, Homo sapiens
  CDR3 for alpha chain variable domain of TCR clone 118212 (TRAV2, TRAJ13)
CASGGYQKVTF

SEQ ID NO: 236424 - protein, 15 aa, Homo sapiens
  CDR3 for beta chain variable domain of TCR clone 118212 (TRBV28, TRBJ2-3)
CASSPDRQGANTQYF

SEQ ID NO: 236425 - protein, 12 aa, Homo sapiens
  CDR3 for alpha chain variable domain of TCR clone 118213 (TRAV12-3, TRAJ17)
CAMTLTGNKLTF

SEQ ID NO: 236426 - protein, 16 aa, Homo sapiens
  CDR3 for beta chain variable domain of TCR clone 118213 (TRBV28, TRBJ2-7)
CASSSPQGRDVYEQYF

SEQ ID NO: 236427 - protein, 11 aa, Homo sapiens
  CDR3 for alpha chain variable domain of TCR clone 118214 (TRAV35, TRAJ34)
CWARNTDKLSF

SEQ ID NO: 236428 - protein, 14 aa, Homo sapiens
  CDR3 for beta chain variable domain of TCR clone 118214 (TRBV5-1, TRBJ2-7)
CASSRGESLYEQYF

SEQ ID NO: 236429 - protein, 14 aa, Homo sapiens
  CDR3 for alpha chain variable domain of TCR clone 118215 (TRAV12-1, TRAJ30)
CVVNIRGRDDKIIF

SEQ ID NO: 236430 - protein, 15 aa, Homo sapiens
  CDR3 for beta chain variable domain of TCR clone 118215 (TRBV18, TRBJ1-2)
CASSPSNTPNYGYTF

SEQ ID NO: 236431 - protein, 12 aa, Homo sapiens
  CDR3 for alpha chain variable domain of TCR clone 118216 (TRAV2, TRAJ33)
CAVPDSNYQLIW

SEQ ID NO: 236432 - protein, 15 aa, Homo sapiens
  CDR3 for beta chain variable domain of TCR clone 118216 (TRBV4-1, TRBJ2-3)
CASSRGQGIPDTQYF

SEQ ID NO: 236433 - protein, 14 aa, Homo sapiens
  CDR3 for alpha chain variable domain of TCR clone 118217 (TRAV2, TRAJ37)
CAVDFTSNTGKLIF

SEQ ID NO: 236434 - protein, 15 aa, Homo sapiens
  CDR3 for beta chain variable domain of TCR clone 118217 (TRBV20-1, TRBJ1-1)
CSASRGVEGNTEAFF

SEQ ID NO: 236435 - protein, 16 aa, Homo sapiens
  CDR3 for alpha chain variable domain of TCR clone 118218 (TRAV16, TRAJ4)
CALSRMFSGGYNKLIF

SEQ ID NO: 236436 - protein, 16 aa, Homo sapiens
  CDR3 for beta chain variable domain of TCR clone 118218 (TRBV24-1, TRBJ2-3)
CATSDPGTGATDTQYF

SEQ ID NO: 236437 - protein, 15 aa, Homo sapiens
  CDR3 for alpha chain variable domain of TCR clone 118219 (TRAV8-6, TRAJ10)
CAVSDKAGGGNKLTF

SEQ ID NO: 236438 - protein, 15 aa, Homo sapiens
  CDR3 for beta chain variable domain of TCR clone 118219 (TRBV3-1, TRBJ2-5)
CASSANLGGPETQYF

SEQ ID NO: 236439 - protein, 16 aa, Homo sapiens
  CDR3 for alpha chain variable domain of TCR clone 118220 (TRAV30, TRAJ24)
CGTEIVDAYSWGKFQF

SEQ ID NO: 236440 - protein, 16 aa, Homo sapiens
  CDR3 for beta chain variable domain of TCR clone 118220 (TRBV2, TRBJ1-3)
CASSGGAGRSGNTIYF

SEQ ID NO: 236441 - protein, 11 aa, Homo sapiens
  CDR3 for alpha chain variable domain of TCR clone 118221 (TRAV23/DV6, TRAJ4)
APAGGYNKLIF

SEQ ID NO: 236442 - protein, 17 aa, Homo sapiens
  CDR3 for beta chain variable domain of TCR clone 118221 (TRBV20-1, TRBJ2-1)
CSAPDRGAGVAYNGQFF

SEQ ID NO: 236443 - protein, 13 aa, Homo sapiens
  CDR3 for alpha chain variable domain of TCR clone 118222 (TRAV16, TRAJ5)
CALTNTGRRAITF

SEQ ID NO: 236444 - protein, 15 aa, Homo sapiens
  CDR3 for beta chain variable domain of TCR clone 118222 (TRBV11-2, TRBJ2-4)
CASSRPGTGINIQYF

SEQ ID NO: 236445 - protein, 13 aa, Homo sapiens
  CDR3 for alpha chain variable domain of TCR clone 118223 (TRAV17, TRAJ5)
CALRGTGRRALTF

SEQ ID NO: 236446 - protein, 14 aa, Homo sapiens
  CDR3 for beta chain variable domain of TCR clone 118223 (TRBV19, TRBJ2-5)
CASSSSGIQETQYF

SEQ ID NO: 236447 - protein, 11 aa, Homo sapiens
  CDR3 for alpha chain variable domain of TCR clone 118224 (TRAV2, TRAJ33)
CAVDSNYQLIW

SEQ ID NO: 236448 - protein, 19 aa, Homo sapiens
  CDR3 for beta chain variable domain of TCR clone 118224 (TRBV4-2, TRBJ2-5)
CASSPIKTGPGAKQETQYF

SEQ ID NO: 236449 - protein, 13 aa, Homo sapiens
  CDR3 for alpha chain variable domain of TCR clone 118225 (TRAV12-3, TRAJ33)
CAMSVNSNYQLIW

SEQ ID NO: 236450 - protein, 15 aa, Homo sapiens
  CDR3 for beta chain variable domain of TCR clone 118225 (TRBV6-1, TRBJ2-1)
CASSEAAYSYNEQFF

SEQ ID NO: 236451 - protein, 14 aa, Homo sapiens
  CDR3 for alpha chain variable domain of TCR clone 118226 (TRAV1-2, TRAJ8)
CAVREDTGFQKLVF

SEQ ID NO: 236452 - protein, 14 aa, Homo sapiens
  CDR3 for beta chain variable domain of TCR clone 118226 (TRBV9, TRBJ2-7)
CASSVGVGSYEQYF

SEQ ID NO: 236453 - protein, 13 aa, Homo sapiens
  CDR3 for alpha chain variable domain of TCR clone 118227 (TRAV1-2, TRAJ9)
CAALNTGGFKTIF

SEQ ID NO: 236454 - protein, 14 aa, Homo sapiens
  CDR3 for beta chain variable domain of TCR clone 118227 (TRBV7-9, TRBJ2-1)
CASSSMVGFGEQFF

SEQ ID NO: 236455 - protein, 18 aa, Homo sapiens
  CDR3 for alpha chain variable domain of TCR clone 118228 (TRAV13-1, TRAJ52)
CAAKNPNAGGTSYGKLTF

SEQ ID NO: 236456 - protein, 18 aa, Homo sapiens
  CDR3 for beta chain variable domain of TCR clone 118228 (TRBV12-4, TRBJ2-4)
CASSRTGAVDVAKNRQYF

SEQ ID NO: 236457 - protein, 12 aa, Homo sapiens
  CDR3 for alpha chain variable domain of TCR clone 118229 (TRAV17, TRAJ20)
CATYSNNYKLSF

SEQ ID NO: 236458 - protein, 11 aa, Homo sapiens
  CDR3 for beta chain variable domain of TCR clone 118229 (TRBV4-1, TRBJ2-2)
CASEHTGELFF

SEQ ID NO: 236459 - protein, 15 aa, Homo sapiens
  CDR3 for alpha chain variable domain of TCR clone 118230 (TRAV12-1, TRAJ44)
CVVFVNTGTASKLTF

SEQ ID NO: 236460 - protein, 12 aa, Homo sapiens
  CDR3 for beta chain variable domain of TCR clone 118230 (TRBV12-4, TRBJ2-7)
CASSLGGYEQYF

SEQ ID NO: 236461 - protein, 14 aa, Homo sapiens
  CDR3 for alpha chain variable domain of TCR clone 118231 (TRAV1-2, TRAJ16)
CAVNRFSDGQKLLF

SEQ ID NO: 236462 - protein, 11 aa, Homo sapiens
  CDR3 for beta chain variable domain of TCR clone 118231 (TRBV4-1, TRBJ2-2)
CASEHTGGLFF

SEQ ID NO: 236463 - protein, 12 aa, Homo sapiens
  CDR3 for alpha chain variable domain of TCR clone 118232 (TRAV16, TRAJ10)
CSRTGGGNKLTF

SEQ ID NO: 236464 - protein, 13 aa, Homo sapiens
  CDR3 for beta chain variable domain of TCR clone 118232 (TRBV7-3, TRBJ1-1)
CASSQDWVAEAFF

SEQ ID NO: 236465 - protein, 12 aa, Homo sapiens
  CDR3 for alpha chain variable domain of TCR clone 118233 (TRAV21, TRAJ11)
CAATSGYSTLTF

SEQ ID NO: 236466 - protein, 13 aa, Homo sapiens
  CDR3 for beta chain variable domain of TCR clone 118233 (TRBV7-9, TRBJ2-1)
CASSLVWAGEQFF

SEQ ID NO: 236467 - protein, 11 aa, Homo sapiens
  CDR3 for alpha chain variable domain of TCR clone 118234 (TRAV12-3, TRAJ27)
CAMANAGKSTF

SEQ ID NO: 236468 - protein, 14 aa, Homo sapiens
  CDR3 for beta chain variable domain of TCR clone 118234 (TRBV7-9, TRBJ1-2)
CASSRQGANYGYTF

SEQ ID NO: 236469 - protein, 17 aa, Homo sapiens
  CDR3 for alpha chain variable domain of TCR clone 118235 (TRAV2, TRAJ22)
ILQVRDADAAEQRQLTF

SEQ ID NO: 236470 - protein, 16 aa, Homo sapiens
  CDR3 for beta chain variable domain of TCR clone 118235 (TRBV2, TRBJ2-5)
CASSETQGVGEETQYF

SEQ ID NO: 236471 - protein, 13 aa, Homo sapiens
  CDR3 for alpha chain variable domain of TCR clone 118236 (TRAV13-2, TRAJ54)
CAENYQGAQKLVF

SEQ ID NO: 236472 - protein, 12 aa, Homo sapiens
  CDR3 for beta chain variable domain of TCR clone 118236 (TRBV7-9, TRBJ2-1)
CASSLGDGEQFF

SEQ ID NO: 236473 - protein, 13 aa, Homo sapiens
  CDR3 for alpha chain variable domain of TCR clone 118237 (TRAV26-2, TRAJ43)
CILRAVNNNDMRF

SEQ ID NO: 236474 - protein, 19 aa, Homo sapiens
  CDR3 for beta chain variable domain of TCR clone 118237 (TRBV28, TRBJ2-1)
CASSFSIRGSGRTRYEQFF

SEQ ID NO: 236475 - protein, 11 aa, Homo sapiens
  CDR3 for alpha chain variable domain of TCR clone 118238 (TRAV2, TRAJ13)
CASGGYQKVTF

SEQ ID NO: 236476 - protein, 14 aa, Homo sapiens
  CDR3 for beta chain variable domain of TCR clone 118238 (TRBV7-3, TRBJ2-1)
CASSVAGGTNEQFF

SEQ ID NO: 236477 - protein, 14 aa, Homo sapiens
  CDR3 for alpha chain variable domain of TCR clone 118239 (TRAV3, TRAJ28)
CTVRRGAGSYQLTF

SEQ ID NO: 236478 - protein, 16 aa, Homo sapiens
  CDR3 for beta chain variable domain of TCR clone 118239 (TRBV4-1, TRBJ2-7)
CASSQEWTSGPLEQYF

SEQ ID NO: 236479 - protein, 14 aa, Homo sapiens
  CDR3 for alpha chain variable domain of TCR clone 118240 (TRAV21, TRAJ10)
CAVALTGGGNKLTF

SEQ ID NO: 236480 - protein, 13 aa, Homo sapiens
  CDR3 for beta chain variable domain of TCR clone 118240 (TRBV7-2, TRBJ1-6)
CASSLGSNSPLHL

SEQ ID NO: 236481 - protein, 13 aa, Homo sapiens
  CDR3 for alpha chain variable domain of TCR clone 118241 (TRAV13-1, TRAJ37)
CAARSGNTAKLIF

SEQ ID NO: 236482 - protein, 14 aa, Homo sapiens
  CDR3 for beta chain variable domain of TCR clone 118241 (TRBV12-4, TRBJ2-3)
CASSLGQGTDTQYF

SEQ ID NO: 236483 - protein, 14 aa, Homo sapiens
  CDR3 for alpha chain variable domain of TCR clone 118242 (TRAV8-3, TRAJ15)
CAVGRHQVGTALIF

SEQ ID NO: 236484 - protein, 13 aa, Homo sapiens
  CDR3 for beta chain variable domain of TCR clone 118242 (TRBV9, TRBJ2-7)
CASSASDSYEQYF

SEQ ID NO: 236485 - protein, 10 aa, Homo sapiens
  CDR3 for alpha chain variable domain of TCR clone 118243 (TRAV30, TRAJ48)
CGIGNEKLTL

SEQ ID NO: 236486 - protein, 16 aa, Homo sapiens
  CDR3 for beta chain variable domain of TCR clone 118243 (TRBV19, TRBJ2-1)
CASSKAGPSSYNEQFF

SEQ ID NO: 236487 - protein, 18 aa, Homo sapiens
  CDR3 for alpha chain variable domain of TCR clone 118244 (TRAV21, TRAJ52)
CAVRPSPAGGTSYGKLTF

SEQ ID NO: 236488 - protein, 13 aa, Homo sapiens
  CDR3 for beta chain variable domain of TCR clone 118244 (TRBV7-7, TRBJ2-5)
CASSRSGQETQYF

SEQ ID NO: 236489 - protein, 14 aa, Homo sapiens
  CDR3 for alpha chain variable domain of TCR clone 118245 (TRAV12-1, TRAJ33)
CVVNMPDSNYQLIW

SEQ ID NO: 236490 - protein, 15 aa, Homo sapiens
  CDR3 for beta chain variable domain of TCR clone 118245 (TRBV19, TRBJ2-4)
CASRGPRRGENIQYF

SEQ ID NO: 236491 - protein, 12 aa, Homo sapiens
  CDR3 for alpha chain variable domain of TCR clone 118246 (TRAV1-2, TRAJ26)
CAVRYYGQNSVF

SEQ ID NO: 236492 - protein, 15 aa, Homo sapiens
  CDR3 for beta chain variable domain of TCR clone 118246 (TRBV28, TRBJ2-1)
CASSIIAGGRSEQFF

SEQ ID NO: 236493 - protein, 15 aa, Homo sapiens
  CDR3 for alpha chain variable domain of TCR clone 118247 (TRAV26-1, TRAJ23)
CIVRVAGYQGGKLIF

SEQ ID NO: 236494 - protein, 13 aa, Homo sapiens
  CDR3 for beta chain variable domain of TCR clone 118247 (TRBV7-9, TRBJ2-3)
CASSPGSTDTQYF

SEQ ID NO: 236495 - protein, 14 aa, Homo sapiens
  CDR3 for alpha chain variable domain of TCR clone 118248 (TRAV8-3, TRAJ9)
CAVVYNTGGFKTIF

SEQ ID NO: 236496 - protein, 13 aa, Homo sapiens
  CDR3 for beta chain variable domain of TCR clone 118248 (TRBV10-2, TRBJ2-1)
CASGASGDAKQFF

SEQ ID NO: 236497 - protein, 14 aa, Homo sapiens
  CDR3 for alpha chain variable domain of TCR clone 118249 (TRAV36/DV7, TRAJ32)
CAVGHVGATNKLIF

SEQ ID NO: 236498 - protein, 16 aa, Homo sapiens
  CDR3 for beta chain variable domain of TCR clone 118249 (TRBV12-4, TRBJ1-4)
CASSLKGVGHGEKLFF

SEQ ID NO: 236499 - protein, 14 aa, Homo sapiens
  CDR3 for alpha chain variable domain of TCR clone 118250 (TRAV26-1, TRAJ38)
CIADNAGNNRKLIW

SEQ ID NO: 236500 - protein, 15 aa, Homo sapiens
  CDR3 for beta chain variable domain of TCR clone 118250 (TRBV9, TRBJ2-1)
CASSLARSSYNEQFF

SEQ ID NO: 236501 - protein, 15 aa, Homo sapiens
  CDR3 for alpha chain variable domain of TCR clone 118251 (TRAV13-1, TRAJ44)
CAASRGGGTASKLTF

SEQ ID NO: 236502 - protein, 14 aa, Homo sapiens
  CDR3 for beta chain variable domain of TCR clone 118251 (TRBV7-2, TRBJ2-5)
YASNPRGSSETQYL

SEQ ID NO: 236503 - protein, 17 aa, Homo sapiens
  CDR3 for alpha chain variable domain of TCR clone 118252 (TRAV3, TRAJ6)
CAVRDGPRAGGSYIPTF

SEQ ID NO: 236504 - protein, 17 aa, Homo sapiens
  CDR3 for beta chain variable domain of TCR clone 118252 (TRBV7-2, TRBJ2-6)
CASSAGTGGAGANVLTF

SEQ ID NO: 236505 - protein, 14 aa, Homo sapiens
  CDR3 for alpha chain variable domain of TCR clone 118253 (TRAV35, TRAJ13)
CAGSPSGGYQKVTF

SEQ ID NO: 236506 - protein, 17 aa, Homo sapiens
  CDR3 for beta chain variable domain of TCR clone 118253 (TRBV7-6, TRBJ2-5)
WASSPGLADPWGETQYF

SEQ ID NO: 236507 - protein, 16 aa, Homo sapiens
  CDR3 for alpha chain variable domain of TCR clone 118254 (TRAV21, TRAJ37)
CAVRTAGSSNTGKLIF

SEQ ID NO: 236508 - protein, 13 aa, Homo sapiens
  CDR3 for beta chain variable domain of TCR clone 118254 (TRBV4-2, TRBJ1-1)
CASSQAGNTEAFF

SEQ ID NO: 236509 - protein, 15 aa, Homo sapiens
  CDR3 for alpha chain variable domain of TCR clone 118255 (TRAV10, TRAJ3)
CVVSVRYSSASKIIF

SEQ ID NO: 236510 - protein, 16 aa, Homo sapiens
  CDR3 for beta chain variable domain of TCR clone 118255 (TRBV11-2, TRBJ2-7)
CASSPTTGGVSYEQYF

SEQ ID NO: 236511 - protein, 13 aa, Homo sapiens
  CDR3 for alpha chain variable domain of TCR clone 118256 (TRAV12-3, TRAJ13)
CAMTSGGYKKVTF

SEQ ID NO: 236512 - protein, 13 aa, Homo sapiens
  CDR3 for beta chain variable domain of TCR clone 118256 (TRBV20-1, TRBJ2-2)
CSALSGGAGELFF

SEQ ID NO: 236513 - protein, 11 aa, Homo sapiens
  CDR3 for alpha chain variable domain of TCR clone 118257 (TRAV21, TRAJ34)
CAVTNTDKLIF

SEQ ID NO: 236514 - protein, 16 aa, Homo sapiens
  CDR3 for beta chain variable domain of TCR clone 118257 (TRBV7-9, TRBJ2-3)
CASSLDYPDLTDTQYF

SEQ ID NO: 236515 - protein, 17 aa, Homo sapiens
  CDR3 for alpha chain variable domain of TCR clone 118258 (TRAV4, TRAJ18)
CLVGERSVGSTLGRLYF

SEQ ID NO: 236516 - protein, 11 aa, Homo sapiens
  CDR3 for beta chain variable domain of TCR clone 118258 (TRBV11-3, TRBJ2-1)
CASSLGNEQFF

SEQ ID NO: 236517 - protein, 17 aa, Homo sapiens
  CDR3 for alpha chain variable domain of TCR clone 118259 (TRAV35, TRAJ28)
CAGLQVYSGAGSCQLTF

SEQ ID NO: 236518 - protein, 15 aa, Homo sapiens
  CDR3 for beta chain variable domain of TCR clone 118259 (TRBV2, TRBJ1-2)
CASSEIGGANYGYTF

SEQ ID NO: 236519 - protein, 15 aa, Homo sapiens
  CDR3 for alpha chain variable domain of TCR clone 118260 (TRAV3, TRAJ5)
CAVRDRKTGRRALTF

SEQ ID NO: 236520 - protein, 15 aa, Homo sapiens
  CDR3 for beta chain variable domain of TCR clone 118260 (TRBV7-8, TRBJ2-1)
CASSLEDSLYNEQFF

SEQ ID NO: 236521 - protein, 16 aa, Homo sapiens
  CDR3 for alpha chain variable domain of TCR clone 118261 (TRAV3, TRAJ34)
CAVIARGTPTSSSLGL

SEQ ID NO: 236522 - protein, 15 aa, Homo sapiens
  CDR3 for beta chain variable domain of TCR clone 118261 (TRBV6-3, TRBJ2-7)
CASSSPGTVFYEQYF

SEQ ID NO: 236523 - protein, 13 aa, Homo sapiens
  CDR3 for alpha chain variable domain of TCR clone 118262 (TRAV38-1, TRAJ42)
CARWGGSQGNLIF

SEQ ID NO: 236524 - protein, 14 aa, Homo sapiens
  CDR3 for beta chain variable domain of TCR clone 118262 (TRBV12-5, TRBJ2-5)
CASGSRTHQETQYF

SEQ ID NO: 236525 - protein, 14 aa, Homo sapiens
  CDR3 for alpha chain variable domain of TCR clone 118263 (TRAV1-2, TRAJ8)
CAVREDTGFQKLVF

SEQ ID NO: 236526 - protein, 16 aa, Homo sapiens
  CDR3 for beta chain variable domain of TCR clone 118263 (TRBV5-6, TRBJ2-5)
CASTLAPAGGRETQYF

SEQ ID NO: 236527 - protein, 11 aa, Homo sapiens
  CDR3 for alpha chain variable domain of TCR clone 118264 (TRAV13-1, TRAJ39)
CASHAGNMLTS

SEQ ID NO: 236528 - protein, 14 aa, Homo sapiens
  CDR3 for beta chain variable domain of TCR clone 118264 (TRBV11-2, TRBJ1-5)
CASSLDRGRQPQHF

SEQ ID NO: 236529 - protein, 14 aa, Homo sapiens
  CDR3 for alpha chain variable domain of TCR clone 118265 (TRAV16, TRAJ37)
CALDISGNTGKLIF

SEQ ID NO: 236530 - protein, 15 aa, Homo sapiens
  CDR3 for beta chain variable domain of TCR clone 118265 (TRBV6-3, TRBJ2-7)
CASSSPGTVFYEQYF

SEQ ID NO: 236531 - protein, 13 aa, Homo sapiens
  CDR3 for alpha chain variable domain of TCR clone 118266 (TRAV3, TRAJ21)
CAVRAPDFNKFYF

SEQ ID NO: 236532 - protein, 18 aa, Homo sapiens
  CDR3 for beta chain variable domain of TCR clone 118266 (TRBV11-2, TRBJ2-3)
CASSLGGASRGAPNTQYF

SEQ ID NO: 236533 - protein, 10 aa, Homo sapiens
  CDR3 for alpha chain variable domain of TCR clone 118267 (TRAV13-1, TRAJ27)
CAPLARQINL

SEQ ID NO: 236534 - protein, 14 aa, Homo sapiens
  CDR3 for beta chain variable domain of TCR clone 118267 (TRBV19, TRBJ2-1)
CASPTFVLSGEQFF

SEQ ID NO: 236535 - protein, 12 aa, Homo sapiens
  CDR3 for alpha chain variable domain of TCR clone 118268 (TRAV29/DV5, TRAJ53)
CAASGGNYKLTF

SEQ ID NO: 236536 - protein, 13 aa, Homo sapiens
  CDR3 for beta chain variable domain of TCR clone 118268 (TRBV7-6, TRBJ2-1)
CQQLGGGADEQFF

SEQ ID NO: 236537 - protein, 18 aa, Homo sapiens
  CDR3 for alpha chain variable domain of TCR clone 118269 (TRAV26-2, TRAJ45)
CILRLWGYSGGGADGLTF

SEQ ID NO: 236538 - protein, 17 aa, Homo sapiens
  CDR3 for beta chain variable domain of TCR clone 118269 (TRBV28, TRBJ2-3)
CASSATPAGGRVDTQYF

SEQ ID NO: 236539 - protein, 16 aa, Homo sapiens
  CDR3 for alpha chain variable domain of TCR clone 118270 (TRAV12-2, TRAJ28)
CAVITDSGAGSYQLTF

SEQ ID NO: 236540 - protein, 15 aa, Homo sapiens
  CDR3 for beta chain variable domain of TCR clone 118270 (TRBV28, TRBJ2-1)
CASSIIAGGRSEQFF

SEQ ID NO: 236541 - protein, 17 aa, Homo sapiens
  CDR3 for alpha chain variable domain of TCR clone 118271 (TRAV3, TRAJ6)
CAVRDGPRAGGSYIPTF

SEQ ID NO: 236542 - protein, 14 aa, Homo sapiens
  CDR3 for beta chain variable domain of TCR clone 118271 (TRBV2, TRBJ2-7)
CASSRDRSSYEQYF

SEQ ID NO: 236543 - protein, 11 aa, Homo sapiens
  CDR3 for alpha chain variable domain of TCR clone 118272 (TRAV12-3, TRAJ27)
CAMANAGKSTF

SEQ ID NO: 236544 - protein, 15 aa, Homo sapiens
  CDR3 for beta chain variable domain of TCR clone 118272 (TRBV6-1, TRBJ2-7)
CASSVQRGVYYEQYF

SEQ ID NO: 236545 - protein, 12 aa, Homo sapiens
  CDR3 for alpha chain variable domain of TCR clone 118273 (TRAV12-1, TRAJ40)
CVVYSGTYKYIF

SEQ ID NO: 236546 - protein, 13 aa, Homo sapiens
  CDR3 for beta chain variable domain of TCR clone 118273 (TRBV28, TRBJ2-5)
CASSFAGGETQYF

SEQ ID NO: 236547 - protein, 12 aa, Homo sapiens
  CDR3 for alpha chain variable domain of TCR clone 118274 (TRAV21, TRAJ49)
CAVRNTGNQFYF

SEQ ID NO: 236548 - protein, 14 aa, Homo sapiens
  CDR3 for beta chain variable domain of TCR clone 118274 (TRBV5-1, TRBJ2-7)
CASSRGESLYEQYF

SEQ ID NO: 236549 - protein, 18 aa, Homo sapiens
  CDR3 for alpha chain variable domain of TCR clone 118275 (TRAV26-1, TRAJ23)
CIVRVGLEVWNQGGKLIL

SEQ ID NO: 236550 - protein, 13 aa, Homo sapiens
  CDR3 for beta chain variable domain of TCR clone 118275 (TRBV7-2, TRBJ2-7)
CASILSGRSGLAG

SEQ ID NO: 236551 - protein, 16 aa, Homo sapiens
  CDR3 for alpha chain variable domain of TCR clone 118276 (TRAV12-3, TRAJ53)
CAMSPGSGGSNYKLTF

SEQ ID NO: 236552 - protein, 12 aa, Homo sapiens
  CDR3 for beta chain variable domain of TCR clone 118276 (TRBV7-8, TRBJ2-7)
CTSSLGDREQYF

SEQ ID NO: 236553 - protein, 14 aa, Homo sapiens
  CDR3 for alpha chain variable domain of TCR clone 118277 (TRAV2, TRAJ30)
CAVAIMNRDDKIIF

SEQ ID NO: 236554 - protein, 13 aa, Homo sapiens
  CDR3 for beta chain variable domain of TCR clone 118277 (TRBV10-3, TRBJ2-7)
CASKLAVNYEQYF

SEQ ID NO: 236555 - protein, 16 aa, Homo sapiens
  CDR3 for alpha chain variable domain of TCR clone 118278 (TRAV30, TRAJ24)
CGTEIVDADSWGKFQF

SEQ ID NO: 236556 - protein, 16 aa, Homo sapiens
  CDR3 for beta chain variable domain of TCR clone 118278 (TRBV11-2, TRBJ2-7)
CASSLAPTGVNYEQYF

SEQ ID NO: 236557 - protein, 12 aa, Homo sapiens
  CDR3 for alpha chain variable domain of TCR clone 118279 (TRAV13-1, TRAJ17)
CAARTAGNKLTL

SEQ ID NO: 236558 - protein, 15 aa, Homo sapiens
  CDR3 for beta chain variable domain of TCR clone 118279 (TRBV7-6, TRBJ1-1)
CASSPQGGANTEAFF

SEQ ID NO: 236559 - protein, 15 aa, Homo sapiens
  CDR3 for alpha chain variable domain of TCR clone 118280 (TRAV21, TRAJ53)
CATLNSGGSNYKLTF

SEQ ID NO: 236560 - protein, 13 aa, Homo sapiens
  CDR3 for beta chain variable domain of TCR clone 118280 (TRBV11-2, TRBJ2-5)
CASSRGPSETQYF

SEQ ID NO: 236561 - protein, 14 aa, Homo sapiens
  CDR3 for alpha chain variable domain of TCR clone 118281 (TRAV8-3, TRAJ9)
CAVVYNTGGFKTIF

SEQ ID NO: 236562 - protein, 12 aa, Homo sapiens
  CDR3 for beta chain variable domain of TCR clone 118281 (TRBV5-7, TRBJ1-1)
CASSLGRGKAFF

SEQ ID NO: 236563 - protein, 13 aa, Homo sapiens
  CDR3 for alpha chain variable domain of TCR clone 118282 (TRAV2, TRAJ40)
CAVVTSGTYKYIF

SEQ ID NO: 236564 - protein, 12 aa, Homo sapiens
  CDR3 for beta chain variable domain of TCR clone 118282 (TRBV5-5, TRBJ2-5)
CASSYFGETQYF

SEQ ID NO: 236565 - protein, 14 aa, Homo sapiens
  CDR3 for alpha chain variable domain of TCR clone 118283 (TRAV2, TRAJ37)
CAVDFTSNTGKLIF

SEQ ID NO: 236566 - protein, 14 aa, Homo sapiens
  CDR3 for beta chain variable domain of TCR clone 118283 (TRBV7-3, TRBJ2-2)
CASSLYPLTGELFF

SEQ ID NO: 236567 - protein, 15 aa, Homo sapiens
  CDR3 for alpha chain variable domain of TCR clone 118284 (TRAV26-1, TRAJ23)
CIVRVLNNQGGKLIF

SEQ ID NO: 236568 - protein, 15 aa, Homo sapiens
  CDR3 for beta chain variable domain of TCR clone 118284 (TRBV6-5, TRBJ2-7)
CASSRTSGFSYEQYF

SEQ ID NO: 236569 - protein, 14 aa, Homo sapiens
  CDR3 for alpha chain variable domain of TCR clone 118285 (TRAV21, TRAJ45)
CAVSSGGGADGLTF

SEQ ID NO: 236570 - protein, 14 aa, Homo sapiens
  CDR3 for beta chain variable domain of TCR clone 118285 (TRBV18, TRBJ1-1)
CASSQGQGNTEAFF

SEQ ID NO: 236571 - protein, 17 aa, Homo sapiens
  CDR3 for alpha chain variable domain of TCR clone 118286 (TRAV38-2/DV8, TRAJ38)
CAYKSARGAGNNRKLIW

SEQ ID NO: 236572 - protein, 13 aa, Homo sapiens
  CDR3 for beta chain variable domain of TCR clone 118286 (TRBV6-5, TRBJ2-1)
CASRGRVGNEQFF

SEQ ID NO: 236573 - protein, 15 aa, Homo sapiens
  CDR3 for alpha chain variable domain of TCR clone 118287 (TRAV3, TRAJ22)
CAVRDRGGSARQLTF

SEQ ID NO: 236574 - protein, 17 aa, Homo sapiens
  CDR3 for beta chain variable domain of TCR clone 118287 (TRBV13, TRBJ2-3)
CASSLARVAGGRNTQYF

SEQ ID NO: 236575 - protein, 18 aa, Homo sapiens
  CDR3 for alpha chain variable domain of TCR clone 118288 (TRAV21, TRAJ52)
CAVRPSPAGGTSYGKPTF

SEQ ID NO: 236576 - protein, 15 aa, Homo sapiens
  CDR3 for beta chain variable domain of TCR clone 118288 (TRBV6-6, TRBJ2-7)
CASSCSYGGSYEQYF

SEQ ID NO: 236577 - protein, 15 aa, Homo sapiens
  CDR3 for alpha chain variable domain of TCR clone 118289 (TRAV13-1, TRAJ44)
CAASRGGDTASKLTF

SEQ ID NO: 236578 - protein, 14 aa, Homo sapiens
  CDR3 for beta chain variable domain of TCR clone 118289 (TRBV7-2, TRBJ2-5)
CASSPRGSSETQYF

SEQ ID NO: 236579 - protein, 12 aa, Homo sapiens
  CDR3 for alpha chain variable domain of TCR clone 118290 (TRAV13-1, TRAJ27)
CAAHTNAGKSTF

SEQ ID NO: 236580 - protein, 16 aa, Homo sapiens
  CDR3 for beta chain variable domain of TCR clone 118290 (TRBV19, TRBJ2-2)
CASRSPGTGATGELFF

SEQ ID NO: 236581 - protein, 12 aa, Homo sapiens
  CDR3 for alpha chain variable domain of TCR clone 118291 (TRAV29/DV5, TRAJ34)
CAARHNTDKLIF

SEQ ID NO: 236582 - protein, 15 aa, Homo sapiens
  CDR3 for beta chain variable domain of TCR clone 118291 (TRBV19, TRBJ2-7)
CASSPAGSGEALRFF

SEQ ID NO: 236583 - protein, 13 aa, Homo sapiens
  CDR3 for alpha chain variable domain of TCR clone 118292 (TRAV20, TRAJ3)
CARRYSSASKIIF

SEQ ID NO: 236584 - protein, 12 aa, Homo sapiens
  CDR3 for beta chain variable domain of TCR clone 118292 (TRBV28, TRBJ2-1)
CASSVRGNEQFF

SEQ ID NO: 236585 - protein, 12 aa, Homo sapiens
  CDR3 for alpha chain variable domain of TCR clone 118293 (TRAV12-3, TRAJ17)
CAMTLTGNKLTF

SEQ ID NO: 236586 - protein, 15 aa, Homo sapiens
  CDR3 for beta chain variable domain of TCR clone 118293 (TRBV7-9, TRBJ2-1)
CASSLGWGRANEQFF

SEQ ID NO: 236587 - protein, 12 aa, Homo sapiens
  CDR3 for alpha chain variable domain of TCR clone 118294 (TRAV16, TRAJ12)
CALEDSSYKLIF

SEQ ID NO: 236588 - protein, 13 aa, Homo sapiens
  CDR3 for beta chain variable domain of TCR clone 118294 (TRBV7-3, TRBJ1-1)
CASSQDWGAEAFF

SEQ ID NO: 236589 - protein, 14 aa, Homo sapiens
  CDR3 for alpha chain variable domain of TCR clone 118295 (TRAV38-2/DV8, TRAJ54)
CAYRRYQGAQKLVF

SEQ ID NO: 236590 - protein, 14 aa, Homo sapiens
  CDR3 for beta chain variable domain of TCR clone 118295 (TRBV4-1, TRBJ2-2)
CASSQAVNTGELFF

SEQ ID NO: 236591 - protein, 14 aa, Homo sapiens
  CDR3 for alpha chain variable domain of TCR clone 118296 (TRAV21, TRAJ45)
CAVSSGGGADGLTF

SEQ ID NO: 236592 - protein, 15 aa, Homo sapiens
  CDR3 for beta chain variable domain of TCR clone 118296 (TRBV6-1, TRBJ2-4)
CASSEAGWTINIQYF

SEQ ID NO: 236593 - protein, 13 aa, Homo sapiens
  CDR3 for alpha chain variable domain of TCR clone 118297 (TRAV12-1, TRAJ33)
CGDAPDSNYQLIW

SEQ ID NO: 236594 - protein, 15 aa, Homo sapiens
  CDR3 for beta chain variable domain of TCR clone 118297 (TRBV27, TRBJ2-1)
CASSNEGGSSNEQFF

SEQ ID NO: 236595 - protein, 14 aa, Homo sapiens
  CDR3 for alpha chain variable domain of TCR clone 118298 (TRAV12-2, TRAJ40)
CAVKIPSGTYKYIF

SEQ ID NO: 236596 - protein, 15 aa, Homo sapiens
  CDR3 for beta chain variable domain of TCR clone 118298 (TRBV5-1, TRBJ1-1)
CASSSTTGTNTEAFF

SEQ ID NO: 236597 - protein, 15 aa, Homo sapiens
  CDR3 for alpha chain variable domain of TCR clone 118299 (TRAV8-3, TRAJ40)
CAAPSLGSETYKYIF

SEQ ID NO: 236598 - protein, 16 aa, Homo sapiens
  CDR3 for beta chain variable domain of TCR clone 118299 (TRBV7-3, TRBJ2-3)
CASSLSGYRPEDTQYF

SEQ ID NO: 236599 - protein, 18 aa, Homo sapiens
  CDR3 for alpha chain variable domain of TCR clone 118300 (TRAV12-3, TRAJ52)
CAMSRTNAGGTSYGTLTF

SEQ ID NO: 236600 - protein, 17 aa, Homo sapiens
  CDR3 for beta chain variable domain of TCR clone 118300 (TRBV7-3, TRBJ2-3)
CASSLMKRMRGADTQYF

SEQ ID NO: 236601 - protein, 15 aa, Homo sapiens
  CDR3 for alpha chain variable domain of TCR clone 118301 (TRAV25, TRAJ10)
CAGPLLTGGGNKLTF

SEQ ID NO: 236602 - protein, 20 aa, Homo sapiens
  CDR3 for beta chain variable domain of TCR clone 118301 (TRBV7-8, TRBJ2-2)
CASSHLFPGPTIHITGELFF

SEQ ID NO: 236603 - protein, 14 aa, Homo sapiens
  CDR3 for alpha chain variable domain of TCR clone 118302 (TRAV26-1, TRAJ21)
CIAHTASTNFTLDL

SEQ ID NO: 236604 - protein, 15 aa, Homo sapiens
  CDR3 for beta chain variable domain of TCR clone 118302 (TRBV20-1, TRBJ2-7)
CSARDRVSGMDEQYF

SEQ ID NO: 236605 - protein, 23 aa, Homo sapiens
  CDR3 for alpha chain variable domain of TCR clone 118303 (TRAV26-1, TRAJ38)
CIADNAGNNHIQNPDPAVYQLSD

SEQ ID NO: 236606 - protein, 16 aa, Homo sapiens
  CDR3 for beta chain variable domain of TCR clone 118303 (TRBV19, TRBJ2-1)
CASSKAGPSSYNEQFF

SEQ ID NO: 236607 - protein, 12 aa, Homo sapiens
  CDR3 for alpha chain variable domain of TCR clone 118304 (TRAV13-1, TRAJ40)
CAASWATYNYIF

SEQ ID NO: 236608 - protein, 15 aa, Homo sapiens
  CDR3 for beta chain variable domain of TCR clone 118304 (TRBV7-8, TRBJ2-1)
CASSSRLAAYNEQFF

SEQ ID NO: 236609 - protein, 14 aa, Homo sapiens
  CDR3 for alpha chain variable domain of TCR clone 118305 (TRAV16, TRAJ39)
CALSKNNAGNMLTF

SEQ ID NO: 236610 - protein, 17 aa, Homo sapiens
  CDR3 for beta chain variable domain of TCR clone 118305 (TRBV23-1, TRBJ1-2)
CASSNTGGGLLWLDLRF

SEQ ID NO: 236611 - protein, 14 aa, Homo sapiens
  CDR3 for alpha chain variable domain of TCR clone 118306 (TRAV2, TRAJ37)
CAVDFTSNTGKLIF

SEQ ID NO: 236612 - protein, 15 aa, Homo sapiens
  CDR3 for beta chain variable domain of TCR clone 118306 (TRBV20-1, TRBJ1-1)
CSASRGVTGKTEALF

SEQ ID NO: 236613 - protein, 13 aa, Homo sapiens
  CDR3 for alpha chain variable domain of TCR clone 118307 (TRAV36/DV7, TRAJ49)
CAGDSNTGNQFYF

SEQ ID NO: 236614 - protein, 14 aa, Homo sapiens
  CDR3 for beta chain variable domain of TCR clone 118307 (TRBV11-2, TRBJ2-1)
CASSLEVANNEQFF

SEQ ID NO: 236615 - protein, 14 aa, Homo sapiens
  CDR3 for alpha chain variable domain of TCR clone 118308 (TRAV12-3, TRAJ10)
SHLPLTGGGNKLTF

SEQ ID NO: 236616 - protein, 13 aa, Homo sapiens
  CDR3 for beta chain variable domain of TCR clone 118308 (TRBV12-4, TRBJ1-1)
CASSPGTGFEAVF

SEQ ID NO: 236617 - protein, 11 aa, Homo sapiens
  CDR3 for alpha chain variable domain of TCR clone 118309 (TRAV2, TRAJ33)
CAVESNYQLIW

SEQ ID NO: 236618 - protein, 13 aa, Homo sapiens
  CDR3 for beta chain variable domain of TCR clone 118309 (TRBV10-2, TRBJ2-7)
CASGASGGYEQYF

SEQ ID NO: 236619 - protein, 15 aa, Homo sapiens
  CDR3 for alpha chain variable domain of TCR clone 118310 (TRAV13-1, TRAJ11)
CAASNRNSGYSTLTF

SEQ ID NO: 236620 - protein, 11 aa, Homo sapiens
  CDR3 for beta chain variable domain of TCR clone 118310 (TRBV20-1, TRBJ2-7)
CSARLSYEQYV

SEQ ID NO: 236621 - protein, 11 aa, Homo sapiens
  CDR3 for alpha chain variable domain of TCR clone 118311 (TRAV4, TRAJ31)
CLVGDNARLMF

SEQ ID NO: 236622 - protein, 16 aa, Homo sapiens
  CDR3 for beta chain variable domain of TCR clone 118311 (TRBV7-2, TRBJ2-5)
CASSSKWLSGQDTQYF

SEQ ID NO: 236623 - protein, 12 aa, Homo sapiens
  CDR3 for alpha chain variable domain of TCR clone 118312 (TRAV8-3, TRAJ20)
CAVGANDYKLSF

SEQ ID NO: 236624 - protein, 15 aa, Homo sapiens
  CDR3 for beta chain variable domain of TCR clone 118312 (TRBV11-2, TRBJ2-7)
CASRFPGTGGYEQYF

SEQ ID NO: 236625 - protein, 11 aa, Homo sapiens
  CDR3 for alpha chain variable domain of TCR clone 118313 (TRAV27, TRAJ20)
CVGLNDYKLSF

SEQ ID NO: 236626 - protein, 14 aa, Homo sapiens
  CDR3 for beta chain variable domain of TCR clone 118313 (TRBV6-1, TRBJ1-1)
CASTPLQMNTEAFF

SEQ ID NO: 236627 - protein, 15 aa, Homo sapiens
  CDR3 for alpha chain variable domain of TCR clone 118314 (TRAV14/DV4, TRAJ10)
CAMRELTGGGNKLTF

SEQ ID NO: 236628 - protein, 15 aa, Homo sapiens
  CDR3 for beta chain variable domain of TCR clone 118314 (TRBV10-3, TRBJ2-3)
CAISLTSGGTDTQYF

SEQ ID NO: 236629 - protein, 14 aa, Homo sapiens
  CDR3 for alpha chain variable domain of TCR clone 118315 (TRAV2, TRAJ9)
CAVEDRSGGFKTIF

SEQ ID NO: 236630 - protein, 14 aa, Homo sapiens
  CDR3 for beta chain variable domain of TCR clone 118315 (TRBV18, TRBJ1-5)
CAGSRQQRNQPQHF

SEQ ID NO: 236631 - protein, 12 aa, Homo sapiens
  CDR3 for alpha chain variable domain of TCR clone 118316 (TRAV8-3, TRAJ20)
CAVGANDYKLSF

SEQ ID NO: 236632 - protein, 16 aa, Homo sapiens
  CDR3 for beta chain variable domain of TCR clone 118316 (TRBV10-3, TRBJ1-6)
CAISERRGQGNSPLHF

SEQ ID NO: 236633 - protein, 15 aa, Homo sapiens
  CDR3 for alpha chain variable domain of TCR clone 118317 (TRAV8-4, TRAJ7)
CAVTGGNYGNNRLAF

SEQ ID NO: 236634 - protein, 11 aa, Homo sapiens
  CDR3 for beta chain variable domain of TCR clone 118317 (TRBV20-1, TRBJ2-1)
CSLSSGSEQFF

SEQ ID NO: 236635 - protein, 17 aa, Homo sapiens
  CDR3 for alpha chain variable domain of TCR clone 118318 (TRAV12-1, TRAJ32)
CVVNMQGYGGATNKLIF

SEQ ID NO: 236636 - protein, 14 aa, Homo sapiens
  CDR3 for beta chain variable domain of TCR clone 118318 (TRBV20-1, TRBJ1-1)
CSAQTRIGGTEAFF

SEQ ID NO: 236637 - protein, 12 aa, Homo sapiens
  CDR3 for alpha chain variable domain of TCR clone 118319 (TRAV12-2, TRAJ9)
CAVNTGGFKTIF

SEQ ID NO: 236638 - protein, 11 aa, Homo sapiens
  CDR3 for beta chain variable domain of TCR clone 118319 (TRBV29-1, TRBJ2-5)
CSEDRTGTQYF

SEQ ID NO: 236639 - protein, 12 aa, Homo sapiens
  CDR3 for alpha chain variable domain of TCR clone 118320 (TRAV27, TRAJ36)
CAGMTGANNRFF

SEQ ID NO: 236640 - protein, 14 aa, Homo sapiens
  CDR3 for beta chain variable domain of TCR clone 118320 (TRBV12-4, TRBJ2-3)
CASSLVPSTDTQYF

SEQ ID NO: 236641 - protein, 15 aa, Homo sapiens
  CDR3 for alpha chain variable domain of TCR clone 118321 (TRAV17, TRAJ57)
CATGPSQGGSEKLVF

SEQ ID NO: 236642 - protein, 17 aa, Homo sapiens
  CDR3 for beta chain variable domain of TCR clone 118321 (TRBV4-2, TRBJ1-1)
CASTQFGGGSGNTEAFF

SEQ ID NO: 236643 - protein, 14 aa, Homo sapiens
  CDR3 for alpha chain variable domain of TCR clone 118322 (TRAV23/DV6, TRAJ40)
CAARKNSGTYKYIF

SEQ ID NO: 236644 - protein, 14 aa, Homo sapiens
  CDR3 for beta chain variable domain of TCR clone 118322 (TRBV10-3, TRBJ2-5)
CAISEIDYQETQYF

SEQ ID NO: 236645 - protein, 14 aa, Homo sapiens
  CDR3 for alpha chain variable domain of TCR clone 118323 (TRAV23/DV6, TRAJ36)
CAASMQGGANNLFF

SEQ ID NO: 236646 - protein, 15 aa, Homo sapiens
  CDR3 for beta chain variable domain of TCR clone 118323 (TRBV7-3, TRBJ2-2)
CASKANGANTGELFF

SEQ ID NO: 236647 - protein, 14 aa, Homo sapiens
  CDR3 for alpha chain variable domain of TCR clone 118324 (TRAV26-1, TRAJ49)
CIARLTNTGNQFYF

SEQ ID NO: 236648 - protein, 11 aa, Homo sapiens
  CDR3 for beta chain variable domain of TCR clone 118324 (TRBV29-1, TRBJ2-5)
CSEDRTGTQYF

SEQ ID NO: 236649 - protein, 13 aa, Homo sapiens
  CDR3 for alpha chain variable domain of TCR clone 118325 (TRAV8-3, TRAJ36)
CAVGATEANNLFF

SEQ ID NO: 236650 - protein, 17 aa, Homo sapiens
  CDR3 for beta chain variable domain of TCR clone 118325 (TRBV4-2, TRBJ1-1)
CASTQFGGGSGNTEAFF

SEQ ID NO: 236651 - protein, 20 aa, Homo sapiens
  CDR3 for alpha chain variable domain of TCR clone 118326 (TRAV12-3, TRAJ52)
CAMTQSYQNAGGTSYGKLTF

SEQ ID NO: 236652 - protein, 14 aa, Homo sapiens
  CDR3 for beta chain variable domain of TCR clone 118326 (TRBV19, TRBJ2-1)
CASPTFVLSGEQFF

SEQ ID NO: 236653 - protein, 16 aa, Homo sapiens
  CDR3 for alpha chain variable domain of TCR clone 118327 (TRAV17, TRAJ28)
CATASVSGAWSYQLTF

SEQ ID NO: 236654 - protein, 11 aa, Homo sapiens
  CDR3 for beta chain variable domain of TCR clone 118327 (TRBV7-9, TRBJ2-5)
CASSLGETQYF

SEQ ID NO: 236655 - protein, 13 aa, Homo sapiens
  CDR3 for alpha chain variable domain of TCR clone 118328 (TRAV16, TRAJ58)
CALSIPSGSRLTF

SEQ ID NO: 236656 - protein, 16 aa, Homo sapiens
  CDR3 for beta chain variable domain of TCR clone 118328 (TRBV28, TRBJ2-7)
CASSFPDRRLTYEQYF

SEQ ID NO: 236657 - protein, 12 aa, Homo sapiens
  CDR3 for alpha chain variable domain of TCR clone 118329 (TRAV12-3, TRAJ17)
CAMALTGNKLTF

SEQ ID NO: 236658 - protein, 14 aa, Homo sapiens
  CDR3 for beta chain variable domain of TCR clone 118329 (TRBV11-2, TRBJ2-3)
CASSRLARTDTQYF

SEQ ID NO: 236659 - protein, 16 aa, Homo sapiens
  CDR3 for alpha chain variable domain of TCR clone 118330 (TRAV26-1, TRAJ23)
CIVRPHGNNQGGKLIF

SEQ ID NO: 236660 - protein, 13 aa, Homo sapiens
  CDR3 for beta chain variable domain of TCR clone 118330 (TRBV7-9, TRBJ1-2)
CASSLKQNYGYTF

SEQ ID NO: 236661 - protein, 15 aa, Homo sapiens
  CDR3 for alpha chain variable domain of TCR clone 118331 (TRAV26-1, TRAJ47)
CIVRVGWGYGNKLAF

SEQ ID NO: 236662 - protein, 13 aa, Homo sapiens
  CDR3 for beta chain variable domain of TCR clone 118331 (TRBV20-1, TRBJ2-7)
CSARGDTQDEQYF

SEQ ID NO: 236663 - protein, 13 aa, Homo sapiens
  CDR3 for alpha chain variable domain of TCR clone 118332 (TRAV8-3, TRAJ48)
CCGCNFGNEKLTF

SEQ ID NO: 236664 - protein, 13 aa, Homo sapiens
  CDR3 for beta chain variable domain of TCR clone 118332 (TRBV10-3, TRBJ2-7)
CASKLAVNYEQYF

SEQ ID NO: 236665 - protein, 14 aa, Homo sapiens
  CDR3 for alpha chain variable domain of TCR clone 118333 (TRAV38-1, TRAJ40)
CALRPTSGTYKYIF

SEQ ID NO: 236666 - protein, 15 aa, Homo sapiens
  CDR3 for beta chain variable domain of TCR clone 118333 (TRBV10-2, TRBJ2-6)
CASSEQGTGANVLTF

SEQ ID NO: 236667 - protein, 21 aa, Homo sapiens
  CDR3 for alpha chain variable domain of TCR clone 118334 (TRAV12-1, TRAJ43)
SSVIQPPTSVWGTNNNNDMRF

SEQ ID NO: 236668 - protein, 14 aa, Homo sapiens
  CDR3 for beta chain variable domain of TCR clone 118334 (TRBV7-9, TRBJ2-2)
CASSLVQDTGELFF

SEQ ID NO: 236669 - protein, 14 aa, Homo sapiens
  CDR3 for alpha chain variable domain of TCR clone 118335 (TRAV12-2, TRAJ9)
CAVNMEGGGFKTIF

SEQ ID NO: 236670 - protein, 16 aa, Homo sapiens
  CDR3 for beta chain variable domain of TCR clone 118335 (TRBV12-5, TRBJ2-5)
CASGPRTSGNQETQYF

SEQ ID NO: 236671 - protein, 12 aa, Homo sapiens
  CDR3 for alpha chain variable domain of TCR clone 118336 (TRAV12-3, TRAJ3)
CAIDSSASKIIF

SEQ ID NO: 236672 - protein, 13 aa, Homo sapiens
  CDR3 for beta chain variable domain of TCR clone 118336 (TRBV7-3, TRBJ1-1)
CASSQDWGAEAFF

SEQ ID NO: 236673 - protein, 15 aa, Homo sapiens
  CDR3 for alpha chain variable domain of TCR clone 118337 (TRAV3, TRAJ4)
CAVRDGTGGYNKLIF

SEQ ID NO: 236674 - protein, 16 aa, Homo sapiens
  CDR3 for beta chain variable domain of TCR clone 118337 (TRBV27, TRBJ2-2)
CASSSSGVSNTGGLFF

SEQ ID NO: 236675 - protein, 16 aa, Homo sapiens
  CDR3 for alpha chain variable domain of TCR clone 118338 (TRAV21, TRAJ17)
CAVRPGEEAAGNKLTF

SEQ ID NO: 236676 - protein, 16 aa, Homo sapiens
  CDR3 for beta chain variable domain of TCR clone 118338 (TRBV2, TRBJ2-7)
CASSEPWKGPSYEQYF

SEQ ID NO: 236677 - protein, 17 aa, Homo sapiens
  CDR3 for alpha chain variable domain of TCR clone 118339 (TRAV21, TRAJ10)
CAVRVYILTGGGNKLTF

SEQ ID NO: 236678 - protein, 15 aa, Homo sapiens
  CDR3 for beta chain variable domain of TCR clone 118339 (TRBV28, TRBJ2-5)
CASSSGRTIQETQYF

SEQ ID NO: 236679 - protein, 11 aa, Homo sapiens
  CDR3 for alpha chain variable domain of TCR clone 118340 (TRAV13-1, TRAJ39)
CASHAGNMLTF

SEQ ID NO: 236680 - protein, 14 aa, Homo sapiens
  CDR3 for beta chain variable domain of TCR clone 118340 (TRBV11-2, TRBJ1-5)
CASSLDRGRQPQHF

SEQ ID NO: 236681 - protein, 10 aa, Homo sapiens
  CDR3 for alpha chain variable domain of TCR clone 118341 (TRAV13-2, TRAJ12)
RADSSYKLIF

SEQ ID NO: 236682 - protein, 15 aa, Homo sapiens
  CDR3 for beta chain variable domain of TCR clone 118341 (TRBV19, TRBJ1-5)
CASSIVWADNQPQHF

SEQ ID NO: 236683 - protein, 14 aa, Homo sapiens
  CDR3 for alpha chain variable domain of TCR clone 118342 (TRAV17, TRAJ40)
CDTALTSGTYKYIF

SEQ ID NO: 236684 - protein, 13 aa, Homo sapiens
  CDR3 for beta chain variable domain of TCR clone 118342 (TRBV27, TRBJ2-1)
CASSSGSYNEQFF

SEQ ID NO: 236685 - protein, 12 aa, Homo sapiens
  CDR3 for alpha chain variable domain of TCR clone 118343 (TRAV12-3, TRAJ20)
CAMVRGDYKLSF

SEQ ID NO: 236686 - protein, 14 aa, Homo sapiens
  CDR3 for beta chain variable domain of TCR clone 118343 (TRBV7-9, TRBJ2-3)
CASSLEDGTDTQYF

SEQ ID NO: 236687 - protein, 14 aa, Homo sapiens
  CDR3 for alpha chain variable domain of TCR clone 118344 (TRAV17, TRAJ12)
CAILPLDSSYKLIF

SEQ ID NO: 236688 - protein, 11 aa, Homo sapiens
  CDR3 for beta chain variable domain of TCR clone 118344 (TRBV19, TRBJ1-1)
CASSIGSEAFF

SEQ ID NO: 236689 - protein, 13 aa, Homo sapiens
  CDR3 for alpha chain variable domain of TCR clone 118345 (TRAV2, TRAJ40)
CAVVTSGTYKYIF

SEQ ID NO: 236690 - protein, 14 aa, Homo sapiens
  CDR3 for beta chain variable domain of TCR clone 118345 (TRBV4-1, TRBJ1-5)
CASSQGPVNQPQHF

SEQ ID NO: 236691 - protein, 11 aa, Homo sapiens
  CDR3 for alpha chain variable domain of TCR clone 118346 (TRAV12-1, TRAJ34)
FVVNKGRELIF

SEQ ID NO: 236692 - protein, 12 aa, Homo sapiens
  CDR3 for beta chain variable domain of TCR clone 118346 (TRBV2, TRBJ2-1)
CAYGPPGNEQFF

SEQ ID NO: 236693 - protein, 14 aa, Homo sapiens
  CDR3 for alpha chain variable domain of TCR clone 118347 (TRAV8-2, TRAJ4)
CVVSPSGGYNKLIF

SEQ ID NO: 236694 - protein, 16 aa, Homo sapiens
  CDR3 for beta chain variable domain of TCR clone 118347 (TRBV7-3, TRBJ2-1)
CASSLEGCRSYNEQFF

SEQ ID NO: 236695 - protein, 11 aa, Homo sapiens
  CDR3 for alpha chain variable domain of TCR clone 118348 (TRAV21, TRAJ31)
CAVRNNARLMF

SEQ ID NO: 236696 - protein, 13 aa, Homo sapiens
  CDR3 for beta chain variable domain of TCR clone 118348 (TRBV11-3, TRBJ2-7)
CAGSLDKLYEQYF

SEQ ID NO: 236697 - protein, 16 aa, Homo sapiens
  CDR3 for alpha chain variable domain of TCR clone 118349 (TRAV13-1, TRAJ18)
CAARRMRGSTLGRLYF

SEQ ID NO: 236698 - protein, 16 aa, Homo sapiens
  CDR3 for beta chain variable domain of TCR clone 118349 (TRBV27, TRBJ1-1)
CASSSRGRTGYTEAFF

SEQ ID NO: 236699 - protein, 16 aa, Homo sapiens
  CDR3 for alpha chain variable domain of TCR clone 118350 (TRAV4, TRAJ22)
CLVGDLYSGSARQLTF

SEQ ID NO: 236700 - protein, 16 aa, Homo sapiens
  CDR3 for beta chain variable domain of TCR clone 118350 (TRBV7-9, TRBJ2-1)
CASSDVAEGSYNEQFF

SEQ ID NO: 236701 - protein, 12 aa, Homo sapiens
  CDR3 for alpha chain variable domain of TCR clone 118351 (TRAV8-4, TRAJ43)
CAVSVNNNDMRF

SEQ ID NO: 236702 - protein, 14 aa, Homo sapiens
  CDR3 for beta chain variable domain of TCR clone 118351 (TRBV11-2, TRBJ1-2)
CASSLGTANYGYTV

SEQ ID NO: 236703 - protein, 14 aa, Homo sapiens
  CDR3 for alpha chain variable domain of TCR clone 118352 (TRAV12-3, TRAJ48)
CAMSVNFGNEKLTF

SEQ ID NO: 236704 - protein, 13 aa, Homo sapiens
  CDR3 for beta chain variable domain of TCR clone 118352 (TRBV20-1, TRBJ1-3)
CSSAGNSGNTMYF

SEQ ID NO: 236705 - protein, 17 aa, Homo sapiens
  CDR3 for alpha chain variable domain of TCR clone 118353 (TRAV8-6, TRAJ58)
CAVSSWVGETSGSRLTF

SEQ ID NO: 236706 - protein, 15 aa, Homo sapiens
  CDR3 for beta chain variable domain of TCR clone 118353 (TRBV6-1, TRBJ2-1)
CASSELRGQYNEQFF

SEQ ID NO: 236707 - protein, 12 aa, Homo sapiens
  CDR3 for alpha chain variable domain of TCR clone 118354 (TRAV12-3, TRAJ17)
CAMTLTGNKLTF

SEQ ID NO: 236708 - protein, 11 aa, Homo sapiens
  CDR3 for beta chain variable domain of TCR clone 118354 (TRBV10-3, TRBJ2-7)
CAISEGLEQYF

SEQ ID NO: 236709 - protein, 14 aa, Homo sapiens
  CDR3 for alpha chain variable domain of TCR clone 118355 (TRAV21, TRAJ9)
CCGGGGTGGFKTIF

SEQ ID NO: 236710 - protein, 13 aa, Homo sapiens
  CDR3 for beta chain variable domain of TCR clone 118355 (TRBV12-4, TRBJ1-2)
CASSSGLTVIATF

SEQ ID NO: 236711 - protein, 14 aa, Homo sapiens
  CDR3 for alpha chain variable domain of TCR clone 118356 (TRAV13-1, TRAJ3)
CAAEGYSSASKIIF

SEQ ID NO: 236712 - protein, 13 aa, Homo sapiens
  CDR3 for beta chain variable domain of TCR clone 118356 (TRBV19, TRBJ1-2)
CASSVPGQDGYTF

SEQ ID NO: 236713 - protein, 17 aa, Homo sapiens
  CDR3 for alpha chain variable domain of TCR clone 118357 (TRAV12-2, TRAJ52)
CAVNPYAGGTSYGKLTF

SEQ ID NO: 236714 - protein, 13 aa, Homo sapiens
  CDR3 for beta chain variable domain of TCR clone 118357 (TRBV7-8, TRBJ2-7)
CASSFAGLYEQYF

SEQ ID NO: 236715 - protein, 15 aa, Homo sapiens
  CDR3 for alpha chain variable domain of TCR clone 118358 (TRAV12-3, TRAJ6)
CAMSATTGGSYIPTF

SEQ ID NO: 236716 - protein, 14 aa, Homo sapiens
  CDR3 for beta chain variable domain of TCR clone 118358 (TRBV2, TRBJ2-1)
CASRAGSSYNEQFF

SEQ ID NO: 236717 - protein, 14 aa, Homo sapiens
  CDR3 for alpha chain variable domain of TCR clone 118359 (TRAV1-2, TRAJ29)
CAVRELTSATPLVF

SEQ ID NO: 236718 - protein, 13 aa, Homo sapiens
  CDR3 for beta chain variable domain of TCR clone 118359 (TRBV7-9, TRBJ1-2)
CASSLKQNYGYTF

SEQ ID NO: 236719 - protein, 15 aa, Homo sapiens
  CDR3 for alpha chain variable domain of TCR clone 118360 (TRAV17, TRAJ13)
CATDAGSGGYQKVTF

SEQ ID NO: 236720 - protein, 12 aa, Homo sapiens
  CDR3 for beta chain variable domain of TCR clone 118360 (TRBV11-2, TRBJ2-2)
CASSLPTGELFF

SEQ ID NO: 236721 - protein, 14 aa, Homo sapiens
  CDR3 for alpha chain variable domain of TCR clone 118361 (TRAV13-1, TRAJ44)
CAAKATGTASKLTF

SEQ ID NO: 236722 - protein, 14 aa, Homo sapiens
  CDR3 for beta chain variable domain of TCR clone 118361 (TRBV15, TRBJ2-1)
CATSGVEDYNEQFF

SEQ ID NO: 236723 - protein, 13 aa, Homo sapiens
  CDR3 for alpha chain variable domain of TCR clone 118362 (TRAV29/DV5, TRAJ31)
CAASRNNNARLMF

SEQ ID NO: 236724 - protein, 15 aa, Homo sapiens
  CDR3 for beta chain variable domain of TCR clone 118362 (TRBV7-2, TRBJ2-1)
CASSLASGRVNELFF

SEQ ID NO: 236725 - protein, 17 aa, Homo sapiens
  CDR3 for alpha chain variable domain of TCR clone 118363 (TRAV3, TRAJ6)
CAVRDGPRAGGSYIPTF

SEQ ID NO: 236726 - protein, 14 aa, Homo sapiens
  CDR3 for beta chain variable domain of TCR clone 118363 (TRBV4-1, TRBJ1-5)
CASSPKGDNQPQHF

SEQ ID NO: 236727 - protein, 14 aa, Homo sapiens
  CDR3 for alpha chain variable domain of TCR clone 118364 (TRAV1-2, TRAJ16)
CAVNRFSDGQKLLF

SEQ ID NO: 236728 - protein, 11 aa, Homo sapiens
  CDR3 for beta chain variable domain of TCR clone 118364 (TRBV29-1, TRBJ2-5)
CSEDRKGTQYF

SEQ ID NO: 236729 - protein, 14 aa, Homo sapiens
  CDR3 for alpha chain variable domain of TCR clone 118365 (TRAV12-3, TRAJ10)
SHLPLTGGGSKLTF

SEQ ID NO: 236730 - protein, 11 aa, Homo sapiens
  CDR3 for beta chain variable domain of TCR clone 118365 (TRBV11-2, TRBJ2-2)
CASSLPGELFF

SEQ ID NO: 236731 - protein, 11 aa, Homo sapiens
  CDR3 for alpha chain variable domain of TCR clone 118366 (TRAV13-1, TRAJ15)
CATTPGTALIF

SEQ ID NO: 236732 - protein, 17 aa, Homo sapiens
  CDR3 for beta chain variable domain of TCR clone 118366 (TRBV13, TRBJ2-3)
CASSLSRVAGGRNTQYF

SEQ ID NO: 236733 - protein, 15 aa, Homo sapiens
  CDR3 for alpha chain variable domain of TCR clone 118367 (TRAV3, TRAJ22)
CAVRDGGGSARQLTF

SEQ ID NO: 236734 - protein, 13 aa, Homo sapiens
  CDR3 for beta chain variable domain of TCR clone 118367 (TRBV2, TRBJ1-5)
CATAGPGNQPQHF

SEQ ID NO: 236735 - protein, 19 aa, Homo sapiens
  CDR3 for alpha chain variable domain of TCR clone 118368 (TRAV1-2, TRAJ26)
CLLPLCCERPDNYGQNFVF

SEQ ID NO: 236736 - protein, 11 aa, Homo sapiens
  CDR3 for beta chain variable domain of TCR clone 118368 (TRBV6-3, TRBJ2-3)
CATGQADTQYF

SEQ ID NO: 236737 - protein, 13 aa, Homo sapiens
  CDR3 for alpha chain variable domain of TCR clone 118369 (TRAV12-1, TRAJ7)
CVVNMRGNNRLAF

SEQ ID NO: 236738 - protein, 15 aa, Homo sapiens
  CDR3 for beta chain variable domain of TCR clone 118369 (TRBV27, TRBJ2-3)
CASSVGLAATDTQYF

SEQ ID NO: 236739 - protein, 10 aa, Homo sapiens
  CDR3 for alpha chain variable domain of TCR clone 118370 (TRAV25, TRAJ20)
CTVNDYKLSF

SEQ ID NO: 236740 - protein, 13 aa, Homo sapiens
  CDR3 for beta chain variable domain of TCR clone 118370 (TRBV6-3, TRBJ2-7)
CASSFSGGYEQYF

SEQ ID NO: 236741 - protein, 13 aa, Homo sapiens
  CDR3 for alpha chain variable domain of TCR clone 118371 (TRAV2, TRAJ15)
CAVASQAGTALIF

SEQ ID NO: 236742 - protein, 14 aa, Homo sapiens
  CDR3 for beta chain variable domain of TCR clone 118371 (TRBV5-1, TRBJ1-1)
CASSRTTGDTEAFF

SEQ ID NO: 236743 - protein, 15 aa, Homo sapiens
  CDR3 for alpha chain variable domain of TCR clone 118372 (TRAV13-1, TRAJ32)
CAASIYCGATNKLIF

SEQ ID NO: 236744 - protein, 14 aa, Homo sapiens
  CDR3 for beta chain variable domain of TCR clone 118372 (TRBV7-9, TRBJ2-1)
CASSLASGSNEQFF

SEQ ID NO: 236745 - protein, 12 aa, Homo sapiens
  CDR3 for alpha chain variable domain of TCR clone 118373 (TRAV21, TRAJ11)
CAATSGYSTLIF

SEQ ID NO: 236746 - protein, 16 aa, Homo sapiens
  CDR3 for beta chain variable domain of TCR clone 118373 (TRBV28, TRBJ2-2)
CASSLEGGSNTGELFF

SEQ ID NO: 236747 - protein, 15 aa, Homo sapiens
  CDR3 for alpha chain variable domain of TCR clone 118374 (TRAV3, TRAJ22)
CAVRDRGGSARQLTF

SEQ ID NO: 236748 - protein, 16 aa, Homo sapiens
  CDR3 for beta chain variable domain of TCR clone 118374 (TRBV27, TRBJ2-2)
CASSFRGLVRTGELFF

SEQ ID NO: 236749 - protein, 15 aa, Homo sapiens
  CDR3 for alpha chain variable domain of TCR clone 118375 (TRAV8-2, TRAJ16)
CVVSDGFSDGQKLLF

SEQ ID NO: 236750 - protein, 14 aa, Homo sapiens
  CDR3 for beta chain variable domain of TCR clone 118375 (TRBV7-3, TRBJ1-1)
CASSLGTGYTEALF

SEQ ID NO: 236751 - protein, 17 aa, Homo sapiens
  CDR3 for alpha chain variable domain of TCR clone 118376 (TRAV3, TRAJ6)
CAVRDGPRAGGSYIPKF

SEQ ID NO: 236752 - protein, 12 aa, Homo sapiens
  CDR3 for beta chain variable domain of TCR clone 118376 (TRBV11-2, TRBJ2-1)
CASSPGNNEQFF

SEQ ID NO: 236753 - protein, 16 aa, Homo sapiens
  CDR3 for alpha chain variable domain of TCR clone 118377 (TRAV16, TRAJ4)
CARSRMFSGGFNKLIF

SEQ ID NO: 236754 - protein, 16 aa, Homo sapiens
  CDR3 for beta chain variable domain of TCR clone 118377 (TRBV24-1, TRBJ2-3)
CATSDPGTGATDTQYF

SEQ ID NO: 236755 - protein, 16 aa, Homo sapiens
  CDR3 for alpha chain variable domain of TCR clone 118378 (TRAV12-3, TRAJ28)
CAMRANSGAGSYKLTF

SEQ ID NO: 236756 - protein, 14 aa, Homo sapiens
  CDR3 for beta chain variable domain of TCR clone 118378 (TRBV19, TRBJ2-1)
CASPTFVLSGEQFF

SEQ ID NO: 236757 - protein, 17 aa, Homo sapiens
  CDR3 for alpha chain variable domain of TCR clone 118379 (TRAV3, TRAJ6)
CAVRDGPRAGGSYIPTF

SEQ ID NO: 236758 - protein, 13 aa, Homo sapiens
  CDR3 for beta chain variable domain of TCR clone 118379 (TRBV7-3, TRBJ1-1)
CASSQDWGAEALF

SEQ ID NO: 236759 - protein, 11 aa, Homo sapiens
  CDR3 for alpha chain variable domain of TCR clone 118380 (TRAV16, TRAJ31)
CALFNNARLMF

SEQ ID NO: 236760 - protein, 15 aa, Homo sapiens
  CDR3 for beta chain variable domain of TCR clone 118380 (TRBV18, TRBJ1-1)
CASSPRQGENTEAVF

SEQ ID NO: 236761 - protein, 18 aa, Homo sapiens
  CDR3 for alpha chain variable domain of TCR clone 118381 (TRAV13-1, TRAJ52)
CAAKNPNAGGTSYGKLTF

SEQ ID NO: 236762 - protein, 15 aa, Homo sapiens
  CDR3 for beta chain variable domain of TCR clone 118381 (TRBV6-1, TRBJ2-3)
CASSERGGITDTQYF

SEQ ID NO: 236763 - protein, 14 aa, Homo sapiens
  CDR3 for alpha chain variable domain of TCR clone 118382 (TRAV35, TRAJ50)
CAGHRKTSYDKVIF

SEQ ID NO: 236764 - protein, 13 aa, Homo sapiens
  CDR3 for beta chain variable domain of TCR clone 118382 (TRBV19, TRBJ1-2)
CASSVPGQDGYTF

SEQ ID NO: 236765 - protein, 13 aa, Homo sapiens
  CDR3 for alpha chain variable domain of TCR clone 118383 (TRAV36/DV7, TRAJ24)
CAVEASLWGKFQF

SEQ ID NO: 236766 - protein, 12 aa, Homo sapiens
  CDR3 for beta chain variable domain of TCR clone 118383 (TRBV7-2, TRBJ2-2)
CASSSLTGELFF

SEQ ID NO: 236767 - protein, 13 aa, Homo sapiens
  CDR3 for alpha chain variable domain of TCR clone 118384 (TRAV16, TRAJ27)
CALRRTNAGKPTF

SEQ ID NO: 236768 - protein, 15 aa, Homo sapiens
  CDR3 for beta chain variable domain of TCR clone 118384 (TRBV18, TRBJ2-1)
CASSPPSASYNEQFF

SEQ ID NO: 236769 - protein, 13 aa, Homo sapiens
  CDR3 for alpha chain variable domain of TCR clone 118385 (TRAV12-1, TRAJ39)
CVVPQRAGNMLTF

SEQ ID NO: 236770 - protein, 16 aa, Homo sapiens
  CDR3 for beta chain variable domain of TCR clone 118385 (TRBV4-1, TRBJ2-5)
RQQPRSDGGPIETQYF

SEQ ID NO: 236771 - protein, 18 aa, Homo sapiens
  CDR3 for alpha chain variable domain of TCR clone 118386 (TRAV26-2, TRAJ45)
CILRVDKYSGGGADVLTF

SEQ ID NO: 236772 - protein, 14 aa, Homo sapiens
  CDR3 for beta chain variable domain of TCR clone 118386 (TRBV7-2, TRBJ2-7)
CASRSQGAAYEQYF

SEQ ID NO: 236773 - protein, 13 aa, Homo sapiens
  CDR3 for alpha chain variable domain of TCR clone 118387 (TRAV12-2, TRAJ39)
CAVNNNAGNLLTF

SEQ ID NO: 236774 - protein, 13 aa, Homo sapiens
  CDR3 for beta chain variable domain of TCR clone 118387 (TRBV2, TRBJ1-5)
CATAGPGNQPQHF

SEQ ID NO: 236775 - protein, 12 aa, Homo sapiens
  CDR3 for alpha chain variable domain of TCR clone 118388 (TRAV8-4, TRAJ43)
CAVSVNNNDMRF

SEQ ID NO: 236776 - protein, 17 aa, Homo sapiens
  CDR3 for beta chain variable domain of TCR clone 118388 (TRBV4-1, TRBJ2-3)
CASSQGYVSGGTDTQYF

SEQ ID NO: 236777 - protein, 14 aa, Homo sapiens
  CDR3 for alpha chain variable domain of TCR clone 118389 (TRAV35, TRAJ13)
CAGSPSGGDQKVTF

SEQ ID NO: 236778 - protein, 17 aa, Homo sapiens
  CDR3 for beta chain variable domain of TCR clone 118389 (TRBV7-6, TRBJ2-5)
CASSPGLADPWGETQYF

SEQ ID NO: 236779 - protein, 13 aa, Homo sapiens
  CDR3 for alpha chain variable domain of TCR clone 118390 (TRAV36/DV7, TRAJ49)
CAVEANTGNQFYF

SEQ ID NO: 236780 - protein, 13 aa, Homo sapiens
  CDR3 for beta chain variable domain of TCR clone 118390 (TRBV10-3, TRBJ2-7)
CAPKLAVSYEQYF

SEQ ID NO: 236781 - protein, 12 aa, Homo sapiens
  CDR3 for alpha chain variable domain of TCR clone 118391 (TRAV17, TRAJ12)
CATLRSSYKLIF

SEQ ID NO: 236782 - protein, 16 aa, Homo sapiens
  CDR3 for beta chain variable domain of TCR clone 118391 (TRBV28, TRBJ2-7)
CASSLFFETGRPEQYF

SEQ ID NO: 236783 - protein, 11 aa, Homo sapiens
  CDR3 for alpha chain variable domain of TCR clone 118392 (TRAV12-1, TRAJ21)
CVVNNFNKFHF

SEQ ID NO: 236784 - protein, 11 aa, Homo sapiens
  CDR3 for beta chain variable domain of TCR clone 118392 (TRBV10-3, TRBJ2-7)
CAISEGLEQYF

SEQ ID NO: 236785 - protein, 13 aa, Homo sapiens
  CDR3 for alpha chain variable domain of TCR clone 118393 (TRAV17, TRAJ39)
CATANNAGNMLTF

SEQ ID NO: 236786 - protein, 16 aa, Homo sapiens
  CDR3 for beta chain variable domain of TCR clone 118393 (TRBV12-5, TRBJ2-5)
CASGPRTSGNQETQYF

SEQ ID NO: 236787 - protein, 16 aa, Homo sapiens
  CDR3 for alpha chain variable domain of TCR clone 118394 (TRAV30, TRAJ24)
CGTEIVYADSWGKFQF

SEQ ID NO: 236788 - protein, 14 aa, Homo sapiens
  CDR3 for beta chain variable domain of TCR clone 118394 (TRBV7-2, TRBJ2-7)
CASSPKTSFYEQYF

SEQ ID NO: 236789 - protein, 15 aa, Homo sapiens
  CDR3 for alpha chain variable domain of TCR clone 118395 (TRAV34, TRAJ36)
CGAPSRLGGAKNLFF

SEQ ID NO: 236790 - protein, 16 aa, Homo sapiens
  CDR3 for beta chain variable domain of TCR clone 118395 (TRBV4-3, TRBJ2-1)
CASSYRRLGSWDEQFF

SEQ ID NO: 236791 - protein, 11 aa, Homo sapiens
  CDR3 for alpha chain variable domain of TCR clone 118396 (TRAV12-1, TRAJ34)
CVVNKGRELIF

SEQ ID NO: 236792 - protein, 13 aa, Homo sapiens
  CDR3 for beta chain variable domain of TCR clone 118396 (TRBV24-1, TRBJ2-2)
CATSDWSTGELFF

SEQ ID NO: 236793 - protein, 16 aa, Homo sapiens
  CDR3 for alpha chain variable domain of TCR clone 118397 (TRAV3, TRAJ28)
CAVLPRSGLGVTNSLS

SEQ ID NO: 236794 - protein, 13 aa, Homo sapiens
  CDR3 for beta chain variable domain of TCR clone 118397 (TRBV12-4, TRBJ2-5)
CASRLAVQETQYF

SEQ ID NO: 236795 - protein, 15 aa, Homo sapiens
  CDR3 for alpha chain variable domain of TCR clone 118398 (TRAV23/DV6, TRAJ18)
CAARYRGSTLGRLYF

SEQ ID NO: 236796 - protein, 13 aa, Homo sapiens
  CDR3 for beta chain variable domain of TCR clone 118398 (TRBV7-2, TRBJ2-7)
CASSSPSGSVQYF

SEQ ID NO: 236797 - protein, 13 aa, Homo sapiens
  CDR3 for alpha chain variable domain of TCR clone 118399 (TRAV27, TRAJ42)
CAGARGSQGNLIF

SEQ ID NO: 236798 - protein, 15 aa, Homo sapiens
  CDR3 for beta chain variable domain of TCR clone 118399 (TRBV10-3, TRBJ2-2)
CAIRTDREDTGGLFS

SEQ ID NO: 236799 - protein, 13 aa, Homo sapiens
  CDR3 for alpha chain variable domain of TCR clone 118400 (TRAV1-1, TRAJ23)
CAVVANQGGKLIF

SEQ ID NO: 236800 - protein, 16 aa, Homo sapiens
  CDR3 for beta chain variable domain of TCR clone 118400 (TRBV5-5, TRBJ1-2)
CASSPTWGRGLYGHTF

SEQ ID NO: 236801 - protein, 12 aa, Homo sapiens
  CDR3 for alpha chain variable domain of TCR clone 118401 (TRAV13-1, TRAJ27)
CAAHTNAGKSTF

SEQ ID NO: 236802 - protein, 15 aa, Homo sapiens
  CDR3 for beta chain variable domain of TCR clone 118401 (TRBV20-1, TRBJ2-7)
CSAESGTSGAYEQYF

SEQ ID NO: 236803 - protein, 16 aa, Homo sapiens
  CDR3 for alpha chain variable domain of TCR clone 118402 (TRAV12-3, TRAJ53)
CAMSPGSGGSNYKLTF

SEQ ID NO: 236804 - protein, 13 aa, Homo sapiens
  CDR3 for beta chain variable domain of TCR clone 118402 (TRBV11-2, TRBJ2-7)
CASSTLDRYEQYF

SEQ ID NO: 236805 - protein, 15 aa, Homo sapiens
  CDR3 for alpha chain variable domain of TCR clone 118403 (TRAV26-1, TRAJ15)
CIVRAANQAGTALIF

SEQ ID NO: 236806 - protein, 15 aa, Homo sapiens
  CDR3 for beta chain variable domain of TCR clone 118403 (TRBV20-1, TRBJ1-1)
CSARSAATSNTEASF

SEQ ID NO: 236807 - protein, 12 aa, Homo sapiens
  CDR3 for alpha chain variable domain of TCR clone 118404 (TRAV1-1, TRAJ39)
CAVPVVGKMLTF

SEQ ID NO: 236808 - protein, 15 aa, Homo sapiens
  CDR3 for beta chain variable domain of TCR clone 118404 (TRBV19, TRBJ1-6)
CASSTQGAVGSPLHF

SEQ ID NO: 236809 - protein, 14 aa, Homo sapiens
  CDR3 for alpha chain variable domain of TCR clone 118405 (TRAV21, TRAJ35)
CAVMPIGFGNVLHR

SEQ ID NO: 236810 - protein, 12 aa, Homo sapiens
  CDR3 for beta chain variable domain of TCR clone 118405 (TRBV7-9, TRBJ2-7)
CASSIKREEQYV

SEQ ID NO: 236811 - protein, 13 aa, Homo sapiens
  CDR3 for alpha chain variable domain of TCR clone 118406 (TRAV8-3, TRAJ21)
CAVGAYNLNKFYF

SEQ ID NO: 236812 - protein, 14 aa, Homo sapiens
  CDR3 for beta chain variable domain of TCR clone 118406 (TRBV20-1, TRBJ2-5)
CSARDGRAGETQYF

SEQ ID NO: 236813 - protein, 12 aa, Homo sapiens
  CDR3 for alpha chain variable domain of TCR clone 118407 (TRAV12-2, TRAJ20)
CAVRPSDYKLSF

SEQ ID NO: 236814 - protein, 12 aa, Homo sapiens
  CDR3 for beta chain variable domain of TCR clone 118407 (TRBV7-9, TRBJ2-7)
CASSIKREEQYF

SEQ ID NO: 236815 - protein, 13 aa, Homo sapiens
  CDR3 for alpha chain variable domain of TCR clone 118408 (TRAV21, TRAJ20)
CAVIRLGDYKLSF

SEQ ID NO: 236816 - protein, 13 aa, Homo sapiens
  CDR3 for beta chain variable domain of TCR clone 118408 (TRBV7-3, TRBJ1-1)
CASSPAGGLEAFF

SEQ ID NO: 236817 - protein, 14 aa, Homo sapiens
  CDR3 for alpha chain variable domain of TCR clone 118409 (TRAV8-6, TRAJ5)
CAVSVDTGRRALTF

SEQ ID NO: 236818 - protein, 11 aa, Homo sapiens
  CDR3 for beta chain variable domain of TCR clone 118409 (TRBV7-3, TRBJ2-5)
CASSSSETQYF

SEQ ID NO: 236819 - protein, 13 aa, Homo sapiens
  CDR3 for alpha chain variable domain of TCR clone 118410 (TRAV8-3, TRAJ15)
CAVGIQAGTALIF

SEQ ID NO: 236820 - protein, 17 aa, Homo sapiens
  CDR3 for beta chain variable domain of TCR clone 118410 (TRBV20-1, TRBJ2-1)
CSARDPLAGVSYNEQLF

SEQ ID NO: 236821 - protein, 15 aa, Homo sapiens
  CDR3 for alpha chain variable domain of TCR clone 118411 (TRAV3, TRAJ5)
CDVRDFDTGRRALTF

SEQ ID NO: 236822 - protein, 13 aa, Homo sapiens
  CDR3 for beta chain variable domain of TCR clone 118411 (TRBV12-4, TRBJ2-7)
CASSPTETYEQYF

SEQ ID NO: 236823 - protein, 14 aa, Homo sapiens
  CDR3 for alpha chain variable domain of TCR clone 118412 (TRAV1-2, TRAJ16)
CAVNRFSDGQKLLF

SEQ ID NO: 236824 - protein, 13 aa, Homo sapiens
  CDR3 for beta chain variable domain of TCR clone 118412 (TRBV7-3, TRBJ1-1)
CASSQDWGAEAVF

SEQ ID NO: 236825 - protein, 16 aa, Homo sapiens
  CDR3 for alpha chain variable domain of TCR clone 118413 (TRAV3, TRAJ10)
CAVRDMRAGGGNKLTF

SEQ ID NO: 236826 - protein, 19 aa, Homo sapiens
  CDR3 for beta chain variable domain of TCR clone 118413 (TRBV6-3, TRBJ1-2)
CASSYSKDRTGPPNYGYTF

SEQ ID NO: 236827 - protein, 16 aa, Homo sapiens
  CDR3 for alpha chain variable domain of TCR clone 118414 (TRAV3, TRAJ37)
CAVRGKGSGNTGKLIF

SEQ ID NO: 236828 - protein, 16 aa, Homo sapiens
  CDR3 for beta chain variable domain of TCR clone 118414 (TRBV20-1, TRBJ1-4)
CSAPGQGLLTNEKLFF

SEQ ID NO: 236829 - protein, 14 aa, Homo sapiens
  CDR3 for alpha chain variable domain of TCR clone 118415 (TRAV35, TRAJ22)
CAVLRPGSARQLTF

SEQ ID NO: 236830 - protein, 14 aa, Homo sapiens
  CDR3 for beta chain variable domain of TCR clone 118415 (TRBV11-3, TRBJ2-3)
CASSSGQGPDTQYF

SEQ ID NO: 236831 - protein, 15 aa, Homo sapiens
  CDR3 for alpha chain variable domain of TCR clone 118416 (TRAV35, TRAJ40)
CAGQLGTSGTYKYMF

SEQ ID NO: 236832 - protein, 14 aa, Homo sapiens
  CDR3 for beta chain variable domain of TCR clone 118416 (TRBV7-3, TRBJ2-1)
CASSLAGGTNEQFF

SEQ ID NO: 236833 - protein, 10 aa, Homo sapiens
  CDR3 for alpha chain variable domain of TCR clone 118417 (TRAV8-2, TRAJ29)
CTGGNTPLVF

SEQ ID NO: 236834 - protein, 17 aa, Homo sapiens
  CDR3 for beta chain variable domain of TCR clone 118417 (TRBV2, TRBJ2-7)
SASSQALTGWDSYEQYF

SEQ ID NO: 236835 - protein, 11 aa, Homo sapiens
  CDR3 for alpha chain variable domain of TCR clone 118418 (TRAV12-2, TRAJ54)
CAVEGAQKLVF

SEQ ID NO: 236836 - protein, 17 aa, Homo sapiens
  CDR3 for beta chain variable domain of TCR clone 118418 (TRBV18, TRBJ1-3)
CASSLYPTGPSGNTIYF

SEQ ID NO: 236837 - protein, 12 aa, Homo sapiens
  CDR3 for alpha chain variable domain of TCR clone 118419 (TRAV38-1, TRAJ47)
CAFETYGNKLVF

SEQ ID NO: 236838 - protein, 12 aa, Homo sapiens
  CDR3 for beta chain variable domain of TCR clone 118419 (TRBV11-2, TRBJ2-2)
CASSLGGGELFF

SEQ ID NO: 236839 - protein, 12 aa, Homo sapiens
  CDR3 for alpha chain variable domain of TCR clone 118420 (TRAV13-1, TRAJ21)
CAAKEGFNKFYF

SEQ ID NO: 236840 - protein, 12 aa, Homo sapiens
  CDR3 for beta chain variable domain of TCR clone 118420 (TRBV14, TRBJ1-1)
CASSQLKGLAFF

SEQ ID NO: 236841 - protein, 16 aa, Homo sapiens
  CDR3 for alpha chain variable domain of TCR clone 118421 (TRAV30, TRAJ44)
CGTEDKRTGTASKLTF

SEQ ID NO: 236842 - protein, 16 aa, Homo sapiens
  CDR3 for beta chain variable domain of TCR clone 118421 (TRBV10-2, TRBJ2-7)
CASSESPGSSGFEKYF

SEQ ID NO: 236843 - protein, 13 aa, Homo sapiens
  CDR3 for alpha chain variable domain of TCR clone 118422 (TRAV20, TRAJ37)
CAGCSSNTDKLIF

SEQ ID NO: 236844 - protein, 11 aa, Homo sapiens
  CDR3 for beta chain variable domain of TCR clone 118422 (TRBV12-4, TRBJ2-3)
CASTATDTQYF

SEQ ID NO: 236845 - protein, 11 aa, Homo sapiens
  CDR3 for alpha chain variable domain of TCR clone 118423 (TRAV12-3, TRAJ27)
CAMANAGKSTF

SEQ ID NO: 236846 - protein, 13 aa, Homo sapiens
  CDR3 for beta chain variable domain of TCR clone 118423 (TRBV3-1, TRBJ1-1)
CASSPGVITVAFF

SEQ ID NO: 236847 - protein, 15 aa, Homo sapiens
  CDR3 for alpha chain variable domain of TCR clone 118424 (TRAV34, TRAJ38)
CGADSTPGNNRKLIW

SEQ ID NO: 236848 - protein, 16 aa, Homo sapiens
  CDR3 for beta chain variable domain of TCR clone 118424 (TRBV12-5, TRBJ2-5)
CASGPRTSGNQETQYF

SEQ ID NO: 236849 - protein, 12 aa, Homo sapiens
  CDR3 for alpha chain variable domain of TCR clone 118425 (TRAV13-1, TRAJ8)
CAALTGFQKLVF

SEQ ID NO: 236850 - protein, 14 aa, Homo sapiens
  CDR3 for beta chain variable domain of TCR clone 118425 (TRBV4-2, TRBJ2-1)
CASGLDRAYNEQFF

SEQ ID NO: 236851 - protein, 15 aa, Homo sapiens
  CDR3 for alpha chain variable domain of TCR clone 118426 (TRAV26-1, TRAJ29)
CIVRVEGSANTPLVF

SEQ ID NO: 236852 - protein, 14 aa, Homo sapiens
  CDR3 for beta chain variable domain of TCR clone 118426 (TRBV18, TRBJ2-5)
CASSPGVSQETQYF

SEQ ID NO: 236853 - protein, 13 aa, Homo sapiens
  CDR3 for alpha chain variable domain of TCR clone 118427 (TRAV36/DV7, TRAJ37)
CAVFSSNTGKLIF

SEQ ID NO: 236854 - protein, 16 aa, Homo sapiens
  CDR3 for beta chain variable domain of TCR clone 118427 (TRBV3-1, TRBJ2-5)
CASSPGQFNGFGIQYF

SEQ ID NO: 236855 - protein, 14 aa, Homo sapiens
  CDR3 for alpha chain variable domain of TCR clone 118428 (TRAV8-4, TRAJ13)
CAVTLSGGYQKVTF

SEQ ID NO: 236856 - protein, 13 aa, Homo sapiens
  CDR3 for beta chain variable domain of TCR clone 118428 (TRBV4-1, TRBJ2-2)
CASSQENTGELFF

SEQ ID NO: 236857 - protein, 13 aa, Homo sapiens
  CDR3 for alpha chain variable domain of TCR clone 118429 (TRAV1-1, TRAJ28)
CVTSGAGSYQLTF

SEQ ID NO: 236858 - protein, 17 aa, Homo sapiens
  CDR3 for beta chain variable domain of TCR clone 118429 (TRBV18, TRBJ2-2)
CASPQRSSGQGPGELFF

SEQ ID NO: 236859 - protein, 13 aa, Homo sapiens
  CDR3 for alpha chain variable domain of TCR clone 118430 (TRAV2, TRAJ40)
CDVVTSGTYKYIF

SEQ ID NO: 236860 - protein, 14 aa, Homo sapiens
  CDR3 for beta chain variable domain of TCR clone 118430 (TRBV19, TRBJ2-1)
CASPTFVLSGGQFF

SEQ ID NO: 236861 - protein, 11 aa, Homo sapiens
  CDR3 for alpha chain variable domain of TCR clone 118431 (TRAV12-2, TRAJ49)
CAVTGGNPFYF

SEQ ID NO: 236862 - protein, 15 aa, Homo sapiens
  CDR3 for beta chain variable domain of TCR clone 118431 (TRBV7-8, TRBJ1-5)
CASSLERRGLEPQHF

SEQ ID NO: 236863 - protein, 19 aa, Homo sapiens
  CDR3 for alpha chain variable domain of TCR clone 118432 (TRAV3, TRAJ6)
CAVRDRNPSRSGGSYIPTS

SEQ ID NO: 236864 - protein, 15 aa, Homo sapiens
  CDR3 for beta chain variable domain of TCR clone 118432 (TRBV18, TRBJ2-7)
CASSPTFMDSYEQYF

SEQ ID NO: 236865 - protein, 14 aa, Homo sapiens
  CDR3 for alpha chain variable domain of TCR clone 118433 (TRAV12-1, TRAJ3)
CVLNPGSSASKIIF

SEQ ID NO: 236866 - protein, 18 aa, Homo sapiens
  CDR3 for beta chain variable domain of TCR clone 118433 (TRBV4-2, TRBJ1-2)
CASSQDKVGHTVNYGYTF

SEQ ID NO: 236867 - protein, 12 aa, Homo sapiens
  CDR3 for alpha chain variable domain of TCR clone 118434 (TRAV21, TRAJ3)
CCFYSSASKIIF

SEQ ID NO: 236868 - protein, 12 aa, Homo sapiens
  CDR3 for beta chain variable domain of TCR clone 118434 (TRBV29-1, TRBJ2-3)
CSVTGGADTQYF

SEQ ID NO: 236869 - protein, 14 aa, Homo sapiens
  CDR3 for alpha chain variable domain of TCR clone 118435 (TRAV38-1, TRAJ45)
CAYYSGGGADGLTF

SEQ ID NO: 236870 - protein, 14 aa, Homo sapiens
  CDR3 for beta chain variable domain of TCR clone 118435 (TRBV13, TRBJ2-7)
CASSLKGASYEQYF

SEQ ID NO: 236871 - protein, 15 aa, Homo sapiens
  CDR3 for alpha chain variable domain of TCR clone 118436 (TRAV8-4, TRAJ53)
CAVSDGGGSNYKLTF

SEQ ID NO: 236872 - protein, 14 aa, Homo sapiens
  CDR3 for beta chain variable domain of TCR clone 118436 (TRBV12-4, TRBJ1-1)
CASSLGTGGTEAFF

SEQ ID NO: 236873 - protein, 13 aa, Homo sapiens
  CDR3 for alpha chain variable domain of TCR clone 118437 (TRAV29/DV5, TRAJ31)
CAASRNNNARLMF

SEQ ID NO: 236874 - protein, 13 aa, Homo sapiens
  CDR3 for beta chain variable domain of TCR clone 118437 (TRBV12-5, TRBJ2-3)
CASGDRQSDTQYF

SEQ ID NO: 236875 - protein, 12 aa, Homo sapiens
  CDR3 for alpha chain variable domain of TCR clone 118438 (TRAV13-1, TRAJ20)
CAASRGDYKLSF

SEQ ID NO: 236876 - protein, 14 aa, Homo sapiens
  CDR3 for beta chain variable domain of TCR clone 118438 (TRBV5-1, TRBJ2-3)
CASSDRGSTDTQYF

SEQ ID NO: 236877 - protein, 16 aa, Homo sapiens
  CDR3 for alpha chain variable domain of TCR clone 118439 (TRAV14/DV4, TRAJ17)
CAMREAGRAAGNKLTF

SEQ ID NO: 236878 - protein, 13 aa, Homo sapiens
  CDR3 for beta chain variable domain of TCR clone 118439 (TRBV6-1, TRBJ1-1)
CASSWTVDTEAFF

SEQ ID NO: 236879 - protein, 13 aa, Homo sapiens
  CDR3 for alpha chain variable domain of TCR clone 118440 (TRAV12-3, TRAJ33)
CAMSVNSNYQLIW

SEQ ID NO: 236880 - protein, 14 aa, Homo sapiens
  CDR3 for beta chain variable domain of TCR clone 118440 (TRBV19, TRBJ2-2)
CASSTGQGAGELFF

SEQ ID NO: 236881 - protein, 17 aa, Homo sapiens
  CDR3 for alpha chain variable domain of TCR clone 118441 (TRAV3, TRAJ42)
CAVRDRYYGGSQGNLIF

SEQ ID NO: 236882 - protein, 14 aa, Homo sapiens
  CDR3 for beta chain variable domain of TCR clone 118441 (TRBV25-1, TRBJ1-1)
CASTHLGGNTEAFF

SEQ ID NO: 236883 - protein, 14 aa, Homo sapiens
  CDR3 for alpha chain variable domain of TCR clone 118442 (TRAV12-2, TRAJ45)
CAVYSGGGADGLTF

SEQ ID NO: 236884 - protein, 15 aa, Homo sapiens
  CDR3 for beta chain variable domain of TCR clone 118442 (TRBV4-1, TRBJ1-4)
CASSDTGGTNEILFF

SEQ ID NO: 236885 - protein, 12 aa, Homo sapiens
  CDR3 for alpha chain variable domain of TCR clone 118443 (TRAV36/DV7, TRAJ37)
CACYGNTGKLIF

SEQ ID NO: 236886 - protein, 14 aa, Homo sapiens
  CDR3 for beta chain variable domain of TCR clone 118443 (TRBV19, TRBJ2-1)
CASPTFVLSGEQFF

SEQ ID NO: 236887 - protein, 12 aa, Homo sapiens
  CDR3 for alpha chain variable domain of TCR clone 118444 (TRAV3, TRAJ20)
CAVRDGDYKLSF

SEQ ID NO: 236888 - protein, 16 aa, Homo sapiens
  CDR3 for beta chain variable domain of TCR clone 118444 (TRBV24-1, TRBJ2-3)
CATSDPGTGATDTQYF

SEQ ID NO: 236889 - protein, 12 aa, Homo sapiens
  CDR3 for alpha chain variable domain of TCR clone 118445 (TRAV21, TRAJ31)
CAVWGNNARLMF

SEQ ID NO: 236890 - protein, 19 aa, Homo sapiens
  CDR3 for beta chain variable domain of TCR clone 118445 (TRBV25-1, TRBJ2-2)
CAILVYRVDRGRKTGELFF

SEQ ID NO: 236891 - protein, 13 aa, Homo sapiens
  CDR3 for alpha chain variable domain of TCR clone 118446 (TRAV27, TRAJ6)
CAGGTSGSYIPTF

SEQ ID NO: 236892 - protein, 14 aa, Homo sapiens
  CDR3 for beta chain variable domain of TCR clone 118446 (TRBV6-3, TRBJ1-1)
CASSYQRRDTEAFF

SEQ ID NO: 236893 - protein, 11 aa, Homo sapiens
  CDR3 for alpha chain variable domain of TCR clone 118447 (TRAV12-3, TRAJ41)
CAMNAREALSF

SEQ ID NO: 236894 - protein, 16 aa, Homo sapiens
  CDR3 for beta chain variable domain of TCR clone 118447 (TRBV7-8, TRBJ2-3)
CASSTEGQRETDTQYF

SEQ ID NO: 236895 - protein, 12 aa, Homo sapiens
  CDR3 for alpha chain variable domain of TCR clone 118448 (TRAV2, TRAJ33)
CAVPDSNYQLVW

SEQ ID NO: 236896 - protein, 15 aa, Homo sapiens
  CDR3 for beta chain variable domain of TCR clone 118448 (TRBV29-1, TRBJ2-7)
CSVEFFDRGSYEQYF

SEQ ID NO: 236897 - protein, 15 aa, Homo sapiens
  CDR3 for alpha chain variable domain of TCR clone 118449 (TRAV17, TRAJ56)
CATEPFTGANSKLTF

SEQ ID NO: 236898 - protein, 15 aa, Homo sapiens
  CDR3 for beta chain variable domain of TCR clone 118449 (TRBV28, TRBJ1-5)
CASSRTGGYVKPQHF

SEQ ID NO: 236899 - protein, 14 aa, Homo sapiens
  CDR3 for alpha chain variable domain of TCR clone 118450 (TRAV8-6, TRAJ49)
CAVSVRYTGNQFYF

SEQ ID NO: 236900 - protein, 19 aa, Homo sapiens
  CDR3 for beta chain variable domain of TCR clone 118450 (TRBV28, TRBJ2-1)
CASSFSSRGSGRTRYEQFF

SEQ ID NO: 236901 - protein, 14 aa, Homo sapiens
  CDR3 for alpha chain variable domain of TCR clone 118451 (TRAV8-4, TRAJ9)
CAVTFNTGGFKNIF

SEQ ID NO: 236902 - protein, 15 aa, Homo sapiens
  CDR3 for beta chain variable domain of TCR clone 118451 (TRBV7-9, TRBJ2-2)
CASSPETGAGGELFF

SEQ ID NO: 236903 - protein, 14 aa, Homo sapiens
  CDR3 for alpha chain variable domain of TCR clone 118452 (TRAV8-3, TRAJ9)
CAVVYNSGGFKTIF

SEQ ID NO: 236904 - protein, 14 aa, Homo sapiens
  CDR3 for beta chain variable domain of TCR clone 118452 (TRBV7-3, TRBJ2-2)
CASSSGGYTGELFF

SEQ ID NO: 236905 - protein, 16 aa, Homo sapiens
  CDR3 for alpha chain variable domain of TCR clone 118453 (TRAV17, TRAJ17)
CATALQEEAAGNKLTF

SEQ ID NO: 236906 - protein, 12 aa, Homo sapiens
  CDR3 for beta chain variable domain of TCR clone 118453 (TRBV7-9, TRBJ1-5)
CASSPQGQPQHF

SEQ ID NO: 236907 - protein, 15 aa, Homo sapiens
  CDR3 for alpha chain variable domain of TCR clone 118454 (TRAV1-2, TRAJ28)
CAVQYSGAGSYKLTF

SEQ ID NO: 236908 - protein, 13 aa, Homo sapiens
  CDR3 for beta chain variable domain of TCR clone 118454 (TRBV4-2, TRBJ1-1)
CASSQAGNTEAFF

SEQ ID NO: 236909 - protein, 11 aa, Homo sapiens
  CDR3 for alpha chain variable domain of TCR clone 118455 (TRAV13-1, TRAJ15)
CAATPGTALIF

SEQ ID NO: 236910 - protein, 13 aa, Homo sapiens
  CDR3 for beta chain variable domain of TCR clone 118455 (TRBV7-9, TRBJ2-4)
CATEGLAGNIQYF

SEQ ID NO: 236911 - protein, 12 aa, Homo sapiens
  CDR3 for alpha chain variable domain of TCR clone 118456 (TRAV23/DV6, TRAJ17)
CSRGSCRQQANF

SEQ ID NO: 236912 - protein, 14 aa, Homo sapiens
  CDR3 for beta chain variable domain of TCR clone 118456 (TRBV7-2, TRBJ1-2)
CASSQTGSTYGYTF

SEQ ID NO: 236913 - protein, 15 aa, Homo sapiens
  CDR3 for alpha chain variable domain of TCR clone 118457 (TRAV12-3, TRAJ27)
CAMRAYNTNAGKSTF

SEQ ID NO: 236914 - protein, 15 aa, Homo sapiens
  CDR3 for beta chain variable domain of TCR clone 118457 (TRBV6-1, TRBJ2-3)
CASSERGGITDTQYF

SEQ ID NO: 236915 - protein, 14 aa, Homo sapiens
  CDR3 for alpha chain variable domain of TCR clone 118458 (TRAV23/DV6, TRAJ4)
CAAPSSGGYNKLIF

SEQ ID NO: 236916 - protein, 13 aa, Homo sapiens
  CDR3 for beta chain variable domain of TCR clone 118458 (TRBV7-2, TRBJ2-5)
CASSRGGLETQYF

SEQ ID NO: 236917 - protein, 11 aa, Homo sapiens
  CDR3 for alpha chain variable domain of TCR clone 118459 (TRAV17, TRAJ36)
CAPTVANNLFF

SEQ ID NO: 236918 - protein, 13 aa, Homo sapiens
  CDR3 for beta chain variable domain of TCR clone 118459 (TRBV20-1, TRBJ1-1)
CSAPPGGHTEAFF

SEQ ID NO: 236919 - protein, 17 aa, Homo sapiens
  CDR3 for alpha chain variable domain of TCR clone 118460 (TRAV17, TRAJ28)
CATDPRRGGAGCYQLTF

SEQ ID NO: 236920 - protein, 16 aa, Homo sapiens
  CDR3 for beta chain variable domain of TCR clone 118460 (TRBV25-1, TRBJ1-1)
CASSGDRDRGRIEAFF

SEQ ID NO: 236921 - protein, 13 aa, Homo sapiens
  CDR3 for alpha chain variable domain of TCR clone 118461 (TRAV1-2, TRAJ9)
CAALNTGGFKTIF

SEQ ID NO: 236922 - protein, 13 aa, Homo sapiens
  CDR3 for beta chain variable domain of TCR clone 118461 (TRBV19, TRBJ1-2)
CASSVPGQDGYTY

SEQ ID NO: 236923 - protein, 14 aa, Homo sapiens
  CDR3 for alpha chain variable domain of TCR clone 118462 (TRAV8-4, TRAJ8)
CAVSVGTGFQKLVF

SEQ ID NO: 236924 - protein, 14 aa, Homo sapiens
  CDR3 for beta chain variable domain of TCR clone 118462 (TRBV6-1, TRBJ1-3)
CASVQGGGGNTIYF

SEQ ID NO: 236925 - protein, 14 aa, Homo sapiens
  CDR3 for alpha chain variable domain of TCR clone 118463 (TRAV20, TRAJ56)
CAVQFGGANSKLTF

SEQ ID NO: 236926 - protein, 13 aa, Homo sapiens
  CDR3 for beta chain variable domain of TCR clone 118463 (TRBV4-1, TRBJ2-7)
CASSQGQAYEQYF

SEQ ID NO: 236927 - protein, 12 aa, Homo sapiens
  CDR3 for alpha chain variable domain of TCR clone 118464 (TRAV26-1, TRAJ36)
CIVRVRADNLFF

SEQ ID NO: 236928 - protein, 15 aa, Homo sapiens
  CDR3 for beta chain variable domain of TCR clone 118464 (TRBV28, TRBJ1-3)
CASSMGWASGNTIYF

SEQ ID NO: 236929 - protein, 13 aa, Homo sapiens
  CDR3 for alpha chain variable domain of TCR clone 118465 (TRAV25, TRAJ30)
CAGRVDRDDKIIF

SEQ ID NO: 236930 - protein, 17 aa, Homo sapiens
  CDR3 for beta chain variable domain of TCR clone 118465 (TRBV7-9, TRBJ2-6)
CASSFGAGYCGANVLTF

SEQ ID NO: 236931 - protein, 12 aa, Homo sapiens
  CDR3 for alpha chain variable domain of TCR clone 118466 (TRAV13-1, TRAJ21)
CAAKEGFDRFYF

SEQ ID NO: 236932 - protein, 15 aa, Homo sapiens
  CDR3 for beta chain variable domain of TCR clone 118466 (TRBV25-1, TRBJ1-4)
CASSPGDSTNEKLFF

SEQ ID NO: 236933 - protein, 14 aa, Homo sapiens
  CDR3 for alpha chain variable domain of TCR clone 118467 (TRAV21, TRAJ28)
CAVGSGAGGYQLTF

SEQ ID NO: 236934 - protein, 14 aa, Homo sapiens
  CDR3 for beta chain variable domain of TCR clone 118467 (TRBV18, TRBJ1-4)
CASSPGPNGEKLFF

SEQ ID NO: 236935 - protein, 12 aa, Homo sapiens
  CDR3 for alpha chain variable domain of TCR clone 118468 (TRAV12-3, TRAJ17)
CAMTLTGNKLTF

SEQ ID NO: 236936 - protein, 16 aa, Homo sapiens
  CDR3 for beta chain variable domain of TCR clone 118468 (TRBV4-1, TRBJ1-5)
CASSQGGHTTNQPQHF

SEQ ID NO: 236937 - protein, 14 aa, Homo sapiens
  CDR3 for alpha chain variable domain of TCR clone 118469 (TRAV12-3, TRAJ10)
SHLPLTGGGNKLTF

SEQ ID NO: 236938 - protein, 13 aa, Homo sapiens
  CDR3 for beta chain variable domain of TCR clone 118469 (TRBV7-7, TRBJ2-1)
CASSLYLGNEQFF

SEQ ID NO: 236939 - protein, 12 aa, Homo sapiens
  CDR3 for alpha chain variable domain of TCR clone 118470 (TRAV13-1, TRAJ21)
CAAREGFNKFYF

SEQ ID NO: 236940 - protein, 14 aa, Homo sapiens
  CDR3 for beta chain variable domain of TCR clone 118470 (TRBV5-1, TRBJ2-7)
CASSRGESLYEQYF

SEQ ID NO: 236941 - protein, 15 aa, Homo sapiens
  CDR3 for alpha chain variable domain of TCR clone 118471 (TRAV4, TRAJ10)
CLVGDGSGGGNKLTF

SEQ ID NO: 236942 - protein, 13 aa, Homo sapiens
  CDR3 for beta chain variable domain of TCR clone 118471 (TRBV7-9, TRBJ2-7)
CASSAGLQYEQYF

SEQ ID NO: 236943 - protein, 18 aa, Homo sapiens
  CDR3 for alpha chain variable domain of TCR clone 118472 (TRAV29/DV5, TRAJ37)
CSVLLCSEGSGNTGKLIF

SEQ ID NO: 236944 - protein, 15 aa, Homo sapiens
  CDR3 for beta chain variable domain of TCR clone 118472 (TRBV11-3, TRBJ2-1)
CASSNGGGSSNEQFF

SEQ ID NO: 236945 - protein, 11 aa, Homo sapiens
  CDR3 for alpha chain variable domain of TCR clone 118473 (TRAV12-2, TRAJ45)
CALPEEEVLTD

SEQ ID NO: 236946 - protein, 14 aa, Homo sapiens
  CDR3 for beta chain variable domain of TCR clone 118473 (TRBV18, TRBJ1-5)
CASSPGNSNQPQHF

SEQ ID NO: 236947 - protein, 14 aa, Homo sapiens
  CDR3 for alpha chain variable domain of TCR clone 118474 (TRAV13-1, TRAJ23)
CAAGRLGRGGKLIF

SEQ ID NO: 236948 - protein, 15 aa, Homo sapiens
  CDR3 for beta chain variable domain of TCR clone 118474 (TRBV7-2, TRBJ2-1)
CASSLVAGRYNEQFF

SEQ ID NO: 236949 - protein, 14 aa, Homo sapiens
  CDR3 for alpha chain variable domain of TCR clone 118475 (TRAV17, TRAJ6)
CATVFQGGSYIPTF

SEQ ID NO: 236950 - protein, 14 aa, Homo sapiens
  CDR3 for beta chain variable domain of TCR clone 118475 (TRBV19, TRBJ2-1)
CASPTFVLSGEQFF

SEQ ID NO: 236951 - protein, 14 aa, Homo sapiens
  CDR3 for alpha chain variable domain of TCR clone 118476 (TRAV1-2, TRAJ16)
CAVNRFSDGQKLLF

SEQ ID NO: 236952 - protein, 15 aa, Homo sapiens
  CDR3 for beta chain variable domain of TCR clone 118476 (TRBV28, TRBJ2-5)
CANSPPWSYQGTQYF

SEQ ID NO: 236953 - protein, 14 aa, Homo sapiens
  CDR3 for alpha chain variable domain of TCR clone 118477 (TRAV12-2, TRAJ13)
CAVRKTGGYQKVTF

SEQ ID NO: 236954 - protein, 15 aa, Homo sapiens
  CDR3 for beta chain variable domain of TCR clone 118477 (TRBV27, TRBJ2-1)
CASSNGGGSSNEQLF

SEQ ID NO: 236955 - protein, 14 aa, Homo sapiens
  CDR3 for alpha chain variable domain of TCR clone 118478 (TRAV26-1, TRAJ38)
CIADNAGDNRKLIW

SEQ ID NO: 236956 - protein, 14 aa, Homo sapiens
  CDR3 for beta chain variable domain of TCR clone 118478 (TRBV4-1, TRBJ2-2)
CASSQAVNTGELFF

SEQ ID NO: 236957 - protein, 13 aa, Homo sapiens
  CDR3 for alpha chain variable domain of TCR clone 118479 (TRAV3, TRAJ20)
CAVRSLNDYKLSF

SEQ ID NO: 236958 - protein, 12 aa, Homo sapiens
  CDR3 for beta chain variable domain of TCR clone 118479 (TRBV7-3, TRBJ1-1)
CQQPGLGAEAFF

SEQ ID NO: 236959 - protein, 11 aa, Homo sapiens
  CDR3 for alpha chain variable domain of TCR clone 118480 (TRAV17, TRAJ9)
CATTGGFKTIF

SEQ ID NO: 236960 - protein, 15 aa, Homo sapiens
  CDR3 for beta chain variable domain of TCR clone 118480 (TRBV7-2, TRBJ2-1)
CASSSGLAGGNEQFF

SEQ ID NO: 236961 - protein, 13 aa, Homo sapiens
  CDR3 for alpha chain variable domain of TCR clone 118481 (TRAV13-2, TRAJ48)
CAEMDFGNEKLTF

SEQ ID NO: 236962 - protein, 13 aa, Homo sapiens
  CDR3 for beta chain variable domain of TCR clone 118481 (TRBV27, TRBJ2-1)
CASRTLGVGEQFF

SEQ ID NO: 236963 - protein, 16 aa, Homo sapiens
  CDR3 for alpha chain variable domain of TCR clone 118482 (TRAV30, TRAJ24)
CGTEIVDADSWGKFQF

SEQ ID NO: 236964 - protein, 13 aa, Homo sapiens
  CDR3 for beta chain variable domain of TCR clone 118482 (TRBV7-2, TRAJ28)
CASSLAGLEKLFF

SEQ ID NO: 236965 - protein, 13 aa, Homo sapiens
  CDR3 for alpha chain variable domain of TCR clone 118483 (TRAV27, TRAJ57)
CAGFQGGSEKLVF

SEQ ID NO: 236966 - protein, 14 aa, Homo sapiens
  CDR3 for beta chain variable domain of TCR clone 118483 (TRBV20-1, TRBJ1-2)
CSGRKDGRAYGYAF

SEQ ID NO: 236967 - protein, 13 aa, Homo sapiens
  CDR3 for alpha chain variable domain of TCR clone 118484 (TRAV30, TRAJ24)
CGTVTDSWGKLQF

SEQ ID NO: 236968 - protein, 15 aa, Homo sapiens
  CDR3 for beta chain variable domain of TCR clone 118484 (TRBV7-9, TRBJ1-5)
CASSQGHQPNQPQHF

SEQ ID NO: 236969 - protein, 13 aa, Homo sapiens
  CDR3 for alpha chain variable domain of TCR clone 118485 (TRAV21, TRAJ57)
CAVTQGGSEKLVF

SEQ ID NO: 236970 - protein, 15 aa, Homo sapiens
  CDR3 for beta chain variable domain of TCR clone 118485 (TRBV18, TRBJ2-1)
CASLPDRGRDNEQFF

SEQ ID NO: 236971 - protein, 15 aa, Homo sapiens
  CDR3 for alpha chain variable domain of TCR clone 118486 (TRAV23/DV6, TRAJ12)
CAAIDPGAMDSSYKL

SEQ ID NO: 236972 - protein, 12 aa, Homo sapiens
  CDR3 for beta chain variable domain of TCR clone 118486 (TRBV10-3, TRBJ2-2)
CAIRENTGELFF

SEQ ID NO: 236973 - protein, 15 aa, Homo sapiens
  CDR3 for alpha chain variable domain of TCR clone 118487 (TRAV8-3, TRAJ27)
CSVGPSKTNAGKSTF

SEQ ID NO: 236974 - protein, 12 aa, Homo sapiens
  CDR3 for beta chain variable domain of TCR clone 118487 (TRBV11-2, TRBJ2-2)
CASSLGGGELFF

SEQ ID NO: 236975 - protein, 13 aa, Homo sapiens
  CDR3 for alpha chain variable domain of TCR clone 118488 (TRAV27, TRAJ6)
CAGGTRGSYIPTF

SEQ ID NO: 236976 - protein, 16 aa, Homo sapiens
  CDR3 for beta chain variable domain of TCR clone 118488 (TRBV18, TRBJ2-4)
CASSPPYSGAKNIQYF

SEQ ID NO: 236977 - protein, 11 aa, Homo sapiens
  CDR3 for alpha chain variable domain of TCR clone 118489 (TRAV2, TRAJ13)
CASGGYQKVTF

SEQ ID NO: 236978 - protein, 17 aa, Homo sapiens
  CDR3 for beta chain variable domain of TCR clone 118489 (TRBV4-2, TRBJ1-1)
CASTQFGGGSGNTEAFF

SEQ ID NO: 236979 - protein, 17 aa, Homo sapiens
  CDR3 for alpha chain variable domain of TCR clone 118490 (TRAV3, TRAJ38)
CAVRDCLNAGNNRKLIW

SEQ ID NO: 236980 - protein, 13 aa, Homo sapiens
  CDR3 for beta chain variable domain of TCR clone 118490 (TRBV23-1, TRBJ1-4)
CASRGRFNEKLFF

SEQ ID NO: 236981 - protein, 11 aa, Homo sapiens
  CDR3 for alpha chain variable domain of TCR clone 118491 (TRAV3, TRAJ21)
CAVCNFNKFYF

SEQ ID NO: 236982 - protein, 14 aa, Homo sapiens
  CDR3 for beta chain variable domain of TCR clone 118491 (TRBV29-1, TRBJ2-2)
CSGRGSGNTGELFF

SEQ ID NO: 236983 - protein, 10 aa, Homo sapiens
  CDR3 for alpha chain variable domain of TCR clone 118492 (TRAV38-1, TRAJ34)
CAFMDDKLIF

SEQ ID NO: 236984 - protein, 18 aa, Homo sapiens
  CDR3 for beta chain variable domain of TCR clone 118492 (TRBV11-2, TRBJ2-3)
CASSLGGASRGAPNTQYF

SEQ ID NO: 236985 - protein, 11 aa, Homo sapiens
  CDR3 for alpha chain variable domain of TCR clone 118493 (TRAV2, TRAJ33)
CAVESNYLLIW

SEQ ID NO: 236986 - protein, 15 aa, Homo sapiens
  CDR3 for beta chain variable domain of TCR clone 118493 (TRBV19, TRBJ1-1)
CASTSGQIQDTEAFF

SEQ ID NO: 236987 - protein, 13 aa, Homo sapiens
  CDR3 for alpha chain variable domain of TCR clone 118494 (TRAV2, TRAJ15)
CAVASQAGTALIF

SEQ ID NO: 236988 - protein, 14 aa, Homo sapiens
  CDR3 for beta chain variable domain of TCR clone 118494 (TRBV11-2, TRBJ2-5)
CASSLDLGRETQYF

SEQ ID NO: 236989 - protein, 15 aa, Homo sapiens
  CDR3 for alpha chain variable domain of TCR clone 118495 (TRAV2, TRAJ13)
CATPSYSGGYQTVTF

SEQ ID NO: 236990 - protein, 14 aa, Homo sapiens
  CDR3 for beta chain variable domain of TCR clone 118495 (TRBV11-2, TRBJ2-3)
CASSRLARTDTQYF

SEQ ID NO: 236991 - protein, 14 aa, Homo sapiens
  CDR3 for alpha chain variable domain of TCR clone 118496 (TRAV30, TRAJ26)
CGTEIVSYVQNFVF

SEQ ID NO: 236992 - protein, 13 aa, Homo sapiens
  CDR3 for beta chain variable domain of TCR clone 118496 (TRBV19, TRBJ1-3)
CASRLSLGNTIYF

SEQ ID NO: 236993 - protein, 14 aa, Homo sapiens
  CDR3 for alpha chain variable domain of TCR clone 118497 (TRAV1-2, TRAJ16)
CAVNRFSDGQKLLF

SEQ ID NO: 236994 - protein, 23 aa, Homo sapiens
  CDR3 for beta chain variable domain of TCR clone 118497 (TRBV4-2, TRBJ2-3)
CASSQDPPRASSISGGRGDTQYF

SEQ ID NO: 236995 - protein, 13 aa, Homo sapiens
  CDR3 for alpha chain variable domain of TCR clone 118498 (TRAV21, TRAJ58)
CAVKGASGSRLTF

SEQ ID NO: 236996 - protein, 13 aa, Homo sapiens
  CDR3 for beta chain variable domain of TCR clone 118498 (TRBV7-3, TRBJ1-1)
CASSQDWGAEAFF

SEQ ID NO: 236997 - protein, 14 aa, Homo sapiens
  CDR3 for alpha chain variable domain of TCR clone 118499 (TRAV3, TRAJ27)
CAVRDDTNAGKSTF

SEQ ID NO: 236998 - protein, 15 aa, Homo sapiens
  CDR3 for beta chain variable domain of TCR clone 118499 (TRBV7-7, TRBJ2-2)
CATSKRAKNTGELFF

SEQ ID NO: 236999 - protein, 13 aa, Homo sapiens
  CDR3 for alpha chain variable domain of TCR clone 118500 (TRAV35, TRAJ42)
CAGFPGSQGNLIF

SEQ ID NO: 237000 - protein, 13 aa, Homo sapiens
  CDR3 for beta chain variable domain of TCR clone 118500 (TRBV29-1, TRBJ2-1)
YSVEGGRVNEQFF

SEQ ID NO: 237001 - protein, 14 aa, Homo sapiens
  CDR3 for alpha chain variable domain of TCR clone 118501 (TRAV12-3, TRAJ29)
CAMSPNSGNTPLVF

SEQ ID NO: 237002 - protein, 15 aa, Homo sapiens
  CDR3 for beta chain variable domain of TCR clone 118501 (TRBV27, TRBJ2-1)
CASSNGGGSSNEQFF

SEQ ID NO: 237003 - protein, 13 aa, Homo sapiens
  CDR3 for alpha chain variable domain of TCR clone 118502 (TRAV35, TRAJ33)
CAGQLDGVYQLIW

SEQ ID NO: 237004 - protein, 14 aa, Homo sapiens
  CDR3 for beta chain variable domain of TCR clone 118502 (TRBV7-2, TRBJ1-1)
CASSLGGAGTGAFF

SEQ ID NO: 237005 - protein, 20 aa, Homo sapiens
  CDR3 for alpha chain variable domain of TCR clone 118503 (TRAV1-1, TRAJ4)
CLLLLRCEGFLSGGYNKLIF

SEQ ID NO: 237006 - protein, 14 aa, Homo sapiens
  CDR3 for beta chain variable domain of TCR clone 118503 (TRBV20-1, TRBJ2-1)
CSAQIGGSANEQFF

SEQ ID NO: 237007 - protein, 14 aa, Homo sapiens
  CDR3 for alpha chain variable domain of TCR clone 118504 (TRAV1-2, TRAJ8)
CAVREDTGFQKLVL

SEQ ID NO: 237008 - protein, 15 aa, Homo sapiens
  CDR3 for beta chain variable domain of TCR clone 118504 (TRBV27, TRBJ2-1)
CASSNGGGSSNEQFF

SEQ ID NO: 237009 - protein, 15 aa, Homo sapiens
  CDR3 for alpha chain variable domain of TCR clone 118505 (TRAV3, TRAJ4)
CAVRDGTGGYNKLIF

SEQ ID NO: 237010 - protein, 17 aa, Homo sapiens
  CDR3 for beta chain variable domain of TCR clone 118505 (TRBV28, TRBJ2-2)
CASSSYSYRGNTGELFF

SEQ ID NO: 237011 - protein, 13 aa, Homo sapiens
  CDR3 for alpha chain variable domain of TCR clone 118506 (TRAV13-2, TRAJ53)
CAENMGSNYKLTF

SEQ ID NO: 237012 - protein, 12 aa, Homo sapiens
  CDR3 for beta chain variable domain of TCR clone 118506 (TRBV11-2, TRBJ2-2)
CASSLGGGELFF

SEQ ID NO: 237013 - protein, 11 aa, Homo sapiens
  CDR3 for alpha chain variable domain of TCR clone 118507 (TRAV1-1, TRAJ23)
CAVRQGGKLIF

SEQ ID NO: 237014 - protein, 14 aa, Homo sapiens
  CDR3 for beta chain variable domain of TCR clone 118507 (TRBV19, TRBJ2-1)
GASPTFVLSGEQFF

SEQ ID NO: 237015 - protein, 15 aa, Homo sapiens
  CDR3 for alpha chain variable domain of TCR clone 118508 (TRAV35, TRAJ40)
CAGQLGTSGSYKYIF

SEQ ID NO: 237016 - protein, 14 aa, Homo sapiens
  CDR3 for beta chain variable domain of TCR clone 118508 (TRBV7-3, TRBJ2-1)
CASSLAGGTNEQFF

SEQ ID NO: 237017 - protein, 19 aa, Homo sapiens
  CDR3 for alpha chain variable domain of TCR clone 118509 (TRAV26-1, TRAJ52)
CIVRAHRNAGGTSYGKLTF

SEQ ID NO: 237018 - protein, 13 aa, Homo sapiens
  CDR3 for beta chain variable domain of TCR clone 118509 (TRBV19, TRBJ1-2)
CASSVPGQDGYTF

SEQ ID NO: 237019 - protein, 14 aa, Homo sapiens
  CDR3 for alpha chain variable domain of TCR clone 118510 (TRAV26-1, TRAJ54)
CIVRRTQGAQKLVF

SEQ ID NO: 237020 - protein, 13 aa, Homo sapiens
  CDR3 for beta chain variable domain of TCR clone 118510 (TRBV7-9, TRBJ1-2)
CASSLKQNYGYTF

SEQ ID NO: 237021 - protein, 16 aa, Homo sapiens
  CDR3 for alpha chain variable domain of TCR clone 118511 (TRAV30, TRAJ24)
CGTEIVDADSWGKFQF

SEQ ID NO: 237022 - protein, 14 aa, Homo sapiens
  CDR3 for beta chain variable domain of TCR clone 118511 (TRBV27, TRBJ2-1)
CASRHLGGGKEQFF

SEQ ID NO: 237023 - protein, 14 aa, Homo sapiens
  CDR3 for alpha chain variable domain of TCR clone 118512 (TRAV8-2, TRAJ37)
CVVSISSNTGKLIF

SEQ ID NO: 237024 - protein, 13 aa, Homo sapiens
  CDR3 for beta chain variable domain of TCR clone 118512 (TRBV7-8, TRBJ2-7)
RRVRLTEMGEQYF

SEQ ID NO: 237025 - protein, 14 aa, Homo sapiens
  CDR3 for alpha chain variable domain of TCR clone 118513 (TRAV16, TRAJ48)
CALTPGFGNEQLTF

SEQ ID NO: 237026 - protein, 14 aa, Homo sapiens
  CDR3 for beta chain variable domain of TCR clone 118513 (TRBV7-2, TRBJ2-7)
CASSSISGFSEQYF

SEQ ID NO: 237027 - protein, 15 aa, Homo sapiens
  CDR3 for alpha chain variable domain of TCR clone 118514 (TRAV13-1, TRAJ11)
CAASDRNSGYSTLTF

SEQ ID NO: 237028 - protein, 11 aa, Homo sapiens
  CDR3 for beta chain variable domain of TCR clone 118514 (TRBV20-1, TRBJ2-7)
CSARLSYEQYF

SEQ ID NO: 237029 - protein, 15 aa, Homo sapiens
  CDR3 for alpha chain variable domain of TCR clone 118515 (TRAV3, TRAJ22)
CAVRDRGGSARQLPF

SEQ ID NO: 237030 - protein, 14 aa, Homo sapiens
  CDR3 for beta chain variable domain of TCR clone 118515 (TRBV20-1, TRBJ2-5)
CSALVPGYQETQYF

SEQ ID NO: 237031 - protein, 12 aa, Homo sapiens
  CDR3 for alpha chain variable domain of TCR clone 118516 (TRAV8-3, TRAJ41)
CAVALSGYALNF

SEQ ID NO: 237032 - protein, 15 aa, Homo sapiens
  CDR3 for beta chain variable domain of TCR clone 118516 (TRBV11-2, TRBJ2-1)
CASSKNRGLIYEQFF

SEQ ID NO: 237033 - protein, 13 aa, Homo sapiens
  CDR3 for alpha chain variable domain of TCR clone 118517 (TRAV21, TRAJ27)
CAALNTNAGKSTL

SEQ ID NO: 237034 - protein, 14 aa, Homo sapiens
  CDR3 for beta chain variable domain of TCR clone 118517 (TRBV27, TRBJ1-1)
CASSLLSGLSEAFF

SEQ ID NO: 237035 - protein, 16 aa, Homo sapiens
  CDR3 for alpha chain variable domain of TCR clone 118518 (TRAV3, TRAJ28)
CAVLPRSGAGSYQLTF

SEQ ID NO: 237036 - protein, 15 aa, Homo sapiens
  CDR3 for beta chain variable domain of TCR clone 118518 (TRBV10-2, TRBJ2-6)
CASSEQGTGANVLTF

SEQ ID NO: 237037 - protein, 16 aa, Homo sapiens
  CDR3 for alpha chain variable domain of TCR clone 118519 (TRAV27, TRAJ13)
CAGAKSDSGGYQKVTF

SEQ ID NO: 237038 - protein, 12 aa, Homo sapiens
  CDR3 for beta chain variable domain of TCR clone 118519 (TRBV12-4, TRBJ2-7)
CASSLGGYEQYF

SEQ ID NO: 237039 - protein, 15 aa, Homo sapiens
  CDR3 for alpha chain variable domain of TCR clone 118520 (TRAV17, TRAJ57)
CATGPSQGGSEKLVF

SEQ ID NO: 237040 - protein, 12 aa, Homo sapiens
  CDR3 for beta chain variable domain of TCR clone 118520 (TRBV11-2, TRBJ2-2)
CASSLPTGELFF

SEQ ID NO: 237041 - protein, 12 aa, Homo sapiens
  CDR3 for alpha chain variable domain of TCR clone 118521 (TRAV12-3, TRAJ17)
CAMTLTGNKLTF

SEQ ID NO: 237042 - protein, 15 aa, Homo sapiens
  CDR3 for beta chain variable domain of TCR clone 118521 (TRBV19, TRBJ2-1)
CASSIQATSYNEQFF

SEQ ID NO: 237043 - protein, 13 aa, Homo sapiens
  CDR3 for alpha chain variable domain of TCR clone 118522 (TRAV12-2, TRAJ12)
CAVNWDSSYKLIF

SEQ ID NO: 237044 - protein, 15 aa, Homo sapiens
  CDR3 for beta chain variable domain of TCR clone 118522 (TRBV5-1, TRBJ2-3)
CASSVTSGSTDTQYF

SEQ ID NO: 237045 - protein, 16 aa, Homo sapiens
  CDR3 for alpha chain variable domain of TCR clone 118523 (TRAV30, TRAJ24)
CGTEIVDADSWGKFQF

SEQ ID NO: 237046 - protein, 14 aa, Homo sapiens
  CDR3 for beta chain variable domain of TCR clone 118523 (TRBV11-2, TRBJ2-3)
CASSLYAGRDTQYF

SEQ ID NO: 237047 - protein, 13 aa, Homo sapiens
  CDR3 for alpha chain variable domain of TCR clone 118524 (TRAV27, TRAJ57)
CRSAQGGSEKLVF

SEQ ID NO: 237048 - protein, 16 aa, Homo sapiens
  CDR3 for beta chain variable domain of TCR clone 118524 (TRBV10-3, TRBJ2-1)
CAISEVGDGGGGEQFF

SEQ ID NO: 237049 - protein, 16 aa, Homo sapiens
  CDR3 for alpha chain variable domain of TCR clone 118525 (TRAV3, TRAJ13)
CAARDFESGGYQKVTF

SEQ ID NO: 237050 - protein, 16 aa, Homo sapiens
  CDR3 for beta chain variable domain of TCR clone 118525 (TRBV27, TRBJ2-5)
CASSYGPGGQKETQYF

SEQ ID NO: 237051 - protein, 11 aa, Homo sapiens
  CDR3 for alpha chain variable domain of TCR clone 118526 (TRAV13-1, TRAJ6)
CATLGSYIPTF

SEQ ID NO: 237052 - protein, 12 aa, Homo sapiens
  CDR3 for beta chain variable domain of TCR clone 118526 (TRBV11-2, TRBJ2-1)
CASSPGNNGQFF

SEQ ID NO: 237053 - protein, 18 aa, Homo sapiens
  CDR3 for alpha chain variable domain of TCR clone 118527 (TRAV13-1, TRAJ52)
CAAKNPNAGGTSYGKLTF

SEQ ID NO: 237054 - protein, 13 aa, Homo sapiens
  CDR3 for beta chain variable domain of TCR clone 118527 (TRBV19, TRBJ2-2)
CASGIWSTGELFF

SEQ ID NO: 237055 - protein, 15 aa, Homo sapiens
  CDR3 for alpha chain variable domain of TCR clone 118528 (TRAV26-1, TRAJ48)
CIARWSWFGNEKLTF

SEQ ID NO: 237056 - protein, 12 aa, Homo sapiens
  CDR3 for beta chain variable domain of TCR clone 118528 (TRBV19, TRBJ2-5)
CASSISEETRYF

SEQ ID NO: 237057 - protein, 14 aa, Homo sapiens
  CDR3 for alpha chain variable domain of TCR clone 118529 (TRAV12-2, TRAJ15)
CAPHTGQAGTALIF

SEQ ID NO: 237058 - protein, 15 aa, Homo sapiens
  CDR3 for beta chain variable domain of TCR clone 118529 (TRBV6-1, TRBJ2-3)
CASSERGGITDTQYF

SEQ ID NO: 237059 - protein, 12 aa, Homo sapiens
  CDR3 for alpha chain variable domain of TCR clone 118530 (TRAV13-1, TRAJ21)
CAAKEGFNKFYF

SEQ ID NO: 237060 - protein, 13 aa, Homo sapiens
  CDR3 for beta chain variable domain of TCR clone 118530 (TRBV7-3, TRBJ1-1)
CASSQDWGAEAFL

SEQ ID NO: 237061 - protein, 14 aa, Homo sapiens
  CDR3 for alpha chain variable domain of TCR clone 118531 (TRAV13-1, TRAJ35)
CAASKGGFGNVLHC

SEQ ID NO: 237062 - protein, 13 aa, Homo sapiens
  CDR3 for beta chain variable domain of TCR clone 118531 (TRBV9, TRBJ2-1)
CASSPSGGSEQFF

SEQ ID NO: 237063 - protein, 13 aa, Homo sapiens
  CDR3 for alpha chain variable domain of TCR clone 118532 (TRAV17, TRAJ5)
CAPMDTGRRAPTF

SEQ ID NO: 237064 - protein, 15 aa, Homo sapiens
  CDR3 for beta chain variable domain of TCR clone 118532 (TRBV6-6, TRBJ2-5)
CASSPGGGLEETQYF

SEQ ID NO: 237065 - protein, 15 aa, Homo sapiens
  CDR3 for alpha chain variable domain of TCR clone 118533 (TRAV13-1, TRAJ44)
CAASRNNGTASKLTF

SEQ ID NO: 237066 - protein, 14 aa, Homo sapiens
  CDR3 for beta chain variable domain of TCR clone 118533 (TRBV11-2, TRBJ1-2)
CASSLYRGNYGYTF

SEQ ID NO: 237067 - protein, 14 aa, Homo sapiens
  CDR3 for alpha chain variable domain of TCR clone 118534 (TRAV13-2, TRAJ10)
FAETFTGGGNKLTF

SEQ ID NO: 237068 - protein, 16 aa, Homo sapiens
  CDR3 for beta chain variable domain of TCR clone 118534 (TRBV18, TRBJ2-7)
CASSPRSQGISYEQYF

SEQ ID NO: 237069 - protein, 12 aa, Homo sapiens
  CDR3 for alpha chain variable domain of TCR clone 118535 (TRAV13-1, TRAJ48)
FAANFGNEKLTF

SEQ ID NO: 237070 - protein, 13 aa, Homo sapiens
  CDR3 for beta chain variable domain of TCR clone 118535 (TRBV7-3, TRBJ1-1)
CASSQDWGAEAFF

SEQ ID NO: 237071 - protein, 15 aa, Homo sapiens
  CDR3 for alpha chain variable domain of TCR clone 118536 (TRAV17, TRAJ35)
CATAFVMGFGNVLHC

SEQ ID NO: 237072 - protein, 14 aa, Homo sapiens
  CDR3 for beta chain variable domain of TCR clone 118536 (TRBV6-1, TRBJ1-3)
CASVQGGGGNTIYF

SEQ ID NO: 237073 - protein, 14 aa, Homo sapiens
  CDR3 for alpha chain variable domain of TCR clone 118537 (TRAV12-2, TRAJ17)
CAVLFKAAGNKLTF

SEQ ID NO: 237074 - protein, 13 aa, Homo sapiens
  CDR3 for beta chain variable domain of TCR clone 118537 (TRBV4-1, TRBJ2-1)
CASSQAGGDEQFF

SEQ ID NO: 237075 - protein, 14 aa, Homo sapiens
  CDR3 for alpha chain variable domain of TCR clone 118538 (TRAV26-1, TRAJ38)
CIAGNAGNNRKLIW

SEQ ID NO: 237076 - protein, 15 aa, Homo sapiens
  CDR3 for beta chain variable domain of TCR clone 118538 (TRBV20-1, TRBJ2-7)
CSARDRVSGMDEQYF

SEQ ID NO: 237077 - protein, 16 aa, Homo sapiens
  CDR3 for alpha chain variable domain of TCR clone 118539 (TRAV38-1, TRAJ56)
CAFMKRQTGANSKLTF

SEQ ID NO: 237078 - protein, 14 aa, Homo sapiens
  CDR3 for beta chain variable domain of TCR clone 118539 (TRBV18, TRBJ2-3)
CASSRDRGTDTQYF

SEQ ID NO: 237079 - protein, 12 aa, Homo sapiens
  CDR3 for alpha chain variable domain of TCR clone 118540 (TRAV27, TRAJ38)
CAARLMLATTIS

SEQ ID NO: 237080 - protein, 13 aa, Homo sapiens
  CDR3 for beta chain variable domain of TCR clone 118540 (TRBV12-5, TRBJ2-3)
CASGDRQSDTQYF

SEQ ID NO: 237081 - protein, 13 aa, Homo sapiens
  CDR3 for alpha chain variable domain of TCR clone 118541 (TRAV13-2, TRAJ53)
CAENMGSNYKLTF

SEQ ID NO: 237082 - protein, 13 aa, Homo sapiens
  CDR3 for beta chain variable domain of TCR clone 118541 (TRBV4-1, TRBJ2-2)
CASSQENTGELFF

SEQ ID NO: 237083 - protein, 17 aa, Homo sapiens
  CDR3 for alpha chain variable domain of TCR clone 118542 (TRAV13-1, TRAJ53)
CAASWKSSGGSNYKLTF

SEQ ID NO: 237084 - protein, 19 aa, Homo sapiens
  CDR3 for beta chain variable domain of TCR clone 118542 (TRBV7-9, TRBJ2-1)
CASGHNRGALLRSYNEQFF

SEQ ID NO: 237085 - protein, 14 aa, Homo sapiens
  CDR3 for alpha chain variable domain of TCR clone 118543 (TRAV12-2, TRAJ17)
CAVNIKAAGNKLTF

SEQ ID NO: 237086 - protein, 16 aa, Homo sapiens
  CDR3 for beta chain variable domain of TCR clone 118543 (TRBV20-1, TRBJ2-6)
CSASCQGYDGANVLTF

SEQ ID NO: 237087 - protein, 15 aa, Homo sapiens
  CDR3 for alpha chain variable domain of TCR clone 118544 (TRAV2, TRAJ9)
FAVEDRGTGGFKTIF

SEQ ID NO: 237088 - protein, 16 aa, Homo sapiens
  CDR3 for beta chain variable domain of TCR clone 118544 (TRBV24-1, TRBJ2-3)
CATSDPGTGATDTQYF

SEQ ID NO: 237089 - protein, 13 aa, Homo sapiens
  CDR3 for alpha chain variable domain of TCR clone 118545 (TRAV8-6, TRAJ49)
CAVSGQTGNQFYF

SEQ ID NO: 237090 - protein, 15 aa, Homo sapiens
  CDR3 for beta chain variable domain of TCR clone 118545 (TRBV7-9, TRBJ1-5)
CASSQGHQPNQPQHF

SEQ ID NO: 237091 - protein, 15 aa, Homo sapiens
  CDR3 for alpha chain variable domain of TCR clone 118546 (TRAV8-6, TRAJ10)
CSVSDQAGGGNKLTF

SEQ ID NO: 237092 - protein, 15 aa, Homo sapiens
  CDR3 for beta chain variable domain of TCR clone 118546 (TRBV3-1, TRBJ2-5)
CASSANLGGPETQYF

SEQ ID NO: 237093 - protein, 12 aa, Homo sapiens
  CDR3 for alpha chain variable domain of TCR clone 118547 (TRAV13-1, TRAJ21)
CAAKEGFNNFYF

SEQ ID NO: 237094 - protein, 17 aa, Homo sapiens
  CDR3 for beta chain variable domain of TCR clone 118547 (TRBV20-1, TRBJ2-2)
CSASGSGQGGLTGELFF

SEQ ID NO: 237095 - protein, 13 aa, Homo sapiens
  CDR3 for alpha chain variable domain of TCR clone 118548 (TRAV8-4, TRAJ10)
WAAFTGGGNKLTF

SEQ ID NO: 237096 - protein, 15 aa, Homo sapiens
  CDR3 for beta chain variable domain of TCR clone 118548 (TRBV2, TRBJ2-3)
CASSDFEKATDTQYF

SEQ ID NO: 237097 - protein, 15 aa, Homo sapiens
  CDR3 for alpha chain variable domain of TCR clone 118549 (TRAV13-2, TRAJ10)
CAENRDTGGGNNLTF

SEQ ID NO: 237098 - protein, 16 aa, Homo sapiens
  CDR3 for beta chain variable domain of TCR clone 118549 (TRBV2, TRBJ1-3)
CASSRTGGSTGNTIYF

SEQ ID NO: 237099 - protein, 12 aa, Homo sapiens
  CDR3 for alpha chain variable domain of TCR clone 118550 (TRAV12-3, TRAJ42)
CATGGSQGNLIF

SEQ ID NO: 237100 - protein, 13 aa, Homo sapiens
  CDR3 for beta chain variable domain of TCR clone 118550 (TRBV5-7, TRBJ2-6)
CASTSSGANVLTF

SEQ ID NO: 237101 - protein, 12 aa, Homo sapiens
  CDR3 for alpha chain variable domain of TCR clone 118551 (TRAV16, TRAJ56)
CAPTGASSKLTF

SEQ ID NO: 237102 - protein, 17 aa, Homo sapiens
  CDR3 for beta chain variable domain of TCR clone 118551 (TRBV27, TRBJ2-6)
CASSSTGFASGANVLTF

SEQ ID NO: 237103 - protein, 15 aa, Homo sapiens
  CDR3 for alpha chain variable domain of TCR clone 118552 (TRAV35, TRAJ41)
CAGQLFSNSGYALNF

SEQ ID NO: 237104 - protein, 17 aa, Homo sapiens
  CDR3 for beta chain variable domain of TCR clone 118552 (TRBV15, TRBJ1-1)
CATSRVGGADGDTEAFF

SEQ ID NO: 237105 - protein, 13 aa, Homo sapiens
  CDR3 for alpha chain variable domain of TCR clone 118553 (TRAV8-6, TRAJ21)
CAVSPSTLNKFYF

SEQ ID NO: 237106 - protein, 14 aa, Homo sapiens
  CDR3 for beta chain variable domain of TCR clone 118553 (TRBV7-9, TRBJ2-5)
CASSLDTAQETQYF

SEQ ID NO: 237107 - protein, 11 aa, Homo sapiens
  CDR3 for alpha chain variable domain of TCR clone 118554 (TRAV3, TRAJ21)
CAVGNFNKFYF

SEQ ID NO: 237108 - protein, 13 aa, Homo sapiens
  CDR3 for beta chain variable domain of TCR clone 118554 (TRBV20-1, TRBJ2-2)
CSASAAGTGELFF

SEQ ID NO: 237109 - protein, 13 aa, Homo sapiens
  CDR3 for alpha chain variable domain of TCR clone 118555 (TRAV12-3, TRAJ9)
CAMRNTGGFKTIF

SEQ ID NO: 237110 - protein, 13 aa, Homo sapiens
  CDR3 for beta chain variable domain of TCR clone 118555 (TRBV7-2, TRBJ2-1)
CASNRDRWNEQFF

SEQ ID NO: 237111 - protein, 17 aa, Homo sapiens
  CDR3 for alpha chain variable domain of TCR clone 118556 (TRAV13-1, TRAJ52)
CAAGRNAGGTSYGKLTI

SEQ ID NO: 237112 - protein, 17 aa, Homo sapiens
  CDR3 for beta chain variable domain of TCR clone 118556 (TRBV13, TRBJ2-3)
CASSLSRVAGGRNTQYF

SEQ ID NO: 237113 - protein, 13 aa, Homo sapiens
  CDR3 for alpha chain variable domain of TCR clone 118557 (TRAV30, TRAJ24)
CGTVTDSWGKLHF

SEQ ID NO: 237114 - protein, 14 aa, Homo sapiens
  CDR3 for beta chain variable domain of TCR clone 118557 (TRBV6-3, TRBJ2-2)
CASTYTPDTGELFF

SEQ ID NO: 237115 - protein, 13 aa, Homo sapiens
  CDR3 for alpha chain variable domain of TCR clone 118558 (TRAV21, TRAJ27)
CSARPGNAGKSTF

SEQ ID NO: 237116 - protein, 12 aa, Homo sapiens
  CDR3 for beta chain variable domain of TCR clone 118558 (TRBV11-2, TRBJ2-2)
CASSLGGGELFF

SEQ ID NO: 237117 - protein, 14 aa, Homo sapiens
  CDR3 for alpha chain variable domain of TCR clone 118559 (TRAV12-2, TRAJ40)
CAVKIPSGTYKYIL

SEQ ID NO: 237118 - protein, 20 aa, Homo sapiens
  CDR3 for beta chain variable domain of TCR clone 118559 (TRBV28, TRBJ2-1)
CASTPIGRSPGLAGGNEQFF

SEQ ID NO: 237119 - protein, 12 aa, Homo sapiens
  CDR3 for alpha chain variable domain of TCR clone 118560 (TRAV13-2, TRAJ23)
CAERHRGGKLIF

SEQ ID NO: 237120 - protein, 14 aa, Homo sapiens
  CDR3 for beta chain variable domain of TCR clone 118560 (TRBV2, TRBJ2-3)
CASSEGQNTDTQYF

SEQ ID NO: 237121 - protein, 14 aa, Homo sapiens
  CDR3 for alpha chain variable domain of TCR clone 118561 (TRAV29/DV5, TRAJ36)
CAARRKTGANNLFF

SEQ ID NO: 237122 - protein, 15 aa, Homo sapiens
  CDR3 for beta chain variable domain of TCR clone 118561 (TRBV11-3, TRBJ2-3)
CASLKDGREGDTQYF

SEQ ID NO: 237123 - protein, 18 aa, Homo sapiens
  CDR3 for alpha chain variable domain of TCR clone 118562 (TRAV17, TRAJ45)
CATSLDLYSGGGADGLTF

SEQ ID NO: 237124 - protein, 15 aa, Homo sapiens
  CDR3 for beta chain variable domain of TCR clone 118562 (TRBV11-2, TRBJ2-1)
CASSKNRGLSYEQFF

SEQ ID NO: 237125 - protein, 15 aa, Homo sapiens
  CDR3 for alpha chain variable domain of TCR clone 118563 (TRAV29/DV5, TRAJ42)
CAAKTDGGSQGNLIF

SEQ ID NO: 237126 - protein, 12 aa, Homo sapiens
  CDR3 for beta chain variable domain of TCR clone 118563 (TRBV11-2, TRBJ2-2)
CASSLPTGELFF

SEQ ID NO: 237127 - protein, 12 aa, Homo sapiens
  CDR3 for alpha chain variable domain of TCR clone 118564 (TRAV12-3, TRAJ17)
CAMTLTGNKLTF

SEQ ID NO: 237128 - protein, 12 aa, Homo sapiens
  CDR3 for beta chain variable domain of TCR clone 118564 (TRBV2, TRBJ2-1)
CAYGPPVNEQFF

SEQ ID NO: 237129 - protein, 17 aa, Homo sapiens
  CDR3 for alpha chain variable domain of TCR clone 118565 (TRAV8-6, TRAJ58)
CAVSYWVGETSGSRLNF

SEQ ID NO: 237130 - protein, 14 aa, Homo sapiens
  CDR3 for beta chain variable domain of TCR clone 118565 (TRBV4-2, TRBJ2-1)
CASGLDRAYNEQFF

SEQ ID NO: 237131 - protein, 14 aa, Homo sapiens
  CDR3 for alpha chain variable domain of TCR clone 118566 (TRAV21, TRAJ38)
CAVMGAGNNRKLIW

SEQ ID NO: 237132 - protein, 13 aa, Homo sapiens
  CDR3 for beta chain variable domain of TCR clone 118566 (TRBV7-3, TRBJ2-5)
CASSIGFSETQYL

SEQ ID NO: 237133 - protein, 14 aa, Homo sapiens
  CDR3 for alpha chain variable domain of TCR clone 118567 (TRAV13-1, TRAJ44)
CAAKATGTASKLTF

SEQ ID NO: 237134 - protein, 12 aa, Homo sapiens
  CDR3 for beta chain variable domain of TCR clone 118567 (TRBV7-8, TRBJ2-7)
CASSPGDREQYF

SEQ ID NO: 237135 - protein, 15 aa, Homo sapiens
  CDR3 for alpha chain variable domain of TCR clone 118568 (TRAV13-1, TRAJ28)
CAAKDSGAGSYQLTF

SEQ ID NO: 237136 - protein, 14 aa, Homo sapiens
  CDR3 for beta chain variable domain of TCR clone 118568 (TRBV6-1, TRBJ2-2)
CASSGQGRAGELLF

SEQ ID NO: 237137 - protein, 13 aa, Homo sapiens
  CDR3 for alpha chain variable domain of TCR clone 118569 (TRAV3, TRAJ20)
CAVRDTPRYKLSF

SEQ ID NO: 237138 - protein, 14 aa, Homo sapiens
  CDR3 for beta chain variable domain of TCR clone 118569 (TRBV5-1, TRBJ2-7)
CASSRGESLYEQYF

SEQ ID NO: 237139 - protein, 13 aa, Homo sapiens
  CDR3 for alpha chain variable domain of TCR clone 118570 (TRAV13-1, TRAJ5)
CAASDTGRRALTF

SEQ ID NO: 237140 - protein, 15 aa, Homo sapiens
  CDR3 for beta chain variable domain of TCR clone 118570 (TRBV28, TRBJ2-5)
CASSPPWSYQETQYF

SEQ ID NO: 237141 - protein, 16 aa, Homo sapiens
  CDR3 for alpha chain variable domain of TCR clone 118571 (TRAV16, TRAJ42)
CALSGLLGGSQGNLIF

SEQ ID NO: 237142 - protein, 15 aa, Homo sapiens
  CDR3 for beta chain variable domain of TCR clone 118571 (TRBV5-1, TRBJ2-1)
CASSPGGLAGNAQFF

SEQ ID NO: 237143 - protein, 19 aa, Homo sapiens
  CDR3 for alpha chain variable domain of TCR clone 118572 (TRAV1-2, TRAJ26)
CLLPLCCERPDNYGQNFVF

SEQ ID NO: 237144 - protein, 14 aa, Homo sapiens
  CDR3 for beta chain variable domain of TCR clone 118572 (TRBV7-8, TRBJ1-2)
CASSPDSLSYGYTF

SEQ ID NO: 237145 - protein, 13 aa, Homo sapiens
  CDR3 for alpha chain variable domain of TCR clone 118573 (TRAV20, TRAJ3)
CASRYSSASKIIF

SEQ ID NO: 237146 - protein, 16 aa, Homo sapiens
  CDR3 for beta chain variable domain of TCR clone 118573 (TRBV6-1, TRBJ1-6)
CASSSDGSPRNSTLHF

SEQ ID NO: 237147 - protein, 10 aa, Homo sapiens
  CDR3 for alpha chain variable domain of TCR clone 118574 (TRAV26-1, TRAJ22)
CNVSLNFFWF

SEQ ID NO: 237148 - protein, 15 aa, Homo sapiens
  CDR3 for beta chain variable domain of TCR clone 118574 (TRBV4-2, TRBJ1-2)
CASSQRTGGRDGYTF

SEQ ID NO: 237149 - protein, 12 aa, Homo sapiens
  CDR3 for alpha chain variable domain of TCR clone 118575 (TRAV35, TRAJ49)
CAGWNTGNQFYF

SEQ ID NO: 237150 - protein, 13 aa, Homo sapiens
  CDR3 for beta chain variable domain of TCR clone 118575 (TRBV19, TRBJ2-7)
CASSTTGNYEQYF

SEQ ID NO: 237151 - protein, 12 aa, Homo sapiens
  CDR3 for alpha chain variable domain of TCR clone 118576 (TRAV16, TRAJ26)
CALMSYGQNFVF

SEQ ID NO: 237152 - protein, 14 aa, Homo sapiens
  CDR3 for beta chain variable domain of TCR clone 118576 (TRBV10-3, TRBJ2-1)
CAISSDLAYNEQFF

SEQ ID NO: 237153 - protein, 17 aa, Homo sapiens
  CDR3 for alpha chain variable domain of TCR clone 118577 (TRAV3, TRAJ6)
CAVRDGPRAGGSYIPTF

SEQ ID NO: 237154 - protein, 12 aa, Homo sapiens
  CDR3 for beta chain variable domain of TCR clone 118577 (TRBV11-2, TRBJ2-1)
CARSPGNNEQFF

SEQ ID NO: 237155 - protein, 15 aa, Homo sapiens
  CDR3 for alpha chain variable domain of TCR clone 118578 (TRAV21, TRAJ24)
CAARSSTDSWGKLQF

SEQ ID NO: 237156 - protein, 15 aa, Homo sapiens
  CDR3 for beta chain variable domain of TCR clone 118578 (TRBV7-9, TRBJ2-7)
CASSSSGLAVYEQYF

SEQ ID NO: 237157 - protein, 13 aa, Homo sapiens
  CDR3 for alpha chain variable domain of TCR clone 118579 (TRAV13-2, TRAJ49)
CAETLHGGNQFYF

SEQ ID NO: 237158 - protein, 13 aa, Homo sapiens
  CDR3 for beta chain variable domain of TCR clone 118579 (TRBV19, TRBJ2-5)
CASSQDSQETQYF

SEQ ID NO: 237159 - protein, 12 aa, Homo sapiens
  CDR3 for alpha chain variable domain of TCR clone 118580 (TRAV12-3, TRAJ42)
CAPWGSQGNLIF

SEQ ID NO: 237160 - protein, 13 aa, Homo sapiens
  CDR3 for beta chain variable domain of TCR clone 118580 (TRBV5-7, TRBJ2-6)
CASTSSGANVLTF

SEQ ID NO: 237161 - protein, 13 aa, Homo sapiens
  CDR3 for alpha chain variable domain of TCR clone 118581 (TRAV23/DV6, TRAJ22)
CAPWGGSARQLTF

SEQ ID NO: 237162 - protein, 14 aa, Homo sapiens
  CDR3 for beta chain variable domain of TCR clone 118581 (TRBV18, TRBJ2-7)
CASSPTAGGYEQYF

SEQ ID NO: 237163 - protein, 14 aa, Homo sapiens
  CDR3 for alpha chain variable domain of TCR clone 118582 (TRAV17, TRAJ35)
CATDRPGFGNVLHC

SEQ ID NO: 237164 - protein, 17 aa, Homo sapiens
  CDR3 for beta chain variable domain of TCR clone 118582 (TRBV7-8, TRBJ2-6)
CASSAGTGGAGANVLTF

SEQ ID NO: 237165 - protein, 11 aa, Homo sapiens
  CDR3 for alpha chain variable domain of TCR clone 118583 (TRAV23/DV6, TRAJ49)
CAVAPVTSAIL

SEQ ID NO: 237166 - protein, 13 aa, Homo sapiens
  CDR3 for beta chain variable domain of TCR clone 118583 (TRBV6-1, TRBJ1-1)
CASSRQGNTEAFF

SEQ ID NO: 237167 - protein, 15 aa, Homo sapiens
  CDR3 for alpha chain variable domain of TCR clone 118584 (TRAV8-6, TRAJ11)
CAVNFMNSGYSTLTF

SEQ ID NO: 237168 - protein, 13 aa, Homo sapiens
  CDR3 for beta chain variable domain of TCR clone 118584 (TRBV7-9, TRBJ2-3)
CASSPGSTDTQYF

SEQ ID NO: 237169 - protein, 16 aa, Homo sapiens
  CDR3 for alpha chain variable domain of TCR clone 118585 (TRAV30, TRAJ24)
CGTEIVDADSWGKFQF

SEQ ID NO: 237170 - protein, 17 aa, Homo sapiens
  CDR3 for beta chain variable domain of TCR clone 118585 (TRBV20-1, TRBJ2-1)
CSAPPRLAGTRHNEQFF

SEQ ID NO: 237171 - protein, 10 aa, Homo sapiens
  CDR3 for alpha chain variable domain of TCR clone 118586 (TRAV26-1, TRAJ22)
CIVSLNFFWF

SEQ ID NO: 237172 - protein, 15 aa, Homo sapiens
  CDR3 for beta chain variable domain of TCR clone 118586 (TRBV4-2, TRBJ1-2)
CASSQRTGGRDGYTL

SEQ ID NO: 237173 - protein, 12 aa, Homo sapiens
  CDR3 for alpha chain variable domain of TCR clone 118587 (TRAV13-1, TRAJ15)
CAASQAGTALIF

SEQ ID NO: 237174 - protein, 14 aa, Homo sapiens
  CDR3 for beta chain variable domain of TCR clone 118587 (TRBV19, TRBJ2-2)
CASSTLHRSGQLFF

SEQ ID NO: 237175 - protein, 13 aa, Homo sapiens
  CDR3 for alpha chain variable domain of TCR clone 118588 (TRAV14/DV4, TRAJ16)
CAMRGTDGQKLLF

SEQ ID NO: 237176 - protein, 14 aa, Homo sapiens
  CDR3 for beta chain variable domain of TCR clone 118588 (TRBV25-1, TRBJ1-1)
CASTHLGGNTEAFF

SEQ ID NO: 237177 - protein, 16 aa, Homo sapiens
  CDR3 for alpha chain variable domain of TCR clone 118589 (TRAV10, TRAJ40)
CVVSRGVSSGTYKYIF

SEQ ID NO: 237178 - protein, 15 aa, Homo sapiens
  CDR3 for beta chain variable domain of TCR clone 118589 (TRBV4-1, TRBJ1-4)
CASSDTGGTNEKLFF

SEQ ID NO: 237179 - protein, 11 aa, Homo sapiens
  CDR3 for alpha chain variable domain of TCR clone 118590 (TRAV23/DV6, TRAJ58)
CAARLLRGETS

SEQ ID NO: 237180 - protein, 16 aa, Homo sapiens
  CDR3 for beta chain variable domain of TCR clone 118590 (TRBV6-6, TRBJ2-1)
CASSYSFSGSYNEQFF

SEQ ID NO: 237181 - protein, 12 aa, Homo sapiens
  CDR3 for alpha chain variable domain of TCR clone 118591 (TRAV2, TRAJ33)
CAVPDSNYQLIW

SEQ ID NO: 237182 - protein, 16 aa, Homo sapiens
  CDR3 for beta chain variable domain of TCR clone 118591 (TRBV19, TRBJ2-1)
CASSKAGPSSYNEQFF

SEQ ID NO: 237183 - protein, 13 aa, Homo sapiens
  CDR3 for alpha chain variable domain of TCR clone 118592 (TRAV13-1, TRAJ12)
CAASPDSSYKLIF

SEQ ID NO: 237184 - protein, 16 aa, Homo sapiens
  CDR3 for beta chain variable domain of TCR clone 118592 (TRBV15, TRBJ2-1)
CATSRERLAGADEQFF

SEQ ID NO: 237185 - protein, 14 aa, Homo sapiens
  CDR3 for alpha chain variable domain of TCR clone 118593 (TRAV12-2, TRAJ5)
CAVNRSTGRRALTF

SEQ ID NO: 237186 - protein, 16 aa, Homo sapiens
  CDR3 for beta chain variable domain of TCR clone 118593 (TRBV20-1, TRBJ1-4)
CSAPGQGLLTNEKLFF

SEQ ID NO: 237187 - protein, 11 aa, Homo sapiens
  CDR3 for alpha chain variable domain of TCR clone 118594 (TRAV2, TRAJ20)
CAVLNDSKLSF

SEQ ID NO: 237188 - protein, 16 aa, Homo sapiens
  CDR3 for beta chain variable domain of TCR clone 118594 (TRBV11-1, TRBJ2-2)
CASSAEGLKNTGELFF

SEQ ID NO: 237189 - protein, 14 aa, Homo sapiens
  CDR3 for alpha chain variable domain of TCR clone 118595 (TRAV29/DV5, TRAJ48)
CAAMALFGNEKLTF

SEQ ID NO: 237190 - protein, 15 aa, Homo sapiens
  CDR3 for beta chain variable domain of TCR clone 118595 (TRBV7-2, TRBJ2-1)
CASTHGTGICNEQFF

SEQ ID NO: 237191 - protein, 14 aa, Homo sapiens
  CDR3 for alpha chain variable domain of TCR clone 118596 (TRAV12-1, TRAJ30)
CLPTGTNRDDKIIF

SEQ ID NO: 237192 - protein, 11 aa, Homo sapiens
  CDR3 for beta chain variable domain of TCR clone 118596 (TRBV4-1, TRBJ2-2)
CASEHTGELFF

SEQ ID NO: 237193 - protein, 14 aa, Homo sapiens
  CDR3 for alpha chain variable domain of TCR clone 118597 (TRAV1-2, TRAJ15)
CAVRDRQAGTALIF

SEQ ID NO: 237194 - protein, 14 aa, Homo sapiens
  CDR3 for beta chain variable domain of TCR clone 118597 (TRBV7-3, TRBJ2-2)
CASSSGGYTGELFF

SEQ ID NO: 237195 - protein, 15 aa, Homo sapiens
  CDR3 for alpha chain variable domain of TCR clone 118598 (TRAV8-6, TRAJ45)
CAVSEQGGGADGLTF

SEQ ID NO: 237196 - protein, 14 aa, Homo sapiens
  CDR3 for beta chain variable domain of TCR clone 118598 (TRBV28, TRBJ2-5)
CASRGSSFRETQYF

SEQ ID NO: 237197 - protein, 12 aa, Homo sapiens
  CDR3 for alpha chain variable domain of TCR clone 118599 (TRAV12-3, TRAJ20)
CAMIRGDYKLSF

SEQ ID NO: 237198 - protein, 12 aa, Homo sapiens
  CDR3 for beta chain variable domain of TCR clone 118599 (TRBV6-1, TRBJ2-7)
CASSDYSYEQYF

SEQ ID NO: 237199 - protein, 19 aa, Homo sapiens
  CDR3 for alpha chain variable domain of TCR clone 118600 (TRAV26-1, TRAJ52)
CIVRAHRNAGGTSDGKLTF

SEQ ID NO: 237200 - protein, 15 aa, Homo sapiens
  CDR3 for beta chain variable domain of TCR clone 118600 (TRBV12-4, TRBJ2-5)
CASSPPTGLQETQYF

SEQ ID NO: 237201 - protein, 13 aa, Homo sapiens
  CDR3 for alpha chain variable domain of TCR clone 118601 (TRAV12-2, TRAJ6)
CSVNVSRKLHTYI

SEQ ID NO: 237202 - protein, 12 aa, Homo sapiens
  CDR3 for beta chain variable domain of TCR clone 118601 (TRBV29-1, TRBJ2-3)
CSVTGGADTQYF

SEQ ID NO: 237203 - protein, 12 aa, Homo sapiens
  CDR3 for alpha chain variable domain of TCR clone 118602 (TRAV27, TRAJ49)
CAGAPTGNQFYF

SEQ ID NO: 237204 - protein, 13 aa, Homo sapiens
  CDR3 for beta chain variable domain of TCR clone 118602 (TRBV20-1, TRBJ1-1)
CSARGGGNTEAFF

SEQ ID NO: 237205 - protein, 15 aa, Homo sapiens
  CDR3 for alpha chain variable domain of TCR clone 118603 (TRAV23/DV6, TRAJ27)
CAASKPMQANQPLRM

SEQ ID NO: 237206 - protein, 14 aa, Homo sapiens
  CDR3 for beta chain variable domain of TCR clone 118603 (TRBV5-4, TRBJ1-1)
CASSLDSRRDEAFF

SEQ ID NO: 237207 - protein, 14 aa, Homo sapiens
  CDR3 for alpha chain variable domain of TCR clone 118604 (TRAV13-1, TRAJ20)
CAARPGSNAYKLSF

SEQ ID NO: 237208 - protein, 13 aa, Homo sapiens
  CDR3 for beta chain variable domain of TCR clone 118604 (TRBV20-1, TRBJ1-1)
CSAPPGGHTEAFF

SEQ ID NO: 237209 - protein, 10 aa, Homo sapiens
  CDR3 for alpha chain variable domain of TCR clone 118605 (TRAV12-3, TRAJ49)
CAMNDDQFYF

SEQ ID NO: 237210 - protein, 14 aa, Homo sapiens
  CDR3 for beta chain variable domain of TCR clone 118605 (TRBV20-1, TRBJ1-1)
CSAQTRIGGTEAFF

SEQ ID NO: 237211 - protein, 15 aa, Homo sapiens
  CDR3 for alpha chain variable domain of TCR clone 118606 (TRAV13-2, TRAJ45)
CAEHHSGGIADGLTF

SEQ ID NO: 237212 - protein, 15 aa, Homo sapiens
  CDR3 for beta chain variable domain of TCR clone 118606 (TRBV7-2, TRBJ2-7)
CASSLALGSAYEQYF

SEQ ID NO: 237213 - protein, 15 aa, Homo sapiens
  CDR3 for alpha chain variable domain of TCR clone 118607 (TRAV8-2, TRAJ40)
CVMLGTTSGTYKYIF

SEQ ID NO: 237214 - protein, 16 aa, Homo sapiens
  CDR3 for beta chain variable domain of TCR clone 118607 (TRBV7-3, TRBJ2-1)
CASSLEGYRSYNEQFF

SEQ ID NO: 237215 - protein, 13 aa, Homo sapiens
  CDR3 for alpha chain variable domain of TCR clone 118608 (TRAV29/DV5, TRAJ31)
CAASRNNNARLMV

SEQ ID NO: 237216 - protein, 12 aa, Homo sapiens
  CDR3 for beta chain variable domain of TCR clone 118608 (TRBV14, TRBJ2-5)
CASSQLKETQYF

SEQ ID NO: 237217 - protein, 12 aa, Homo sapiens
  CDR3 for alpha chain variable domain of TCR clone 118609 (TRAV38-2/DV8, TRAJ48)
CALLSGNETLTF

SEQ ID NO: 237218 - protein, 15 aa, Homo sapiens
  CDR3 for beta chain variable domain of TCR clone 118609 (TRBV6-1, TRBJ2-1)
CASSELRGQYNEQFF

SEQ ID NO: 237219 - protein, 12 aa, Homo sapiens
  CDR3 for alpha chain variable domain of TCR clone 118610 (TRAV21, TRAJ33)
CAKMDSNYQLIW

SEQ ID NO: 237220 - protein, 16 aa, Homo sapiens
  CDR3 for beta chain variable domain of TCR clone 118610 (TRBV6-1, TRBJ2-5)
CASSETLDRGAETQYF

SEQ ID NO: 237221 - protein, 11 aa, Homo sapiens
  CDR3 for alpha chain variable domain of TCR clone 118611 (TRAV35, TRAJ34)
CWARNTDKLTF

SEQ ID NO: 237222 - protein, 13 aa, Homo sapiens
  CDR3 for beta chain variable domain of TCR clone 118611 (TRBV19, TRBJ2-7)
CASSIDRTYEQYF

SEQ ID NO: 237223 - protein, 16 aa, Homo sapiens
  CDR3 for alpha chain variable domain of TCR clone 118612 (TRAV20, TRAJ22)
CAVQASSSGSARQLTF

SEQ ID NO: 237224 - protein, 12 aa, Homo sapiens
  CDR3 for beta chain variable domain of TCR clone 118612 (TRBV11-2, TRBJ2-2)
CASSLGGGELFF

SEQ ID NO: 237225 - protein, 13 aa, Homo sapiens
  CDR3 for alpha chain variable domain of TCR clone 118613 (TRAV2, TRAJ40)
CAVVTSGTYKYIF

SEQ ID NO: 237226 - protein, 16 aa, Homo sapiens
  CDR3 for beta chain variable domain of TCR clone 118613 (TRBV4-2, TRBJ2-7)
CASSQDRGTSSYEQYF

SEQ ID NO: 237227 - protein, 15 aa, Homo sapiens
  CDR3 for alpha chain variable domain of TCR clone 118614 (TRAV12-1, TRAJ45)
CVVLSGGGGSDGLTF

SEQ ID NO: 237228 - protein, 13 aa, Homo sapiens
  CDR3 for beta chain variable domain of TCR clone 118614 (TRBV7-3, TRBJ1-1)
CASSQDWGAEAFF

SEQ ID NO: 237229 - protein, 15 aa, Homo sapiens
  CDR3 for alpha chain variable domain of TCR clone 118615 (TRAV13-1, TRAJ49)
CAASTEGNTGNQFYF

SEQ ID NO: 237230 - protein, 12 aa, Homo sapiens
  CDR3 for beta chain variable domain of TCR clone 118615 (TRBV11-2, TRBJ2-2)
CASSIGGGELFF

SEQ ID NO: 237231 - protein, 12 aa, Homo sapiens
  CDR3 for alpha chain variable domain of TCR clone 118616 (TRAV13-1, TRAJ53)
AASGGSNYKLTF

SEQ ID NO: 237232 - protein, 15 aa, Homo sapiens
  CDR3 for beta chain variable domain of TCR clone 118616 (TRBV5-1, TRBJ2-1)
CAISPPRAPYNEQFF

SEQ ID NO: 237233 - protein, 14 aa, Homo sapiens
  CDR3 for alpha chain variable domain of TCR clone 118617 (TRAV4, TRAJ23)
CLVGSYNQGGKLIF

SEQ ID NO: 237234 - protein, 13 aa, Homo sapiens
  CDR3 for beta chain variable domain of TCR clone 118617 (TRBV7-9, TRBJ1-2)
CASSLKQNYGYTF

SEQ ID NO: 237235 - protein, 15 aa, Homo sapiens
  CDR3 for alpha chain variable domain of TCR clone 118618 (TRAV12-2, TRAJ53)
CAVNGGGGSNYKLTF

SEQ ID NO: 237236 - protein, 13 aa, Homo sapiens
  CDR3 for beta chain variable domain of TCR clone 118618 (TRBV7-8, TRBJ2-1)
CASSLMAYNEQFF

SEQ ID NO: 237237 - protein, 12 aa, Homo sapiens
  CDR3 for alpha chain variable domain of TCR clone 118619 (TRAV21, TRAJ23)
CAVMLQGGKLIF

SEQ ID NO: 237238 - protein, 16 aa, Homo sapiens
  CDR3 for beta chain variable domain of TCR clone 118619 (TRBV7-3, TRBJ2-2)
CASSLKRGTLSGELFF

SEQ ID NO: 237239 - protein, 14 aa, Homo sapiens
  CDR3 for alpha chain variable domain of TCR clone 118620 (TRAV2, TRAJ37)
CAVDFTSNTGKLIF

SEQ ID NO: 237240 - protein, 15 aa, Homo sapiens
  CDR3 for beta chain variable domain of TCR clone 118620 (TRBV9, TRBJ1-4)
CASSVGGSTNEKLFF

SEQ ID NO: 237241 - protein, 12 aa, Homo sapiens
  CDR3 for alpha chain variable domain of TCR clone 118621 (TRAV12-1, TRAJ40)
CVVYSGTYKYIF

SEQ ID NO: 237242 - protein, 14 aa, Homo sapiens
  CDR3 for beta chain variable domain of TCR clone 118621 (TRBV7-9, TRBJ2-5)
CASSLDTAHETQYF

SEQ ID NO: 237243 - protein, 15 aa, Homo sapiens
  CDR3 for alpha chain variable domain of TCR clone 118622 (TRAV26-1, TRAJ44)
CIVRANTGTASKLTF

SEQ ID NO: 237244 - protein, 16 aa, Homo sapiens
  CDR3 for beta chain variable domain of TCR clone 118622 (TRBV7-7, TRBJ2-1)
CASSLASGISYNEQFF

SEQ ID NO: 237245 - protein, 16 aa, Homo sapiens
  CDR3 for alpha chain variable domain of TCR clone 118623 (TRAV30, TRAJ24)
CGTEIVDADSWGKFQF

SEQ ID NO: 237246 - protein, 16 aa, Homo sapiens
  CDR3 for beta chain variable domain of TCR clone 118623 (TRBV28, TRBJ2-7)
CASSLFFETGGPEQYV

SEQ ID NO: 237247 - protein, 15 aa, Homo sapiens
  CDR3 for alpha chain variable domain of TCR clone 118624 (TRAV13-1, TRAJ17)
CAASIERAAGNKLTF

SEQ ID NO: 237248 - protein, 16 aa, Homo sapiens
  CDR3 for beta chain variable domain of TCR clone 118624 (TRBV5-1, TRBJ2-7)
CASSWGTGGRAWEQYF

SEQ ID NO: 237249 - protein, 13 aa, Homo sapiens
  CDR3 for alpha chain variable domain of TCR clone 118625 (TRAV26-1, TRAJ34)
CIVRPWITDKLIF

SEQ ID NO: 237250 - protein, 15 aa, Homo sapiens
  CDR3 for beta chain variable domain of TCR clone 118625 (TRBV9, TRBJ2-1)
CASSLAGSSYNEQFF

SEQ ID NO: 237251 - protein, 16 aa, Homo sapiens
  CDR3 for alpha chain variable domain of TCR clone 118626 (TRAV26-1, TRAJ53)
CIVRVATGGSNYKLTF

SEQ ID NO: 237252 - protein, 12 aa, Homo sapiens
  CDR3 for beta chain variable domain of TCR clone 118626 (TRBV7-9, TRBJ1-5)
CASSPQGKPQHF

SEQ ID NO: 237253 - protein, 13 aa, Homo sapiens
  CDR3 for alpha chain variable domain of TCR clone 118627 (TRAV8-3, TRAJ44)
CAVVPGTASKLPF

SEQ ID NO: 237254 - protein, 14 aa, Homo sapiens
  CDR3 for beta chain variable domain of TCR clone 118627 (TRBV11-2, TRBJ2-3)
CASSRLARTDTQHF

SEQ ID NO: 237255 - protein, 12 aa, Homo sapiens
  CDR3 for alpha chain variable domain of TCR clone 118628 (TRAV8-3, TRAJ20)
CAVVFNDYKLSF

SEQ ID NO: 237256 - protein, 13 aa, Homo sapiens
  CDR3 for beta chain variable domain of TCR clone 118628 (TRBV5-7, TRBJ2-3)
CASSLGRTDTQYF

SEQ ID NO: 237257 - protein, 15 aa, Homo sapiens
  CDR3 for alpha chain variable domain of TCR clone 118629 (TRAV2, TRAJ28)
CAVPYSGAGSYQLAF

SEQ ID NO: 237258 - protein, 17 aa, Homo sapiens
  CDR3 for beta chain variable domain of TCR clone 118629 (TRBV20-1, TRBJ2-4)
CSARDWASGGRENIQYF

SEQ ID NO: 237259 - protein, 10 aa, Homo sapiens
  CDR3 for alpha chain variable domain of TCR clone 118630 (TRAV23/DV6, TRAJ31)
CARGGARLMF

SEQ ID NO: 237260 - protein, 14 aa, Homo sapiens
  CDR3 for beta chain variable domain of TCR clone 118630 (TRBV7-8, TRBJ1-2)
CASSPYSLSYGYTF

SEQ ID NO: 237261 - protein, 12 aa, Homo sapiens
  CDR3 for alpha chain variable domain of TCR clone 118631 (TRAV27, TRAJ9)
CAGESGGFKTIF

SEQ ID NO: 237262 - protein, 18 aa, Homo sapiens
  CDR3 for beta chain variable domain of TCR clone 118631 (TRBV10-2, TRBJ2-2)
CIPAPAVHRQADAGELFF

SEQ ID NO: 237263 - protein, 14 aa, Homo sapiens
  CDR3 for alpha chain variable domain of TCR clone 118632 (TRAV1-1, TRAJ27)
CAVIYNTNAGKSTF

SEQ ID NO: 237264 - protein, 15 aa, Homo sapiens
  CDR3 for beta chain variable domain of TCR clone 118632 (TRBV7-2, TRBJ2-1)
CASSSGLAGGNEEFF

SEQ ID NO: 237265 - protein, 14 aa, Homo sapiens
  CDR3 for alpha chain variable domain of TCR clone 118633 (TRAV9-2, TRAJ36)
CALPLRTGANNLFF

SEQ ID NO: 237266 - protein, 14 aa, Homo sapiens
  CDR3 for beta chain variable domain of TCR clone 118633 (TRBV2, TRBJ1-2)
CASSELQVNYGYTF

SEQ ID NO: 237267 - protein, 16 aa, Homo sapiens
  CDR3 for alpha chain variable domain of TCR clone 118634 (TRAV12-3, TRAJ53)
CAMSPGSGGSNYKLTF

SEQ ID NO: 237268 - protein, 13 aa, Homo sapiens
  CDR3 for beta chain variable domain of TCR clone 118634 (TRBV7-9, TRBJ2-7)
CASSFAGAYEQYF

SEQ ID NO: 237269 - protein, 13 aa, Homo sapiens
  CDR3 for alpha chain variable domain of TCR clone 118635 (TRAV27, TRAJ40)
CAGPPSGTYKYIF

SEQ ID NO: 237270 - protein, 13 aa, Homo sapiens
  CDR3 for beta chain variable domain of TCR clone 118635 (TRBV28, TRBJ1-2)
CAGRDRGNYGDTF

SEQ ID NO: 237271 - protein, 13 aa, Homo sapiens
  CDR3 for alpha chain variable domain of TCR clone 118636 (TRAV27, TRAJ6)
CAGGTRGSYIPTF

SEQ ID NO: 237272 - protein, 15 aa, Homo sapiens
  CDR3 for beta chain variable domain of TCR clone 118636 (TRBV7-2, TRBJ2-1)
CASSSGLAGGNEQFF

SEQ ID NO: 237273 - protein, 13 aa, Homo sapiens
  CDR3 for alpha chain variable domain of TCR clone 118637 (TRAV25, TRAJ26)
CAGMDNYGQNFVF

SEQ ID NO: 237274 - protein, 15 aa, Homo sapiens
  CDR3 for beta chain variable domain of TCR clone 118637 (TRBV10-3, TRBJ2-1)
CAIRNGTIGHNEQFF

SEQ ID NO: 237275 - protein, 18 aa, Homo sapiens
  CDR3 for alpha chain variable domain of TCR clone 118638 (TRAV2, TRAJ20)
CAVEDLPPGSVNDYKLSF

SEQ ID NO: 237276 - protein, 13 aa, Homo sapiens
  CDR3 for beta chain variable domain of TCR clone 118638 (TRBV12-4, TRBJ1-2)
CASSLRQGKGYTF

SEQ ID NO: 237277 - protein, 14 aa, Homo sapiens
  CDR3 for alpha chain variable domain of TCR clone 118639 (TRAV8-4, TRAJ54)
CAVSEVLGAQKLVF

SEQ ID NO: 237278 - protein, 15 aa, Homo sapiens
  CDR3 for beta chain variable domain of TCR clone 118639 (TRBV11-3, TRBJ2-3)
CASLKDGREGDTQYF

SEQ ID NO: 237279 - protein, 15 aa, Homo sapiens
  CDR3 for alpha chain variable domain of TCR clone 118640 (TRAV8-3, TRAJ40)
CAAPSLGSGTYKYIF

SEQ ID NO: 237280 - protein, 16 aa, Homo sapiens
  CDR3 for beta chain variable domain of TCR clone 118640 (TRBV7-3, TRBJ2-3)
CASSLSGYRPEDTHYF

SEQ ID NO: 237281 - protein, 13 aa, Homo sapiens
  CDR3 for alpha chain variable domain of TCR clone 118641 (TRAV29/DV5, TRAJ31)
CAASRNNNARLMF

SEQ ID NO: 237282 - protein, 15 aa, Homo sapiens
  CDR3 for beta chain variable domain of TCR clone 118641 (TRBV11-2, TRBJ2-1)
CASSRNRGLMYEQFF

SEQ ID NO: 237283 - protein, 11 aa, Homo sapiens
  CDR3 for alpha chain variable domain of TCR clone 118642 (TRAV4, TRAJ21)
CLIYNFNKFYF

SEQ ID NO: 237284 - protein, 17 aa, Homo sapiens
  CDR3 for beta chain variable domain of TCR clone 118642 (TRBV23-1, TRBJ2-1)
CISSPAVNRDQGGEQFF

SEQ ID NO: 237285 - protein, 16 aa, Homo sapiens
  CDR3 for alpha chain variable domain of TCR clone 118643 (TRAV3, TRAJ21)
CAVRDIERGTFNKFYF

SEQ ID NO: 237286 - protein, 13 aa, Homo sapiens
  CDR3 for beta chain variable domain of TCR clone 118643 (TRBV27, TRBJ2-7)
CASSLTTGYEQYF

SEQ ID NO: 237287 - protein, 17 aa, Homo sapiens
  CDR3 for alpha chain variable domain of TCR clone 118644 (TRAV3, TRAJ42)
CAVRDREYGGSQGNLIF

SEQ ID NO: 237288 - protein, 14 aa, Homo sapiens
  CDR3 for beta chain variable domain of TCR clone 118644 (TRBV25-1, TRBJ1-1)
CASTHLGGNTEAFF

SEQ ID NO: 237289 - protein, 15 aa, Homo sapiens
  CDR3 for alpha chain variable domain of TCR clone 118645 (TRAV3, TRAJ4)
CAVRDGTGGYNKLIF

SEQ ID NO: 237290 - protein, 15 aa, Homo sapiens
  CDR3 for beta chain variable domain of TCR clone 118645 (TRBV9, TRBJ1-6)
CASSVAGTGDSPLHF

SEQ ID NO: 237291 - protein, 13 aa, Homo sapiens
  CDR3 for alpha chain variable domain of TCR clone 118646 (TRAV8-3, TRAJ20)
CAVGAQDDYKLSF

SEQ ID NO: 237292 - protein, 15 aa, Homo sapiens
  CDR3 for beta chain variable domain of TCR clone 118646 (TRBV28, TRBJ2-3)
CAPTFRDWSTDTQYF

SEQ ID NO: 237293 - protein, 16 aa, Homo sapiens
  CDR3 for alpha chain variable domain of TCR clone 118647 (TRAV8-3, TRAJ10)
CAVGPILTGGGNKLTF

SEQ ID NO: 237294 - protein, 15 aa, Homo sapiens
  CDR3 for beta chain variable domain of TCR clone 118647 (TRBV7-2, TRBJ2-2)
CARRRPGQNTGELFF

SEQ ID NO: 237295 - protein, 15 aa, Homo sapiens
  CDR3 for alpha chain variable domain of TCR clone 118648 (TRAV2, TRAJ24)
CAVVRLKNSWWKLQF

SEQ ID NO: 237296 - protein, 16 aa, Homo sapiens
  CDR3 for beta chain variable domain of TCR clone 118648 (TRBV7-7, TRBJ2-3)
CASSPGTSGSTDTQYF

SEQ ID NO: 237297 - protein, 13 aa, Homo sapiens
  CDR3 for alpha chain variable domain of TCR clone 118649 (TRAV12-3, TRAJ13)
CAMSSGGYQKVTF

SEQ ID NO: 237298 - protein, 14 aa, Homo sapiens
  CDR3 for beta chain variable domain of TCR clone 118649 (TRBV11-2, TRBJ2-5)
CASSRTGGIETQYF

SEQ ID NO: 237299 - protein, 13 aa, Homo sapiens
  CDR3 for alpha chain variable domain of TCR clone 118650 (TRAV21, TRAJ36)
CAVIKNGANNLFF

SEQ ID NO: 237300 - protein, 13 aa, Homo sapiens
  CDR3 for beta chain variable domain of TCR clone 118650 (TRBV29-1, TRBJ2-3)
CSATRGGRDTQYF

SEQ ID NO: 237301 - protein, 11 aa, Homo sapiens
  CDR3 for alpha chain variable domain of TCR clone 118651 (TRAV13-1, TRAJ39)
CASHAGNMLTF

SEQ ID NO: 237302 - protein, 13 aa, Homo sapiens
  CDR3 for beta chain variable domain of TCR clone 118651 (TRBV19, TRBJ2-2)
CASSGRGTGELFF

SEQ ID NO: 237303 - protein, 14 aa, Homo sapiens
  CDR3 for alpha chain variable domain of TCR clone 118652 (TRAV16, TRAJ15)
CALSFNQAGTSLIF

SEQ ID NO: 237304 - protein, 16 aa, Homo sapiens
  CDR3 for beta chain variable domain of TCR clone 118652 (TRBV9, TRBJ2-7)
CASSAGPDRSPYEQYF

SEQ ID NO: 237305 - protein, 12 aa, Homo sapiens
  CDR3 for alpha chain variable domain of TCR clone 118653 (TRAV12-1, TRAJ40)
CVVSSGTYKYIF

SEQ ID NO: 237306 - protein, 16 aa, Homo sapiens
  CDR3 for beta chain variable domain of TCR clone 118653 (TRBV24-1, TRBJ2-3)
CATSDPGTGATDTQYF

SEQ ID NO: 237307 - protein, 12 aa, Homo sapiens
  CDR3 for alpha chain variable domain of TCR clone 118654 (TRAV16, TRAJ10)
CSRTGGGNKLTF

SEQ ID NO: 237308 - protein, 14 aa, Homo sapiens
  CDR3 for beta chain variable domain of TCR clone 118654 (TRBV6-3, TRBJ1-1)
CASSYQRRDTEAFF

SEQ ID NO: 237309 - protein, 14 aa, Homo sapiens
  CDR3 for alpha chain variable domain of TCR clone 118655 (TRAV3, TRAJ21)
CAVESQANFNKFYF

SEQ ID NO: 237310 - protein, 13 aa, Homo sapiens
  CDR3 for beta chain variable domain of TCR clone 118655 (TRBV24-1, TRBJ2-2)
CATSDWSTGELFF

SEQ ID NO: 237311 - protein, 12 aa, Homo sapiens
  CDR3 for alpha chain variable domain of TCR clone 118656 (TRAV12-3, TRAJ41)
CAMSYSGYALNF

SEQ ID NO: 237312 - protein, 13 aa, Homo sapiens
  CDR3 for beta chain variable domain of TCR clone 118656 (TRBV7-3, TRBJ2-1)
CASSLDSYNEKFF

SEQ ID NO: 237313 - protein, 11 aa, Homo sapiens
  CDR3 for alpha chain variable domain of TCR clone 118657 (TRAV3, TRAJ21)
FAVGNFNKFYF

SEQ ID NO: 237314 - protein, 13 aa, Homo sapiens
  CDR3 for beta chain variable domain of TCR clone 118657 (TRBV7-9, TRBJ1-2)
CASSLKQNYGYTF

SEQ ID NO: 237315 - protein, 10 aa, Homo sapiens
  CDR3 for alpha chain variable domain of TCR clone 118658 (TRAV1-2, TRAJ31)
CVSEDARLMF

SEQ ID NO: 237316 - protein, 16 aa, Homo sapiens
  CDR3 for beta chain variable domain of TCR clone 118658 (TRBV7-3, TRBJ2-1)
CASSLEGYRSYNEQFF

SEQ ID NO: 237317 - protein, 13 aa, Homo sapiens
  CDR3 for alpha chain variable domain of TCR clone 118659 (TRAV13-1, TRAJ6)
CAASKGGSYITTF

SEQ ID NO: 237318 - protein, 14 aa, Homo sapiens
  CDR3 for beta chain variable domain of TCR clone 118659 (TRBV7-2, TRBJ2-1)
CASSLGVGYNEQFF

SEQ ID NO: 237319 - protein, 13 aa, Homo sapiens
  CDR3 for alpha chain variable domain of TCR clone 118660 (TRAV12-3, TRAJ13)
CAMSSGGYQTVTF

SEQ ID NO: 237320 - protein, 13 aa, Homo sapiens
  CDR3 for beta chain variable domain of TCR clone 118660 (TRBV20-1, TRBJ1-1)
CSAPPGGHTEAFF

SEQ ID NO: 237321 - protein, 11 aa, Homo sapiens
  CDR3 for alpha chain variable domain of TCR clone 118661 (TRAV17, TRAJ31)
CATSNNARLMF

SEQ ID NO: 237322 - protein, 16 aa, Homo sapiens
  CDR3 for beta chain variable domain of TCR clone 118661 (TRBV7-8, TRBJ2-4)
CASSADRTLAKNIQYF

SEQ ID NO: 237323 - protein, 14 aa, Homo sapiens
  CDR3 for alpha chain variable domain of TCR clone 118662 (TRAV1-2, TRAJ16)
CAVNRSSDGQKLLF

SEQ ID NO: 237324 - protein, 16 aa, Homo sapiens
  CDR3 for beta chain variable domain of TCR clone 118662 (TRBV12-5, TRBJ2-5)
CASGPRTSGNQETQYF

SEQ ID NO: 237325 - protein, 15 aa, Homo sapiens
  CDR3 for alpha chain variable domain of TCR clone 118663 (TRAV26-1, TRAJ22)
CIVRVSFWFCKATDL

SEQ ID NO: 237326 - protein, 16 aa, Homo sapiens
  CDR3 for beta chain variable domain of TCR clone 118663 (TRBV4-1, TRBJ2-7)
CASSQEWTSGPLEQYF

SEQ ID NO: 237327 - protein, 12 aa, Homo sapiens
  CDR3 for alpha chain variable domain of TCR clone 118664 (TRAV12-3, TRAJ17)
CAMTLTGNKLTF

SEQ ID NO: 237328 - protein, 13 aa, Homo sapiens
  CDR3 for beta chain variable domain of TCR clone 118664 (TRBV7-3, TRBJ1-1)
CTSSQDWGAEAFF

SEQ ID NO: 237329 - protein, 12 aa, Homo sapiens
  CDR3 for alpha chain variable domain of TCR clone 118665 (TRAV13-2, TRAJ23)
CAERHRGGKLIF

SEQ ID NO: 237330 - protein, 20 aa, Homo sapiens
  CDR3 for beta chain variable domain of TCR clone 118665 (TRBV19, TRBJ2-1)
CASSISRTVTSTRLNNEQFF

SEQ ID NO: 237331 - protein, 14 aa, Homo sapiens
  CDR3 for alpha chain variable domain of TCR clone 118666 (TRAV1-2, TRAJ8)
CAVREDTGFQKLVF

SEQ ID NO: 237332 - protein, 13 aa, Homo sapiens
  CDR3 for beta chain variable domain of TCR clone 118666 (TRBV28, TRBJ2-5)
CASSFAGGETQYF

SEQ ID NO: 237333 - protein, 14 aa, Homo sapiens
  CDR3 for alpha chain variable domain of TCR clone 118667 (TRAV1-2, TRAJ16)
CAVNRFSDGQKLLF

SEQ ID NO: 237334 - protein, 15 aa, Homo sapiens
  CDR3 for beta chain variable domain of TCR clone 118667 (TRBV9, TRBJ1-6)
CASSVAGTGDSPLPF

SEQ ID NO: 237335 - protein, 10 aa, Homo sapiens
  CDR3 for alpha chain variable domain of TCR clone 118668 (TRAV12-3, TRAJ49)
CAMNDDQFYF

SEQ ID NO: 237336 - protein, 13 aa, Homo sapiens
  CDR3 for beta chain variable domain of TCR clone 118668 (TRBV12-4, TRBJ1-1)
CASSPGTAFEAFF

SEQ ID NO: 237337 - protein, 13 aa, Homo sapiens
  CDR3 for alpha chain variable domain of TCR clone 118669 (TRAV21, TRAJ57)
CAVIEGGSEKLVL

SEQ ID NO: 237338 - protein, 14 aa, Homo sapiens
  CDR3 for beta chain variable domain of TCR clone 118669 (TRBV12-5, TRBJ2-5)
CASGSRTHQETQYF

SEQ ID NO: 237339 - protein, 12 aa, Homo sapiens
  CDR3 for alpha chain variable domain of TCR clone 118670 (TRAV21, TRAJ11)
CAATSGYSTLTF

SEQ ID NO: 237340 - protein, 16 aa, Homo sapiens
  CDR3 for beta chain variable domain of TCR clone 118670 (TRBV28, TRBJ2-2)
CASSLEGSSNTGELFF

SEQ ID NO: 237341 - protein, 11 aa, Homo sapiens
  CDR3 for alpha chain variable domain of TCR clone 118671 (TRAV26-1, TRAJ37)
CIVRVGRKLIF

SEQ ID NO: 237342 - protein, 13 aa, Homo sapiens
  CDR3 for beta chain variable domain of TCR clone 118671 (TRBV7-9, TRBJ2-5)
CASTPVGQETQYF

SEQ ID NO: 237343 - protein, 12 aa, Homo sapiens
  CDR3 for alpha chain variable domain of TCR clone 118672 (TRAV3, TRAJ20)
CAVRDGDYKLSF

SEQ ID NO: 237344 - protein, 16 aa, Homo sapiens
  CDR3 for beta chain variable domain of TCR clone 118672 (TRBV15, TRBJ2-1)
CATSRERLAGAYEQFF

SEQ ID NO: 237345 - protein, 12 aa, Homo sapiens
  CDR3 for alpha chain variable domain of TCR clone 118673 (TRAV13-1, TRAJ45)
CAATRGADGLTF

SEQ ID NO: 237346 - protein, 13 aa, Homo sapiens
  CDR3 for beta chain variable domain of TCR clone 118673 (TRBV7-9, TRBJ1-2)
CASSLKQNYGYTF

SEQ ID NO: 237347 - protein, 14 aa, Homo sapiens
  CDR3 for alpha chain variable domain of TCR clone 118674 (TRAV12-3, TRAJ21)
SAATDLYNFNKFYF

SEQ ID NO: 237348 - protein, 13 aa, Homo sapiens
  CDR3 for beta chain variable domain of TCR clone 118674 (TRBV19, TRBJ2-2)
CASSSKNTGELFF

SEQ ID NO: 237349 - protein, 14 aa, Homo sapiens
  CDR3 for alpha chain variable domain of TCR clone 118675 (TRAV26-1, TRAJ38)
CIADNAGNNHKLIW

SEQ ID NO: 237350 - protein, 14 aa, Homo sapiens
  CDR3 for beta chain variable domain of TCR clone 118675 (TRBV25-1, TRBJ1-1)
CASTHLGGNTEAFF

SEQ ID NO: 237351 - protein, 14 aa, Homo sapiens
  CDR3 for alpha chain variable domain of TCR clone 118676 (TRAV1-2, TRAJ29)
CAVRELTSATPLVF

SEQ ID NO: 237352 - protein, 14 aa, Homo sapiens
  CDR3 for beta chain variable domain of TCR clone 118676 (TRBV3-1, TRBJ2-5)
CASSQCPDQETQYF

SEQ ID NO: 237353 - protein, 14 aa, Homo sapiens
  CDR3 for alpha chain variable domain of TCR clone 118677 (TRAV17, TRAJ22)
CATSPSGSARQLTF

SEQ ID NO: 237354 - protein, 17 aa, Homo sapiens
  CDR3 for beta chain variable domain of TCR clone 118677 (TRBV11-2, TRBJ2-1)
CASSLYPPGVEYNEQFF

SEQ ID NO: 237355 - protein, 13 aa, Homo sapiens
  CDR3 for alpha chain variable domain of TCR clone 118678 (TRAV21, TRAJ20)
CAVGLRVDYKLSF

SEQ ID NO: 237356 - protein, 16 aa, Homo sapiens
  CDR3 for beta chain variable domain of TCR clone 118678 (TRBV11-2, TRBJ2-3)
CASSSELGSSTDTQYF

SEQ ID NO: 237357 - protein, 16 aa, Homo sapiens
  CDR3 for alpha chain variable domain of TCR clone 118679 (TRAV3, TRAJ37)
CAVRPHGSGNTGKLIF

SEQ ID NO: 237358 - protein, 15 aa, Homo sapiens
  CDR3 for beta chain variable domain of TCR clone 118679 (TRBV7-3, TRBJ2-1)
CASSPTGGGEVEQFF

SEQ ID NO: 237359 - protein, 15 aa, Homo sapiens
  CDR3 for alpha chain variable domain of TCR clone 118680 (TRAV2, TRAJ9)
CAVEDRGTGGFKTIF

SEQ ID NO: 237360 - protein, 14 aa, Homo sapiens
  CDR3 for beta chain variable domain of TCR clone 118680 (TRBV7-2, TRBJ1-1)
CASSFLTGTTEAFF

SEQ ID NO: 237361 - protein, 14 aa, Homo sapiens
  CDR3 for alpha chain variable domain of TCR clone 118681 (TRAV1-2, TRAJ16)
CAVNRFSDGQKLLF

SEQ ID NO: 237362 - protein, 15 aa, Homo sapiens
  CDR3 for beta chain variable domain of TCR clone 118681 (TRBV28, TRBJ2-1)
CASSGLAEVDNEQFF

SEQ ID NO: 237363 - protein, 14 aa, Homo sapiens
  CDR3 for alpha chain variable domain of TCR clone 118682 (TRAV12-2, TRAJ13)
CAVKKTGGYQKVTF

SEQ ID NO: 237364 - protein, 15 aa, Homo sapiens
  CDR3 for beta chain variable domain of TCR clone 118682 (TRBV20-1, TRBJ1-1)
CSASRGVTGNTEAFF

SEQ ID NO: 237365 - protein, 11 aa, Homo sapiens
  CDR3 for alpha chain variable domain of TCR clone 118683 (TRAV13-1, TRAJ6)
CATLGSYIPAF

SEQ ID NO: 237366 - protein, 12 aa, Homo sapiens
  CDR3 for beta chain variable domain of TCR clone 118683 (TRBV11-2, TRBJ2-1)
CASSPGNNEQFF

SEQ ID NO: 237367 - protein, 16 aa, Homo sapiens
  CDR3 for alpha chain variable domain of TCR clone 118684 (TRAV12-1, TRAJ5)
CGELLNMDTGRRALTF

SEQ ID NO: 237368 - protein, 14 aa, Homo sapiens
  CDR3 for beta chain variable domain of TCR clone 118684 (TRBV19, TRBJ2-5)
CASSMTGQQETQYF

SEQ ID NO: 237369 - protein, 12 aa, Homo sapiens
  CDR3 for alpha chain variable domain of TCR clone 118685 (TRAV21, TRAJ13)
PGPSGGYQKVTF

SEQ ID NO: 237370 - protein, 14 aa, Homo sapiens
  CDR3 for beta chain variable domain of TCR clone 118685 (TRBV27, TRBJ2-5)
CQQFIPAGGETQYF

SEQ ID NO: 237371 - protein, 14 aa, Homo sapiens
  CDR3 for alpha chain variable domain of TCR clone 118686 (TRAV38-1, TRAJ45)
CASHSGGGADGLTF

SEQ ID NO: 237372 - protein, 11 aa, Homo sapiens
  CDR3 for beta chain variable domain of TCR clone 118686 (TRBV29-1, TRBJ1-1)
CSVEVGTRTFF

SEQ ID NO: 237373 - protein, 14 aa, Homo sapiens
  CDR3 for alpha chain variable domain of TCR clone 118687 (TRAV12-1, TRAJ23)
CVVIVYNQRGKLIF

SEQ ID NO: 237374 - protein, 15 aa, Homo sapiens
  CDR3 for beta chain variable domain of TCR clone 118687 (TRBV20-1, TRBJ1-5)
CSAKPPGQGPQPQHF

SEQ ID NO: 237375 - protein, 17 aa, Homo sapiens
  CDR3 for alpha chain variable domain of TCR clone 118688 (TRAV3, TRAJ6)
CAVRDGPRAGGSYIPTF

SEQ ID NO: 237376 - protein, 12 aa, Homo sapiens
  CDR3 for beta chain variable domain of TCR clone 118688 (TRBV5-1, TRBJ2-7)
CASSLDSYEQYF

SEQ ID NO: 237377 - protein, 14 aa, Homo sapiens
  CDR3 for alpha chain variable domain of TCR clone 118689 (TRAV3, TRAJ17)
CAVRDAAAVNKLTF

SEQ ID NO: 237378 - protein, 15 aa, Homo sapiens
  CDR3 for beta chain variable domain of TCR clone 118689 (TRBV3-1, TRBJ2-7)
CASSQVRQGAYEQYF

SEQ ID NO: 237379 - protein, 15 aa, Homo sapiens
  CDR3 for alpha chain variable domain of TCR clone 118690 (TRAV23/DV6, TRAJ18)
CAARYRGSTLGRLYF

SEQ ID NO: 237380 - protein, 15 aa, Homo sapiens
  CDR3 for beta chain variable domain of TCR clone 118690 (TRBV12-4, TRBJ2-5)
CASSPPTGLQETQYF

SEQ ID NO: 237381 - protein, 12 aa, Homo sapiens
  CDR3 for alpha chain variable domain of TCR clone 118691 (TRAV1-2, TRAJ8)
CAVNTGFQKLVF

SEQ ID NO: 237382 - protein, 15 aa, Homo sapiens
  CDR3 for beta chain variable domain of TCR clone 118691 (TRBV20-1, TRBJ2-7)
CSARDRVSGMDEQYF

SEQ ID NO: 237383 - protein, 16 aa, Homo sapiens
  CDR3 for alpha chain variable domain of TCR clone 118692 (TRAV30, TRAJ24)
CGTEIVDADSWGKFHF

SEQ ID NO: 237384 - protein, 16 aa, Homo sapiens
  CDR3 for beta chain variable domain of TCR clone 118692 (TRBV12-5, TRBJ2-5)
CASGPRTSGNQETQYF

SEQ ID NO: 237385 - protein, 13 aa, Homo sapiens
  CDR3 for alpha chain variable domain of TCR clone 118693 (TRAV30, TRAJ34)
CGTEGYNTDKLIF

SEQ ID NO: 237386 - protein, 16 aa, Homo sapiens
  CDR3 for beta chain variable domain of TCR clone 118693 (TRBV7-9, TRBJ1-2)
CASSLGFSSGEDGYTF

SEQ ID NO: 237387 - protein, 12 aa, Homo sapiens
  CDR3 for alpha chain variable domain of TCR clone 118694 (TRAV2, TRAJ33)
CAFMGSNYQLIW

SEQ ID NO: 237388 - protein, 16 aa, Homo sapiens
  CDR3 for beta chain variable domain of TCR clone 118694 (TRBV2, TRBJ2-7)
CASSEPWTGPSYEQYF

SEQ ID NO: 237389 - protein, 15 aa, Homo sapiens
  CDR3 for alpha chain variable domain of TCR clone 118695 (TRAV3, TRAJ20)
CAVRDIKLSDYKLSF

SEQ ID NO: 237390 - protein, 10 aa, Homo sapiens
  CDR3 for beta chain variable domain of TCR clone 118695 (TRBV20-1, TRBJ2-5)
CSARFETQYF

SEQ ID NO: 237391 - protein, 14 aa, Homo sapiens
  CDR3 for alpha chain variable domain of TCR clone 118696 (TRAV16, TRAJ17)
CALSGRAAGNKLTF

SEQ ID NO: 237392 - protein, 14 aa, Homo sapiens
  CDR3 for beta chain variable domain of TCR clone 118696 (TRBV7-2, TRBJ2-7)
CASSPKTSFYEQYF

SEQ ID NO: 237393 - protein, 14 aa, Homo sapiens
  CDR3 for alpha chain variable domain of TCR clone 118697 (TRAV1-2, TRAJ16)
CVVNWFSDGQKLLF

SEQ ID NO: 237394 - protein, 15 aa, Homo sapiens
  CDR3 for beta chain variable domain of TCR clone 118697 (TRBV6-5, TRBJ1-2)
CASSYSQAFNYGYTF

SEQ ID NO: 237395 - protein, 15 aa, Homo sapiens
  CDR3 for alpha chain variable domain of TCR clone 118698 (TRAV27, TRAJ38)
CAARRNAGNNRKLIW

SEQ ID NO: 237396 - protein, 13 aa, Homo sapiens
  CDR3 for beta chain variable domain of TCR clone 118698 (TRBV12-5, TRBJ2-3)
FASGDRQSDTQYF

SEQ ID NO: 237397 - protein, 14 aa, Homo sapiens
  CDR3 for alpha chain variable domain of TCR clone 118699 (TRAV1-2, TRAJ16)
CAVNRFSDGQRLLF

SEQ ID NO: 237398 - protein, 12 aa, Homo sapiens
  CDR3 for beta chain variable domain of TCR clone 118699 (TRBV20-1, TRBJ1-5)
CSAAGWDQPQHF

SEQ ID NO: 237399 - protein, 14 aa, Homo sapiens
  CDR3 for alpha chain variable domain of TCR clone 118700 (TRAV16, TRAJ54)
RALSLIQGAQKLVS

SEQ ID NO: 237400 - protein, 15 aa, Homo sapiens
  CDR3 for beta chain variable domain of TCR clone 118700 (TRBV20-1, TRBJ2-7)
CSARDRVSGMDEQYF

SEQ ID NO: 237401 - protein, 16 aa, Homo sapiens
  CDR3 for alpha chain variable domain of TCR clone 118701 (TRAV30, TRAJ24)
CGTEIVDADSWGKFQF

SEQ ID NO: 237402 - protein, 18 aa, Homo sapiens
  CDR3 for beta chain variable domain of TCR clone 118701 (TRBV11-2, TRBJ2-3)
CASSLGGASWGAPNTQYF

SEQ ID NO: 237403 - protein, 13 aa, Homo sapiens
  CDR3 for alpha chain variable domain of TCR clone 118702 (TRAV2, TRAJ15)
CAVASQAGTALIF

SEQ ID NO: 237404 - protein, 17 aa, Homo sapiens
  CDR3 for beta chain variable domain of TCR clone 118702 (TRBV7-3, TRBJ2-3)
RASSLMKRMRGADTQYF

SEQ ID NO: 237405 - protein, 19 aa, Homo sapiens
  CDR3 for alpha chain variable domain of TCR clone 118703 (TRAV13-1, TRAJ52)
CAASPYQNAGGTSSGKLTF

SEQ ID NO: 237406 - protein, 14 aa, Homo sapiens
  CDR3 for beta chain variable domain of TCR clone 118703 (TRBV19, TRBJ2-7)
CASTVQGRPYEQYF

SEQ ID NO: 237407 - protein, 10 aa, Homo sapiens
  CDR3 for alpha chain variable domain of TCR clone 118704 (TRAV12-2, TRAJ43)
CAVKVLSMRF

SEQ ID NO: 237408 - protein, 14 aa, Homo sapiens
  CDR3 for beta chain variable domain of TCR clone 118704 (TRBV11-2, TRBJ2-7)
CASSLGTSLYEQYF

SEQ ID NO: 237409 - protein, 17 aa, Homo sapiens
  CDR3 for alpha chain variable domain of TCR clone 118705 (TRAV8-3, TRAJ34)
CAIPGKLIFGTGTRLQV

SEQ ID NO: 237410 - protein, 16 aa, Homo sapiens
  CDR3 for beta chain variable domain of TCR clone 118705 (TRBV7-6, TRBJ2-1)
CASSAPGPSSYNEQFF

SEQ ID NO: 237411 - protein, 15 aa, Homo sapiens
  CDR3 for alpha chain variable domain of TCR clone 118706 (TRAV1-2, TRAJ26)
CAVRDLITMARILSL

SEQ ID NO: 237412 - protein, 17 aa, Homo sapiens
  CDR3 for beta chain variable domain of TCR clone 118706 (TRBV28, TRBJ2-5)
CASSRQGGLAGAETQYF

SEQ ID NO: 237413 - protein, 13 aa, Homo sapiens
  CDR3 for alpha chain variable domain of TCR clone 118707 (TRAV21, TRAJ15)
CAVANQAGTALIF

SEQ ID NO: 237414 - protein, 12 aa, Homo sapiens
  CDR3 for beta chain variable domain of TCR clone 118707 (TRBV6-6, TRBJ2-5)
CASNRQSGTQYF

SEQ ID NO: 237415 - protein, 15 aa, Homo sapiens
  CDR3 for alpha chain variable domain of TCR clone 118708 (TRAV10, TRAJ6)
CVVRPRTGGSYIPTF

SEQ ID NO: 237416 - protein, 15 aa, Homo sapiens
  CDR3 for beta chain variable domain of TCR clone 118708 (TRBV20-1, TRBJ2-7)
CSARARVSGMDEQYF

SEQ ID NO: 237417 - protein, 14 aa, Homo sapiens
  CDR3 for alpha chain variable domain of TCR clone 118709 (TRAV1-2, TRAJ8)
CAVREDTGFQKLVF

SEQ ID NO: 237418 - protein, 17 aa, Homo sapiens
  CDR3 for beta chain variable domain of TCR clone 118709 (TRBV7-9, TRBJ1-5)
CASSASQGGYSNQPQHF

SEQ ID NO: 237419 - protein, 14 aa, Homo sapiens
  CDR3 for alpha chain variable domain of TCR clone 118710 (TRAV12-2, TRAJ48)
CAVNAFFGNEQLTF

SEQ ID NO: 237420 - protein, 13 aa, Homo sapiens
  CDR3 for beta chain variable domain of TCR clone 118710 (TRBV28, TRBJ2-7)
CAGAQQGLDEQYF

SEQ ID NO: 237421 - protein, 12 aa, Homo sapiens
  CDR3 for alpha chain variable domain of TCR clone 118711 (TRAV3, TRAJ20)
CAVRDGEYKLSF

SEQ ID NO: 237422 - protein, 13 aa, Homo sapiens
  CDR3 for beta chain variable domain of TCR clone 118711 (TRBV9, TRBJ2-1)
CASSVGQGGEQFF

SEQ ID NO: 237423 - protein, 13 aa, Homo sapiens
  CDR3 for alpha chain variable domain of TCR clone 118712 (TRAV2, TRAJ24)
CDLQLTAGGNSSL

SEQ ID NO: 237424 - protein, 13 aa, Homo sapiens
  CDR3 for beta chain variable domain of TCR clone 118712 (TRBV7-9, TRBJ1-2)
CASSLKQNYGYTV

SEQ ID NO: 237425 - protein, 11 aa, Homo sapiens
  CDR3 for alpha chain variable domain of TCR clone 118713 (TRAV12-2, TRAJ49)
CAVNTGNQFYF

SEQ ID NO: 237426 - protein, 12 aa, Homo sapiens
  CDR3 for beta chain variable domain of TCR clone 118713 (TRBV2, TRBJ2-7)
CASSDPDYEQYF

SEQ ID NO: 237427 - protein, 17 aa, Homo sapiens
  CDR3 for alpha chain variable domain of TCR clone 118714 (TRAV26-2, TRAJ42)
CILRDVGYGGSQGNLIF

SEQ ID NO: 237428 - protein, 16 aa, Homo sapiens
  CDR3 for beta chain variable domain of TCR clone 118714 (TRBV12-4, TRBJ2-7)
CACSLIGGTGTYEQYF

SEQ ID NO: 237429 - protein, 17 aa, Homo sapiens
  CDR3 for alpha chain variable domain of TCR clone 118715 (TRAV27, TRAJ18)
CAGLHRGRGSTLGRRYF

SEQ ID NO: 237430 - protein, 14 aa, Homo sapiens
  CDR3 for beta chain variable domain of TCR clone 118715 (TRBV20-1, TRBJ1-5)
CSARGRGSNQPQHF

SEQ ID NO: 237431 - protein, 13 aa, Homo sapiens
  CDR3 for alpha chain variable domain of TCR clone 118716 (TRAV21, TRAJ27)
CAARPGNAGKSTF

SEQ ID NO: 237432 - protein, 14 aa, Homo sapiens
  CDR3 for beta chain variable domain of TCR clone 118716 (TRBV15, TRBJ2-3)
CATRSGTSTDTQYF

SEQ ID NO: 237433 - protein, 10 aa, Homo sapiens
  CDR3 for alpha chain variable domain of TCR clone 118717 (TRAV2, TRAJ40)
CAPYLRNLQI

SEQ ID NO: 237434 - protein, 13 aa, Homo sapiens
  CDR3 for beta chain variable domain of TCR clone 118717 (TRBV7-6, TRBJ2-3)
CASSLRSDNTQYF

SEQ ID NO: 237435 - protein, 13 aa, Homo sapiens
  CDR3 for alpha chain variable domain of TCR clone 118718 (TRAV29/DV5, TRAJ31)
CAASRNNNARLMF

SEQ ID NO: 237436 - protein, 14 aa, Homo sapiens
  CDR3 for beta chain variable domain of TCR clone 118718 (TRBV7-2, TRBJ1-2)
CASSQTGSTYGYTF

SEQ ID NO: 237437 - protein, 19 aa, Homo sapiens
  CDR3 for alpha chain variable domain of TCR clone 118719 (TRAV13-1, TRAJ52)
CAASPYQNAGGTSYGKLTF

SEQ ID NO: 237438 - protein, 16 aa, Homo sapiens
  CDR3 for beta chain variable domain of TCR clone 118719 (TRBV7-8, TRBJ2-4)
CASSAERTLAKNIQYF

SEQ ID NO: 237439 - protein, 15 aa, Homo sapiens
  CDR3 for alpha chain variable domain of TCR clone 118720 (TRAV12-3, TRAJ42)
CAMSGHGGSQGNLIF

SEQ ID NO: 237440 - protein, 15 aa, Homo sapiens
  CDR3 for beta chain variable domain of TCR clone 118720 (TRBV28, TRBJ1-3)
CASSMGWASGNTIYF

SEQ ID NO: 237441 - protein, 11 aa, Homo sapiens
  CDR3 for alpha chain variable domain of TCR clone 118721 (TRAV3, TRAJ13)
CAVISYQKVTF

SEQ ID NO: 237442 - protein, 15 aa, Homo sapiens
  CDR3 for beta chain variable domain of TCR clone 118721 (TRBV7-9, TRBJ2-7)
CASSSSGLAVYEQYF

SEQ ID NO: 237443 - protein, 14 aa, Homo sapiens
  CDR3 for alpha chain variable domain of TCR clone 118722 (TRAV17, TRAJ54)
CATDANQRAQKLVF

SEQ ID NO: 237444 - protein, 12 aa, Homo sapiens
  CDR3 for beta chain variable domain of TCR clone 118722 (TRBV6-3, TRBJ2-1)
CASSGSYNEQFF

SEQ ID NO: 237445 - protein, 15 aa, Homo sapiens
  CDR3 for alpha chain variable domain of TCR clone 118723 (TRAV21, TRAJ13)
CAVRPTSVGYQKVTF

SEQ ID NO: 237446 - protein, 18 aa, Homo sapiens
  CDR3 for beta chain variable domain of TCR clone 118723 (TRBV11-3, TRBJ2-1)
CASSSYPGGRDSYNEQFF

SEQ ID NO: 237447 - protein, 14 aa, Homo sapiens
  CDR3 for alpha chain variable domain of TCR clone 118724 (TRAV2, TRAJ37)
CAVDFTSNTGKLIF

SEQ ID NO: 237448 - protein, 13 aa, Homo sapiens
  CDR3 for beta chain variable domain of TCR clone 118724 (TRBV20-1, TRBJ1-1)
CSALLGGGTEAFF

SEQ ID NO: 237449 - protein, 13 aa, Homo sapiens
  CDR3 for alpha chain variable domain of TCR clone 118725 (TRAV35, TRAJ33)
CAGQLYGVYQLIW

SEQ ID NO: 237450 - protein, 14 aa, Homo sapiens
  CDR3 for beta chain variable domain of TCR clone 118725 (TRBV7-2, TRBJ1-1)
CASSLGGAGAEAFF

SEQ ID NO: 237451 - protein, 13 aa, Homo sapiens
  CDR3 for alpha chain variable domain of TCR clone 118726 (TRAV39, TRAJ58)
CSGEETSGSRLTF

SEQ ID NO: 237452 - protein, 13 aa, Homo sapiens
  CDR3 for beta chain variable domain of TCR clone 118726 (TRBV15, TRBJ2-7)
CATSTTGHYEQYF

SEQ ID NO: 237453 - protein, 16 aa, Homo sapiens
  CDR3 for alpha chain variable domain of TCR clone 118727 (TRAV8-3, TRAJ18)
CAVALDRGSTLGRLYF

SEQ ID NO: 237454 - protein, 11 aa, Homo sapiens
  CDR3 for beta chain variable domain of TCR clone 118727 (TRBV29-1, TRBJ1-1)
CSVEILTEALF

SEQ ID NO: 237455 - protein, 12 aa, Homo sapiens
  CDR3 for alpha chain variable domain of TCR clone 118728 (TRAV17, TRAJ54)
CATDKGAQKLVF

SEQ ID NO: 237456 - protein, 13 aa, Homo sapiens
  CDR3 for beta chain variable domain of TCR clone 118728 (TRBV28, TRBJ1-5)
CASRMTGDQPQHF

SEQ ID NO: 237457 - protein, 13 aa, Homo sapiens
  CDR3 for alpha chain variable domain of TCR clone 118729 (TRAV8-6, TRAJ41)
CAVSENSGYALNF

SEQ ID NO: 237458 - protein, 14 aa, Homo sapiens
  CDR3 for beta chain variable domain of TCR clone 118729 (TRBV19, TRBJ2-1)
CASPTFVLSGEQFF

SEQ ID NO: 237459 - protein, 15 aa, Homo sapiens
  CDR3 for alpha chain variable domain of TCR clone 118730 (TRAV21, TRAJ53)
CATLNSGGSNYKLTF

SEQ ID NO: 237460 - protein, 15 aa, Homo sapiens
  CDR3 for beta chain variable domain of TCR clone 118730 (TRBV27, TRBJ2-1)
CGSSNGGGSSNEQFF

SEQ ID NO: 237461 - protein, 13 aa, Homo sapiens
  CDR3 for alpha chain variable domain of TCR clone 118731 (TRAV13-1, TRAJ21)
CAASIYNFNKFYF

SEQ ID NO: 237462 - protein, 11 aa, Homo sapiens
  CDR3 for beta chain variable domain of TCR clone 118731 (TRBV29-1, TRBJ2-5)
CSEDRTGTQYF

SEQ ID NO: 237463 - protein, 13 aa, Homo sapiens
  CDR3 for alpha chain variable domain of TCR clone 118732 (TRAV3, TRAJ29)
CAVRYIIDTPLVF

SEQ ID NO: 237464 - protein, 14 aa, Homo sapiens
  CDR3 for beta chain variable domain of TCR clone 118732 (TRBV27, TRBJ2-1)
CASSATGGYNEQFF

SEQ ID NO: 237465 - protein, 16 aa, Homo sapiens
  CDR3 for alpha chain variable domain of TCR clone 118733 (TRAV8-3, TRAJ13)
CAVGAYPSGGYQKVTF

SEQ ID NO: 237466 - protein, 15 aa, Homo sapiens
  CDR3 for beta chain variable domain of TCR clone 118733 (TRBV19, TRBJ1-5)
CASSIVWADNQLQHF

SEQ ID NO: 237467 - protein, 12 aa, Homo sapiens
  CDR3 for alpha chain variable domain of TCR clone 118734 (TRAV12-3, TRAJ20)
CAMVRGDYKLSF

SEQ ID NO: 237468 - protein, 16 aa, Homo sapiens
  CDR3 for beta chain variable domain of TCR clone 118734 (TRBV5-1, TRBJ2-2)
CASSSLTGGRTGELFF

SEQ ID NO: 237469 - protein, 16 aa, Homo sapiens
  CDR3 for alpha chain variable domain of TCR clone 118735 (TRAV30, TRAJ24)
CGTEIVDADSWGKFQF

SEQ ID NO: 237470 - protein, 11 aa, Homo sapiens
  CDR3 for beta chain variable domain of TCR clone 118735 (TRBV5-6, TRBJ2-5)
CASSRERAQYF

SEQ ID NO: 237471 - protein, 12 aa, Homo sapiens
  CDR3 for alpha chain variable domain of TCR clone 118736 (TRAV13-2, TRAJ23)
CAERHRGGKLIF

SEQ ID NO: 237472 - protein, 15 aa, Homo sapiens
  CDR3 for beta chain variable domain of TCR clone 118736 (TRBV7-9, TRBJ1-6)
CASSSPGRGNSPRHF

SEQ ID NO: 237473 - protein, 12 aa, Homo sapiens
  CDR3 for alpha chain variable domain of TCR clone 118737 (TRAV20, TRAJ33)
CAVRGSNYQLIW

SEQ ID NO: 237474 - protein, 15 aa, Homo sapiens
  CDR3 for beta chain variable domain of TCR clone 118737 (TRBV28, TRBJ2-1)
CASSIIAGGRSEQFF

SEQ ID NO: 237475 - protein, 11 aa, Homo sapiens
  CDR3 for alpha chain variable domain of TCR clone 118738 (TRAV21, TRAJ34)
CAVTNTDKLIF

SEQ ID NO: 237476 - protein, 16 aa, Homo sapiens
  CDR3 for beta chain variable domain of TCR clone 118738 (TRBV18, TRBJ1-1)
CARSPGVGGRGGEAFF

SEQ ID NO: 237477 - protein, 14 aa, Homo sapiens
  CDR3 for alpha chain variable domain of TCR clone 118739 (TRAV13-1, TRAJ3)
CAASKSSSASKIIF

SEQ ID NO: 237478 - protein, 13 aa, Homo sapiens
  CDR3 for beta chain variable domain of TCR clone 118739 (TRBV25-1, TRBJ2-5)
CASSESGRDTQYF

SEQ ID NO: 237479 - protein, 12 aa, Homo sapiens
  CDR3 for alpha chain variable domain of TCR clone 118740 (TRAV36/DV7, TRAJ40)
CAVGTGTYKYIF

SEQ ID NO: 237480 - protein, 13 aa, Homo sapiens
  CDR3 for beta chain variable domain of TCR clone 118740 (TRBV10-3, TRBJ2-7)
CASKLAVNYEQYF

SEQ ID NO: 237481 - protein, 20 aa, Homo sapiens
  CDR3 for alpha chain variable domain of TCR clone 118741 (TRAV1-1, TRAJ4)
CLLLLRCEGFLSGGYNKLIF

SEQ ID NO: 237482 - protein, 14 aa, Homo sapiens
  CDR3 for beta chain variable domain of TCR clone 118741 (TRBV19, TRBJ2-1)
CASPTFVLSGEQFF

SEQ ID NO: 237483 - protein, 14 aa, Homo sapiens
  CDR3 for alpha chain variable domain of TCR clone 118742 (TRAV8-3, TRAJ42)
CAVGAWGSQGNLIF

SEQ ID NO: 237484 - protein, 14 aa, Homo sapiens
  CDR3 for beta chain variable domain of TCR clone 118742 (TRBV25-1, TRBJ1-1)
CASTHLGGNTEAFF

SEQ ID NO: 237485 - protein, 12 aa, Homo sapiens
  CDR3 for alpha chain variable domain of TCR clone 118743 (TRAV8-3, TRAJ26)
CAGDNYGQNLVF

SEQ ID NO: 237486 - protein, 15 aa, Homo sapiens
  CDR3 for beta chain variable domain of TCR clone 118743 (TRBV9, TRBJ2-1)
CASSLAGSSYNEQFF

SEQ ID NO: 237487 - protein, 15 aa, Homo sapiens
  CDR3 for alpha chain variable domain of TCR clone 118744 (TRAV3, TRAJ4)
CAQNMFSGGYNKLIF

SEQ ID NO: 237488 - protein, 14 aa, Homo sapiens
  CDR3 for beta chain variable domain of TCR clone 118744 (TRBV25-1, TRBJ1-1)
CASTHLGGNTEAFF

SEQ ID NO: 237489 - protein, 13 aa, Homo sapiens
  CDR3 for alpha chain variable domain of TCR clone 118745 (TRAV3, TRAJ33)
CAVRDRSNYQLIW

SEQ ID NO: 237490 - protein, 22 aa, Homo sapiens
  CDR3 for beta chain variable domain of TCR clone 118745 (TRBV29-1, TRBJ2-5)
TVSNMSPEDSSIYLCSAGTQYF

SEQ ID NO: 237491 - protein, 20 aa, Homo sapiens
  CDR3 for alpha chain variable domain of TCR clone 118746 (TRAV12-3, TRAJ41)
SLFIRNSQPSDSATPEALNF

SEQ ID NO: 237492 - protein, 15 aa, Homo sapiens
  CDR3 for beta chain variable domain of TCR clone 118746 (TRBV5-1, TRBJ2-7)
CASSLDLTSSYEQYF

SEQ ID NO: 237493 - protein, 15 aa, Homo sapiens
  CDR3 for alpha chain variable domain of TCR clone 118747 (TRAV3, TRAJ22)
CAVRDRGGSARQLTF

SEQ ID NO: 237494 - protein, 12 aa, Homo sapiens
  CDR3 for beta chain variable domain of TCR clone 118747 (TRBV2, TRBJ2-1)
CAYGPPGNEQFF

SEQ ID NO: 237495 - protein, 14 aa, Homo sapiens
  CDR3 for alpha chain variable domain of TCR clone 118748 (TRAV12-2, TRAJ53)
CAVKGGGSNYKLTF

SEQ ID NO: 237496 - protein, 14 aa, Homo sapiens
  CDR3 for beta chain variable domain of TCR clone 118748 (TRBV4-1, TRBJ2-2)
CASSQAVNTGELFF

SEQ ID NO: 237497 - protein, 17 aa, Homo sapiens
  CDR3 for alpha chain variable domain of TCR clone 118749 (TRAV13-1, TRAJ52)
CAASSGAGGTSYGKLTF

SEQ ID NO: 237498 - protein, 15 aa, Homo sapiens
  CDR3 for beta chain variable domain of TCR clone 118749 (TRBV2, TRBJ2-1)
CASSELAGSYNEQFV

SEQ ID NO: 237499 - protein, 11 aa, Homo sapiens
  CDR3 for alpha chain variable domain of TCR clone 118750 (TRAV16, TRAJ26)
CALTRWSEFCL

SEQ ID NO: 237500 - protein, 17 aa, Homo sapiens
  CDR3 for beta chain variable domain of TCR clone 118750 (TRBV11-2, TRBJ2-1)
CASSLYPPGVEYNEQFF

SEQ ID NO: 237501 - protein, 15 aa, Homo sapiens
  CDR3 for alpha chain variable domain of TCR clone 118751 (TRAV8-4, TRAJ37)
CAVTYGSSNTGKLIF

SEQ ID NO: 237502 - protein, 13 aa, Homo sapiens
  CDR3 for beta chain variable domain of TCR clone 118751 (TRBV12-4, TRBJ2-5)
WASSLGGSRTQYF

SEQ ID NO: 237503 - protein, 14 aa, Homo sapiens
  CDR3 for alpha chain variable domain of TCR clone 118752 (TRAV26-1, TRAJ38)
CIADNAGNNRKLIW

SEQ ID NO: 237504 - protein, 17 aa, Homo sapiens
  CDR3 for beta chain variable domain of TCR clone 118752 (TRBV7-9, TRBJ2-3)
CASSPTVAWDLTDTQYF

SEQ ID NO: 237505 - protein, 15 aa, Homo sapiens
  CDR3 for alpha chain variable domain of TCR clone 118753 (TRAV12-3, TRAJ54)
CAMSPTFQGAQKLVF

SEQ ID NO: 237506 - protein, 15 aa, Homo sapiens
  CDR3 for beta chain variable domain of TCR clone 118753 (TRBV20-1, TRBJ2-7)
CSARDRVSGMDEQYF

SEQ ID NO: 237507 - protein, 15 aa, Homo sapiens
  CDR3 for alpha chain variable domain of TCR clone 118754 (TRAV12-2, TRAJ57)
CAVSRGQGGSEKLVF

SEQ ID NO: 237508 - protein, 12 aa, Homo sapiens
  CDR3 for beta chain variable domain of TCR clone 118754 (TRBV11-2, TRBJ2-2)
CASSLGGGELFF

SEQ ID NO: 237509 - protein, 12 aa, Homo sapiens
  CDR3 for alpha chain variable domain of TCR clone 118755 (TRAV13-1, TRAJ21)
CAAKEGFNKFYF

SEQ ID NO: 237510 - protein, 13 aa, Homo sapiens
  CDR3 for beta chain variable domain of TCR clone 118755 (TRBV7-7, TRBJ2-2)
CASSLTSAGELFF

SEQ ID NO: 237511 - protein, 14 aa, Homo sapiens
  CDR3 for alpha chain variable domain of TCR clone 118756 (TRAV16, TRAJ33)
CALSAMDSNYQLIW

SEQ ID NO: 237512 - protein, 20 aa, Homo sapiens
  CDR3 for beta chain variable domain of TCR clone 118756 (TRBV11-2, TRBJ2-2)
LRTRPCISVPAASLPGSCFF

SEQ ID NO: 237513 - protein, 13 aa, Homo sapiens
  CDR3 for alpha chain variable domain of TCR clone 118757 (TRAV21, TRAJ57)
CAVTQGGSEKLVF

SEQ ID NO: 237514 - protein, 14 aa, Homo sapiens
  CDR3 for beta chain variable domain of TCR clone 118757 (TRBV7-2, TRBJ1-2)
CASSSQGAHYGYTF

SEQ ID NO: 237515 - protein, 14 aa, Homo sapiens
  CDR3 for alpha chain variable domain of TCR clone 118758 (TRAV1-2, TRAJ16)
CADNRFSDGQKLLF

SEQ ID NO: 237516 - protein, 11 aa, Homo sapiens
  CDR3 for beta chain variable domain of TCR clone 118758 (TRBV29-1, TRBJ2-5)
CSEDRTGTQYF

SEQ ID NO: 237517 - protein, 12 aa, Homo sapiens
  CDR3 for alpha chain variable domain of TCR clone 118759 (TRAV17, TRAJ34)
CATDAKGDKLIF

SEQ ID NO: 237518 - protein, 12 aa, Homo sapiens
  CDR3 for beta chain variable domain of TCR clone 118759 (TRBV5-1, TRBJ1-2)
CASSWDRDGYTF

SEQ ID NO: 237519 - protein, 15 aa, Homo sapiens
  CDR3 for alpha chain variable domain of TCR clone 118760 (TRAV26-1, TRAJ29)
CIVKVEGSGSTPLVF

SEQ ID NO: 237520 - protein, 14 aa, Homo sapiens
  CDR3 for beta chain variable domain of TCR clone 118760 (TRBV18, TRBJ2-5)
CASSPGVSQETQYF

SEQ ID NO: 237521 - protein, 15 aa, Homo sapiens
  CDR3 for alpha chain variable domain of TCR clone 118761 (TRAV3, TRAJ5)
CAVRDLDTGRRALTF

SEQ ID NO: 237522 - protein, 15 aa, Homo sapiens
  CDR3 for beta chain variable domain of TCR clone 118761 (TRBV7-2, TRBJ2-3)
CASSLASARTDTQYF

SEQ ID NO: 237523 - protein, 15 aa, Homo sapiens
  CDR3 for alpha chain variable domain of TCR clone 118762 (TRAV12-3, TRAJ6)
CAMSPASGGSYIPTF

SEQ ID NO: 237524 - protein, 16 aa, Homo sapiens
  CDR3 for beta chain variable domain of TCR clone 118762 (TRBV12-5, TRBJ2-5)
CASGPRTSGNQETQYF

SEQ ID NO: 237525 - protein, 13 aa, Homo sapiens
  CDR3 for alpha chain variable domain of TCR clone 118763 (TRAV8-3, TRAJ36)
CAVGATGANNLFF

SEQ ID NO: 237526 - protein, 14 aa, Homo sapiens
  CDR3 for beta chain variable domain of TCR clone 118763 (TRBV7-2, TRBJ1-1)
CASSFLTGTTEAFF

SEQ ID NO: 237527 - protein, 17 aa, Homo sapiens
  CDR3 for alpha chain variable domain of TCR clone 118764 (TRAV12-1, TRAJ8)
CVVNPKRVNTGFQKLVF

SEQ ID NO: 237528 - protein, 16 aa, Homo sapiens
  CDR3 for beta chain variable domain of TCR clone 118764 (TRBV7-9, TRBJ1-2)
CASSLGFSSGEDGYTF

SEQ ID NO: 237529 - protein, 14 aa, Homo sapiens
  CDR3 for alpha chain variable domain of TCR clone 118765 (TRAV2, TRAJ9)
CAVEDRSGGFKTIF

SEQ ID NO: 237530 - protein, 14 aa, Homo sapiens
  CDR3 for beta chain variable domain of TCR clone 118765 (TRBV7-6, TRBJ1-6)
CASSQAGGGSPLHF

SEQ ID NO: 237531 - protein, 17 aa, Homo sapiens
  CDR3 for alpha chain variable domain of TCR clone 118766 (TRAV3, TRAJ6)
CAVRDGPRAGGSYITTF

SEQ ID NO: 237532 - protein, 13 aa, Homo sapiens
  CDR3 for beta chain variable domain of TCR clone 118766 (TRBV19, TRBJ2-7)
CASSIDRTYEQYF

SEQ ID NO: 237533 - protein, 13 aa, Homo sapiens
  CDR3 for alpha chain variable domain of TCR clone 118767 (TRAV2, TRAJ24)
CAVPTDSWGKLQF

SEQ ID NO: 237534 - protein, 16 aa, Homo sapiens
  CDR3 for beta chain variable domain of TCR clone 118767 (TRBV6-1, TRBJ2-5)
CASSETLDRGAETQYF

SEQ ID NO: 237535 - protein, 15 aa, Homo sapiens
  CDR3 for alpha chain variable domain of TCR clone 118768 (TRAV12-1, TRAJ44)
CVVFVNTGTASKITF

SEQ ID NO: 237536 - protein, 16 aa, Homo sapiens
  CDR3 for beta chain variable domain of TCR clone 118768 (TRBV20-1, TRBJ2-5)
CSPGGTSGGYMETQYF

SEQ ID NO: 237537 - protein, 13 aa, Homo sapiens
  CDR3 for alpha chain variable domain of TCR clone 118769 (TRAV21, TRAJ44)
CAAHTGTASKLTF

SEQ ID NO: 237538 - protein, 15 aa, Homo sapiens
  CDR3 for beta chain variable domain of TCR clone 118769 (TRBV10-3, TRBJ2-2)
CAIRTDREDTGELFF

SEQ ID NO: 237539 - protein, 13 aa, Homo sapiens
  CDR3 for alpha chain variable domain of TCR clone 118770 (TRAV12-3, TRAJ53)
CAMRGGSNYKLIF

SEQ ID NO: 237540 - protein, 15 aa, Homo sapiens
  CDR3 for beta chain variable domain of TCR clone 118770 (TRBV2, TRBJ2-1)
CATQARLVMIGEQFF

SEQ ID NO: 237541 - protein, 13 aa, Homo sapiens
  CDR3 for alpha chain variable domain of TCR clone 118771 (TRAV29/DV5, TRAJ44)
CAASTGTASNLTF

SEQ ID NO: 237542 - protein, 11 aa, Homo sapiens
  CDR3 for beta chain variable domain of TCR clone 118771 (TRBV12-4, TRBJ2-3)
CASTATDTQYF

SEQ ID NO: 237543 - protein, 13 aa, Homo sapiens
  CDR3 for alpha chain variable domain of TCR clone 118772 (TRAV14/DV4, TRAJ16)
CAMREGSGPKLLF

SEQ ID NO: 237544 - protein, 15 aa, Homo sapiens
  CDR3 for beta chain variable domain of TCR clone 118772 (TRBV7-9, TRBJ2-7)
CASSLDLDRGYEQYF

SEQ ID NO: 237545 - protein, 13 aa, Homo sapiens
  CDR3 for alpha chain variable domain of TCR clone 118773 (TRAV12-2, TRAJ50)
CAVIVTSYDKVIF

SEQ ID NO: 237546 - protein, 20 aa, Homo sapiens
  CDR3 for beta chain variable domain of TCR clone 118773 (TRBV19, TRBJ2-7)
CASTQVAPESLRAVLRAGHQ

SEQ ID NO: 237547 - protein, 17 aa, Homo sapiens
  CDR3 for alpha chain variable domain of TCR clone 118774 (TRAV1-1, TRAJ4)
CALYNKLIFGAGTRLAV

SEQ ID NO: 237548 - protein, 18 aa, Homo sapiens
  CDR3 for beta chain variable domain of TCR clone 118774 (TRBV27, TRBJ2-7)
CASRTGQFFPGARDGQYF

SEQ ID NO: 237549 - protein, 10 aa, Homo sapiens
  CDR3 for alpha chain variable domain of TCR clone 118775 (TRAV16, TRAJ22)
SAMYLRQLTF

SEQ ID NO: 237550 - protein, 15 aa, Homo sapiens
  CDR3 for beta chain variable domain of TCR clone 118775 (TRBV11-3, TRBJ2-3)
CASLKDGREGDTQYF

SEQ ID NO: 237551 - protein, 14 aa, Homo sapiens
  CDR3 for alpha chain variable domain of TCR clone 118776 (TRAV20, TRAJ32)
CCVRYGGATNKLIF

SEQ ID NO: 237552 - protein, 16 aa, Homo sapiens
  CDR3 for beta chain variable domain of TCR clone 118776 (TRBV19, TRBJ2-2)
CASRSPGTGATGELFF

SEQ ID NO: 237553 - protein, 13 aa, Homo sapiens
  CDR3 for alpha chain variable domain of TCR clone 118777 (TRAV17, TRAJ39)
CATDYGAGNMLTF

SEQ ID NO: 237554 - protein, 14 aa, Homo sapiens
  CDR3 for beta chain variable domain of TCR clone 118777 (TRBV18, TRBJ2-7)
CASSPRGGAYEQYF

SEQ ID NO: 237555 - protein, 15 aa, Homo sapiens
  CDR3 for alpha chain variable domain of TCR clone 118778 (TRAV3, TRAJ32)
CAVSSYGGATNKLIF

SEQ ID NO: 237556 - protein, 13 aa, Homo sapiens
  CDR3 for beta chain variable domain of TCR clone 118778 (TRBV20-1, TRBJ2-7)
CSARPSTNYEQYF

SEQ ID NO: 237557 - protein, 11 aa, Homo sapiens
  CDR3 for alpha chain variable domain of TCR clone 118779 (TRAV2, TRAJ13)
CASGGYQKVTF

SEQ ID NO: 237558 - protein, 15 aa, Homo sapiens
  CDR3 for beta chain variable domain of TCR clone 118779 (TRBV7-3, TRBJ2-3)
CASSLTSGVGDTQYF

SEQ ID NO: 237559 - protein, 23 aa, Homo sapiens
  CDR3 for alpha chain variable domain of TCR clone 118780 (TRAV26-1, TRAJ38)
CIADNAGNNHIQNPDPAVYQLRD

SEQ ID NO: 237560 - protein, 13 aa, Homo sapiens
  CDR3 for beta chain variable domain of TCR clone 118780 (TRBV20-1, TRBJ1-1)
CSVRGGGNTEAFF

SEQ ID NO: 237561 - protein, 12 aa, Homo sapiens
  CDR3 for alpha chain variable domain of TCR clone 118781 (TRAV3, TRAJ20)
CAVRDPDYKLSF

SEQ ID NO: 237562 - protein, 16 aa, Homo sapiens
  CDR3 for beta chain variable domain of TCR clone 118781 (TRBV29-1, TRBJ2-7)
CSVEDAEDGTAYEQYF

SEQ ID NO: 237563 - protein, 13 aa, Homo sapiens
  CDR3 for alpha chain variable domain of TCR clone 118782 (TRAV35, TRAJ42)
CAGFPGSQGNLIF

SEQ ID NO: 237564 - protein, 13 aa, Homo sapiens
  CDR3 for beta chain variable domain of TCR clone 118782 (TRBV29-1, TRBJ2-1)
CSVEGGMVNEQFF

SEQ ID NO: 237565 - protein, 13 aa, Homo sapiens
  CDR3 for alpha chain variable domain of TCR clone 118783 (TRAV22, TRAJ29)
CAVGGSGNTPLVF

SEQ ID NO: 237566 - protein, 13 aa, Homo sapiens
  CDR3 for beta chain variable domain of TCR clone 118783 (TRBV4-2, TRBJ1-1)
CASSRAGNTEAFF

SEQ ID NO: 237567 - protein, 16 aa, Homo sapiens
  CDR3 for alpha chain variable domain of TCR clone 118784 (TRAV16, TRAJ4)
CALSRMFSGGYNKLIF

SEQ ID NO: 237568 - protein, 13 aa, Homo sapiens
  CDR3 for beta chain variable domain of TCR clone 118784 (TRBV20-1, TRBJ2-7)
CSASPDSPYEQYF

SEQ ID NO: 237569 - protein, 15 aa, Homo sapiens
  CDR3 for alpha chain variable domain of TCR clone 118785 (TRAV12-3, TRAJ52)
CNGGAVGTSYGKLTF

SEQ ID NO: 237570 - protein, 13 aa, Homo sapiens
  CDR3 for beta chain variable domain of TCR clone 118785 (TRBV20-1, TRBJ2-5)
CSARGDYQETQYF

SEQ ID NO: 237571 - protein, 15 aa, Homo sapiens
  CDR3 for alpha chain variable domain of TCR clone 118786 (TRAV29/DV5, TRAJ29)
CAASERSSGNTPLVF

SEQ ID NO: 237572 - protein, 15 aa, Homo sapiens
  CDR3 for beta chain variable domain of TCR clone 118786 (TRBV7-9, TRBJ1-6)
CASSSPGRGNSPLHF

SEQ ID NO: 237573 - protein, 14 aa, Homo sapiens
  CDR3 for alpha chain variable domain of TCR clone 118787 (TRAV1-2, TRAJ8)
CAVREDTGFQKLVF

SEQ ID NO: 237574 - protein, 17 aa, Homo sapiens
  CDR3 for beta chain variable domain of TCR clone 118787 (TRBV28, TRBJ2-5)
CASSTPEGDALQETQYF

SEQ ID NO: 237575 - protein, 14 aa, Homo sapiens
  CDR3 for alpha chain variable domain of TCR clone 118788 (TRAV12-2, TRAJ13)
CAVKKTGGYQKVTF

SEQ ID NO: 237576 - protein, 20 aa, Homo sapiens
  CDR3 for beta chain variable domain of TCR clone 118788 (TRBV7-8, TRBJ2-2)
CASSHLSPGPTIHITGELFF

SEQ ID NO: 237577 - protein, 11 aa, Homo sapiens
  CDR3 for alpha chain variable domain of TCR clone 118789 (TRAV12-1, TRAJ33)
CVVNMNYQLIW

SEQ ID NO: 237578 - protein, 14 aa, Homo sapiens
  CDR3 for beta chain variable domain of TCR clone 118789 (TRBV7-2, TRBJ1-2)
CASSQTGSTYGYTF

SEQ ID NO: 237579 - protein, 18 aa, Homo sapiens
  CDR3 for alpha chain variable domain of TCR clone 118790 (TRAV21, TRAJ52)
CAVRPSPAGGTSYGTLTF

SEQ ID NO: 237580 - protein, 14 aa, Homo sapiens
  CDR3 for beta chain variable domain of TCR clone 118790 (TRBV4-1, TRBJ2-2)
CASSQAVNTGELFF

SEQ ID NO: 237581 - protein, 14 aa, Homo sapiens
  CDR3 for alpha chain variable domain of TCR clone 118791 (TRAV27, TRAJ22)
CAGLPSGSARQLTF

SEQ ID NO: 237582 - protein, 16 aa, Homo sapiens
  CDR3 for beta chain variable domain of TCR clone 118791 (TRBV7-3, TRBJ2-2)
CASRLKRGTLSGELFF

SEQ ID NO: 237583 - protein, 23 aa, Homo sapiens
  CDR3 for alpha chain variable domain of TCR clone 118792 (TRAV26-1, )
CIADNAGNNHIQNPDPAVYQLRD

SEQ ID NO: 237584 - protein, 13 aa, Homo sapiens
  CDR3 for beta chain variable domain of TCR clone 118792 (TRBV20-1, TRBJ1-1)
CSARGGGNTEALF

SEQ ID NO: 237585 - protein, 18 aa, Homo sapiens
  CDR3 for alpha chain variable domain of TCR clone 118793 (TRAV1-1, TRAJ37)
CLLLLRCEIASNTGKLIF

SEQ ID NO: 237586 - protein, 11 aa, Homo sapiens
  CDR3 for beta chain variable domain of TCR clone 118793 (TRBV29-1, TRBJ2-5)
CSEDRTGTQYF

SEQ ID NO: 237587 - protein, 16 aa, Homo sapiens
  CDR3 for alpha chain variable domain of TCR clone 118794 (TRAV8-3, TRAJ45)
CAVGDGSGGGADGLTF

SEQ ID NO: 237588 - protein, 13 aa, Homo sapiens
  CDR3 for beta chain variable domain of TCR clone 118794 (TRBV7-9, TRBJ1-2)
CASSLKQNYGYTF

SEQ ID NO: 237589 - protein, 13 aa, Homo sapiens
  CDR3 for alpha chain variable domain of TCR clone 118795 (TRAV23/DV6, TRAJ12)
CAPRVDSSYKLIF

SEQ ID NO: 237590 - protein, 12 aa, Homo sapiens
  CDR3 for beta chain variable domain of TCR clone 118795 (TRBV7-8, TRBJ2-7)
CASGLGDREQYF

SEQ ID NO: 237591 - protein, 17 aa, Homo sapiens
  CDR3 for alpha chain variable domain of TCR clone 118796 (TRAV3, TRAJ6)
CAVRDGPRAGGSYIPTF

SEQ ID NO: 237592 - protein, 15 aa, Homo sapiens
  CDR3 for beta chain variable domain of TCR clone 118796 (TRBV7-3, TRBJ2-1)
CASSQRGGALIEQFF

SEQ ID NO: 237593 - protein, 14 aa, Homo sapiens
  CDR3 for alpha chain variable domain of TCR clone 118797 (TRAV8-2, TRAJ37)
CVVSISGNTGKLIF

SEQ ID NO: 237594 - protein, 16 aa, Homo sapiens
  CDR3 for beta chain variable domain of TCR clone 118797 (TRBV7-8, TRBJ2-6)
CASRVGDSSGANVLTF

SEQ ID NO: 237595 - protein, 15 aa, Homo sapiens
  CDR3 for alpha chain variable domain of TCR clone 118798 (TRAV26-1, TRAJ44)
CIVRANTGTASKLTF

SEQ ID NO: 237596 - protein, 16 aa, Homo sapiens
  CDR3 for beta chain variable domain of TCR clone 118798 (TRBV19, TRBJ2-3)
CASSPGAASRTDTQYF

SEQ ID NO: 237597 - protein, 16 aa, Homo sapiens
  CDR3 for alpha chain variable domain of TCR clone 118799 (TRAV12-3, TRAJ28)
CAMRANSGAGSYQLTF

SEQ ID NO: 237598 - protein, 16 aa, Homo sapiens
  CDR3 for beta chain variable domain of TCR clone 118799 (TRBV7-2, TRBJ1-3)
CASSRLEASSGTTIYF

SEQ ID NO: 237599 - protein, 16 aa, Homo sapiens
  CDR3 for alpha chain variable domain of TCR clone 118800 (TRAV12-1, TRAJ32)
CVVNKDYGGATNKLIF

SEQ ID NO: 237600 - protein, 15 aa, Homo sapiens
  CDR3 for beta chain variable domain of TCR clone 118800 (TRBV24-1, TRBJ2-1)
CATSDWNSGREEQFF

SEQ ID NO: 237601 - protein, 22 aa, Homo sapiens
  CDR3 for alpha chain variable domain of TCR clone 118801 (TRAV26-1, TRAJ42)
CIVRPNMEEAKEISSLEKALNS

SEQ ID NO: 237602 - protein, 16 aa, Homo sapiens
  CDR3 for beta chain variable domain of TCR clone 118801 (TRBV7-3, TRBJ2-2)
CASSLKRGTLSGELFF

SEQ ID NO: 237603 - protein, 11 aa, Homo sapiens
  CDR3 for alpha chain variable domain of TCR clone 118802 (TRAV21, TRAJ4)
HVSGGYNKLIF

SEQ ID NO: 237604 - protein, 13 aa, Homo sapiens
  CDR3 for beta chain variable domain of TCR clone 118802 (TRBV7-3, TRBJ2-5)
CASSLTAGEAQYF

SEQ ID NO: 237605 - protein, 14 aa, Homo sapiens
  CDR3 for alpha chain variable domain of TCR clone 118803 (TRAV38-1, TRAJ45)
CASHSGGCADGLTL

SEQ ID NO: 237606 - protein, 13 aa, Homo sapiens
  CDR3 for beta chain variable domain of TCR clone 118803 (TRBV10-3, TRBJ1-2)
CAISERDSYGYTF

SEQ ID NO: 237607 - protein, 14 aa, Homo sapiens
  CDR3 for alpha chain variable domain of TCR clone 118804 (TRAV12-2, TRAJ53)
CAVKGGGSNYKLTF

SEQ ID NO: 237608 - protein, 15 aa, Homo sapiens
  CDR3 for beta chain variable domain of TCR clone 118804 (TRBV11-2, TRBJ2-2)
CASSLDTGNTGELVF

SEQ ID NO: 237609 - protein, 12 aa, Homo sapiens
  CDR3 for alpha chain variable domain of TCR clone 118805 (TRAV2, TRAJ5)
CALDTGRRALTF

SEQ ID NO: 237610 - protein, 15 aa, Homo sapiens
  CDR3 for beta chain variable domain of TCR clone 118805 (TRBV10-3, TRBJ2-1)
CAISDVQDRAYEQFL

SEQ ID NO: 237611 - protein, 12 aa, Homo sapiens
  CDR3 for alpha chain variable domain of TCR clone 118806 (TRAV2, TRAJ31)
CAVEDNNARLMI

SEQ ID NO: 237612 - protein, 16 aa, Homo sapiens
  CDR3 for beta chain variable domain of TCR clone 118806 (TRBV10-3, TRBJ2-1)
CAISGVGDGGGGEQFF

SEQ ID NO: 237613 - protein, 14 aa, Homo sapiens
  CDR3 for alpha chain variable domain of TCR clone 118807 (TRAV12-2, TRAJ45)
CALPERGGADGLTF

SEQ ID NO: 237614 - protein, 15 aa, Homo sapiens
  CDR3 for beta chain variable domain of TCR clone 118807 (TRBV15, TRBJ1-5)
CATSTTGVVNQPQHF

SEQ ID NO: 237615 - protein, 14 aa, Homo sapiens
  CDR3 for alpha chain variable domain of TCR clone 118808 (TRAV13-1, TRAJ10)
CAAKEPGGGNRLTF

SEQ ID NO: 237616 - protein, 14 aa, Homo sapiens
  CDR3 for beta chain variable domain of TCR clone 118808 (TRBV6-6, TRBJ2-7)
CASSDSGAGYEQYF

SEQ ID NO: 237617 - protein, 13 aa, Homo sapiens
  CDR3 for alpha chain variable domain of TCR clone 118809 (TRAV35, TRAJ33)
CAGQLYGVCQLIW

SEQ ID NO: 237618 - protein, 14 aa, Homo sapiens
  CDR3 for beta chain variable domain of TCR clone 118809 (TRBV7-2, TRBJ1-1)
CASSLGGAGTEAFF

SEQ ID NO: 237619 - protein, 12 aa, Homo sapiens
  CDR3 for alpha chain variable domain of TCR clone 118810 (TRAV13-2, TRAJ23)
CAECHRGGKLIF

SEQ ID NO: 237620 - protein, 13 aa, Homo sapiens
  CDR3 for beta chain variable domain of TCR clone 118810 (TRBV7-9, TRBJ2-3)
CASSPGSTDTQYF

SEQ ID NO: 237621 - protein, 15 aa, Homo sapiens
  CDR3 for alpha chain variable domain of TCR clone 118811 (TRAV26-1, TRAJ38)
CIVRAEGGNNRKLIW

SEQ ID NO: 237622 - protein, 14 aa, Homo sapiens
  CDR3 for beta chain variable domain of TCR clone 118811 (TRBV7-6, TRBJ2-5)
CASSSPAGSETQYF

SEQ ID NO: 237623 - protein, 15 aa, Homo sapiens
  CDR3 for alpha chain variable domain of TCR clone 118812 (TRAV16, TRAJ4)
CALEDPSGGYNKPIF

SEQ ID NO: 237624 - protein, 13 aa, Homo sapiens
  CDR3 for beta chain variable domain of TCR clone 118812 (TRBV7-3, TRBJ2-7)
CASSQAGGYEQYF

SEQ ID NO: 237625 - protein, 12 aa, Homo sapiens
  CDR3 for alpha chain variable domain of TCR clone 118813 (TRAV12-3, TRAJ40)
CAMSSGTYKYIF

SEQ ID NO: 237626 - protein, 15 aa, Homo sapiens
  CDR3 for beta chain variable domain of TCR clone 118813 (TRBV7-3, TRBJ2-2)
CASSETGQGTGELFV

SEQ ID NO: 237627 - protein, 15 aa, Homo sapiens
  CDR3 for alpha chain variable domain of TCR clone 118814 (TRAV21, TRAJ53)
CATLNSGGSNYKLTF

SEQ ID NO: 237628 - protein, 16 aa, Homo sapiens
  CDR3 for beta chain variable domain of TCR clone 118814 (TRBV9, TRBJ2-1)
CASSVGGGGNYNQQFF

SEQ ID NO: 237629 - protein, 14 aa, Homo sapiens
  CDR3 for alpha chain variable domain of TCR clone 118815 (TRAV17, TRAJ12)
CATDREDSSYKLIF

SEQ ID NO: 237630 - protein, 13 aa, Homo sapiens
  CDR3 for beta chain variable domain of TCR clone 118815 (TRBV7-9, TRBJ1-2)
CASSLKQNYGYTF

SEQ ID NO: 237631 - protein, 14 aa, Homo sapiens
  CDR3 for alpha chain variable domain of TCR clone 118816 (TRAV35, TRAJ42)
CAGRYGGSQGNLSF

SEQ ID NO: 237632 - protein, 15 aa, Homo sapiens
  CDR3 for beta chain variable domain of TCR clone 118816 (TRBV7-9, TRBJ2-1)
CASSLGWGRANEQFF

SEQ ID NO: 237633 - protein, 15 aa, Homo sapiens
  CDR3 for alpha chain variable domain of TCR clone 118817 (TRAV26-1, TRAJ29)
CIVRVEGSGNTPLVF

SEQ ID NO: 237634 - protein, 13 aa, Homo sapiens
  CDR3 for beta chain variable domain of TCR clone 118817 (TRBV7-2, TRBJ2-2)
CASSLAVTGELFF

SEQ ID NO: 237635 - protein, 21 aa, Homo sapiens
  CDR3 for alpha chain variable domain of TCR clone 118818 (TRAV8-3, TRAJ6)
CAVGGEEATYLHFEEEPALLF

SEQ ID NO: 237636 - protein, 14 aa, Homo sapiens
  CDR3 for beta chain variable domain of TCR clone 118818 (TRBV5-1, TRBJ2-7)
CASSRGESLYEQYF

SEQ ID NO: 237637 - protein, 14 aa, Homo sapiens
  CDR3 for alpha chain variable domain of TCR clone 118819 (TRAV13-1, TRAJ6)
CAAVAYIWKRNQTY

SEQ ID NO: 237638 - protein, 14 aa, Homo sapiens
  CDR3 for beta chain variable domain of TCR clone 118819 (TRBV28, TRBJ2-3)
CASSLTDLLDTQYF

SEQ ID NO: 237639 - protein, 17 aa, Homo sapiens
  CDR3 for alpha chain variable domain of TCR clone 118820 (TRAV4, )
CLVDIQNPDPAVYQLRD

SEQ ID NO: 237640 - protein, 16 aa, Homo sapiens
  CDR3 for beta chain variable domain of TCR clone 118820 (TRBV20-1, TRBJ1-4)
CSAPGQGLLTNEKLFF

SEQ ID NO: 237641 - protein, 13 aa, Homo sapiens
  CDR3 for alpha chain variable domain of TCR clone 118821 (TRAV25, TRAJ30)
CAGRVDRDDKIIF

SEQ ID NO: 237642 - protein, 17 aa, Homo sapiens
  CDR3 for beta chain variable domain of TCR clone 118821 (TRBV7-9, TRBJ2-6)
CASSFGVGYSGANVLTF

SEQ ID NO: 237643 - protein, 14 aa, Homo sapiens
  CDR3 for alpha chain variable domain of TCR clone 118822 (TRAV1-1, TRAJ27)
CAVIYNTNAGKSTF

SEQ ID NO: 237644 - protein, 15 aa, Homo sapiens
  CDR3 for beta chain variable domain of TCR clone 118822 (TRBV7-2, TRBJ2-7)
CASSLKGALTYEQYF

SEQ ID NO: 237645 - protein, 13 aa, Homo sapiens
  CDR3 for alpha chain variable domain of TCR clone 118823 (TRAV8-2, TRAJ11)
CVVNRSGYSTLTF

SEQ ID NO: 237646 - protein, 11 aa, Homo sapiens
  CDR3 for beta chain variable domain of TCR clone 118823 (TRBV11-2, TRBJ2-2)
CASSLPGELFF

SEQ ID NO: 237647 - protein, 13 aa, Homo sapiens
  CDR3 for alpha chain variable domain of TCR clone 118824 (TRAV3, TRAJ21)
CAVREPDFNKFYF

SEQ ID NO: 237648 - protein, 14 aa, Homo sapiens
  CDR3 for beta chain variable domain of TCR clone 118824 (TRBV18, TRBJ2-5)
CASSPGVSQETQYF

SEQ ID NO: 237649 - protein, 17 aa, Homo sapiens
  CDR3 for alpha chain variable domain of TCR clone 118825 (TRAV8-1, TRAJ43)
CAVTNGMRFGAGTRLTV

SEQ ID NO: 237650 - protein, 15 aa, Homo sapiens
  CDR3 for beta chain variable domain of TCR clone 118825 (TRBV11-3, TRBJ2-7)
CASSPGPASSYEQYF

SEQ ID NO: 237651 - protein, 12 aa, Homo sapiens
  CDR3 for alpha chain variable domain of TCR clone 118826 (TRAV12-3, TRAJ17)
CAMTLTGNKLTF

SEQ ID NO: 237652 - protein, 17 aa, Homo sapiens
  CDR3 for beta chain variable domain of TCR clone 118826 (TRBV7-8, TRBJ2-1)
CASSPPTGTLAYNEQFF

SEQ ID NO: 237653 - protein, 14 aa, Homo sapiens
  CDR3 for alpha chain variable domain of TCR clone 118827 (TRAV12-2, TRAJ44)
CAVNPAGTASKLTF

SEQ ID NO: 237654 - protein, 14 aa, Homo sapiens
  CDR3 for beta chain variable domain of TCR clone 118827 (TRBV7-6, TRBJ2-3)
CASSLGTVTDTQYF

SEQ ID NO: 237655 - protein, 14 aa, Homo sapiens
  CDR3 for alpha chain variable domain of TCR clone 118828 (TRAV1-2, TRAJ16)
CAVRGFSDGQKLLF

SEQ ID NO: 237656 - protein, 16 aa, Homo sapiens
  CDR3 for beta chain variable domain of TCR clone 118828 (TRBV7-3, TRBJ2-2)
CASSLKRGTLSGELFF

SEQ ID NO: 237657 - protein, 16 aa, Homo sapiens
  CDR3 for alpha chain variable domain of TCR clone 118829 (TRAV17, TRAJ52)
CATGIIGGTSFGKLTF

SEQ ID NO: 237658 - protein, 12 aa, Homo sapiens
  CDR3 for beta chain variable domain of TCR clone 118829 (TRBV7-3, TRBJ2-1)
CASSFINNEQFF

SEQ ID NO: 237659 - protein, 14 aa, Homo sapiens
  CDR3 for alpha chain variable domain of TCR clone 118830 (TRAV38-1, TRAJ54)
CAFMSPSGAQKLGF

SEQ ID NO: 237660 - protein, 16 aa, Homo sapiens
  CDR3 for beta chain variable domain of TCR clone 118830 (TRBV28, TRBJ2-1)
CASSLGGSGSYNEQFF

SEQ ID NO: 237661 - protein, 14 aa, Homo sapiens
  CDR3 for alpha chain variable domain of TCR clone 118831 (TRAV13-1, TRAJ13)
CAASRVGGYQKVNF

SEQ ID NO: 237662 - protein, 15 aa, Homo sapiens
  CDR3 for beta chain variable domain of TCR clone 118831 (TRBV28, TRBJ2-1)
CASSIIAGGRSEQFF

SEQ ID NO: 237663 - protein, 14 aa, Homo sapiens
  CDR3 for alpha chain variable domain of TCR clone 118832 (TRAV17, TRAJ43)
CATDHPYNNNDMRF

SEQ ID NO: 237664 - protein, 16 aa, Homo sapiens
  CDR3 for beta chain variable domain of TCR clone 118832 (TRBV4-2, TRBJ2-1)
CASSPRAGQGANEQFF

SEQ ID NO: 237665 - protein, 14 aa, Homo sapiens
  CDR3 for alpha chain variable domain of TCR clone 118833 (TRAV1-2, TRAJ16)
CAVNRFSDGQKLLF

SEQ ID NO: 237666 - protein, 17 aa, Homo sapiens
  CDR3 for beta chain variable domain of TCR clone 118833 (TRBV7-9, TRBJ2-6)
CASSFGAGYSGANVLTF

SEQ ID NO: 237667 - protein, 13 aa, Homo sapiens
  CDR3 for alpha chain variable domain of TCR clone 118834 (TRAV1-2, TRAJ31)
CAVRPNNNARLMF

SEQ ID NO: 237668 - protein, 17 aa, Homo sapiens
  CDR3 for beta chain variable domain of TCR clone 118834 (TRBV13, TRBJ2-3)
CASSLSRVAGGRNTQYF

SEQ ID NO: 237669 - protein, 14 aa, Homo sapiens
  CDR3 for alpha chain variable domain of TCR clone 118835 (TRAV35, TRAJ53)
CAGNSGGSNYKLTF

SEQ ID NO: 237670 - protein, 11 aa, Homo sapiens
  CDR3 for beta chain variable domain of TCR clone 118835 (TRBV4-1, TRBJ1-4)
CASKENEKLSF

SEQ ID NO: 237671 - protein, 16 aa, Homo sapiens
  CDR3 for alpha chain variable domain of TCR clone 118836 (TRAV30, TRAJ24)
CGTEIVDADSWGKFQF

SEQ ID NO: 237672 - protein, 13 aa, Homo sapiens
  CDR3 for beta chain variable domain of TCR clone 118836 (TRBV19, TRBJ1-2)
CASSVPGQDGYAF

SEQ ID NO: 237673 - protein, 14 aa, Homo sapiens
  CDR3 for alpha chain variable domain of TCR clone 118837 (TRAV12-1, TRAJ9)
CVVNKGTGGFKTIF

SEQ ID NO: 237674 - protein, 16 aa, Homo sapiens
  CDR3 for beta chain variable domain of TCR clone 118837 (TRBV4-3, TRBJ2-2)
CASSRDRGSDTGELFF

SEQ ID NO: 237675 - protein, 15 aa, Homo sapiens
  CDR3 for alpha chain variable domain of TCR clone 118838 (TRAV23/DV6, TRAJ44)
CAARTLTGTASKLTF

SEQ ID NO: 237676 - protein, 17 aa, Homo sapiens
  CDR3 for beta chain variable domain of TCR clone 118838 (TRBV24-1, TRBJ2-1)
CATSAVSTSGTYNEQFF

SEQ ID NO: 237677 - protein, 11 aa, Homo sapiens
  CDR3 for alpha chain variable domain of TCR clone 118839 (TRAV2, TRAJ21)
CAVFNFNKFYF

SEQ ID NO: 237678 - protein, 11 aa, Homo sapiens
  CDR3 for beta chain variable domain of TCR clone 118839 (TRBV4-1, TRBJ2-2)
CASEHTGELFF

SEQ ID NO: 237679 - protein, 11 aa, Homo sapiens
  CDR3 for alpha chain variable domain of TCR clone 118840 (TRAV12-3, TRAJ27)
CAMANAGKSTF

SEQ ID NO: 237680 - protein, 14 aa, Homo sapiens
  CDR3 for beta chain variable domain of TCR clone 118840 (TRBV7-8, TRBJ2-3)
CASSLEAGTDTQYF

SEQ ID NO: 237681 - protein, 14 aa, Homo sapiens
  CDR3 for alpha chain variable domain of TCR clone 118841 (TRAV14/DV4, TRAJ20)
CAMRESLNDYKLSF

SEQ ID NO: 237682 - protein, 14 aa, Homo sapiens
  CDR3 for beta chain variable domain of TCR clone 118841 (TRBV7-6, TRBJ2-3)
CASSLGTVTDTQYF

SEQ ID NO: 237683 - protein, 14 aa, Homo sapiens
  CDR3 for alpha chain variable domain of TCR clone 118842 (TRAV13-1, TRAJ9)
CAASALTGGFKTIL

SEQ ID NO: 237684 - protein, 16 aa, Homo sapiens
  CDR3 for beta chain variable domain of TCR clone 118842 (TRBV7-8, TRBJ2-4)
CASSAERTLAKNIQYF

SEQ ID NO: 237685 - protein, 12 aa, Homo sapiens
  CDR3 for alpha chain variable domain of TCR clone 118843 (TRAV3, TRAJ20)
CAVRDGDYKLSF

SEQ ID NO: 237686 - protein, 13 aa, Homo sapiens
  CDR3 for beta chain variable domain of TCR clone 118843 (TRBV7-7, TRBJ2-3)
CASSLSRADTQYF

SEQ ID NO: 237687 - protein, 16 aa, Homo sapiens
  CDR3 for alpha chain variable domain of TCR clone 118844 (TRAV26-2, TRAJ57)
CILRDVGSCGSEKLVF

SEQ ID NO: 237688 - protein, 13 aa, Homo sapiens
  CDR3 for beta chain variable domain of TCR clone 118844 (TRBV18, TRBJ2-3)
CASSPGVTDTQYF

SEQ ID NO: 237689 - protein, 14 aa, Homo sapiens
  CDR3 for alpha chain variable domain of TCR clone 118845 (TRAV13-1, TRAJ35)
CAASKGGFGNLLHC

SEQ ID NO: 237690 - protein, 15 aa, Homo sapiens
  CDR3 for beta chain variable domain of TCR clone 118845 (TRBV28, TRBJ2-1)
CASSGLAEVDNEQFF

SEQ ID NO: 237691 - protein, 13 aa, Homo sapiens
  CDR3 for alpha chain variable domain of TCR clone 118846 (TRAV36/DV7, TRAJ38)
CVANAGNNRKLMW

SEQ ID NO: 237692 - protein, 14 aa, Homo sapiens
  CDR3 for beta chain variable domain of TCR clone 118846 (TRBV7-2, TRBJ2-7)
CASSLRWEVNEQYF

SEQ ID NO: 237693 - protein, 13 aa, Homo sapiens
  CDR3 for alpha chain variable domain of TCR clone 118847 (TRAV16, TRAJ7)
CAPLLGGNNRLAF

SEQ ID NO: 237694 - protein, 12 aa, Homo sapiens
  CDR3 for beta chain variable domain of TCR clone 118847 (TRBV7-8, TRBJ2-7)
CASSLGDREQYF

SEQ ID NO: 237695 - protein, 11 aa, Homo sapiens
  CDR3 for alpha chain variable domain of TCR clone 118848 (TRAV12-1, TRAJ15)
CVVNAGTAPIF

SEQ ID NO: 237696 - protein, 16 aa, Homo sapiens
  CDR3 for beta chain variable domain of TCR clone 118848 (TRBV28, TRBJ2-1)
CASSSRVRDSYNEQFF

SEQ ID NO: 237697 - protein, 15 aa, Homo sapiens
  CDR3 for alpha chain variable domain of TCR clone 118849 (TRAV20, TRAJ6)
CAVRLQSGGSYIPTF

SEQ ID NO: 237698 - protein, 14 aa, Homo sapiens
  CDR3 for beta chain variable domain of TCR clone 118849 (TRBV12-4, TRBJ2-7)
CASSALGGWYEQYF

SEQ ID NO: 237699 - protein, 15 aa, Homo sapiens
  CDR3 for alpha chain variable domain of TCR clone 118850 (TRAV1-2, TRAJ34)
CLLPLCSPYTDKLIF

SEQ ID NO: 237700 - protein, 13 aa, Homo sapiens
  CDR3 for beta chain variable domain of TCR clone 118850 (TRBV7-9, TRBJ1-2)
CASSLKQNYGYTF

SEQ ID NO: 237701 - protein, 13 aa, Homo sapiens
  CDR3 for alpha chain variable domain of TCR clone 118851 (TRAV12-1, TRAJ42)
CGGVGGSQGNLIF

SEQ ID NO: 237702 - protein, 15 aa, Homo sapiens
  CDR3 for beta chain variable domain of TCR clone 118851 (TRBV2, TRBJ2-1)
CASSEARSAYNEQFF

SEQ ID NO: 237703 - protein, 13 aa, Homo sapiens
  CDR3 for alpha chain variable domain of TCR clone 118852 (TRAV12-2, TRAJ6)
CAVNVSRKLHTYI

SEQ ID NO: 237704 - protein, 15 aa, Homo sapiens
  CDR3 for beta chain variable domain of TCR clone 118852 (TRBV18, TRBJ1-5)
CASSPSDRSNQPQHF

SEQ ID NO: 237705 - protein, 12 aa, Homo sapiens
  CDR3 for alpha chain variable domain of TCR clone 118853 (TRAV4, TRAJ6)
CLAPGGSYIATF

SEQ ID NO: 237706 - protein, 17 aa, Homo sapiens
  CDR3 for beta chain variable domain of TCR clone 118853 (TRBV20-1, TRBJ2-2)
CSASGSGQGGLTGELFF

SEQ ID NO: 237707 - protein, 16 aa, Homo sapiens
  CDR3 for alpha chain variable domain of TCR clone 118854 (TRAV8-2, TRAJ7)
CVVSEGPYYGNNRLAF

SEQ ID NO: 237708 - protein, 16 aa, Homo sapiens
  CDR3 for beta chain variable domain of TCR clone 118854 (TRBV29-1, TRBJ1-2)
CSVEANRDIANYGYTF

SEQ ID NO: 237709 - protein, 15 aa, Homo sapiens
  CDR3 for alpha chain variable domain of TCR clone 118855 (TRAV21, TRAJ37)
CAVRPTLSNTGKLIF

SEQ ID NO: 237710 - protein, 16 aa, Homo sapiens
  CDR3 for beta chain variable domain of TCR clone 118855 (TRBV24-1, TRBJ2-3)
CATSDRQQDLTDTQYF

SEQ ID NO: 237711 - protein, 13 aa, Homo sapiens
  CDR3 for alpha chain variable domain of TCR clone 118856 (TRAV2, TRAJ40)
CAVVTSGTYKYIF

SEQ ID NO: 237712 - protein, 13 aa, Homo sapiens
  CDR3 for beta chain variable domain of TCR clone 118856 (TRBV7-8, TRBJ2-7)
CASSLTGGREQYF

SEQ ID NO: 237713 - protein, 10 aa, Homo sapiens
  CDR3 for alpha chain variable domain of TCR clone 118857 (TRAV16, TRAJ22)
SAMYLRQLAF

SEQ ID NO: 237714 - protein, 15 aa, Homo sapiens
  CDR3 for beta chain variable domain of TCR clone 118857 (TRBV7-9, TRBJ1-6)
CASSSPGCGNSPLHF

SEQ ID NO: 237715 - protein, 16 aa, Homo sapiens
  CDR3 for alpha chain variable domain of TCR clone 118858 (TRAV30, TRAJ24)
CGTEIVDADSWGKFQF

SEQ ID NO: 237716 - protein, 17 aa, Homo sapiens
  CDR3 for beta chain variable domain of TCR clone 118858 (TRBV20-1, TRBJ2-1)
CSASSSGLAGPYNEQFF

SEQ ID NO: 237717 - protein, 14 aa, Homo sapiens
  CDR3 for alpha chain variable domain of TCR clone 118859 (TRAV12-2, TRAJ40)
CAVKIPSGTYKYIF

SEQ ID NO: 237718 - protein, 18 aa, Homo sapiens
  CDR3 for beta chain variable domain of TCR clone 118859 (TRBV20-1, TRBJ2-6)
CSAGTTPTHGSGANVLTF

SEQ ID NO: 237719 - protein, 17 aa, Homo sapiens
  CDR3 for alpha chain variable domain of TCR clone 118860 (TRAV1-1, TRAJ4)
CALYNKLIFGAGTRLAV

SEQ ID NO: 237720 - protein, 16 aa, Homo sapiens
  CDR3 for beta chain variable domain of TCR clone 118860 (TRBV7-3, TRBJ2-2)
RASSLKRGTLSGELFF

SEQ ID NO: 237721 - protein, 16 aa, Homo sapiens
  CDR3 for alpha chain variable domain of TCR clone 118861 (TRAV16, TRAJ4)
CALSRMLSGGYNKLIF

SEQ ID NO: 237722 - protein, 12 aa, Homo sapiens
  CDR3 for beta chain variable domain of TCR clone 118861 (TRBV29-1, TRBJ2-3)
CSVTGGADTQYF

SEQ ID NO: 237723 - protein, 17 aa, Homo sapiens
  CDR3 for alpha chain variable domain of TCR clone 118862 (TRAV3, TRAJ42)
CAVRDRDYGGSQGNLIF

SEQ ID NO: 237724 - protein, 15 aa, Homo sapiens
  CDR3 for beta chain variable domain of TCR clone 118862 (TRBV4-2, TRBJ1-2)
CASSQRTGGRDGYTF

SEQ ID NO: 237725 - protein, 13 aa, Homo sapiens
  CDR3 for alpha chain variable domain of TCR clone 118863 (TRAV13-1, TRAJ21)
CAASIYNFNKFYF

SEQ ID NO: 237726 - protein, 15 aa, Homo sapiens
  CDR3 for beta chain variable domain of TCR clone 118863 (TRBV2, TRBJ2-1)
CASSELAGSYNEQFF

SEQ ID NO: 237727 - protein, 14 aa, Homo sapiens
  CDR3 for alpha chain variable domain of TCR clone 118864 (TRAV9-2, TRAJ39)
CALYIYNAGNMLTF

SEQ ID NO: 237728 - protein, 13 aa, Homo sapiens
  CDR3 for beta chain variable domain of TCR clone 118864 (TRBV11-3, TRBJ1-1)
CASSRQPDTEAFF

SEQ ID NO: 237729 - protein, 13 aa, Homo sapiens
  CDR3 for alpha chain variable domain of TCR clone 118865 (TRAV20, TRAJ37)
CAGCSSNTGKLIF

SEQ ID NO: 237730 - protein, 15 aa, Homo sapiens
  CDR3 for beta chain variable domain of TCR clone 118865 (TRBV28, TRBJ1-3)
CASSMGWASGNTIYF

SEQ ID NO: 237731 - protein, 17 aa, Homo sapiens
  CDR3 for alpha chain variable domain of TCR clone 118866 (TRAV23/DV6, TRAJ58)
CAARLLRGETSGSRLTF

SEQ ID NO: 237732 - protein, 14 aa, Homo sapiens
  CDR3 for beta chain variable domain of TCR clone 118866 (TRBV7-2, TRBJ2-7)
CASSPKTSFYEQYF

SEQ ID NO: 237733 - protein, 13 aa, Homo sapiens
  CDR3 for alpha chain variable domain of TCR clone 118867 (TRAV21, TRAJ27)
CAARPGNAGKSTF

SEQ ID NO: 237734 - protein, 16 aa, Homo sapiens
  CDR3 for beta chain variable domain of TCR clone 118867 (TRBV9, TRBJ2-1)
CASSVGGGGNYNEQFF

SEQ ID NO: 237735 - protein, 14 aa, Homo sapiens
  CDR3 for alpha chain variable domain of TCR clone 118868 (TRAV12-1, TRAJ17)
CVVNYKAAGNKLTF

SEQ ID NO: 237736 - protein, 16 aa, Homo sapiens
  CDR3 for beta chain variable domain of TCR clone 118868 (TRBV4-2, TRBJ2-3)
CASSLSGTGSTDTQYF

SEQ ID NO: 237737 - protein, 13 aa, Homo sapiens
  CDR3 for alpha chain variable domain of TCR clone 118869 (TRAV13-1, TRAJ17)
SSGSKAAGNKLTF

SEQ ID NO: 237738 - protein, 14 aa, Homo sapiens
  CDR3 for beta chain variable domain of TCR clone 118869 (TRBV7-9, TRBJ2-1)
CASSSMVGFGEQFF

SEQ ID NO: 237739 - protein, 12 aa, Homo sapiens
  CDR3 for alpha chain variable domain of TCR clone 118870 (TRAV13-1, TRAJ21)
CAAKEGFNKFYF

SEQ ID NO: 237740 - protein, 12 aa, Homo sapiens
  CDR3 for beta chain variable domain of TCR clone 118870 (TRBV7-9, TRBJ1-1)
CASSLVRGEAFF

SEQ ID NO: 237741 - protein, 13 aa, Homo sapiens
  CDR3 for alpha chain variable domain of TCR clone 118871 (TRAV12-3, TRAJ7)
CAMSASGNNRLAF

SEQ ID NO: 237742 - protein, 17 aa, Homo sapiens
  CDR3 for beta chain variable domain of TCR clone 118871 (TRBV13, TRBJ2-3)
CASSLSRVAGGRNTQYF

SEQ ID NO: 237743 - protein, 18 aa, Homo sapiens
  CDR3 for alpha chain variable domain of TCR clone 118872 (TRAV26-1, TRAJ23)
CIVRVGLEVWNQGGKLIF

SEQ ID NO: 237744 - protein, 16 aa, Homo sapiens
  CDR3 for beta chain variable domain of TCR clone 118872 (TRBV12-4, TRBJ2-5)
CANSFFVRGRQETQYF

SEQ ID NO: 237745 - protein, 14 aa, Homo sapiens
  CDR3 for alpha chain variable domain of TCR clone 118873 (TRAV20, TRAJ56)
CAVQFGGANSKLTF

SEQ ID NO: 237746 - protein, 19 aa, Homo sapiens
  CDR3 for beta chain variable domain of TCR clone 118873 (TRBV2, TRBJ2-2)
CASSQPGLAGGGNTGELFF

SEQ ID NO: 237747 - protein, 11 aa, Homo sapiens
  CDR3 for alpha chain variable domain of TCR clone 118874 (TRAV2, TRAJ21)
CDVFNFNKFYF

SEQ ID NO: 237748 - protein, 14 aa, Homo sapiens
  CDR3 for beta chain variable domain of TCR clone 118874 (TRBV15, TRBJ2-3)
CATRSGTSTDTQYF

SEQ ID NO: 237749 - protein, 17 aa, Homo sapiens
  CDR3 for alpha chain variable domain of TCR clone 118875 (TRAV29/DV5, TRAJ10)
CSVLLGRATGGGNKLTF

SEQ ID NO: 237750 - protein, 14 aa, Homo sapiens
  CDR3 for beta chain variable domain of TCR clone 118875 (TRBV6-1, TRBJ1-3)
CASVQGGGGNTIYF

SEQ ID NO: 237751 - protein, 15 aa, Homo sapiens
  CDR3 for alpha chain variable domain of TCR clone 118876 (TRAV1-2, TRAJ26)
CAVRDLITMVRILSL

SEQ ID NO: 237752 - protein, 13 aa, Homo sapiens
  CDR3 for beta chain variable domain of TCR clone 118876 (TRBV5-5, TRBJ1-2)
CASSFWRGEDYTF

SEQ ID NO: 237753 - protein, 18 aa, Homo sapiens
  CDR3 for alpha chain variable domain of TCR clone 118877 (TRAV13-1, TRAJ52)
CAASKRSAGGTSYGKLTF

SEQ ID NO: 237754 - protein, 14 aa, Homo sapiens
  CDR3 for beta chain variable domain of TCR clone 118877 (TRBV2, TRBJ2-7)
CASSRDRSSYEQYF

SEQ ID NO: 237755 - protein, 13 aa, Homo sapiens
  CDR3 for alpha chain variable domain of TCR clone 118878 (TRAV36/DV7, TRAJ54)
CAVLIQGAQKLVF

SEQ ID NO: 237756 - protein, 17 aa, Homo sapiens
  CDR3 for beta chain variable domain of TCR clone 118878 (TRBV23-1, TRBJ2-1)
CASSHAQRGGGAMSSSS

SEQ ID NO: 237757 - protein, 14 aa, Homo sapiens
  CDR3 for alpha chain variable domain of TCR clone 118879 (TRAV1-2, TRAJ8)
CAVREDTGFQRLVF

SEQ ID NO: 237758 - protein, 13 aa, Homo sapiens
  CDR3 for beta chain variable domain of TCR clone 118879 (TRBV7-6, TRBJ1-2)
CASSLVADYGYTF

SEQ ID NO: 237759 - protein, 15 aa, Homo sapiens
  CDR3 for alpha chain variable domain of TCR clone 118880 (TRAV26-1, TRAJ23)
CIVRVAGYQGGKLIF

SEQ ID NO: 237760 - protein, 16 aa, Homo sapiens
  CDR3 for beta chain variable domain of TCR clone 118880 (TRBV24-1, TRBJ2-3)
CATSDPGTGATDTQYF

SEQ ID NO: 237761 - protein, 17 aa, Homo sapiens
  CDR3 for alpha chain variable domain of TCR clone 118881 (TRAV3, TRAJ6)
CAVRDGPRAGGSYIPTF

SEQ ID NO: 237762 - protein, 13 aa, Homo sapiens
  CDR3 for beta chain variable domain of TCR clone 118881 (TRBV29-1, TRBJ2-1)
CSVEGGRVNEQFF

SEQ ID NO: 237763 - protein, 15 aa, Homo sapiens
  CDR3 for alpha chain variable domain of TCR clone 118882 (TRAV16, TRAJ20)
CALKGGLRADYRLSF

SEQ ID NO: 237764 - protein, 16 aa, Homo sapiens
  CDR3 for beta chain variable domain of TCR clone 118882 (TRBV11-3, TRBJ2-2)
CASSSRTSPGTGELFF

SEQ ID NO: 237765 - protein, 15 aa, Homo sapiens
  CDR3 for alpha chain variable domain of TCR clone 118883 (TRAV8-3, TRAJ15)
CAVGAPNQAGTDLIF

SEQ ID NO: 237766 - protein, 14 aa, Homo sapiens
  CDR3 for beta chain variable domain of TCR clone 118883 (TRBV20-1, TRBJ2-1)
CSPNDEASYNEQFF

SEQ ID NO: 237767 - protein, 14 aa, Homo sapiens
  CDR3 for alpha chain variable domain of TCR clone 118884 (TRAV2, TRAJ37)
CAVDFTSNTGKLIF

SEQ ID NO: 237768 - protein, 19 aa, Homo sapiens
  CDR3 for beta chain variable domain of TCR clone 118884 (TRBV25-1, TRBJ2-2)
CAILVYRVDRGRKTGELFF

SEQ ID NO: 237769 - protein, 14 aa, Homo sapiens
  CDR3 for alpha chain variable domain of TCR clone 118885 (TRAV25, TRAJ35)
CARRMEGFGNVLHC

SEQ ID NO: 237770 - protein, 15 aa, Homo sapiens
  CDR3 for beta chain variable domain of TCR clone 118885 (TRBV11-2, TRBJ1-2)
CASSLEGVQRNGYTF

SEQ ID NO: 237771 - protein, 15 aa, Homo sapiens
  CDR3 for alpha chain variable domain of TCR clone 118886 (TRAV21, TRAJ53)
CAALNSGGSNYKLTF

SEQ ID NO: 237772 - protein, 14 aa, Homo sapiens
  CDR3 for beta chain variable domain of TCR clone 118886 (TRBV7-2, TRBJ2-1)
CASSLTSGNRRQFF

SEQ ID NO: 237773 - protein, 18 aa, Homo sapiens
  CDR3 for alpha chain variable domain of TCR clone 118887 (TRAV38-2/DV8, TRAJ42)
CAYRSADITGGSQGNLIF

SEQ ID NO: 237774 - protein, 12 aa, Homo sapiens
  CDR3 for beta chain variable domain of TCR clone 118887 (TRBV11-2, TRBJ2-2)
CASSLGGGELFF

SEQ ID NO: 237775 - protein, 14 aa, Homo sapiens
  CDR3 for alpha chain variable domain of TCR clone 118888 (TRAV12-2, TRAJ53)
CRERGGGSNYKLTF

SEQ ID NO: 237776 - protein, 14 aa, Homo sapiens
  CDR3 for beta chain variable domain of TCR clone 118888 (TRBV19, TRBJ2-2)
CDSSTLHRSGELFF

SEQ ID NO: 237777 - protein, 14 aa, Homo sapiens
  CDR3 for alpha chain variable domain of TCR clone 118889 (TRAV17, TRAJ57)
CATDPQGGSEKLVF

SEQ ID NO: 237778 - protein, 13 aa, Homo sapiens
  CDR3 for beta chain variable domain of TCR clone 118889 (TRBV12-4, TRBJ2-7)
CASSPTETYEQYF

SEQ ID NO: 237779 - protein, 12 aa, Homo sapiens
  CDR3 for alpha chain variable domain of TCR clone 118890 (TRAV12-2, TRAJ21)
CAVRYNFNEFYF

SEQ ID NO: 237780 - protein, 14 aa, Homo sapiens
  CDR3 for beta chain variable domain of TCR clone 118890 (TRBV28, TRBJ2-1)
CASSYYTAYNEQFF

SEQ ID NO: 237781 - protein, 14 aa, Homo sapiens
  CDR3 for alpha chain variable domain of TCR clone 118891 (TRAV12-2, TRAJ49)
CAVNPRTPVTSSIL

SEQ ID NO: 237782 - protein, 15 aa, Homo sapiens
  CDR3 for beta chain variable domain of TCR clone 118891 (TRBV27, TRBJ2-7)
CASSTAGTGSYEQYF

SEQ ID NO: 237783 - protein, 16 aa, Homo sapiens
  CDR3 for alpha chain variable domain of TCR clone 118892 (TRAV8-3, TRAJ13)
CAVGAYPSGGYQKVTF

SEQ ID NO: 237784 - protein, 15 aa, Homo sapiens
  CDR3 for beta chain variable domain of TCR clone 118892 (TRBV19, TRBJ1-5)
CASSIVWANNQPQHF

SEQ ID NO: 237785 - protein, 13 aa, Homo sapiens
  CDR3 for alpha chain variable domain of TCR clone 118893 (TRAV38-1, TRAJ42)
CARWGGSQGNLIF

SEQ ID NO: 237786 - protein, 17 aa, Homo sapiens
  CDR3 for beta chain variable domain of TCR clone 118893 (TRBV20-1, TRBJ2-1)
CSARDPLAGVWDKEQFF

SEQ ID NO: 237787 - protein, 14 aa, Homo sapiens
  CDR3 for alpha chain variable domain of TCR clone 118894 (TRAV8-1, TRAJ5)
CAVRTDTGRRALTF

SEQ ID NO: 237788 - protein, 14 aa, Homo sapiens
  CDR3 for beta chain variable domain of TCR clone 118894 (TRBV5-5, TRBJ1-2)
CASSLDPYNYGYSF

SEQ ID NO: 237789 - protein, 16 aa, Homo sapiens
  CDR3 for alpha chain variable domain of TCR clone 118895 (TRAV16, TRAJ4)
CALSRMFSGGYNKLIF

SEQ ID NO: 237790 - protein, 16 aa, Homo sapiens
  CDR3 for beta chain variable domain of TCR clone 118895 (TRBV19, TRBJ2-1)
CASSKAGPSSYNEQFF

SEQ ID NO: 237791 - protein, 14 aa, Homo sapiens
  CDR3 for alpha chain variable domain of TCR clone 118896 (TRAV8-3, TRAJ4)
CAVGAAGGYNKLIF

SEQ ID NO: 237792 - protein, 15 aa, Homo sapiens
  CDR3 for beta chain variable domain of TCR clone 118896 (TRBV11-2, TRBJ1-3)
CASSLSPLVRDTIYF

SEQ ID NO: 237793 - protein, 14 aa, Homo sapiens
  CDR3 for alpha chain variable domain of TCR clone 118897 (TRAV23/DV6, TRAJ40)
CAARKNSGTYKYIF

SEQ ID NO: 237794 - protein, 14 aa, Homo sapiens
  CDR3 for beta chain variable domain of TCR clone 118897 (TRBV10-3, TRBJ2-5)
CASSERDYQETQYF

SEQ ID NO: 237795 - protein, 12 aa, Homo sapiens
  CDR3 for alpha chain variable domain of TCR clone 118898 (TRAV12-3, TRAJ17)
CARTLTGNKLTF

SEQ ID NO: 237796 - protein, 13 aa, Homo sapiens
  CDR3 for beta chain variable domain of TCR clone 118898 (TRBV7-9, TRBJ1-2)
CASSLKQNYGYTF

SEQ ID NO: 237797 - protein, 13 aa, Homo sapiens
  CDR3 for alpha chain variable domain of TCR clone 118899 (TRAV1-1, TRAJ31)
CASYLNNNARLMV

SEQ ID NO: 237798 - protein, 13 aa, Homo sapiens
  CDR3 for beta chain variable domain of TCR clone 118899 (TRBV15, TRBJ1-6)
CATSGGLNSPLHF

SEQ ID NO: 237799 - protein, 16 aa, Homo sapiens
  CDR3 for alpha chain variable domain of TCR clone 118900 (TRAV3, TRAJ18)
CAVRDGRGSTLGRPYF

SEQ ID NO: 237800 - protein, 15 aa, Homo sapiens
  CDR3 for beta chain variable domain of TCR clone 118900 (TRBV7-9, TRBJ1-6)
CASSSPGRGNSPLHF

SEQ ID NO: 237801 - protein, 15 aa, Homo sapiens
  CDR3 for alpha chain variable domain of TCR clone 118901 (TRAV2, TRAJ9)
CAVEDRGTGGFKTIF

SEQ ID NO: 237802 - protein, 16 aa, Homo sapiens
  CDR3 for beta chain variable domain of TCR clone 118901 (TRBV7-2, TRBJ2-7)
CASSLEAGGPWYEQYF

SEQ ID NO: 237803 - protein, 14 aa, Homo sapiens
  CDR3 for alpha chain variable domain of TCR clone 118902 (TRAV1-2, TRAJ16)
CAVNRFSDGQKLLF

SEQ ID NO: 237804 - protein, 17 aa, Homo sapiens
  CDR3 for beta chain variable domain of TCR clone 118902 (TRBV11-2, TRBJ2-1)
CASSLYPRGVEYNEQFF

SEQ ID NO: 237805 - protein, 15 aa, Homo sapiens
  CDR3 for alpha chain variable domain of TCR clone 118903 (TRAV12-1, TRAJ4)
CVVNGFSGGYNKLIF

SEQ ID NO: 237806 - protein, 13 aa, Homo sapiens
  CDR3 for beta chain variable domain of TCR clone 118903 (TRBV7-9, TRBJ1-2)
CASSLKQNYGYTF

SEQ ID NO: 237807 - protein, 14 aa, Homo sapiens
  CDR3 for alpha chain variable domain of TCR clone 118904 (TRAV1-2, TRAJ16)
CAVNRFSDGKKLLF

SEQ ID NO: 237808 - protein, 16 aa, Homo sapiens
  CDR3 for beta chain variable domain of TCR clone 118904 (TRBV12-4, TRBJ2-5)
CASSFFVRGRQETQYF

SEQ ID NO: 237809 - protein, 13 aa, Homo sapiens
  CDR3 for alpha chain variable domain of TCR clone 118905 (TRAV8-1, TRAJ28)
CAVSGAGSYQLTF

SEQ ID NO: 237810 - protein, 14 aa, Homo sapiens
  CDR3 for beta chain variable domain of TCR clone 118905 (TRBV7-2, TRBJ2-2)
CASRGQGAAGELVF

SEQ ID NO: 237811 - protein, 14 aa, Homo sapiens
  CDR3 for alpha chain variable domain of TCR clone 118906 (TRAV12-1, TRAJ17)
CVVNYKAAGNKLTF

SEQ ID NO: 237812 - protein, 18 aa, Homo sapiens
  CDR3 for beta chain variable domain of TCR clone 118906 (TRBV6-6, TRBJ1-3)
CASSYSKWDSISGNTIYF

SEQ ID NO: 237813 - protein, 11 aa, Homo sapiens
  CDR3 for alpha chain variable domain of TCR clone 118907 (TRAV17, TRAJ9)
CGFTGGFKTIF

SEQ ID NO: 237814 - protein, 15 aa, Homo sapiens
  CDR3 for beta chain variable domain of TCR clone 118907 (TRBV19, TRBJ2-1)
CASSIGLAGWDEQFF

SEQ ID NO: 237815 - protein, 12 aa, Homo sapiens
  CDR3 for alpha chain variable domain of TCR clone 118908 (TRAV16, TRAJ10)
CSRTGGGNKLTF

SEQ ID NO: 237816 - protein, 12 aa, Homo sapiens
  CDR3 for beta chain variable domain of TCR clone 118908 (TRBV11-3, TRBJ1-1)
CARSHRQGEAFF

SEQ ID NO: 237817 - protein, 17 aa, Homo sapiens
  CDR3 for alpha chain variable domain of TCR clone 118909 (TRAV1-2, TRAJ6)
CAVRDTTRTGGSYIPTF

SEQ ID NO: 237818 - protein, 14 aa, Homo sapiens
  CDR3 for beta chain variable domain of TCR clone 118909 (TRBV7-8, TRBJ2-3)
CASSLEAGTDTQYF

SEQ ID NO: 237819 - protein, 15 aa, Homo sapiens
  CDR3 for alpha chain variable domain of TCR clone 118910 (TRAV29/DV5, TRAJ48)
CAASLGGSGNEKLTF

SEQ ID NO: 237820 - protein, 11 aa, Homo sapiens
  CDR3 for beta chain variable domain of TCR clone 118910 (TRBV20-1, TRBJ2-3)
CSGTSSTTQYF

SEQ ID NO: 237821 - protein, 17 aa, Homo sapiens
  CDR3 for alpha chain variable domain of TCR clone 118911 (TRAV4, TRAJ18)
CLVGERSVGSTLGRLYF

SEQ ID NO: 237822 - protein, 16 aa, Homo sapiens
  CDR3 for beta chain variable domain of TCR clone 118911 (TRBV20-1, TRBJ1-4)
CSAPGQGLLTNEKLFF

SEQ ID NO: 237823 - protein, 17 aa, Homo sapiens
  CDR3 for alpha chain variable domain of TCR clone 118912 (TRAV17, TRAJ7)
CATLGRIAFGKGNQVVV

SEQ ID NO: 237824 - protein, 13 aa, Homo sapiens
  CDR3 for beta chain variable domain of TCR clone 118912 (TRBV12-4, TRBJ2-7)
CASSLERVREQYF

SEQ ID NO: 237825 - protein, 14 aa, Homo sapiens
  CDR3 for alpha chain variable domain of TCR clone 118913 (TRAV1-2, TRAJ8)
CAVREDTVFPKLVF

SEQ ID NO: 237826 - protein, 15 aa, Homo sapiens
  CDR3 for beta chain variable domain of TCR clone 118913 (TRBV6-3, TRBJ2-7)
CASSSPGTVFYEQYF

SEQ ID NO: 237827 - protein, 15 aa, Homo sapiens
  CDR3 for alpha chain variable domain of TCR clone 118914 (TRAV3, TRAJ5)
CAVRDLDTGRRALTF

SEQ ID NO: 237828 - protein, 13 aa, Homo sapiens
  CDR3 for beta chain variable domain of TCR clone 118914 (TRBV12-4, TRBJ2-7)
CASSPTETYELYF

SEQ ID NO: 237829 - protein, 13 aa, Homo sapiens
  CDR3 for alpha chain variable domain of TCR clone 118915 (TRAV8-3, TRAJ44)
CAVVPGTASKLNF

SEQ ID NO: 237830 - protein, 14 aa, Homo sapiens
  CDR3 for beta chain variable domain of TCR clone 118915 (TRBV11-2, TRBJ2-3)
CASSRLARTDTQYF

SEQ ID NO: 237831 - protein, 14 aa, Homo sapiens
  CDR3 for alpha chain variable domain of TCR clone 118916 (TRAV21, TRAJ47)
CAVGVGLYGNKLVF

SEQ ID NO: 237832 - protein, 15 aa, Homo sapiens
  CDR3 for beta chain variable domain of TCR clone 118916 (TRBV11-3, TRBJ2-3)
CASLKDGREGDTQYF

SEQ ID NO: 237833 - protein, 12 aa, Homo sapiens
  CDR3 for alpha chain variable domain of TCR clone 118917 (TRAV9-2, TRAJ26)
CALRGYGQNFVF

SEQ ID NO: 237834 - protein, 14 aa, Homo sapiens
  CDR3 for beta chain variable domain of TCR clone 118917 (TRBV5-1, TRBJ1-1)
CASSLQGASTEAFF

SEQ ID NO: 237835 - protein, 14 aa, Homo sapiens
  CDR3 for alpha chain variable domain of TCR clone 118918 (TRAV35, TRAJ33)
CAGSSQDSNYQLIW

SEQ ID NO: 237836 - protein, 16 aa, Homo sapiens
  CDR3 for beta chain variable domain of TCR clone 118918 (TRBV19, TRBJ2-1)
CASSKAGPSSYNEQFF

SEQ ID NO: 237837 - protein, 11 aa, Homo sapiens
  CDR3 for alpha chain variable domain of TCR clone 118919 (TRAV26-1, TRAJ27)
CIDPNADKSTF

SEQ ID NO: 237838 - protein, 18 aa, Homo sapiens
  CDR3 for beta chain variable domain of TCR clone 118919 (TRBV7-9, TRBJ2-6)
CASSFPGAGISGANVLTF

SEQ ID NO: 237839 - protein, 10 aa, Homo sapiens
  CDR3 for alpha chain variable domain of TCR clone 118920 (TRAV2, TRAJ34)
CAVVNDKLIF

SEQ ID NO: 237840 - protein, 15 aa, Homo sapiens
  CDR3 for beta chain variable domain of TCR clone 118920 (TRBV3-1, TRBJ2-2)
CASSQDRTRAGELFF

SEQ ID NO: 237841 - protein, 16 aa, Homo sapiens
  CDR3 for alpha chain variable domain of TCR clone 118921 (TRAV30, TRAJ24)
CGTEIVDADSWGKFQF

SEQ ID NO: 237842 - protein, 15 aa, Homo sapiens
  CDR3 for beta chain variable domain of TCR clone 118921 (TRBV7-9, TRBJ2-2)
CASSPETGAGGELFF

SEQ ID NO: 237843 - protein, 18 aa, Homo sapiens
  CDR3 for alpha chain variable domain of TCR clone 118922 (TRAV21, TRAJ52)
CAVRPSPAGGTSYGKLTF

SEQ ID NO: 237844 - protein, 17 aa, Homo sapiens
  CDR3 for beta chain variable domain of TCR clone 118922 (TRBV13, TRBJ2-3)
CASSLARVAGGKNTQYF

SEQ ID NO: 237845 - protein, 13 aa, Homo sapiens
  CDR3 for alpha chain variable domain of TCR clone 118923 (TRAV8-2, TRAJ29)
CALPGAGNTPLVF

SEQ ID NO: 237846 - protein, 14 aa, Homo sapiens
  CDR3 for beta chain variable domain of TCR clone 118923 (TRBV6-3, TRBJ1-1)
CASSYQRRDTEAFF

SEQ ID NO: 237847 - protein, 14 aa, Homo sapiens
  CDR3 for alpha chain variable domain of TCR clone 118924 (TRAV1-2, TRAJ8)
CAVREDTGFLKLVF

SEQ ID NO: 237848 - protein, 15 aa, Homo sapiens
  CDR3 for beta chain variable domain of TCR clone 118924 (TRBV4-1, TRBJ2-7)
CASSQNTGRLYEQYF

SEQ ID NO: 237849 - protein, 18 aa, Homo sapiens
  CDR3 for alpha chain variable domain of TCR clone 118925 (TRAV12-3, TRAJ52)
CAMSRTNAGGTSYGKLTF

SEQ ID NO: 237850 - protein, 15 aa, Homo sapiens
  CDR3 for beta chain variable domain of TCR clone 118925 (TRBV7-3, TRBJ2-1)
CASSQRGGALIEQFF

SEQ ID NO: 237851 - protein, 15 aa, Homo sapiens
  CDR3 for alpha chain variable domain of TCR clone 118926 (TRAV8-3, TRAJ27)
CAVGPSKTNAGKSTF

SEQ ID NO: 237852 - protein, 15 aa, Homo sapiens
  CDR3 for beta chain variable domain of TCR clone 118926 (TRBV11-3, TRBJ2-7)
CASSPGPASSYEQYF

SEQ ID NO: 237853 - protein, 16 aa, Homo sapiens
  CDR3 for alpha chain variable domain of TCR clone 118927 (TRAV12-3, TRAJ53)
CAMSPGSGGSNHKLTF

SEQ ID NO: 237854 - protein, 18 aa, Homo sapiens
  CDR3 for beta chain variable domain of TCR clone 118927 (TRBV12-4, TRBJ2-2)
CASSLVAGTRGRTGELFF

SEQ ID NO: 237855 - protein, 12 aa, Homo sapiens
  CDR3 for alpha chain variable domain of TCR clone 118928 (TRAV13-1, TRAJ15)
CAASQAGTALIF

SEQ ID NO: 237856 - protein, 13 aa, Homo sapiens
  CDR3 for beta chain variable domain of TCR clone 118928 (TRBV19, TRBJ1-3)
CASRLSLGNTIYF

SEQ ID NO: 237857 - protein, 17 aa, Homo sapiens
  CDR3 for alpha chain variable domain of TCR clone 118929 (TRAV3, TRAJ6)
CAVRDGPRAGGSYIPTF

SEQ ID NO: 237858 - protein, 12 aa, Homo sapiens
  CDR3 for beta chain variable domain of TCR clone 118929 (TRBV11-2, TRBJ2-1)
CASRPGNNEQFF

SEQ ID NO: 237859 - protein, 14 aa, Homo sapiens
  CDR3 for alpha chain variable domain of TCR clone 118930 (TRAV16, TRAJ54)
CALSGAQGAQKLVF

SEQ ID NO: 237860 - protein, 15 aa, Homo sapiens
  CDR3 for beta chain variable domain of TCR clone 118930 (TRBV18, TRBJ2-2)
CASSTSGLHTGELFF

SEQ ID NO: 237861 - protein, 15 aa, Homo sapiens
  CDR3 for alpha chain variable domain of TCR clone 118931 (TRAV12-3, TRAJ6)
CAMSATTGGSYIPTF

SEQ ID NO: 237862 - protein, 13 aa, Homo sapiens
  CDR3 for beta chain variable domain of TCR clone 118931 (TRBV7-2, TRBJ2-2)
CASSLAVTGELFF

SEQ ID NO: 237863 - protein, 14 aa, Homo sapiens
  CDR3 for alpha chain variable domain of TCR clone 118932 (TRAV35, TRAJ33)
CWPRGRDSNYQLIW

SEQ ID NO: 237864 - protein, 11 aa, Homo sapiens
  CDR3 for beta chain variable domain of TCR clone 118932 (TRBV10-3, TRBJ2-7)
CAISEGIEQYF

SEQ ID NO: 237865 - protein, 13 aa, Homo sapiens
  CDR3 for alpha chain variable domain of TCR clone 118933 (TRAV8-2, TRAJ43)
CVVSDQGDNDRRF

SEQ ID NO: 237866 - protein, 12 aa, Homo sapiens
  CDR3 for beta chain variable domain of TCR clone 118933 (TRBV7-9, TRBJ2-7)
CASRTGFDEQYF

SEQ ID NO: 237867 - protein, 13 aa, Homo sapiens
  CDR3 for alpha chain variable domain of TCR clone 118934 (TRAV17, TRAJ13)
CATDSGGYKKVTF

SEQ ID NO: 237868 - protein, 14 aa, Homo sapiens
  CDR3 for beta chain variable domain of TCR clone 118934 (TRBV6-1, TRBJ1-1)
CASTPLQMNTEAFF

SEQ ID NO: 237869 - protein, 16 aa, Homo sapiens
  CDR3 for alpha chain variable domain of TCR clone 118935 (TRAV12-3, TRAJ53)
CAMSVGSGGSNYKLTF

SEQ ID NO: 237870 - protein, 13 aa, Homo sapiens
  CDR3 for beta chain variable domain of TCR clone 118935 (TRBV4-2, TRBJ1-1)
CASSQAGNTEAFF

SEQ ID NO: 237871 - protein, 15 aa, Homo sapiens
  CDR3 for alpha chain variable domain of TCR clone 118936 (TRAV8-6, TRAJ26)
CAVSDQSPGGQNFVF

SEQ ID NO: 237872 - protein, 13 aa, Homo sapiens
  CDR3 for beta chain variable domain of TCR clone 118936 (TRBV27, TRBJ2-7)
CASRLRHRYEQYF

SEQ ID NO: 237873 - protein, 15 aa, Homo sapiens
  CDR3 for alpha chain variable domain of TCR clone 118937 (TRAV16, TRAJ10)
CALEGLTGGGNKLTF

SEQ ID NO: 237874 - protein, 16 aa, Homo sapiens
  CDR3 for beta chain variable domain of TCR clone 118937 (TRBV5-7, TRBJ1-1)
CASSLVGPRGNTEAVF

SEQ ID NO: 237875 - protein, 16 aa, Homo sapiens
  CDR3 for alpha chain variable domain of TCR clone 118938 (TRAV30, TRAJ24)
CGTEIVDADSWGKFQF

SEQ ID NO: 237876 - protein, 17 aa, Homo sapiens
  CDR3 for beta chain variable domain of TCR clone 118938 (TRBV25-1, TRBJ2-7)
CASSDARVVFSSYEQYF

SEQ ID NO: 237877 - protein, 14 aa, Homo sapiens
  CDR3 for alpha chain variable domain of TCR clone 118939 (TRAV13-1, TRAJ35)
CAASKGGFGNVLHC

SEQ ID NO: 237878 - protein, 13 aa, Homo sapiens
  CDR3 for beta chain variable domain of TCR clone 118939 (TRBV7-3, TRBJ1-1)
CASSQDWGAEDFF

SEQ ID NO: 237879 - protein, 11 aa, Homo sapiens
  CDR3 for alpha chain variable domain of TCR clone 118940 (TRAV27, TRAJ47)
CRSNQGNKLVF

SEQ ID NO: 237880 - protein, 15 aa, Homo sapiens
  CDR3 for beta chain variable domain of TCR clone 118940 (TRBV7-3, TRBJ2-1)
CASSPTGGGEVEQFF

SEQ ID NO: 237881 - protein, 16 aa, Homo sapiens
  CDR3 for alpha chain variable domain of TCR clone 118941 (TRAV30, TRAJ24)
CGTEIVDADSWGKFQF

SEQ ID NO: 237882 - protein, 14 aa, Homo sapiens
  CDR3 for beta chain variable domain of TCR clone 118941 (TRBV7-9, TRBJ2-3)
CASSLEDGTDTQYF

SEQ ID NO: 237883 - protein, 15 aa, Homo sapiens
  CDR3 for alpha chain variable domain of TCR clone 118942 (TRAV17, TRAJ16)
CATALWFSDGQKLLF

SEQ ID NO: 237884 - protein, 12 aa, Homo sapiens
  CDR3 for beta chain variable domain of TCR clone 118942 (TRBV2, TRBJ2-7)
CASSDPDYEQYF

SEQ ID NO: 237885 - protein, 15 aa, Homo sapiens
  CDR3 for alpha chain variable domain of TCR clone 118943 (TRAV8-2, TRAJ16)
CVVSDGFSDGQKMLF

SEQ ID NO: 237886 - protein, 14 aa, Homo sapiens
  CDR3 for beta chain variable domain of TCR clone 118943 (TRBV7-3, TRBJ1-1)
CARSLGTGYTEAFF

SEQ ID NO: 237887 - protein, 15 aa, Homo sapiens
  CDR3 for alpha chain variable domain of TCR clone 118944 (TRAV14/DV4, TRAJ12)
CAMREERDSSYKLIF

SEQ ID NO: 237888 - protein, 15 aa, Homo sapiens
  CDR3 for beta chain variable domain of TCR clone 118944 (TRBV11-2, TRBJ2-1)
CASSLVAGGHNEQFF

SEQ ID NO: 237889 - protein, 14 aa, Homo sapiens
  CDR3 for alpha chain variable domain of TCR clone 118945 (TRAV17, TRAJ22)
CATVLSGSARQLTF

SEQ ID NO: 237890 - protein, 15 aa, Homo sapiens
  CDR3 for beta chain variable domain of TCR clone 118945 (TRBV20-1, TRBJ2-7)
CSARAPAAYFYEQYF

SEQ ID NO: 237891 - protein, 18 aa, Homo sapiens
  CDR3 for alpha chain variable domain of TCR clone 118946 (TRAV13-1, TRAJ52)
CAAKNPNAGGTSYGKLTF

SEQ ID NO: 237892 - protein, 15 aa, Homo sapiens
  CDR3 for beta chain variable domain of TCR clone 118946 (TRBV7-2, TRBJ2-1)
CASTHGTGIYNEQFF

SEQ ID NO: 237893 - protein, 15 aa, Homo sapiens
  CDR3 for alpha chain variable domain of TCR clone 118947 (TRAV17, TRAJ57)
CATGSSQGGSEKLVF

SEQ ID NO: 237894 - protein, 17 aa, Homo sapiens
  CDR3 for beta chain variable domain of TCR clone 118947 (TRBV13, TRBJ2-3)
CASSLSRVAGGRNTQYF

SEQ ID NO: 237895 - protein, 14 aa, Homo sapiens
  CDR3 for alpha chain variable domain of TCR clone 118948 (TRAV17, TRAJ57)
CATDPQGGTEKLVF

SEQ ID NO: 237896 - protein, 17 aa, Homo sapiens
  CDR3 for beta chain variable domain of TCR clone 118948 (TRBV5-1, TRBJ2-2)
CASSLAGLSGGTGELFF

SEQ ID NO: 237897 - protein, 19 aa, Homo sapiens
  CDR3 for alpha chain variable domain of TCR clone 118949 (TRAV3, TRAJ6)
CAVRDRNPSRSGGSYIPTF

SEQ ID NO: 237898 - protein, 17 aa, Homo sapiens
  CDR3 for beta chain variable domain of TCR clone 118949 (TRBV4-1, TRBJ2-7)
CASSRDPLGVRGGEQYF

SEQ ID NO: 237899 - protein, 15 aa, Homo sapiens
  CDR3 for alpha chain variable domain of TCR clone 118950 (TRAV35, TRAJ40)
CAGQLVTSGTYKYIF

SEQ ID NO: 237900 - protein, 14 aa, Homo sapiens
  CDR3 for beta chain variable domain of TCR clone 118950 (TRBV7-3, TRBJ2-1)
CASSLAGGTNEQFF

SEQ ID NO: 237901 - protein, 15 aa, Homo sapiens
  CDR3 for alpha chain variable domain of TCR clone 118951 (TRAV26-1, TRAJ44)
CIVRANTGTASKLTF

SEQ ID NO: 237902 - protein, 12 aa, Homo sapiens
  CDR3 for beta chain variable domain of TCR clone 118951 (TRBV5-5, TRBJ2-5)
CASSYFGETQYF

SEQ ID NO: 237903 - protein, 13 aa, Homo sapiens
  CDR3 for alpha chain variable domain of TCR clone 118952 (TRAV1-2, TRAJ9)
CAALNTGGFKTIF

SEQ ID NO: 237904 - protein, 13 aa, Homo sapiens
  CDR3 for beta chain variable domain of TCR clone 118952 (TRBV15, TRBJ1-6)
CATSGGPNSPLHF

SEQ ID NO: 237905 - protein, 17 aa, Homo sapiens
  CDR3 for alpha chain variable domain of TCR clone 118953 (TRAV4, TRAJ18)
CLVGERSVGSTLGRLYF

SEQ ID NO: 237906 - protein, 14 aa, Homo sapiens
  CDR3 for beta chain variable domain of TCR clone 118953 (TRBV19, TRBJ2-5)
CASSMTGQQETQYF

SEQ ID NO: 237907 - protein, 16 aa, Homo sapiens
  CDR3 for alpha chain variable domain of TCR clone 118954 (TRAV17, TRAJ53)
CATDALSGGSNYKLTF

SEQ ID NO: 237908 - protein, 13 aa, Homo sapiens
  CDR3 for beta chain variable domain of TCR clone 118954 (TRBV7-3, TRBJ2-1)
CASSLDSYNEQFF

SEQ ID NO: 237909 - protein, 13 aa, Homo sapiens
  CDR3 for alpha chain variable domain of TCR clone 118955 (TRAV12-3, TRAJ33)
RAMSVNSNYQLIW

SEQ ID NO: 237910 - protein, 13 aa, Homo sapiens
  CDR3 for beta chain variable domain of TCR clone 118955 (TRBV7-2, TRBJ2-2)
CASSLAVTGELFI

SEQ ID NO: 237911 - protein, 16 aa, Homo sapiens
  CDR3 for alpha chain variable domain of TCR clone 118956 (TRAV14/DV4, TRAJ54)
CAMREGRIQGAQKLVF

SEQ ID NO: 237912 - protein, 14 aa, Homo sapiens
  CDR3 for beta chain variable domain of TCR clone 118956 (TRBV7-9, TRBJ2-1)
CASSSDRGLDEQFF

SEQ ID NO: 237913 - protein, 19 aa, Homo sapiens
  CDR3 for alpha chain variable domain of TCR clone 118957 (TRAV38-1, TRAJ53)
CAFMKHGLESGGSNYKLTF

SEQ ID NO: 237914 - protein, 14 aa, Homo sapiens
  CDR3 for beta chain variable domain of TCR clone 118957 (TRBV15, TRBJ1-5)
CATSREQSNQPQHF

SEQ ID NO: 237915 - protein, 12 aa, Homo sapiens
  CDR3 for alpha chain variable domain of TCR clone 118958 (TRAV12-1, TRAJ35)
CPAGALGMCCIA

SEQ ID NO: 237916 - protein, 15 aa, Homo sapiens
  CDR3 for beta chain variable domain of TCR clone 118958 (TRBV11-2, TRBJ1-3)
CASSLDGTVGNTIYF

SEQ ID NO: 237917 - protein, 18 aa, Homo sapiens
  CDR3 for alpha chain variable domain of TCR clone 118959 (TRAV26-1, TRAJ52)
CIVRVEGVGGTSYGKLTF

SEQ ID NO: 237918 - protein, 13 aa, Homo sapiens
  CDR3 for beta chain variable domain of TCR clone 118959 (TRBV7-3, TRBJ1-2)
CASSLKRGYGYTF

SEQ ID NO: 237919 - protein, 15 aa, Homo sapiens
  CDR3 for alpha chain variable domain of TCR clone 118960 (TRAV21, TRAJ53)
CATLNSGGSNYKLIF

SEQ ID NO: 237920 - protein, 16 aa, Homo sapiens
  CDR3 for beta chain variable domain of TCR clone 118960 (TRBV9, TRBJ2-1)
CASSVGGGGNYNEQFF

SEQ ID NO: 237921 - protein, 14 aa, Homo sapiens
  CDR3 for alpha chain variable domain of TCR clone 118961 (TRAV12-2, TRAJ15)
CAPHTGQAGTALIF

SEQ ID NO: 237922 - protein, 14 aa, Homo sapiens
  CDR3 for beta chain variable domain of TCR clone 118961 (TRBV7-2, TRBJ2-7)
CASSPKTRFYEQYF

SEQ ID NO: 237923 - protein, 14 aa, Homo sapiens
  CDR3 for alpha chain variable domain of TCR clone 118962 (TRAV8-3, TRAJ9)
CAVVYNTGGFKTIF

SEQ ID NO: 237924 - protein, 14 aa, Homo sapiens
  CDR3 for beta chain variable domain of TCR clone 118962 (TRBV7-3, TRBJ2-2)
CASSSGGYTGKLFF

SEQ ID NO: 237925 - protein, 18 aa, Homo sapiens
  CDR3 for alpha chain variable domain of TCR clone 118963 (TRAV29/DV5, TRAJ26)
CSVLLCSKRKHEGQNFVF

SEQ ID NO: 237926 - protein, 17 aa, Homo sapiens
  CDR3 for beta chain variable domain of TCR clone 118963 (TRBV20-1, TRBJ2-2)
CSASGSGQGGLTGELFF

SEQ ID NO: 237927 - protein, 16 aa, Homo sapiens
  CDR3 for alpha chain variable domain of TCR clone 118964 (TRAV36/DV7, TRAJ33)
WRPGNKVQDSNYQLIW

SEQ ID NO: 237928 - protein, 15 aa, Homo sapiens
  CDR3 for beta chain variable domain of TCR clone 118964 (TRBV29-1, TRBJ2-1)
CSVGRRALFYNEQFF

SEQ ID NO: 237929 - protein, 16 aa, Homo sapiens
  CDR3 for alpha chain variable domain of TCR clone 118965 (TRAV8-3, TRAJ44)
CAVGTFMTGTASKLTF

SEQ ID NO: 237930 - protein, 15 aa, Homo sapiens
  CDR3 for beta chain variable domain of TCR clone 118965 (TRBV10-2, TRBJ2-6)
CASSEQGTGANVLTF

SEQ ID NO: 237931 - protein, 15 aa, Homo sapiens
  CDR3 for alpha chain variable domain of TCR clone 118966 (TRAV12-3, TRAJ6)
CALSATTGGSYIPTF

SEQ ID NO: 237932 - protein, 13 aa, Homo sapiens
  CDR3 for beta chain variable domain of TCR clone 118966 (TRBV7-9, TRBJ1-2)
CASSLKQNYGYTF

SEQ ID NO: 237933 - protein, 14 aa, Homo sapiens
  CDR3 for alpha chain variable domain of TCR clone 118967 (TRAV13-1, TRAJ44)
CAAKATGTASKPTF

SEQ ID NO: 237934 - protein, 15 aa, Homo sapiens
  CDR3 for beta chain variable domain of TCR clone 118967 (TRBV19, TRBJ2-1)
CASIKGRGPYNEQFF

SEQ ID NO: 237935 - protein, 14 aa, Homo sapiens
  CDR3 for alpha chain variable domain of TCR clone 118968 (TRAV38-1, TRAJ35)
CDFLTIGFGNVLHC

SEQ ID NO: 237936 - protein, 17 aa, Homo sapiens
  CDR3 for beta chain variable domain of TCR clone 118968 (TRBV28, TRBJ1-1)
CASSGDLRTESNTEAFF

SEQ ID NO: 237937 - protein, 18 aa, Homo sapiens
  CDR3 for alpha chain variable domain of TCR clone 118969 (TRAV21, TRAJ52)
CAVRPSPAGGTSYGKLTF

SEQ ID NO: 237938 - protein, 17 aa, Homo sapiens
  CDR3 for beta chain variable domain of TCR clone 118969 (TRBV13, TRBJ2-3)
CDSSLSGVAGGRNTQYF

SEQ ID NO: 237939 - protein, 19 aa, Homo sapiens
  CDR3 for alpha chain variable domain of TCR clone 118970 (TRAV13-1, TRAJ52)
CAASPYQNAGVTSYGKLTF

SEQ ID NO: 237940 - protein, 13 aa, Homo sapiens
  CDR3 for beta chain variable domain of TCR clone 118970 (TRBV15, TRBJ2-7)
CATSTTGHYEQYF

SEQ ID NO: 237941 - protein, 13 aa, Homo sapiens
  CDR3 for alpha chain variable domain of TCR clone 118971 (TRAV12-2, TRAJ9)
CAVIRGGGFKAIF

SEQ ID NO: 237942 - protein, 16 aa, Homo sapiens
  CDR3 for beta chain variable domain of TCR clone 118971 (TRBV7-2, TRBJ2-7)
CASSSQGLAPTYEQYF

SEQ ID NO: 237943 - protein, 19 aa, Homo sapiens
  CDR3 for alpha chain variable domain of TCR clone 118972 (TRAV2, TRAJ20)
ILQVREADAAVYRDCKLSF

SEQ ID NO: 237944 - protein, 13 aa, Homo sapiens
  CDR3 for beta chain variable domain of TCR clone 118972 (TRBV20-1, TRBJ1-6)
CSAPLGVGSPLHF

SEQ ID NO: 237945 - protein, 13 aa, Homo sapiens
  CDR3 for alpha chain variable domain of TCR clone 118973 (TRAV8-3, TRAJ28)
CAVGAVGSYQFTF

SEQ ID NO: 237946 - protein, 14 aa, Homo sapiens
  CDR3 for beta chain variable domain of TCR clone 118973 (TRBV25-1, TRBJ1-1)
CASTHLGGNTEAFF

SEQ ID NO: 237947 - protein, 15 aa, Homo sapiens
  CDR3 for alpha chain variable domain of TCR clone 118974 (TRAV25, TRAJ53)
CAATGGGGSNYKLTF

SEQ ID NO: 237948 - protein, 12 aa, Homo sapiens
  CDR3 for beta chain variable domain of TCR clone 118974 (TRBV7-8, TRBJ2-7)
CASGLGDREQYF

SEQ ID NO: 237949 - protein, 11 aa, Homo sapiens
  CDR3 for alpha chain variable domain of TCR clone 118975 (TRAV8-4, TRAJ26)
CAGGGGQNFVF

SEQ ID NO: 237950 - protein, 17 aa, Homo sapiens
  CDR3 for beta chain variable domain of TCR clone 118975 (TRBV7-9, TRBJ2-3)
CASSPTVAGDLTDTQYF

SEQ ID NO: 237951 - protein, 14 aa, Homo sapiens
  CDR3 for alpha chain variable domain of TCR clone 118976 (TRAV35, TRAJ53)
CAGNSGGSNYKLTF

SEQ ID NO: 237952 - protein, 15 aa, Homo sapiens
  CDR3 for beta chain variable domain of TCR clone 118976 (TRBV7-9, TRBJ2-1)
CASSLGGGRANEQFF

SEQ ID NO: 237953 - protein, 14 aa, Homo sapiens
  CDR3 for alpha chain variable domain of TCR clone 118977 (TRAV12-2, TRAJ13)
CAVKKTGGYPKVTF

SEQ ID NO: 237954 - protein, 15 aa, Homo sapiens
  CDR3 for beta chain variable domain of TCR clone 118977 (TRBV20-1, TRBJ2-7)
CSARDRVSGMDEQYF

SEQ ID NO: 237955 - protein, 12 aa, Homo sapiens
  CDR3 for alpha chain variable domain of TCR clone 118978 (TRAV16, TRAJ56)
CAPTGANSKLTF

SEQ ID NO: 237956 - protein, 16 aa, Homo sapiens
  CDR3 for beta chain variable domain of TCR clone 118978 (TRBV7-9, TRBJ1-2)
CASSLGFSAGEDGYTF

SEQ ID NO: 237957 - protein, 13 aa, Homo sapiens
  CDR3 for alpha chain variable domain of TCR clone 118979 (TRAV21, TRAJ10)
CAVRMGGGNKLTF

SEQ ID NO: 237958 - protein, 14 aa, Homo sapiens
  CDR3 for beta chain variable domain of TCR clone 118979 (TRBV7-3, TRBJ1-1)
CASSLKGGNTEAFF

SEQ ID NO: 237959 - protein, 14 aa, Homo sapiens
  CDR3 for alpha chain variable domain of TCR clone 118980 (TRAV12-2, TRAJ13)
CAVKKTGGYQKVTF

SEQ ID NO: 237960 - protein, 12 aa, Homo sapiens
  CDR3 for beta chain variable domain of TCR clone 118980 (TRBV11-2, TRBJ2-2)
CASSLGGGKLFF

SEQ ID NO: 237961 - protein, 13 aa, Homo sapiens
  CDR3 for alpha chain variable domain of TCR clone 118981 (TRAV3, TRAJ21)
CAVREPAFNKFYF

SEQ ID NO: 237962 - protein, 16 aa, Homo sapiens
  CDR3 for beta chain variable domain of TCR clone 118981 (TRBV27, TRBJ2-2)
CASSFRGLVRTGELFF

SEQ ID NO: 237963 - protein, 14 aa, Homo sapiens
  CDR3 for alpha chain variable domain of TCR clone 118982 (TRAV29/DV5, TRAJ36)
CAARRKTGANNLFF

SEQ ID NO: 237964 - protein, 16 aa, Homo sapiens
  CDR3 for beta chain variable domain of TCR clone 118982 (TRBV15, TRBJ1-2)
CATSRGPRTGGGGYTF

SEQ ID NO: 237965 - protein, 15 aa, Homo sapiens
  CDR3 for alpha chain variable domain of TCR clone 118983 (TRAV35, TRAJ58)
CAGRRQATSGSRLTF

SEQ ID NO: 237966 - protein, 16 aa, Homo sapiens
  CDR3 for beta chain variable domain of TCR clone 118983 (TRBV2, TRBJ2-1)
CASSVGGSLSYNEQFF

SEQ ID NO: 237967 - protein, 16 aa, Homo sapiens
  CDR3 for alpha chain variable domain of TCR clone 118984 (TRAV12-2, TRAJ52)
CRLANAGGTSYGKLTF

SEQ ID NO: 237968 - protein, 14 aa, Homo sapiens
  CDR3 for beta chain variable domain of TCR clone 118984 (TRBV7-6, TRBJ2-3)
CASSLGTVTDTRYF

SEQ ID NO: 237969 - protein, 12 aa, Homo sapiens
  CDR3 for alpha chain variable domain of TCR clone 118985 (TRAV17, TRAJ20)
CATDSNDYKLSF

SEQ ID NO: 237970 - protein, 12 aa, Homo sapiens
  CDR3 for beta chain variable domain of TCR clone 118985 (TRBV11-2, TRBJ2-2)
CASSLGGGELFF

SEQ ID NO: 237971 - protein, 14 aa, Homo sapiens
  CDR3 for alpha chain variable domain of TCR clone 118986 (TRAV13-1, TRAJ44)
CAAKATGTASKLTF

SEQ ID NO: 237972 - protein, 13 aa, Homo sapiens
  CDR3 for beta chain variable domain of TCR clone 118986 (TRBV4-1, TRBJ2-2)
CASSQENTGELFF

SEQ ID NO: 237973 - protein, 15 aa, Homo sapiens
  CDR3 for alpha chain variable domain of TCR clone 118987 (TRAV26-1, TRAJ37)
CIVKTGSSSTGQLIF

SEQ ID NO: 237974 - protein, 12 aa, Homo sapiens
  CDR3 for beta chain variable domain of TCR clone 118987 (TRBV7-8, TRBJ2-7)
CASSLGDREQYF

SEQ ID NO: 237975 - protein, 17 aa, Homo sapiens
  CDR3 for alpha chain variable domain of TCR clone 118988 (TRAV3, TRAJ6)
CAVRDGPRAGGSYIPTF

SEQ ID NO: 237976 - protein, 13 aa, Homo sapiens
  CDR3 for beta chain variable domain of TCR clone 118988 (TRBV20-1, TRBJ1-1)
CSAPLGGGTEAFF

SEQ ID NO: 237977 - protein, 11 aa, Homo sapiens
  CDR3 for alpha chain variable domain of TCR clone 118989 (TRAV4, TRAJ23)
CLVAPGGKLIF

SEQ ID NO: 237978 - protein, 16 aa, Homo sapiens
  CDR3 for beta chain variable domain of TCR clone 118989 (TRBV11-2, TRBJ1-2)
CASSLDTGGADYGYTF

SEQ ID NO: 237979 - protein, 15 aa, Homo sapiens
  CDR3 for alpha chain variable domain of TCR clone 118990 (TRAV21, TRAJ38)
CSVRQDAGNNRKLIW

SEQ ID NO: 237980 - protein, 16 aa, Homo sapiens
  CDR3 for beta chain variable domain of TCR clone 118990 (TRBV4-2, TRBJ1-1)
CASRPLDGGGDTEAFF

SEQ ID NO: 237981 - protein, 16 aa, Homo sapiens
  CDR3 for alpha chain variable domain of TCR clone 118991 (TRAV30, TRAJ24)
YGTEIVDADSWGKFQF

SEQ ID NO: 237982 - protein, 14 aa, Homo sapiens
  CDR3 for beta chain variable domain of TCR clone 118991 (TRBV20-1, TRBJ1-1)
CSAQTRIGGTEAFF

SEQ ID NO: 237983 - protein, 16 aa, Homo sapiens
  CDR3 for alpha chain variable domain of TCR clone 118992 (TRAV4, TRAJ5)
CLVGPDHGHGQESTYL

SEQ ID NO: 237984 - protein, 15 aa, Homo sapiens
  CDR3 for beta chain variable domain of TCR clone 118992 (TRBV27, TRBJ2-5)
CASSLIPSGGETQYF

SEQ ID NO: 237985 - protein, 15 aa, Homo sapiens
  CDR3 for alpha chain variable domain of TCR clone 118993 (TRAV41, TRAJ45)
CAASYSGGGADGLTF

SEQ ID NO: 237986 - protein, 14 aa, Homo sapiens
  CDR3 for beta chain variable domain of TCR clone 118993 (TRBV12-5, TRBJ2-5)
SASGSRTHQETQYF

SEQ ID NO: 237987 - protein, 14 aa, Homo sapiens
  CDR3 for alpha chain variable domain of TCR clone 118994 (TRAV26-1, TRAJ34)
CIIRVAYNTDKLIF

SEQ ID NO: 237988 - protein, 15 aa, Homo sapiens
  CDR3 for beta chain variable domain of TCR clone 118994 (TRBV20-1, TRBJ2-7)
CSARVPAAYFYEQYL

SEQ ID NO: 237989 - protein, 15 aa, Homo sapiens
  CDR3 for alpha chain variable domain of TCR clone 118995 (TRAV26-1, TRAJ56)
CIVRVDNGANSKLKF

SEQ ID NO: 237990 - protein, 15 aa, Homo sapiens
  CDR3 for beta chain variable domain of TCR clone 118995 (TRBV20-1, TRBJ2-7)
CSARDPTEVGHEQYF

SEQ ID NO: 237991 - protein, 15 aa, Homo sapiens
  CDR3 for alpha chain variable domain of TCR clone 118996 (TRAV3, TRAJ22)
CAVRDRGGSARQLTF

SEQ ID NO: 237992 - protein, 16 aa, Homo sapiens
  CDR3 for beta chain variable domain of TCR clone 118996 (TRBV10-3, TRBJ2-1)
CAISGVGDGGGGEQFF

SEQ ID NO: 237993 - protein, 12 aa, Homo sapiens
  CDR3 for alpha chain variable domain of TCR clone 118997 (TRAV4, TRAJ26)
CLVGDYGKNFVF

SEQ ID NO: 237994 - protein, 16 aa, Homo sapiens
  CDR3 for beta chain variable domain of TCR clone 118997 (TRBV7-2, TRBJ1-2)
CASSSNQDRRGHGYTF

SEQ ID NO: 237995 - protein, 11 aa, Homo sapiens
  CDR3 for alpha chain variable domain of TCR clone 118998 (TRAV12-3, TRAJ27)
CAMANAGKSTF

SEQ ID NO: 237996 - protein, 13 aa, Homo sapiens
  CDR3 for beta chain variable domain of TCR clone 118998 (TRBV18, TRBJ1-1)
CASSGGRNTEAFF

SEQ ID NO: 237997 - protein, 16 aa, Homo sapiens
  CDR3 for alpha chain variable domain of TCR clone 118999 (TRAV13-1, TRAJ48)
CAASIFGNFGNEKLTF

SEQ ID NO: 237998 - protein, 16 aa, Homo sapiens
  CDR3 for beta chain variable domain of TCR clone 118999 (TRBV18, TRBJ1-5)
CASSPCRVEGNQPQHF

SEQ ID NO: 237999 - protein, 16 aa, Homo sapiens
  CDR3 for alpha chain variable domain of TCR clone 119000 (TRAV21, TRAJ45)
CAVSWGSGGGADGLTF

SEQ ID NO: 238000 - protein, 14 aa, Homo sapiens
  CDR3 for beta chain variable domain of TCR clone 119000 (TRBV4-2, TRBJ1-2)
CASSPVGSNYGYTF

SEQ ID NO: 238001 - protein, 13 aa, Homo sapiens
  CDR3 for alpha chain variable domain of TCR clone 119001 (TRAV36/DV7, TRAJ37)
CAVFSSNTGKLIF

SEQ ID NO: 238002 - protein, 16 aa, Homo sapiens
  CDR3 for beta chain variable domain of TCR clone 119001 (TRBV7-3, TRBJ2-2)
CASSLKRGTLSGELFF

SEQ ID NO: 238003 - protein, 14 aa, Homo sapiens
  CDR3 for alpha chain variable domain of TCR clone 119002 (TRAV26-1, TRAJ38)
CIANNAGNNRKLIW

SEQ ID NO: 238004 - protein, 13 aa, Homo sapiens
  CDR3 for beta chain variable domain of TCR clone 119002 (TRBV4-1, TRBJ2-7)
CASSQGQAYEQYF

SEQ ID NO: 238005 - protein, 16 aa, Homo sapiens
  CDR3 for alpha chain variable domain of TCR clone 119003 (TRAV16, TRAJ52)
CALSGVGGTSYGKLTC

SEQ ID NO: 238006 - protein, 14 aa, Homo sapiens
  CDR3 for beta chain variable domain of TCR clone 119003 (TRBV19, TRBJ1-2)
CASSLQGQAYGYTF

SEQ ID NO: 238007 - protein, 12 aa, Homo sapiens
  CDR3 for alpha chain variable domain of TCR clone 119004 (TRAV8-6, TRAJ20)
CAVSSNDYKPSF

SEQ ID NO: 238008 - protein, 15 aa, Homo sapiens
  CDR3 for beta chain variable domain of TCR clone 119004 (TRBV6-5, TRBJ2-2)
CASVSGGPSTGELFF

SEQ ID NO: 238009 - protein, 14 aa, Homo sapiens
  CDR3 for alpha chain variable domain of TCR clone 119005 (TRAV35, TRAJ42)
CAGRYGGSQGNHIF

SEQ ID NO: 238010 - protein, 15 aa, Homo sapiens
  CDR3 for beta chain variable domain of TCR clone 119005 (TRBV7-9, TRBJ2-1)
CASSLGWGRANEQFF

SEQ ID NO: 238011 - protein, 16 aa, Homo sapiens
  CDR3 for alpha chain variable domain of TCR clone 119006 (TRAV30, TRAJ24)
CGTEIVDADSWGKFQC

SEQ ID NO: 238012 - protein, 14 aa, Homo sapiens
  CDR3 for beta chain variable domain of TCR clone 119006 (TRBV7-2, TRBJ2-7)
CASSPKTSFYEQYF

SEQ ID NO: 238013 - protein, 17 aa, Homo sapiens
  CDR3 for alpha chain variable domain of TCR clone 119007 (TRAV36/DV7, TRAJ52)
CAVAQRAGGTSYGKLTF

SEQ ID NO: 238014 - protein, 14 aa, Homo sapiens
  CDR3 for beta chain variable domain of TCR clone 119007 (TRBV7-6, TRBJ2-3)
CASSLGTVTDTQYL

SEQ ID NO: 238015 - protein, 15 aa, Homo sapiens
  CDR3 for alpha chain variable domain of TCR clone 119008 (TRAV3, TRAJ3)
CAVRDMRSSASKIIF

SEQ ID NO: 238016 - protein, 17 aa, Homo sapiens
  CDR3 for beta chain variable domain of TCR clone 119008 (TRBV24-1, TRBJ2-1)
CATSDVSTSGTYNEQFF

SEQ ID NO: 238017 - protein, 13 aa, Homo sapiens
  CDR3 for alpha chain variable domain of TCR clone 119009 (TRAV12-3, TRAJ5)
CAMIYTGGRALTF

SEQ ID NO: 238018 - protein, 12 aa, Homo sapiens
  CDR3 for beta chain variable domain of TCR clone 119009 (TRBV18, TRBJ1-4)
CASSPSREKLFF

SEQ ID NO: 238019 - protein, 13 aa, Homo sapiens
  CDR3 for alpha chain variable domain of TCR clone 119010 (TRAV12-2, TRAJ6)
CAARGGGSYIPTF

SEQ ID NO: 238020 - protein, 12 aa, Homo sapiens
  CDR3 for beta chain variable domain of TCR clone 119010 (TRBV11-2, TRBJ2-2)
CASSLGGGELFF

SEQ ID NO: 238021 - protein, 12 aa, Homo sapiens
  CDR3 for alpha chain variable domain of TCR clone 119011 (TRAV8-6, TRAJ7)
CAVFYGNNRLAF

SEQ ID NO: 238022 - protein, 14 aa, Homo sapiens
  CDR3 for beta chain variable domain of TCR clone 119011 (TRBV19, TRBJ2-1)
CASSLLASINEQFF

SEQ ID NO: 238023 - protein, 16 aa, Homo sapiens
  CDR3 for alpha chain variable domain of TCR clone 119012 (TRAV26-1, TRAJ32)
CIVRTNYGGATNKLIF

SEQ ID NO: 238024 - protein, 14 aa, Homo sapiens
  CDR3 for beta chain variable domain of TCR clone 119012 (TRBV27, TRBJ1-1)
CARSLLSGLSEAFF

SEQ ID NO: 238025 - protein, 13 aa, Homo sapiens
  CDR3 for alpha chain variable domain of TCR clone 119013 (TRAV13-2, TRAJ40)
CAENLHYLRNLQI

SEQ ID NO: 238026 - protein, 15 aa, Homo sapiens
  CDR3 for beta chain variable domain of TCR clone 119013 (TRBV4-3, TRBJ2-3)
CASSLGTRSSDTQYF

SEQ ID NO: 238027 - protein, 12 aa, Homo sapiens
  CDR3 for alpha chain variable domain of TCR clone 119014 (TRAV13-1, TRAJ36)
WRGGDGANNLFF

SEQ ID NO: 238028 - protein, 16 aa, Homo sapiens
  CDR3 for beta chain variable domain of TCR clone 119014 (TRBV7-9, TRBJ2-5)
CASRLEIGTRKETQYF

SEQ ID NO: 238029 - protein, 18 aa, Homo sapiens
  CDR3 for alpha chain variable domain of TCR clone 119015 (TRAV13-1, TRAJ52)
CAASKRSAGGTSYGKLTF

SEQ ID NO: 238030 - protein, 15 aa, Homo sapiens
  CDR3 for beta chain variable domain of TCR clone 119015 (TRBV7-9, TRBJ2-2)
CASGPLDTFPGELFF

SEQ ID NO: 238031 - protein, 14 aa, Homo sapiens
  CDR3 for alpha chain variable domain of TCR clone 119016 (TRAV16, TRAJ33)
CALSDMDSNYQLIW

SEQ ID NO: 238032 - protein, 12 aa, Homo sapiens
  CDR3 for beta chain variable domain of TCR clone 119016 (TRBV5-1, TRBJ1-2)
CASSQDTYGYTF

SEQ ID NO: 238033 - protein, 13 aa, Homo sapiens
  CDR3 for alpha chain variable domain of TCR clone 119017 (TRAV3, TRAJ41)
CAVSSNSGYALNF

SEQ ID NO: 238034 - protein, 10 aa, Homo sapiens
  CDR3 for beta chain variable domain of TCR clone 119017 (TRBV20-1, TRBJ2-2)
LAGGAGELFF

SEQ ID NO: 238035 - protein, 12 aa, Homo sapiens
  CDR3 for alpha chain variable domain of TCR clone 119018 (TRAV12-1, TRAJ30)
CVVNPRDDNIIF

SEQ ID NO: 238036 - protein, 18 aa, Homo sapiens
  CDR3 for beta chain variable domain of TCR clone 119018 (TRBV5-1, TRBJ2-7)
CASSLAGFGGMSSYEQYF

SEQ ID NO: 238037 - protein, 15 aa, Homo sapiens
  CDR3 for alpha chain variable domain of TCR clone 119019 (TRAV25, TRAJ53)
CAATGGGGSNYKLTF

SEQ ID NO: 238038 - protein, 14 aa, Homo sapiens
  CDR3 for beta chain variable domain of TCR clone 119019 (TRBV7-2, TRBJ2-7)
CASSPKTSFYEQYF

SEQ ID NO: 238039 - protein, 14 aa, Homo sapiens
  CDR3 for alpha chain variable domain of TCR clone 119020 (TRAV8-4, TRAJ13)
CAVTLSGGYQKVTF

SEQ ID NO: 238040 - protein, 14 aa, Homo sapiens
  CDR3 for beta chain variable domain of TCR clone 119020 (TRBV7-2, TRBJ1-2)
CASSRTGSTYGYTF

SEQ ID NO: 238041 - protein, 18 aa, Homo sapiens
  CDR3 for alpha chain variable domain of TCR clone 119021 (TRAV26-1, TRAJ52)
CIVRVEVAGGTSYGKLTF

SEQ ID NO: 238042 - protein, 13 aa, Homo sapiens
  CDR3 for beta chain variable domain of TCR clone 119021 (TRBV7-3, TRBJ1-2)
CASSLKRGYGYTF

SEQ ID NO: 238043 - protein, 12 aa, Homo sapiens
  CDR3 for alpha chain variable domain of TCR clone 119022 (TRAV8-1, TRAJ31)
CAVINNDARLMF

SEQ ID NO: 238044 - protein, 15 aa, Homo sapiens
  CDR3 for beta chain variable domain of TCR clone 119022 (TRBV20-1, TRBJ2-2)
CSARGGQGNTGELFF

SEQ ID NO: 238045 - protein, 12 aa, Homo sapiens
  CDR3 for alpha chain variable domain of TCR clone 119023 (TRAV12-1, TRAJ40)
CVVYSGTYKYIC

SEQ ID NO: 238046 - protein, 18 aa, Homo sapiens
  CDR3 for beta chain variable domain of TCR clone 119023 (TRBV11-2, TRBJ2-3)
CASSLGGASRGAPNTQYF

SEQ ID NO: 238047 - protein, 11 aa, Homo sapiens
  CDR3 for alpha chain variable domain of TCR clone 119024 (TRAV12-2, TRAJ33)
CAVTSNYQLIG

SEQ ID NO: 238048 - protein, 14 aa, Homo sapiens
  CDR3 for beta chain variable domain of TCR clone 119024 (TRBV12-4, TRBJ2-2)
CASNQGANTGELFF

SEQ ID NO: 238049 - protein, 14 aa, Homo sapiens
  CDR3 for alpha chain variable domain of TCR clone 119025 (TRAV1-2, TRAJ16)
CAVNRFSDVQKLLF

SEQ ID NO: 238050 - protein, 13 aa, Homo sapiens
  CDR3 for beta chain variable domain of TCR clone 119025 (TRBV4-1, TRBJ2-1)
CASSQAGGDEQFF

SEQ ID NO: 238051 - protein, 14 aa, Homo sapiens
  CDR3 for alpha chain variable domain of TCR clone 119026 (TRAV38-1, TRAJ40)
CALRPTSGTYKYIF

SEQ ID NO: 238052 - protein, 17 aa, Homo sapiens
  CDR3 for beta chain variable domain of TCR clone 119026 (TRBV7-8, TRBJ2-6)
CASSAGTGGAGANVLTF

SEQ ID NO: 238053 - protein, 14 aa, Homo sapiens
  CDR3 for alpha chain variable domain of TCR clone 119027 (TRAV34, TRAJ44)
CGADGTGTASKLTF

SEQ ID NO: 238054 - protein, 14 aa, Homo sapiens
  CDR3 for beta chain variable domain of TCR clone 119027 (TRBV7-2, TRBJ2-1)
CASSLVAGRNEQFF

SEQ ID NO: 238055 - protein, 18 aa, Homo sapiens
  CDR3 for alpha chain variable domain of TCR clone 119028 (TRAV13-1, TRAJ52)
CAASKRSAGGTSYGKLTF

SEQ ID NO: 238056 - protein, 15 aa, Homo sapiens
  CDR3 for beta chain variable domain of TCR clone 119028 (TRBV5-1, TRBJ2-1)
CASKGLAGVYNEQFF

SEQ ID NO: 238057 - protein, 13 aa, Homo sapiens
  CDR3 for alpha chain variable domain of TCR clone 119029 (TRAV14/DV4, TRAJ20)
CAMREGRDYKLSF

SEQ ID NO: 238058 - protein, 13 aa, Homo sapiens
  CDR3 for beta chain variable domain of TCR clone 119029 (TRBV7-9, TRBJ2-3)
CASSPGSTDTQYF

SEQ ID NO: 238059 - protein, 11 aa, Homo sapiens
  CDR3 for alpha chain variable domain of TCR clone 119030 (TRAV2, TRAJ13)
CASGGYQKVTF

SEQ ID NO: 238060 - protein, 14 aa, Homo sapiens
  CDR3 for beta chain variable domain of TCR clone 119030 (TRBV19, TRBJ2-1)
CASQTFVLSGEQFF

SEQ ID NO: 238061 - protein, 13 aa, Homo sapiens
  CDR3 for alpha chain variable domain of TCR clone 119031 (TRAV1-2, TRAJ9)
CAALDTGGFKTIF

SEQ ID NO: 238062 - protein, 14 aa, Homo sapiens
  CDR3 for beta chain variable domain of TCR clone 119031 (TRBV13, TRBJ2-3)
CASSSGSPTDTQYF

SEQ ID NO: 238063 - protein, 15 aa, Homo sapiens
  CDR3 for alpha chain variable domain of TCR clone 119032 (TRAV25, TRAJ10)
CAGPLLTGGGNKLTF

SEQ ID NO: 238064 - protein, 14 aa, Homo sapiens
  CDR3 for beta chain variable domain of TCR clone 119032 (TRBV12-4, TRBJ1-3)
CASTLTGAGNTIYF

SEQ ID NO: 238065 - protein, 12 aa, Homo sapiens
  CDR3 for alpha chain variable domain of TCR clone 119033 (TRAV12-1, TRAJ40)
CVFYSGTYKYIF

SEQ ID NO: 238066 - protein, 19 aa, Homo sapiens
  CDR3 for beta chain variable domain of TCR clone 119033 (TRBV28, TRBJ2-4)
CASSFQPGGPAHSKNIQYF

SEQ ID NO: 238067 - protein, 15 aa, Homo sapiens
  CDR3 for alpha chain variable domain of TCR clone 119034 (TRAV17, TRAJ28)
CATVDSGAGSYQLTF

SEQ ID NO: 238068 - protein, 13 aa, Homo sapiens
  CDR3 for beta chain variable domain of TCR clone 119034 (TRBV5-4, TRBJ2-5)
CASGRQEGETQYF

SEQ ID NO: 238069 - protein, 13 aa, Homo sapiens
  CDR3 for alpha chain variable domain of TCR clone 119035 (TRAV21, TRAJ20)
CAVGLRVDYKLSF

SEQ ID NO: 238070 - protein, 15 aa, Homo sapiens
  CDR3 for beta chain variable domain of TCR clone 119035 (TRBV7-2, TRBJ2-1)
CASSSRTSREDEQFF

SEQ ID NO: 238071 - protein, 13 aa, Homo sapiens
  CDR3 for alpha chain variable domain of TCR clone 119036 (TRAV13-1, TRAJ13)
CAASKGGYQEVTF

SEQ ID NO: 238072 - protein, 16 aa, Homo sapiens
  CDR3 for beta chain variable domain of TCR clone 119036 (TRBV6-1, TRBJ2-5)
CASSETLDRGAETQYF

SEQ ID NO: 238073 - protein, 11 aa, Homo sapiens
  CDR3 for alpha chain variable domain of TCR clone 119037 (TRAV23/DV6, TRAJ58)
CAARLLRGETS

SEQ ID NO: 238074 - protein, 14 aa, Homo sapiens
  CDR3 for beta chain variable domain of TCR clone 119037 (TRBV20-1, TRBJ2-1)
CSAQIGGSANEQFF

SEQ ID NO: 238075 - protein, 13 aa, Homo sapiens
  CDR3 for alpha chain variable domain of TCR clone 119038 (TRAV17, TRAJ5)
CALRGTGRRALTF

SEQ ID NO: 238076 - protein, 17 aa, Homo sapiens
  CDR3 for beta chain variable domain of TCR clone 119038 (TRBV11-2, TRBJ2-1)
CASSLYPPGVEYNEQFF

SEQ ID NO: 238077 - protein, 13 aa, Homo sapiens
  CDR3 for alpha chain variable domain of TCR clone 119039 (TRAV12-3, TRAJ43)
CAMIRPTNNDMRF

SEQ ID NO: 238078 - protein, 12 aa, Homo sapiens
  CDR3 for beta chain variable domain of TCR clone 119039 (TRBV11-2, TRBJ2-5)
CASSLGQETQYF

SEQ ID NO: 238079 - protein, 11 aa, Homo sapiens
  CDR3 for alpha chain variable domain of TCR clone 119040 (TRAV4, TRAJ31)
CLVGDNARLMF

SEQ ID NO: 238080 - protein, 15 aa, Homo sapiens
  CDR3 for beta chain variable domain of TCR clone 119040 (TRBV7-2, TRBJ2-1)
CASSLVAGGHNEQFF

SEQ ID NO: 238081 - protein, 14 aa, Homo sapiens
  CDR3 for alpha chain variable domain of TCR clone 119041 (TRAV1-2, TRAJ29)
CAVRTDSGNTPLVF

SEQ ID NO: 238082 - protein, 13 aa, Homo sapiens
  CDR3 for beta chain variable domain of TCR clone 119041 (TRBV7-9, TRBJ1-2)
CASSLKQNYGYTF

SEQ ID NO: 238083 - protein, 11 aa, Homo sapiens
  CDR3 for alpha chain variable domain of TCR clone 119042 (TRAV12-1, TRAJ30)
CVVNGQDKIIF

SEQ ID NO: 238084 - protein, 14 aa, Homo sapiens
  CDR3 for beta chain variable domain of TCR clone 119042 (TRBV2, TRBJ2-7)
CASSLTSGGYEQYF

SEQ ID NO: 238085 - protein, 13 aa, Homo sapiens
  CDR3 for alpha chain variable domain of TCR clone 119043 (TRAV13-1, TRAJ10)
CAATAGGGNKLTF

SEQ ID NO: 238086 - protein, 14 aa, Homo sapiens
  CDR3 for beta chain variable domain of TCR clone 119043 (TRBV7-9, TRBJ2-7)
CASSLGGSSYEQYF

SEQ ID NO: 238087 - protein, 13 aa, Homo sapiens
  CDR3 for alpha chain variable domain of TCR clone 119044 (TRAV8-1, TRAJ23)
RAVTGGQGGKLIF

SEQ ID NO: 238088 - protein, 15 aa, Homo sapiens
  CDR3 for beta chain variable domain of TCR clone 119044 (TRBV20-1, TRBJ2-2)
CSAIPGHSNTGELFF

SEQ ID NO: 238089 - protein, 20 aa, Homo sapiens
  CDR3 for alpha chain variable domain of TCR clone 119045 (TRAV26-1, TRAJ42)
CCVLLHRQTYYGGSQGNLIF

SEQ ID NO: 238090 - protein, 16 aa, Homo sapiens
  CDR3 for beta chain variable domain of TCR clone 119045 (TRBV7-3, TRBJ2-2)
CASSLKRGTLSRELFF

SEQ ID NO: 238091 - protein, 14 aa, Homo sapiens
  CDR3 for alpha chain variable domain of TCR clone 119046 (TRAV2, TRAJ37)
CTVDFTSNIGKLIF

SEQ ID NO: 238092 - protein, 15 aa, Homo sapiens
  CDR3 for beta chain variable domain of TCR clone 119046 (TRBV20-1, TRBJ1-1)
CSASRGVTGNTEAFF

SEQ ID NO: 238093 - protein, 14 aa, Homo sapiens
  CDR3 for alpha chain variable domain of TCR clone 119047 (TRAV30, TRAJ26)
CGTEIVSYGQNFVF

SEQ ID NO: 238094 - protein, 13 aa, Homo sapiens
  CDR3 for beta chain variable domain of TCR clone 119047 (TRBV19, TRBJ1-3)
CASRISLGNTIYF

SEQ ID NO: 238095 - protein, 10 aa, Homo sapiens
  CDR3 for alpha chain variable domain of TCR clone 119048 (TRAV21, TRAJ31)
CAVDNARLMF

SEQ ID NO: 238096 - protein, 14 aa, Homo sapiens
  CDR3 for beta chain variable domain of TCR clone 119048 (TRBV25-1, TRBJ1-1)
CASTHLGGNTEAFF

SEQ ID NO: 238097 - protein, 14 aa, Homo sapiens
  CDR3 for alpha chain variable domain of TCR clone 119049 (TRAV2, TRAJ37)
CAVDFTSNTGKLIF

SEQ ID NO: 238098 - protein, 14 aa, Homo sapiens
  CDR3 for beta chain variable domain of TCR clone 119049 (TRBV20-1, TRBJ1-1)
QCSRGVTGNTEAFF

SEQ ID NO: 238099 - protein, 14 aa, Homo sapiens
  CDR3 for alpha chain variable domain of TCR clone 119050 (TRAV12-1, TRAJ26)
CVVKGSNYGQNFVF

SEQ ID NO: 238100 - protein, 17 aa, Homo sapiens
  CDR3 for beta chain variable domain of TCR clone 119050 (TRBV11-2, TRBJ2-6)
CASSQRDIFAGANVLTF

SEQ ID NO: 238101 - protein, 15 aa, Homo sapiens
  CDR3 for alpha chain variable domain of TCR clone 119051 (TRAV3, TRAJ33)
CPFERLLLWNYQLIW

SEQ ID NO: 238102 - protein, 15 aa, Homo sapiens
  CDR3 for beta chain variable domain of TCR clone 119051 (TRBV20-1, TRBJ1-1)
CSASRGVTGNTEAFF

SEQ ID NO: 238103 - protein, 15 aa, Homo sapiens
  CDR3 for alpha chain variable domain of TCR clone 119052 (TRAV12-3, TRAJ5)
CAMSGLGTGRRALTF

SEQ ID NO: 238104 - protein, 16 aa, Homo sapiens
  CDR3 for beta chain variable domain of TCR clone 119052 (TRBV20-1, TRBJ2-3)
CSARLYSAGAIDTQYF

SEQ ID NO: 238105 - protein, 12 aa, Homo sapiens
  CDR3 for alpha chain variable domain of TCR clone 119053 (TRAV8-4, TRAJ43)
CAVSVNDNDMRF

SEQ ID NO: 238106 - protein, 14 aa, Homo sapiens
  CDR3 for beta chain variable domain of TCR clone 119053 (TRBV11-2, TRBJ1-2)
CASSLGTANYGYTF

SEQ ID NO: 238107 - protein, 14 aa, Homo sapiens
  CDR3 for alpha chain variable domain of TCR clone 119054 (TRAV17, TRAJ57)
CATDPQGGSEKLVF

SEQ ID NO: 238108 - protein, 17 aa, Homo sapiens
  CDR3 for beta chain variable domain of TCR clone 119054 (TRBV7-8, TRBJ2-6)
CASSAGTGGAGANVLTF

SEQ ID NO: 238109 - protein, 16 aa, Homo sapiens
  CDR3 for alpha chain variable domain of TCR clone 119055 (TRAV21, TRAJ17)
CAVRPGEEAASNKLTF

SEQ ID NO: 238110 - protein, 16 aa, Homo sapiens
  CDR3 for beta chain variable domain of TCR clone 119055 (TRBV2, TRBJ2-7)
CASSEPWTGPSYEQYF

SEQ ID NO: 238111 - protein, 15 aa, Homo sapiens
  CDR3 for alpha chain variable domain of TCR clone 119056 (TRAV3, TRAJ45)
CAVRTPCGGADGLTF

SEQ ID NO: 238112 - protein, 16 aa, Homo sapiens
  CDR3 for beta chain variable domain of TCR clone 119056 (TRBV6-1, TRBJ2-2)
CASSFGQGANTGELFF

SEQ ID NO: 238113 - protein, 16 aa, Homo sapiens
  CDR3 for alpha chain variable domain of TCR clone 119057 (TRAV27, TRAJ48)
TAAQPGDTGLYLPLTF

SEQ ID NO: 238114 - protein, 13 aa, Homo sapiens
  CDR3 for beta chain variable domain of TCR clone 119057 (TRBV7-9, TRBJ2-3)
CASSPGSTDTQYF

SEQ ID NO: 238115 - protein, 15 aa, Homo sapiens
  CDR3 for alpha chain variable domain of TCR clone 119058 (TRAV23/DV6, TRAJ37)
CAAGEGSSNTGTLIF

SEQ ID NO: 238116 - protein, 17 aa, Homo sapiens
  CDR3 for beta chain variable domain of TCR clone 119058 (TRBV20-1, TRBJ2-7)
CSATRAGGVAGVEEQYF

SEQ ID NO: 238117 - protein, 14 aa, Homo sapiens
  CDR3 for alpha chain variable domain of TCR clone 119059 (TRAV1-2, TRAJ33)
CAVRAPDSNYQLIW

SEQ ID NO: 238118 - protein, 14 aa, Homo sapiens
  CDR3 for beta chain variable domain of TCR clone 119059 (TRBV11-3, TRBJ1-6)
CASSFSGGDSPLLF

SEQ ID NO: 238119 - protein, 14 aa, Homo sapiens
  CDR3 for alpha chain variable domain of TCR clone 119060 (TRAV21, TRAJ35)
CAVMPIGFGNVLHC

SEQ ID NO: 238120 - protein, 13 aa, Homo sapiens
  CDR3 for beta chain variable domain of TCR clone 119060 (TRBV24-1, TRBJ2-2)
CATSDWSTGELFF

SEQ ID NO: 238121 - protein, 16 aa, Homo sapiens
  CDR3 for alpha chain variable domain of TCR clone 119061 (TRAV4, TRAJ42)
CLVGPIYGESQGNLIF

SEQ ID NO: 238122 - protein, 13 aa, Homo sapiens
  CDR3 for beta chain variable domain of TCR clone 119061 (TRBV11-2, TRBJ2-7)
CASSPLGSYEQYF

SEQ ID NO: 238123 - protein, 12 aa, Homo sapiens
  CDR3 for alpha chain variable domain of TCR clone 119062 (TRAV16, TRAJ10)
CSRTGGGNKLTF

SEQ ID NO: 238124 - protein, 16 aa, Homo sapiens
  CDR3 for beta chain variable domain of TCR clone 119062 (TRBV19, TRBJ2-1)
CASSMGGGSSYNEQFF

SEQ ID NO: 238125 - protein, 18 aa, Homo sapiens
  CDR3 for alpha chain variable domain of TCR clone 119063 (TRAV21, TRAJ52)
CAVRPSPAGGTSYGKLTF

SEQ ID NO: 238126 - protein, 20 aa, Homo sapiens
  CDR3 for beta chain variable domain of TCR clone 119063 (TRBV28, TRBJ2-6)
CASSLFLAGRELSGANVLTF

SEQ ID NO: 238127 - protein, 12 aa, Homo sapiens
  CDR3 for alpha chain variable domain of TCR clone 119064 (TRAV12-3, TRAJ17)
CAMTLTGNKLTF

SEQ ID NO: 238128 - protein, 16 aa, Homo sapiens
  CDR3 for beta chain variable domain of TCR clone 119064 (TRBV12-4, TRBJ2-5)
CASSFFVRGRQEIQYF

SEQ ID NO: 238129 - protein, 13 aa, Homo sapiens
  CDR3 for alpha chain variable domain of TCR clone 119065 (TRAV26-2, TRAJ43)
CILRAVNNNDMRF

SEQ ID NO: 238130 - protein, 14 aa, Homo sapiens
  CDR3 for beta chain variable domain of TCR clone 119065 (TRBV20-1, TRBJ1-1)
CSAQTRIGGTEAVF

SEQ ID NO: 238131 - protein, 16 aa, Homo sapiens
  CDR3 for alpha chain variable domain of TCR clone 119066 (TRAV3, TRAJ17)
RAVRDGSPAAGNKLTF

SEQ ID NO: 238132 - protein, 14 aa, Homo sapiens
  CDR3 for beta chain variable domain of TCR clone 119066 (TRBV15, TRBJ2-1)
CATNHGGRHNEQFF

SEQ ID NO: 238133 - protein, 13 aa, Homo sapiens
  CDR3 for alpha chain variable domain of TCR clone 119067 (TRAV27, TRAJ45)
CRSSGGGADGLTF

SEQ ID NO: 238134 - protein, 14 aa, Homo sapiens
  CDR3 for beta chain variable domain of TCR clone 119067 (TRBV15, TRBJ1-5)
CATSREQSNQPQHF

SEQ ID NO: 238135 - protein, 15 aa, Homo sapiens
  CDR3 for alpha chain variable domain of TCR clone 119068 (TRAV25, TRAJ53)
CPTSNSGGSNYKLTF

SEQ ID NO: 238136 - protein, 16 aa, Homo sapiens
  CDR3 for beta chain variable domain of TCR clone 119068 (TRBV6-1, TRBJ2-1)
CASILRQGSSYNEQFF

SEQ ID NO: 238137 - protein, 11 aa, Homo sapiens
  CDR3 for alpha chain variable domain of TCR clone 119069 (TRAV13-2, TRAJ15)
CSHQAGTALIF

SEQ ID NO: 238138 - protein, 13 aa, Homo sapiens
  CDR3 for beta chain variable domain of TCR clone 119069 (TRBV7-6, TRBJ1-2)
CASSLVADYGYTF

SEQ ID NO: 238139 - protein, 13 aa, Homo sapiens
  CDR3 for alpha chain variable domain of TCR clone 119070 (TRAV20, TRAJ31)
CAVQAWNNARPMF

SEQ ID NO: 238140 - protein, 13 aa, Homo sapiens
  CDR3 for beta chain variable domain of TCR clone 119070 (TRBV12-4, TRBJ1-2)
CASSLRQGKGYTF

SEQ ID NO: 238141 - protein, 15 aa, Homo sapiens
  CDR3 for alpha chain variable domain of TCR clone 119071 (TRAV3, TRAJ11)
CAVRDRGSGYRTLTF

SEQ ID NO: 238142 - protein, 13 aa, Homo sapiens
  CDR3 for beta chain variable domain of TCR clone 119071 (TRBV7-9, TRBJ1-2)
CASSLKQNYGYTF

SEQ ID NO: 238143 - protein, 15 aa, Homo sapiens
  CDR3 for alpha chain variable domain of TCR clone 119072 (TRAV2, TRAJ15)
CAVEDREQAGTALIF

SEQ ID NO: 238144 - protein, 13 aa, Homo sapiens
  CDR3 for beta chain variable domain of TCR clone 119072 (TRBV10-2, TRBJ2-3)
CASSESGDHTPYF

SEQ ID NO: 238145 - protein, 14 aa, Homo sapiens
  CDR3 for alpha chain variable domain of TCR clone 119073 (TRAV13-1, TRAJ10)
CAAKEPGGGNKLTF

SEQ ID NO: 238146 - protein, 14 aa, Homo sapiens
  CDR3 for beta chain variable domain of TCR clone 119073 (TRBV6-6, TRBJ2-7)
CASSDDGAGYEQYF

SEQ ID NO: 238147 - protein, 14 aa, Homo sapiens
  CDR3 for alpha chain variable domain of TCR clone 119074 (TRAV1-2, TRAJ16)
CAVNRFSDGQKLLF

SEQ ID NO: 238148 - protein, 12 aa, Homo sapiens
  CDR3 for beta chain variable domain of TCR clone 119074 (TRBV27, TRBJ2-5)
CASSPAGETQYF

SEQ ID NO: 238149 - protein, 12 aa, Homo sapiens
  CDR3 for alpha chain variable domain of TCR clone 119075 (TRAV25, TRAJ11)
CAGYSGYSTLTF

SEQ ID NO: 238150 - protein, 13 aa, Homo sapiens
  CDR3 for beta chain variable domain of TCR clone 119075 (TRBV7-9, TRBJ1-2)
CASSVKQNYGYTF

SEQ ID NO: 238151 - protein, 14 aa, Homo sapiens
  CDR3 for alpha chain variable domain of TCR clone 119076 (TRAV20, TRAJ42)
CCAADGGSQGNLIF

SEQ ID NO: 238152 - protein, 13 aa, Homo sapiens
  CDR3 for beta chain variable domain of TCR clone 119076 (TRBV7-3, TRBJ1-2)
CASSLKRGYGYTF

SEQ ID NO: 238153 - protein, 15 aa, Homo sapiens
  CDR3 for alpha chain variable domain of TCR clone 119077 (TRAV38-1, TRAJ37)
CAFIHGSGNTGKLIF

SEQ ID NO: 238154 - protein, 14 aa, Homo sapiens
  CDR3 for beta chain variable domain of TCR clone 119077 (TRBV25-1, TRBJ1-1)
CASTHLGGNTEAFF

SEQ ID NO: 238155 - protein, 16 aa, Homo sapiens
  CDR3 for alpha chain variable domain of TCR clone 119078 (TRAV27, TRAJ13)
CAGAKSDSGGYQKVTF

SEQ ID NO: 238156 - protein, 16 aa, Homo sapiens
  CDR3 for beta chain variable domain of TCR clone 119078 (TRBV12-5, TRBJ2-5)
CASGPRTSGNQETQYF

SEQ ID NO: 238157 - protein, 14 aa, Homo sapiens
  CDR3 for alpha chain variable domain of TCR clone 119079 (TRAV13-1, TRAJ35)
CAASKGGFGNVLHC

SEQ ID NO: 238158 - protein, 14 aa, Homo sapiens
  CDR3 for beta chain variable domain of TCR clone 119079 (TRBV20-1, TRBJ1-1)
CSAQTRIGGTEAFF

SEQ ID NO: 238159 - protein, 13 aa, Homo sapiens
  CDR3 for alpha chain variable domain of TCR clone 119080 (TRAV27, TRAJ29)
CAGAHSGNTPLVF

SEQ ID NO: 238160 - protein, 12 aa, Homo sapiens
  CDR3 for beta chain variable domain of TCR clone 119080 (TRBV5-4, TRBJ2-7)
CASSLEAYEQYF

SEQ ID NO: 238161 - protein, 12 aa, Homo sapiens
  CDR3 for alpha chain variable domain of TCR clone 119081 (TRAV17, TRAJ39)
CATGAAGNMLTF

SEQ ID NO: 238162 - protein, 15 aa, Homo sapiens
  CDR3 for beta chain variable domain of TCR clone 119081 (TRBV5-1, TRBJ2-1)
CASSPPRAPYNEQFF

SEQ ID NO: 238163 - protein, 14 aa, Homo sapiens
  CDR3 for alpha chain variable domain of TCR clone 119082 (TRAV12-2, TRAJ13)
CAVKKTGGYQKGTF

SEQ ID NO: 238164 - protein, 15 aa, Homo sapiens
  CDR3 for beta chain variable domain of TCR clone 119082 (TRBV28, TRBJ2-5)
CASSPPWSYQETQYF

SEQ ID NO: 238165 - protein, 14 aa, Homo sapiens
  CDR3 for alpha chain variable domain of TCR clone 119083 (TRAV20, TRAJ21)
CAAGGIYNFNKFYF

SEQ ID NO: 238166 - protein, 12 aa, Homo sapiens
  CDR3 for beta chain variable domain of TCR clone 119083 (TRBV12-4, TRBJ2-1)
CASSLVRGEQFF

SEQ ID NO: 238167 - protein, 15 aa, Homo sapiens
  CDR3 for alpha chain variable domain of TCR clone 119084 (TRAV12-2, TRAJ53)
CAVNGGGGSNYKLTF

SEQ ID NO: 238168 - protein, 16 aa, Homo sapiens
  CDR3 for beta chain variable domain of TCR clone 119084 (TRBV12-4, TRBJ2-5)
CASSFFVRGRQETQYF

SEQ ID NO: 238169 - protein, 15 aa, Homo sapiens
  CDR3 for alpha chain variable domain of TCR clone 119085 (TRAV9-2, TRAJ49)
CALSPPEHTGNQFYF

SEQ ID NO: 238170 - protein, 14 aa, Homo sapiens
  CDR3 for beta chain variable domain of TCR clone 119085 (TRBV12-4, TRBJ1-1)
CASSLGTGGTEAFF

SEQ ID NO: 238171 - protein, 11 aa, Homo sapiens
  CDR3 for alpha chain variable domain of TCR clone 119086 (TRAV22, TRAJ49)
CAVLTGNQFYF

SEQ ID NO: 238172 - protein, 11 aa, Homo sapiens
  CDR3 for beta chain variable domain of TCR clone 119086 (TRBV5-6, TRBJ2-1)
CSSSLGGEQFF

SEQ ID NO: 238173 - protein, 13 aa, Homo sapiens
  CDR3 for alpha chain variable domain of TCR clone 119087 (TRAV27, TRAJ49)
CAPRPYTGNQFDF

SEQ ID NO: 238174 - protein, 16 aa, Homo sapiens
  CDR3 for beta chain variable domain of TCR clone 119087 (TRBV4-1, TRBJ1-2)
CASSQDAGQVLYGYTF

SEQ ID NO: 238175 - protein, 15 aa, Homo sapiens
  CDR3 for alpha chain variable domain of TCR clone 119088 (TRAV17, TRAJ13)
CATDAGSGGCQKVTF

SEQ ID NO: 238176 - protein, 17 aa, Homo sapiens
  CDR3 for beta chain variable domain of TCR clone 119088 (TRBV11-2, TRBJ2-1)
CASSLYPPGVEYNEQFF

SEQ ID NO: 238177 - protein, 18 aa, Homo sapiens
  CDR3 for alpha chain variable domain of TCR clone 119089 (TRAV21, TRAJ52)
CAVRPSPAGGTSYGKRTF

SEQ ID NO: 238178 - protein, 15 aa, Homo sapiens
  CDR3 for beta chain variable domain of TCR clone 119089 (TRBV20-1, TRBJ2-7)
CSARDRVSGMDEQYF

SEQ ID NO: 238179 - protein, 13 aa, Homo sapiens
  CDR3 for alpha chain variable domain of TCR clone 119090 (TRAV12-1, TRAJ13)
CVVALLGYQKVTF

SEQ ID NO: 238180 - protein, 13 aa, Homo sapiens
  CDR3 for beta chain variable domain of TCR clone 119090 (TRBV20-1, TRBJ2-5)
CSAVLTGQETQYF

SEQ ID NO: 238181 - protein, 14 aa, Homo sapiens
  CDR3 for alpha chain variable domain of TCR clone 119091 (TRAV1-2, TRAJ8)
CAVREDTGFQKLVF

SEQ ID NO: 238182 - protein, 13 aa, Homo sapiens
  CDR3 for beta chain variable domain of TCR clone 119091 (TRBV12-5, TRBJ2-3)
CASGDRQPDTQYF

SEQ ID NO: 238183 - protein, 18 aa, Homo sapiens
  CDR3 for alpha chain variable domain of TCR clone 119092 (TRAV26-1, TRAJ23)
CIVRVGLEVWNQGGKLIF

SEQ ID NO: 238184 - protein, 18 aa, Homo sapiens
  CDR3 for beta chain variable domain of TCR clone 119092 (TRBV11-2, TRBJ2-3)
CASSLGGASRGAPNTQYF

SEQ ID NO: 238185 - protein, 11 aa, Homo sapiens
  CDR3 for alpha chain variable domain of TCR clone 119093 (TRAV3, TRAJ21)
CAVGNFNKFYF

SEQ ID NO: 238186 - protein, 15 aa, Homo sapiens
  CDR3 for beta chain variable domain of TCR clone 119093 (TRBV29-1, TRBJ2-1)
CSVEGGPASYNEQFF

SEQ ID NO: 238187 - protein, 12 aa, Homo sapiens
  CDR3 for alpha chain variable domain of TCR clone 119094 (TRAV12-1, TRAJ40)
CVVNGETYKYIF

SEQ ID NO: 238188 - protein, 14 aa, Homo sapiens
  CDR3 for beta chain variable domain of TCR clone 119094 (TRBV5-1, TRBJ1-1)
CASSSATGGTEAFF

SEQ ID NO: 238189 - protein, 16 aa, Homo sapiens
  CDR3 for alpha chain variable domain of TCR clone 119095 (TRAV12-1, TRAJ12)
CVLNTLLMDSSYKLIF

SEQ ID NO: 238190 - protein, 13 aa, Homo sapiens
  CDR3 for beta chain variable domain of TCR clone 119095 (TRBV11-2, TRBJ2-1)
CASSSEAYNEQFF

SEQ ID NO: 238191 - protein, 16 aa, Homo sapiens
  CDR3 for alpha chain variable domain of TCR clone 119096 (TRAV1-1, TRAJ29)
CAVRSTRNSGNTPHVF

SEQ ID NO: 238192 - protein, 16 aa, Homo sapiens
  CDR3 for beta chain variable domain of TCR clone 119096 (TRBV27, TRBJ1-1)
CASSSRGRTGYTEAFF

SEQ ID NO: 238193 - protein, 14 aa, Homo sapiens
  CDR3 for alpha chain variable domain of TCR clone 119097 (TRAV8-3, TRAJ9)
CTVVYNTGGFKTIF

SEQ ID NO: 238194 - protein, 14 aa, Homo sapiens
  CDR3 for beta chain variable domain of TCR clone 119097 (TRBV7-3, TRBJ2-2)
CASSSGGYTGELFF

SEQ ID NO: 238195 - protein, 12 aa, Homo sapiens
  CDR3 for alpha chain variable domain of TCR clone 119098 (TRAV12-3, TRAJ17)
CAMTLTGNKLTF

SEQ ID NO: 238196 - protein, 12 aa, Homo sapiens
  CDR3 for beta chain variable domain of TCR clone 119098 (TRBV5-7, TRBJ1-2)
CASSLVQNGYTF

SEQ ID NO: 238197 - protein, 15 aa, Homo sapiens
  CDR3 for alpha chain variable domain of TCR clone 119099 (TRAV27, TRAJ50)
CAGRERGTSYDKVIF

SEQ ID NO: 238198 - protein, 13 aa, Homo sapiens
  CDR3 for beta chain variable domain of TCR clone 119099 (TRBV11-2, TRBJ2-1)
CASSLDLVNEQFF

SEQ ID NO: 238199 - protein, 12 aa, Homo sapiens
  CDR3 for alpha chain variable domain of TCR clone 119100 (TRAV36/DV7, TRAJ26)
CAVDNYGQNFVF

SEQ ID NO: 238200 - protein, 12 aa, Homo sapiens
  CDR3 for beta chain variable domain of TCR clone 119100 (TRBV7-8, TRBJ2-7)
CASSLGDREQYF

SEQ ID NO: 238201 - protein, 10 aa, Homo sapiens
  CDR3 for alpha chain variable domain of TCR clone 119101 (TRAV13-1, TRAJ49)
CAVPGNQFYF

SEQ ID NO: 238202 - protein, 17 aa, Homo sapiens
  CDR3 for beta chain variable domain of TCR clone 119101 (TRBV11-2, TRBJ2-1)
CASSLYPPGVEYNEQFF

SEQ ID NO: 238203 - protein, 15 aa, Homo sapiens
  CDR3 for alpha chain variable domain of TCR clone 119102 (TRAV16, TRAJ52)
ALSAAGGTSYGKLTF

SEQ ID NO: 238204 - protein, 12 aa, Homo sapiens
  CDR3 for beta chain variable domain of TCR clone 119102 (TRBV12-4, TRBJ1-3)
CASSFSGNTIYF

SEQ ID NO: 238205 - protein, 14 aa, Homo sapiens
  CDR3 for alpha chain variable domain of TCR clone 119103 (TRAV26-1, TRAJ38)
CIADNAGNNRKLLW

SEQ ID NO: 238206 - protein, 15 aa, Homo sapiens
  CDR3 for beta chain variable domain of TCR clone 119103 (TRBV20-1, TRBJ1-1)
CSARGGGTLKLSLDK

SEQ ID NO: 238207 - protein, 15 aa, Homo sapiens
  CDR3 for alpha chain variable domain of TCR clone 119104 (TRAV2, TRAJ9)
CAVEDRGTGGFKTIF

SEQ ID NO: 238208 - protein, 15 aa, Homo sapiens
  CDR3 for beta chain variable domain of TCR clone 119104 (TRBV5-1, TRBJ2-3)
CASSLETASTDTQYF

SEQ ID NO: 238209 - protein, 15 aa, Homo sapiens
  CDR3 for alpha chain variable domain of TCR clone 119105 (TRAV25, TRAJ52)
CAGRPGGTSYGKLTF

SEQ ID NO: 238210 - protein, 14 aa, Homo sapiens
  CDR3 for beta chain variable domain of TCR clone 119105 (TRBV2, TRBJ2-3)
CASSEGQNTDTQYF

SEQ ID NO: 238211 - protein, 20 aa, Homo sapiens
  CDR3 for alpha chain variable domain of TCR clone 119106 (TRAV26-1, TRAJ42)
CCVLLHRQTYYGGSQGNLIF

SEQ ID NO: 238212 - protein, 16 aa, Homo sapiens
  CDR3 for beta chain variable domain of TCR clone 119106 (TRBV7-3, TRBJ2-2)
CASSLKRGTLSGELYF

SEQ ID NO: 238213 - protein, 12 aa, Homo sapiens
  CDR3 for alpha chain variable domain of TCR clone 119107 (TRAV12-1, TRAJ16)
CVVFRDGQKLLF

SEQ ID NO: 238214 - protein, 15 aa, Homo sapiens
  CDR3 for beta chain variable domain of TCR clone 119107 (TRBV6-5, TRBJ2-1)
CASRGDFDSYNEQFF

SEQ ID NO: 238215 - protein, 16 aa, Homo sapiens
  CDR3 for alpha chain variable domain of TCR clone 119108 (TRAV30, TRAJ24)
CGTEIVDADSWGKFQF

SEQ ID NO: 238216 - protein, 14 aa, Homo sapiens
  CDR3 for beta chain variable domain of TCR clone 119108 (TRBV7-2, TRBJ2-3)
CASRRGLAADTQYF

SEQ ID NO: 238217 - protein, 12 aa, Homo sapiens
  CDR3 for alpha chain variable domain of TCR clone 119109 (TRAV2, TRAJ31)
CAVEEGNARLMF

SEQ ID NO: 238218 - protein, 11 aa, Homo sapiens
  CDR3 for beta chain variable domain of TCR clone 119109 (TRBV6-3, TRBJ2-3)
CATGQADTQYF

SEQ ID NO: 238219 - protein, 20 aa, Homo sapiens
  CDR3 for alpha chain variable domain of TCR clone 119110 (TRAV12-1, TRAJ42)
SSVIQPPTSVKGGSQGNLIF

SEQ ID NO: 238220 - protein, 16 aa, Homo sapiens
  CDR3 for beta chain variable domain of TCR clone 119110 (TRBV20-1, TRBJ1-4)
CSAPGQGLLTNEKLFF

SEQ ID NO: 238221 - protein, 16 aa, Homo sapiens
  CDR3 for alpha chain variable domain of TCR clone 119111 (TRAV30, TRAJ24)
CGTEIVDADSWGKFQF

SEQ ID NO: 238222 - protein, 16 aa, Homo sapiens
  CDR3 for beta chain variable domain of TCR clone 119111 (TRBV4-2, TRBJ1-1)
CASSPSPGRAAPEAFF

SEQ ID NO: 238223 - protein, 16 aa, Homo sapiens
  CDR3 for alpha chain variable domain of TCR clone 119112 (TRAV12-3, TRAJ53)
CAMSPGSGGSNYKLTF

SEQ ID NO: 238224 - protein, 17 aa, Homo sapiens
  CDR3 for beta chain variable domain of TCR clone 119112 (TRBV28, TRBJ2-5)
CASSTPEGDALHETQYF

SEQ ID NO: 238225 - protein, 12 aa, Homo sapiens
  CDR3 for alpha chain variable domain of TCR clone 119113 (TRAV2, TRAJ10)
CASTGGGNKLTF

SEQ ID NO: 238226 - protein, 14 aa, Homo sapiens
  CDR3 for beta chain variable domain of TCR clone 119113 (TRBV7-2, TRBJ2-2)
CASRGQGAAGELFC

SEQ ID NO: 238227 - protein, 12 aa, Homo sapiens
  CDR3 for alpha chain variable domain of TCR clone 119114 (TRAV12-3, TRAJ40)
CAVSSGTYKYIF

SEQ ID NO: 238228 - protein, 15 aa, Homo sapiens
  CDR3 for beta chain variable domain of TCR clone 119114 (TRBV7-9, TRBJ2-7)
CASSPGGGLAYEQYF

SEQ ID NO: 238229 - protein, 14 aa, Homo sapiens
  CDR3 for alpha chain variable domain of TCR clone 119115 (TRAV12-2, TRAJ53)
CAVKGGGSNYKLTF

SEQ ID NO: 238230 - protein, 14 aa, Homo sapiens
  CDR3 for beta chain variable domain of TCR clone 119115 (TRBV7-7, TRBJ2-2)
CATRQDSDTGEMFF

SEQ ID NO: 238231 - protein, 14 aa, Homo sapiens
  CDR3 for alpha chain variable domain of TCR clone 119116 (TRAV12-2, TRAJ24)
CAVTPADSWGKLQF

SEQ ID NO: 238232 - protein, 18 aa, Homo sapiens
  CDR3 for beta chain variable domain of TCR clone 119116 (TRBV12-4, TRBJ2-2)
CASSLVAGTRGRTGELFF

SEQ ID NO: 238233 - protein, 15 aa, Homo sapiens
  CDR3 for alpha chain variable domain of TCR clone 119117 (TRAV29/DV5, TRAJ24)
CAASGATDSWGRFQF

SEQ ID NO: 238234 - protein, 12 aa, Homo sapiens
  CDR3 for beta chain variable domain of TCR clone 119117 (TRBV11-2, TRBJ2-2)
CASSLPTGELFF

SEQ ID NO: 238235 - protein, 13 aa, Homo sapiens
  CDR3 for alpha chain variable domain of TCR clone 119118 (TRAV3, TRAJ21)
CAVREPDFNKFYF

SEQ ID NO: 238236 - protein, 15 aa, Homo sapiens
  CDR3 for beta chain variable domain of TCR clone 119118 (TRBV7-2, TRBJ2-3)
CASTPTSGETDTQYF

SEQ ID NO: 238237 - protein, 20 aa, Homo sapiens
  CDR3 for alpha chain variable domain of TCR clone 119119 (TRAV12-3, TRAJ41)
SLFIRDSQPSDSATPEALNF

SEQ ID NO: 238238 - protein, 13 aa, Homo sapiens
  CDR3 for beta chain variable domain of TCR clone 119119 (TRBV29-1, TRBJ2-1)
CSVEGGRVNEQFF

SEQ ID NO: 238239 - protein, 14 aa, Homo sapiens
  CDR3 for alpha chain variable domain of TCR clone 119120 (TRAV12-1, TRAJ17)
CVVNYKAAGNKLTF

SEQ ID NO: 238240 - protein, 18 aa, Homo sapiens
  CDR3 for beta chain variable domain of TCR clone 119120 (TRBV23-1, TRBJ2-7)
CASSQYRRTDSTSSTSGR

SEQ ID NO: 238241 - protein, 11 aa, Homo sapiens
  CDR3 for alpha chain variable domain of TCR clone 119121 (TRAV2, TRAJ13)
CASGGYQKVTF

SEQ ID NO: 238242 - protein, 15 aa, Homo sapiens
  CDR3 for beta chain variable domain of TCR clone 119121 (TRBV5-4, TRBJ2-7)
CASSGFGTGSYEQYF

SEQ ID NO: 238243 - protein, 13 aa, Homo sapiens
  CDR3 for alpha chain variable domain of TCR clone 119122 (TRAV29/DV5, TRAJ31)
RAASRNNNARLMF

SEQ ID NO: 238244 - protein, 19 aa, Homo sapiens
  CDR3 for beta chain variable domain of TCR clone 119122 (TRBV11-2, TRBJ2-2)
LRTRPCISVPAAYPGSCFF

SEQ ID NO: 238245 - protein, 13 aa, Homo sapiens
  CDR3 for alpha chain variable domain of TCR clone 119123 (TRAV12-3, TRAJ7)
CAMTPYGNNRLAF

SEQ ID NO: 238246 - protein, 16 aa, Homo sapiens
  CDR3 for beta chain variable domain of TCR clone 119123 (TRBV20-1, TRBJ1-4)
CSARPYGGELNETLFF

SEQ ID NO: 238247 - protein, 14 aa, Homo sapiens
  CDR3 for alpha chain variable domain of TCR clone 119124 (TRAV35, TRAJ13)
CAGSPSGGYQKVTF

SEQ ID NO: 238248 - protein, 13 aa, Homo sapiens
  CDR3 for beta chain variable domain of TCR clone 119124 (TRBV29-1, TRBJ1-1)
CSVGHSRNTEAFF

SEQ ID NO: 238249 - protein, 13 aa, Homo sapiens
  CDR3 for alpha chain variable domain of TCR clone 119125 (TRAV6, TRAJ23)
CALDQNQGGKLIF

SEQ ID NO: 238250 - protein, 15 aa, Homo sapiens
  CDR3 for beta chain variable domain of TCR clone 119125 (TRBV28, TRBJ1-2)
CASSGSEQRAFGYAF

SEQ ID NO: 238251 - protein, 14 aa, Homo sapiens
  CDR3 for alpha chain variable domain of TCR clone 119126 (TRAV1-1, TRAJ27)
CAVIYNTNAGKSTF

SEQ ID NO: 238252 - protein, 14 aa, Homo sapiens
  CDR3 for beta chain variable domain of TCR clone 119126 (TRBV2, TRBJ1-6)
CALSPSDPRSPLHF

SEQ ID NO: 238253 - protein, 14 aa, Homo sapiens
  CDR3 for alpha chain variable domain of TCR clone 119127 (TRAV12-2, TRAJ5)
CAVNRSTGRRALTF

SEQ ID NO: 238254 - protein, 11 aa, Homo sapiens
  CDR3 for beta chain variable domain of TCR clone 119127 (TRBV29-1, TRBJ2-5)
CSEDRAGTQYF

SEQ ID NO: 238255 - protein, 14 aa, Homo sapiens
  CDR3 for alpha chain variable domain of TCR clone 119128 (TRAV2, TRAJ29)
CAGPFQYGNTPLVS

SEQ ID NO: 238256 - protein, 14 aa, Homo sapiens
  CDR3 for beta chain variable domain of TCR clone 119128 (TRBV7-2, TRBJ2-5)
CQQLKEQGRETQYF

SEQ ID NO: 238257 - protein, 15 aa, Homo sapiens
  CDR3 for alpha chain variable domain of TCR clone 119129 (TRAV21, TRAJ24)
CAARSSTDSWGKLQF

SEQ ID NO: 238258 - protein, 14 aa, Homo sapiens
  CDR3 for beta chain variable domain of TCR clone 119129 (TRBV7-8, TRBJ2-3)
CASSLEAGTDTQYF

SEQ ID NO: 238259 - protein, 17 aa, Homo sapiens
  CDR3 for alpha chain variable domain of TCR clone 119130 (TRAV26-1, TRAJ37)
CIVRVITGSSNTGKLIF

SEQ ID NO: 238260 - protein, 15 aa, Homo sapiens
  CDR3 for beta chain variable domain of TCR clone 119130 (TRBV10-1, TRBJ2-3)
CASSATSGGFDTQYF

SEQ ID NO: 238261 - protein, 14 aa, Homo sapiens
  CDR3 for alpha chain variable domain of TCR clone 119131 (TRAV8-3, TRAJ10)
CAVGNAGGGNKLTF

SEQ ID NO: 238262 - protein, 16 aa, Homo sapiens
  CDR3 for beta chain variable domain of TCR clone 119131 (TRBV11-2, TRBJ1-2)
CASSLDTGGADYGYSF

SEQ ID NO: 238263 - protein, 14 aa, Homo sapiens
  CDR3 for alpha chain variable domain of TCR clone 119132 (TRAV13-1, TRAJ49)
CAASIGNTGNQFYF

SEQ ID NO: 238264 - protein, 16 aa, Homo sapiens
  CDR3 for beta chain variable domain of TCR clone 119132 (TRBV29-1, TRBJ2-7)
CSVEVVGTSGSYEQYF

SEQ ID NO: 238265 - protein, 23 aa, Homo sapiens
  CDR3 for alpha chain variable domain of TCR clone 119133 (TRAV26-2, TRAJ38)
CILYNAGNNHIQNPDPAVYQLRD

SEQ ID NO: 238266 - protein, 15 aa, Homo sapiens
  CDR3 for beta chain variable domain of TCR clone 119133 (TRBV7-3, TRBJ2-1)
CASSLSSGSFDEQFF

SEQ ID NO: 238267 - protein, 13 aa, Homo sapiens
  CDR3 for alpha chain variable domain of TCR clone 119134 (TRAV12-3, TRAJ33)
CARSVNSNYQLIW

SEQ ID NO: 238268 - protein, 13 aa, Homo sapiens
  CDR3 for beta chain variable domain of TCR clone 119134 (TRBV7-2, TRBJ2-2)
CASSLAVTGELFF

SEQ ID NO: 238269 - protein, 14 aa, Homo sapiens
  CDR3 for alpha chain variable domain of TCR clone 119135 (TRAV23/DV6, TRAJ21)
CAAYKSGPRDKFYF

SEQ ID NO: 238270 - protein, 15 aa, Homo sapiens
  CDR3 for beta chain variable domain of TCR clone 119135 (TRBV5-4, TRBJ2-2)
CASSLTSRGTGELLF

SEQ ID NO: 238271 - protein, 18 aa, Homo sapiens
  CDR3 for alpha chain variable domain of TCR clone 119136 (TRAV21, TRAJ52)
CAVRPSPAGGTSYGKLTF

SEQ ID NO: 238272 - protein, 13 aa, Homo sapiens
  CDR3 for beta chain variable domain of TCR clone 119136 (TRBV7-3, TRBJ1-1)
CASSQYWGAEAFF

SEQ ID NO: 238273 - protein, 12 aa, Homo sapiens
  CDR3 for alpha chain variable domain of TCR clone 119137 (TRAV12-3, TRAJ17)
YAMTLTGNKLTF

SEQ ID NO: 238274 - protein, 15 aa, Homo sapiens
  CDR3 for beta chain variable domain of TCR clone 119137 (TRBV20-1, TRBJ2-7)
CSARDRVSGMDEQYF

SEQ ID NO: 238275 - protein, 11 aa, Homo sapiens
  CDR3 for alpha chain variable domain of TCR clone 119138 (TRAV23/DV6, TRAJ48)
CAPRCGEKLTF

SEQ ID NO: 238276 - protein, 14 aa, Homo sapiens
  CDR3 for beta chain variable domain of TCR clone 119138 (TRBV29-1, TRBJ1-3)
CSVADRVVGNTIYF

SEQ ID NO: 238277 - protein, 13 aa, Homo sapiens
  CDR3 for alpha chain variable domain of TCR clone 119139 (TRAV13-1, TRAJ5)
CAASDTGRRALTF

SEQ ID NO: 238278 - protein, 12 aa, Homo sapiens
  CDR3 for beta chain variable domain of TCR clone 119139 (TRBV28, TRBJ2-3)
CASSLYRYTQYF

SEQ ID NO: 238279 - protein, 14 aa, Homo sapiens
  CDR3 for alpha chain variable domain of TCR clone 119140 (TRAV17, TRAJ11)
CATEGESGYSTLTF

SEQ ID NO: 238280 - protein, 13 aa, Homo sapiens
  CDR3 for beta chain variable domain of TCR clone 119140 (TRBV7-9, TRBJ1-2)
CASSLKQNYGYTF

SEQ ID NO: 238281 - protein, 13 aa, Homo sapiens
  CDR3 for alpha chain variable domain of TCR clone 119141 (TRAV12-3, TRAJ21)
CAPGPHNFNKFYF

SEQ ID NO: 238282 - protein, 14 aa, Homo sapiens
  CDR3 for beta chain variable domain of TCR clone 119141 (TRBV4-1, TRBJ2-2)
CASSQAVNTGELFF

SEQ ID NO: 238283 - protein, 16 aa, Homo sapiens
  CDR3 for alpha chain variable domain of TCR clone 119142 (TRAV20, TRAJ17)
CAVQARWESCRQQANF

SEQ ID NO: 238284 - protein, 13 aa, Homo sapiens
  CDR3 for beta chain variable domain of TCR clone 119142 (TRBV12-5, TRBJ2-3)
CASGDRQSDTQYF

SEQ ID NO: 238285 - protein, 17 aa, Homo sapiens
  CDR3 for alpha chain variable domain of TCR clone 119143 (TRAV8-6, TRAJ52)
CAVTRNAGGTSYGKLTF

SEQ ID NO: 238286 - protein, 13 aa, Homo sapiens
  CDR3 for beta chain variable domain of TCR clone 119143 (TRBV7-9, TRBJ1-2)
CASSLKQNYGYAF

SEQ ID NO: 238287 - protein, 12 aa, Homo sapiens
  CDR3 for alpha chain variable domain of TCR clone 119144 (TRAV12-3, TRAJ42)
CAPGGSQGNLIV

SEQ ID NO: 238288 - protein, 13 aa, Homo sapiens
  CDR3 for beta chain variable domain of TCR clone 119144 (TRBV5-7, TRBJ2-6)
CASTSSGANVLTF

SEQ ID NO: 238289 - protein, 14 aa, Homo sapiens
  CDR3 for alpha chain variable domain of TCR clone 119145 (TRAV13-1, TRAJ40)
CAASMTSGTYKYIV

SEQ ID NO: 238290 - protein, 15 aa, Homo sapiens
  CDR3 for beta chain variable domain of TCR clone 119145 (TRBV7-3, TRBJ2-1)
CASSPTGGGEVEQFF

SEQ ID NO: 238291 - protein, 16 aa, Homo sapiens
  CDR3 for alpha chain variable domain of TCR clone 119146 (TRAV30, TRAJ24)
CGTEFVDADSWGKFQF

SEQ ID NO: 238292 - protein, 15 aa, Homo sapiens
  CDR3 for beta chain variable domain of TCR clone 119146 (TRBV20-1, TRBJ2-7)
CSARDRVSGMDEQYF

SEQ ID NO: 238293 - protein, 17 aa, Homo sapiens
  CDR3 for alpha chain variable domain of TCR clone 119147 (TRAV3, TRAJ6)
CAVRDGPRAGGGYIPTF

SEQ ID NO: 238294 - protein, 14 aa, Homo sapiens
  CDR3 for beta chain variable domain of TCR clone 119147 (TRBV7-2, TRBJ2-7)
CASSPKTSFYEQYF

SEQ ID NO: 238295 - protein, 18 aa, Homo sapiens
  CDR3 for alpha chain variable domain of TCR clone 119148 (TRAV1-2, TRAJ10)
CAVRALTPVTGGGNKLTL

SEQ ID NO: 238296 - protein, 14 aa, Homo sapiens
  CDR3 for beta chain variable domain of TCR clone 119148 (TRBV4-1, TRBJ1-1)
CASSQQGNGNEAFF

SEQ ID NO: 238297 - protein, 14 aa, Homo sapiens
  CDR3 for alpha chain variable domain of TCR clone 119149 (TRAV38-1, TRAJ45)
CAYYSGGGADGLTF

SEQ ID NO: 238298 - protein, 20 aa, Homo sapiens
  CDR3 for beta chain variable domain of TCR clone 119149 (TRBV28, TRBJ2-1)
GASTPIGRSPGLAGGNEQFF

SEQ ID NO: 238299 - protein, 15 aa, Homo sapiens
  CDR3 for alpha chain variable domain of TCR clone 119150 (TRAV17, TRAJ56)
CATEPFTGSNSKLTF

SEQ ID NO: 238300 - protein, 15 aa, Homo sapiens
  CDR3 for beta chain variable domain of TCR clone 119150 (TRBV28, TRBJ1-5)
CASSRTGGYVQPQHF

SEQ ID NO: 238301 - protein, 12 aa, Homo sapiens
  CDR3 for alpha chain variable domain of TCR clone 119151 (TRAV12-3, TRAJ17)
CAMTLKGNKLTF

SEQ ID NO: 238302 - protein, 18 aa, Homo sapiens
  CDR3 for beta chain variable domain of TCR clone 119151 (TRBV4-3, TRBJ1-6)
CASSQETPASSYNSPLHF

SEQ ID NO: 238303 - protein, 13 aa, Homo sapiens
  CDR3 for alpha chain variable domain of TCR clone 119152 (TRAV8-3, TRAJ40)
CAVGAQYLRNLQI

SEQ ID NO: 238304 - protein, 13 aa, Homo sapiens
  CDR3 for beta chain variable domain of TCR clone 119152 (TRBV7-3, TRBJ1-1)
CASSQDWGAEAFF

SEQ ID NO: 238305 - protein, 12 aa, Homo sapiens
  CDR3 for alpha chain variable domain of TCR clone 119153 (TRAV13-2, TRAJ23)
CAERHRGGKLIF

SEQ ID NO: 238306 - protein, 15 aa, Homo sapiens
  CDR3 for beta chain variable domain of TCR clone 119153 (TRBV6-5, TRBJ2-7)
CASSRTSGFSYEQYF

SEQ ID NO: 238307 - protein, 14 aa, Homo sapiens
  CDR3 for alpha chain variable domain of TCR clone 119154 (TRAV12-2, TRAJ53)
CAVKGGGSNYNLTF

SEQ ID NO: 238308 - protein, 14 aa, Homo sapiens
  CDR3 for beta chain variable domain of TCR clone 119154 (TRBV19, TRBJ2-1)
CASPTFVLSGEQFF

SEQ ID NO: 238309 - protein, 12 aa, Homo sapiens
  CDR3 for alpha chain variable domain of TCR clone 119155 (TRAV12-3, TRAJ17)
CAMTLTGNKLTF

SEQ ID NO: 238310 - protein, 17 aa, Homo sapiens
  CDR3 for beta chain variable domain of TCR clone 119155 (TRBV5-1, TRBJ2-3)
CASSMGRTGPATDTQYF

SEQ ID NO: 238311 - protein, 11 aa, Homo sapiens
  CDR3 for alpha chain variable domain of TCR clone 119156 (TRAV12-1, TRAJ8)
CVVTGFQKLVF

SEQ ID NO: 238312 - protein, 17 aa, Homo sapiens
  CDR3 for beta chain variable domain of TCR clone 119156 (TRBV13, TRBJ2-3)
CASSLSRVAGGRNTQYF

SEQ ID NO: 238313 - protein, 13 aa, Homo sapiens
  CDR3 for alpha chain variable domain of TCR clone 119157 (TRAV8-3, TRAJ44)
CAVVPGTASKLTF

SEQ ID NO: 238314 - protein, 14 aa, Homo sapiens
  CDR3 for beta chain variable domain of TCR clone 119157 (TRBV11-2, TRBJ2-3)
CASSRLARTDTHYF

SEQ ID NO: 238315 - protein, 14 aa, Homo sapiens
  CDR3 for alpha chain variable domain of TCR clone 119158 (TRAV35, TRAJ22)
CAGLRPGSASQLTF

SEQ ID NO: 238316 - protein, 13 aa, Homo sapiens
  CDR3 for beta chain variable domain of TCR clone 119158 (TRBV20-1, TRBJ2-7)
CSATHTSGYEQYF

SEQ ID NO: 238317 - protein, 13 aa, Homo sapiens
  CDR3 for alpha chain variable domain of TCR clone 119159 (TRAV21, TRAJ27)
CAARPGNAGKSTL

SEQ ID NO: 238318 - protein, 12 aa, Homo sapiens
  CDR3 for beta chain variable domain of TCR clone 119159 (TRBV11-2, TRBJ2-2)
CASSLGGGELFF

SEQ ID NO: 238319 - protein, 17 aa, Homo sapiens
  CDR3 for alpha chain variable domain of TCR clone 119160 (TRAV8-6, TRAJ58)
CAVSSWVGETSGSRLTF

SEQ ID NO: 238320 - protein, 17 aa, Homo sapiens
  CDR3 for beta chain variable domain of TCR clone 119160 (TRBV4-3, TRBJ1-2)
CASSSRIQAGGSVGYTF

SEQ ID NO: 238321 - protein, 14 aa, Homo sapiens
  CDR3 for alpha chain variable domain of TCR clone 119161 (TRAV12-1, TRAJ29)
CVVNEGSGNTPLVF

SEQ ID NO: 238322 - protein, 16 aa, Homo sapiens
  CDR3 for beta chain variable domain of TCR clone 119161 (TRBV19, TRBJ2-1)
CASSKAGPSSYNEQFF

SEQ ID NO: 238323 - protein, 11 aa, Homo sapiens
  CDR3 for alpha chain variable domain of TCR clone 119162 (TRAV36/DV7, TRAJ36)
CAVIARRQTTS

SEQ ID NO: 238324 - protein, 12 aa, Homo sapiens
  CDR3 for beta chain variable domain of TCR clone 119162 (TRBV2, TRBJ2-1)
CAYGPPGNEQFF

SEQ ID NO: 238325 - protein, 13 aa, Homo sapiens
  CDR3 for alpha chain variable domain of TCR clone 119163 (TRAV13-1, TRAJ39)
CSKYSNAGNMLTF

SEQ ID NO: 238326 - protein, 19 aa, Homo sapiens
  CDR3 for beta chain variable domain of TCR clone 119163 (TRBV19, TRBJ2-5)
CASSIGQVTDFFLGETQYF

SEQ ID NO: 238327 - protein, 18 aa, Homo sapiens
  CDR3 for alpha chain variable domain of TCR clone 119164 (TRAV12-3, TRAJ52)
CAMSRTNAGGTSYGKLTF

SEQ ID NO: 238328 - protein, 17 aa, Homo sapiens
  CDR3 for beta chain variable domain of TCR clone 119164 (TRBV7-3, TRBJ2-3)
CASSLTKRMRGADTRYF

SEQ ID NO: 238329 - protein, 12 aa, Homo sapiens
  CDR3 for alpha chain variable domain of TCR clone 119165 (TRAV20, TRAJ31)
CAVTDNNARLMF

SEQ ID NO: 238330 - protein, 12 aa, Homo sapiens
  CDR3 for beta chain variable domain of TCR clone 119165 (TRBV11-2, TRBJ2-2)
CASSLPTGELFF

SEQ ID NO: 238331 - protein, 13 aa, Homo sapiens
  CDR3 for alpha chain variable domain of TCR clone 119166 (TRAV36/DV7, TRAJ57)
RAVVLGGSEKLVF

SEQ ID NO: 238332 - protein, 14 aa, Homo sapiens
  CDR3 for beta chain variable domain of TCR clone 119166 (TRBV4-1, TRBJ1-2)
CASSQDGQVRGYTF

SEQ ID NO: 238333 - protein, 12 aa, Homo sapiens
  CDR3 for alpha chain variable domain of TCR clone 119167 (TRAV21, TRAJ39)
CAADNAGNMLTF

SEQ ID NO: 238334 - protein, 13 aa, Homo sapiens
  CDR3 for beta chain variable domain of TCR clone 119167 (TRBV12-4, TRBJ1-1)
CAGSPGTGFEAFF

SEQ ID NO: 238335 - protein, 14 aa, Homo sapiens
  CDR3 for alpha chain variable domain of TCR clone 119168 (TRAV26-1, TRAJ38)
CIADNAGNNRKLIW

SEQ ID NO: 238336 - protein, 13 aa, Homo sapiens
  CDR3 for beta chain variable domain of TCR clone 119168 (TRBV20-1, TRBJ1-1)
CSARGGGNTEGFF

SEQ ID NO: 238337 - protein, 13 aa, Homo sapiens
  CDR3 for alpha chain variable domain of TCR clone 119169 (TRAV27, TRAJ49)
CAPRPYTGNQFYF

SEQ ID NO: 238338 - protein, 16 aa, Homo sapiens
  CDR3 for beta chain variable domain of TCR clone 119169 (TRBV4-1, TRBJ1-2)
CASSQVAGQVLYGYTF

SEQ ID NO: 238339 - protein, 14 aa, Homo sapiens
  CDR3 for alpha chain variable domain of TCR clone 119170 (TRAV38-1, TRAJ45)
CAYYSGGGGDGLTF

SEQ ID NO: 238340 - protein, 20 aa, Homo sapiens
  CDR3 for beta chain variable domain of TCR clone 119170 (TRBV28, TRBJ2-1)
CASTPIGRSPGLAGGNEQFF

SEQ ID NO: 238341 - protein, 14 aa, Homo sapiens
  CDR3 for alpha chain variable domain of TCR clone 119171 (TRAV27, TRAJ22)
CAGVSVLGKRQLTF

SEQ ID NO: 238342 - protein, 13 aa, Homo sapiens
  CDR3 for beta chain variable domain of TCR clone 119171 (TRBV7-9, TRBJ1-2)
CASSLKQNYGYTF

SEQ ID NO: 238343 - protein, 12 aa, Homo sapiens
  CDR3 for alpha chain variable domain of TCR clone 119172 (TRAV8-3, TRAJ43)
CAVGAGNNDMRF

SEQ ID NO: 238344 - protein, 14 aa, Homo sapiens
  CDR3 for beta chain variable domain of TCR clone 119172 (TRBV4-2, TRBJ1-5)
CASSRDRGNQHQHF

SEQ ID NO: 238345 - protein, 14 aa, Homo sapiens
  CDR3 for alpha chain variable domain of TCR clone 119173 (TRAV12-3, TRAJ35)
CAMSLIGFGNVLHC

SEQ ID NO: 238346 - protein, 14 aa, Homo sapiens
  CDR3 for beta chain variable domain of TCR clone 119173 (TRBV6-1, TRBJ1-3)
CASVQGGGGNTIYF

SEQ ID NO: 238347 - protein, 16 aa, Homo sapiens
  CDR3 for alpha chain variable domain of TCR clone 119174 (TRAV12-2, TRAJ32)
CAVNFGQGGATNKLIF

SEQ ID NO: 238348 - protein, 13 aa, Homo sapiens
  CDR3 for beta chain variable domain of TCR clone 119174 (TRBV9, TRBJ2-2)
CASSPRPAGELFF

SEQ ID NO: 238349 - protein, 15 aa, Homo sapiens
  CDR3 for alpha chain variable domain of TCR clone 119175 (TRAV21, TRAJ24)
CAARSSTDSWGKLQF

SEQ ID NO: 238350 - protein, 12 aa, Homo sapiens
  CDR3 for beta chain variable domain of TCR clone 119175 (TRBV7-3, TRBJ2-1)
CASSFQSGPQFF

SEQ ID NO: 238351 - protein, 13 aa, Homo sapiens
  CDR3 for alpha chain variable domain of TCR clone 119176 (TRAV20, TRAJ34)
CAVRAYNTDKLIF

SEQ ID NO: 238352 - protein, 12 aa, Homo sapiens
  CDR3 for beta chain variable domain of TCR clone 119176 (TRBV11-2, TRBJ2-1)
CASSPGNNEQFF

SEQ ID NO: 238353 - protein, 14 aa, Homo sapiens
  CDR3 for alpha chain variable domain of TCR clone 119177 (TRAV12-3, TRAJ12)
CAMSEVESSYKLIF

SEQ ID NO: 238354 - protein, 12 aa, Homo sapiens
  CDR3 for beta chain variable domain of TCR clone 119177 (TRBV18, TRBJ1-4)
CASSPSREKLFF

SEQ ID NO: 238355 - protein, 13 aa, Homo sapiens
  CDR3 for alpha chain variable domain of TCR clone 119178 (TRAV9-2, TRAJ53)
CALRGGSNYKLTF

SEQ ID NO: 238356 - protein, 16 aa, Homo sapiens
  CDR3 for beta chain variable domain of TCR clone 119178 (TRBV20-1, TRBJ2-1)
CSALTWTSGSYNEQFF

SEQ ID NO: 238357 - protein, 13 aa, Homo sapiens
  CDR3 for alpha chain variable domain of TCR clone 119179 (TRAV20, TRAJ37)
CAGCSSNTGTLIF

SEQ ID NO: 238358 - protein, 14 aa, Homo sapiens
  CDR3 for beta chain variable domain of TCR clone 119179 (TRBV20-1, TRBJ2-5)
CSARDGRAGETQYF

SEQ ID NO: 238359 - protein, 14 aa, Homo sapiens
  CDR3 for alpha chain variable domain of TCR clone 119180 (TRAV6, TRAJ26)
CALDKDNYGQNFVF

SEQ ID NO: 238360 - protein, 18 aa, Homo sapiens
  CDR3 for beta chain variable domain of TCR clone 119180 (TRBV5-1, TRBJ2-7)
CASSSTGGASGYSYEQYF

SEQ ID NO: 238361 - protein, 19 aa, Homo sapiens
  CDR3 for alpha chain variable domain of TCR clone 119181 (TRAV21, TRAJ41)
CAVREFRVCPQLRQRHLAV

SEQ ID NO: 238362 - protein, 15 aa, Homo sapiens
  CDR3 for beta chain variable domain of TCR clone 119181 (TRBV18, TRBJ1-5)
CASSPQARSNQPQHF

SEQ ID NO: 238363 - protein, 15 aa, Homo sapiens
  CDR3 for alpha chain variable domain of TCR clone 119182 (TRAV34, TRAJ38)
CGADFTPGNNRKLIW

SEQ ID NO: 238364 - protein, 17 aa, Homo sapiens
  CDR3 for beta chain variable domain of TCR clone 119182 (TRBV11-3, TRBJ2-5)
CASSLPGVRGGKETQYF

SEQ ID NO: 238365 - protein, 16 aa, Homo sapiens
  CDR3 for alpha chain variable domain of TCR clone 119183 (TRAV8-3, TRAJ13)
CAVGAYPSVGYQKVTF

SEQ ID NO: 238366 - protein, 13 aa, Homo sapiens
  CDR3 for beta chain variable domain of TCR clone 119183 (TRBV7-9, TRBJ1-2)
CASSLKQNYGYTF

SEQ ID NO: 238367 - protein, 11 aa, Homo sapiens
  CDR3 for alpha chain variable domain of TCR clone 119184 (TRAV2, TRAJ33)
CAVDSNYQLIW

SEQ ID NO: 238368 - protein, 13 aa, Homo sapiens
  CDR3 for beta chain variable domain of TCR clone 119184 (TRBV24-1, TRBJ2-2)
CATSDWSTGELFF

SEQ ID NO: 238369 - protein, 16 aa, Homo sapiens
  CDR3 for alpha chain variable domain of TCR clone 119185 (TRAV13-1, TRAJ48)
CSASIFGNFGNEKLTF

SEQ ID NO: 238370 - protein, 14 aa, Homo sapiens
  CDR3 for beta chain variable domain of TCR clone 119185 (TRBV7-3, TRBJ1-1)
CASSLKGGNTEAFF

SEQ ID NO: 238371 - protein, 12 aa, Homo sapiens
  CDR3 for alpha chain variable domain of TCR clone 119186 (TRAV17, TRAJ20)
CATQSNDYKVSF

SEQ ID NO: 238372 - protein, 13 aa, Homo sapiens
  CDR3 for beta chain variable domain of TCR clone 119186 (TRBV10-3, TRBJ1-1)
CAIIPEGGTEAFF

SEQ ID NO: 238373 - protein, 15 aa, Homo sapiens
  CDR3 for alpha chain variable domain of TCR clone 119187 (TRAV8-3, TRAJ40)
CAAPSLGSGTYKYTF

SEQ ID NO: 238374 - protein, 16 aa, Homo sapiens
  CDR3 for beta chain variable domain of TCR clone 119187 (TRBV7-3, TRBJ2-3)
CASSLSGYRPEDTQYF

SEQ ID NO: 238375 - protein, 18 aa, Homo sapiens
  CDR3 for alpha chain variable domain of TCR clone 119188 (TRAV12-3, TRAJ52)
CAMSVGGAGGTSYGKLTF

SEQ ID NO: 238376 - protein, 17 aa, Homo sapiens
  CDR3 for beta chain variable domain of TCR clone 119188 (TRBV28, TRBJ2-1)
CASSSARQALTYNEQFF

SEQ ID NO: 238377 - protein, 16 aa, Homo sapiens
  CDR3 for alpha chain variable domain of TCR clone 119189 (TRAV30, TRAJ24)
CGTEIVGADSWGKFQL

SEQ ID NO: 238378 - protein, 15 aa, Homo sapiens
  CDR3 for beta chain variable domain of TCR clone 119189 (TRBV7-9, TRBJ1-4)
CASSARTGGNEKLFF

SEQ ID NO: 238379 - protein, 15 aa, Homo sapiens
  CDR3 for alpha chain variable domain of TCR clone 119190 (TRAV8-2, TRAJ40)
CVVLGTTSGTYKYIF

SEQ ID NO: 238380 - protein, 16 aa, Homo sapiens
  CDR3 for beta chain variable domain of TCR clone 119190 (TRBV7-3, TRBJ2-1)
CASSLEGHRSYNEQFF

SEQ ID NO: 238381 - protein, 11 aa, Homo sapiens
  CDR3 for alpha chain variable domain of TCR clone 119191 (TRAV2, TRAJ21)
CAVFNFNKFYF

SEQ ID NO: 238382 - protein, 15 aa, Homo sapiens
  CDR3 for beta chain variable domain of TCR clone 119191 (TRBV2, TRBJ2-1)
CASSELAGSYNEQFF

SEQ ID NO: 238383 - protein, 11 aa, Homo sapiens
  CDR3 for alpha chain variable domain of TCR clone 119192 (TRAV2, TRAJ13)
CASGGYQKVTF

SEQ ID NO: 238384 - protein, 12 aa, Homo sapiens
  CDR3 for beta chain variable domain of TCR clone 119192 (TRBV19, TRBJ2-1)
CASSQISNEQFF

SEQ ID NO: 238385 - protein, 14 aa, Homo sapiens
  CDR3 for alpha chain variable domain of TCR clone 119193 (TRAV12-3, TRAJ10)
SHLPLTGGGNKLTF

SEQ ID NO: 238386 - protein, 13 aa, Homo sapiens
  CDR3 for beta chain variable domain of TCR clone 119193 (TRBV4-2, TRBJ2-1)
CASSPGTYNEQFF

SEQ ID NO: 238387 - protein, 15 aa, Homo sapiens
  CDR3 for alpha chain variable domain of TCR clone 119194 (TRAV35, TRAJ52)
CAGPRSGTSYGKLTF

SEQ ID NO: 238388 - protein, 14 aa, Homo sapiens
  CDR3 for beta chain variable domain of TCR clone 119194 (TRBV20-1, TRBJ2-7)
CSAWTALSSYEQYF

SEQ ID NO: 238389 - protein, 12 aa, Homo sapiens
  CDR3 for alpha chain variable domain of TCR clone 119195 (TRAV26-1, TRAJ36)
CIVRVRADNLFF

SEQ ID NO: 238390 - protein, 14 aa, Homo sapiens
  CDR3 for beta chain variable domain of TCR clone 119195 (TRBV4-1, TRBJ2-2)
CASSQAVNTGELFF

SEQ ID NO: 238391 - protein, 14 aa, Homo sapiens
  CDR3 for alpha chain variable domain of TCR clone 119196 (TRAV1-2, TRAJ8)
CAVREDTGFQKLVF

SEQ ID NO: 238392 - protein, 13 aa, Homo sapiens
  CDR3 for beta chain variable domain of TCR clone 119196 (TRBV20-1, TRBJ1-1)
QCTNTDWGTEAFF

SEQ ID NO: 238393 - protein, 12 aa, Homo sapiens
  CDR3 for alpha chain variable domain of TCR clone 119197 (TRAV12-1, TRAJ34)
CVVAGATDKLIF

SEQ ID NO: 238394 - protein, 16 aa, Homo sapiens
  CDR3 for beta chain variable domain of TCR clone 119197 (TRBV7-2, TRBJ1-2)
CDSSSNQDRRGHGYTF

SEQ ID NO: 238395 - protein, 12 aa, Homo sapiens
  CDR3 for alpha chain variable domain of TCR clone 119198 (TRAV1-2, TRAJ33)
CAALDSNYQLIW

SEQ ID NO: 238396 - protein, 16 aa, Homo sapiens
  CDR3 for beta chain variable domain of TCR clone 119198 (TRBV24-1, TRBJ2-3)
CATSDPGTGATDTQYF

SEQ ID NO: 238397 - protein, 16 aa, Homo sapiens
  CDR3 for alpha chain variable domain of TCR clone 119199 (TRAV23/DV6, )
CADIQNPDPAVYQLRD

SEQ ID NO: 238398 - protein, 13 aa, Homo sapiens
  CDR3 for beta chain variable domain of TCR clone 119199 (TRBV28, TRBJ2-7)
CASRSGGVYEQYF

SEQ ID NO: 238399 - protein, 16 aa, Homo sapiens
  CDR3 for alpha chain variable domain of TCR clone 119200 (TRAV29/DV5, TRAJ39)
CAASLLFNNAGNMLTF

SEQ ID NO: 238400 - protein, 16 aa, Homo sapiens
  CDR3 for beta chain variable domain of TCR clone 119200 (TRBV19, TRBJ2-6)
CASSMSGLSGANVLSF

SEQ ID NO: 238401 - protein, 15 aa, Homo sapiens
  CDR3 for alpha chain variable domain of TCR clone 119201 (TRAV35, TRAJ41)
CAGQLFSNSGYALNF

SEQ ID NO: 238402 - protein, 12 aa, Homo sapiens
  CDR3 for beta chain variable domain of TCR clone 119201 (TRBV11-2, TRBJ2-2)
CASSLGGGELFF

SEQ ID NO: 238403 - protein, 14 aa, Homo sapiens
  CDR3 for alpha chain variable domain of TCR clone 119202 (TRAV8-3, TRAJ39)
CAVGADNAGNMLTF

SEQ ID NO: 238404 - protein, 12 aa, Homo sapiens
  CDR3 for beta chain variable domain of TCR clone 119202 (TRBV7-9, TRBJ2-7)
CASSQGVYEQYF

SEQ ID NO: 238405 - protein, 11 aa, Homo sapiens
  CDR3 for alpha chain variable domain of TCR clone 119203 (TRAV17, TRAJ49)
CATDAGNQFYF

SEQ ID NO: 238406 - protein, 16 aa, Homo sapiens
  CDR3 for beta chain variable domain of TCR clone 119203 (TRBV7-2, TRBJ1-2)
CASSPTAGTSLGGYTF

SEQ ID NO: 238407 - protein, 11 aa, Homo sapiens
  CDR3 for alpha chain variable domain of TCR clone 119204 (TRAV8-2, TRAJ26)
CVVTLLLGSEF

SEQ ID NO: 238408 - protein, 16 aa, Homo sapiens
  CDR3 for beta chain variable domain of TCR clone 119204 (TRBV4-2, TRBJ2-3)
CASSQELAGDTDTQYF

SEQ ID NO: 238409 - protein, 14 aa, Homo sapiens
  CDR3 for alpha chain variable domain of TCR clone 119205 (TRAV3, TRAJ9)
CAVRLNTGGFKTIF

SEQ ID NO: 238410 - protein, 17 aa, Homo sapiens
  CDR3 for beta chain variable domain of TCR clone 119205 (TRBV5-1, TRBJ2-5)
CASSPVALGQNQETQYF

SEQ ID NO: 238411 - protein, 15 aa, Homo sapiens
  CDR3 for alpha chain variable domain of TCR clone 119206 (TRAV13-2, TRAJ37)
CREYEDPGKTGKLIF

SEQ ID NO: 238412 - protein, 13 aa, Homo sapiens
  CDR3 for beta chain variable domain of TCR clone 119206 (TRBV20-1, TRBJ2-7)
CSARSGHPYEQYF

SEQ ID NO: 238413 - protein, 13 aa, Homo sapiens
  CDR3 for alpha chain variable domain of TCR clone 119207 (TRAV13-2, TRAJ40)
CAEFTSGTYKYIF

SEQ ID NO: 238414 - protein, 15 aa, Homo sapiens
  CDR3 for beta chain variable domain of TCR clone 119207 (TRBV7-2, TRBJ1-5)
CASSRGQGDNQPQHF

SEQ ID NO: 238415 - protein, 13 aa, Homo sapiens
  CDR3 for alpha chain variable domain of TCR clone 119208 (TRAV12-1, TRAJ11)
CVVTRGGYSTLTF

SEQ ID NO: 238416 - protein, 17 aa, Homo sapiens
  CDR3 for beta chain variable domain of TCR clone 119208 (TRBV13, TRBJ2-3)
CASSLSRVAGGRDTQYF

SEQ ID NO: 238417 - protein, 16 aa, Homo sapiens
  CDR3 for alpha chain variable domain of TCR clone 119209 (TRAV3, TRAJ28)
CAVLPRYGAGSYQLTF

SEQ ID NO: 238418 - protein, 13 aa, Homo sapiens
  CDR3 for beta chain variable domain of TCR clone 119209 (TRBV12-4, TRBJ2-5)
CASRLAVQETQYF

SEQ ID NO: 238419 - protein, 14 aa, Homo sapiens
  CDR3 for alpha chain variable domain of TCR clone 119210 (TRAV1-2, TRAJ16)
CAVNRFSDGQKLLF

SEQ ID NO: 238420 - protein, 13 aa, Homo sapiens
  CDR3 for beta chain variable domain of TCR clone 119210 (TRBV20-1, TRBJ2-5)
CSARGDYQETQYF

SEQ ID NO: 238421 - protein, 11 aa, Homo sapiens
  CDR3 for alpha chain variable domain of TCR clone 119211 (TRAV2, TRAJ13)
CASGGYQKVTF

SEQ ID NO: 238422 - protein, 14 aa, Homo sapiens
  CDR3 for beta chain variable domain of TCR clone 119211 (TRBV7-3, TRBJ2-7)
CASSYYQDYYEQYF

SEQ ID NO: 238423 - protein, 15 aa, Homo sapiens
  CDR3 for alpha chain variable domain of TCR clone 119212 (TRAV13-1, TRAJ17)
CAARIERAAGNKLTF

SEQ ID NO: 238424 - protein, 13 aa, Homo sapiens
  CDR3 for beta chain variable domain of TCR clone 119212 (TRBV7-7, TRBJ2-3)
CASSLSRADTQYF

SEQ ID NO: 238425 - protein, 14 aa, Homo sapiens
  CDR3 for alpha chain variable domain of TCR clone 119213 (TRAV12-3, TRAJ10)
SHLPLTGGGNKLTF

SEQ ID NO: 238426 - protein, 16 aa, Homo sapiens
  CDR3 for beta chain variable domain of TCR clone 119213 (TRBV28, TRBJ2-1)
CASSSPEYPRDNEQFF

SEQ ID NO: 238427 - protein, 14 aa, Homo sapiens
  CDR3 for alpha chain variable domain of TCR clone 119214 (TRAV1-2, TRAJ16)
CAVNRFSDGQKLLF

SEQ ID NO: 238428 - protein, 17 aa, Homo sapiens
  CDR3 for beta chain variable domain of TCR clone 119214 (TRBV20-1, TRBJ2-1)
CSASSSGLSGSYNEQFF

SEQ ID NO: 238429 - protein, 13 aa, Homo sapiens
  CDR3 for alpha chain variable domain of TCR clone 119215 (TRAV12-3, TRAJ9)
CAMRNTGGFKTIF

SEQ ID NO: 238430 - protein, 15 aa, Homo sapiens
  CDR3 for beta chain variable domain of TCR clone 119215 (TRBV5-5, TRBJ1-5)
CASSSTPGSNQPQHF

SEQ ID NO: 238431 - protein, 18 aa, Homo sapiens
  CDR3 for alpha chain variable domain of TCR clone 119216 (TRAV21, TRAJ52)
CAVGPSPAGGTSYGKLTF

SEQ ID NO: 238432 - protein, 13 aa, Homo sapiens
  CDR3 for beta chain variable domain of TCR clone 119216 (TRBV19, TRBJ1-2)
CASSVPGQDGYTF

SEQ ID NO: 238433 - protein, 15 aa, Homo sapiens
  CDR3 for alpha chain variable domain of TCR clone 119217 (TRAV13-1, TRAJ36)
CAASTRQTGANNLFF

SEQ ID NO: 238434 - protein, 16 aa, Homo sapiens
  CDR3 for beta chain variable domain of TCR clone 119217 (TRBV4-1, TRBJ2-7)
CASSQEWTSGPLEQYF

SEQ ID NO: 238435 - protein, 12 aa, Homo sapiens
  CDR3 for alpha chain variable domain of TCR clone 119218 (TRAV8-3, TRAJ20)
CAVGANDYRLSF

SEQ ID NO: 238436 - protein, 16 aa, Homo sapiens
  CDR3 for beta chain variable domain of TCR clone 119218 (TRBV19, TRBJ2-2)
CASRSPGTGATGELFS

SEQ ID NO: 238437 - protein, 15 aa, Homo sapiens
  CDR3 for alpha chain variable domain of TCR clone 119219 (TRAV12-3, TRAJ27)
CAMRAYNTNAGKSTF

SEQ ID NO: 238438 - protein, 13 aa, Homo sapiens
  CDR3 for beta chain variable domain of TCR clone 119219 (TRBV11-2, TRBJ2-5)
CASSRGPSETQSF

SEQ ID NO: 238439 - protein, 13 aa, Homo sapiens
  CDR3 for alpha chain variable domain of TCR clone 119220 (TRAV39, TRAJ48)
CAAVNFGNDKLTF

SEQ ID NO: 238440 - protein, 12 aa, Homo sapiens
  CDR3 for beta chain variable domain of TCR clone 119220 (TRBV5-5, TRBJ2-5)
CASSYFGETQYF

SEQ ID NO: 238441 - protein, 12 aa, Homo sapiens
  CDR3 for alpha chain variable domain of TCR clone 119221 (TRAV13-1, TRAJ53)
AASGGSNYELTF

SEQ ID NO: 238442 - protein, 13 aa, Homo sapiens
  CDR3 for beta chain variable domain of TCR clone 119221 (TRBV9, TRBJ2-5)
CASSPAGLGTQYF

SEQ ID NO: 238443 - protein, 17 aa, Homo sapiens
  CDR3 for alpha chain variable domain of TCR clone 119222 (TRAV8-6, TRAJ58)
CAVSSWVGETSGSRLTF

SEQ ID NO: 238444 - protein, 14 aa, Homo sapiens
  CDR3 for beta chain variable domain of TCR clone 119222 (TRBV4-2, TRBJ2-1)
CASGMDRAYNEQFF

SEQ ID NO: 238445 - protein, 11 aa, Homo sapiens
  CDR3 for alpha chain variable domain of TCR clone 119223 (TRAV1-2, TRAJ11)
CAVRGYSTLTF

SEQ ID NO: 238446 - protein, 13 aa, Homo sapiens
  CDR3 for beta chain variable domain of TCR clone 119223 (TRBV29-1, TRBJ2-7)
CSVGPSGGYEQYF

SEQ ID NO: 238447 - protein, 17 aa, Homo sapiens
  CDR3 for alpha chain variable domain of TCR clone 119224 (TRAV26-1, TRAJ46)
IASSEAEKKSSGDKLTF

SEQ ID NO: 238448 - protein, 16 aa, Homo sapiens
  CDR3 for beta chain variable domain of TCR clone 119224 (TRBV27, TRBJ2-2)
CASSFRGLVRTGELFF

SEQ ID NO: 238449 - protein, 15 aa, Homo sapiens
  CDR3 for alpha chain variable domain of TCR clone 119225 (TRAV12-2, TRAJ53)
CAVNGGGGSKYKLTF

SEQ ID NO: 238450 - protein, 17 aa, Homo sapiens
  CDR3 for beta chain variable domain of TCR clone 119225 (TRBV7-3, TRBJ2-3)
CASSLMKRMRGADTQYF

SEQ ID NO: 238451 - protein, 14 aa, Homo sapiens
  CDR3 for alpha chain variable domain of TCR clone 119226 (TRAV13-1, TRAJ40)
CAASMTSGTYKYIF

SEQ ID NO: 238452 - protein, 12 aa, Homo sapiens
  CDR3 for beta chain variable domain of TCR clone 119226 (TRBV7-8, TRBJ2-7)
CASSLGDREQYF

SEQ ID NO: 238453 - protein, 16 aa, Homo sapiens
  CDR3 for alpha chain variable domain of TCR clone 119227 (TRAV8-3, TRAJ10)
CAVGPILTGGGNKLTF

SEQ ID NO: 238454 - protein, 14 aa, Homo sapiens
  CDR3 for beta chain variable domain of TCR clone 119227 (TRBV11-1, TRBJ2-7)
CASSFRQGSYEQYF

SEQ ID NO: 238455 - protein, 13 aa, Homo sapiens
  CDR3 for alpha chain variable domain of TCR clone 119228 (TRAV12-3, TRAJ33)
CAMSVNSNYPLIW

SEQ ID NO: 238456 - protein, 13 aa, Homo sapiens
  CDR3 for beta chain variable domain of TCR clone 119228 (TRBV7-2, TRBJ2-2)
CASSLAVTGELFF

SEQ ID NO: 238457 - protein, 14 aa, Homo sapiens
  CDR3 for alpha chain variable domain of TCR clone 119229 (TRAV12-2, TRAJ45)
CAVNIGGGADGLTF

SEQ ID NO: 238458 - protein, 17 aa, Homo sapiens
  CDR3 for beta chain variable domain of TCR clone 119229 (TRBV7-8, TRBJ2-6)
RASSAGTGGAGANVLTF

SEQ ID NO: 238459 - protein, 11 aa, Homo sapiens
  CDR3 for alpha chain variable domain of TCR clone 119230 (TRAV2, TRAJ13)
CASGGYQKVTF

SEQ ID NO: 238460 - protein, 17 aa, Homo sapiens
  CDR3 for beta chain variable domain of TCR clone 119230 (TRBV11-2, TRBJ2-3)
CQQLRGASRGAPNTQYF

SEQ ID NO: 238461 - protein, 16 aa, Homo sapiens
  CDR3 for alpha chain variable domain of TCR clone 119231 (TRAV26-2, TRAJ48)
CILRSPFNFGNEKLTF

SEQ ID NO: 238462 - protein, 15 aa, Homo sapiens
  CDR3 for beta chain variable domain of TCR clone 119231 (TRBV20-1, TRBJ2-3)
CSARVEGTYTDTQYF

SEQ ID NO: 238463 - protein, 13 aa, Homo sapiens
  CDR3 for alpha chain variable domain of TCR clone 119232 (TRAV1-2, TRAJ37)
CAGGSGNTGKLIF

SEQ ID NO: 238464 - protein, 14 aa, Homo sapiens
  CDR3 for beta chain variable domain of TCR clone 119232 (TRBV6-1, TRBJ2-6)
CASQQGAGANVLTF

SEQ ID NO: 238465 - protein, 12 aa, Homo sapiens
  CDR3 for alpha chain variable domain of TCR clone 119233 (TRAV16, TRAJ10)
CSRTGGGNKLTF

SEQ ID NO: 238466 - protein, 17 aa, Homo sapiens
  CDR3 for beta chain variable domain of TCR clone 119233 (TRBV7-3, TRBJ2-3)
CASSLMKRMRGADTQYF

SEQ ID NO: 238467 - protein, 16 aa, Homo sapiens
  CDR3 for alpha chain variable domain of TCR clone 119234 (TRAV3, TRAJ18)
CAVRDGRGSNLGRLYF

SEQ ID NO: 238468 - protein, 17 aa, Homo sapiens
  CDR3 for beta chain variable domain of TCR clone 119234 (TRBV5-1, TRBJ2-3)
CASSKIGLADRTDTQYF

SEQ ID NO: 238469 - protein, 19 aa, Homo sapiens
  CDR3 for alpha chain variable domain of TCR clone 119235 (TRAV29/DV5, TRAJ49)
CSVLLCSKLTVDTGNQCYF

SEQ ID NO: 238470 - protein, 17 aa, Homo sapiens
  CDR3 for beta chain variable domain of TCR clone 119235 (TRBV13, TRBJ2-3)
CASSLSRVAGGRNTQYF

SEQ ID NO: 238471 - protein, 17 aa, Homo sapiens
  CDR3 for alpha chain variable domain of TCR clone 119236 (TRAV3, TRAJ6)
CAVRDGPRAGGSYIPPF

SEQ ID NO: 238472 - protein, 14 aa, Homo sapiens
  CDR3 for beta chain variable domain of TCR clone 119236 (TRBV7-2, TRBJ2-7)
CASSPKTSSYEQYF

SEQ ID NO: 238473 - protein, 15 aa, Homo sapiens
  CDR3 for alpha chain variable domain of TCR clone 119237 (TRAV3, TRAJ3)
CAVRDRDSSASKIIF

SEQ ID NO: 238474 - protein, 18 aa, Homo sapiens
  CDR3 for beta chain variable domain of TCR clone 119237 (TRBV25-1, TRBJ1-2)
CASSGLQNGKGLIFGYTF

SEQ ID NO: 238475 - protein, 15 aa, Homo sapiens
  CDR3 for alpha chain variable domain of TCR clone 119238 (TRAV13-2, TRAJ17)
CREEGGEAAGNKLTF

SEQ ID NO: 238476 - protein, 12 aa, Homo sapiens
  CDR3 for beta chain variable domain of TCR clone 119238 (TRBV11-2, TRBJ2-1)
CASSPGNNEQFF

SEQ ID NO: 238477 - protein, 14 aa, Homo sapiens
  CDR3 for alpha chain variable domain of TCR clone 119239 (TRAV16, TRAJ39)
CALSKNNAGNMLTF

SEQ ID NO: 238478 - protein, 16 aa, Homo sapiens
  CDR3 for beta chain variable domain of TCR clone 119239 (TRBV11-2, TRBJ2-1)
CQQLIPPGVEYNEQFF

SEQ ID NO: 238479 - protein, 13 aa, Homo sapiens
  CDR3 for alpha chain variable domain of TCR clone 119240 (TRAV13-1, TRAJ10)
RAALEGGGNKLTF

SEQ ID NO: 238480 - protein, 13 aa, Homo sapiens
  CDR3 for beta chain variable domain of TCR clone 119240 (TRBV7-9, TRBJ1-2)
CASSLKQNYGYTF

SEQ ID NO: 238481 - protein, 14 aa, Homo sapiens
  CDR3 for alpha chain variable domain of TCR clone 119241 (TRAV3, TRAJ21)
CAVESQANFNKFYF

SEQ ID NO: 238482 - protein, 18 aa, Homo sapiens
  CDR3 for beta chain variable domain of TCR clone 119241 (TRBV7-9, TRBJ2-1)
CASSLAVSGTSGRNEQLF

SEQ ID NO: 238483 - protein, 13 aa, Homo sapiens
  CDR3 for alpha chain variable domain of TCR clone 119242 (TRAV12-1, TRAJ40)
CVVPTSGTHKYIF

SEQ ID NO: 238484 - protein, 18 aa, Homo sapiens
  CDR3 for beta chain variable domain of TCR clone 119242 (TRBV7-6, TRBJ2-1)
CASSPRTSGMSSYNEQFF

SEQ ID NO: 238485 - protein, 13 aa, Homo sapiens
  CDR3 for alpha chain variable domain of TCR clone 119243 (TRAV21, TRAJ15)
CAVDNQAGTALIF

SEQ ID NO: 238486 - protein, 13 aa, Homo sapiens
  CDR3 for beta chain variable domain of TCR clone 119243 (TRBV10-3, TRBJ2-7)
CASKLAVNYEQYF

SEQ ID NO: 238487 - protein, 13 aa, Homo sapiens
  CDR3 for alpha chain variable domain of TCR clone 119244 (TRAV21, TRAJ27)
CAALNTNAGKSTF

SEQ ID NO: 238488 - protein, 13 aa, Homo sapiens
  CDR3 for beta chain variable domain of TCR clone 119244 (TRBV27, TRBJ1-1)
CASSLSIGAEAFF

SEQ ID NO: 238489 - protein, 13 aa, Homo sapiens
  CDR3 for alpha chain variable domain of TCR clone 119245 (TRAV29/DV5, TRAJ33)
CAASVESNYQLIW

SEQ ID NO: 238490 - protein, 13 aa, Homo sapiens
  CDR3 for beta chain variable domain of TCR clone 119245 (TRBV10-3, TRBJ2-7)
CASKLAVNYEQYF

SEQ ID NO: 238491 - protein, 15 aa, Homo sapiens
  CDR3 for alpha chain variable domain of TCR clone 119246 (TRAV1-2, TRAJ38)
CAVSENAGNNRKLIW

SEQ ID NO: 238492 - protein, 15 aa, Homo sapiens
  CDR3 for beta chain variable domain of TCR clone 119246 (TRBV20-1, TRBJ2-7)
CSARDQVSGMDEQYF

SEQ ID NO: 238493 - protein, 14 aa, Homo sapiens
  CDR3 for alpha chain variable domain of TCR clone 119247 (TRAV12-2, TRAJ13)
CAVKKTGGYQKVTF

SEQ ID NO: 238494 - protein, 16 aa, Homo sapiens
  CDR3 for beta chain variable domain of TCR clone 119247 (TRBV12-5, TRBJ2-7)
CASGSQGAPTSSTAGR

SEQ ID NO: 238495 - protein, 13 aa, Homo sapiens
  CDR3 for alpha chain variable domain of TCR clone 119248 (TRAV12-2, TRAJ20)
CAVYPSNDYKLSF

SEQ ID NO: 238496 - protein, 15 aa, Homo sapiens
  CDR3 for beta chain variable domain of TCR clone 119248 (TRBV18, TRBJ1-2)
CASSPGNGLGYGYAF

SEQ ID NO: 238497 - protein, 18 aa, Homo sapiens
  CDR3 for alpha chain variable domain of TCR clone 119249 (TRAV21, TRAJ52)
CAVGPSPAGGTSYGKLTF

SEQ ID NO: 238498 - protein, 17 aa, Homo sapiens
  CDR3 for beta chain variable domain of TCR clone 119249 (TRBV13, TRBJ2-3)
CASSLSRVAGGGNTQYF

SEQ ID NO: 238499 - protein, 17 aa, Homo sapiens
  CDR3 for alpha chain variable domain of TCR clone 119250 (TRAV12-2, TRAJ22)
CAVNRIPFSGSARQLTF

SEQ ID NO: 238500 - protein, 13 aa, Homo sapiens
  CDR3 for beta chain variable domain of TCR clone 119250 (TRBV15, TRBJ1-6)
CATSGGLNPPLHF

SEQ ID NO: 238501 - protein, 15 aa, Homo sapiens
  CDR3 for alpha chain variable domain of TCR clone 119251 (TRAV1-2, TRAJ16)
CAVRARFSDVQKLLF

SEQ ID NO: 238502 - protein, 19 aa, Homo sapiens
  CDR3 for beta chain variable domain of TCR clone 119251 (TRBV11-3, TRBJ2-3)
CASGFGTSGGPRGGGTQYF

SEQ ID NO: 238503 - protein, 11 aa, Homo sapiens
  CDR3 for alpha chain variable domain of TCR clone 119252 (TRAV35, TRAJ22)
CAGPGVGQLTF

SEQ ID NO: 238504 - protein, 13 aa, Homo sapiens
  CDR3 for beta chain variable domain of TCR clone 119252 (TRBV19, TRBJ1-2)
CASSVPGQDGYTF

SEQ ID NO: 238505 - protein, 15 aa, Homo sapiens
  CDR3 for alpha chain variable domain of TCR clone 119253 (TRAV17, TRAJ57)
CATGPSQGGSEKLVF

SEQ ID NO: 238506 - protein, 16 aa, Homo sapiens
  CDR3 for beta chain variable domain of TCR clone 119253 (TRBV12-4, TRBJ1-5)
FASSRPVGGSNQPQHF

SEQ ID NO: 238507 - protein, 14 aa, Homo sapiens
  CDR3 for alpha chain variable domain of TCR clone 119254 (TRAV29/DV5, TRAJ36)
CAARRKSGANNLFF

SEQ ID NO: 238508 - protein, 14 aa, Homo sapiens
  CDR3 for beta chain variable domain of TCR clone 119254 (TRBV12-5, TRBJ2-5)
CASGSRTHQETQYF

SEQ ID NO: 238509 - protein, 12 aa, Homo sapiens
  CDR3 for alpha chain variable domain of TCR clone 119255 (TRAV13-1, TRAJ53)
AASGGSNYKLTF

SEQ ID NO: 238510 - protein, 17 aa, Homo sapiens
  CDR3 for beta chain variable domain of TCR clone 119255 (TRBV7-3, TRBJ2-3)
CASSPRGQGYGTDTQYF

SEQ ID NO: 238511 - protein, 15 aa, Homo sapiens
  CDR3 for alpha chain variable domain of TCR clone 119256 (TRAV21, TRAJ53)
CATLNSGGSNYKLTF

SEQ ID NO: 238512 - protein, 14 aa, Homo sapiens
  CDR3 for beta chain variable domain of TCR clone 119256 (TRBV20-1, TRBJ1-5)
CSARDDRGNQPQHF

SEQ ID NO: 238513 - protein, 14 aa, Homo sapiens
  CDR3 for alpha chain variable domain of TCR clone 119257 (TRAV25, TRAJ22)
CAVRSSGSARQLTF

SEQ ID NO: 238514 - protein, 13 aa, Homo sapiens
  CDR3 for beta chain variable domain of TCR clone 119257 (TRBV7-3, TRBJ1-1)
CASSQDWGAEAFF

SEQ ID NO: 238515 - protein, 15 aa, Homo sapiens
  CDR3 for alpha chain variable domain of TCR clone 119258 (TRAV21, TRAJ37)
CDVRPTLSNTGKLIF

SEQ ID NO: 238516 - protein, 16 aa, Homo sapiens
  CDR3 for beta chain variable domain of TCR clone 119258 (TRBV24-1, TRBJ2-3)
CATSDRRQDLTDTQYF

SEQ ID NO: 238517 - protein, 14 aa, Homo sapiens
  CDR3 for alpha chain variable domain of TCR clone 119259 (TRAV8-4, TRAJ9)
CAVSDRTGGLKTIF

SEQ ID NO: 238518 - protein, 13 aa, Homo sapiens
  CDR3 for beta chain variable domain of TCR clone 119259 (TRBV11-2, TRBJ2-7)
CASSLGDSYEQYF

SEQ ID NO: 238519 - protein, 15 aa, Homo sapiens
  CDR3 for alpha chain variable domain of TCR clone 119260 (TRAV4, TRAJ36)
CLVGDRQTGANNLFF

SEQ ID NO: 238520 - protein, 15 aa, Homo sapiens
  CDR3 for beta chain variable domain of TCR clone 119260 (TRBV7-6, TRBJ2-1)
CASSSLAGEGNEQLF

SEQ ID NO: 238521 - protein, 16 aa, Homo sapiens
  CDR3 for alpha chain variable domain of TCR clone 119261 (TRAV17, TRAJ22)
CATDAISSGSARQLTF

SEQ ID NO: 238522 - protein, 15 aa, Homo sapiens
  CDR3 for beta chain variable domain of TCR clone 119261 (TRBV5-1, TRBJ2-1)
CASSPPRATYNEQFF

SEQ ID NO: 238523 - protein, 14 aa, Homo sapiens
  CDR3 for alpha chain variable domain of TCR clone 119262 (TRAV1-2, TRAJ16)
CAVNRFSDGQKLLF

SEQ ID NO: 238524 - protein, 13 aa, Homo sapiens
  CDR3 for beta chain variable domain of TCR clone 119262 (TRBV7-9, TRBJ1-2)
CASSLKQNYGYTS

SEQ ID NO: 238525 - protein, 17 aa, Homo sapiens
  CDR3 for alpha chain variable domain of TCR clone 119263 (TRAV12-2, TRAJ42)
CAVNILNYGGSQGNLIF

SEQ ID NO: 238526 - protein, 11 aa, Homo sapiens
  CDR3 for beta chain variable domain of TCR clone 119263 (TRBV11-2, TRBJ1-1)
CASSINTEAFF

SEQ ID NO: 238527 - protein, 19 aa, Homo sapiens
  CDR3 for alpha chain variable domain of TCR clone 119264 (TRAV2, TRAJ20)
ILQVREADAAVYRDYKLSF

SEQ ID NO: 238528 - protein, 16 aa, Homo sapiens
  CDR3 for beta chain variable domain of TCR clone 119264 (TRBV19, TRBJ2-1)
CASSKAGPSSYNEQFF

SEQ ID NO: 238529 - protein, 14 aa, Homo sapiens
  CDR3 for alpha chain variable domain of TCR clone 119265 (TRAV1-1, TRAJ27)
CAVIYNTNAGKSTF

SEQ ID NO: 238530 - protein, 13 aa, Homo sapiens
  CDR3 for beta chain variable domain of TCR clone 119265 (TRBV12-4, TRBJ1-2)
CASSLRQGKGYTF

SEQ ID NO: 238531 - protein, 15 aa, Homo sapiens
  CDR3 for alpha chain variable domain of TCR clone 119266 (TRAV26-1, TRAJ29)
VIVRVEGSGNTPLVF

SEQ ID NO: 238532 - protein, 15 aa, Homo sapiens
  CDR3 for beta chain variable domain of TCR clone 119266 (TRBV7-9, TRBJ1-5)
CASSQGHQPNQPQHF

SEQ ID NO: 238533 - protein, 19 aa, Homo sapiens
  CDR3 for alpha chain variable domain of TCR clone 119267 (TRAV1-2, TRAJ32)
CLLPLCCELYGGATNKLIF

SEQ ID NO: 238534 - protein, 12 aa, Homo sapiens
  CDR3 for beta chain variable domain of TCR clone 119267 (TRBV11-2, TRBJ2-2)
CASSLGGGELFF

SEQ ID NO: 238535 - protein, 15 aa, Homo sapiens
  CDR3 for alpha chain variable domain of TCR clone 119268 (TRAV3, TRAJ22)
CAVRDRGGSARQLTV

SEQ ID NO: 238536 - protein, 16 aa, Homo sapiens
  CDR3 for beta chain variable domain of TCR clone 119268 (TRBV5-4, TRBJ2-3)
CASQQPGAGGSDTQYF

SEQ ID NO: 238537 - protein, 15 aa, Homo sapiens
  CDR3 for alpha chain variable domain of TCR clone 119269 (TRAV12-3, TRAJ6)
CAMSATSGGSYIPTY

SEQ ID NO: 238538 - protein, 11 aa, Homo sapiens
  CDR3 for beta chain variable domain of TCR clone 119269 (TRBV20-1, TRBJ1-5)
CSAQGDQPQHF

SEQ ID NO: 238539 - protein, 14 aa, Homo sapiens
  CDR3 for alpha chain variable domain of TCR clone 119270 (TRAV1-2, TRAJ16)
CAVSRFSDGQKLLF

SEQ ID NO: 238540 - protein, 14 aa, Homo sapiens
  CDR3 for beta chain variable domain of TCR clone 119270 (TRBV19, TRBJ2-2)
CASSTLHRSGELFF

SEQ ID NO: 238541 - protein, 13 aa, Homo sapiens
  CDR3 for alpha chain variable domain of TCR clone 119271 (TRAV12-1, TRAJ26)
CVVRRNYGQNFFF

SEQ ID NO: 238542 - protein, 14 aa, Homo sapiens
  CDR3 for beta chain variable domain of TCR clone 119271 (TRBV6-3, TRBJ1-1)
CASRYTGESTEAFF

SEQ ID NO: 238543 - protein, 14 aa, Homo sapiens
  CDR3 for alpha chain variable domain of TCR clone 119272 (TRAV29/DV5, TRAJ32)
CAAAYGVATNKIIF

SEQ ID NO: 238544 - protein, 15 aa, Homo sapiens
  CDR3 for beta chain variable domain of TCR clone 119272 (TRBV27, TRBJ2-7)
CASSTAGTGSYEQYF

SEQ ID NO: 238545 - protein, 15 aa, Homo sapiens
  CDR3 for alpha chain variable domain of TCR clone 119273 (TRAV21, TRAJ24)
CAARSSTDSWGKLQF

SEQ ID NO: 238546 - protein, 15 aa, Homo sapiens
  CDR3 for beta chain variable domain of TCR clone 119273 (TRBV20-1, TRBJ1-1)
CSASRGVTGSTEAFF

SEQ ID NO: 238547 - protein, 17 aa, Homo sapiens
  CDR3 for alpha chain variable domain of TCR clone 119274 (TRAV26-1, TRAJ28)
CIVRVPDSGAVSYQLTF

SEQ ID NO: 238548 - protein, 17 aa, Homo sapiens
  CDR3 for beta chain variable domain of TCR clone 119274 (TRBV28, TRBJ2-7)
CASSPLPAGGKSYEQYF

SEQ ID NO: 238549 - protein, 16 aa, Homo sapiens
  CDR3 for alpha chain variable domain of TCR clone 119275 (TRAV3, TRAJ37)
CAVRGKGSGNTGKLIF

SEQ ID NO: 238550 - protein, 16 aa, Homo sapiens
  CDR3 for beta chain variable domain of TCR clone 119275 (TRBV12-4, TRBJ1-5)
CASSRPVGGSNQPPHF

SEQ ID NO: 238551 - protein, 14 aa, Homo sapiens
  CDR3 for alpha chain variable domain of TCR clone 119276 (TRAV1-2, TRAJ33)
CAVRAPDSNYQLIW

SEQ ID NO: 238552 - protein, 14 aa, Homo sapiens
  CDR3 for beta chain variable domain of TCR clone 119276 (TRBV11-3, TRBJ1-6)
CASSFSGGDSPLHV

SEQ ID NO: 238553 - protein, 14 aa, Homo sapiens
  CDR3 for alpha chain variable domain of TCR clone 119277 (TRAV3, TRAJ6)
CAVRDVGGSYIPTF

SEQ ID NO: 238554 - protein, 11 aa, Homo sapiens
  CDR3 for beta chain variable domain of TCR clone 119277 (TRBV6-1, TRBJ2-1)
CASSPGPEQFF

SEQ ID NO: 238555 - protein, 16 aa, Homo sapiens
  CDR3 for alpha chain variable domain of TCR clone 119278 (TRAV26-1, TRAJ31)
CIVRPPVLNNNARLMF

SEQ ID NO: 238556 - protein, 13 aa, Homo sapiens
  CDR3 for beta chain variable domain of TCR clone 119278 (TRBV20-1, TRBJ1-1)
CSARGGGNTEAFF

SEQ ID NO: 238557 - protein, 14 aa, Homo sapiens
  CDR3 for alpha chain variable domain of TCR clone 119279 (TRAV1-2, TRAJ16)
CAVNRFSDGQKLLF

SEQ ID NO: 238558 - protein, 16 aa, Homo sapiens
  CDR3 for beta chain variable domain of TCR clone 119279 (TRBV11-2, TRBJ1-1)
CSSSLRQGGEHSKAFF

SEQ ID NO: 238559 - protein, 12 aa, Homo sapiens
  CDR3 for alpha chain variable domain of TCR clone 119280 (TRAV23/DV6, TRAJ17)
CAAKAAGNKLTF

SEQ ID NO: 238560 - protein, 14 aa, Homo sapiens
  CDR3 for beta chain variable domain of TCR clone 119280 (TRBV11-2, TRBJ2-3)
CASSRLARTDTQYF

SEQ ID NO: 238561 - protein, 13 aa, Homo sapiens
  CDR3 for alpha chain variable domain of TCR clone 119281 (TRAV21, TRAJ27)
CAARPVNAGKSTF

SEQ ID NO: 238562 - protein, 13 aa, Homo sapiens
  CDR3 for beta chain variable domain of TCR clone 119281 (TRBV18, TRBJ2-7)
CASQSGGGYEQYF

SEQ ID NO: 238563 - protein, 18 aa, Homo sapiens
  CDR3 for alpha chain variable domain of TCR clone 119282 (TRAV26-1, TRAJ52)
CIVRVAGAGGTSYGKLTF

SEQ ID NO: 238564 - protein, 13 aa, Homo sapiens
  CDR3 for beta chain variable domain of TCR clone 119282 (TRBV7-8, TRBJ1-2)
CASSAQSYYSYTF

SEQ ID NO: 238565 - protein, 11 aa, Homo sapiens
  CDR3 for alpha chain variable domain of TCR clone 119283 (TRAV22, TRAJ49)
CAVLTGNQFYF

SEQ ID NO: 238566 - protein, 11 aa, Homo sapiens
  CDR3 for beta chain variable domain of TCR clone 119283 (TRBV5-6, TRBJ2-1)
CASSVGGEQFF

SEQ ID NO: 238567 - protein, 11 aa, Homo sapiens
  CDR3 for alpha chain variable domain of TCR clone 119284 (TRAV10, TRAJ20)
CVALNDYKLSF

SEQ ID NO: 238568 - protein, 16 aa, Homo sapiens
  CDR3 for beta chain variable domain of TCR clone 119284 (TRBV2, TRBJ2-1)
CASRSPAGGKYNEQFF

SEQ ID NO: 238569 - protein, 13 aa, Homo sapiens
  CDR3 for alpha chain variable domain of TCR clone 119285 (TRAV35, TRAJ57)
CAGSQGGSEKLVF

SEQ ID NO: 238570 - protein, 15 aa, Homo sapiens
  CDR3 for beta chain variable domain of TCR clone 119285 (TRBV29-1, TRBJ2-1)
CSGRDRKSSYNEQFF

SEQ ID NO: 238571 - protein, 15 aa, Homo sapiens
  CDR3 for alpha chain variable domain of TCR clone 119286 (TRAV12-1, TRAJ9)
CVVSFGDTGGFKPIF

SEQ ID NO: 238572 - protein, 13 aa, Homo sapiens
  CDR3 for beta chain variable domain of TCR clone 119286 (TRBV2, TRBJ1-4)
CASSERAGEKLFF

SEQ ID NO: 238573 - protein, 14 aa, Homo sapiens
  CDR3 for alpha chain variable domain of TCR clone 119287 (TRAV17, TRAJ34)
CATDSLEGTDKLIF

SEQ ID NO: 238574 - protein, 13 aa, Homo sapiens
  CDR3 for beta chain variable domain of TCR clone 119287 (TRBV11-2, TRBJ2-7)
CASSGTRPYEQYV

SEQ ID NO: 238575 - protein, 10 aa, Homo sapiens
  CDR3 for alpha chain variable domain of TCR clone 119288 (TRAV1-2, TRAJ20)
CALNDYKLSI

SEQ ID NO: 238576 - protein, 16 aa, Homo sapiens
  CDR3 for beta chain variable domain of TCR clone 119288 (TRBV20-1, TRBJ1-1)
CSARALTQGMNTEAFF

SEQ ID NO: 238577 - protein, 16 aa, Homo sapiens
  CDR3 for alpha chain variable domain of TCR clone 119289 (TRAV27, TRAJ13)
CAGAKSDSGGYQKVTF

SEQ ID NO: 238578 - protein, 16 aa, Homo sapiens
  CDR3 for beta chain variable domain of TCR clone 119289 (TRBV7-3, TRBJ2-2)
CASSLKRGTLSGELFF

SEQ ID NO: 238579 - protein, 12 aa, Homo sapiens
  CDR3 for alpha chain variable domain of TCR clone 119290 (TRAV27, TRAJ28)
CAGWGWELPTHF

SEQ ID NO: 238580 - protein, 15 aa, Homo sapiens
  CDR3 for beta chain variable domain of TCR clone 119290 (TRBV28, TRBJ2-1)
CASSIIAGGRSEQFS

SEQ ID NO: 238581 - protein, 11 aa, Homo sapiens
  CDR3 for alpha chain variable domain of TCR clone 119291 (TRAV13-2, TRAJ54)
RAVQGAQKLVF

SEQ ID NO: 238582 - protein, 15 aa, Homo sapiens
  CDR3 for beta chain variable domain of TCR clone 119291 (TRBV20-1, TRBJ2-7)
CSAESGTSVAYEQYF

SEQ ID NO: 238583 - protein, 14 aa, Homo sapiens
  CDR3 for alpha chain variable domain of TCR clone 119292 (TRAV12-2, TRAJ3)
FAVSLYSSASKIIF

SEQ ID NO: 238584 - protein, 14 aa, Homo sapiens
  CDR3 for beta chain variable domain of TCR clone 119292 (TRBV27, TRBJ2-1)
CAGSIAETYNEQFF

SEQ ID NO: 238585 - protein, 10 aa, Homo sapiens
  CDR3 for alpha chain variable domain of TCR clone 119293 (TRAV1-2, TRAJ23)
CAGQGGKLIF

SEQ ID NO: 238586 - protein, 15 aa, Homo sapiens
  CDR3 for beta chain variable domain of TCR clone 119293 (TRBV7-8, TRBJ2-1)
CASSLADSLYNEQFF

SEQ ID NO: 238587 - protein, 16 aa, Homo sapiens
  CDR3 for alpha chain variable domain of TCR clone 119294 (TRAV17, TRAJ9)
CATGAWGGTGGFKTIF

SEQ ID NO: 238588 - protein, 15 aa, Homo sapiens
  CDR3 for beta chain variable domain of TCR clone 119294 (TRBV20-1, TRBJ1-2)
CSARDSRGRNYGYTF

SEQ ID NO: 238589 - protein, 12 aa, Homo sapiens
  CDR3 for alpha chain variable domain of TCR clone 119295 (TRAV2, TRAJ9)
CAVGAGGFKTIF

SEQ ID NO: 238590 - protein, 14 aa, Homo sapiens
  CDR3 for beta chain variable domain of TCR clone 119295 (TRBV7-2, TRBJ2-3)
CASSLGGGERYAVF

SEQ ID NO: 238591 - protein, 17 aa, Homo sapiens
  CDR3 for alpha chain variable domain of TCR clone 119296 (TRAV4, TRAJ18)
CLVGGRSVGSTLGRLYF

SEQ ID NO: 238592 - protein, 16 aa, Homo sapiens
  CDR3 for beta chain variable domain of TCR clone 119296 (TRBV4-2, TRBJ1-1)
CASSPSPGRAAPEAFF

SEQ ID NO: 238593 - protein, 17 aa, Homo sapiens
  CDR3 for alpha chain variable domain of TCR clone 119297 (TRAV8-6, TRAJ58)
CAVSSWVGETSGSRLTF

SEQ ID NO: 238594 - protein, 15 aa, Homo sapiens
  CDR3 for beta chain variable domain of TCR clone 119297 (TRBV7-9, TRBJ1-4)
CASSRTGGFNEKLFF

SEQ ID NO: 238595 - protein, 14 aa, Homo sapiens
  CDR3 for alpha chain variable domain of TCR clone 119298 (TRAV12-2, TRAJ23)
CAVNRMNQGGKIIF

SEQ ID NO: 238596 - protein, 13 aa, Homo sapiens
  CDR3 for beta chain variable domain of TCR clone 119298 (TRBV19, TRBJ1-2)
CASSVPGQDGYTF

SEQ ID NO: 238597 - protein, 15 aa, Homo sapiens
  CDR3 for alpha chain variable domain of TCR clone 119299 (TRAV21, TRAJ24)
CAARSSTDSWGKLQF

SEQ ID NO: 238598 - protein, 15 aa, Homo sapiens
  CDR3 for beta chain variable domain of TCR clone 119299 (TRBV6-5, TRBJ2-1)
CASSYDAGAGNEQFF

SEQ ID NO: 238599 - protein, 15 aa, Homo sapiens
  CDR3 for alpha chain variable domain of TCR clone 119300 (TRAV8-3, TRAJ6)
CAVGAEHQEEATYLH

SEQ ID NO: 238600 - protein, 14 aa, Homo sapiens
  CDR3 for beta chain variable domain of TCR clone 119300 (TRBV6-6, TRBJ2-7)
CASSDSGAGYEQYF

SEQ ID NO: 238601 - protein, 17 aa, Homo sapiens
  CDR3 for alpha chain variable domain of TCR clone 119301 (TRAV8-1, TRAJ43)
CAVTNDVRFGAGTRLTV

SEQ ID NO: 238602 - protein, 17 aa, Homo sapiens
  CDR3 for beta chain variable domain of TCR clone 119301 (TRBV5-4, TRBJ2-1)
CASSSAGGRGPYNEQFF

SEQ ID NO: 238603 - protein, 13 aa, Homo sapiens
  CDR3 for alpha chain variable domain of TCR clone 119302 (TRAV21, TRAJ27)
CAARPGNASKSTF

SEQ ID NO: 238604 - protein, 16 aa, Homo sapiens
  CDR3 for beta chain variable domain of TCR clone 119302 (TRBV20-1, TRBJ1-2)
CSASMGQGVANYGYTF

SEQ ID NO: 238605 - protein, 16 aa, Homo sapiens
  CDR3 for alpha chain variable domain of TCR clone 119303 (TRAV30, TRAJ24)
CGTEIVDADSWGKFQF

SEQ ID NO: 238606 - protein, 14 aa, Homo sapiens
  CDR3 for beta chain variable domain of TCR clone 119303 (TRBV7-8, TRBJ2-7)
CASSLQGIRYEQYF

SEQ ID NO: 238607 - protein, 14 aa, Homo sapiens
  CDR3 for alpha chain variable domain of TCR clone 119304 (TRAV8-3, TRAJ47)
CAVGAQGYGNKLVF

SEQ ID NO: 238608 - protein, 14 aa, Homo sapiens
  CDR3 for beta chain variable domain of TCR clone 119304 (TRBV4-1, TRBJ2-5)
CASSQVTGLETQYF

SEQ ID NO: 238609 - protein, 13 aa, Homo sapiens
  CDR3 for alpha chain variable domain of TCR clone 119305 (TRAV13-1, TRAJ40)
CVAISPGTYKYIF

SEQ ID NO: 238610 - protein, 12 aa, Homo sapiens
  CDR3 for beta chain variable domain of TCR clone 119305 (TRBV3-1, TRBJ2-1)
CASGGLGNEQFF

SEQ ID NO: 238611 - protein, 15 aa, Homo sapiens
  CDR3 for alpha chain variable domain of TCR clone 119306 (TRAV17, TRAJ53)
CATDDSGGSNYKLTF

SEQ ID NO: 238612 - protein, 12 aa, Homo sapiens
  CDR3 for beta chain variable domain of TCR clone 119306 (TRBV5-1, TRBJ2-7)
CASSFRGYEQYF

SEQ ID NO: 238613 - protein, 14 aa, Homo sapiens
  CDR3 for alpha chain variable domain of TCR clone 119307 (TRAV1-2, TRAJ15)
CAVRDRHAGTALIF

SEQ ID NO: 238614 - protein, 17 aa, Homo sapiens
  CDR3 for beta chain variable domain of TCR clone 119307 (TRBV5-5, TRBJ1-2)
CASSLGSLDGQSEGYTF

SEQ ID NO: 238615 - protein, 14 aa, Homo sapiens
  CDR3 for alpha chain variable domain of TCR clone 119308 (TRAV1-2, TRAJ16)
CAVNRFSDGQKLLF

SEQ ID NO: 238616 - protein, 15 aa, Homo sapiens
  CDR3 for beta chain variable domain of TCR clone 119308 (TRBV4-2, TRBJ2-1)
CASSQEGSGGNEQFF

SEQ ID NO: 238617 - protein, 13 aa, Homo sapiens
  CDR3 for alpha chain variable domain of TCR clone 119309 (TRAV1-1, TRAJ9)
CAAKNTGGFKTIF

SEQ ID NO: 238618 - protein, 15 aa, Homo sapiens
  CDR3 for beta chain variable domain of TCR clone 119309 (TRBV5-1, TRBJ2-1)
CASTGSGRTYNGQFF

SEQ ID NO: 238619 - protein, 17 aa, Homo sapiens
  CDR3 for alpha chain variable domain of TCR clone 119310 (TRAV3, TRAJ6)
CAVRDGPRAGGSYIPTF

SEQ ID NO: 238620 - protein, 16 aa, Homo sapiens
  CDR3 for beta chain variable domain of TCR clone 119310 (TRBV7-2, TRBJ2-7)
CASSPKTSSTSSTSGR

SEQ ID NO: 238621 - protein, 15 aa, Homo sapiens
  CDR3 for alpha chain variable domain of TCR clone 119311 (TRAV25, TRAJ52)
CAGRPGGTSYGKLTF

SEQ ID NO: 238622 - protein, 17 aa, Homo sapiens
  CDR3 for beta chain variable domain of TCR clone 119311 (TRBV7-8, TRBJ2-6)
CASSAGTGGAEANVLTF

SEQ ID NO: 238623 - protein, 15 aa, Homo sapiens
  CDR3 for alpha chain variable domain of TCR clone 119312 (TRAV3, TRAJ22)
CAVRDRGGSARQLTF

SEQ ID NO: 238624 - protein, 13 aa, Homo sapiens
  CDR3 for beta chain variable domain of TCR clone 119312 (TRBV19, TRBJ1-5)
CASSIGGEQPQHF

SEQ ID NO: 238625 - protein, 14 aa, Homo sapiens
  CDR3 for alpha chain variable domain of TCR clone 119313 (TRAV12-2, TRAJ13)
CAVKKTGGYQKVTF

SEQ ID NO: 238626 - protein, 14 aa, Homo sapiens
  CDR3 for beta chain variable domain of TCR clone 119313 (TRBV7-8, TRBJ2-3)
CASSFKSSTDTQYF

SEQ ID NO: 238627 - protein, 13 aa, Homo sapiens
  CDR3 for alpha chain variable domain of TCR clone 119314 (TRAV35, TRAJ36)
CAGPRIGASNLFF

SEQ ID NO: 238628 - protein, 15 aa, Homo sapiens
  CDR3 for beta chain variable domain of TCR clone 119314 (TRBV20-1, TRBJ2-7)
CSARDRVSGMDEQYF

SEQ ID NO: 238629 - protein, 11 aa, Homo sapiens
  CDR3 for alpha chain variable domain of TCR clone 119315 (TRAV21, TRAJ11)
CAVNGYSTLTF

SEQ ID NO: 238630 - protein, 15 aa, Homo sapiens
  CDR3 for beta chain variable domain of TCR clone 119315 (TRBV7-3, TRBJ2-1)
CASSLGQGPFGEQFF

SEQ ID NO: 238631 - protein, 15 aa, Homo sapiens
  CDR3 for alpha chain variable domain of TCR clone 119316 (TRAV17, TRAJ13)
CATDAGSGGYQKVTF

SEQ ID NO: 238632 - protein, 17 aa, Homo sapiens
  CDR3 for beta chain variable domain of TCR clone 119316 (TRBV11-2, TRBJ2-1)
CASSLYPPRVEYNEQFF

SEQ ID NO: 238633 - protein, 11 aa, Homo sapiens
  CDR3 for alpha chain variable domain of TCR clone 119317 (TRAV12-1, TRAJ30)
CVVNGQDKIIF

SEQ ID NO: 238634 - protein, 13 aa, Homo sapiens
  CDR3 for beta chain variable domain of TCR clone 119317 (TRBV20-1, TRBJ1-1)
CSARGGGNTEAFF

SEQ ID NO: 238635 - protein, 12 aa, Homo sapiens
  CDR3 for alpha chain variable domain of TCR clone 119318 (TRAV30, TRAJ43)
CGTEERGNDMRF

SEQ ID NO: 238636 - protein, 13 aa, Homo sapiens
  CDR3 for beta chain variable domain of TCR clone 119318 (TRBV7-9, TRBJ2-3)
CASSPGATDTQYF

SEQ ID NO: 238637 - protein, 12 aa, Homo sapiens
  CDR3 for alpha chain variable domain of TCR clone 119319 (TRAV8-3, TRAJ27)
CAVGAEAGKSTF

SEQ ID NO: 238638 - protein, 14 aa, Homo sapiens
  CDR3 for beta chain variable domain of TCR clone 119319 (TRBV2, TRBJ2-1)
CASRLRVGHDEQFF

SEQ ID NO: 238639 - protein, 14 aa, Homo sapiens
  CDR3 for alpha chain variable domain of TCR clone 119320 (TRAV13-1, TRAJ35)
CAASKGGFGNVLHC

SEQ ID NO: 238640 - protein, 14 aa, Homo sapiens
  CDR3 for beta chain variable domain of TCR clone 119320 (TRBV7-8, TRBJ2-3)
CASSLEAGTDTQYF

SEQ ID NO: 238641 - protein, 16 aa, Homo sapiens
  CDR3 for alpha chain variable domain of TCR clone 119321 (TRAV36/DV7, TRAJ33)
WRPGNKAQDSNYQLIW

SEQ ID NO: 238642 - protein, 15 aa, Homo sapiens
  CDR3 for beta chain variable domain of TCR clone 119321 (TRBV29-1, TRBJ2-1)
CSVGRHALFYNEQFF

SEQ ID NO: 238643 - protein, 14 aa, Homo sapiens
  CDR3 for alpha chain variable domain of TCR clone 119322 (TRAV17, TRAJ56)
CATVPAGANSKLTF

SEQ ID NO: 238644 - protein, 13 aa, Homo sapiens
  CDR3 for beta chain variable domain of TCR clone 119322 (TRBV12-4, TRBJ2-2)
CASSITGSGELFS

SEQ ID NO: 238645 - protein, 13 aa, Homo sapiens
  CDR3 for alpha chain variable domain of TCR clone 119323 (TRAV23/DV6, TRAJ12)
CAPRVDSSYKLIF

SEQ ID NO: 238646 - protein, 12 aa, Homo sapiens
  CDR3 for beta chain variable domain of TCR clone 119323 (TRBV7-8, TRBJ2-7)
CAGSLGDREQYF

SEQ ID NO: 238647 - protein, 14 aa, Homo sapiens
  CDR3 for alpha chain variable domain of TCR clone 119324 (TRAV1-2, TRAJ16)
CAVNRFSDGQKLLF

SEQ ID NO: 238648 - protein, 16 aa, Homo sapiens
  CDR3 for beta chain variable domain of TCR clone 119324 (TRBV11-2, TRBJ1-2)
RASSLDTGGADYGYTF

SEQ ID NO: 238649 - protein, 15 aa, Homo sapiens
  CDR3 for alpha chain variable domain of TCR clone 119325 (TRAV14/DV4, TRAJ22)
CNERGPPGSARQLTF

SEQ ID NO: 238650 - protein, 16 aa, Homo sapiens
  CDR3 for beta chain variable domain of TCR clone 119325 (TRBV19, TRBJ1-6)
CASSVAPVAGNSHLHF

SEQ ID NO: 238651 - protein, 16 aa, Homo sapiens
  CDR3 for alpha chain variable domain of TCR clone 119326 (TRAV30, TRAJ24)
CGTEIVDADSWGKFHF

SEQ ID NO: 238652 - protein, 15 aa, Homo sapiens
  CDR3 for beta chain variable domain of TCR clone 119326 (TRBV9, TRBJ1-6)
CASSVAGTGDSPLHF

SEQ ID NO: 238653 - protein, 15 aa, Homo sapiens
  CDR3 for alpha chain variable domain of TCR clone 119327 (TRAV2, TRAJ15)
CAVEDRGQAGTALIF

SEQ ID NO: 238654 - protein, 15 aa, Homo sapiens
  CDR3 for beta chain variable domain of TCR clone 119327 (TRBV7-3, TRBJ2-1)
CASSPTGGGEVEQFF

SEQ ID NO: 238655 - protein, 23 aa, Homo sapiens
  CDR3 for alpha chain variable domain of TCR clone 119328 (TRAV8-3, TRAJ38)
CAVGASNAGNNHIQNPDPALYQL

SEQ ID NO: 238656 - protein, 15 aa, Homo sapiens
  CDR3 for beta chain variable domain of TCR clone 119328 (TRBV11-3, TRBJ1-3)
CASSLFGPSGNTIYF

SEQ ID NO: 238657 - protein, 21 aa, Homo sapiens
  CDR3 for alpha chain variable domain of TCR clone 119329 (TRAV12-1, TRAJ37)
CVVNGGLWQDRQTNLWARDNF

SEQ ID NO: 238658 - protein, 12 aa, Homo sapiens
  CDR3 for beta chain variable domain of TCR clone 119329 (TRBV20-1, TRBJ1-2)
CSAPGFNYGYTF

SEQ ID NO: 238659 - protein, 14 aa, Homo sapiens
  CDR3 for alpha chain variable domain of TCR clone 119330 (TRAV2, TRAJ22)
CAVEVKRAARQLTF

SEQ ID NO: 238660 - protein, 14 aa, Homo sapiens
  CDR3 for beta chain variable domain of TCR clone 119330 (TRBV19, TRBJ2-2)
CASTPGHSGGELFF

SEQ ID NO: 238661 - protein, 14 aa, Homo sapiens
  CDR3 for alpha chain variable domain of TCR clone 119331 (TRAV12-2, TRAJ53)
CRERGGGSNYKLTF

SEQ ID NO: 238662 - protein, 16 aa, Homo sapiens
  CDR3 for beta chain variable domain of TCR clone 119331 (TRBV7-3, TRBJ2-3)
CQQLNEKDAGADTQYF

SEQ ID NO: 238663 - protein, 12 aa, Homo sapiens
  CDR3 for alpha chain variable domain of TCR clone 119332 (TRAV3, TRAJ43)
CAVRDPNNDVRF

SEQ ID NO: 238664 - protein, 17 aa, Homo sapiens
  CDR3 for beta chain variable domain of TCR clone 119332 (TRBV7-8, TRBJ2-6)
CASSAGTGGAGANVLTF

SEQ ID NO: 238665 - protein, 13 aa, Homo sapiens
  CDR3 for alpha chain variable domain of TCR clone 119333 (TRAV36/DV7, TRAJ7)
CAVERYGNNRLAF

SEQ ID NO: 238666 - protein, 13 aa, Homo sapiens
  CDR3 for beta chain variable domain of TCR clone 119333 (TRBV12-4, TRBJ2-2)
CASSITGSGELFF

SEQ ID NO: 238667 - protein, 14 aa, Homo sapiens
  CDR3 for alpha chain variable domain of TCR clone 119334 (TRAV1-2, TRAJ8)
CAVREDTGFQTLVF

SEQ ID NO: 238668 - protein, 12 aa, Homo sapiens
  CDR3 for beta chain variable domain of TCR clone 119334 (TRBV11-2, TRBJ2-2)
CASSLPTGELFF

SEQ ID NO: 238669 - protein, 14 aa, Homo sapiens
  CDR3 for alpha chain variable domain of TCR clone 119335 (TRAV12-1, TRAJ30)
CVVNIGNRDDKSIF

SEQ ID NO: 238670 - protein, 14 aa, Homo sapiens
  CDR3 for beta chain variable domain of TCR clone 119335 (TRBV7-9, TRBJ2-5)
CASSPRPSGETQYF

SEQ ID NO: 238671 - protein, 13 aa, Homo sapiens
  CDR3 for alpha chain variable domain of TCR clone 119336 (TRAV2, TRAJ40)
CAVVPSGTYKYIF

SEQ ID NO: 238672 - protein, 16 aa, Homo sapiens
  CDR3 for beta chain variable domain of TCR clone 119336 (TRBV7-9, TRBJ1-3)
CASSLGAGSSGNTIYF

SEQ ID NO: 238673 - protein, 16 aa, Homo sapiens
  CDR3 for alpha chain variable domain of TCR clone 119337 (TRAV13-1, TRAJ48)
CAASIFGNFGNEKLTL

SEQ ID NO: 238674 - protein, 16 aa, Homo sapiens
  CDR3 for beta chain variable domain of TCR clone 119337 (TRBV18, TRBJ1-5)
CASSPYRVEGNQPQHF

SEQ ID NO: 238675 - protein, 13 aa, Homo sapiens
  CDR3 for alpha chain variable domain of TCR clone 119338 (TRAV3, TRAJ27)
CAVRPLGAGKSTF

SEQ ID NO: 238676 - protein, 13 aa, Homo sapiens
  CDR3 for beta chain variable domain of TCR clone 119338 (TRBV6-1, TRBJ1-1)
CASSRQGNTEAFF

SEQ ID NO: 238677 - protein, 12 aa, Homo sapiens
  CDR3 for alpha chain variable domain of TCR clone 119339 (TRAV36/DV7, TRAJ54)
CCVYSGSQKLVF

SEQ ID NO: 238678 - protein, 13 aa, Homo sapiens
  CDR3 for beta chain variable domain of TCR clone 119339 (TRBV7-6, TRBJ2-7)
CASSLDHTHEQYF

SEQ ID NO: 238679 - protein, 14 aa, Homo sapiens
  CDR3 for alpha chain variable domain of TCR clone 119340 (TRAV29/DV5, TRAJ44)
CAAFLVGTASKLTF

SEQ ID NO: 238680 - protein, 14 aa, Homo sapiens
  CDR3 for beta chain variable domain of TCR clone 119340 (TRBV4-2, TRBJ2-1)
CASGLDRAYNEQFF

SEQ ID NO: 238681 - protein, 14 aa, Homo sapiens
  CDR3 for alpha chain variable domain of TCR clone 119341 (TRAV26-1, TRAJ45)
CIVRVVGGADGLTF

SEQ ID NO: 238682 - protein, 14 aa, Homo sapiens
  CDR3 for beta chain variable domain of TCR clone 119341 (TRBV7-6, TRBJ2-3)
CASSLGTVTDTQYF

SEQ ID NO: 238683 - protein, 16 aa, Homo sapiens
  CDR3 for alpha chain variable domain of TCR clone 119342 (TRAV12-2, TRAJ10)
CAVNRVLTGGGNKLTF

SEQ ID NO: 238684 - protein, 12 aa, Homo sapiens
  CDR3 for beta chain variable domain of TCR clone 119342 (TRBV28, TRBJ2-7)
CASGFSSYEQYF

SEQ ID NO: 238685 - protein, 16 aa, Homo sapiens
  CDR3 for alpha chain variable domain of TCR clone 119343 (TRAV26-1, TRAJ53)
CIVRVAMGGSNYKLTF

SEQ ID NO: 238686 - protein, 12 aa, Homo sapiens
  CDR3 for beta chain variable domain of TCR clone 119343 (TRBV7-9, TRBJ1-5)
CASSPQGQPQYF

SEQ ID NO: 238687 - protein, 18 aa, Homo sapiens
  CDR3 for alpha chain variable domain of TCR clone 119344 (TRAV21, TRAJ52)
CAVRPSPAGGTSYGKLTF

SEQ ID NO: 238688 - protein, 16 aa, Homo sapiens
  CDR3 for beta chain variable domain of TCR clone 119344 (TRBV7-9, TRBJ1-2)
CASSPGGGAINYGYTF

SEQ ID NO: 238689 - protein, 13 aa, Homo sapiens
  CDR3 for alpha chain variable domain of TCR clone 119345 (TRAV13-1, TRAJ12)
CSKYMGSSYKLIF

SEQ ID NO: 238690 - protein, 15 aa, Homo sapiens
  CDR3 for beta chain variable domain of TCR clone 119345 (TRBV2, TRBJ2-3)
CASSDFEKATDTQYF

SEQ ID NO: 238691 - protein, 11 aa, Homo sapiens
  CDR3 for alpha chain variable domain of TCR clone 119346 (TRAV12-2, TRAJ29)
CAVTLRSPLFF

SEQ ID NO: 238692 - protein, 16 aa, Homo sapiens
  CDR3 for beta chain variable domain of TCR clone 119346 (TRBV19, TRBJ1-5)
CASSIDRGGPRQPQHF

SEQ ID NO: 238693 - protein, 18 aa, Homo sapiens
  CDR3 for alpha chain variable domain of TCR clone 119347 (TRAV21, TRAJ52)
CAVRPSPAGGTSYGKLTF

SEQ ID NO: 238694 - protein, 14 aa, Homo sapiens
  CDR3 for beta chain variable domain of TCR clone 119347 (TRBV4-2, TRBJ2-1)
CASGLDRAYNERFF

SEQ ID NO: 238695 - protein, 14 aa, Homo sapiens
  CDR3 for alpha chain variable domain of TCR clone 119348 (TRAV1-2, TRAJ8)
CAVREDTGFQKLVF

SEQ ID NO: 238696 - protein, 17 aa, Homo sapiens
  CDR3 for beta chain variable domain of TCR clone 119348 (TRBV13, TRBJ2-3)
CAGSLSRVAGGRNTQYF

SEQ ID NO: 238697 - protein, 15 aa, Homo sapiens
  CDR3 for alpha chain variable domain of TCR clone 119349 (TRAV12-1, TRAJ44)
CVVDEYTGTASKLTF

SEQ ID NO: 238698 - protein, 14 aa, Homo sapiens
  CDR3 for beta chain variable domain of TCR clone 119349 (TRBV12-5, TRBJ2-5)
CASGSRTHQETQYF

SEQ ID NO: 238699 - protein, 11 aa, Homo sapiens
  CDR3 for alpha chain variable domain of TCR clone 119350 (TRAV1-1, TRAJ22)
CLGGFFKATDL

SEQ ID NO: 238700 - protein, 14 aa, Homo sapiens
  CDR3 for beta chain variable domain of TCR clone 119350 (TRBV27, TRBJ2-7)
CASSLAGLSYEQYF

SEQ ID NO: 238701 - protein, 14 aa, Homo sapiens
  CDR3 for alpha chain variable domain of TCR clone 119351 (TRAV13-1, TRAJ44)
FAAKATGTASKLTF

SEQ ID NO: 238702 - protein, 17 aa, Homo sapiens
  CDR3 for beta chain variable domain of TCR clone 119351 (TRBV7-3, TRBJ2-3)
RASSLMKRMRGADTQYF

SEQ ID NO: 238703 - protein, 12 aa, Homo sapiens
  CDR3 for alpha chain variable domain of TCR clone 119352 (TRAV2, TRAJ33)
CAVWGSNYQLIW

SEQ ID NO: 238704 - protein, 16 aa, Homo sapiens
  CDR3 for beta chain variable domain of TCR clone 119352 (TRBV2, TRBJ2-1)
CASSVGGSLSYNEQFF

SEQ ID NO: 238705 - protein, 16 aa, Homo sapiens
  CDR3 for alpha chain variable domain of TCR clone 119353 (TRAV12-3, TRAJ53)
CAMSPGSGGSNYKMTF

SEQ ID NO: 238706 - protein, 12 aa, Homo sapiens
  CDR3 for beta chain variable domain of TCR clone 119353 (TRBV7-8, TRBJ2-7)
CASSLGDREQYF

SEQ ID NO: 238707 - protein, 14 aa, Homo sapiens
  CDR3 for alpha chain variable domain of TCR clone 119354 (TRAV16, TRAJ44)
CALSTNGTASKLTF

SEQ ID NO: 238708 - protein, 14 aa, Homo sapiens
  CDR3 for beta chain variable domain of TCR clone 119354 (TRBV20-1, TRBJ2-7)
CSAISREASYEQYF

SEQ ID NO: 238709 - protein, 14 aa, Homo sapiens
  CDR3 for alpha chain variable domain of TCR clone 119355 (TRAV35, TRAJ42)
CAGRYGGSPGNLIF

SEQ ID NO: 238710 - protein, 15 aa, Homo sapiens
  CDR3 for beta chain variable domain of TCR clone 119355 (TRBV7-9, TRBJ2-1)
CASSLGWGRANEQFF

SEQ ID NO: 238711 - protein, 18 aa, Homo sapiens
  CDR3 for alpha chain variable domain of TCR clone 119356 (TRAV8-3, TRAJ4)
WVRDPTSNDPGGYNELIF

SEQ ID NO: 238712 - protein, 13 aa, Homo sapiens
  CDR3 for beta chain variable domain of TCR clone 119356 (TRBV20-1, TRBJ1-2)
CSATGIQGSGYTF

SEQ ID NO: 238713 - protein, 16 aa, Homo sapiens
  CDR3 for alpha chain variable domain of TCR clone 119357 (TRAV16, TRAJ21)
CACGWATTSTNFALDL

SEQ ID NO: 238714 - protein, 15 aa, Homo sapiens
  CDR3 for beta chain variable domain of TCR clone 119357 (TRBV19, TRBJ2-1)
CASSIQATSYNEQFF

SEQ ID NO: 238715 - protein, 16 aa, Homo sapiens
  CDR3 for alpha chain variable domain of TCR clone 119358 (TRAV3, TRAJ10)
CAVRDMRAGGGNKLTF

SEQ ID NO: 238716 - protein, 14 aa, Homo sapiens
  CDR3 for beta chain variable domain of TCR clone 119358 (TRBV2, TRBJ2-1)
CASSEARQGVSEFF

SEQ ID NO: 238717 - protein, 13 aa, Homo sapiens
  CDR3 for alpha chain variable domain of TCR clone 119359 (TRAV2, TRAJ29)
CAVYSSGNTPLVF

SEQ ID NO: 238718 - protein, 14 aa, Homo sapiens
  CDR3 for beta chain variable domain of TCR clone 119359 (TRBV7-9, TRBJ1-1)
CASSLGGLKTAAFF

SEQ ID NO: 238719 - protein, 13 aa, Homo sapiens
  CDR3 for alpha chain variable domain of TCR clone 119360 (TRAV23/DV6, TRAJ12)
CAPRVDSSYKLIF

SEQ ID NO: 238720 - protein, 12 aa, Homo sapiens
  CDR3 for beta chain variable domain of TCR clone 119360 (TRBV7-8, TRBJ2-7)
RASSLGDREQYF

SEQ ID NO: 238721 - protein, 15 aa, Homo sapiens
  CDR3 for alpha chain variable domain of TCR clone 119361 (TRAV12-1, TRAJ4)
CVVNPFSGGYNKLIV

SEQ ID NO: 238722 - protein, 16 aa, Homo sapiens
  CDR3 for beta chain variable domain of TCR clone 119361 (TRBV5-1, TRBJ1-1)
CASSKTGTEVGTEAFF

SEQ ID NO: 238723 - protein, 12 aa, Homo sapiens
  CDR3 for alpha chain variable domain of TCR clone 119362 (TRAV1-2, TRAJ29)
CAVLSGNTPLVF

SEQ ID NO: 238724 - protein, 12 aa, Homo sapiens
  CDR3 for beta chain variable domain of TCR clone 119362 (TRBV12-4, TRBJ2-7)
CASSLGGYEQYF

SEQ ID NO: 238725 - protein, 16 aa, Homo sapiens
  CDR3 for alpha chain variable domain of TCR clone 119363 (TRAV13-1, TRAJ52)
CAAKDAGGTSYGKLTF

SEQ ID NO: 238726 - protein, 14 aa, Homo sapiens
  CDR3 for beta chain variable domain of TCR clone 119363 (TRBV5-4, TRBJ1-1)
CASSLDSRRDEAFF

SEQ ID NO: 238727 - protein, 13 aa, Homo sapiens
  CDR3 for alpha chain variable domain of TCR clone 119364 (TRAV2, TRAJ15)
CAVASQAGTALIF

SEQ ID NO: 238728 - protein, 13 aa, Homo sapiens
  CDR3 for beta chain variable domain of TCR clone 119364 (TRBV28, TRBJ2-7)
CASKAGGVYVQYF

SEQ ID NO: 238729 - protein, 13 aa, Homo sapiens
  CDR3 for alpha chain variable domain of TCR clone 119365 (TRAV13-1, TRAJ39)
CAASIWAGNMLTF

SEQ ID NO: 238730 - protein, 14 aa, Homo sapiens
  CDR3 for beta chain variable domain of TCR clone 119365 (TRBV7-9, TRBJ2-7)
CASSLGGSSYEQYF

SEQ ID NO: 238731 - protein, 11 aa, Homo sapiens
  CDR3 for alpha chain variable domain of TCR clone 119366 (TRAV26-1, TRAJ37)
CIVRVGRKLIF

SEQ ID NO: 238732 - protein, 17 aa, Homo sapiens
  CDR3 for beta chain variable domain of TCR clone 119366 (TRBV4-1, TRBJ2-5)
CASSQDQTGGPQETQYF

SEQ ID NO: 238733 - protein, 13 aa, Homo sapiens
  CDR3 for alpha chain variable domain of TCR clone 119367 (TRAV2, TRAJ21)
CAVEDLNFNKFYF

SEQ ID NO: 238734 - protein, 15 aa, Homo sapiens
  CDR3 for beta chain variable domain of TCR clone 119367 (TRBV28, TRBJ2-5)
CASSPGQGSVETQYF

SEQ ID NO: 238735 - protein, 11 aa, Homo sapiens
  CDR3 for alpha chain variable domain of TCR clone 119368 (TRAV12-3, TRAJ43)
CAMSVSNDMRF

SEQ ID NO: 238736 - protein, 14 aa, Homo sapiens
  CDR3 for beta chain variable domain of TCR clone 119368 (TRBV20-1, TRBJ2-1)
CSPNDEASYNEQFF

SEQ ID NO: 238737 - protein, 14 aa, Homo sapiens
  CDR3 for alpha chain variable domain of TCR clone 119369 (TRAV12-2, TRAJ44)
CAVNPAGTASKLTF

SEQ ID NO: 238738 - protein, 15 aa, Homo sapiens
  CDR3 for beta chain variable domain of TCR clone 119369 (TRBV19, TRBJ2-7)
CASSPAGSGEALKYF

SEQ ID NO: 238739 - protein, 16 aa, Homo sapiens
  CDR3 for alpha chain variable domain of TCR clone 119370 (TRAV5, TRAJ23)
CAGDRLIFGQGTELSV

SEQ ID NO: 238740 - protein, 12 aa, Homo sapiens
  CDR3 for beta chain variable domain of TCR clone 119370 (TRBV5-4, TRBJ2-5)
CASSSTRETQYF

SEQ ID NO: 238741 - protein, 14 aa, Homo sapiens
  CDR3 for alpha chain variable domain of TCR clone 119371 (TRAV13-1, TRAJ35)
CAASKGGFGNGLHC

SEQ ID NO: 238742 - protein, 13 aa, Homo sapiens
  CDR3 for beta chain variable domain of TCR clone 119371 (TRBV7-3, TRBJ1-1)
CASSQDWGAEAVF

SEQ ID NO: 238743 - protein, 13 aa, Homo sapiens
  CDR3 for alpha chain variable domain of TCR clone 119372 (TRAV21, TRAJ57)
CAVTQSGSEKLVF

SEQ ID NO: 238744 - protein, 15 aa, Homo sapiens
  CDR3 for beta chain variable domain of TCR clone 119372 (TRBV5-1, TRBJ1-1)
CASSSTTGTNTEAFF

SEQ ID NO: 238745 - protein, 16 aa, Homo sapiens
  CDR3 for alpha chain variable domain of TCR clone 119373 (TRAV30, TRAJ24)
CGTEIVDADSWGKFQF

SEQ ID NO: 238746 - protein, 18 aa, Homo sapiens
  CDR3 for beta chain variable domain of TCR clone 119373 (TRBV11-2, TRBJ2-6)
CASSLNPFLGTGANDLTF

SEQ ID NO: 238747 - protein, 14 aa, Homo sapiens
  CDR3 for alpha chain variable domain of TCR clone 119374 (TRAV12-3, TRAJ10)
SHLPLTGGGNKLTF

SEQ ID NO: 238748 - protein, 14 aa, Homo sapiens
  CDR3 for beta chain variable domain of TCR clone 119374 (TRBV19, TRBJ1-5)
CASSIGGGGQPQHF

SEQ ID NO: 238749 - protein, 15 aa, Homo sapiens
  CDR3 for alpha chain variable domain of TCR clone 119375 (TRAV12-2, TRAJ53)
CAVNGGGGSNYKLTF

SEQ ID NO: 238750 - protein, 14 aa, Homo sapiens
  CDR3 for beta chain variable domain of TCR clone 119375 (TRBV4-1, TRBJ2-7)
CASSPVAGGDEQYF

SEQ ID NO: 238751 - protein, 18 aa, Homo sapiens
  CDR3 for alpha chain variable domain of TCR clone 119376 (TRAV12-3, TRAJ52)
CAMSVGGAGGTSYGKLTF

SEQ ID NO: 238752 - protein, 15 aa, Homo sapiens
  CDR3 for beta chain variable domain of TCR clone 119376 (TRBV11-1, TRBJ1-6)
CASSFDRGLGSPLHF

SEQ ID NO: 238753 - protein, 16 aa, Homo sapiens
  CDR3 for alpha chain variable domain of TCR clone 119377 (TRAV16, TRAJ4)
CALSRMFSGGYNKLIF

SEQ ID NO: 238754 - protein, 15 aa, Homo sapiens
  CDR3 for beta chain variable domain of TCR clone 119377 (TRBV28, TRBJ1-4)
CASSLGTGTKEKLFF

SEQ ID NO: 238755 - protein, 11 aa, Homo sapiens
  CDR3 for alpha chain variable domain of TCR clone 119378 (TRAV17, TRAJ9)
CGFTGGFKTIF

SEQ ID NO: 238756 - protein, 13 aa, Homo sapiens
  CDR3 for beta chain variable domain of TCR clone 119378 (TRBV19, TRBJ1-1)
CASSPSNGGEAFF

SEQ ID NO: 238757 - protein, 15 aa, Homo sapiens
  CDR3 for alpha chain variable domain of TCR clone 119379 (TRAV8-3, TRAJ15)
CAVGAPNQAGTALIF

SEQ ID NO: 238758 - protein, 14 aa, Homo sapiens
  CDR3 for beta chain variable domain of TCR clone 119379 (TRBV20-1, TRBJ2-1)
CSPNDEASYNGQFF

SEQ ID NO: 238759 - protein, 12 aa, Homo sapiens
  CDR3 for alpha chain variable domain of TCR clone 119380 (TRAV24, TRAJ32)
CLYGGATNKLIF

SEQ ID NO: 238760 - protein, 17 aa, Homo sapiens
  CDR3 for beta chain variable domain of TCR clone 119380 (TRBV11-2, TRBJ2-1)
CASSLYPPGVEYNEQFL

SEQ ID NO: 238761 - protein, 17 aa, Homo sapiens
  CDR3 for alpha chain variable domain of TCR clone 119381 (TRAV27, TRAJ42)
CAERVIYYGGSQGNLIF

SEQ ID NO: 238762 - protein, 13 aa, Homo sapiens
  CDR3 for beta chain variable domain of TCR clone 119381 (TRBV10-2, TRBJ2-7)
CASGASGGYEQYF

SEQ ID NO: 238763 - protein, 13 aa, Homo sapiens
  CDR3 for alpha chain variable domain of TCR clone 119382 (TRAV12-3, TRAJ7)
CAMSASGNNRLAF

SEQ ID NO: 238764 - protein, 14 aa, Homo sapiens
  CDR3 for beta chain variable domain of TCR clone 119382 (TRBV13, TRBJ2-5)
CASSLGPRSETQYF

SEQ ID NO: 238765 - protein, 14 aa, Homo sapiens
  CDR3 for alpha chain variable domain of TCR clone 119383 (TRAV17, TRAJ22)
CATSPSGSARLLTF

SEQ ID NO: 238766 - protein, 15 aa, Homo sapiens
  CDR3 for beta chain variable domain of TCR clone 119383 (TRBV4-1, TRBJ2-5)
CASSQWDLYQETQYF

SEQ ID NO: 238767 - protein, 11 aa, Homo sapiens
  CDR3 for alpha chain variable domain of TCR clone 119384 (TRAV1-2, TRAJ20)
CAVSNDYKLSF

SEQ ID NO: 238768 - protein, 13 aa, Homo sapiens
  CDR3 for beta chain variable domain of TCR clone 119384 (TRBV29-1, TRBJ1-3)
CSVEGGSGNTMYF

SEQ ID NO: 238769 - protein, 15 aa, Homo sapiens
  CDR3 for alpha chain variable domain of TCR clone 119385 (TRAV3, TRAJ5)
CAVRDLDTGRRALTF

SEQ ID NO: 238770 - protein, 16 aa, Homo sapiens
  CDR3 for beta chain variable domain of TCR clone 119385 (TRBV7-3, TRBJ2-1)
CASSLEGYRSYNEQFF

SEQ ID NO: 238771 - protein, 13 aa, Homo sapiens
  CDR3 for alpha chain variable domain of TCR clone 119386 (TRAV3, TRAJ21)
CAVREPDFNKFYF

SEQ ID NO: 238772 - protein, 15 aa, Homo sapiens
  CDR3 for beta chain variable domain of TCR clone 119386 (TRBV7-2, TRBJ2-2)
CASRRPGQNTGELFF

SEQ ID NO: 238773 - protein, 12 aa, Homo sapiens
  CDR3 for alpha chain variable domain of TCR clone 119387 (TRAV3, TRAJ7)
CSDLLWEQQTRF

SEQ ID NO: 238774 - protein, 13 aa, Homo sapiens
  CDR3 for beta chain variable domain of TCR clone 119387 (TRBV7-3, TRBJ2-5)
CASSFRGGETQYF

SEQ ID NO: 238775 - protein, 13 aa, Homo sapiens
  CDR3 for alpha chain variable domain of TCR clone 119388 (TRAV1-1, TRAJ11)
CAVLNSGYSTLTF

SEQ ID NO: 238776 - protein, 15 aa, Homo sapiens
  CDR3 for beta chain variable domain of TCR clone 119388 (TRBV27, TRBJ2-1)
CASSNGGGSSNEQFF

SEQ ID NO: 238777 - protein, 12 aa, Homo sapiens
  CDR3 for alpha chain variable domain of TCR clone 119389 (TRAV1-1, TRAJ9)
CAVPVVGNMLTF

SEQ ID NO: 238778 - protein, 14 aa, Homo sapiens
  CDR3 for beta chain variable domain of TCR clone 119389 (TRBV9, TRBJ2-7)
CASSVGVGSYEQYF

SEQ ID NO: 238779 - protein, 17 aa, Homo sapiens
  CDR3 for alpha chain variable domain of TCR clone 119390 (TRAV3, TRAJ42)
CAVRDRAYGGSQGNLIF

SEQ ID NO: 238780 - protein, 14 aa, Homo sapiens
  CDR3 for beta chain variable domain of TCR clone 119390 (TRBV7-2, TRBJ2-5)
CASSPRGSSETQYF

SEQ ID NO: 238781 - protein, 17 aa, Homo sapiens
  CDR3 for alpha chain variable domain of TCR clone 119391 (TRAV23/DV6, TRAJ57)
CAASSTLSQVGSEKLVF

SEQ ID NO: 238782 - protein, 17 aa, Homo sapiens
  CDR3 for beta chain variable domain of TCR clone 119391 (TRBV4-2, TRBJ1-1)
CASTQFGGDSGNTEAFF

SEQ ID NO: 238783 - protein, 13 aa, Homo sapiens
  CDR3 for alpha chain variable domain of TCR clone 119392 (TRAV12-1, TRAJ26)
CVVRRNYGQNFVF

SEQ ID NO: 238784 - protein, 11 aa, Homo sapiens
  CDR3 for beta chain variable domain of TCR clone 119392 (TRBV19, TRBJ1-2)
CASSISSGYTF

SEQ ID NO: 238785 - protein, 15 aa, Homo sapiens
  CDR3 for alpha chain variable domain of TCR clone 119393 (TRAV8-3, TRAJ40)
CAAPSLGSGTYKHIF

SEQ ID NO: 238786 - protein, 16 aa, Homo sapiens
  CDR3 for beta chain variable domain of TCR clone 119393 (TRBV7-3, TRBJ2-3)
CASSLSGYRPEDTQYF

SEQ ID NO: 238787 - protein, 14 aa, Homo sapiens
  CDR3 for alpha chain variable domain of TCR clone 119394 (TRAV8-2, TRAJ4)
CVVSPSGGYNKLIF

SEQ ID NO: 238788 - protein, 15 aa, Homo sapiens
  CDR3 for beta chain variable domain of TCR clone 119394 (TRBV4-1, TRBJ1-4)
CASSDTGGTNKKLFF

SEQ ID NO: 238789 - protein, 12 aa, Homo sapiens
  CDR3 for alpha chain variable domain of TCR clone 119395 (TRAV13-2, TRAJ23)
CAERHRGGKLIF

SEQ ID NO: 238790 - protein, 11 aa, Homo sapiens
  CDR3 for beta chain variable domain of TCR clone 119395 (TRBV19, TRBJ1-1)
CASSIGSEAFF

SEQ ID NO: 238791 - protein, 14 aa, Homo sapiens
  CDR3 for alpha chain variable domain of TCR clone 119396 (TRAV12-3, TRAJ10)
SHLPLTGGGNKLTF

SEQ ID NO: 238792 - protein, 16 aa, Homo sapiens
  CDR3 for beta chain variable domain of TCR clone 119396 (TRBV7-3, TRBJ2-1)
CASSSIRRAPTMSSSS

SEQ ID NO: 238793 - protein, 12 aa, Homo sapiens
  CDR3 for alpha chain variable domain of TCR clone 119397 (TRAV1-1, TRAJ8)
CAGGTGFQKLVF

SEQ ID NO: 238794 - protein, 15 aa, Homo sapiens
  CDR3 for beta chain variable domain of TCR clone 119397 (TRBV7-9, TRBJ1-4)
GASSRTGGFNEKLFF

SEQ ID NO: 238795 - protein, 11 aa, Homo sapiens
  CDR3 for alpha chain variable domain of TCR clone 119398 (TRAV35, TRAJ34)
CWARNTDKLIF

SEQ ID NO: 238796 - protein, 14 aa, Homo sapiens
  CDR3 for beta chain variable domain of TCR clone 119398 (TRBV5-1, TRBJ2-7)
CASSRGDSLYEQYF

SEQ ID NO: 238797 - protein, 20 aa, Homo sapiens
  CDR3 for alpha chain variable domain of TCR clone 119399 (TRAV12-1, TRAJ42)
SSVIQPPTSVKGGSQGNLIF

SEQ ID NO: 238798 - protein, 15 aa, Homo sapiens
  CDR3 for beta chain variable domain of TCR clone 119399 (TRBV4-1, TRBJ2-7)
CASGQNTGRLYEQYF

SEQ ID NO: 238799 - protein, 15 aa, Homo sapiens
  CDR3 for alpha chain variable domain of TCR clone 119400 (TRAV3, TRAJ5)
CAVRDLDTGRRALTC

SEQ ID NO: 238800 - protein, 14 aa, Homo sapiens
  CDR3 for beta chain variable domain of TCR clone 119400 (TRBV25-1, TRBJ1-1)
CASTHLGGNTEAFF

SEQ ID NO: 238801 - protein, 11 aa, Homo sapiens
  CDR3 for alpha chain variable domain of TCR clone 119401 (TRAV21, TRAJ39)
LLVNAGNMLTF

SEQ ID NO: 238802 - protein, 14 aa, Homo sapiens
  CDR3 for beta chain variable domain of TCR clone 119401 (TRBV7-2, TRBJ2-7)
CASSPKTSFYEQYF

SEQ ID NO: 238803 - protein, 17 aa, Homo sapiens
  CDR3 for alpha chain variable domain of TCR clone 119402 (TRAV13-2, TRAJ42)
CAEKGKNYGGGQGNLIF

SEQ ID NO: 238804 - protein, 16 aa, Homo sapiens
  CDR3 for beta chain variable domain of TCR clone 119402 (TRBV7-9, TRBJ2-1)
CASSLGTGWDYNEQFF

SEQ ID NO: 238805 - protein, 16 aa, Homo sapiens
  CDR3 for alpha chain variable domain of TCR clone 119403 (TRAV12-3, TRAJ53)
CAMSPGSGGSNYKLTF

SEQ ID NO: 238806 - protein, 13 aa, Homo sapiens
  CDR3 for beta chain variable domain of TCR clone 119403 (TRBV4-1, TRBJ2-5)
CASSQEVQETQYF

SEQ ID NO: 238807 - protein, 14 aa, Homo sapiens
  CDR3 for alpha chain variable domain of TCR clone 119404 (TRAV9-2, TRAJ39)
CALYIYNAGNMLTF

SEQ ID NO: 238808 - protein, 14 aa, Homo sapiens
  CDR3 for beta chain variable domain of TCR clone 119404 (TRBV19, TRBJ2-2)
CATTGHANTGELFF

SEQ ID NO: 238809 - protein, 13 aa, Homo sapiens
  CDR3 for alpha chain variable domain of TCR clone 119405 (TRAV13-2, TRAJ49)
CAEAPQTGNQFYF

SEQ ID NO: 238810 - protein, 15 aa, Homo sapiens
  CDR3 for beta chain variable domain of TCR clone 119405 (TRBV28, TRBJ1-3)
CASSMGWASGNTIYF

SEQ ID NO: 238811 - protein, 13 aa, Homo sapiens
  CDR3 for alpha chain variable domain of TCR clone 119406 (TRAV1-2, TRAJ9)
CAALNTGGFKTIF

SEQ ID NO: 238812 - protein, 13 aa, Homo sapiens
  CDR3 for beta chain variable domain of TCR clone 119406 (TRBV19, TRBJ1-2)
CASSFPGQDGYTF

SEQ ID NO: 238813 - protein, 16 aa, Homo sapiens
  CDR3 for alpha chain variable domain of TCR clone 119407 (TRAV26-1, TRAJ53)
CIVRVAMGGSNYKLTF

SEQ ID NO: 238814 - protein, 13 aa, Homo sapiens
  CDR3 for beta chain variable domain of TCR clone 119407 (TRBV7-9, TRBJ2-7)
CASSFAGAYEQYF

SEQ ID NO: 238815 - protein, 13 aa, Homo sapiens
  CDR3 for alpha chain variable domain of TCR clone 119408 (TRAV29/DV5, TRAJ29)
CAASAAGNTPLVF

SEQ ID NO: 238816 - protein, 16 aa, Homo sapiens
  CDR3 for beta chain variable domain of TCR clone 119408 (TRBV7-2, TRBJ2-5)
CASSSKWLSGQETQYF

SEQ ID NO: 238817 - protein, 13 aa, Homo sapiens
  CDR3 for alpha chain variable domain of TCR clone 119409 (TRAV12-1, TRAJ7)
CVVNMRGNDRLAF

SEQ ID NO: 238818 - protein, 15 aa, Homo sapiens
  CDR3 for beta chain variable domain of TCR clone 119409 (TRBV27, TRBJ2-3)
CASSLGLAATDTQYF

SEQ ID NO: 238819 - protein, 12 aa, Homo sapiens
  CDR3 for alpha chain variable domain of TCR clone 119410 (TRAV21, TRAJ11)
CAATSGYSTLTF

SEQ ID NO: 238820 - protein, 14 aa, Homo sapiens
  CDR3 for beta chain variable domain of TCR clone 119410 (TRBV20-1, TRBJ2-7)
CSAPELAGVGEQYY

SEQ ID NO: 238821 - protein, 12 aa, Homo sapiens
  CDR3 for alpha chain variable domain of TCR clone 119411 (TRAV3, TRAJ39)
CAVIEWSSMLTF

SEQ ID NO: 238822 - protein, 14 aa, Homo sapiens
  CDR3 for beta chain variable domain of TCR clone 119411 (TRBV7-8, TRBJ2-3)
CASSFPDGQDTQYF

SEQ ID NO: 238823 - protein, 14 aa, Homo sapiens
  CDR3 for alpha chain variable domain of TCR clone 119412 (TRAV12-3, TRAJ10)
SHLPLTGGGDKLTF

SEQ ID NO: 238824 - protein, 13 aa, Homo sapiens
  CDR3 for beta chain variable domain of TCR clone 119412 (TRBV7-6, TRBJ2-3)
CASSLAVGDTQYF

SEQ ID NO: 238825 - protein, 14 aa, Homo sapiens
  CDR3 for alpha chain variable domain of TCR clone 119413 (TRAV12-2, TRAJ5)
CAVNRSTGRRALTC

SEQ ID NO: 238826 - protein, 12 aa, Homo sapiens
  CDR3 for beta chain variable domain of TCR clone 119413 (TRBV19, TRBJ1-5)
CASSIAQQPQHF

SEQ ID NO: 238827 - protein, 14 aa, Homo sapiens
  CDR3 for alpha chain variable domain of TCR clone 119414 (TRAV34, TRAJ44)
CGADGTGTASKLTF

SEQ ID NO: 238828 - protein, 13 aa, Homo sapiens
  CDR3 for beta chain variable domain of TCR clone 119414 (TRBV7-3, TRBJ1-1)
CASSQDWGAEAFF

SEQ ID NO: 238829 - protein, 14 aa, Homo sapiens
  CDR3 for alpha chain variable domain of TCR clone 119415 (TRAV16, TRAJ44)
CALSTTGTASKLTF

SEQ ID NO: 238830 - protein, 14 aa, Homo sapiens
  CDR3 for beta chain variable domain of TCR clone 119415 (TRBV20-1, TRBJ2-7)
CSAISREASCEQYF

SEQ ID NO: 238831 - protein, 13 aa, Homo sapiens
  CDR3 for alpha chain variable domain of TCR clone 119416 (TRAV27, TRAJ45)
CRSSGGGADGLTF

SEQ ID NO: 238832 - protein, 18 aa, Homo sapiens
  CDR3 for beta chain variable domain of TCR clone 119416 (TRBV11-2, TRBJ2-6)
CASSLNPFLGTGANVLTF

SEQ ID NO: 238833 - protein, 16 aa, Homo sapiens
  CDR3 for alpha chain variable domain of TCR clone 119417 (TRAV20, TRAJ38)
CAVQASNAGNNRKPLW

SEQ ID NO: 238834 - protein, 16 aa, Homo sapiens
  CDR3 for beta chain variable domain of TCR clone 119417 (TRBV7-8, TRBJ2-6)
CASRVGDSSGANVLTF

SEQ ID NO: 238835 - protein, 13 aa, Homo sapiens
  CDR3 for alpha chain variable domain of TCR clone 119418 (TRAV17, TRAJ9)
CATDYTGGFKTIF

SEQ ID NO: 238836 - protein, 14 aa, Homo sapiens
  CDR3 for beta chain variable domain of TCR clone 119418 (TRBV25-1, TRBJ1-1)
CASTHLGGNTEAFF

SEQ ID NO: 238837 - protein, 12 aa, Homo sapiens
  CDR3 for alpha chain variable domain of TCR clone 119419 (TRAV29/DV5, TRAJ49)
CAATDTGNQFYF

SEQ ID NO: 238838 - protein, 12 aa, Homo sapiens
  CDR3 for beta chain variable domain of TCR clone 119419 (TRBV5-5, TRBJ2-5)
CASSYFGETQYF

SEQ ID NO: 238839 - protein, 15 aa, Homo sapiens
  CDR3 for alpha chain variable domain of TCR clone 119420 (TRAV8-3, TRAJ27)
CAVGPSKTNAGKSTF

SEQ ID NO: 238840 - protein, 15 aa, Homo sapiens
  CDR3 for beta chain variable domain of TCR clone 119420 (TRBV7-2, TRBJ2-1)
CASSSGLAGVNEQFF

SEQ ID NO: 238841 - protein, 13 aa, Homo sapiens
  CDR3 for alpha chain variable domain of TCR clone 119421 (TRAV35, TRAJ42)
CAGFPGSQGNLIF

SEQ ID NO: 238842 - protein, 15 aa, Homo sapiens
  CDR3 for beta chain variable domain of TCR clone 119421 (TRBV2, TRBJ2-1)
CASSELAGSYNEQFF

SEQ ID NO: 238843 - protein, 12 aa, Homo sapiens
  CDR3 for alpha chain variable domain of TCR clone 119422 (TRAV27, TRAJ34)
CAGAKSTDKLIF

SEQ ID NO: 238844 - protein, 13 aa, Homo sapiens
  CDR3 for beta chain variable domain of TCR clone 119422 (TRBV4-1, TRBJ2-1)
CASSQEVQYEQFF

SEQ ID NO: 238845 - protein, 14 aa, Homo sapiens
  CDR3 for alpha chain variable domain of TCR clone 119423 (TRAV21, TRAJ28)
CAVGSGAGSYQLTF

SEQ ID NO: 238846 - protein, 14 aa, Homo sapiens
  CDR3 for beta chain variable domain of TCR clone 119423 (TRBV18, TRBJ1-4)
CASSPGPNGENLFF

SEQ ID NO: 238847 - protein, 16 aa, Homo sapiens
  CDR3 for alpha chain variable domain of TCR clone 119424 (TRAV13-1, TRAJ53)
SVQQAASGGSNYKLTF

SEQ ID NO: 238848 - protein, 15 aa, Homo sapiens
  CDR3 for beta chain variable domain of TCR clone 119424 (TRBV5-1, TRBJ2-1)
CASSPPRAPYNEQFF

SEQ ID NO: 238849 - protein, 14 aa, Homo sapiens
  CDR3 for alpha chain variable domain of TCR clone 119425 (TRAV12-1, TRAJ12)
CVVTRMDSSYKLIF

SEQ ID NO: 238850 - protein, 14 aa, Homo sapiens
  CDR3 for beta chain variable domain of TCR clone 119425 (TRBV20-1, TRBJ1-1)
SAVLGGGGNTEAFF

SEQ ID NO: 238851 - protein, 13 aa, Homo sapiens
  CDR3 for alpha chain variable domain of TCR clone 119426 (TRAV3, TRAJ20)
CAVRDTPRYKLSF

SEQ ID NO: 238852 - protein, 14 aa, Homo sapiens
  CDR3 for beta chain variable domain of TCR clone 119426 (TRBV19, TRBJ2-1)
CASPTFVLSGEQFF

SEQ ID NO: 238853 - protein, 14 aa, Homo sapiens
  CDR3 for alpha chain variable domain of TCR clone 119427 (TRAV26-1, TRAJ22)
CIVRVYGSARQLTF

SEQ ID NO: 238854 - protein, 17 aa, Homo sapiens
  CDR3 for beta chain variable domain of TCR clone 119427 (TRBV7-3, TRBJ2-3)
CASSPGRLAGFGDTQYF

SEQ ID NO: 238855 - protein, 14 aa, Homo sapiens
  CDR3 for alpha chain variable domain of TCR clone 119428 (TRAV35, TRAJ33)
CAGSSQDSNYQLIW

SEQ ID NO: 238856 - protein, 15 aa, Homo sapiens
  CDR3 for beta chain variable domain of TCR clone 119428 (TRBV20-1, TRBJ2-7)
CSAESGTRGAYEQYF

SEQ ID NO: 238857 - protein, 14 aa, Homo sapiens
  CDR3 for alpha chain variable domain of TCR clone 119429 (TRAV1-2, TRAJ16)
CAVNRFSDGQKLLF

SEQ ID NO: 238858 - protein, 16 aa, Homo sapiens
  CDR3 for beta chain variable domain of TCR clone 119429 (TRBV7-2, TRBJ2-5)
CASSPFPTGGEETQYF

SEQ ID NO: 238859 - protein, 15 aa, Homo sapiens
  CDR3 for alpha chain variable domain of TCR clone 119430 (TRAV3, TRAJ27)
CAVRDPLTNAGKSTF

SEQ ID NO: 238860 - protein, 15 aa, Homo sapiens
  CDR3 for beta chain variable domain of TCR clone 119430 (TRBV28, TRBJ2-1)
CASSIIARGRSEQFF

SEQ ID NO: 238861 - protein, 13 aa, Homo sapiens
  CDR3 for alpha chain variable domain of TCR clone 119431 (TRAV21, TRAJ15)
CAVANQAGTALIF

SEQ ID NO: 238862 - protein, 14 aa, Homo sapiens
  CDR3 for beta chain variable domain of TCR clone 119431 (TRBV27, TRBJ2-2)
CASSLVAATGELFF

SEQ ID NO: 238863 - protein, 13 aa, Homo sapiens
  CDR3 for alpha chain variable domain of TCR clone 119432 (TRAV17, TRAJ9)
CATDYTGGFKTIF

SEQ ID NO: 238864 - protein, 14 aa, Homo sapiens
  CDR3 for beta chain variable domain of TCR clone 119432 (TRBV19, TRBJ2-5)
CASSMTGQQEAQYF

SEQ ID NO: 238865 - protein, 14 aa, Homo sapiens
  CDR3 for alpha chain variable domain of TCR clone 119433 (TRAV2, TRAJ9)
CAVEDRSGGFKTIF

SEQ ID NO: 238866 - protein, 13 aa, Homo sapiens
  CDR3 for beta chain variable domain of TCR clone 119433 (TRBV7-9, TRBJ1-2)
CASSVKQNYGYTF

SEQ ID NO: 238867 - protein, 15 aa, Homo sapiens
  CDR3 for alpha chain variable domain of TCR clone 119434 (TRAV8-2, TRAJ40)
CVVSDRGSGTYKYIF

SEQ ID NO: 238868 - protein, 17 aa, Homo sapiens
  CDR3 for beta chain variable domain of TCR clone 119434 (TRBV9, TRBJ2-1)
CASSVRSLSGGNNEQFC

SEQ ID NO: 238869 - protein, 13 aa, Homo sapiens
  CDR3 for alpha chain variable domain of TCR clone 119435 (TRAV21, TRAJ27)
CAARPGNAGKSTL

SEQ ID NO: 238870 - protein, 14 aa, Homo sapiens
  CDR3 for beta chain variable domain of TCR clone 119435 (TRBV7-6, TRBJ2-3)
CAGSLGTVTDTQYF

SEQ ID NO: 238871 - protein, 11 aa, Homo sapiens
  CDR3 for alpha chain variable domain of TCR clone 119436 (TRAV12-3, TRAJ22)
CAMTLARQLTF

SEQ ID NO: 238872 - protein, 11 aa, Homo sapiens
  CDR3 for beta chain variable domain of TCR clone 119436 (TRBV12-4, TRBJ2-3)
CASTATDTQYF

SEQ ID NO: 238873 - protein, 18 aa, Homo sapiens
  CDR3 for alpha chain variable domain of TCR clone 119437 (TRAV21, TRAJ52)
CAVRPSPAGGTSYGKLTF

SEQ ID NO: 238874 - protein, 15 aa, Homo sapiens
  CDR3 for beta chain variable domain of TCR clone 119437 (TRBV5-1, TRBJ1-1)
CASSSTTGTNTEAFF

SEQ ID NO: 238875 - protein, 16 aa, Homo sapiens
  CDR3 for alpha chain variable domain of TCR clone 119438 (TRAV8-3, TRAJ10)
CAVGPILTGGGSKLTF

SEQ ID NO: 238876 - protein, 16 aa, Homo sapiens
  CDR3 for beta chain variable domain of TCR clone 119438 (TRBV7-2, TRBJ2-5)
CASSSKWLSGQETQYF

SEQ ID NO: 238877 - protein, 10 aa, Homo sapiens
  CDR3 for alpha chain variable domain of TCR clone 119439 (TRAV23/DV6, TRAJ57)
CAASSTLSQG

SEQ ID NO: 238878 - protein, 14 aa, Homo sapiens
  CDR3 for beta chain variable domain of TCR clone 119439 (TRBV20-1, TRBJ1-5)
CSARGDGNFQPQHF

SEQ ID NO: 238879 - protein, 18 aa, Homo sapiens
  CDR3 for alpha chain variable domain of TCR clone 119440 (TRAV21, TRAJ52)
CAVRPSPAGGTSYGKLTF

SEQ ID NO: 238880 - protein, 15 aa, Homo sapiens
  CDR3 for beta chain variable domain of TCR clone 119440 (TRBV20-1, TRBJ2-7)
CSAGDRVSGMDEQYF

SEQ ID NO: 238881 - protein, 13 aa, Homo sapiens
  CDR3 for alpha chain variable domain of TCR clone 119441 (TRAV21, TRAJ15)
CAVRNQAGTALIF

SEQ ID NO: 238882 - protein, 12 aa, Homo sapiens
  CDR3 for beta chain variable domain of TCR clone 119441 (TRBV14, TRBJ2-7)
CASSSLKGEQYF

SEQ ID NO: 238883 - protein, 15 aa, Homo sapiens
  CDR3 for alpha chain variable domain of TCR clone 119442 (TRAV12-3, TRAJ6)
CAMSAASGGSYIPTF

SEQ ID NO: 238884 - protein, 16 aa, Homo sapiens
  CDR3 for beta chain variable domain of TCR clone 119442 (TRBV24-1, TRBJ2-3)
CATSDPGTGATDTQYF

SEQ ID NO: 238885 - protein, 12 aa, Homo sapiens
  CDR3 for alpha chain variable domain of TCR clone 119443 (TRAV26-1, TRAJ54)
CIGCWGAQKLVF

SEQ ID NO: 238886 - protein, 14 aa, Homo sapiens
  CDR3 for beta chain variable domain of TCR clone 119443 (TRBV11-2, TRBJ1-2)
CASSSGQAGDGYTF

SEQ ID NO: 238887 - protein, 10 aa, Homo sapiens
  CDR3 for alpha chain variable domain of TCR clone 119444 (TRAV38-2/DV8, TRAJ40)
CASGTYKYIF

SEQ ID NO: 238888 - protein, 14 aa, Homo sapiens
  CDR3 for beta chain variable domain of TCR clone 119444 (TRBV7-9, TRBJ2-1)
CASSPLDSLYEQFF

SEQ ID NO: 238889 - protein, 16 aa, Homo sapiens
  CDR3 for alpha chain variable domain of TCR clone 119445 (TRAV30, TRAJ24)
CGTEIVDADSWGKFQF

SEQ ID NO: 238890 - protein, 13 aa, Homo sapiens
  CDR3 for beta chain variable domain of TCR clone 119445 (TRBV4-1, TRBJ2-2)
CASSQENTGEPFF

SEQ ID NO: 238891 - protein, 14 aa, Homo sapiens
  CDR3 for alpha chain variable domain of TCR clone 119446 (TRAV38-1, TRAJ40)
CALRPTSGTYKYIF

SEQ ID NO: 238892 - protein, 13 aa, Homo sapiens
  CDR3 for beta chain variable domain of TCR clone 119446 (TRBV12-4, TRBJ2-7)
CASSFVPTAEQYF

SEQ ID NO: 238893 - protein, 13 aa, Homo sapiens
  CDR3 for alpha chain variable domain of TCR clone 119447 (TRAV35, TRAJ57)
CAGSQGGSDKLVF

SEQ ID NO: 238894 - protein, 14 aa, Homo sapiens
  CDR3 for beta chain variable domain of TCR clone 119447 (TRBV25-1, TRBJ1-1)
CASTHLGGNTEAFF

SEQ ID NO: 238895 - protein, 16 aa, Homo sapiens
  CDR3 for alpha chain variable domain of TCR clone 119448 (TRAV13-1, TRAJ10)
CAAGYILTGGGNKLNF

SEQ ID NO: 238896 - protein, 15 aa, Homo sapiens
  CDR3 for beta chain variable domain of TCR clone 119448 (TRBV12-4, TRBJ2-7)
CASSQTGAISYEQYF

SEQ ID NO: 238897 - protein, 17 aa, Homo sapiens
  CDR3 for alpha chain variable domain of TCR clone 119449 (TRAV29/DV5, TRAJ52)
CAATSTADGTSYGKLTF

SEQ ID NO: 238898 - protein, 15 aa, Homo sapiens
  CDR3 for beta chain variable domain of TCR clone 119449 (TRBV7-3, TRBJ2-1)
CASSPTGGGEVEQFF

SEQ ID NO: 238899 - protein, 16 aa, Homo sapiens
  CDR3 for alpha chain variable domain of TCR clone 119450 (TRAV30, TRAJ24)
CGTEIVDDDSWGKFQF

SEQ ID NO: 238900 - protein, 16 aa, Homo sapiens
  CDR3 for beta chain variable domain of TCR clone 119450 (TRBV6-3, TRBJ1-1)
CASTDLGTVPNTEAFF

SEQ ID NO: 238901 - protein, 15 aa, Homo sapiens
  CDR3 for alpha chain variable domain of TCR clone 119451 (TRAV3, TRAJ22)
CAVRDRGGSARPLTF

SEQ ID NO: 238902 - protein, 17 aa, Homo sapiens
  CDR3 for beta chain variable domain of TCR clone 119451 (TRBV28, TRBJ2-5)
CASSTPEGDALQETQYF

SEQ ID NO: 238903 - protein, 13 aa, Homo sapiens
  CDR3 for alpha chain variable domain of TCR clone 119452 (TRAV12-2, TRAJ52)
YAVGGTSYGKLTF

SEQ ID NO: 238904 - protein, 14 aa, Homo sapiens
  CDR3 for beta chain variable domain of TCR clone 119452 (TRBV19, TRBJ2-1)
CVSPTFVLSGEQFF

SEQ ID NO: 238905 - protein, 12 aa, Homo sapiens
  CDR3 for alpha chain variable domain of TCR clone 119453 (TRAV12-2, TRAJ43)
CAVNVNNNDMRF

SEQ ID NO: 238906 - protein, 14 aa, Homo sapiens
  CDR3 for beta chain variable domain of TCR clone 119453 (TRBV5-1, TRBJ2-7)
CASSRGESLYEQYF

SEQ ID NO: 238907 - protein, 15 aa, Homo sapiens
  CDR3 for alpha chain variable domain of TCR clone 119454 (TRAV8-2, TRAJ15)
CVVTMGNQAGTALIF

SEQ ID NO: 238908 - protein, 12 aa, Homo sapiens
  CDR3 for beta chain variable domain of TCR clone 119454 (TRBV6-1, TRBJ2-7)
CASSDYPYEQYF

SEQ ID NO: 238909 - protein, 14 aa, Homo sapiens
  CDR3 for alpha chain variable domain of TCR clone 119455 (TRAV1-2, TRAJ16)
RAVNRFSDGQKLLF

SEQ ID NO: 238910 - protein, 13 aa, Homo sapiens
  CDR3 for beta chain variable domain of TCR clone 119455 (TRBV4-2, TRBJ1-1)
CASSQAGNTEAFF

SEQ ID NO: 238911 - protein, 15 aa, Homo sapiens
  CDR3 for alpha chain variable domain of TCR clone 119456 (TRAV16, TRAJ16)
CALQGGGSDGQKLLL

SEQ ID NO: 238912 - protein, 15 aa, Homo sapiens
  CDR3 for beta chain variable domain of TCR clone 119456 (TRBV20-1, TRBJ2-7)
CSARDRVSGMDEQYF

SEQ ID NO: 238913 - protein, 14 aa, Homo sapiens
  CDR3 for alpha chain variable domain of TCR clone 119457 (TRAV3, TRAJ9)
CAVRGNTGGFKTIF

SEQ ID NO: 238914 - protein, 14 aa, Homo sapiens
  CDR3 for beta chain variable domain of TCR clone 119457 (TRBV15, TRBJ2-1)
CATSGIEDYNEQFF

SEQ ID NO: 238915 - protein, 14 aa, Homo sapiens
  CDR3 for alpha chain variable domain of TCR clone 119458 (TRAV29/DV5, TRAJ36)
CAARRKTGANNLFF

SEQ ID NO: 238916 - protein, 15 aa, Homo sapiens
  CDR3 for beta chain variable domain of TCR clone 119458 (TRBV18, TRBJ2-7)
CASSPSSTGNYEQYF

SEQ ID NO: 238917 - protein, 14 aa, Homo sapiens
  CDR3 for alpha chain variable domain of TCR clone 119459 (TRAV12-3, TRAJ10)
SHLPLTGGGNKLTF

SEQ ID NO: 238918 - protein, 15 aa, Homo sapiens
  CDR3 for beta chain variable domain of TCR clone 119459 (TRBV20-1, TRBJ2-3)
CSASPPQVSTDTQYF

SEQ ID NO: 238919 - protein, 11 aa, Homo sapiens
  CDR3 for alpha chain variable domain of TCR clone 119460 (TRAV20, TRAJ23)
CACTQGGKLIF

SEQ ID NO: 238920 - protein, 16 aa, Homo sapiens
  CDR3 for beta chain variable domain of TCR clone 119460 (TRBV7-8, TRBJ2-5)
CASSFGGQPAQETQYF

SEQ ID NO: 238921 - protein, 16 aa, Homo sapiens
  CDR3 for alpha chain variable domain of TCR clone 119461 (TRAV30, TRAJ24)
CGTEIVDADSWGKFQF

SEQ ID NO: 238922 - protein, 14 aa, Homo sapiens
  CDR3 for beta chain variable domain of TCR clone 119461 (TRBV15, TRBJ2-4)
CATEGGQGANIQYF

SEQ ID NO: 238923 - protein, 14 aa, Homo sapiens
  CDR3 for alpha chain variable domain of TCR clone 119462 (TRAV2, TRAJ9)
CAVDPNTGGFKTIF

SEQ ID NO: 238924 - protein, 16 aa, Homo sapiens
  CDR3 for beta chain variable domain of TCR clone 119462 (TRBV28, TRBJ1-2)
CASSLYGQEANYGYTF

SEQ ID NO: 238925 - protein, 12 aa, Homo sapiens
  CDR3 for alpha chain variable domain of TCR clone 119463 (TRAV12-3, TRAJ17)
CAMTLTGNKLTF

SEQ ID NO: 238926 - protein, 16 aa, Homo sapiens
  CDR3 for beta chain variable domain of TCR clone 119463 (TRBV20-1, TRBJ2-3)
CSAVRDRGPIADTQYF

SEQ ID NO: 238927 - protein, 17 aa, Homo sapiens
  CDR3 for alpha chain variable domain of TCR clone 119464 (TRAV12-2, TRAJ36)
CAVKDNPFFGTGTRLTV

SEQ ID NO: 238928 - protein, 15 aa, Homo sapiens
  CDR3 for beta chain variable domain of TCR clone 119464 (TRBV28, TRBJ2-2)
CASTVAGANTGELFF

SEQ ID NO: 238929 - protein, 14 aa, Homo sapiens
  CDR3 for alpha chain variable domain of TCR clone 119465 (TRAV1-2, TRAJ16)
CAVNRFSDGQKLLF

SEQ ID NO: 238930 - protein, 15 aa, Homo sapiens
  CDR3 for beta chain variable domain of TCR clone 119465 (TRBV18, TRBJ1-5)
CASSPQARSNQPQHF

SEQ ID NO: 238931 - protein, 13 aa, Homo sapiens
  CDR3 for alpha chain variable domain of TCR clone 119466 (TRAV36/DV7, TRAJ37)
CAVFSSNTGKLIF

SEQ ID NO: 238932 - protein, 16 aa, Homo sapiens
  CDR3 for beta chain variable domain of TCR clone 119466 (TRBV12-4, TRBJ1-5)
CASSRPVGGSNQPQHF

SEQ ID NO: 238933 - protein, 14 aa, Homo sapiens
  CDR3 for alpha chain variable domain of TCR clone 119467 (TRAV8-3, TRAJ21)
CAVDARDNFNKFYF

SEQ ID NO: 238934 - protein, 16 aa, Homo sapiens
  CDR3 for beta chain variable domain of TCR clone 119467 (TRBV20-1, TRBJ2-1)
CSARDPAGHSYNEQFF

SEQ ID NO: 238935 - protein, 13 aa, Homo sapiens
  CDR3 for alpha chain variable domain of TCR clone 119468 (TRAV12-3, TRAJ13)
CAMSSGGYQNVTF

SEQ ID NO: 238936 - protein, 14 aa, Homo sapiens
  CDR3 for beta chain variable domain of TCR clone 119468 (TRBV2, TRBJ2-1)
CASRTGSSYNEQFF

SEQ ID NO: 238937 - protein, 14 aa, Homo sapiens
  CDR3 for alpha chain variable domain of TCR clone 119469 (TRAV12-3, TRAJ29)
CAMSAGIQETHLLS

SEQ ID NO: 238938 - protein, 11 aa, Homo sapiens
  CDR3 for beta chain variable domain of TCR clone 119469 (TRBV7-3, TRBJ2-1)
CASSLNNEQFF

SEQ ID NO: 238939 - protein, 15 aa, Homo sapiens
  CDR3 for alpha chain variable domain of TCR clone 119470 (TRAV35, TRAJ58)
CAGRRQETSGSRLTF

SEQ ID NO: 238940 - protein, 11 aa, Homo sapiens
  CDR3 for beta chain variable domain of TCR clone 119470 (TRBV11-2, TRBJ1-1)
FASSINTEAFF

SEQ ID NO: 238941 - protein, 13 aa, Homo sapiens
  CDR3 for alpha chain variable domain of TCR clone 119471 (TRAV6, TRAJ23)
CALDQNPGGKLIF

SEQ ID NO: 238942 - protein, 15 aa, Homo sapiens
  CDR3 for beta chain variable domain of TCR clone 119471 (TRBV28, TRBJ1-2)
CASSGSEQRAFGYTF

SEQ ID NO: 238943 - protein, 12 aa, Homo sapiens
  CDR3 for alpha chain variable domain of TCR clone 119472 (TRAV27, TRAJ33)
CAGDGSNYQLIW

SEQ ID NO: 238944 - protein, 17 aa, Homo sapiens
  CDR3 for beta chain variable domain of TCR clone 119472 (TRBV6-3, TRBJ1-1)
CASSYSGRGRRNTEAFF

SEQ ID NO: 238945 - protein, 14 aa, Homo sapiens
  CDR3 for alpha chain variable domain of TCR clone 119473 (TRAV17, TRAJ6)
CATDASGGSYIPTF

SEQ ID NO: 238946 - protein, 19 aa, Homo sapiens
  CDR3 for beta chain variable domain of TCR clone 119473 (TRBV4-3, TRBJ2-7)
CASSQEVIGWQVTPYEQYF

SEQ ID NO: 238947 - protein, 16 aa, Homo sapiens
  CDR3 for alpha chain variable domain of TCR clone 119474 (TRAV27, TRAJ13)
CARAKSDSGGYQKVTF

SEQ ID NO: 238948 - protein, 15 aa, Homo sapiens
  CDR3 for beta chain variable domain of TCR clone 119474 (TRBV29-1, TRBJ2-1)
CSVGRHALFYNEQFF

SEQ ID NO: 238949 - protein, 13 aa, Homo sapiens
  CDR3 for alpha chain variable domain of TCR clone 119475 (TRAV8-3, TRAJ28)
CAVGAVGSYQLTF

SEQ ID NO: 238950 - protein, 13 aa, Homo sapiens
  CDR3 for beta chain variable domain of TCR clone 119475 (TRBV4-1, TRBJ2-5)
CASSLTRGETQYF

SEQ ID NO: 238951 - protein, 14 aa, Homo sapiens
  CDR3 for alpha chain variable domain of TCR clone 119476 (TRAV12-2, TRAJ13)
CAVKKTGGYQKVTF

SEQ ID NO: 238952 - protein, 15 aa, Homo sapiens
  CDR3 for beta chain variable domain of TCR clone 119476 (TRBV7-3, TRBJ2-1)
CASSLDGNSYNEQFF

SEQ ID NO: 238953 - protein, 20 aa, Homo sapiens
  CDR3 for alpha chain variable domain of TCR clone 119477 (TRAV25, TRAJ21)
TATQTTDVGTYPLSFNKFYF

SEQ ID NO: 238954 - protein, 14 aa, Homo sapiens
  CDR3 for beta chain variable domain of TCR clone 119477 (TRBV6-1, TRBJ2-1)
CASAKDGFYNEQYF

SEQ ID NO: 238955 - protein, 13 aa, Homo sapiens
  CDR3 for alpha chain variable domain of TCR clone 119478 (TRAV12-1, TRAJ29)
CVVNGPGNTPLVF

SEQ ID NO: 238956 - protein, 13 aa, Homo sapiens
  CDR3 for beta chain variable domain of TCR clone 119478 (TRBV7-2, TRBJ2-5)
CAGSRGGLETQYF

SEQ ID NO: 238957 - protein, 12 aa, Homo sapiens
  CDR3 for alpha chain variable domain of TCR clone 119479 (TRAV12-2, TRAJ10)
WGVTGGGNKLTF

SEQ ID NO: 238958 - protein, 14 aa, Homo sapiens
  CDR3 for beta chain variable domain of TCR clone 119479 (TRBV19, TRBJ2-3)
CASSAPRGTDTQHF

SEQ ID NO: 238959 - protein, 17 aa, Homo sapiens
  CDR3 for alpha chain variable domain of TCR clone 119480 (TRAV12-2, TRAJ48)
CASNEKLTFGTGTRLTI

SEQ ID NO: 238960 - protein, 12 aa, Homo sapiens
  CDR3 for beta chain variable domain of TCR clone 119480 (TRBV11-2, TRBJ2-2)
CASSLGGGELFF

SEQ ID NO: 238961 - protein, 14 aa, Homo sapiens
  CDR3 for alpha chain variable domain of TCR clone 119481 (TRAV1-2, TRAJ16)
CAVNRFSDGQKLLF

SEQ ID NO: 238962 - protein, 16 aa, Homo sapiens
  CDR3 for beta chain variable domain of TCR clone 119481 (TRBV7-3, TRBJ2-2)
CASSLQRGTLSGELFF

SEQ ID NO: 238963 - protein, 14 aa, Homo sapiens
  CDR3 for alpha chain variable domain of TCR clone 119482 (TRAV13-2, TRAJ43)
CAEIPTYNNNDMRF

SEQ ID NO: 238964 - protein, 17 aa, Homo sapiens
  CDR3 for beta chain variable domain of TCR clone 119482 (TRBV13, TRBJ2-3)
CASSLSRVAGGRNTQYF

SEQ ID NO: 238965 - protein, 14 aa, Homo sapiens
  CDR3 for alpha chain variable domain of TCR clone 119483 (TRAV1-1, TRAJ28)
CAAPSGAVSYQLTF

SEQ ID NO: 238966 - protein, 15 aa, Homo sapiens
  CDR3 for beta chain variable domain of TCR clone 119483 (TRBV7-2, TRBJ1-2)
CASSLVSGGDYGYTF

SEQ ID NO: 238967 - protein, 14 aa, Homo sapiens
  CDR3 for alpha chain variable domain of TCR clone 119484 (TRAV12-3, TRAJ10)
SHLPLTGGGNKLTF

SEQ ID NO: 238968 - protein, 16 aa, Homo sapiens
  CDR3 for beta chain variable domain of TCR clone 119484 (TRBV5-1, TRBJ2-7)
CASSLEGLAGLYEQYF

SEQ ID NO: 238969 - protein, 12 aa, Homo sapiens
  CDR3 for alpha chain variable domain of TCR clone 119485 (TRAV21, TRAJ31)
CAVWGNNARLMF

SEQ ID NO: 238970 - protein, 14 aa, Homo sapiens
  CDR3 for beta chain variable domain of TCR clone 119485 (TRBV5-1, TRBJ2-7)
CASSRGESLYEQYF

SEQ ID NO: 238971 - protein, 16 aa, Homo sapiens
  CDR3 for alpha chain variable domain of TCR clone 119486 (TRAV16, TRAJ4)
CITVLPFSGGYIKLIF

SEQ ID NO: 238972 - protein, 14 aa, Homo sapiens
  CDR3 for beta chain variable domain of TCR clone 119486 (TRBV19, TRBJ2-7)
CASSMGQGAIEQYF

SEQ ID NO: 238973 - protein, 15 aa, Homo sapiens
  CDR3 for alpha chain variable domain of TCR clone 119487 (TRAV1-1, TRAJ36)
CAGHLNWGKQPLLWD

SEQ ID NO: 238974 - protein, 15 aa, Homo sapiens
  CDR3 for beta chain variable domain of TCR clone 119487 (TRBV19, TRBJ2-1)
CASSSPGVPLDEQFF

SEQ ID NO: 238975 - protein, 17 aa, Homo sapiens
  CDR3 for alpha chain variable domain of TCR clone 119488 (TRAV13-1, TRAJ52)
CAASSGAGGTSYGKLTF

SEQ ID NO: 238976 - protein, 15 aa, Homo sapiens
  CDR3 for beta chain variable domain of TCR clone 119488 (TRBV2, TRBJ2-1)
CSSSELAGSYNEQFF

SEQ ID NO: 238977 - protein, 16 aa, Homo sapiens
  CDR3 for alpha chain variable domain of TCR clone 119489 (TRAV8-3, TRAJ42)
CAVGEGNGGSQGNLIF

SEQ ID NO: 238978 - protein, 14 aa, Homo sapiens
  CDR3 for beta chain variable domain of TCR clone 119489 (TRBV7-2, TRBJ2-1)
CAGSRGGARNEQFF

SEQ ID NO: 238979 - protein, 16 aa, Homo sapiens
  CDR3 for alpha chain variable domain of TCR clone 119490 (TRAV3, TRAJ10)
CAVRDMRAGGGNKLTF

SEQ ID NO: 238980 - protein, 17 aa, Homo sapiens
  CDR3 for beta chain variable domain of TCR clone 119490 (TRBV6-5, TRBJ2-4)
CASRPTPGQGSKNMQYF

SEQ ID NO: 238981 - protein, 17 aa, Homo sapiens
  CDR3 for alpha chain variable domain of TCR clone 119491 (TRAV21, TRAJ10)
CAVRVYILTGGGNKLTF

SEQ ID NO: 238982 - protein, 12 aa, Homo sapiens
  CDR3 for beta chain variable domain of TCR clone 119491 (TRBV11-2, TRBJ2-2)
CASSLPTGELFS

SEQ ID NO: 238983 - protein, 18 aa, Homo sapiens
  CDR3 for alpha chain variable domain of TCR clone 119492 (TRAV21, TRAJ52)
CAVRPSPAGCTSYGKLTF

SEQ ID NO: 238984 - protein, 16 aa, Homo sapiens
  CDR3 for beta chain variable domain of TCR clone 119492 (TRBV7-3, TRBJ2-1)
CASSLEGYRSYNEQFF

SEQ ID NO: 238985 - protein, 13 aa, Homo sapiens
  CDR3 for alpha chain variable domain of TCR clone 119493 (TRAV17, TRAJ26)
CATVDNYAQNFVF

SEQ ID NO: 238986 - protein, 16 aa, Homo sapiens
  CDR3 for beta chain variable domain of TCR clone 119493 (TRBV2, TRBJ2-1)
CASSVGGSLSYNEQFF

SEQ ID NO: 238987 - protein, 11 aa, Homo sapiens
  CDR3 for alpha chain variable domain of TCR clone 119494 (TRAV17, TRAJ9)
CATTGGFKTIF

SEQ ID NO: 238988 - protein, 14 aa, Homo sapiens
  CDR3 for beta chain variable domain of TCR clone 119494 (TRBV7-9, TRBJ2-2)
CASSGLPDTGELFF

SEQ ID NO: 238989 - protein, 14 aa, Homo sapiens
  CDR3 for alpha chain variable domain of TCR clone 119495 (TRAV3, TRAJ33)
CAVRDPSSNYQLIW

SEQ ID NO: 238990 - protein, 15 aa, Homo sapiens
  CDR3 for beta chain variable domain of TCR clone 119495 (TRBV28, TRBJ2-1)
CASSIIAGGRSEQFF

SEQ ID NO: 238991 - protein, 11 aa, Homo sapiens
  CDR3 for alpha chain variable domain of TCR clone 119496 (TRAV3, TRAJ21)
CAVGNFNKFYF

SEQ ID NO: 238992 - protein, 15 aa, Homo sapiens
  CDR3 for beta chain variable domain of TCR clone 119496 (TRBV29-1, TRBJ2-1)
CSGRDRKSSYNEQFF

SEQ ID NO: 238993 - protein, 17 aa, Homo sapiens
  CDR3 for alpha chain variable domain of TCR clone 119497 (TRAV26-1, TRAJ11)
CIVRVGQSNSGYSTLTF

SEQ ID NO: 238994 - protein, 16 aa, Homo sapiens
  CDR3 for beta chain variable domain of TCR clone 119497 (TRBV12-5, TRBJ2-5)
CASGPRTSGNQETQYF

SEQ ID NO: 238995 - protein, 14 aa, Homo sapiens
  CDR3 for alpha chain variable domain of TCR clone 119498 (TRAV12-2, TRAJ44)
CAVNPAGTASKLTF

SEQ ID NO: 238996 - protein, 13 aa, Homo sapiens
  CDR3 for beta chain variable domain of TCR clone 119498 (TRBV20-1, TRBJ1-6)
CSAPLGVGSPLHY

SEQ ID NO: 238997 - protein, 12 aa, Homo sapiens
  CDR3 for alpha chain variable domain of TCR clone 119499 (TRAV8-3, TRAJ26)
SAGDNYGQNFVF

SEQ ID NO: 238998 - protein, 12 aa, Homo sapiens
  CDR3 for beta chain variable domain of TCR clone 119499 (TRBV11-2, TRBJ2-1)
CASSPGNNEQFF

SEQ ID NO: 238999 - protein, 12 aa, Homo sapiens
  CDR3 for alpha chain variable domain of TCR clone 119500 (TRAV10, TRAJ43)
CVVVRVGNAMRF

SEQ ID NO: 239000 - protein, 15 aa, Homo sapiens
  CDR3 for beta chain variable domain of TCR clone 119500 (TRBV2, TRBJ2-7)
CASSEGLARSYEQYF

SEQ ID NO: 239001 - protein, 12 aa, Homo sapiens
  CDR3 for alpha chain variable domain of TCR clone 119501 (TRAV17, TRAJ57)
CATDGGSEKLVF

SEQ ID NO: 239002 - protein, 14 aa, Homo sapiens
  CDR3 for beta chain variable domain of TCR clone 119501 (TRBV29-1, TRBJ2-5)
CSVETSGSGETQYF

SEQ ID NO: 239003 - protein, 13 aa, Homo sapiens
  CDR3 for alpha chain variable domain of TCR clone 119502 (TRAV12-2, TRAJ4)
CAVFSGGYNKLIF

SEQ ID NO: 239004 - protein, 13 aa, Homo sapiens
  CDR3 for beta chain variable domain of TCR clone 119502 (TRBV19, TRBJ1-5)
CASSIDWDQPQHF

SEQ ID NO: 239005 - protein, 15 aa, Homo sapiens
  CDR3 for alpha chain variable domain of TCR clone 119503 (TRAV12-2, TRAJ53)
CAVNGGGGSNYKLTF

SEQ ID NO: 239006 - protein, 14 aa, Homo sapiens
  CDR3 for beta chain variable domain of TCR clone 119503 (TRBV19, TRBJ2-2)
CASSTIHRSGELFF

SEQ ID NO: 239007 - protein, 12 aa, Homo sapiens
  CDR3 for alpha chain variable domain of TCR clone 119504 (TRAV2, TRAJ33)
CAVPDSNYQLIW

SEQ ID NO: 239008 - protein, 17 aa, Homo sapiens
  CDR3 for beta chain variable domain of TCR clone 119504 (TRBV6-5, TRBJ2-3)
CASSYGTSLYKSDTQHF

SEQ ID NO: 239009 - protein, 15 aa, Homo sapiens
  CDR3 for alpha chain variable domain of TCR clone 119505 (TRAV21, TRAJ53)
CATLNSGGNNYKLTF

SEQ ID NO: 239010 - protein, 16 aa, Homo sapiens
  CDR3 for beta chain variable domain of TCR clone 119505 (TRBV9, TRBJ2-1)
CASSVGGGGNYNEQFF

SEQ ID NO: 239011 - protein, 15 aa, Homo sapiens
  CDR3 for alpha chain variable domain of TCR clone 119506 (TRAV3, TRAJ5)
CAVRDLDTGRRALTF

SEQ ID NO: 239012 - protein, 15 aa, Homo sapiens
  CDR3 for beta chain variable domain of TCR clone 119506 (TRBV5-1, TRBJ2-3)
CASSVTPGSTDTQYF

SEQ ID NO: 239013 - protein, 13 aa, Homo sapiens
  CDR3 for alpha chain variable domain of TCR clone 119507 (TRAV1-2, TRAJ9)
CAALNIGGFKTIF

SEQ ID NO: 239014 - protein, 13 aa, Homo sapiens
  CDR3 for beta chain variable domain of TCR clone 119507 (TRBV15, TRBJ1-6)
CATSGGLNSPLHF

SEQ ID NO: 239015 - protein, 13 aa, Homo sapiens
  CDR3 for alpha chain variable domain of TCR clone 119508 (TRAV20, TRAJ31)
CAVQAIGGAILMF

SEQ ID NO: 239016 - protein, 14 aa, Homo sapiens
  CDR3 for beta chain variable domain of TCR clone 119508 (TRBV2, TRBJ1-5)
CASSGTVSNQPQHF

SEQ ID NO: 239017 - protein, 15 aa, Homo sapiens
  CDR3 for alpha chain variable domain of TCR clone 119509 (TRAV26-1, TRAJ29)
CIVRVEGSGNTPLVF

SEQ ID NO: 239018 - protein, 14 aa, Homo sapiens
  CDR3 for beta chain variable domain of TCR clone 119509 (TRBV18, TRBJ2-5)
CATSPGVSQETQYF

SEQ ID NO: 239019 - protein, 14 aa, Homo sapiens
  CDR3 for alpha chain variable domain of TCR clone 119510 (TRAV1-2, TRAJ6)
CAVSLSGGSYIPTF

SEQ ID NO: 239020 - protein, 15 aa, Homo sapiens
  CDR3 for beta chain variable domain of TCR clone 119510 (TRBV28, TRBJ2-7)
CACSPGGRGFYEQYF

SEQ ID NO: 239021 - protein, 13 aa, Homo sapiens
  CDR3 for alpha chain variable domain of TCR clone 119511 (TRAV25, TRAJ30)
CAGRVDRDDKIIF

SEQ ID NO: 239022 - protein, 17 aa, Homo sapiens
  CDR3 for beta chain variable domain of TCR clone 119511 (TRBV7-9, TRBJ2-6)
CASSVGAGYSGANVLTF

SEQ ID NO: 239023 - protein, 11 aa, Homo sapiens
  CDR3 for alpha chain variable domain of TCR clone 119512 (TRAV12-3, TRAJ27)
CAMANAGKSTF

SEQ ID NO: 239024 - protein, 15 aa, Homo sapiens
  CDR3 for beta chain variable domain of TCR clone 119512 (TRBV20-1, TRBJ1-1)
CSARVGGNTEAFLDK

SEQ ID NO: 239025 - protein, 20 aa, Homo sapiens
  CDR3 for alpha chain variable domain of TCR clone 119513 (TRAV13-1, )
CAASPMDIQNPDPAVYQLRD

SEQ ID NO: 239026 - protein, 13 aa, Homo sapiens
  CDR3 for beta chain variable domain of TCR clone 119513 (TRBV20-1, TRBJ2-2)
CSASAAGTGELLF

SEQ ID NO: 239027 - protein, 14 aa, Homo sapiens
  CDR3 for alpha chain variable domain of TCR clone 119514 (TRAV12-3, TRAJ29)
CAMILLSGNKPLVF

SEQ ID NO: 239028 - protein, 16 aa, Homo sapiens
  CDR3 for beta chain variable domain of TCR clone 119514 (TRBV28, TRBJ2-7)
CASSSGTSGRGYEQYF

SEQ ID NO: 239029 - protein, 18 aa, Homo sapiens
  CDR3 for alpha chain variable domain of TCR clone 119515 (TRAV9-2, TRAJ52)
CALSRHHAGGTSYGKLTF

SEQ ID NO: 239030 - protein, 13 aa, Homo sapiens
  CDR3 for beta chain variable domain of TCR clone 119515 (TRBV7-9, TRBJ1-2)
CASSLKQNYGYTF

SEQ ID NO: 239031 - protein, 12 aa, Homo sapiens
  CDR3 for alpha chain variable domain of TCR clone 119516 (TRAV21, TRAJ33)
CAKMDSNYQLIW

SEQ ID NO: 239032 - protein, 14 aa, Homo sapiens
  CDR3 for beta chain variable domain of TCR clone 119516 (TRBV4-2, TRBJ2-1)
CASGLDRAYNEQFF

SEQ ID NO: 239033 - protein, 11 aa, Homo sapiens
  CDR3 for alpha chain variable domain of TCR clone 119517 (TRAV12-1, TRAJ30)
CVVNGQDKIIF

SEQ ID NO: 239034 - protein, 14 aa, Homo sapiens
  CDR3 for beta chain variable domain of TCR clone 119517 (TRBV6-1, TRBJ1-3)
CASVRGGGGNTIYF

SEQ ID NO: 239035 - protein, 12 aa, Homo sapiens
  CDR3 for alpha chain variable domain of TCR clone 119518 (TRAV1-2, TRAJ29)
CAVRNLNTPLVF

SEQ ID NO: 239036 - protein, 14 aa, Homo sapiens
  CDR3 for beta chain variable domain of TCR clone 119518 (TRBV19, TRBJ2-1)
CASPTFVLSGEQFF

SEQ ID NO: 239037 - protein, 14 aa, Homo sapiens
  CDR3 for alpha chain variable domain of TCR clone 119519 (TRAV13-1, TRAJ49)
CGTSSILGRTSLTV

SEQ ID NO: 239038 - protein, 16 aa, Homo sapiens
  CDR3 for beta chain variable domain of TCR clone 119519 (TRBV5-1, TRBJ2-7)
CASRPSFSNNPYEQYF

SEQ ID NO: 239039 - protein, 15 aa, Homo sapiens
  CDR3 for alpha chain variable domain of TCR clone 119520 (TRAV3, TRAJ22)
CAVRDRGGSARQLAF

SEQ ID NO: 239040 - protein, 12 aa, Homo sapiens
  CDR3 for beta chain variable domain of TCR clone 119520 (TRBV12-4, TRBJ1-2)
CASSFIWLHLRF

SEQ ID NO: 239041 - protein, 12 aa, Homo sapiens
  CDR3 for alpha chain variable domain of TCR clone 119521 (TRAV22, TRAJ22)
CAPGGSARQLTF

SEQ ID NO: 239042 - protein, 18 aa, Homo sapiens
  CDR3 for beta chain variable domain of TCR clone 119521 (TRBV7-9, TRBJ2-7)
CASSLTTSGSRTWYEQYF

SEQ ID NO: 239043 - protein, 12 aa, Homo sapiens
  CDR3 for alpha chain variable domain of TCR clone 119522 (TRAV13-1, TRAJ21)
CAAKEGFNKFYF

SEQ ID NO: 239044 - protein, 14 aa, Homo sapiens
  CDR3 for beta chain variable domain of TCR clone 119522 (TRBV18, TRBJ2-7)
CASSPRGVAYEQYF

SEQ ID NO: 239045 - protein, 13 aa, Homo sapiens
  CDR3 for alpha chain variable domain of TCR clone 119523 (TRAV2, TRAJ40)
CAVVTSGTYKYIF

SEQ ID NO: 239046 - protein, 15 aa, Homo sapiens
  CDR3 for beta chain variable domain of TCR clone 119523 (TRBV11-3, TRBJ2-3)
SASLKDGREGDTQYF

SEQ ID NO: 239047 - protein, 14 aa, Homo sapiens
  CDR3 for alpha chain variable domain of TCR clone 119524 (TRAV3, TRAJ34)
CAVRAPGNTDKLLF

SEQ ID NO: 239048 - protein, 17 aa, Homo sapiens
  CDR3 for beta chain variable domain of TCR clone 119524 (TRBV20-1, TRBJ2-7)
CSAAPGLARGISYEQYF

SEQ ID NO: 239049 - protein, 14 aa, Homo sapiens
  CDR3 for alpha chain variable domain of TCR clone 119525 (TRAV26-1, TRAJ38)
CIADNAGNNRKLIW

SEQ ID NO: 239050 - protein, 13 aa, Homo sapiens
  CDR3 for beta chain variable domain of TCR clone 119525 (TRBV20-1, TRBJ1-1)
CSGRGGGNTEAFF

SEQ ID NO: 239051 - protein, 11 aa, Homo sapiens
  CDR3 for alpha chain variable domain of TCR clone 119526 (TRAV13-1, TRAJ15)
CAATPGTALTF

SEQ ID NO: 239052 - protein, 13 aa, Homo sapiens
  CDR3 for beta chain variable domain of TCR clone 119526 (TRBV7-2, TRBJ2-1)
CASSVGVYNEQFF

SEQ ID NO: 239053 - protein, 16 aa, Homo sapiens
  CDR3 for alpha chain variable domain of TCR clone 119527 (TRAV30, TRAJ24)
CGTEIVDADSWGKFQF

SEQ ID NO: 239054 - protein, 18 aa, Homo sapiens
  CDR3 for beta chain variable domain of TCR clone 119527 (TRBV11-2, TRBJ2-3)
WASSLGGASRGAPNTQYF

SEQ ID NO: 239055 - protein, 20 aa, Homo sapiens
  CDR3 for alpha chain variable domain of TCR clone 119528 (TRAV26-1, TRAJ42)
CCVLLHRQTYYGGSQGNLII

SEQ ID NO: 239056 - protein, 16 aa, Homo sapiens
  CDR3 for beta chain variable domain of TCR clone 119528 (TRBV7-3, TRBJ2-2)
CASSLKRGTLSGELFF

SEQ ID NO: 239057 - protein, 13 aa, Homo sapiens
  CDR3 for alpha chain variable domain of TCR clone 119529 (TRAV13-1, TRAJ21)
CAASIYNFNKFYF

SEQ ID NO: 239058 - protein, 17 aa, Homo sapiens
  CDR3 for beta chain variable domain of TCR clone 119529 (TRBV4-1, TRBJ2-3)
CASSQGYVSGGTDTQYF

SEQ ID NO: 239059 - protein, 14 aa, Homo sapiens
  CDR3 for alpha chain variable domain of TCR clone 119530 (TRAV12-1, TRAJ17)
CVVNPKAAGNKLTF

SEQ ID NO: 239060 - protein, 16 aa, Homo sapiens
  CDR3 for beta chain variable domain of TCR clone 119530 (TRBV20-1, TRBJ2-1)
CSASASGYSSYNEQFS

SEQ ID NO: 239061 - protein, 17 aa, Homo sapiens
  CDR3 for alpha chain variable domain of TCR clone 119531 (TRAV3, TRAJ6)
CSVRDGPRAGGSYIPTF

SEQ ID NO: 239062 - protein, 14 aa, Homo sapiens
  CDR3 for beta chain variable domain of TCR clone 119531 (TRBV20-1, TRBJ1-1)
CSAQTRIGGTEAFF

SEQ ID NO: 239063 - protein, 12 aa, Homo sapiens
  CDR3 for alpha chain variable domain of TCR clone 119532 (TRAV36/DV7, TRAJ40)
CAVGTGTYKYIF

SEQ ID NO: 239064 - protein, 18 aa, Homo sapiens
  CDR3 for beta chain variable domain of TCR clone 119532 (TRBV11-2, TRBJ2-6)
CASSLNPFLGTGANVLAF

SEQ ID NO: 239065 - protein, 12 aa, Homo sapiens
  CDR3 for alpha chain variable domain of TCR clone 119533 (TRAV12-3, TRAJ17)
CAMTLTGNKLTF

SEQ ID NO: 239066 - protein, 14 aa, Homo sapiens
  CDR3 for beta chain variable domain of TCR clone 119533 (TRBV5-8, TRBJ2-3)
CASSLGQGTDTQYF

SEQ ID NO: 239067 - protein, 13 aa, Homo sapiens
  CDR3 for alpha chain variable domain of TCR clone 119534 (TRAV29/DV5, TRAJ47)
CAASAEFGNKLVF

SEQ ID NO: 239068 - protein, 15 aa, Homo sapiens
  CDR3 for beta chain variable domain of TCR clone 119534 (TRBV7-9, TRBJ1-4)
CASSARTGGNEKLFF

SEQ ID NO: 239069 - protein, 13 aa, Homo sapiens
  CDR3 for alpha chain variable domain of TCR clone 119535 (TRAV12-3, TRAJ54)
CALVPQGARKLVF

SEQ ID NO: 239070 - protein, 15 aa, Homo sapiens
  CDR3 for beta chain variable domain of TCR clone 119535 (TRBV4-1, TRBJ2-2)
CASSQDSRGTGELFF

SEQ ID NO: 239071 - protein, 10 aa, Homo sapiens
  CDR3 for alpha chain variable domain of TCR clone 119536 (TRAV12-2, TRAJ36)
CGTNNLFFGT

SEQ ID NO: 239072 - protein, 14 aa, Homo sapiens
  CDR3 for beta chain variable domain of TCR clone 119536 (TRBV7-2, TRBJ2-1)
CASSLSRVDNEQFF

SEQ ID NO: 239073 - protein, 14 aa, Homo sapiens
  CDR3 for alpha chain variable domain of TCR clone 119537 (TRAV2, TRAJ9)
CAVEDRSGGLKTIF

SEQ ID NO: 239074 - protein, 13 aa, Homo sapiens
  CDR3 for beta chain variable domain of TCR clone 119537 (TRBV7-3, TRBJ1-1)
CASSQDWGAEAFF

SEQ ID NO: 239075 - protein, 17 aa, Homo sapiens
  CDR3 for alpha chain variable domain of TCR clone 119538 (TRAV3, TRAJ6)
CAVRDGPRAGGSYIPTF

SEQ ID NO: 239076 - protein, 13 aa, Homo sapiens
  CDR3 for beta chain variable domain of TCR clone 119538 (TRBV11-2, TRBJ2-1)
CASSSEAYNEQFF

SEQ ID NO: 239077 - protein, 15 aa, Homo sapiens
  CDR3 for alpha chain variable domain of TCR clone 119539 (TRAV3, TRAJ22)
CAVRDRGGFARPLTF

SEQ ID NO: 239078 - protein, 13 aa, Homo sapiens
  CDR3 for beta chain variable domain of TCR clone 119539 (TRBV2, TRBJ1-5)
CATAGPGNQPQHF

SEQ ID NO: 239079 - protein, 14 aa, Homo sapiens
  CDR3 for alpha chain variable domain of TCR clone 119540 (TRAV13-1, TRAJ13)
CAASRVGGYQKVTF

SEQ ID NO: 239080 - protein, 12 aa, Homo sapiens
  CDR3 for beta chain variable domain of TCR clone 119540 (TRBV11-2, TRBJ2-2)
CASSLGGGELFF

SEQ ID NO: 239081 - protein, 14 aa, Homo sapiens
  CDR3 for alpha chain variable domain of TCR clone 119541 (TRAV2, TRAJ9)
CAVEDRSGGFKTIF

SEQ ID NO: 239082 - protein, 12 aa, Homo sapiens
  CDR3 for beta chain variable domain of TCR clone 119541 (TRBV12-4, TRBJ2-4)
CASSSSGNSQCF

SEQ ID NO: 239083 - protein, 15 aa, Homo sapiens
  CDR3 for alpha chain variable domain of TCR clone 119542 (TRAV3, TRAJ22)
CAVRDRGGSARQLTF

SEQ ID NO: 239084 - protein, 15 aa, Homo sapiens
  CDR3 for beta chain variable domain of TCR clone 119542 (TRBV20-1, TRBJ2-2)
CSAIPGHSNTGELFF

SEQ ID NO: 239085 - protein, 12 aa, Homo sapiens
  CDR3 for alpha chain variable domain of TCR clone 119543 (TRAV12-1, TRAJ40)
CVVYSGTYKYIF

SEQ ID NO: 239086 - protein, 13 aa, Homo sapiens
  CDR3 for beta chain variable domain of TCR clone 119543 (TRBV12-4, TRBJ1-5)
CASSPRQYQPQHF

SEQ ID NO: 239087 - protein, 14 aa, Homo sapiens
  CDR3 for alpha chain variable domain of TCR clone 119544 (TRAV13-1, TRAJ44)
CAAKATGTASKLTF

SEQ ID NO: 239088 - protein, 14 aa, Homo sapiens
  CDR3 for beta chain variable domain of TCR clone 119544 (TRBV20-1, TRBJ2-5)
CSARDGRAGETQYF

SEQ ID NO: 239089 - protein, 12 aa, Homo sapiens
  CDR3 for alpha chain variable domain of TCR clone 119545 (TRAV25, TRAJ35)
CAGIGFGNVLHC

SEQ ID NO: 239090 - protein, 13 aa, Homo sapiens
  CDR3 for beta chain variable domain of TCR clone 119545 (TRBV7-9, TRBJ1-2)
CASSLKQNYGYTF

SEQ ID NO: 239091 - protein, 12 aa, Homo sapiens
  CDR3 for alpha chain variable domain of TCR clone 119546 (TRAV12-3, TRAJ20)
CAMVRGDYKLSF

SEQ ID NO: 239092 - protein, 16 aa, Homo sapiens
  CDR3 for beta chain variable domain of TCR clone 119546 (TRBV5-1, TRBJ2-3)
CASSLGLAVYKDTQYF

SEQ ID NO: 239093 - protein, 14 aa, Homo sapiens
  CDR3 for alpha chain variable domain of TCR clone 119547 (TRAV13-1, TRAJ35)
CASSKGGFGNVLHC

SEQ ID NO: 239094 - protein, 14 aa, Homo sapiens
  CDR3 for beta chain variable domain of TCR clone 119547 (TRBV20-1, TRBJ2-2)
CSAPDTANTGELFF

SEQ ID NO: 239095 - protein, 15 aa, Homo sapiens
  CDR3 for alpha chain variable domain of TCR clone 119548 (TRAV20, TRAJ43)
CAVQAGRSSNNDMRF

SEQ ID NO: 239096 - protein, 14 aa, Homo sapiens
  CDR3 for beta chain variable domain of TCR clone 119548 (TRBV27, TRBJ2-1)
CASRHLGGGKEQFF

SEQ ID NO: 239097 - protein, 18 aa, Homo sapiens
  CDR3 for alpha chain variable domain of TCR clone 119549 (TRAV1-2, TRAJ18)
CAVRDMGDRGSTLGRLYF

SEQ ID NO: 239098 - protein, 16 aa, Homo sapiens
  CDR3 for beta chain variable domain of TCR clone 119549 (TRBV29-1, TRBJ1-2)
CSVEANRDIANYGCTF

SEQ ID NO: 239099 - protein, 17 aa, Homo sapiens
  CDR3 for alpha chain variable domain of TCR clone 119550 (TRAV8-1, TRAJ43)
CAVTNDMRFGAGTRLTV

SEQ ID NO: 239100 - protein, 14 aa, Homo sapiens
  CDR3 for beta chain variable domain of TCR clone 119550 (TRBV19, TRBJ2-1)
CASSRLASINEQFF

SEQ ID NO: 239101 - protein, 17 aa, Homo sapiens
  CDR3 for alpha chain variable domain of TCR clone 119551 (TRAV3, TRAJ38)
CAVRDCLNAGNNRKLIW

SEQ ID NO: 239102 - protein, 14 aa, Homo sapiens
  CDR3 for beta chain variable domain of TCR clone 119551 (TRBV20-1, TRBJ2-1)
CSAQIGGSANEQFF

SEQ ID NO: 239103 - protein, 16 aa, Homo sapiens
  CDR3 for alpha chain variable domain of TCR clone 119552 (TRAV3, TRAJ5)
CAVRNLMDTGRRALTF

SEQ ID NO: 239104 - protein, 11 aa, Homo sapiens
  CDR3 for beta chain variable domain of TCR clone 119552 (TRBV29-1, TRBJ2-5)
CSEDRTGTQYF

SEQ ID NO: 239105 - protein, 14 aa, Homo sapiens
  CDR3 for alpha chain variable domain of TCR clone 119553 (TRAV26-1, TRAJ38)
CIADNAGNNRKLIW

SEQ ID NO: 239106 - protein, 17 aa, Homo sapiens
  CDR3 for beta chain variable domain of TCR clone 119553 (TRBV15, TRBJ1-1)
CATSRVGGADGDTGAFF

SEQ ID NO: 239107 - protein, 15 aa, Homo sapiens
  CDR3 for alpha chain variable domain of TCR clone 119554 (TRAV21, TRAJ40)
CAVRPQTSGTYKYIF

SEQ ID NO: 239108 - protein, 14 aa, Homo sapiens
  CDR3 for beta chain variable domain of TCR clone 119554 (TRBV7-6, TRBJ2-3)
CASSLGTVTDTQYF

SEQ ID NO: 239109 - protein, 13 aa, Homo sapiens
  CDR3 for alpha chain variable domain of TCR clone 119555 (TRAV17, TRAJ7)
CATDNYGKNRLAF

SEQ ID NO: 239110 - protein, 16 aa, Homo sapiens
  CDR3 for beta chain variable domain of TCR clone 119555 (TRBV4-1, TRBJ2-5)
CASSQAIAASSATQYF

SEQ ID NO: 239111 - protein, 16 aa, Homo sapiens
  CDR3 for alpha chain variable domain of TCR clone 119556 (TRAV3, TRAJ37)
CAVRGKGPGNTGKLIF

SEQ ID NO: 239112 - protein, 13 aa, Homo sapiens
  CDR3 for beta chain variable domain of TCR clone 119556 (TRBV10-3, TRBJ2-7)
CASKLAVNYEQYF

SEQ ID NO: 239113 - protein, 13 aa, Homo sapiens
  CDR3 for alpha chain variable domain of TCR clone 119557 (TRAV12-2, TRAJ30)
CAVNLNRDDKIIF

SEQ ID NO: 239114 - protein, 15 aa, Homo sapiens
  CDR3 for beta chain variable domain of TCR clone 119557 (TRBV5-1, TRBJ1-1)
CASSSTTGTNTEAFF

SEQ ID NO: 239115 - protein, 14 aa, Homo sapiens
  CDR3 for alpha chain variable domain of TCR clone 119558 (TRAV20, TRAJ42)
CAVQAGGSQGNLIF

SEQ ID NO: 239116 - protein, 14 aa, Homo sapiens
  CDR3 for beta chain variable domain of TCR clone 119558 (TRBV12-5, TRBJ2-5)
CASGSRTHQETQYF

SEQ ID NO: 239117 - protein, 12 aa, Homo sapiens
  CDR3 for alpha chain variable domain of TCR clone 119559 (TRAV13-1, TRAJ21)
CAAKEGFNKFYF

SEQ ID NO: 239118 - protein, 12 aa, Homo sapiens
  CDR3 for beta chain variable domain of TCR clone 119559 (TRBV24-1, TRBJ2-3)
CATSDSTDTQYF

SEQ ID NO: 239119 - protein, 11 aa, Homo sapiens
  CDR3 for alpha chain variable domain of TCR clone 119560 (TRAV1-2, TRAJ20)
CAVANDYKLSF

SEQ ID NO: 239120 - protein, 16 aa, Homo sapiens
  CDR3 for beta chain variable domain of TCR clone 119560 (TRBV4-3, TRBJ1-6)
CASSRDPGVYNSPLHF

SEQ ID NO: 239121 - protein, 14 aa, Homo sapiens
  CDR3 for alpha chain variable domain of TCR clone 119561 (TRAV20, TRAJ22)
CAVALGGSARQLTF

SEQ ID NO: 239122 - protein, 14 aa, Homo sapiens
  CDR3 for beta chain variable domain of TCR clone 119561 (TRBV18, TRBJ2-5)
CASSPGVSQETQYF

SEQ ID NO: 239123 - protein, 14 aa, Homo sapiens
  CDR3 for alpha chain variable domain of TCR clone 119562 (TRAV26-2, TRAJ31)
CILIPGNNNARLMF

SEQ ID NO: 239124 - protein, 16 aa, Homo sapiens
  CDR3 for beta chain variable domain of TCR clone 119562 (TRBV7-3, TRBJ2-1)
CASSLVSGSSNKEQFF

SEQ ID NO: 239125 - protein, 18 aa, Homo sapiens
  CDR3 for alpha chain variable domain of TCR clone 119563 (TRAV1-2, TRAJ18)
CAVRDMGDRCSTLGRLYF

SEQ ID NO: 239126 - protein, 16 aa, Homo sapiens
  CDR3 for beta chain variable domain of TCR clone 119563 (TRBV29-1, TRBJ1-2)
CSVEANRDIANYGYTF

SEQ ID NO: 239127 - protein, 12 aa, Homo sapiens
  CDR3 for alpha chain variable domain of TCR clone 119564 (TRAV13-2, TRAJ23)
CAERHRGGKLIF

SEQ ID NO: 239128 - protein, 15 aa, Homo sapiens
  CDR3 for beta chain variable domain of TCR clone 119564 (TRBV19, TRBJ2-1)
CASSSPGVPLDEQFF

SEQ ID NO: 239129 - protein, 14 aa, Homo sapiens
  CDR3 for alpha chain variable domain of TCR clone 119565 (TRAV3, TRAJ27)
CAVRDDTNAGKSTF

SEQ ID NO: 239130 - protein, 15 aa, Homo sapiens
  CDR3 for beta chain variable domain of TCR clone 119565 (TRBV7-7, TRBJ2-2)
CATGKLAKNTGELFF

SEQ ID NO: 239131 - protein, 14 aa, Homo sapiens
  CDR3 for alpha chain variable domain of TCR clone 119566 (TRAV4, TRAJ6)
CLVGESGGSYIPTF

SEQ ID NO: 239132 - protein, 16 aa, Homo sapiens
  CDR3 for beta chain variable domain of TCR clone 119566 (TRBV7-6, TRBJ2-1)
CASSLNEGPSYNEQFF

SEQ ID NO: 239133 - protein, 13 aa, Homo sapiens
  CDR3 for alpha chain variable domain of TCR clone 119567 (TRAV2, TRAJ40)
CAVVTSGTYKYIF

SEQ ID NO: 239134 - protein, 15 aa, Homo sapiens
  CDR3 for beta chain variable domain of TCR clone 119567 (TRBV11-3, TRBJ2-3)
CASLKDGREGDRQYF

SEQ ID NO: 239135 - protein, 17 aa, Homo sapiens
  CDR3 for alpha chain variable domain of TCR clone 119568 (TRAV3, TRAJ12)
CAVRDGGRMDSSYKLIF

SEQ ID NO: 239136 - protein, 15 aa, Homo sapiens
  CDR3 for beta chain variable domain of TCR clone 119568 (TRBV10-3, TRBJ2-3)
CAISLTSGGTDTQYF

SEQ ID NO: 239137 - protein, 17 aa, Homo sapiens
  CDR3 for alpha chain variable domain of TCR clone 119569 (TRAV3, TRAJ38)
CAVRDCLNAGNNRKLIW

SEQ ID NO: 239138 - protein, 17 aa, Homo sapiens
  CDR3 for beta chain variable domain of TCR clone 119569 (TRBV19, TRBJ1-1)
CASSIAGRGLMNTEAFF

SEQ ID NO: 239139 - protein, 17 aa, Homo sapiens
  CDR3 for alpha chain variable domain of TCR clone 119570 (TRAV26-2, TRAJ42)
CILRDVGYGGSQGNLIY

SEQ ID NO: 239140 - protein, 16 aa, Homo sapiens
  CDR3 for beta chain variable domain of TCR clone 119570 (TRBV12-4, TRBJ2-7)
CASSLIGGTGTYEQYF

SEQ ID NO: 239141 - protein, 12 aa, Homo sapiens
  CDR3 for alpha chain variable domain of TCR clone 119571 (TRAV1-2, TRAJ11)
CAVRGGYSTLTF

SEQ ID NO: 239142 - protein, 11 aa, Homo sapiens
  CDR3 for beta chain variable domain of TCR clone 119571 (TRBV6-3, TRBJ2-3)
CATGRADTQYF

SEQ ID NO: 239143 - protein, 17 aa, Homo sapiens
  CDR3 for alpha chain variable domain of TCR clone 119572 (TRAV14/DV4, TRAJ4)
CAMREASGRGGYNKLIF

SEQ ID NO: 239144 - protein, 12 aa, Homo sapiens
  CDR3 for beta chain variable domain of TCR clone 119572 (TRBV2, TRBJ2-1)
CAKREGYNEQFF

SEQ ID NO: 239145 - protein, 12 aa, Homo sapiens
  CDR3 for alpha chain variable domain of TCR clone 119573 (TRAV13-1, TRAJ49)
CAASPMGNQFYF

SEQ ID NO: 239146 - protein, 14 aa, Homo sapiens
  CDR3 for beta chain variable domain of TCR clone 119573 (TRBV12-4, TRBJ2-7)
CASSPRQDLYEQYF

SEQ ID NO: 239147 - protein, 13 aa, Homo sapiens
  CDR3 for alpha chain variable domain of TCR clone 119574 (TRAV17, TRAJ5)
CAPVDTGRRALTF

SEQ ID NO: 239148 - protein, 14 aa, Homo sapiens
  CDR3 for beta chain variable domain of TCR clone 119574 (TRBV29-1, TRBJ2-7)
CSVDQRQASYEQYF

SEQ ID NO: 239149 - protein, 14 aa, Homo sapiens
  CDR3 for alpha chain variable domain of TCR clone 119575 (TRAV26-1, TRAJ38)
CIADNAGNNSKLIW

SEQ ID NO: 239150 - protein, 15 aa, Homo sapiens
  CDR3 for beta chain variable domain of TCR clone 119575 (TRBV7-6, TRBJ1-4)
CASSLGAGAGEKLFF

SEQ ID NO: 239151 - protein, 15 aa, Homo sapiens
  CDR3 for alpha chain variable domain of TCR clone 119576 (TRAV27, TRAJ38)
CAGRFNAGNNRKLIW

SEQ ID NO: 239152 - protein, 12 aa, Homo sapiens
  CDR3 for beta chain variable domain of TCR clone 119576 (TRBV19, TRBJ1-5)
CASSIAQQPQHF

SEQ ID NO: 239153 - protein, 10 aa, Homo sapiens
  CDR3 for alpha chain variable domain of TCR clone 119577 (TRAV30, TRAJ48)
CGIGNEKLTF

SEQ ID NO: 239154 - protein, 15 aa, Homo sapiens
  CDR3 for beta chain variable domain of TCR clone 119577 (TRBV6-5, TRBJ2-1)
CASSYDAGAGNEQFF

SEQ ID NO: 239155 - protein, 16 aa, Homo sapiens
  CDR3 for alpha chain variable domain of TCR clone 119578 (TRAV3, TRAJ6)
CAVRDGMGRRKLHTYI

SEQ ID NO: 239156 - protein, 15 aa, Homo sapiens
  CDR3 for beta chain variable domain of TCR clone 119578 (TRBV5-1, TRBJ2-7)
CASSVGDFTTYEQYF

SEQ ID NO: 239157 - protein, 14 aa, Homo sapiens
  CDR3 for alpha chain variable domain of TCR clone 119579 (TRAV1-2, TRAJ16)
CAVNRISDGQKLLF

SEQ ID NO: 239158 - protein, 13 aa, Homo sapiens
  CDR3 for beta chain variable domain of TCR clone 119579 (TRBV7-9, TRBJ1-2)
CASSLKQNYGYTF

SEQ ID NO: 239159 - protein, 17 aa, Homo sapiens
  CDR3 for alpha chain variable domain of TCR clone 119580 (TRAV3, TRAJ38)
CAVRDCLNAGNNRKLIW

SEQ ID NO: 239160 - protein, 14 aa, Homo sapiens
  CDR3 for beta chain variable domain of TCR clone 119580 (TRBV7-2, TRBJ2-7)
CASRSQGAAYEQYF

SEQ ID NO: 239161 - protein, 14 aa, Homo sapiens
  CDR3 for alpha chain variable domain of TCR clone 119581 (TRAV1-2, TRAJ16)
CAVNRFSDGQKLLF

SEQ ID NO: 239162 - protein, 16 aa, Homo sapiens
  CDR3 for beta chain variable domain of TCR clone 119581 (TRBV13, TRBJ2-2)
CASSLGRGYGTGELFF

SEQ ID NO: 239163 - protein, 13 aa, Homo sapiens
  CDR3 for alpha chain variable domain of TCR clone 119582 (TRAV27, TRAJ45)
CRSSGGGADGLTF

SEQ ID NO: 239164 - protein, 14 aa, Homo sapiens
  CDR3 for beta chain variable domain of TCR clone 119582 (TRBV7-8, TRBJ2-3)
CASSFPDGQDTQYF

SEQ ID NO: 239165 - protein, 12 aa, Homo sapiens
  CDR3 for alpha chain variable domain of TCR clone 119583 (TRAV2, TRAJ26)
GPPGDYGQNFVF

SEQ ID NO: 239166 - protein, 17 aa, Homo sapiens
  CDR3 for beta chain variable domain of TCR clone 119583 (TRBV11-2, TRBJ2-1)
CASSLYPPGVEYNEQFF

SEQ ID NO: 239167 - protein, 15 aa, Homo sapiens
  CDR3 for alpha chain variable domain of TCR clone 119584 (TRAV25, TRAJ53)
CPTSNSGGSNCKLTF

SEQ ID NO: 239168 - protein, 14 aa, Homo sapiens
  CDR3 for beta chain variable domain of TCR clone 119584 (TRBV11-2, TRBJ2-3)
CASSRLARTDTQYF

SEQ ID NO: 239169 - protein, 15 aa, Homo sapiens
  CDR3 for alpha chain variable domain of TCR clone 119585 (TRAV26-2, TRAJ28)
CILVESGAGGYQLTF

SEQ ID NO: 239170 - protein, 16 aa, Homo sapiens
  CDR3 for beta chain variable domain of TCR clone 119585 (TRBV4-2, TRBJ1-2)
CASSQEIGGASYGYTF

SEQ ID NO: 239171 - protein, 12 aa, Homo sapiens
  CDR3 for alpha chain variable domain of TCR clone 119586 (TRAV21, TRAJ31)
CAVWGNNARLMF

SEQ ID NO: 239172 - protein, 16 aa, Homo sapiens
  CDR3 for beta chain variable domain of TCR clone 119586 (TRBV27, TRBJ2-5)
CASSYCPGGQKETQYF

SEQ ID NO: 239173 - protein, 12 aa, Homo sapiens
  CDR3 for alpha chain variable domain of TCR clone 119587 (TRAV1-1, TRAJ8)
CVGGTGFQKLVF

SEQ ID NO: 239174 - protein, 13 aa, Homo sapiens
  CDR3 for beta chain variable domain of TCR clone 119587 (TRBV19, TRBJ1-2)
CASSQGQVYGYTF

SEQ ID NO: 239175 - protein, 15 aa, Homo sapiens
  CDR3 for alpha chain variable domain of TCR clone 119588 (TRAV12-1, TRAJ9)
CVVSFGDTGGFKTIF

SEQ ID NO: 239176 - protein, 13 aa, Homo sapiens
  CDR3 for beta chain variable domain of TCR clone 119588 (TRBV19, TRBJ1-1)
CASSPQMNTEAFF

SEQ ID NO: 239177 - protein, 15 aa, Homo sapiens
  CDR3 for alpha chain variable domain of TCR clone 119589 (TRAV25, TRAJ52)
CAGRPGGTSYGKLTF

SEQ ID NO: 239178 - protein, 17 aa, Homo sapiens
  CDR3 for beta chain variable domain of TCR clone 119589 (TRBV7-8, TRBJ2-6)
CASSAGTRGAGANVLTF

SEQ ID NO: 239179 - protein, 11 aa, Homo sapiens
  CDR3 for alpha chain variable domain of TCR clone 119590 (TRAV13-1, TRAJ31)
CSNRYNARLMF

SEQ ID NO: 239180 - protein, 11 aa, Homo sapiens
  CDR3 for beta chain variable domain of TCR clone 119590 (TRBV20-1, TRBJ2-7)
CSARTSYEQYF

SEQ ID NO: 239181 - protein, 13 aa, Homo sapiens
  CDR3 for alpha chain variable domain of TCR clone 119591 (TRAV17, TRAJ9)
CDTDYTGGFKTIF

SEQ ID NO: 239182 - protein, 13 aa, Homo sapiens
  CDR3 for beta chain variable domain of TCR clone 119591 (TRBV7-9, TRBJ1-2)
CASSLKQNYGYTF

SEQ ID NO: 239183 - protein, 23 aa, Homo sapiens
  CDR3 for alpha chain variable domain of TCR clone 119592 (TRAV26-1, TRAJ38)
CIAYNAGNNHIQNPDPAVYQLRD

SEQ ID NO: 239184 - protein, 13 aa, Homo sapiens
  CDR3 for beta chain variable domain of TCR clone 119592 (TRBV20-1, TRBJ1-1)
CSARGGGNTEAFF

SEQ ID NO: 239185 - protein, 16 aa, Homo sapiens
  CDR3 for alpha chain variable domain of TCR clone 119593 (TRAV16, TRAJ21)
CACGWATTSTNFTLYL

SEQ ID NO: 239186 - protein, 15 aa, Homo sapiens
  CDR3 for beta chain variable domain of TCR clone 119593 (TRBV19, TRBJ2-1)
CASSIQATSYNEQFF

SEQ ID NO: 239187 - protein, 11 aa, Homo sapiens
  CDR3 for alpha chain variable domain of TCR clone 119594 (TRAV17, TRAJ36)
CAPTGANNLFF

SEQ ID NO: 239188 - protein, 14 aa, Homo sapiens
  CDR3 for beta chain variable domain of TCR clone 119594 (TRBV6-1, TRBJ1-3)
CASVQGGGGNTIYF

SEQ ID NO: 239189 - protein, 14 aa, Homo sapiens
  CDR3 for alpha chain variable domain of TCR clone 119595 (TRAV16, TRAJ15)
CALSFNQAGTALIF

SEQ ID NO: 239190 - protein, 16 aa, Homo sapiens
  CDR3 for beta chain variable domain of TCR clone 119595 (TRBV9, TRBJ2-7)
CASSAGPGRSPYEQYF

SEQ ID NO: 239191 - protein, 14 aa, Homo sapiens
  CDR3 for alpha chain variable domain of TCR clone 119596 (TRAV35, TRAJ13)
CAGSPSGGYQKVTF

SEQ ID NO: 239192 - protein, 16 aa, Homo sapiens
  CDR3 for beta chain variable domain of TCR clone 119596 (TRBV18, TRBJ1-1)
CASSPGVGGRGGEAFF

SEQ ID NO: 239193 - protein, 14 aa, Homo sapiens
  CDR3 for alpha chain variable domain of TCR clone 119597 (TRAV23/DV6, TRAJ22)
CSASVSGSARQLTF

SEQ ID NO: 239194 - protein, 13 aa, Homo sapiens
  CDR3 for beta chain variable domain of TCR clone 119597 (TRBV11-2, TRBJ2-5)
CASSRGPSETQYF

SEQ ID NO: 239195 - protein, 11 aa, Homo sapiens
  CDR3 for alpha chain variable domain of TCR clone 119598 (TRAV25, TRAJ49)
CAGGTGNQFYF

SEQ ID NO: 239196 - protein, 12 aa, Homo sapiens
  CDR3 for beta chain variable domain of TCR clone 119598 (TRBV7-3, TRBJ2-1)
CASSFINNEQFF

SEQ ID NO: 239197 - protein, 13 aa, Homo sapiens
  CDR3 for alpha chain variable domain of TCR clone 119599 (TRAV8-6, TRAJ34)
CAVSDQGTEKLIF

SEQ ID NO: 239198 - protein, 14 aa, Homo sapiens
  CDR3 for beta chain variable domain of TCR clone 119599 (TRBV12-4, TRBJ1-1)
CASTWTGHDTEAFF

SEQ ID NO: 239199 - protein, 16 aa, Homo sapiens
  CDR3 for alpha chain variable domain of TCR clone 119600 (TRAV17, TRAJ28)
CATDEYSGAGSYQLTF

SEQ ID NO: 239200 - protein, 13 aa, Homo sapiens
  CDR3 for beta chain variable domain of TCR clone 119600 (TRBV7-9, TRBJ1-2)
CASRTCPNYGYTF

SEQ ID NO: 239201 - protein, 15 aa, Homo sapiens
  CDR3 for alpha chain variable domain of TCR clone 119601 (TRAV12-3, TRAJ6)
CAMSATTGGSYIPTF

SEQ ID NO: 239202 - protein, 19 aa, Homo sapiens
  CDR3 for beta chain variable domain of TCR clone 119601 (TRBV25-1, TRBJ2-2)
CAILVYRVDRGRKAGELFF

SEQ ID NO: 239203 - protein, 12 aa, Homo sapiens
  CDR3 for alpha chain variable domain of TCR clone 119602 (TRAV21, TRAJ34)
CAVRFNTDKLIF

SEQ ID NO: 239204 - protein, 11 aa, Homo sapiens
  CDR3 for beta chain variable domain of TCR clone 119602 (TRBV29-1, TRBJ2-5)
CSEDRTGTQYF

SEQ ID NO: 239205 - protein, 20 aa, Homo sapiens
  CDR3 for alpha chain variable domain of TCR clone 119603 (TRAV12-1, TRAJ42)
SSVIQPPTSVKGGSQGNLIF

SEQ ID NO: 239206 - protein, 18 aa, Homo sapiens
  CDR3 for beta chain variable domain of TCR clone 119603 (TRBV11-2, TRBJ2-3)
CASSLVGASRGAPNTQYF

SEQ ID NO: 239207 - protein, 15 aa, Homo sapiens
  CDR3 for alpha chain variable domain of TCR clone 119604 (TRAV4, TRAJ39)
CLVGPNNNAGNLLTF

SEQ ID NO: 239208 - protein, 13 aa, Homo sapiens
  CDR3 for beta chain variable domain of TCR clone 119604 (TRBV11-2, TRBJ2-5)
CASSSTGEETQYF

SEQ ID NO: 239209 - protein, 16 aa, Homo sapiens
  CDR3 for alpha chain variable domain of TCR clone 119605 (TRAV12-3, TRAJ10)
CAMKKGITGGGNKLTF

SEQ ID NO: 239210 - protein, 12 aa, Homo sapiens
  CDR3 for beta chain variable domain of TCR clone 119605 (TRBV11-2, TRBJ2-2)
CASSLPTGELFF

SEQ ID NO: 239211 - protein, 18 aa, Homo sapiens
  CDR3 for alpha chain variable domain of TCR clone 119606 (TRAV26-1, TRAJ23)
CIVRVGLEVWNQGGKLSF

SEQ ID NO: 239212 - protein, 15 aa, Homo sapiens
  CDR3 for beta chain variable domain of TCR clone 119606 (TRBV10-3, TRBJ2-3)
CAISDWDRDTDTQYF

SEQ ID NO: 239213 - protein, 10 aa, Homo sapiens
  CDR3 for alpha chain variable domain of TCR clone 119607 (TRAV1-2, TRAJ23)
CAGQGGKLIF

SEQ ID NO: 239214 - protein, 14 aa, Homo sapiens
  CDR3 for beta chain variable domain of TCR clone 119607 (TRBV6-1, TRBJ1-3)
CASVQGGGGNTIHF

SEQ ID NO: 239215 - protein, 13 aa, Homo sapiens
  CDR3 for alpha chain variable domain of TCR clone 119608 (TRAV12-3, TRAJ53)
CAMRGGSNYKLTF

SEQ ID NO: 239216 - protein, 14 aa, Homo sapiens
  CDR3 for beta chain variable domain of TCR clone 119608 (TRBV7-2, TRBJ1-1)
CASSFLTGTTEAFF

SEQ ID NO: 239217 - protein, 13 aa, Homo sapiens
  CDR3 for alpha chain variable domain of TCR clone 119609 (TRAV21, TRAJ52)
CAVRPSPAGGTSY

SEQ ID NO: 239218 - protein, 17 aa, Homo sapiens
  CDR3 for beta chain variable domain of TCR clone 119609 (TRBV13, TRBJ2-3)
CASSLPRVAGGRNTQYF

SEQ ID NO: 239219 - protein, 17 aa, Homo sapiens
  CDR3 for alpha chain variable domain of TCR clone 119610 (TRAV2, TRAJ22)
ILQMREADAAEQRQLTF

SEQ ID NO: 239220 - protein, 16 aa, Homo sapiens
  CDR3 for beta chain variable domain of TCR clone 119610 (TRBV2, TRBJ2-5)
CASSETQGVGEETQYF

SEQ ID NO: 239221 - protein, 16 aa, Homo sapiens
  CDR3 for alpha chain variable domain of TCR clone 119611 (TRAV8-2, TRAJ50)
CVVSDHMKTSYDKVIF

SEQ ID NO: 239222 - protein, 15 aa, Homo sapiens
  CDR3 for beta chain variable domain of TCR clone 119611 (TRBV7-2, TRBJ2-1)
CASSFQADEYSEQFF

SEQ ID NO: 239223 - protein, 14 aa, Homo sapiens
  CDR3 for alpha chain variable domain of TCR clone 119612 (TRAV8-3, TRAJ28)
CAVVPGAGSYQLTF

SEQ ID NO: 239224 - protein, 13 aa, Homo sapiens
  CDR3 for beta chain variable domain of TCR clone 119612 (TRBV7-9, TRBJ2-3)
CASSPGSTDTQYF

SEQ ID NO: 239225 - protein, 12 aa, Homo sapiens
  CDR3 for alpha chain variable domain of TCR clone 119613 (TRAV13-1, TRAJ21)
CSAKEGFNKFYF

SEQ ID NO: 239226 - protein, 13 aa, Homo sapiens
  CDR3 for beta chain variable domain of TCR clone 119613 (TRBV7-3, TRBJ1-1)
CASSQDWGAEAFF

SEQ ID NO: 239227 - protein, 14 aa, Homo sapiens
  CDR3 for alpha chain variable domain of TCR clone 119614 (TRAV21, TRAJ35)
CAVMPIGFGNVLHC

SEQ ID NO: 239228 - protein, 14 aa, Homo sapiens
  CDR3 for beta chain variable domain of TCR clone 119614 (TRBV7-2, TRBJ2-1)
CASSLGVGYNEQFF

SEQ ID NO: 239229 - protein, 17 aa, Homo sapiens
  CDR3 for alpha chain variable domain of TCR clone 119615 (TRAV3, TRAJ38)
CAVRDCLNAGNNRTLIW

SEQ ID NO: 239230 - protein, 13 aa, Homo sapiens
  CDR3 for beta chain variable domain of TCR clone 119615 (TRBV23-1, TRBJ1-4)
CASRGKFNEKLFF

SEQ ID NO: 239231 - protein, 14 aa, Homo sapiens
  CDR3 for alpha chain variable domain of TCR clone 119616 (TRAV12-2, TRAJ13)
FAVKKTGGYQKVTF

SEQ ID NO: 239232 - protein, 13 aa, Homo sapiens
  CDR3 for beta chain variable domain of TCR clone 119616 (TRBV10-3, TRBJ2-7)
CASKLAVNYEQYF

SEQ ID NO: 239233 - protein, 14 aa, Homo sapiens
  CDR3 for alpha chain variable domain of TCR clone 119617 (TRAV12-2, TRAJ17)
CAVLFKAAGNKLTF

SEQ ID NO: 239234 - protein, 20 aa, Homo sapiens
  CDR3 for beta chain variable domain of TCR clone 119617 (TRBV7-8, TRBJ2-2)
CASSHLFPGPNIHITGELFF

SEQ ID NO: 239235 - protein, 16 aa, Homo sapiens
  CDR3 for alpha chain variable domain of TCR clone 119618 (TRAV8-2, TRAJ7)
CVVSEGPYYGNNSLAF

SEQ ID NO: 239236 - protein, 13 aa, Homo sapiens
  CDR3 for beta chain variable domain of TCR clone 119618 (TRBV19, TRBJ2-1)
CASSMYRVNEQFF

SEQ ID NO: 239237 - protein, 13 aa, Homo sapiens
  CDR3 for alpha chain variable domain of TCR clone 119619 (TRAV12-1, TRAJ21)
CVVTLYNFNKFYF

SEQ ID NO: 239238 - protein, 20 aa, Homo sapiens
  CDR3 for beta chain variable domain of TCR clone 119619 (TRBV7-8, TRBJ2-1)
CASGLAHRLAGVRSYNEQFF

SEQ ID NO: 239239 - protein, 15 aa, Homo sapiens
  CDR3 for alpha chain variable domain of TCR clone 119620 (TRAV3, TRAJ22)
CAVRDRGGSARQLTF

SEQ ID NO: 239240 - protein, 16 aa, Homo sapiens
  CDR3 for beta chain variable domain of TCR clone 119620 (TRBV5-4, TRBJ2-3)
CASQQPGAGGSDAQYF

SEQ ID NO: 239241 - protein, 13 aa, Homo sapiens
  CDR3 for alpha chain variable domain of TCR clone 119621 (TRAV21, TRAJ15)
CAVANQAGTALIF

SEQ ID NO: 239242 - protein, 14 aa, Homo sapiens
  CDR3 for beta chain variable domain of TCR clone 119621 (TRBV27, TRBJ2-2)
CASSLGAATGELFF

SEQ ID NO: 239243 - protein, 14 aa, Homo sapiens
  CDR3 for alpha chain variable domain of TCR clone 119622 (TRAV1-2, TRAJ8)
CAVREDTGFQKLVF

SEQ ID NO: 239244 - protein, 13 aa, Homo sapiens
  CDR3 for beta chain variable domain of TCR clone 119622 (TRBV2, TRBJ1-1)
CARNPTGGCHAFF

SEQ ID NO: 239245 - protein, 14 aa, Homo sapiens
  CDR3 for alpha chain variable domain of TCR clone 119623 (TRAV20, TRAJ29)
CAVQAWVGNTPLVF

SEQ ID NO: 239246 - protein, 16 aa, Homo sapiens
  CDR3 for beta chain variable domain of TCR clone 119623 (TRBV19, TRBJ2-2)
CASRSPGTGATGELFF

SEQ ID NO: 239247 - protein, 18 aa, Homo sapiens
  CDR3 for alpha chain variable domain of TCR clone 119624 (TRAV13-1, TRAJ52)
CAASKRSAGGTSYGKLTF

SEQ ID NO: 239248 - protein, 13 aa, Homo sapiens
  CDR3 for beta chain variable domain of TCR clone 119624 (TRBV12-4, TRBJ1-2)
CASSFRQGKGYTF

SEQ ID NO: 239249 - protein, 13 aa, Homo sapiens
  CDR3 for alpha chain variable domain of TCR clone 119625 (TRAV26-1, TRAJ29)
CIVRRSGNTPLVF

SEQ ID NO: 239250 - protein, 16 aa, Homo sapiens
  CDR3 for beta chain variable domain of TCR clone 119625 (TRBV11-2, TRBJ2-7)
GASSLAPTGVNYEQYF

SEQ ID NO: 239251 - protein, 12 aa, Homo sapiens
  CDR3 for alpha chain variable domain of TCR clone 119626 (TRAV12-2, TRAJ31)
CAVNAPDARLMF

SEQ ID NO: 239252 - protein, 15 aa, Homo sapiens
  CDR3 for beta chain variable domain of TCR clone 119626 (TRBV20-1, TRBJ2-7)
CSAESGTSGAYEQYF

SEQ ID NO: 239253 - protein, 14 aa, Homo sapiens
  CDR3 for alpha chain variable domain of TCR clone 119627 (TRAV13-2, TRAJ15)
CAENPNQAGTALIF

SEQ ID NO: 239254 - protein, 16 aa, Homo sapiens
  CDR3 for beta chain variable domain of TCR clone 119627 (TRBV12-4, TRBJ1-2)
CASSPTATRKTRGYTF

SEQ ID NO: 239255 - protein, 18 aa, Homo sapiens
  CDR3 for alpha chain variable domain of TCR clone 119628 (TRAV21, TRAJ52)
CAVRPSPAGGTSYGKLAF

SEQ ID NO: 239256 - protein, 14 aa, Homo sapiens
  CDR3 for beta chain variable domain of TCR clone 119628 (TRBV20-1, TRBJ2-1)
CSAQIGGSANEQFF

SEQ ID NO: 239257 - protein, 14 aa, Homo sapiens
  CDR3 for alpha chain variable domain of TCR clone 119629 (TRAV1-1, TRAJ27)
CAVIYNTNAGKSTF

SEQ ID NO: 239258 - protein, 17 aa, Homo sapiens
  CDR3 for beta chain variable domain of TCR clone 119629 (TRBV19, TRBJ2-7)
CASSISFYDSYPYEQYF

SEQ ID NO: 239259 - protein, 14 aa, Homo sapiens
  CDR3 for alpha chain variable domain of TCR clone 119630 (TRAV27, TRAJ15)
CAGFDNQAGNALIF

SEQ ID NO: 239260 - protein, 11 aa, Homo sapiens
  CDR3 for beta chain variable domain of TCR clone 119630 (TRBV29-1, TRBJ1-1)
CSVEVGTRTFF

SEQ ID NO: 239261 - protein, 14 aa, Homo sapiens
  CDR3 for alpha chain variable domain of TCR clone 119631 (TRAV8-4, TRAJ5)
CAVSTDTGRRALTF

SEQ ID NO: 239262 - protein, 16 aa, Homo sapiens
  CDR3 for beta chain variable domain of TCR clone 119631 (TRBV6-1, TRBJ2-5)
CASSETLDRGAETQYF

SEQ ID NO: 239263 - protein, 11 aa, Homo sapiens
  CDR3 for alpha chain variable domain of TCR clone 119632 (TRAV13-1, TRAJ6)
CATLGSYIPTF

SEQ ID NO: 239264 - protein, 12 aa, Homo sapiens
  CDR3 for beta chain variable domain of TCR clone 119632 (TRBV11-2, TRBJ2-1)
CAGSPGNNEQFF

SEQ ID NO: 239265 - protein, 13 aa, Homo sapiens
  CDR3 for alpha chain variable domain of TCR clone 119633 (TRAV27, TRAJ54)
CAGAGQGAPKLVF

SEQ ID NO: 239266 - protein, 15 aa, Homo sapiens
  CDR3 for beta chain variable domain of TCR clone 119633 (TRBV18, TRBJ2-6)
CASSPSYAGANVLTF

SEQ ID NO: 239267 - protein, 12 aa, Homo sapiens
  CDR3 for alpha chain variable domain of TCR clone 119634 (TRAV16, TRAJ10)
CSRTGGGNKLTF

SEQ ID NO: 239268 - protein, 16 aa, Homo sapiens
  CDR3 for beta chain variable domain of TCR clone 119634 (TRBV7-3, TRBJ2-3)
CASSLSGYRPEDTQYF

SEQ ID NO: 239269 - protein, 12 aa, Homo sapiens
  CDR3 for alpha chain variable domain of TCR clone 119635 (TRAV21, TRAJ31)
CVLAGNNARLMF

SEQ ID NO: 239270 - protein, 16 aa, Homo sapiens
  CDR3 for beta chain variable domain of TCR clone 119635 (TRBV27, TRBJ2-5)
CASSFGPGGTKETQCF

SEQ ID NO: 239271 - protein, 14 aa, Homo sapiens
  CDR3 for alpha chain variable domain of TCR clone 119636 (TRAV1-2, TRAJ8)
CAVREDTGFQKLVF

SEQ ID NO: 239272 - protein, 15 aa, Homo sapiens
  CDR3 for beta chain variable domain of TCR clone 119636 (TRBV6-3, TRBJ2-7)
CPSSSPGTVFYEQYF

SEQ ID NO: 239273 - protein, 14 aa, Homo sapiens
  CDR3 for alpha chain variable domain of TCR clone 119637 (TRAV1-2, TRAJ16)
CAVHRFSDGQKLLF

SEQ ID NO: 239274 - protein, 15 aa, Homo sapiens
  CDR3 for beta chain variable domain of TCR clone 119637 (TRBV7-9, TRBJ1-6)
CASSSPGRGNSPLHF

SEQ ID NO: 239275 - protein, 14 aa, Homo sapiens
  CDR3 for alpha chain variable domain of TCR clone 119638 (TRAV8-1, TRAJ27)
CAVNVGTNAGKSTF

SEQ ID NO: 239276 - protein, 12 aa, Homo sapiens
  CDR3 for beta chain variable domain of TCR clone 119638 (TRBV11-2, TRBJ2-1)
CASSPGNNEQFF

SEQ ID NO: 239277 - protein, 15 aa, Homo sapiens
  CDR3 for alpha chain variable domain of TCR clone 119639 (TRAV17, TRAJ16)
CATALRFSDCQKLPF

SEQ ID NO: 239278 - protein, 15 aa, Homo sapiens
  CDR3 for beta chain variable domain of TCR clone 119639 (TRBV20-1, TRBJ1-1)
CSASRGVTGNTEAFF

SEQ ID NO: 239279 - protein, 13 aa, Homo sapiens
  CDR3 for alpha chain variable domain of TCR clone 119640 (TRAV12-3, TRAJ4)
CNEQAGGHNKLIF

SEQ ID NO: 239280 - protein, 15 aa, Homo sapiens
  CDR3 for beta chain variable domain of TCR clone 119640 (TRBV5-1, TRBJ1-1)
CASSLSDLGGTEAFF

SEQ ID NO: 239281 - protein, 14 aa, Homo sapiens
  CDR3 for alpha chain variable domain of TCR clone 119641 (TRAV12-1, TRAJ12)
CVVTRMDSSYKLIF

SEQ ID NO: 239282 - protein, 12 aa, Homo sapiens
  CDR3 for beta chain variable domain of TCR clone 119641 (TRBV18, TRBJ1-4)
CASSPSREKLFF

SEQ ID NO: 239283 - protein, 18 aa, Homo sapiens
  CDR3 for alpha chain variable domain of TCR clone 119642 (TRAV26-1, TRAJ23)
CIVRVGLEVWNQGGKLIF

SEQ ID NO: 239284 - protein, 16 aa, Homo sapiens
  CDR3 for beta chain variable domain of TCR clone 119642 (TRBV12-4, TRBJ2-5)
CASSFFVRARQETQYF

SEQ ID NO: 239285 - protein, 15 aa, Homo sapiens
  CDR3 for alpha chain variable domain of TCR clone 119643 (TRAV38-2/DV8, TRAJ31)
CAYRSPRNNNARLTF

SEQ ID NO: 239286 - protein, 13 aa, Homo sapiens
  CDR3 for beta chain variable domain of TCR clone 119643 (TRBV27, TRBJ2-7)
CASSPSRDYEQYF

SEQ ID NO: 239287 - protein, 12 aa, Homo sapiens
  CDR3 for alpha chain variable domain of TCR clone 119644 (TRAV8-3, TRAJ26)
CAGDNYCQNFVF

SEQ ID NO: 239288 - protein, 11 aa, Homo sapiens
  CDR3 for beta chain variable domain of TCR clone 119644 (TRBV29-1, TRBJ2-5)
CSEDRTGTQYF

SEQ ID NO: 239289 - protein, 15 aa, Homo sapiens
  CDR3 for alpha chain variable domain of TCR clone 119645 (TRAV17, TRAJ57)
CATGPSQGGSEKLVF

SEQ ID NO: 239290 - protein, 14 aa, Homo sapiens
  CDR3 for beta chain variable domain of TCR clone 119645 (TRBV7-2, TRBJ2-1)
CASSLVAGRNEQFF

SEQ ID NO: 239291 - protein, 11 aa, Homo sapiens
  CDR3 for alpha chain variable domain of TCR clone 119646 (TRAV12-1, TRAJ30)
CVVNGQDKIIF

SEQ ID NO: 239292 - protein, 16 aa, Homo sapiens
  CDR3 for beta chain variable domain of TCR clone 119646 (TRBV7-9, TRBJ2-1)
CASSLVSGPSYNEQFF

SEQ ID NO: 239293 - protein, 15 aa, Homo sapiens
  CDR3 for alpha chain variable domain of TCR clone 119647 (TRAV8-3, TRAJ45)
CASSYSGGGADGLTF

SEQ ID NO: 239294 - protein, 14 aa, Homo sapiens
  CDR3 for beta chain variable domain of TCR clone 119647 (TRBV24-1, TRBJ1-1)
CATSIPRGDTEAFF

SEQ ID NO: 239295 - protein, 14 aa, Homo sapiens
  CDR3 for alpha chain variable domain of TCR clone 119648 (TRAV16, TRAJ33)
CALSAMDSSYQLIW

SEQ ID NO: 239296 - protein, 12 aa, Homo sapiens
  CDR3 for beta chain variable domain of TCR clone 119648 (TRBV5-1, TRBJ1-2)
CASSQDTYGYTF

SEQ ID NO: 239297 - protein, 12 aa, Homo sapiens
  CDR3 for alpha chain variable domain of TCR clone 119649 (TRAV1-2, TRAJ42)
CVAGGSQGNLIF

SEQ ID NO: 239298 - protein, 16 aa, Homo sapiens
  CDR3 for beta chain variable domain of TCR clone 119649 (TRBV20-1, TRBJ1-4)
CSAPGQGLLTNEKLFF

SEQ ID NO: 239299 - protein, 14 aa, Homo sapiens
  CDR3 for alpha chain variable domain of TCR clone 119650 (TRAV8-1, TRAJ5)
CAVRTDTGRRALTF

SEQ ID NO: 239300 - protein, 14 aa, Homo sapiens
  CDR3 for beta chain variable domain of TCR clone 119650 (TRBV6-1, TRBJ1-3)
CASVQGGGGNTIYF

SEQ ID NO: 239301 - protein, 17 aa, Homo sapiens
  CDR3 for alpha chain variable domain of TCR clone 119651 (TRAV38-2/DV8, TRAJ28)
CAYRFAYSGAGSYQLTF

SEQ ID NO: 239302 - protein, 13 aa, Homo sapiens
  CDR3 for beta chain variable domain of TCR clone 119651 (TRBV7-3, TRBJ1-1)
CASSQDWGAEAFF

SEQ ID NO: 239303 - protein, 11 aa, Homo sapiens
  CDR3 for alpha chain variable domain of TCR clone 119652 (TRAV17, TRAJ31)
CATDRTARLMF

SEQ ID NO: 239304 - protein, 14 aa, Homo sapiens
  CDR3 for beta chain variable domain of TCR clone 119652 (TRBV2, TRBJ2-3)
CASSEGQNTDTQYF

SEQ ID NO: 239305 - protein, 16 aa, Homo sapiens
  CDR3 for alpha chain variable domain of TCR clone 119653 (TRAV8-3, TRAJ13)
CAVGAYPSGGYQKVTF

SEQ ID NO: 239306 - protein, 15 aa, Homo sapiens
  CDR3 for beta chain variable domain of TCR clone 119653 (TRBV19, TRBJ1-5)
CASSIVWADNRPQHF

SEQ ID NO: 239307 - protein, 11 aa, Homo sapiens
  CDR3 for alpha chain variable domain of TCR clone 119654 (TRAV23/DV6, TRAJ58)
CAARLLRGETS

SEQ ID NO: 239308 - protein, 14 aa, Homo sapiens
  CDR3 for beta chain variable domain of TCR clone 119654 (TRBV25-1, TRBJ1-1)
CASTHLGGNTEAFF

SEQ ID NO: 239309 - protein, 17 aa, Homo sapiens
  CDR3 for alpha chain variable domain of TCR clone 119655 (TRAV3, TRAJ6)
CAVRDGPRAGGSYIPKF

SEQ ID NO: 239310 - protein, 18 aa, Homo sapiens
  CDR3 for beta chain variable domain of TCR clone 119655 (TRBV7-9, TRBJ2-7)
CASSLTTSGSRTWYEQYF

SEQ ID NO: 239311 - protein, 13 aa, Homo sapiens
  CDR3 for alpha chain variable domain of TCR clone 119656 (TRAV1-2, TRAJ9)
CAVLNTGGFKTIF

SEQ ID NO: 239312 - protein, 16 aa, Homo sapiens
  CDR3 for beta chain variable domain of TCR clone 119656 (TRBV19, TRBJ2-2)
CASRSPGTGATGELFF

SEQ ID NO: 239313 - protein, 17 aa, Homo sapiens
  CDR3 for alpha chain variable domain of TCR clone 119657 (TRAV27, TRAJ18)
CAGLHRGRGSTLGRIYF

SEQ ID NO: 239314 - protein, 14 aa, Homo sapiens
  CDR3 for beta chain variable domain of TCR clone 119657 (TRBV20-1, TRBJ1-5)
CSARGRGSNQPQHF

SEQ ID NO: 239315 - protein, 15 aa, Homo sapiens
  CDR3 for alpha chain variable domain of TCR clone 119658 (TRAV3, TRAJ3)
CAVRDMSSSASKIIF

SEQ ID NO: 239316 - protein, 15 aa, Homo sapiens
  CDR3 for beta chain variable domain of TCR clone 119658 (TRBV18, TRBJ2-1)
CASSPPSASYNEQFF

SEQ ID NO: 239317 - protein, 13 aa, Homo sapiens
  CDR3 for alpha chain variable domain of TCR clone 119659 (TRAV12-1, TRAJ13)
CVVTSGGYQKVTF

SEQ ID NO: 239318 - protein, 14 aa, Homo sapiens
  CDR3 for beta chain variable domain of TCR clone 119659 (TRBV7-6, TRBJ2-3)
CASSLGTVTDTQYF

SEQ ID NO: 239319 - protein, 14 aa, Homo sapiens
  CDR3 for alpha chain variable domain of TCR clone 119660 (TRAV17, TRAJ6)
CATDASGGSYIPTF

SEQ ID NO: 239320 - protein, 19 aa, Homo sapiens
  CDR3 for beta chain variable domain of TCR clone 119660 (TRBV4-3, TRBJ2-7)
CASSQEFIGWQVTPYDQYF

SEQ ID NO: 239321 - protein, 14 aa, Homo sapiens
  CDR3 for alpha chain variable domain of TCR clone 119661 (TRAV1-2, TRAJ8)
CAVREDTGFQKLVF

SEQ ID NO: 239322 - protein, 14 aa, Homo sapiens
  CDR3 for beta chain variable domain of TCR clone 119661 (TRBV29-1, TRBJ1-4)
CSVTGTGGNEKLSF

SEQ ID NO: 239323 - protein, 10 aa, Homo sapiens
  CDR3 for alpha chain variable domain of TCR clone 119662 (TRAV1-2, TRAJ31)
CAFFDARLMF

SEQ ID NO: 239324 - protein, 13 aa, Homo sapiens
  CDR3 for beta chain variable domain of TCR clone 119662 (TRBV20-1, TRBJ2-2)
CSASAAGTGELFL

SEQ ID NO: 239325 - protein, 13 aa, Homo sapiens
  CDR3 for alpha chain variable domain of TCR clone 119663 (TRAV12-3, TRAJ53)
CALRGGSNYKLTF

SEQ ID NO: 239326 - protein, 15 aa, Homo sapiens
  CDR3 for beta chain variable domain of TCR clone 119663 (TRBV2, TRBJ2-1)
CATQARLVMIGEQFF

SEQ ID NO: 239327 - protein, 15 aa, Homo sapiens
  CDR3 for alpha chain variable domain of TCR clone 119664 (TRAV17, TRAJ57)
CATGPSQGVSEKLVF

SEQ ID NO: 239328 - protein, 16 aa, Homo sapiens
  CDR3 for beta chain variable domain of TCR clone 119664 (TRBV12-5, TRBJ2-5)
CASGPRTSGNQETQYF

SEQ ID NO: 239329 - protein, 12 aa, Homo sapiens
  CDR3 for alpha chain variable domain of TCR clone 119665 (TRAV12-2, TRAJ8)
CAVNTGFQKLVF

SEQ ID NO: 239330 - protein, 15 aa, Homo sapiens
  CDR3 for beta chain variable domain of TCR clone 119665 (TRBV27, TRBJ2-1)
CASSNGGGSSNEQFF

SEQ ID NO: 239331 - protein, 12 aa, Homo sapiens
  CDR3 for alpha chain variable domain of TCR clone 119666 (TRAV30, TRAJ43)
CGTEERGNDMRF

SEQ ID NO: 239332 - protein, 13 aa, Homo sapiens
  CDR3 for beta chain variable domain of TCR clone 119666 (TRBV11-2, TRBJ2-5)
CASSSTGEETQYF

SEQ ID NO: 239333 - protein, 16 aa, Homo sapiens
  CDR3 for alpha chain variable domain of TCR clone 119667 (TRAV26-1, TRAJ32)
CIVRTNYGGATNKLIF

SEQ ID NO: 239334 - protein, 14 aa, Homo sapiens
  CDR3 for beta chain variable domain of TCR clone 119667 (TRBV7-6, TRBJ2-3)
CASSLGTVTDTQYF

SEQ ID NO: 239335 - protein, 10 aa, Homo sapiens
  CDR3 for alpha chain variable domain of TCR clone 119668 (TRAV8-4, TRAJ43)
CAVSADDMRF

SEQ ID NO: 239336 - protein, 13 aa, Homo sapiens
  CDR3 for beta chain variable domain of TCR clone 119668 (TRBV4-2, TRBJ1-1)
CASSQAGNTEAFF

SEQ ID NO: 239337 - protein, 15 aa, Homo sapiens
  CDR3 for alpha chain variable domain of TCR clone 119669 (TRAV25, TRAJ52)
CAGRPGGTSCGKLTF

SEQ ID NO: 239338 - protein, 17 aa, Homo sapiens
  CDR3 for beta chain variable domain of TCR clone 119669 (TRBV7-8, TRBJ2-6)
CASSAGTGAAGANVRTF

SEQ ID NO: 239339 - protein, 14 aa, Homo sapiens
  CDR3 for alpha chain variable domain of TCR clone 119670 (TRAV26-1, TRAJ49)
CIVRLTNTGNQFHF

SEQ ID NO: 239340 - protein, 11 aa, Homo sapiens
  CDR3 for beta chain variable domain of TCR clone 119670 (TRBV29-1, TRBJ2-5)
CSEDRTGTQYF

SEQ ID NO: 239341 - protein, 14 aa, Homo sapiens
  CDR3 for alpha chain variable domain of TCR clone 119671 (TRAV1-2, TRAJ16)
CAVNRFSDGQKLLF

SEQ ID NO: 239342 - protein, 15 aa, Homo sapiens
  CDR3 for beta chain variable domain of TCR clone 119671 (TRBV9, TRBJ1-6)
CASSVAGTGDSSLHF

SEQ ID NO: 239343 - protein, 14 aa, Homo sapiens
  CDR3 for alpha chain variable domain of TCR clone 119672 (TRAV12-2, TRAJ13)
CAVKRTGGYQKVTF

SEQ ID NO: 239344 - protein, 13 aa, Homo sapiens
  CDR3 for beta chain variable domain of TCR clone 119672 (TRBV12-4, TRBJ2-7)
CASSPTETYEQYF

SEQ ID NO: 239345 - protein, 12 aa, Homo sapiens
  CDR3 for alpha chain variable domain of TCR clone 119673 (TRAV12-3, TRAJ17)
CAMTLTGNKLTF

SEQ ID NO: 239346 - protein, 15 aa, Homo sapiens
  CDR3 for beta chain variable domain of TCR clone 119673 (TRBV2, TRBJ2-1)
CASSELAGGYNEQFF

SEQ ID NO: 239347 - protein, 15 aa, Homo sapiens
  CDR3 for alpha chain variable domain of TCR clone 119674 (TRAV12-1, TRAJ44)
CVADLPTGTASKLTS

SEQ ID NO: 239348 - protein, 13 aa, Homo sapiens
  CDR3 for beta chain variable domain of TCR clone 119674 (TRBV6-5, TRBJ2-5)
CASSPQGGETQYF

SEQ ID NO: 239349 - protein, 13 aa, Homo sapiens
  CDR3 for alpha chain variable domain of TCR clone 119675 (TRAV17, TRAJ40)
CATAPGGTYKYIF

SEQ ID NO: 239350 - protein, 12 aa, Homo sapiens
  CDR3 for beta chain variable domain of TCR clone 119675 (TRBV2, TRBJ1-5)
CASSENRTPQQF

SEQ ID NO: 239351 - protein, 13 aa, Homo sapiens
  CDR3 for alpha chain variable domain of TCR clone 119676 (TRAV21, TRAJ37)
CAVSSGNTGKLIF

SEQ ID NO: 239352 - protein, 17 aa, Homo sapiens
  CDR3 for beta chain variable domain of TCR clone 119676 (TRBV5-1, TRBJ2-5)
CTSSLLGLAANQETQYF

SEQ ID NO: 239353 - protein, 14 aa, Homo sapiens
  CDR3 for alpha chain variable domain of TCR clone 119677 (TRAV12-2, TRAJ13)
CAVKKTGGYQKVTF

SEQ ID NO: 239354 - protein, 16 aa, Homo sapiens
  CDR3 for beta chain variable domain of TCR clone 119677 (TRBV28, TRBJ2-1)
CASSPPEYPRDNEQFF

SEQ ID NO: 239355 - protein, 17 aa, Homo sapiens
  CDR3 for alpha chain variable domain of TCR clone 119678 (TRAV4, TRAJ18)
CLVGERSVGSTLGRLYF

SEQ ID NO: 239356 - protein, 14 aa, Homo sapiens
  CDR3 for beta chain variable domain of TCR clone 119678 (TRBV6-5, TRBJ1-2)
CASSYDGTGGSYTF

SEQ ID NO: 239357 - protein, 16 aa, Homo sapiens
  CDR3 for alpha chain variable domain of TCR clone 119679 (TRAV27, TRAJ13)
CAGAKSDSGGYQKVTF

SEQ ID NO: 239358 - protein, 15 aa, Homo sapiens
  CDR3 for beta chain variable domain of TCR clone 119679 (TRBV29-1, TRBJ2-1)
CSVVRHALFYNEQFF

SEQ ID NO: 239359 - protein, 12 aa, Homo sapiens
  CDR3 for alpha chain variable domain of TCR clone 119680 (TRAV23/DV6, TRAJ49)
CAASSTGNQFYF

SEQ ID NO: 239360 - protein, 15 aa, Homo sapiens
  CDR3 for beta chain variable domain of TCR clone 119680 (TRBV27, TRBJ1-5)
CASSLGTGFDQPQHF

SEQ ID NO: 239361 - protein, 14 aa, Homo sapiens
  CDR3 for alpha chain variable domain of TCR clone 119681 (TRAV3, TRAJ17)
CAVRDAAAGNKLTS

SEQ ID NO: 239362 - protein, 13 aa, Homo sapiens
  CDR3 for beta chain variable domain of TCR clone 119681 (TRBV2, TRBJ1-1)
CASSVSGYTEAFF

SEQ ID NO: 239363 - protein, 15 aa, Homo sapiens
  CDR3 for alpha chain variable domain of TCR clone 119682 (TRAV2, TRAJ15)
CAVGGPNQAGTALIF

SEQ ID NO: 239364 - protein, 13 aa, Homo sapiens
  CDR3 for beta chain variable domain of TCR clone 119682 (TRBV2, TRBJ1-5)
YATAGPGNQPQHF

SEQ ID NO: 239365 - protein, 16 aa, Homo sapiens
  CDR3 for alpha chain variable domain of TCR clone 119683 (TRAV23/DV6, TRAJ9)
CAVSIGGNTGGFKTIF

SEQ ID NO: 239366 - protein, 14 aa, Homo sapiens
  CDR3 for beta chain variable domain of TCR clone 119683 (TRBV9, TRBJ2-7)
CASSVGVGSYEQYF

SEQ ID NO: 239367 - protein, 14 aa, Homo sapiens
  CDR3 for alpha chain variable domain of TCR clone 119684 (TRAV21, TRAJ28)
CAVGSGAGSYQLTF

SEQ ID NO: 239368 - protein, 14 aa, Homo sapiens
  CDR3 for beta chain variable domain of TCR clone 119684 (TRBV18, TRBJ1-4)
CASSPGLNGEKLFF

SEQ ID NO: 239369 - protein, 12 aa, Homo sapiens
  CDR3 for alpha chain variable domain of TCR clone 119685 (TRAV27, TRAJ13)
CAGVRGYQKVTF

SEQ ID NO: 239370 - protein, 14 aa, Homo sapiens
  CDR3 for beta chain variable domain of TCR clone 119685 (TRBV20-1, TRBJ2-1)
CSAQIGGSANEQFF

SEQ ID NO: 239371 - protein, 13 aa, Homo sapiens
  CDR3 for alpha chain variable domain of TCR clone 119686 (TRAV13-1, TRAJ39)
FAASIWAGNMLTF

SEQ ID NO: 239372 - protein, 13 aa, Homo sapiens
  CDR3 for beta chain variable domain of TCR clone 119686 (TRBV11-2, TRBJ1-3)
CASSLEPVNTIYF

SEQ ID NO: 239373 - protein, 14 aa, Homo sapiens
  CDR3 for alpha chain variable domain of TCR clone 119687 (TRAV13-2, TRAJ43)
CAEIPTYNNNDMRI

SEQ ID NO: 239374 - protein, 15 aa, Homo sapiens
  CDR3 for beta chain variable domain of TCR clone 119687 (TRBV7-9, TRBJ2-2)
CASGPLDTFPGELFF

SEQ ID NO: 239375 - protein, 14 aa, Homo sapiens
  CDR3 for alpha chain variable domain of TCR clone 119688 (TRAV8-2, TRAJ37)
CVVSISGNTGKLIF

SEQ ID NO: 239376 - protein, 12 aa, Homo sapiens
  CDR3 for beta chain variable domain of TCR clone 119688 (TRBV11-2, TRBJ2-2)
CASSLPTGELFF

SEQ ID NO: 239377 - protein, 15 aa, Homo sapiens
  CDR3 for alpha chain variable domain of TCR clone 119689 (TRAV26-1, TRAJ22)
CIVRVSFWFCKATDL

SEQ ID NO: 239378 - protein, 12 aa, Homo sapiens
  CDR3 for beta chain variable domain of TCR clone 119689 (TRBV11-2, TRBJ2-2)
RASSLGGGELFF

SEQ ID NO: 239379 - protein, 15 aa, Homo sapiens
  CDR3 for alpha chain variable domain of TCR clone 119690 (TRAV8-3, TRAJ15)
CAVGAPNQAGTALIF

SEQ ID NO: 239380 - protein, 14 aa, Homo sapiens
  CDR3 for beta chain variable domain of TCR clone 119690 (TRBV20-1, TRBJ2-1)
CSANDEASYNEQFF

SEQ ID NO: 239381 - protein, 14 aa, Homo sapiens
  CDR3 for alpha chain variable domain of TCR clone 119691 (TRAV13-2, TRAJ10)
CAENITGGGNKLTF

SEQ ID NO: 239382 - protein, 17 aa, Homo sapiens
  CDR3 for beta chain variable domain of TCR clone 119691 (TRBV11-2, TRBJ2-1)
CASSLYPPGVEYNEQFF

SEQ ID NO: 239383 - protein, 12 aa, Homo sapiens
  CDR3 for alpha chain variable domain of TCR clone 119692 (TRAV36/DV7, TRAJ54)
CAVVRGAQKLVF

SEQ ID NO: 239384 - protein, 14 aa, Homo sapiens
  CDR3 for beta chain variable domain of TCR clone 119692 (TRBV12-5, TRBJ2-5)
CASGSRTHQETQYF

SEQ ID NO: 239385 - protein, 13 aa, Homo sapiens
  CDR3 for alpha chain variable domain of TCR clone 119693 (TRAV16, TRAJ22)
SAMLAGSARQLTF

SEQ ID NO: 239386 - protein, 20 aa, Homo sapiens
  CDR3 for beta chain variable domain of TCR clone 119693 (TRBV7-8, TRBJ2-2)
CASSHLFPGPTIHITGELFF

SEQ ID NO: 239387 - protein, 13 aa, Homo sapiens
  CDR3 for alpha chain variable domain of TCR clone 119694 (TRAV1-2, TRAJ9)
CAALNTGGFKTIF

SEQ ID NO: 239388 - protein, 17 aa, Homo sapiens
  CDR3 for beta chain variable domain of TCR clone 119694 (TRBV11-2, TRBJ2-1)
CASSLYPPGVEYSEQFF

SEQ ID NO: 239389 - protein, 11 aa, Homo sapiens
  CDR3 for alpha chain variable domain of TCR clone 119695 (TRAV12-1, TRAJ30)
CVVNGQDKIIF

SEQ ID NO: 239390 - protein, 14 aa, Homo sapiens
  CDR3 for beta chain variable domain of TCR clone 119695 (TRBV18, TRBJ2-5)
CASSPGVSQETQYF

SEQ ID NO: 239391 - protein, 14 aa, Homo sapiens
  CDR3 for alpha chain variable domain of TCR clone 119696 (TRAV9-2, TRAJ39)
CALYIYNAGNMLTF

SEQ ID NO: 239392 - protein, 15 aa, Homo sapiens
  CDR3 for beta chain variable domain of TCR clone 119696 (TRBV7-2, TRBJ2-2)
CASSPTGANTGELFF

SEQ ID NO: 239393 - protein, 11 aa, Homo sapiens
  CDR3 for alpha chain variable domain of TCR clone 119697 (TRAV3, TRAJ21)
CAVGNFNKFYF

SEQ ID NO: 239394 - protein, 13 aa, Homo sapiens
  CDR3 for beta chain variable domain of TCR clone 119697 (TRBV7-9, TRBJ1-2)
CAISLKQNYGYTF

SEQ ID NO: 239395 - protein, 10 aa, Homo sapiens
  CDR3 for alpha chain variable domain of TCR clone 119698 (TRAV12-1, TRAJ33)
CVASNYQLIW

SEQ ID NO: 239396 - protein, 14 aa, Homo sapiens
  CDR3 for beta chain variable domain of TCR clone 119698 (TRBV7-2, TRBJ2-7)
CASRSQGAAYEQYF

SEQ ID NO: 239397 - protein, 16 aa, Homo sapiens
  CDR3 for alpha chain variable domain of TCR clone 119699 (TRAV30, TRAJ24)
CGTEIVDADSWGKFQF

SEQ ID NO: 239398 - protein, 13 aa, Homo sapiens
  CDR3 for beta chain variable domain of TCR clone 119699 (TRBV7-9, TRBJ1-1)
CASSLSGETEAFF

SEQ ID NO: 239399 - protein, 13 aa, Homo sapiens
  CDR3 for alpha chain variable domain of TCR clone 119700 (TRAV12-1, TRAJ21)
WVVIGDNFNKFYF

SEQ ID NO: 239400 - protein, 14 aa, Homo sapiens
  CDR3 for beta chain variable domain of TCR clone 119700 (TRBV7-3, TRBJ2-2)
CASSLYPLTGELFF

SEQ ID NO: 239401 - protein, 14 aa, Homo sapiens
  CDR3 for alpha chain variable domain of TCR clone 119701 (TRAV2, TRAJ9)
CAVEDRSGGFKTIF

SEQ ID NO: 239402 - protein, 12 aa, Homo sapiens
  CDR3 for beta chain variable domain of TCR clone 119701 (TRBV12-4, TRBJ1-2)
CASSFIWLHLRF

SEQ ID NO: 239403 - protein, 17 aa, Homo sapiens
  CDR3 for alpha chain variable domain of TCR clone 119702 (TRAV4, TRAJ18)
CLVGERSVGSTLGRLYF

SEQ ID NO: 239404 - protein, 13 aa, Homo sapiens
  CDR3 for beta chain variable domain of TCR clone 119702 (TRBV7-9, TRBJ1-2)
CASSLKQNYGYTF

SEQ ID NO: 239405 - protein, 12 aa, Homo sapiens
  CDR3 for alpha chain variable domain of TCR clone 119703 (TRAV12-3, TRAJ17)
CAMTLTGNKLTF

SEQ ID NO: 239406 - protein, 14 aa, Homo sapiens
  CDR3 for beta chain variable domain of TCR clone 119703 (TRBV28, TRBJ2-1)
CASSLLQGTNEQFF

SEQ ID NO: 239407 - protein, 15 aa, Homo sapiens
  CDR3 for alpha chain variable domain of TCR clone 119704 (TRAV8-3, TRAJ37)
CAVGGLSSNTGKLIF

SEQ ID NO: 239408 - protein, 16 aa, Homo sapiens
  CDR3 for beta chain variable domain of TCR clone 119704 (TRBV19, TRBJ2-2)
CASRSPGTGATGELFF

SEQ ID NO: 239409 - protein, 13 aa, Homo sapiens
  CDR3 for alpha chain variable domain of TCR clone 119705 (TRAV12-1, TRAJ17)
CVVNKAAGNKLTF

SEQ ID NO: 239410 - protein, 17 aa, Homo sapiens
  CDR3 for beta chain variable domain of TCR clone 119705 (TRBV28, TRBJ2-1)
CASSFIPGGSSYNEQFF

SEQ ID NO: 239411 - protein, 15 aa, Homo sapiens
  CDR3 for alpha chain variable domain of TCR clone 119706 (TRAV12-3, TRAJ6)
CAMSAASGGSYIPTF

SEQ ID NO: 239412 - protein, 16 aa, Homo sapiens
  CDR3 for beta chain variable domain of TCR clone 119706 (TRBV12-4, TRBJ2-2)
CTSVPAVLQGPGSCFF

SEQ ID NO: 239413 - protein, 15 aa, Homo sapiens
  CDR3 for alpha chain variable domain of TCR clone 119707 (TRAV8-3, TRAJ11)
CAVGLLNSGHSTLTF

SEQ ID NO: 239414 - protein, 23 aa, Homo sapiens
  CDR3 for beta chain variable domain of TCR clone 119707 (TRBV7-9, TRBJ1-2)
EAQLEKSRLLSDRFSSGEDGYTF

SEQ ID NO: 239415 - protein, 15 aa, Homo sapiens
  CDR3 for alpha chain variable domain of TCR clone 119708 (TRAV23/DV6, TRAJ18)
CAASFRGSTLGGLYF

SEQ ID NO: 239416 - protein, 13 aa, Homo sapiens
  CDR3 for beta chain variable domain of TCR clone 119708 (TRBV28, TRBJ2-7)
CAILDRAGGEQYF

SEQ ID NO: 239417 - protein, 14 aa, Homo sapiens
  CDR3 for alpha chain variable domain of TCR clone 119709 (TRAV1-2, TRAJ16)
CAVNRFSDGQKLLF

SEQ ID NO: 239418 - protein, 13 aa, Homo sapiens
  CDR3 for beta chain variable domain of TCR clone 119709 (TRBV7-6, TRBJ2-7)
CASSLDHTREQYF

SEQ ID NO: 239419 - protein, 12 aa, Homo sapiens
  CDR3 for alpha chain variable domain of TCR clone 119710 (TRAV2, TRAJ31)
CAVEDNHARLMF

SEQ ID NO: 239420 - protein, 16 aa, Homo sapiens
  CDR3 for beta chain variable domain of TCR clone 119710 (TRBV10-3, TRBJ2-1)
CAISGVGDGGGGEQFF

SEQ ID NO: 239421 - protein, 13 aa, Homo sapiens
  CDR3 for alpha chain variable domain of TCR clone 119711 (TRAV13-2, TRAJ13)
CAERPGGLPESYL

SEQ ID NO: 239422 - protein, 14 aa, Homo sapiens
  CDR3 for beta chain variable domain of TCR clone 119711 (TRBV23-1, TRBJ2-5)
CASSFLRSQETQYF

SEQ ID NO: 239423 - protein, 15 aa, Homo sapiens
  CDR3 for alpha chain variable domain of TCR clone 119712 (TRAV3, TRAJ3)
CAVRDRDSSASKIIF

SEQ ID NO: 239424 - protein, 11 aa, Homo sapiens
  CDR3 for beta chain variable domain of TCR clone 119712 (TRBV12-4, TRBJ2-3)
CASTATDTQYF

SEQ ID NO: 239425 - protein, 15 aa, Homo sapiens
  CDR3 for alpha chain variable domain of TCR clone 119713 (TRAV26-1, TRAJ44)
CIVRANTGTASKLTF

SEQ ID NO: 239426 - protein, 14 aa, Homo sapiens
  CDR3 for beta chain variable domain of TCR clone 119713 (TRBV7-9, TRBJ2-1)
CASSPRDSLYEQFF

SEQ ID NO: 239427 - protein, 15 aa, Homo sapiens
  CDR3 for alpha chain variable domain of TCR clone 119714 (TRAV21, TRAJ53)
CATLNSGGSKYKLTF

SEQ ID NO: 239428 - protein, 16 aa, Homo sapiens
  CDR3 for beta chain variable domain of TCR clone 119714 (TRBV20-1, TRBJ1-2)
CSASMGQGVANYGYTF

SEQ ID NO: 239429 - protein, 16 aa, Homo sapiens
  CDR3 for alpha chain variable domain of TCR clone 119715 (TRAV3, TRAJ21)
CAVRDIERGNFNKFYF

SEQ ID NO: 239430 - protein, 16 aa, Homo sapiens
  CDR3 for beta chain variable domain of TCR clone 119715 (TRBV7-3, TRBJ2-2)
CASSLKRGTLSGELFF

SEQ ID NO: 239431 - protein, 14 aa, Homo sapiens
  CDR3 for alpha chain variable domain of TCR clone 119716 (TRAV17, TRAJ16)
CATADFSEGQKLLF

SEQ ID NO: 239432 - protein, 15 aa, Homo sapiens
  CDR3 for beta chain variable domain of TCR clone 119716 (TRBV18, TRBJ2-1)
CASSPPSASYNEQFF

SEQ ID NO: 239433 - protein, 12 aa, Homo sapiens
  CDR3 for alpha chain variable domain of TCR clone 119717 (TRAV8-3, TRAJ20)
CAVGANDYKLSF

SEQ ID NO: 239434 - protein, 13 aa, Homo sapiens
  CDR3 for beta chain variable domain of TCR clone 119717 (TRBV19, TRBJ1-1)
CASSFGRMPEAFF

SEQ ID NO: 239435 - protein, 15 aa, Homo sapiens
  CDR3 for alpha chain variable domain of TCR clone 119718 (TRAV17, TRAJ52)
CATEAGGNSYGKLTF

SEQ ID NO: 239436 - protein, 14 aa, Homo sapiens
  CDR3 for beta chain variable domain of TCR clone 119718 (TRBV28, TRBJ1-5)
CASSLGVLVKPQHF

SEQ ID NO: 239437 - protein, 16 aa, Homo sapiens
  CDR3 for alpha chain variable domain of TCR clone 119719 (TRAV4, TRAJ8)
CLVGDSGNTGFQKLVF

SEQ ID NO: 239438 - protein, 13 aa, Homo sapiens
  CDR3 for beta chain variable domain of TCR clone 119719 (TRBV9, TRBJ2-1)
CASSVGQGGKQFF

SEQ ID NO: 239439 - protein, 17 aa, Homo sapiens
  CDR3 for alpha chain variable domain of TCR clone 119720 (TRAV13-1, TRAJ52)
CAASSGAGVTSYGKLTF

SEQ ID NO: 239440 - protein, 12 aa, Homo sapiens
  CDR3 for beta chain variable domain of TCR clone 119720 (TRBV11-2, TRBJ2-2)
CASSLGGGELFF

SEQ ID NO: 239441 - protein, 14 aa, Homo sapiens
  CDR3 for alpha chain variable domain of TCR clone 119721 (TRAV26-1, TRAJ34)
CIVRVAYNTDKLIF

SEQ ID NO: 239442 - protein, 13 aa, Homo sapiens
  CDR3 for beta chain variable domain of TCR clone 119721 (TRBV10-3, TRBJ2-7)
CASKLAVNYEQYF

SEQ ID NO: 239443 - protein, 13 aa, Homo sapiens
  CDR3 for alpha chain variable domain of TCR clone 119722 (TRAV38-1, TRAJ42)
CARWGGSQGNLIF

SEQ ID NO: 239444 - protein, 10 aa, Homo sapiens
  CDR3 for beta chain variable domain of TCR clone 119722 (TRBV2, TRBJ2-5)
CASRAATQYF

SEQ ID NO: 239445 - protein, 14 aa, Homo sapiens
  CDR3 for alpha chain variable domain of TCR clone 119723 (TRAV9-2, TRAJ6)
CALSDPGGSYIPTF

SEQ ID NO: 239446 - protein, 15 aa, Homo sapiens
  CDR3 for beta chain variable domain of TCR clone 119723 (TRBV18, TRBJ1-1)
CASSPRQGENTEAFF

SEQ ID NO: 239447 - protein, 14 aa, Homo sapiens
  CDR3 for alpha chain variable domain of TCR clone 119724 (TRAV1-2, TRAJ16)
CAVNRFSDGQKLFF

SEQ ID NO: 239448 - protein, 13 aa, Homo sapiens
  CDR3 for beta chain variable domain of TCR clone 119724 (TRBV10-2, TRBJ2-7)
CASGASGGYEQYF

SEQ ID NO: 239449 - protein, 14 aa, Homo sapiens
  CDR3 for alpha chain variable domain of TCR clone 119725 (TRAV1-2, TRAJ8)
CAVREDTGFQELVF

SEQ ID NO: 239450 - protein, 16 aa, Homo sapiens
  CDR3 for beta chain variable domain of TCR clone 119725 (TRBV12-4, TRBJ1-5)
CASSRPVGGSNQPQHF

SEQ ID NO: 239451 - protein, 14 aa, Homo sapiens
  CDR3 for alpha chain variable domain of TCR clone 119726 (TRAV17, TRAJ56)
CATVPAGANSKLTF

SEQ ID NO: 239452 - protein, 13 aa, Homo sapiens
  CDR3 for beta chain variable domain of TCR clone 119726 (TRBV12-4, TRBJ2-2)
CSSSITGSGELFF

SEQ ID NO: 239453 - protein, 15 aa, Homo sapiens
  CDR3 for alpha chain variable domain of TCR clone 119727 (TRAV17, TRAJ13)
CATDAGSGGYQKVTF

SEQ ID NO: 239454 - protein, 17 aa, Homo sapiens
  CDR3 for beta chain variable domain of TCR clone 119727 (TRBV11-2, TRBJ2-1)
RASSLYPPGAEYNEQFF

SEQ ID NO: 239455 - protein, 15 aa, Homo sapiens
  CDR3 for alpha chain variable domain of TCR clone 119728 (TRAV12-1, TRAJ48)
CVVNPLGFGNEKLTF

SEQ ID NO: 239456 - protein, 12 aa, Homo sapiens
  CDR3 for beta chain variable domain of TCR clone 119728 (TRBV18, TRBJ2-1)
CASSPGTSEGFF

SEQ ID NO: 239457 - protein, 14 aa, Homo sapiens
  CDR3 for alpha chain variable domain of TCR clone 119729 (TRAV26-1, TRAJ11)
CIVPLYSGYSTLTF

SEQ ID NO: 239458 - protein, 13 aa, Homo sapiens
  CDR3 for beta chain variable domain of TCR clone 119729 (TRBV10-3, TRBJ2-7)
CASKLAVNYEQYF

SEQ ID NO: 239459 - protein, 13 aa, Homo sapiens
  CDR3 for alpha chain variable domain of TCR clone 119730 (TRAV3, TRAJ33)
CAVRDGSNYQLIW

SEQ ID NO: 239460 - protein, 16 aa, Homo sapiens
  CDR3 for beta chain variable domain of TCR clone 119730 (TRBV4-2, TRBJ2-7)
CASSQDRGTSSYEQYF

SEQ ID NO: 239461 - protein, 13 aa, Homo sapiens
  CDR3 for alpha chain variable domain of TCR clone 119731 (TRAV1-1, TRAJ31)
CASYLNNNARLLF

SEQ ID NO: 239462 - protein, 14 aa, Homo sapiens
  CDR3 for beta chain variable domain of TCR clone 119731 (TRBV4-1, TRBJ2-5)
CASSRSGSGETQYF

SEQ ID NO: 239463 - protein, 13 aa, Homo sapiens
  CDR3 for alpha chain variable domain of TCR clone 119732 (TRAV2, TRAJ40)
CAVVTSGTYKYIF

SEQ ID NO: 239464 - protein, 16 aa, Homo sapiens
  CDR3 for beta chain variable domain of TCR clone 119732 (TRBV27, TRBJ1-5)
CASSLSGGASNQPQHF

SEQ ID NO: 239465 - protein, 11 aa, Homo sapiens
  CDR3 for alpha chain variable domain of TCR clone 119733 (TRAV3, TRAJ21)
CAVGNFNKFLL

SEQ ID NO: 239466 - protein, 16 aa, Homo sapiens
  CDR3 for beta chain variable domain of TCR clone 119733 (TRBV19, TRBJ2-1)
CASSKAGPSSYNEQFF

SEQ ID NO: 239467 - protein, 14 aa, Homo sapiens
  CDR3 for alpha chain variable domain of TCR clone 119734 (TRAV9-2, TRAJ39)
CALYIYNAGNMLTF

SEQ ID NO: 239468 - protein, 14 aa, Homo sapiens
  CDR3 for beta chain variable domain of TCR clone 119734 (TRBV7-2, TRBJ1-2)
CASSQTGSTYGYTF

SEQ ID NO: 239469 - protein, 17 aa, Homo sapiens
  CDR3 for alpha chain variable domain of TCR clone 119735 (TRAV3, TRAJ6)
CAVRDGPRAGGSYIPTF

SEQ ID NO: 239470 - protein, 22 aa, Homo sapiens
  CDR3 for beta chain variable domain of TCR clone 119735 (TRBV29-1, TRBJ2-5)
TVSNMSPEDSSIYLCSAGTQYF

SEQ ID NO: 239471 - protein, 13 aa, Homo sapiens
  CDR3 for alpha chain variable domain of TCR clone 119736 (TRAV2, TRAJ29)
CAVYSSGNTPLVF

SEQ ID NO: 239472 - protein, 14 aa, Homo sapiens
  CDR3 for beta chain variable domain of TCR clone 119736 (TRBV7-9, TRBJ1-1)
RASSLGGLKTEAFF

SEQ ID NO: 239473 - protein, 11 aa, Homo sapiens
  CDR3 for alpha chain variable domain of TCR clone 119737 (TRAV23/DV6, TRAJ48)
CAPRWDEKLTF

SEQ ID NO: 239474 - protein, 14 aa, Homo sapiens
  CDR3 for beta chain variable domain of TCR clone 119737 (TRBV29-1, TRBJ1-3)
CSVADRVVGNTIYF

SEQ ID NO: 239475 - protein, 16 aa, Homo sapiens
  CDR3 for alpha chain variable domain of TCR clone 119738 (TRAV30, TRAJ48)
CGTEIKSNFGNEKLTF

SEQ ID NO: 239476 - protein, 17 aa, Homo sapiens
  CDR3 for beta chain variable domain of TCR clone 119738 (TRBV27, TRBJ2-1)
CASSSGRGGQSADGQFF

SEQ ID NO: 239477 - protein, 14 aa, Homo sapiens
  CDR3 for alpha chain variable domain of TCR clone 119739 (TRAV35, TRAJ22)
CAGLRPGSARQLTF

SEQ ID NO: 239478 - protein, 16 aa, Homo sapiens
  CDR3 for beta chain variable domain of TCR clone 119739 (TRBV10-3, TRBJ1-5)
CAISDQVGAPNQPQHF

SEQ ID NO: 239479 - protein, 16 aa, Homo sapiens
  CDR3 for alpha chain variable domain of TCR clone 119740 (TRAV22, TRAJ45)
CAVERGKRGGADGLTF

SEQ ID NO: 239480 - protein, 13 aa, Homo sapiens
  CDR3 for beta chain variable domain of TCR clone 119740 (TRBV27, TRBJ1-1)
CARSLSIGAEAFF

SEQ ID NO: 239481 - protein, 13 aa, Homo sapiens
  CDR3 for alpha chain variable domain of TCR clone 119741 (TRAV3, TRAJ29)
CAVRAIIDTPLVF

SEQ ID NO: 239482 - protein, 14 aa, Homo sapiens
  CDR3 for beta chain variable domain of TCR clone 119741 (TRBV27, TRBJ2-1)
CASSATGGYNEQFF

SEQ ID NO: 239483 - protein, 11 aa, Homo sapiens
  CDR3 for alpha chain variable domain of TCR clone 119742 (TRAV21, TRAJ34)
CAPLDTDKPIF

SEQ ID NO: 239484 - protein, 16 aa, Homo sapiens
  CDR3 for beta chain variable domain of TCR clone 119742 (TRBV5-1, TRBJ2-3)
CASSLAGDRGTDTQYF

SEQ ID NO: 239485 - protein, 12 aa, Homo sapiens
  CDR3 for alpha chain variable domain of TCR clone 119743 (TRAV12-3, TRAJ17)
CAMTLTGNKLTF

SEQ ID NO: 239486 - protein, 15 aa, Homo sapiens
  CDR3 for beta chain variable domain of TCR clone 119743 (TRBV11-1, TRBJ2-7)
CASSRGRFKTYEQYF

SEQ ID NO: 239487 - protein, 12 aa, Homo sapiens
  CDR3 for alpha chain variable domain of TCR clone 119744 (TRAV3, TRAJ39)
CAVIEGSNMLTF

SEQ ID NO: 239488 - protein, 14 aa, Homo sapiens
  CDR3 for beta chain variable domain of TCR clone 119744 (TRBV7-8, TRBJ2-3)
CASSFPDGQDTQYF

SEQ ID NO: 239489 - protein, 16 aa, Homo sapiens
  CDR3 for alpha chain variable domain of TCR clone 119745 (TRAV30, TRAJ24)
CGTKIVGADSWGKFQF

SEQ ID NO: 239490 - protein, 14 aa, Homo sapiens
  CDR3 for beta chain variable domain of TCR clone 119745 (TRBV12-5, TRBJ2-5)
CASGSRTHQETQYF

SEQ ID NO: 239491 - protein, 13 aa, Homo sapiens
  CDR3 for alpha chain variable domain of TCR clone 119746 (TRAV38-1, TRAJ52)
CAFRGTSYGKLTF

SEQ ID NO: 239492 - protein, 15 aa, Homo sapiens
  CDR3 for beta chain variable domain of TCR clone 119746 (TRBV7-8, TRBJ2-5)
CASSDAAGSQETQYV

SEQ ID NO: 239493 - protein, 16 aa, Homo sapiens
  CDR3 for alpha chain variable domain of TCR clone 119747 (TRAV21, TRAJ37)
CAVRTAGSSKPGKLIF

SEQ ID NO: 239494 - protein, 13 aa, Homo sapiens
  CDR3 for beta chain variable domain of TCR clone 119747 (TRBV7-9, TRBJ2-5)
CASLPSGRETQYF

SEQ ID NO: 239495 - protein, 15 aa, Homo sapiens
  CDR3 for alpha chain variable domain of TCR clone 119748 (TRAV27, TRAJ38)
CAARRNAGNNRKLIW

SEQ ID NO: 239496 - protein, 17 aa, Homo sapiens
  CDR3 for beta chain variable domain of TCR clone 119748 (TRBV19, TRBJ2-6)
CASSTGQVFSGANVLTF

SEQ ID NO: 239497 - protein, 14 aa, Homo sapiens
  CDR3 for alpha chain variable domain of TCR clone 119749 (TRAV29/DV5, TRAJ32)
GAAAYGGATNKLIF

SEQ ID NO: 239498 - protein, 15 aa, Homo sapiens
  CDR3 for beta chain variable domain of TCR clone 119749 (TRBV27, TRBJ2-7)
CASSTAGTGSYEQYF

SEQ ID NO: 239499 - protein, 16 aa, Homo sapiens
  CDR3 for alpha chain variable domain of TCR clone 119750 (TRAV30, TRAJ24)
CGTEIVDADSWGKFQF

SEQ ID NO: 239500 - protein, 16 aa, Homo sapiens
  CDR3 for beta chain variable domain of TCR clone 119750 (TRBV7-3, TRBJ2-3)
ELSLMKRMRGADTRYF

SEQ ID NO: 239501 - protein, 10 aa, Homo sapiens
  CDR3 for alpha chain variable domain of TCR clone 119751 (TRAV12-1, TRAJ37)
ARGNTCKLIF

SEQ ID NO: 239502 - protein, 15 aa, Homo sapiens
  CDR3 for beta chain variable domain of TCR clone 119751 (TRBV7-2, TRBJ2-3)
CASSLEQGGTDTQYF

SEQ ID NO: 239503 - protein, 14 aa, Homo sapiens
  CDR3 for alpha chain variable domain of TCR clone 119752 (TRAV12-1, TRAJ13)
CVVIDSGGYQKVTF

SEQ ID NO: 239504 - protein, 17 aa, Homo sapiens
  CDR3 for beta chain variable domain of TCR clone 119752 (TRBV15, TRBJ1-5)
CATSSAPPGTRNQPQHF

SEQ ID NO: 239505 - protein, 15 aa, Homo sapiens
  CDR3 for alpha chain variable domain of TCR clone 119753 (TRAV38-1, TRAJ37)
CAFIFGSGNTGKLIF

SEQ ID NO: 239506 - protein, 15 aa, Homo sapiens
  CDR3 for beta chain variable domain of TCR clone 119753 (TRBV7-2, TRBJ2-3)
CASSLASARTDTQYF

SEQ ID NO: 239507 - protein, 16 aa, Homo sapiens
  CDR3 for alpha chain variable domain of TCR clone 119754 (TRAV25, TRAJ53)
TDVGTGSGGSNYKLTF

SEQ ID NO: 239508 - protein, 16 aa, Homo sapiens
  CDR3 for beta chain variable domain of TCR clone 119754 (TRBV4-2, TRBJ2-3)
CASSLSSGGHTDTQYF

SEQ ID NO: 239509 - protein, 11 aa, Homo sapiens
  CDR3 for alpha chain variable domain of TCR clone 119755 (TRAV1-1, TRAJ23)
CAVRQGGKLIF

SEQ ID NO: 239510 - protein, 20 aa, Homo sapiens
  CDR3 for beta chain variable domain of TCR clone 119755 (TRBV7-8, TRBJ2-2)
CASSHLFPGPTIHIIGELFF

SEQ ID NO: 239511 - protein, 12 aa, Homo sapiens
  CDR3 for alpha chain variable domain of TCR clone 119756 (TRAV12-1, TRAJ34)
CVVAGATDKLIF

SEQ ID NO: 239512 - protein, 17 aa, Homo sapiens
  CDR3 for beta chain variable domain of TCR clone 119756 (TRBV15, TRBJ1-4)
CATSRYGTGDPNEKLFF

SEQ ID NO: 239513 - protein, 14 aa, Homo sapiens
  CDR3 for alpha chain variable domain of TCR clone 119757 (TRAV17, TRAJ8)
CATDLNTGFQKLVF

SEQ ID NO: 239514 - protein, 13 aa, Homo sapiens
  CDR3 for beta chain variable domain of TCR clone 119757 (TRBV7-9, TRBJ1-2)
CASSLKQNYGYTF

SEQ ID NO: 239515 - protein, 16 aa, Homo sapiens
  CDR3 for alpha chain variable domain of TCR clone 119758 (TRAV8-2, TRAJ48)
CVVSDVSNFGNEKLTF

SEQ ID NO: 239516 - protein, 16 aa, Homo sapiens
  CDR3 for beta chain variable domain of TCR clone 119758 (TRBV24-1, TRBJ2-1)
CATSGVTGANYNEQFF

SEQ ID NO: 239517 - protein, 15 aa, Homo sapiens
  CDR3 for alpha chain variable domain of TCR clone 119759 (TRAV3, TRAJ40)
CAVRDVTSGTYKYIF

SEQ ID NO: 239518 - protein, 14 aa, Homo sapiens
  CDR3 for beta chain variable domain of TCR clone 119759 (TRBV12-4, TRBJ1-1)
CASSLGTGGTEAFF

SEQ ID NO: 239519 - protein, 14 aa, Homo sapiens
  CDR3 for alpha chain variable domain of TCR clone 119760 (TRAV17, TRAJ32)
CATDPGGATNKPIF

SEQ ID NO: 239520 - protein, 12 aa, Homo sapiens
  CDR3 for beta chain variable domain of TCR clone 119760 (TRBV7-8, TRBJ2-7)
CASSLGDREQYF

SEQ ID NO: 239521 - protein, 16 aa, Homo sapiens
  CDR3 for alpha chain variable domain of TCR clone 119761 (TRAV30, TRAJ24)
CGTEIVDADSWGKFQF

SEQ ID NO: 239522 - protein, 15 aa, Homo sapiens
  CDR3 for beta chain variable domain of TCR clone 119761 (TRBV7-9, TRBJ1-4)
CASSDRTGGNEKLFF

SEQ ID NO: 239523 - protein, 14 aa, Homo sapiens
  CDR3 for alpha chain variable domain of TCR clone 119762 (TRAV29/DV5, TRAJ36)
CAARRKTGANNLFF

SEQ ID NO: 239524 - protein, 13 aa, Homo sapiens
  CDR3 for beta chain variable domain of TCR clone 119762 (TRBV11-2, TRBJ2-5)
CASSFSSQETQYF

SEQ ID NO: 239525 - protein, 14 aa, Homo sapiens
  CDR3 for alpha chain variable domain of TCR clone 119763 (TRAV4, TRAJ9)
CLVGSGTGGFKTIF

SEQ ID NO: 239526 - protein, 13 aa, Homo sapiens
  CDR3 for beta chain variable domain of TCR clone 119763 (TRBV18, TRBJ1-2)
CASSLLTGEGYTF

SEQ ID NO: 239527 - protein, 15 aa, Homo sapiens
  CDR3 for alpha chain variable domain of TCR clone 119764 (TRAV3, TRAJ3)
CAVRDMSSSASKITF

SEQ ID NO: 239528 - protein, 14 aa, Homo sapiens
  CDR3 for beta chain variable domain of TCR clone 119764 (TRBV6-6, TRBJ2-7)
CASSIAGGVDEQYF

SEQ ID NO: 239529 - protein, 14 aa, Homo sapiens
  CDR3 for alpha chain variable domain of TCR clone 119765 (TRAV17, TRAJ35)
CATDRPGFGNVLHC

SEQ ID NO: 239530 - protein, 14 aa, Homo sapiens
  CDR3 for beta chain variable domain of TCR clone 119765 (TRBV7-8, TRBJ2-3)
CASSLEAGTDTQYF

SEQ ID NO: 239531 - protein, 12 aa, Homo sapiens
  CDR3 for alpha chain variable domain of TCR clone 119766 (TRAV21, TRAJ23)
CAVMLQGGKLIF

SEQ ID NO: 239532 - protein, 14 aa, Homo sapiens
  CDR3 for beta chain variable domain of TCR clone 119766 (TRBV7-9, TRBJ1-4)
CAITEGEANKKLFF

SEQ ID NO: 239533 - protein, 16 aa, Homo sapiens
  CDR3 for alpha chain variable domain of TCR clone 119767 (TRAV13-1, TRAJ48)
CAASIFGNFGNEKLTF

SEQ ID NO: 239534 - protein, 16 aa, Homo sapiens
  CDR3 for beta chain variable domain of TCR clone 119767 (TRBV7-2, TRBJ2-6)
CASSERRASGANVLAF

SEQ ID NO: 239535 - protein, 14 aa, Homo sapiens
  CDR3 for alpha chain variable domain of TCR clone 119768 (TRAV29/DV5, TRAJ32)
CAAAYGGATNKLIF

SEQ ID NO: 239536 - protein, 15 aa, Homo sapiens
  CDR3 for beta chain variable domain of TCR clone 119768 (TRBV9, TRBJ1-6)
CASSVAGTGDSPLHF

SEQ ID NO: 239537 - protein, 14 aa, Homo sapiens
  CDR3 for alpha chain variable domain of TCR clone 119769 (TRAV12-1, TRAJ42)
CVVIYGGSQGNRIF

SEQ ID NO: 239538 - protein, 13 aa, Homo sapiens
  CDR3 for beta chain variable domain of TCR clone 119769 (TRBV18, TRBJ2-5)
CASSPPGKETQYF

SEQ ID NO: 239539 - protein, 14 aa, Homo sapiens
  CDR3 for alpha chain variable domain of TCR clone 119770 (TRAV12-2, TRAJ13)
CAVKKTGGYQKATF

SEQ ID NO: 239540 - protein, 15 aa, Homo sapiens
  CDR3 for beta chain variable domain of TCR clone 119770 (TRBV20-1, TRBJ2-1)
CSARGIGGTYNEQFF

SEQ ID NO: 239541 - protein, 12 aa, Homo sapiens
  CDR3 for alpha chain variable domain of TCR clone 119771 (TRAV21, TRAJ3)
CCFYSSASKIIF

SEQ ID NO: 239542 - protein, 14 aa, Homo sapiens
  CDR3 for beta chain variable domain of TCR clone 119771 (TRBV7-6, TRBJ2-3)
CASSVAGGTDTQYF

SEQ ID NO: 239543 - protein, 18 aa, Homo sapiens
  CDR3 for alpha chain variable domain of TCR clone 119772 (TRAV26-2, TRAJ45)
CILRLWGYSGGGDDGLTF

SEQ ID NO: 239544 - protein, 13 aa, Homo sapiens
  CDR3 for beta chain variable domain of TCR clone 119772 (TRBV7-8, TRBJ2-7)
CASSLTGGREQYF

SEQ ID NO: 239545 - protein, 16 aa, Homo sapiens
  CDR3 for alpha chain variable domain of TCR clone 119773 (TRAV3, TRAJ37)
CAVRGKGSGNTGKLIF

SEQ ID NO: 239546 - protein, 16 aa, Homo sapiens
  CDR3 for beta chain variable domain of TCR clone 119773 (TRBV15, TRBJ1-2)
CATSRGPRTGGGGYTF

SEQ ID NO: 239547 - protein, 15 aa, Homo sapiens
  CDR3 for alpha chain variable domain of TCR clone 119774 (TRAV10, TRAJ34)
CVVSGKHRQAHLWNW

SEQ ID NO: 239548 - protein, 14 aa, Homo sapiens
  CDR3 for beta chain variable domain of TCR clone 119774 (TRBV19, TRBJ2-1)
CASPTFVLSGEQFF

SEQ ID NO: 239549 - protein, 23 aa, Homo sapiens
  CDR3 for alpha chain variable domain of TCR clone 119775 (TRAV26-1, TRAJ38)
CIADNAGNNHIQNPDPAVYQLRD

SEQ ID NO: 239550 - protein, 13 aa, Homo sapiens
  CDR3 for beta chain variable domain of TCR clone 119775 (TRBV7-9, TRBJ1-2)
CASSLRQNYGYTF

SEQ ID NO: 239551 - protein, 13 aa, Homo sapiens
  CDR3 for alpha chain variable domain of TCR clone 119776 (TRAV13-1, TRAJ21)
CAASIYNFNKFYF

SEQ ID NO: 239552 - protein, 14 aa, Homo sapiens
  CDR3 for beta chain variable domain of TCR clone 119776 (TRBV13, TRBJ2-1)
CASSLLAEYNEQFF

SEQ ID NO: 239553 - protein, 18 aa, Homo sapiens
  CDR3 for alpha chain variable domain of TCR clone 119777 (TRAV26-2, TRAJ45)
CILRVDKYSGGGSDGLTF

SEQ ID NO: 239554 - protein, 11 aa, Homo sapiens
  CDR3 for beta chain variable domain of TCR clone 119777 (TRBV29-1, TRBJ2-5)
CSEDRTGTQYF

SEQ ID NO: 239555 - protein, 13 aa, Homo sapiens
  CDR3 for alpha chain variable domain of TCR clone 119778 (TRAV12-1, TRAJ9)
CVVLNTGGFRTIF

SEQ ID NO: 239556 - protein, 13 aa, Homo sapiens
  CDR3 for beta chain variable domain of TCR clone 119778 (TRBV20-1, TRBJ1-1)
CSARGGGNTEAFF

SEQ ID NO: 239557 - protein, 14 aa, Homo sapiens
  CDR3 for alpha chain variable domain of TCR clone 119779 (TRAV4, TRAJ6)
CLVGEAGGSYIPTF

SEQ ID NO: 239558 - protein, 14 aa, Homo sapiens
  CDR3 for beta chain variable domain of TCR clone 119779 (TRBV19, TRBJ2-2)
CATTGHANTGELFF

SEQ ID NO: 239559 - protein, 15 aa, Homo sapiens
  CDR3 for alpha chain variable domain of TCR clone 119780 (TRAV12-1, TRAJ45)
CVVLSGGGGADGLTF

SEQ ID NO: 239560 - protein, 14 aa, Homo sapiens
  CDR3 for beta chain variable domain of TCR clone 119780 (TRBV11-2, TRBJ2-3)
CASSLGGGTDTQYF

SEQ ID NO: 239561 - protein, 15 aa, Homo sapiens
  CDR3 for alpha chain variable domain of TCR clone 119781 (TRAV3, TRAJ20)
CAVRDIKLSDYKLSF

SEQ ID NO: 239562 - protein, 15 aa, Homo sapiens
  CDR3 for beta chain variable domain of TCR clone 119781 (TRBV7-9, TRBJ1-6)
CASISPGRGNSPLHF

SEQ ID NO: 239563 - protein, 14 aa, Homo sapiens
  CDR3 for alpha chain variable domain of TCR clone 119782 (TRAV12-2, TRAJ13)
CAVKKTGGYQKVTF

SEQ ID NO: 239564 - protein, 14 aa, Homo sapiens
  CDR3 for beta chain variable domain of TCR clone 119782 (TRBV7-8, TRBJ2-3)
CASSSRDSTDTQYF

SEQ ID NO: 239565 - protein, 14 aa, Homo sapiens
  CDR3 for alpha chain variable domain of TCR clone 119783 (TRAV27, TRAJ52)
CAGAGGTSYGKLTF

SEQ ID NO: 239566 - protein, 14 aa, Homo sapiens
  CDR3 for beta chain variable domain of TCR clone 119783 (TRBV19, TRBJ2-1)
CASPTFVLSGEQFF

SEQ ID NO: 239567 - protein, 15 aa, Homo sapiens
  CDR3 for alpha chain variable domain of TCR clone 119784 (TRAV12-3, TRAJ49)
CAMAVTPNTGNQFYF

SEQ ID NO: 239568 - protein, 18 aa, Homo sapiens
  CDR3 for beta chain variable domain of TCR clone 119784 (TRBV4-1, TRBJ1-5)
CASSQDPRGQGLNQPQHV

SEQ ID NO: 239569 - protein, 12 aa, Homo sapiens
  CDR3 for alpha chain variable domain of TCR clone 119785 (TRAV25, TRAJ11)
CAGASGYSTLTF

SEQ ID NO: 239570 - protein, 16 aa, Homo sapiens
  CDR3 for beta chain variable domain of TCR clone 119785 (TRBV15, TRBJ1-2)
CATSRGPRTGGGGYSF

SEQ ID NO: 239571 - protein, 13 aa, Homo sapiens
  CDR3 for alpha chain variable domain of TCR clone 119786 (TRAV12-2, TRAJ20)
CAVYPSNDYKLSF

SEQ ID NO: 239572 - protein, 15 aa, Homo sapiens
  CDR3 for beta chain variable domain of TCR clone 119786 (TRBV5-7, TRBJ1-5)
CASSYGKLWDQPQHF

SEQ ID NO: 239573 - protein, 14 aa, Homo sapiens
  CDR3 for alpha chain variable domain of TCR clone 119787 (TRAV12-3, TRAJ10)
SHLPLTGGGNKLTF

SEQ ID NO: 239574 - protein, 16 aa, Homo sapiens
  CDR3 for beta chain variable domain of TCR clone 119787 (TRBV5-1, TRBJ2-2)
CASSLWDTTNTGELFF

SEQ ID NO: 239575 - protein, 13 aa, Homo sapiens
  CDR3 for alpha chain variable domain of TCR clone 119788 (TRAV8-3, TRAJ5)
CAVGPRGRRALPF

SEQ ID NO: 239576 - protein, 16 aa, Homo sapiens
  CDR3 for beta chain variable domain of TCR clone 119788 (TRBV11-3, TRBJ2-3)
CASSPGGLLGTDTQYF

SEQ ID NO: 239577 - protein, 16 aa, Homo sapiens
  CDR3 for alpha chain variable domain of TCR clone 119789 (TRAV2, TRAJ10)
CCGGSTVTGGGNKLTF

SEQ ID NO: 239578 - protein, 16 aa, Homo sapiens
  CDR3 for beta chain variable domain of TCR clone 119789 (TRBV18, TRBJ1-5)
CAGSPSTGNSNQPQHF

SEQ ID NO: 239579 - protein, 14 aa, Homo sapiens
  CDR3 for alpha chain variable domain of TCR clone 119790 (TRAV38-1, TRAJ40)
CALRPTSGTYKYIF

SEQ ID NO: 239580 - protein, 14 aa, Homo sapiens
  CDR3 for beta chain variable domain of TCR clone 119790 (TRBV19, TRBJ2-1)
CASPTFVLSGGQFF

SEQ ID NO: 239581 - protein, 14 aa, Homo sapiens
  CDR3 for alpha chain variable domain of TCR clone 119791 (TRAV29/DV5, TRAJ32)
CAAAYGGATNKLIF

SEQ ID NO: 239582 - protein, 16 aa, Homo sapiens
  CDR3 for beta chain variable domain of TCR clone 119791 (TRBV4-1, TRBJ1-3)
CASSQDELLAGNTIYF

SEQ ID NO: 239583 - protein, 12 aa, Homo sapiens
  CDR3 for alpha chain variable domain of TCR clone 119792 (TRAV27, TRAJ35)
CAGADFGNVLHC

SEQ ID NO: 239584 - protein, 16 aa, Homo sapiens
  CDR3 for beta chain variable domain of TCR clone 119792 (TRBV3-1, TRBJ1-2)
CASSQGQGVQRDGYTF

SEQ ID NO: 239585 - protein, 15 aa, Homo sapiens
  CDR3 for alpha chain variable domain of TCR clone 119793 (TRAV3, TRAJ3)
CAVRDGHSSASTIIF

SEQ ID NO: 239586 - protein, 14 aa, Homo sapiens
  CDR3 for beta chain variable domain of TCR clone 119793 (TRBV28, TRBJ1-4)
CASSFGTFDEKLFF

SEQ ID NO: 239587 - protein, 17 aa, Homo sapiens
  CDR3 for alpha chain variable domain of TCR clone 119794 (TRAV26-1, TRAJ58)
CIVRVGAEETSGSRLTF

SEQ ID NO: 239588 - protein, 18 aa, Homo sapiens
  CDR3 for beta chain variable domain of TCR clone 119794 (TRBV7-9, TRBJ2-7)
CAGSLTTSGSRTWYEQYF

SEQ ID NO: 239589 - protein, 14 aa, Homo sapiens
  CDR3 for alpha chain variable domain of TCR clone 119795 (TRAV17, TRAJ16)
CATADFSDGQKQLF

SEQ ID NO: 239590 - protein, 15 aa, Homo sapiens
  CDR3 for beta chain variable domain of TCR clone 119795 (TRBV18, TRBJ2-1)
CASSPPSASYNEQFF

SEQ ID NO: 239591 - protein, 15 aa, Homo sapiens
  CDR3 for alpha chain variable domain of TCR clone 119796 (TRAV8-2, TRAJ42)
CVVSAYMGSQGNLIF

SEQ ID NO: 239592 - protein, 15 aa, Homo sapiens
  CDR3 for beta chain variable domain of TCR clone 119796 (TRBV28, TRBJ1-2)
CASSGSEQRAFGYTF

SEQ ID NO: 239593 - protein, 14 aa, Homo sapiens
  CDR3 for alpha chain variable domain of TCR clone 119797 (TRAV3, TRAJ7)
CAVREEEREQQTRF

SEQ ID NO: 239594 - protein, 13 aa, Homo sapiens
  CDR3 for beta chain variable domain of TCR clone 119797 (TRBV4-1, TRBJ2-7)
CASSQGQAYEQYF

SEQ ID NO: 239595 - protein, 14 aa, Homo sapiens
  CDR3 for alpha chain variable domain of TCR clone 119798 (TRAV12-1, TRAJ13)
CVVIDSGGYQKVTL

SEQ ID NO: 239596 - protein, 12 aa, Homo sapiens
  CDR3 for beta chain variable domain of TCR clone 119798 (TRBV29-1, TRBJ2-3)
CSVTGGADTQYF

SEQ ID NO: 239597 - protein, 11 aa, Homo sapiens
  CDR3 for alpha chain variable domain of TCR clone 119799 (TRAV1-2, TRAJ20)
CAVANDYKPSF

SEQ ID NO: 239598 - protein, 14 aa, Homo sapiens
  CDR3 for beta chain variable domain of TCR clone 119799 (TRBV19, TRBJ2-1)
CASGKSTQYNEQFF

SEQ ID NO: 239599 - protein, 11 aa, Homo sapiens
  CDR3 for alpha chain variable domain of TCR clone 119800 (TRAV2, TRAJ33)
CAVESNYQLIW

SEQ ID NO: 239600 - protein, 15 aa, Homo sapiens
  CDR3 for beta chain variable domain of TCR clone 119800 (TRBV4-1, TRBJ2-3)
CASSQDRLPPDTQYF

SEQ ID NO: 239601 - protein, 13 aa, Homo sapiens
  CDR3 for alpha chain variable domain of TCR clone 119801 (TRAV1-1, TRAJ9)
CAAKNTGGFKTIF

SEQ ID NO: 239602 - protein, 17 aa, Homo sapiens
  CDR3 for beta chain variable domain of TCR clone 119801 (TRBV20-1, TRBJ2-1)
CSAPPRLAGTRYNEQFF

SEQ ID NO: 239603 - protein, 12 aa, Homo sapiens
  CDR3 for alpha chain variable domain of TCR clone 119802 (TRAV12-1, TRAJ8)
CVVNKGFQKLVF

SEQ ID NO: 239604 - protein, 13 aa, Homo sapiens
  CDR3 for beta chain variable domain of TCR clone 119802 (TRBV24-1, TRBJ2-2)
CATSDWSTGELFI

SEQ ID NO: 239605 - protein, 14 aa, Homo sapiens
  CDR3 for alpha chain variable domain of TCR clone 119803 (TRAV16, TRAJ44)
CALSTTGIASKLTF

SEQ ID NO: 239606 - protein, 14 aa, Homo sapiens
  CDR3 for beta chain variable domain of TCR clone 119803 (TRBV20-1, TRBJ2-7)
CSAISREASYEQYF

SEQ ID NO: 239607 - protein, 13 aa, Homo sapiens
  CDR3 for alpha chain variable domain of TCR clone 119804 (TRAV26-2, TRAJ37)
CIRGSSNTGKLIF

SEQ ID NO: 239608 - protein, 12 aa, Homo sapiens
  CDR3 for beta chain variable domain of TCR clone 119804 (TRBV7-9, TRBJ2-7)
CASSIKREEQYF

SEQ ID NO: 239609 - protein, 14 aa, Homo sapiens
  CDR3 for alpha chain variable domain of TCR clone 119805 (TRAV1-2, TRAJ8)
CAVRGDTGFQKLVF

SEQ ID NO: 239610 - protein, 15 aa, Homo sapiens
  CDR3 for beta chain variable domain of TCR clone 119805 (TRBV6-3, TRBJ2-7)
CAGSSPGTVFYEQYF

SEQ ID NO: 239611 - protein, 11 aa, Homo sapiens
  CDR3 for alpha chain variable domain of TCR clone 119806 (TRAV3, TRAJ21)
CAVGNFNKFYF

SEQ ID NO: 239612 - protein, 12 aa, Homo sapiens
  CDR3 for beta chain variable domain of TCR clone 119806 (TRBV12-4, TRBJ1-1)
CASSLAGLEAFF

SEQ ID NO: 239613 - protein, 11 aa, Homo sapiens
  CDR3 for alpha chain variable domain of TCR clone 119807 (TRAV2, TRAJ13)
RASGGYQKVTF

SEQ ID NO: 239614 - protein, 14 aa, Homo sapiens
  CDR3 for beta chain variable domain of TCR clone 119807 (TRBV19, TRBJ2-1)
CASPTFALSGEQFF

SEQ ID NO: 239615 - protein, 13 aa, Homo sapiens
  CDR3 for alpha chain variable domain of TCR clone 119808 (TRAV8-3, TRAJ36)
CAVGATGANNLFF

SEQ ID NO: 239616 - protein, 15 aa, Homo sapiens
  CDR3 for beta chain variable domain of TCR clone 119808 (TRBV7-8, TRBJ1-3)
CASSPRGKDGNTIYF

SEQ ID NO: 239617 - protein, 15 aa, Homo sapiens
  CDR3 for alpha chain variable domain of TCR clone 119809 (TRAV13-2, TRAJ58)
CLTAQKETSGSRLTF

SEQ ID NO: 239618 - protein, 14 aa, Homo sapiens
  CDR3 for beta chain variable domain of TCR clone 119809 (TRBV7-2, TRBJ2-3)
CASRRGLAADTQYF

SEQ ID NO: 239619 - protein, 16 aa, Homo sapiens
  CDR3 for alpha chain variable domain of TCR clone 119810 (TRAV3, TRAJ21)
CAVRDIQRGNFNKFYF

SEQ ID NO: 239620 - protein, 13 aa, Homo sapiens
  CDR3 for beta chain variable domain of TCR clone 119810 (TRBV27, TRBJ2-7)
CASSLTTGYEQYF

SEQ ID NO: 239621 - protein, 14 aa, Homo sapiens
  CDR3 for alpha chain variable domain of TCR clone 119811 (TRAV16, TRAJ33)
CALSAMDSNYQLIW

SEQ ID NO: 239622 - protein, 12 aa, Homo sapiens
  CDR3 for beta chain variable domain of TCR clone 119811 (TRBV11-2, TRBJ2-1)
CASSPGNNEQFF

SEQ ID NO: 239623 - protein, 12 aa, Homo sapiens
  CDR3 for alpha chain variable domain of TCR clone 119812 (TRAV13-1, TRAJ49)
CAASPMGNQFYF

SEQ ID NO: 239624 - protein, 15 aa, Homo sapiens
  CDR3 for beta chain variable domain of TCR clone 119812 (TRBV11-3, TRBJ2-3)
CASLKDGREGDTQYF

SEQ ID NO: 239625 - protein, 11 aa, Homo sapiens
  CDR3 for alpha chain variable domain of TCR clone 119813 (TRAV2, TRAJ27)
CAVSNAGKSTF

SEQ ID NO: 239626 - protein, 13 aa, Homo sapiens
  CDR3 for beta chain variable domain of TCR clone 119813 (TRBV7-9, TRBJ1-2)
CASSLKQNYGYTF

SEQ ID NO: 239627 - protein, 12 aa, Homo sapiens
  CDR3 for alpha chain variable domain of TCR clone 119814 (TRAV3, TRAJ20)
CAVRDGDYKLSF

SEQ ID NO: 239628 - protein, 13 aa, Homo sapiens
  CDR3 for beta chain variable domain of TCR clone 119814 (TRBV7-9, TRBJ2-3)
CASSPGSTDTQYF

SEQ ID NO: 239629 - protein, 14 aa, Homo sapiens
  CDR3 for alpha chain variable domain of TCR clone 119815 (TRAV38-1, TRAJ45)
CANYSGGGADGLTF

SEQ ID NO: 239630 - protein, 20 aa, Homo sapiens
  CDR3 for beta chain variable domain of TCR clone 119815 (TRBV28, TRBJ2-1)
CASTPIGRSPGLAGGNEQFF

SEQ ID NO: 239631 - protein, 13 aa, Homo sapiens
  CDR3 for alpha chain variable domain of TCR clone 119816 (TRAV8-6, TRAJ21)
CAVSPSSLNKFSF

SEQ ID NO: 239632 - protein, 14 aa, Homo sapiens
  CDR3 for beta chain variable domain of TCR clone 119816 (TRBV7-9, TRBJ2-5)
CASSLDTAQETQYF

SEQ ID NO: 239633 - protein, 13 aa, Homo sapiens
  CDR3 for alpha chain variable domain of TCR clone 119817 (TRAV13-1, TRAJ5)
CAASDTGRRALTF

SEQ ID NO: 239634 - protein, 15 aa, Homo sapiens
  CDR3 for beta chain variable domain of TCR clone 119817 (TRBV11-2, TRBJ1-3)
CASSLDGTVGNTIYF

SEQ ID NO: 239635 - protein, 14 aa, Homo sapiens
  CDR3 for alpha chain variable domain of TCR clone 119818 (TRAV12-2, TRAJ44)
CAVNPAGPASKLTF

SEQ ID NO: 239636 - protein, 14 aa, Homo sapiens
  CDR3 for beta chain variable domain of TCR clone 119818 (TRBV7-2, TRBJ1-3)
CASSRLRSGNTIYF

SEQ ID NO: 239637 - protein, 11 aa, Homo sapiens
  CDR3 for alpha chain variable domain of TCR clone 119819 (TRAV12-3, TRAJ49)
CAANTGNQFYL

SEQ ID NO: 239638 - protein, 12 aa, Homo sapiens
  CDR3 for beta chain variable domain of TCR clone 119819 (TRBV6-3, TRBJ2-7)
CASSEPGFEQYF

SEQ ID NO: 239639 - protein, 17 aa, Homo sapiens
  CDR3 for alpha chain variable domain of TCR clone 119820 (TRAV4, TRAJ42)
CLVGVLNYGGCQGNLIF

SEQ ID NO: 239640 - protein, 12 aa, Homo sapiens
  CDR3 for beta chain variable domain of TCR clone 119820 (TRBV20-1, TRBJ2-1)
CSAQYTYNEQFF

SEQ ID NO: 239641 - protein, 15 aa, Homo sapiens
  CDR3 for alpha chain variable domain of TCR clone 119821 (TRAV38-2/DV8, TRAJ45)
CAYWDSGGGAGGLTF

SEQ ID NO: 239642 - protein, 14 aa, Homo sapiens
  CDR3 for beta chain variable domain of TCR clone 119821 (TRBV7-2, TRBJ2-7)
CASRSQGAAYEQYF

SEQ ID NO: 239643 - protein, 15 aa, Homo sapiens
  CDR3 for alpha chain variable domain of TCR clone 119822 (TRAV26-1, TRAJ58)
CIVRIQETSGSRLTF

SEQ ID NO: 239644 - protein, 13 aa, Homo sapiens
  CDR3 for beta chain variable domain of TCR clone 119822 (TRBV6-5, TRBJ2-1)
CAGIGETSKREFF

SEQ ID NO: 239645 - protein, 15 aa, Homo sapiens
  CDR3 for alpha chain variable domain of TCR clone 119823 (TRAV21, TRAJ53)
CATLNSGGSNYKLTF

SEQ ID NO: 239646 - protein, 16 aa, Homo sapiens
  CDR3 for beta chain variable domain of TCR clone 119823 (TRBV9, TRBJ2-1)
CASGVGGGGNYNEQFF

SEQ ID NO: 239647 - protein, 16 aa, Homo sapiens
  CDR3 for alpha chain variable domain of TCR clone 119824 (TRAV30, TRAJ57)
CGTGWAPQGGSEKLVC

SEQ ID NO: 239648 - protein, 14 aa, Homo sapiens
  CDR3 for beta chain variable domain of TCR clone 119824 (TRBV18, TRBJ1-1)
CASSPGFQGVEAFF

SEQ ID NO: 239649 - protein, 16 aa, Homo sapiens
  CDR3 for alpha chain variable domain of TCR clone 119825 (TRAV21, TRAJ37)
CAVRTAGSSNTGKLIF

SEQ ID NO: 239650 - protein, 17 aa, Homo sapiens
  CDR3 for beta chain variable domain of TCR clone 119825 (TRBV13, TRBJ2-3)
CASSLSRVAGGRNTQYF

SEQ ID NO: 239651 - protein, 12 aa, Homo sapiens
  CDR3 for alpha chain variable domain of TCR clone 119826 (TRAV25, TRAJ26)
CAGSNYGQNFVF

SEQ ID NO: 239652 - protein, 12 aa, Homo sapiens
  CDR3 for beta chain variable domain of TCR clone 119826 (TRBV28, TRBJ2-3)
CASSLYRDTQYF

SEQ ID NO: 239653 - protein, 19 aa, Homo sapiens
  CDR3 for alpha chain variable domain of TCR clone 119827 (TRAV29/DV5, TRAJ49)
CSVLLCSKLTVDTGNQFYF

SEQ ID NO: 239654 - protein, 17 aa, Homo sapiens
  CDR3 for beta chain variable domain of TCR clone 119827 (TRBV13, TRBJ2-3)
WASSLSRVAGGRNTQYF

SEQ ID NO: 239655 - protein, 16 aa, Homo sapiens
  CDR3 for alpha chain variable domain of TCR clone 119828 (TRAV30, TRAJ24)
CGTAIVDADSWGEFQF

SEQ ID NO: 239656 - protein, 14 aa, Homo sapiens
  CDR3 for beta chain variable domain of TCR clone 119828 (TRBV12-5, TRBJ2-5)
CASGSRTHQETQYF

SEQ ID NO: 239657 - protein, 16 aa, Homo sapiens
  CDR3 for alpha chain variable domain of TCR clone 119829 (TRAV30, TRAJ24)
CGTEIVDADSWGKFQF

SEQ ID NO: 239658 - protein, 17 aa, Homo sapiens
  CDR3 for beta chain variable domain of TCR clone 119829 (TRBV20-1, TRBJ2-1)
GSAPPRLAGTRYNEQFF

SEQ ID NO: 239659 - protein, 14 aa, Homo sapiens
  CDR3 for alpha chain variable domain of TCR clone 119830 (TRAV20, TRAJ22)
CAVALGGSARQLTF

SEQ ID NO: 239660 - protein, 13 aa, Homo sapiens
  CDR3 for beta chain variable domain of TCR clone 119830 (TRBV7-9, TRBJ1-2)
CASSLKQNYGYTF

SEQ ID NO: 239661 - protein, 14 aa, Homo sapiens
  CDR3 for alpha chain variable domain of TCR clone 119831 (TRAV29/DV5, TRAJ36)
CAARRKTGANNLFF

SEQ ID NO: 239662 - protein, 14 aa, Homo sapiens
  CDR3 for beta chain variable domain of TCR clone 119831 (TRBV12-5, TRBJ2-5)
CTSGSRTHRETQYF

SEQ ID NO: 239663 - protein, 14 aa, Homo sapiens
  CDR3 for alpha chain variable domain of TCR clone 119832 (TRAV12-2, TRAJ36)
CAVTPPTGANNLFF

SEQ ID NO: 239664 - protein, 13 aa, Homo sapiens
  CDR3 for beta chain variable domain of TCR clone 119832 (TRBV20-1, TRBJ1-6)
CSAPTGHGSPLHF

SEQ ID NO: 239665 - protein, 15 aa, Homo sapiens
  CDR3 for alpha chain variable domain of TCR clone 119833 (TRAV2, TRAJ15)
CAVEDRGQAGAALIF

SEQ ID NO: 239666 - protein, 15 aa, Homo sapiens
  CDR3 for beta chain variable domain of TCR clone 119833 (TRBV7-2, TRBJ2-3)
CASSLVVRGPDTQYF

SEQ ID NO: 239667 - protein, 11 aa, Homo sapiens
  CDR3 for alpha chain variable domain of TCR clone 119834 (TRAV4, TRAJ23)
CLGAPGGKLIF

SEQ ID NO: 239668 - protein, 15 aa, Homo sapiens
  CDR3 for beta chain variable domain of TCR clone 119834 (TRBV7-2, TRBJ2-1)
CASSFQADEYNEQFF

SEQ ID NO: 239669 - protein, 14 aa, Homo sapiens
  CDR3 for alpha chain variable domain of TCR clone 119835 (TRAV12-2, TRAJ13)
CAVKKPGGYQKVTF

SEQ ID NO: 239670 - protein, 16 aa, Homo sapiens
  CDR3 for beta chain variable domain of TCR clone 119835 (TRBV20-1, TRBJ1-2)
CSASMGQGVANYGYTF

SEQ ID NO: 239671 - protein, 11 aa, Homo sapiens
  CDR3 for alpha chain variable domain of TCR clone 119836 (TRAV35, TRAJ22)
CAGPGVGQLTF

SEQ ID NO: 239672 - protein, 14 aa, Homo sapiens
  CDR3 for beta chain variable domain of TCR clone 119836 (TRBV19, TRBJ2-7)
FASSMGQGAIEQYF

SEQ ID NO: 239673 - protein, 12 aa, Homo sapiens
  CDR3 for alpha chain variable domain of TCR clone 119837 (TRAV13-1, TRAJ21)
CAAKEGFNKFYF

SEQ ID NO: 239674 - protein, 13 aa, Homo sapiens
  CDR3 for beta chain variable domain of TCR clone 119837 (TRBV6-4, TRBJ2-1)
CASSASVNNEQFF

SEQ ID NO: 239675 - protein, 14 aa, Homo sapiens
  CDR3 for alpha chain variable domain of TCR clone 119838 (TRAV26-1, TRAJ44)
CISPLPGTASKLTF

SEQ ID NO: 239676 - protein, 12 aa, Homo sapiens
  CDR3 for beta chain variable domain of TCR clone 119838 (TRBV3-1, TRBJ2-2)
CASSLFPGELFF

SEQ ID NO: 239677 - protein, 13 aa, Homo sapiens
  CDR3 for alpha chain variable domain of TCR clone 119839 (TRAV27, TRAJ56)
RAGKPGANSKLTF

SEQ ID NO: 239678 - protein, 18 aa, Homo sapiens
  CDR3 for beta chain variable domain of TCR clone 119839 (TRBV11-2, TRBJ2-3)
CASSLGGASRGAPNTQYF

SEQ ID NO: 239679 - protein, 16 aa, Homo sapiens
  CDR3 for alpha chain variable domain of TCR clone 119840 (TRAV16, TRAJ52)
CALSAAGGTSYGKLTF

SEQ ID NO: 239680 - protein, 12 aa, Homo sapiens
  CDR3 for beta chain variable domain of TCR clone 119840 (TRBV12-4, TRBJ1-3)
CASSFSGTTIYF

SEQ ID NO: 239681 - protein, 14 aa, Homo sapiens
  CDR3 for alpha chain variable domain of TCR clone 119841 (TRAV3, TRAJ21)
CAVESQANFNKFYF

SEQ ID NO: 239682 - protein, 14 aa, Homo sapiens
  CDR3 for beta chain variable domain of TCR clone 119841 (TRBV19, TRBJ2-1)
CASPTFVLSGEQFF

SEQ ID NO: 239683 - protein, 15 aa, Homo sapiens
  CDR3 for alpha chain variable domain of TCR clone 119842 (TRAV8-6, TRAJ23)
CAVSPRGNQGGKLIF

SEQ ID NO: 239684 - protein, 16 aa, Homo sapiens
  CDR3 for beta chain variable domain of TCR clone 119842 (TRBV11-2, TRBJ2-7)
CASSPTTGGVSYEQYF

SEQ ID NO: 239685 - protein, 14 aa, Homo sapiens
  CDR3 for alpha chain variable domain of TCR clone 119843 (TRAV29/DV5, TRAJ48)
CAAMALFGNEKLTF

SEQ ID NO: 239686 - protein, 15 aa, Homo sapiens
  CDR3 for beta chain variable domain of TCR clone 119843 (TRBV7-2, TRBJ2-1)
CASTHGTGTYNEQFF

SEQ ID NO: 239687 - protein, 14 aa, Homo sapiens
  CDR3 for alpha chain variable domain of TCR clone 119844 (TRAV4, TRAJ17)
CLVGDMAAGNRLTF

SEQ ID NO: 239688 - protein, 14 aa, Homo sapiens
  CDR3 for beta chain variable domain of TCR clone 119844 (TRBV7-6, TRBJ2-3)
CASSLGTVTDTQYF

SEQ ID NO: 239689 - protein, 12 aa, Homo sapiens
  CDR3 for alpha chain variable domain of TCR clone 119845 (TRAV13-1, TRAJ21)
CAAKEGFNKFYF

SEQ ID NO: 239690 - protein, 13 aa, Homo sapiens
  CDR3 for beta chain variable domain of TCR clone 119845 (TRBV11-2, TRBJ2-5)
CASSRGPSETQYF

SEQ ID NO: 239691 - protein, 23 aa, Homo sapiens
  CDR3 for alpha chain variable domain of TCR clone 119846 (TRAV26-1, TRAJ38)
CIADNAGNNHIQNPDPAVYQLRD

SEQ ID NO: 239692 - protein, 18 aa, Homo sapiens
  CDR3 for beta chain variable domain of TCR clone 119846 (TRBV13, TRBJ2-6)
CASSPMTSGGSGANVLTF

SEQ ID NO: 239693 - protein, 13 aa, Homo sapiens
  CDR3 for alpha chain variable domain of TCR clone 119847 (TRAV1-2, TRAJ9)
CAALNTGGFKTIF

SEQ ID NO: 239694 - protein, 13 aa, Homo sapiens
  CDR3 for beta chain variable domain of TCR clone 119847 (TRBV12-4, TRBJ2-2)
CASSITGSGELFF

SEQ ID NO: 239695 - protein, 14 aa, Homo sapiens
  CDR3 for alpha chain variable domain of TCR clone 119848 (TRAV17, TRAJ12)
CATDEKDSSYKLIF

SEQ ID NO: 239696 - protein, 16 aa, Homo sapiens
  CDR3 for beta chain variable domain of TCR clone 119848 (TRBV15, TRBJ1-2)
CATSRGPRTGGGGYTF

SEQ ID NO: 239697 - protein, 13 aa, Homo sapiens
  CDR3 for alpha chain variable domain of TCR clone 119849 (TRAV12-1, TRAJ6)
CVVFPGGSYIPTF

SEQ ID NO: 239698 - protein, 13 aa, Homo sapiens
  CDR3 for beta chain variable domain of TCR clone 119849 (TRBV7-9, TRBJ1-2)
CASSLNQNYGYTF

SEQ ID NO: 239699 - protein, 14 aa, Homo sapiens
  CDR3 for alpha chain variable domain of TCR clone 119850 (TRAV1-1, TRAJ27)
CAVIYNTNSGKSTF

SEQ ID NO: 239700 - protein, 15 aa, Homo sapiens
  CDR3 for beta chain variable domain of TCR clone 119850 (TRBV6-3, TRBJ2-7)
CASSSPGTVFYEQYF

SEQ ID NO: 239701 - protein, 16 aa, Homo sapiens
  CDR3 for alpha chain variable domain of TCR clone 119851 (TRAV4, TRAJ42)
CLVGPIYGGSQGNPIF

SEQ ID NO: 239702 - protein, 13 aa, Homo sapiens
  CDR3 for beta chain variable domain of TCR clone 119851 (TRBV11-2, TRBJ2-7)
CASSPLGSYEQYF

SEQ ID NO: 239703 - protein, 13 aa, Homo sapiens
  CDR3 for alpha chain variable domain of TCR clone 119852 (TRAV3, TRAJ27)
CAVRPLGAGKSTF

SEQ ID NO: 239704 - protein, 13 aa, Homo sapiens
  CDR3 for beta chain variable domain of TCR clone 119852 (TRBV12-4, TRBJ1-1)
CASSPGTGFEAFF

SEQ ID NO: 239705 - protein, 15 aa, Homo sapiens
  CDR3 for alpha chain variable domain of TCR clone 119853 (TRAV3, TRAJ3)
CAVRDMSSSASKIIF

SEQ ID NO: 239706 - protein, 17 aa, Homo sapiens
  CDR3 for beta chain variable domain of TCR clone 119853 (TRBV11-2, TRBJ2-1)
CASSLYPPGVEYNEQFF

SEQ ID NO: 239707 - protein, 14 aa, Homo sapiens
  CDR3 for alpha chain variable domain of TCR clone 119854 (TRAV2, TRAJ9)
CAVEDRCGGFKTIF

SEQ ID NO: 239708 - protein, 13 aa, Homo sapiens
  CDR3 for beta chain variable domain of TCR clone 119854 (TRBV3-1, TRBJ1-1)
CASSPGVITEAFF

SEQ ID NO: 239709 - protein, 14 aa, Homo sapiens
  CDR3 for alpha chain variable domain of TCR clone 119855 (TRAV29/DV5, TRAJ36)
CAARRQTGANNLFF

SEQ ID NO: 239710 - protein, 12 aa, Homo sapiens
  CDR3 for beta chain variable domain of TCR clone 119855 (TRBV12-5, TRBJ2-5)
CASGQGVETQYF

SEQ ID NO: 239711 - protein, 13 aa, Homo sapiens
  CDR3 for alpha chain variable domain of TCR clone 119856 (TRAV21, TRAJ11)
SAVPNSGYSTLTF

SEQ ID NO: 239712 - protein, 13 aa, Homo sapiens
  CDR3 for beta chain variable domain of TCR clone 119856 (TRBV3-1, TRBJ2-7)
CASSLRDGYEQYF

SEQ ID NO: 239713 - protein, 11 aa, Homo sapiens
  CDR3 for alpha chain variable domain of TCR clone 119857 (TRAV4, TRAJ23)
CLVAPGGKLIF

SEQ ID NO: 239714 - protein, 15 aa, Homo sapiens
  CDR3 for beta chain variable domain of TCR clone 119857 (TRBV7-2, TRBJ2-1)
CASSSQADEYNEQFF

SEQ ID NO: 239715 - protein, 12 aa, Homo sapiens
  CDR3 for alpha chain variable domain of TCR clone 119858 (TRAV26-2, TRAJ21)
CILKGNFNKFYF

SEQ ID NO: 239716 - protein, 15 aa, Homo sapiens
  CDR3 for beta chain variable domain of TCR clone 119858 (TRBV20-1, TRBJ2-7)
CSAGDRVSGMDEQYF

SEQ ID NO: 239717 - protein, 13 aa, Homo sapiens
  CDR3 for alpha chain variable domain of TCR clone 119859 (TRAV12-1, TRAJ26)
SATYLYYGQNFFF

SEQ ID NO: 239718 - protein, 15 aa, Homo sapiens
  CDR3 for beta chain variable domain of TCR clone 119859 (TRBV5-1, TRBJ2-6)
CASSLDPSGANVLTF

SEQ ID NO: 239719 - protein, 11 aa, Homo sapiens
  CDR3 for alpha chain variable domain of TCR clone 119860 (TRAV21, TRAJ48)
CAVDGNEKLTF

SEQ ID NO: 239720 - protein, 15 aa, Homo sapiens
  CDR3 for beta chain variable domain of TCR clone 119860 (TRBV7-3, TRBJ2-1)
CASSPTGGGEVEQFF

SEQ ID NO: 239721 - protein, 13 aa, Homo sapiens
  CDR3 for alpha chain variable domain of TCR clone 119861 (TRAV17, TRAJ6)
CATGFGGSYIPTF

SEQ ID NO: 239722 - protein, 12 aa, Homo sapiens
  CDR3 for beta chain variable domain of TCR clone 119861 (TRBV28, TRBJ1-6)
CASSLLRGGIAF

SEQ ID NO: 239723 - protein, 16 aa, Homo sapiens
  CDR3 for alpha chain variable domain of TCR clone 119862 (TRAV3, TRAJ37)
CVVRGKGSGNTGKLIF

SEQ ID NO: 239724 - protein, 13 aa, Homo sapiens
  CDR3 for beta chain variable domain of TCR clone 119862 (TRBV14, TRBJ2-7)
CASSQDRRYEQYF

SEQ ID NO: 239725 - protein, 13 aa, Homo sapiens
  CDR3 for alpha chain variable domain of TCR clone 119863 (TRAV27, TRAJ6)
CAGGTRGSYIPTF

SEQ ID NO: 239726 - protein, 15 aa, Homo sapiens
  CDR3 for beta chain variable domain of TCR clone 119863 (TRBV5-5, TRBJ2-7)
CASSLAAPLSCEQYF

SEQ ID NO: 239727 - protein, 16 aa, Homo sapiens
  CDR3 for alpha chain variable domain of TCR clone 119864 (TRAV3, TRAJ32)
CAVRDMGGGATNKLIF

SEQ ID NO: 239728 - protein, 11 aa, Homo sapiens
  CDR3 for beta chain variable domain of TCR clone 119864 (TRBV12-4, TRBJ2-1)
CASSRLNGQFF

SEQ ID NO: 239729 - protein, 15 aa, Homo sapiens
  CDR3 for alpha chain variable domain of TCR clone 119865 (TRAV3, TRAJ22)
CAVRGRGGSARQLTF

SEQ ID NO: 239730 - protein, 14 aa, Homo sapiens
  CDR3 for beta chain variable domain of TCR clone 119865 (TRBV19, TRBJ2-1)
CASSRLASINEQFF

SEQ ID NO: 239731 - protein, 14 aa, Homo sapiens
  CDR3 for alpha chain variable domain of TCR clone 119866 (TRAV1-2, TRAJ8)
CAVREDTGFQKLVF

SEQ ID NO: 239732 - protein, 15 aa, Homo sapiens
  CDR3 for beta chain variable domain of TCR clone 119866 (TRBV18, TRBJ2-7)
CASSPLQGRTYEQYF

SEQ ID NO: 239733 - protein, 13 aa, Homo sapiens
  CDR3 for alpha chain variable domain of TCR clone 119867 (TRAV21, TRAJ27)
CAARPGNAGKSTF

SEQ ID NO: 239734 - protein, 13 aa, Homo sapiens
  CDR3 for beta chain variable domain of TCR clone 119867 (TRBV18, TRBJ2-7)
CASQSGGGCEQYF

SEQ ID NO: 239735 - protein, 12 aa, Homo sapiens
  CDR3 for alpha chain variable domain of TCR clone 119868 (TRAV12-2, TRAJ10)
WGVTGGGNKLTF

SEQ ID NO: 239736 - protein, 16 aa, Homo sapiens
  CDR3 for beta chain variable domain of TCR clone 119868 (TRBV6-4, TRBJ1-2)
CASSEAVGDPNYGYSF

SEQ ID NO: 239737 - protein, 14 aa, Homo sapiens
  CDR3 for alpha chain variable domain of TCR clone 119869 (TRAV8-3, TRAJ35)
CAVVPQGFGNGLHC

SEQ ID NO: 239738 - protein, 15 aa, Homo sapiens
  CDR3 for beta chain variable domain of TCR clone 119869 (TRBV6-1, TRBJ2-2)
CASSAGQGYTGELFF

SEQ ID NO: 239739 - protein, 14 aa, Homo sapiens
  CDR3 for alpha chain variable domain of TCR clone 119870 (TRAV8-3, TRAJ4)
CAVGAAGGYNKLIF

SEQ ID NO: 239740 - protein, 16 aa, Homo sapiens
  CDR3 for beta chain variable domain of TCR clone 119870 (TRBV7-3, TRBJ2-1)
CASSLEGYRSYNEQFF

SEQ ID NO: 239741 - protein, 13 aa, Homo sapiens
  CDR3 for alpha chain variable domain of TCR clone 119871 (TRAV27, TRAJ45)
CRSSGGGADGLTF

SEQ ID NO: 239742 - protein, 15 aa, Homo sapiens
  CDR3 for beta chain variable domain of TCR clone 119871 (TRBV2, TRBJ2-1)
CASSEEREGDNEQFF

SEQ ID NO: 239743 - protein, 18 aa, Homo sapiens
  CDR3 for alpha chain variable domain of TCR clone 119872 (TRAV26-1, TRAJ23)
CIVRVGLEVWNQGGKLIF

SEQ ID NO: 239744 - protein, 16 aa, Homo sapiens
  CDR3 for beta chain variable domain of TCR clone 119872 (TRBV7-2, TRBJ1-2)
CASSSNQDRRGHGYTF

SEQ ID NO: 239745 - protein, 11 aa, Homo sapiens
  CDR3 for alpha chain variable domain of TCR clone 119873 (TRAV16, TRAJ42)
CALASQGNLIF

SEQ ID NO: 239746 - protein, 16 aa, Homo sapiens
  CDR3 for beta chain variable domain of TCR clone 119873 (TRBV27, TRBJ2-5)
CASSYGPGGQKETQYF

SEQ ID NO: 239747 - protein, 14 aa, Homo sapiens
  CDR3 for alpha chain variable domain of TCR clone 119874 (TRAV17, TRAJ22)
CATSPSGSARQLTF

SEQ ID NO: 239748 - protein, 15 aa, Homo sapiens
  CDR3 for beta chain variable domain of TCR clone 119874 (TRBV20-1, TRBJ2-7)
CSARDRVSGMDEQYF

SEQ ID NO: 239749 - protein, 12 aa, Homo sapiens
  CDR3 for alpha chain variable domain of TCR clone 119875 (TRAV12-3, TRAJ17)
CAMTLTGNKLNF

SEQ ID NO: 239750 - protein, 13 aa, Homo sapiens
  CDR3 for beta chain variable domain of TCR clone 119875 (TRBV7-9, TRBJ1-2)
CASSLKQNYGYTF

SEQ ID NO: 239751 - protein, 18 aa, Homo sapiens
  CDR3 for alpha chain variable domain of TCR clone 119876 (TRAV26-2, TRAJ45)
CILRVDKYSGGGADGLTF

SEQ ID NO: 239752 - protein, 12 aa, Homo sapiens
  CDR3 for beta chain variable domain of TCR clone 119876 (TRBV5-5, TRBJ2-5)
CASSYFGETQYF

SEQ ID NO: 239753 - protein, 14 aa, Homo sapiens
  CDR3 for alpha chain variable domain of TCR clone 119877 (TRAV1-2, TRAJ8)
CAVREDTGFQKLVF

SEQ ID NO: 239754 - protein, 13 aa, Homo sapiens
  CDR3 for beta chain variable domain of TCR clone 119877 (TRBV5-1, TRBJ1-2)
CASSIDGPEGYTF

SEQ ID NO: 239755 - protein, 13 aa, Homo sapiens
  CDR3 for alpha chain variable domain of TCR clone 119878 (TRAV8-3, TRAJ43)
CAVVPYNNNDMRF

SEQ ID NO: 239756 - protein, 16 aa, Homo sapiens
  CDR3 for beta chain variable domain of TCR clone 119878 (TRBV5-1, TRBJ2-2)
CASSLWDTTNTGELFF

SEQ ID NO: 239757 - protein, 10 aa, Homo sapiens
  CDR3 for alpha chain variable domain of TCR clone 119879 (TRAV26-1, TRAJ40)
CIAGTYKHIF

SEQ ID NO: 239758 - protein, 15 aa, Homo sapiens
  CDR3 for beta chain variable domain of TCR clone 119879 (TRBV19, TRBJ2-1)
CASSSPGVPLDEQFF

SEQ ID NO: 239759 - protein, 15 aa, Homo sapiens
  CDR3 for alpha chain variable domain of TCR clone 119880 (TRAV13-2, TRAJ45)
CAEHHSGGGADVLTF

SEQ ID NO: 239760 - protein, 15 aa, Homo sapiens
  CDR3 for beta chain variable domain of TCR clone 119880 (TRBV7-2, TRBJ2-7)
CASSLALGSAYEQYF

SEQ ID NO: 239761 - protein, 15 aa, Homo sapiens
  CDR3 for alpha chain variable domain of TCR clone 119881 (TRAV13-1, TRAJ18)
CSASGGGSTLGRLYF

SEQ ID NO: 239762 - protein, 13 aa, Homo sapiens
  CDR3 for beta chain variable domain of TCR clone 119881 (TRBV18, TRBJ2-1)
CASGLASNNEQFF

SEQ ID NO: 239763 - protein, 14 aa, Homo sapiens
  CDR3 for alpha chain variable domain of TCR clone 119882 (TRAV1-2, TRAJ16)
CAVNRFSDGQKLLF

SEQ ID NO: 239764 - protein, 15 aa, Homo sapiens
  CDR3 for beta chain variable domain of TCR clone 119882 (TRBV7-2, TRBJ2-3)
CASSLGGGGRDTQYF

SEQ ID NO: 239765 - protein, 13 aa, Homo sapiens
  CDR3 for alpha chain variable domain of TCR clone 119883 (TRAV13-2, TRAJ53)
CAENMGSNYKLTF

SEQ ID NO: 239766 - protein, 12 aa, Homo sapiens
  CDR3 for beta chain variable domain of TCR clone 119883 (TRBV7-8, TRBJ2-7)
CASSLGDREQYF

SEQ ID NO: 239767 - protein, 16 aa, Homo sapiens
  CDR3 for alpha chain variable domain of TCR clone 119884 (TRAV12-3, TRAJ53)
CAMSPGSGGSNYKLTF

SEQ ID NO: 239768 - protein, 15 aa, Homo sapiens
  CDR3 for beta chain variable domain of TCR clone 119884 (TRBV2, TRBJ2-3)
CASSDFEKATDTQYF

SEQ ID NO: 239769 - protein, 14 aa, Homo sapiens
  CDR3 for alpha chain variable domain of TCR clone 119885 (TRAV13-1, TRAJ35)
CAASKGGFGNGMHC

SEQ ID NO: 239770 - protein, 13 aa, Homo sapiens
  CDR3 for beta chain variable domain of TCR clone 119885 (TRBV7-3, TRBJ1-1)
CASSQDWGAEAFF

SEQ ID NO: 239771 - protein, 12 aa, Homo sapiens
  CDR3 for alpha chain variable domain of TCR clone 119886 (TRAV8-1, TRAJ26)
CAVNNYGQNFVF

SEQ ID NO: 239772 - protein, 15 aa, Homo sapiens
  CDR3 for beta chain variable domain of TCR clone 119886 (TRBV20-1, TRBJ1-1)
CSASWDRLLNTEAFF

SEQ ID NO: 239773 - protein, 15 aa, Homo sapiens
  CDR3 for alpha chain variable domain of TCR clone 119887 (TRAV26-1, TRAJ44)
CIVRANTGTASKLTF

SEQ ID NO: 239774 - protein, 16 aa, Homo sapiens
  CDR3 for beta chain variable domain of TCR clone 119887 (TRBV7-7, TRBJ2-1)
CASSLASGTSYNEQFV

SEQ ID NO: 239775 - protein, 15 aa, Homo sapiens
  CDR3 for alpha chain variable domain of TCR clone 119888 (TRAV8-4, TRAJ13)
CAVSDRGGGYQKVTF

SEQ ID NO: 239776 - protein, 17 aa, Homo sapiens
  CDR3 for beta chain variable domain of TCR clone 119888 (TRBV25-1, TRBJ1-2)
CASSESGSATTNYGYTF

SEQ ID NO: 239777 - protein, 14 aa, Homo sapiens
  CDR3 for alpha chain variable domain of TCR clone 119889 (TRAV12-1, TRAJ13)
CVVIDSGGYQKVTF

SEQ ID NO: 239778 - protein, 13 aa, Homo sapiens
  CDR3 for beta chain variable domain of TCR clone 119889 (TRBV20-1, TRBJ1-1)
CSAPPGGHTEAFL

SEQ ID NO: 239779 - protein, 15 aa, Homo sapiens
  CDR3 for alpha chain variable domain of TCR clone 119890 (TRAV8-4, TRAJ48)
CAVSAAYFGNEKLTF

SEQ ID NO: 239780 - protein, 13 aa, Homo sapiens
  CDR3 for beta chain variable domain of TCR clone 119890 (TRBV10-3, TRBJ2-7)
CASKLAVNYEQYF

SEQ ID NO: 239781 - protein, 14 aa, Homo sapiens
  CDR3 for alpha chain variable domain of TCR clone 119891 (TRAV3, TRAJ13)
CAVSYSGGYQKVTF

SEQ ID NO: 239782 - protein, 15 aa, Homo sapiens
  CDR3 for beta chain variable domain of TCR clone 119891 (TRBV7-2, TRBJ1-3)
CASSLQAGGENTMYF

SEQ ID NO: 239783 - protein, 15 aa, Homo sapiens
  CDR3 for alpha chain variable domain of TCR clone 119892 (TRAV25, TRAJ52)
CAGTSGGTSYGKLTL

SEQ ID NO: 239784 - protein, 16 aa, Homo sapiens
  CDR3 for beta chain variable domain of TCR clone 119892 (TRBV15, TRBJ1-2)
CATSRGPKTGGGGYTF

SEQ ID NO: 239785 - protein, 15 aa, Homo sapiens
  CDR3 for alpha chain variable domain of TCR clone 119893 (TRAV8-2, TRAJ40)
CVASDRGSGTYKYIF

SEQ ID NO: 239786 - protein, 17 aa, Homo sapiens
  CDR3 for beta chain variable domain of TCR clone 119893 (TRBV9, TRBJ2-1)
CASSVRSLSGGNNEQFF

SEQ ID NO: 239787 - protein, 14 aa, Homo sapiens
  CDR3 for alpha chain variable domain of TCR clone 119894 (TRAV1-1, TRAJ30)
CAVRSLNRDDKIIF

SEQ ID NO: 239788 - protein, 15 aa, Homo sapiens
  CDR3 for beta chain variable domain of TCR clone 119894 (TRBV27)
CASSAQQDLNEKLFF

SEQ ID NO: 239789 - protein, 14 aa, Homo sapiens
  CDR3 for alpha chain variable domain of TCR clone 119895 (TRAV17, TRAJ4)
CATAPLGGYNKLIF

SEQ ID NO: 239790 - protein, 13 aa, Homo sapiens
  CDR3 for beta chain variable domain of TCR clone 119895 (TRBV11-2, TRBJ2-5)
CASSFSSQETQYF

SEQ ID NO: 239791 - protein, 13 aa, Homo sapiens
  CDR3 for alpha chain variable domain of TCR clone 119896 (TRAV3, TRAJ21)
FAVREPDFNKFYF

SEQ ID NO: 239792 - protein, 18 aa, Homo sapiens
  CDR3 for beta chain variable domain of TCR clone 119896 (TRBV11-2, TRBJ2-3)
CASSLGGASRGAPNTQYF

SEQ ID NO: 239793 - protein, 12 aa, Homo sapiens
  CDR3 for alpha chain variable domain of TCR clone 119897 (TRAV27, TRAJ41)
CAGRNSGYALNF

SEQ ID NO: 239794 - protein, 10 aa, Homo sapiens
  CDR3 for beta chain variable domain of TCR clone 119897 (TRBV20-1, TRBJ1-5)
RTGVLDSQHF

SEQ ID NO: 239795 - protein, 14 aa, Homo sapiens
  CDR3 for alpha chain variable domain of TCR clone 119898 (TRAV1-1, TRAJ27)
CAVIYNNNAGKSTF

SEQ ID NO: 239796 - protein, 15 aa, Homo sapiens
  CDR3 for beta chain variable domain of TCR clone 119898 (TRBV7-2, TRBJ2-1)
CASSSGLAGGNEQFF

SEQ ID NO: 239797 - protein, 14 aa, Homo sapiens
  CDR3 for alpha chain variable domain of TCR clone 119899 (TRAV29/DV5, TRAJ20)
CAATIRSKDYKLSF

SEQ ID NO: 239798 - protein, 15 aa, Homo sapiens
  CDR3 for beta chain variable domain of TCR clone 119899 (TRBV20-1, TRBJ2-1)
CSASSAGSSYNEQFF

SEQ ID NO: 239799 - protein, 14 aa, Homo sapiens
  CDR3 for alpha chain variable domain of TCR clone 119900 (TRAV13-1, TRAJ44)
CAAKATGTASKLTF

SEQ ID NO: 239800 - protein, 17 aa, Homo sapiens
  CDR3 for beta chain variable domain of TCR clone 119900 (TRBV7-3, TRBJ2-3)
RASSLMKRMRGADTQCF

SEQ ID NO: 239801 - protein, 12 aa, Homo sapiens
  CDR3 for alpha chain variable domain of TCR clone 119901 (TRAV3, TRAJ39)
CAVIEWSNMLTF

SEQ ID NO: 239802 - protein, 14 aa, Homo sapiens
  CDR3 for beta chain variable domain of TCR clone 119901 (TRBV19, TRBJ2-1)
CASPTFVLSGEQFF

SEQ ID NO: 239803 - protein, 14 aa, Homo sapiens
  CDR3 for alpha chain variable domain of TCR clone 119902 (TRAV1-2, TRAJ8)
FAVREDTGFQKLVF

SEQ ID NO: 239804 - protein, 13 aa, Homo sapiens
  CDR3 for beta chain variable domain of TCR clone 119902 (TRBV12-4, TRBJ1-5)
CASSPDRAQPQHF

SEQ ID NO: 239805 - protein, 12 aa, Homo sapiens
  CDR3 for alpha chain variable domain of TCR clone 119903 (TRAV4, TRAJ21)
CLGGDNFNKFYF

SEQ ID NO: 239806 - protein, 17 aa, Homo sapiens
  CDR3 for beta chain variable domain of TCR clone 119903 (TRBV3-1, TRBJ2-7)
CASSQDLTGLSSYEQYF

SEQ ID NO: 239807 - protein, 11 aa, Homo sapiens
  CDR3 for alpha chain variable domain of TCR clone 119904 (TRAV3, TRAJ21)
CAVGNFNKFYF

SEQ ID NO: 239808 - protein, 12 aa, Homo sapiens
  CDR3 for beta chain variable domain of TCR clone 119904 (TRBV27, TRBJ2-2)
CASKLFTGELFF

SEQ ID NO: 239809 - protein, 18 aa, Homo sapiens
  CDR3 for alpha chain variable domain of TCR clone 119905 (TRAV12-3, TRAJ52)
CAMSVGGAGGTSYGKLTF

SEQ ID NO: 239810 - protein, 13 aa, Homo sapiens
  CDR3 for beta chain variable domain of TCR clone 119905 (TRBV4-2, TRBJ1-1)
CASSQAGNTEAFF

SEQ ID NO: 239811 - protein, 13 aa, Homo sapiens
  CDR3 for alpha chain variable domain of TCR clone 119906 (TRAV12-3, TRAJ9)
CAMSADGGFKTIF

SEQ ID NO: 239812 - protein, 15 aa, Homo sapiens
  CDR3 for beta chain variable domain of TCR clone 119906 (TRBV19, TRBJ1-6)
CASSTQGAVGSPLHL

SEQ ID NO: 239813 - protein, 14 aa, Homo sapiens
  CDR3 for alpha chain variable domain of TCR clone 119907 (TRAV16, TRAJ17)
CAPRIKAAGNKLTF

SEQ ID NO: 239814 - protein, 17 aa, Homo sapiens
  CDR3 for beta chain variable domain of TCR clone 119907 (TRBV7-2, TRBJ2-3)
CASSAYSGTRRADTQYF

SEQ ID NO: 239815 - protein, 17 aa, Homo sapiens
  CDR3 for alpha chain variable domain of TCR clone 119908 (TRAV26-1, TRAJ37)
CIVRVITVSSNTVKLIF

SEQ ID NO: 239816 - protein, 11 aa, Homo sapiens
  CDR3 for beta chain variable domain of TCR clone 119908 (TRBV29-1, TRBJ2-5)
CSEDRTGTQYF

SEQ ID NO: 239817 - protein, 15 aa, Homo sapiens
  CDR3 for alpha chain variable domain of TCR clone 119909 (TRAV1-2, TRAJ30)
CAVRPHGNRDDKIIF

SEQ ID NO: 239818 - protein, 17 aa, Homo sapiens
  CDR3 for beta chain variable domain of TCR clone 119909 (TRBV4-1, TRBJ2-7)
CASSQGRGLQTSYEQYF

SEQ ID NO: 239819 - protein, 14 aa, Homo sapiens
  CDR3 for alpha chain variable domain of TCR clone 119910 (TRAV3, TRAJ21)
CAPGRGSTNFTLDL

SEQ ID NO: 239820 - protein, 14 aa, Homo sapiens
  CDR3 for beta chain variable domain of TCR clone 119910 (TRBV7-9, TRBJ2-4)
CASSLAMGGNIQYF

SEQ ID NO: 239821 - protein, 14 aa, Homo sapiens
  CDR3 for alpha chain variable domain of TCR clone 119911 (TRAV12-2, TRAJ13)
RAVKKTGGYQKVTF

SEQ ID NO: 239822 - protein, 13 aa, Homo sapiens
  CDR3 for beta chain variable domain of TCR clone 119911 (TRBV7-9, TRBJ1-2)
CASSLKQNYGYTF

SEQ ID NO: 239823 - protein, 15 aa, Homo sapiens
  CDR3 for alpha chain variable domain of TCR clone 119912 (TRAV3, TRAJ22)
CAVRDRGGSARQLTF

SEQ ID NO: 239824 - protein, 14 aa, Homo sapiens
  CDR3 for beta chain variable domain of TCR clone 119912 (TRBV12-4, TRBJ1-1)
CASSPIRRTGEAFF

SEQ ID NO: 239825 - protein, 14 aa, Homo sapiens
  CDR3 for alpha chain variable domain of TCR clone 119913 (TRAV12-2, TRAJ13)
CAVKKTGGYQKVAF

SEQ ID NO: 239826 - protein, 12 aa, Homo sapiens
  CDR3 for beta chain variable domain of TCR clone 119913 (TRBV29-1, TRBJ1-1)
CSESDGNTEAFF

SEQ ID NO: 239827 - protein, 13 aa, Homo sapiens
  CDR3 for alpha chain variable domain of TCR clone 119914 (TRAV12-3, TRAJ49)
CAMLSNTGNQFYF

SEQ ID NO: 239828 - protein, 13 aa, Homo sapiens
  CDR3 for beta chain variable domain of TCR clone 119914 (TRBV12-5, TRBJ2-3)
CASGDRQSDTQYF

SEQ ID NO: 239829 - protein, 14 aa, Homo sapiens
  CDR3 for alpha chain variable domain of TCR clone 119915 (TRAV8-3, TRAJ39)
CAVGAWGAGNMLAF

SEQ ID NO: 239830 - protein, 16 aa, Homo sapiens
  CDR3 for beta chain variable domain of TCR clone 119915 (TRBV7-2, TRBJ1-3)
CASSSGRVLSGNTIYF

SEQ ID NO: 239831 - protein, 15 aa, Homo sapiens
  CDR3 for alpha chain variable domain of TCR clone 119916 (TRAV12-3, TRAJ6)
CAMSATTGGSYIPTF

SEQ ID NO: 239832 - protein, 12 aa, Homo sapiens
  CDR3 for beta chain variable domain of TCR clone 119916 (TRBV7-9, TRBJ2-7)
CASSIKREEQYF

SEQ ID NO: 239833 - protein, 14 aa, Homo sapiens
  CDR3 for alpha chain variable domain of TCR clone 119917 (TRAV13-1, TRAJ17)
CAASRGAAGNKLTF

SEQ ID NO: 239834 - protein, 13 aa, Homo sapiens
  CDR3 for beta chain variable domain of TCR clone 119917 (TRBV11-2, TRBJ2-5)
CASSFSSQETQYF

SEQ ID NO: 239835 - protein, 16 aa, Homo sapiens
  CDR3 for alpha chain variable domain of TCR clone 119918 (TRAV20, TRAJ22)
CAVQDSSSGSARQLTF

SEQ ID NO: 239836 - protein, 13 aa, Homo sapiens
  CDR3 for beta chain variable domain of TCR clone 119918 (TRBV7-2, TRBJ2-5)
CASSQTSVETQYF

SEQ ID NO: 239837 - protein, 14 aa, Homo sapiens
  CDR3 for alpha chain variable domain of TCR clone 119919 (TRAV16, TRAJ17)
CSPRIKAAGNKLTF

SEQ ID NO: 239838 - protein, 17 aa, Homo sapiens
  CDR3 for beta chain variable domain of TCR clone 119919 (TRBV7-2, TRBJ2-3)
CASSSYSGTRRADTQYF

SEQ ID NO: 239839 - protein, 12 aa, Homo sapiens
  CDR3 for alpha chain variable domain of TCR clone 119920 (TRAV12-3, TRAJ17)
CAMTLTGNKLTF

SEQ ID NO: 239840 - protein, 13 aa, Homo sapiens
  CDR3 for beta chain variable domain of TCR clone 119920 (TRBV7-3, TRBJ1-1)
CASSQDWGAKAFF

SEQ ID NO: 239841 - protein, 14 aa, Homo sapiens
  CDR3 for alpha chain variable domain of TCR clone 119921 (TRAV2, TRAJ37)
CAVDFTSDTGKLIF

SEQ ID NO: 239842 - protein, 14 aa, Homo sapiens
  CDR3 for beta chain variable domain of TCR clone 119921 (TRBV6-1, TRBJ1-3)
CASVQGGGGNTIYF

SEQ ID NO: 239843 - protein, 15 aa, Homo sapiens
  CDR3 for alpha chain variable domain of TCR clone 119922 (TRAV26-1, TRAJ22)
CIVRVSFWFCKATDL

SEQ ID NO: 239844 - protein, 14 aa, Homo sapiens
  CDR3 for beta chain variable domain of TCR clone 119922 (TRBV7-2, TRBJ2-7)
CASRSQGAAYEQYF

SEQ ID NO: 239845 - protein, 14 aa, Homo sapiens
  CDR3 for alpha chain variable domain of TCR clone 119923 (TRAV12-3, TRAJ20)
CAMSARRGDYKLSF

SEQ ID NO: 239846 - protein, 14 aa, Homo sapiens
  CDR3 for beta chain variable domain of TCR clone 119923 (TRBV7-3, TRBJ2-3)
CASSPSARTYTQYF

SEQ ID NO: 239847 - protein, 14 aa, Homo sapiens
  CDR3 for alpha chain variable domain of TCR clone 119924 (TRAV12-2, TRAJ13)
CAVKKTGGYQKVTF

SEQ ID NO: 239848 - protein, 16 aa, Homo sapiens
  CDR3 for beta chain variable domain of TCR clone 119924 (TRBV28, TRBJ2-1)
CASSSSYSGSLNEQFF

SEQ ID NO: 239849 - protein, 14 aa, Homo sapiens
  CDR3 for alpha chain variable domain of TCR clone 119925 (TRAV17, TRAJ57)
CATDPQGGSDKLVF

SEQ ID NO: 239850 - protein, 14 aa, Homo sapiens
  CDR3 for beta chain variable domain of TCR clone 119925 (TRBV13, TRBJ2-7)
CASSLKGASYEQYF

SEQ ID NO: 239851 - protein, 15 aa, Homo sapiens
  CDR3 for alpha chain variable domain of TCR clone 119926 (TRAV3, TRAJ5)
CAVRDLDTGRRALTF

SEQ ID NO: 239852 - protein, 20 aa, Homo sapiens
  CDR3 for beta chain variable domain of TCR clone 119926 (TRBV4-2, TRBJ2-7)
CASSQASGGNLRAVLRAGHQ

SEQ ID NO: 239853 - protein, 11 aa, Homo sapiens
  CDR3 for alpha chain variable domain of TCR clone 119927 (TRAV8-4, TRAJ20)
CAGTNVLTTTS

SEQ ID NO: 239854 - protein, 16 aa, Homo sapiens
  CDR3 for beta chain variable domain of TCR clone 119927 (TRBV6-1, TRBJ1-2)
CASSGAWQGRSHGYTF

SEQ ID NO: 239855 - protein, 14 aa, Homo sapiens
  CDR3 for alpha chain variable domain of TCR clone 119928 (TRAV17, TRAJ6)
CATDASGGSYIPTF

SEQ ID NO: 239856 - protein, 19 aa, Homo sapiens
  CDR3 for beta chain variable domain of TCR clone 119928 (TRBV4-3, TRBJ2-7)
CASSQAFIGWQVTPYEQYF

SEQ ID NO: 239857 - protein, 14 aa, Homo sapiens
  CDR3 for alpha chain variable domain of TCR clone 119929 (TRAV26-1, TRAJ38)
FIADNAGNNRKLIW

SEQ ID NO: 239858 - protein, 17 aa, Homo sapiens
  CDR3 for beta chain variable domain of TCR clone 119929 (TRBV15, TRBJ1-1)
CATSRVGGADGDTEAFF

SEQ ID NO: 239859 - protein, 13 aa, Homo sapiens
  CDR3 for alpha chain variable domain of TCR clone 119930 (TRAV27, TRAJ57)
CRSAQGGSEKLVF

SEQ ID NO: 239860 - protein, 16 aa, Homo sapiens
  CDR3 for beta chain variable domain of TCR clone 119930 (TRBV4-1, TRBJ2-3)
CASSQSTSGAEDTQYF

SEQ ID NO: 239861 - protein, 14 aa, Homo sapiens
  CDR3 for alpha chain variable domain of TCR clone 119931 (TRAV12-2, TRAJ40)
CAVKIPSGTYKYIF

SEQ ID NO: 239862 - protein, 14 aa, Homo sapiens
  CDR3 for beta chain variable domain of TCR clone 119931 (TRBV20-1, TRBJ2-4)
CSASGRVGENIQYF

SEQ ID NO: 239863 - protein, 18 aa, Homo sapiens
  CDR3 for alpha chain variable domain of TCR clone 119932 (TRAV35, TRAJ28)
CAGHNYPLSGAGSSQLTF

SEQ ID NO: 239864 - protein, 12 aa, Homo sapiens
  CDR3 for beta chain variable domain of TCR clone 119932 (TRBV7-9, TRBJ1-1)
CASSLEGTEAFF

SEQ ID NO: 239865 - protein, 10 aa, Homo sapiens
  CDR3 for alpha chain variable domain of TCR clone 119933 (TRAV1-2, TRAJ23)
CAAWAGKLIF

SEQ ID NO: 239866 - protein, 12 aa, Homo sapiens
  CDR3 for beta chain variable domain of TCR clone 119933 (TRBV11-2, TRBJ2-2)
CASSLPTGELFF

SEQ ID NO: 239867 - protein, 16 aa, Homo sapiens
  CDR3 for alpha chain variable domain of TCR clone 119934 (TRAV16, TRAJ9)
CALSRMFSGGYNKLIF

SEQ ID NO: 239868 - protein, 16 aa, Homo sapiens
  CDR3 for beta chain variable domain of TCR clone 119934 (TRBV24-1, TRBJ2-3)
CATSDPGTGATDTQYF

SEQ ID NO: 239869 - protein, 14 aa, Homo sapiens
  CDR3 for alpha chain variable domain of TCR clone 119935 (TRAV2, TRAJ29)
CAVTPPSGNTPLVF

SEQ ID NO: 239870 - protein, 13 aa, Homo sapiens
  CDR3 for beta chain variable domain of TCR clone 119935 (TRBV11-2, TRBJ2-1)
YASSLGLAGGRFF

SEQ ID NO: 239871 - protein, 14 aa, Homo sapiens
  CDR3 for alpha chain variable domain of TCR clone 119936 (TRAV1-2, TRAJ16)
CAVNRLSDGQKLLF

SEQ ID NO: 239872 - protein, 14 aa, Homo sapiens
  CDR3 for beta chain variable domain of TCR clone 119936 (TRBV19, TRBJ2-7)
CASSVDSESYEQYF

SEQ ID NO: 239873 - protein, 12 aa, Homo sapiens
  CDR3 for alpha chain variable domain of TCR clone 119937 (TRAV12-3, TRAJ17)
CAMTLTGNKLTF

SEQ ID NO: 239874 - protein, 12 aa, Homo sapiens
  CDR3 for beta chain variable domain of TCR clone 119937 (TRBV18, TRBJ2-7)
CASSLDSYEQYF

SEQ ID NO: 239875 - protein, 13 aa, Homo sapiens
  CDR3 for alpha chain variable domain of TCR clone 119938 (TRAV12-3, TRAJ7)
CAMTPYGNNRLAF

SEQ ID NO: 239876 - protein, 16 aa, Homo sapiens
  CDR3 for beta chain variable domain of TCR clone 119938 (TRBV28, TRBJ2-7)
CASSLFFETGGPEQYF

SEQ ID NO: 239877 - protein, 16 aa, Homo sapiens
  CDR3 for alpha chain variable domain of TCR clone 119939 (TRAV3, TRAJ4)
CAVRPSPSGGYNKLSF

SEQ ID NO: 239878 - protein, 12 aa, Homo sapiens
  CDR3 for beta chain variable domain of TCR clone 119939 (TRBV7-9, TRBJ2-7)
CASSQGVYEQYF

SEQ ID NO: 239879 - protein, 15 aa, Homo sapiens
  CDR3 for alpha chain variable domain of TCR clone 119940 (TRAV2, TRAJ22)
CAVPSRGGSAMQLTF

SEQ ID NO: 239880 - protein, 11 aa, Homo sapiens
  CDR3 for beta chain variable domain of TCR clone 119940 (TRBV27, TRBJ2-3)
CASSLGDTQYF

SEQ ID NO: 239881 - protein, 15 aa, Homo sapiens
  CDR3 for alpha chain variable domain of TCR clone 119941 (TRAV26-1, TRAJ38)
CIASSNAGNNRKLIL

SEQ ID NO: 239882 - protein, 12 aa, Homo sapiens
  CDR3 for beta chain variable domain of TCR clone 119941 (TRBV5-8, TRBJ1-2)
CASSFGVYGYTF

SEQ ID NO: 239883 - protein, 14 aa, Homo sapiens
  CDR3 for alpha chain variable domain of TCR clone 119942 (TRAV12-2, TRAJ13)
CAVKKTGGYQKVTF

SEQ ID NO: 239884 - protein, 16 aa, Homo sapiens
  CDR3 for beta chain variable domain of TCR clone 119942 (TRBV6-1, TRBJ1-1)
CASRDSGRGMNTEAFF

SEQ ID NO: 239885 - protein, 15 aa, Homo sapiens
  CDR3 for alpha chain variable domain of TCR clone 119943 (TRAV12-2, TRAJ53)
CAMNGGGGSNYKLTF

SEQ ID NO: 239886 - protein, 16 aa, Homo sapiens
  CDR3 for beta chain variable domain of TCR clone 119943 (TRBV7-3, TRBJ2-3)
CASSLSGYRPEDTQYF

SEQ ID NO: 239887 - protein, 13 aa, Homo sapiens
  CDR3 for alpha chain variable domain of TCR clone 119944 (TRAV1-2, TRAJ9)
CAALNTGGFITIF

SEQ ID NO: 239888 - protein, 13 aa, Homo sapiens
  CDR3 for beta chain variable domain of TCR clone 119944 (TRBV4-1, TRBJ2-1)
CASSQAGGDEQFF

SEQ ID NO: 239889 - protein, 16 aa, Homo sapiens
  CDR3 for alpha chain variable domain of TCR clone 119945 (TRAV30, TRAJ24)
CGTETVDADSWGKFQF

SEQ ID NO: 239890 - protein, 14 aa, Homo sapiens
  CDR3 for beta chain variable domain of TCR clone 119945 (TRBV12-5, TRBJ2-5)
RASGSRTHQETQYF

SEQ ID NO: 239891 - protein, 17 aa, Homo sapiens
  CDR3 for alpha chain variable domain of TCR clone 119946 (TRAV36/DV7, TRAJ52)
CAVAQRAGGTSCGKLTF

SEQ ID NO: 239892 - protein, 14 aa, Homo sapiens
  CDR3 for beta chain variable domain of TCR clone 119946 (TRBV19, TRBJ2-1)
CASPTFVLSGEQFF

SEQ ID NO: 239893 - protein, 14 aa, Homo sapiens
  CDR3 for alpha chain variable domain of TCR clone 119947 (TRAV17, TRAJ37)
CATDGSSNTGKLIF

SEQ ID NO: 239894 - protein, 15 aa, Homo sapiens
  CDR3 for beta chain variable domain of TCR clone 119947 (TRBV5-1, TRBJ2-7)
CASSFSTDSVYEQYF

SEQ ID NO: 239895 - protein, 12 aa, Homo sapiens
  CDR3 for alpha chain variable domain of TCR clone 119948 (TRAV1-1, TRAJ33)
CAALDSNYQLIW

SEQ ID NO: 239896 - protein, 14 aa, Homo sapiens
  CDR3 for beta chain variable domain of TCR clone 119948 (TRBV19, TRBJ2-3)
CASSAPRGTDTQYF

SEQ ID NO: 239897 - protein, 12 aa, Homo sapiens
  CDR3 for alpha chain variable domain of TCR clone 119949 (TRAV12-2, TRAJ31)
CAVSTPDARLMF

SEQ ID NO: 239898 - protein, 15 aa, Homo sapiens
  CDR3 for beta chain variable domain of TCR clone 119949 (TRBV20-1, TRBJ2-7)
CSAESGTSGAYEQYF

SEQ ID NO: 239899 - protein, 14 aa, Homo sapiens
  CDR3 for alpha chain variable domain of TCR clone 119950 (TRAV12-3, TRAJ9)
CAMSPNTGGFKTIF

SEQ ID NO: 239900 - protein, 14 aa, Homo sapiens
  CDR3 for beta chain variable domain of TCR clone 119950 (TRBV4-2, TRBJ2-1)
CASGLDRAYNEQFF

SEQ ID NO: 239901 - protein, 14 aa, Homo sapiens
  CDR3 for alpha chain variable domain of TCR clone 119951 (TRAV12-3, TRAJ10)
SHLPLTGGGNKLTF

SEQ ID NO: 239902 - protein, 12 aa, Homo sapiens
  CDR3 for beta chain variable domain of TCR clone 119951 (TRBV7-8, TRBJ2-1)
CASTDRDNEQFF

SEQ ID NO: 239903 - protein, 12 aa, Homo sapiens
  CDR3 for alpha chain variable domain of TCR clone 119952 (TRAV1-2, TRAJ33)
CAALDSNYQLIL

SEQ ID NO: 239904 - protein, 16 aa, Homo sapiens
  CDR3 for beta chain variable domain of TCR clone 119952 (TRBV24-1, TRBJ2-3)
CATSDRRQDLTDTQYF

SEQ ID NO: 239905 - protein, 15 aa, Homo sapiens
  CDR3 for alpha chain variable domain of TCR clone 119953 (TRAV2, TRAJ28)
CAVPYSGAGSYQLTF

SEQ ID NO: 239906 - protein, 17 aa, Homo sapiens
  CDR3 for beta chain variable domain of TCR clone 119953 (TRBV20-1, TRBJ2-4)
CSARDWASGGRDNIQYF

SEQ ID NO: 239907 - protein, 15 aa, Homo sapiens
  CDR3 for alpha chain variable domain of TCR clone 119954 (TRAV17, TRAJ35)
CATAFVIGFGNVLHC

SEQ ID NO: 239908 - protein, 15 aa, Homo sapiens
  CDR3 for beta chain variable domain of TCR clone 119954 (TRBV7-9, TRBJ2-7)
CSSSLALAEAYEQYF

SEQ ID NO: 239909 - protein, 15 aa, Homo sapiens
  CDR3 for alpha chain variable domain of TCR clone 119955 (TRAV3, TRAJ40)
CAVRDVTSGTYKYNF

SEQ ID NO: 239910 - protein, 13 aa, Homo sapiens
  CDR3 for beta chain variable domain of TCR clone 119955 (TRBV7-9, TRBJ1-2)
CASSLKQNYGYTF

SEQ ID NO: 239911 - protein, 14 aa, Homo sapiens
  CDR3 for alpha chain variable domain of TCR clone 119956 (TRAV12-1, TRAJ42)
CVVIYGGSQGNPIF

SEQ ID NO: 239912 - protein, 13 aa, Homo sapiens
  CDR3 for beta chain variable domain of TCR clone 119956 (TRBV18, TRBJ2-5)
CASSPPGKETQYF

SEQ ID NO: 239913 - protein, 14 aa, Homo sapiens
  CDR3 for alpha chain variable domain of TCR clone 119957 (TRAV23/DV6, TRAJ6)
CAASRSGGSYIHTF

SEQ ID NO: 239914 - protein, 17 aa, Homo sapiens
  CDR3 for beta chain variable domain of TCR clone 119957 (TRBV20-1, TRBJ2-1)
CSASASGLAGSYNEQFF

SEQ ID NO: 239915 - protein, 14 aa, Homo sapiens
  CDR3 for alpha chain variable domain of TCR clone 119958 (TRAV1-2, TRAJ8)
CAVREDTGFQKLVF

SEQ ID NO: 239916 - protein, 12 aa, Homo sapiens
  CDR3 for beta chain variable domain of TCR clone 119958 (TRBV2, TRBJ2-7)
CASTYRTDEQYF

SEQ ID NO: 239917 - protein, 15 aa, Homo sapiens
  CDR3 for alpha chain variable domain of TCR clone 119959 (TRAV26-1, TRAJ44)
CIVRANTGTASKLTF

SEQ ID NO: 239918 - protein, 16 aa, Homo sapiens
  CDR3 for beta chain variable domain of TCR clone 119959 (TRBV5-1, TRBJ1-4)
CASSLDRVGDNEKLFF

SEQ ID NO: 239919 - protein, 21 aa, Homo sapiens
  CDR3 for alpha chain variable domain of TCR clone 119960 (TRAV1-1, TRAJ6)
CLLLLRCERLERTGGSYIPTF

SEQ ID NO: 239920 - protein, 12 aa, Homo sapiens
  CDR3 for beta chain variable domain of TCR clone 119960 (TRBV11-2, TRBJ2-2)
CASSLPTGELFF

SEQ ID NO: 239921 - protein, 13 aa, Homo sapiens
  CDR3 for alpha chain variable domain of TCR clone 119961 (TRAV4, TRAJ42)
CLVGGGSHGNLIF

SEQ ID NO: 239922 - protein, 16 aa, Homo sapiens
  CDR3 for beta chain variable domain of TCR clone 119961 (TRBV5-1, TRBJ2-3)
CASSLQGRVGADTQYF

SEQ ID NO: 239923 - protein, 13 aa, Homo sapiens
  CDR3 for alpha chain variable domain of TCR clone 119962 (TRAV27, TRAJ29)
CAGAHSGNTPLVF

SEQ ID NO: 239924 - protein, 19 aa, Homo sapiens
  CDR3 for beta chain variable domain of TCR clone 119962 (TRBV4-1, TRBJ2-4)
CASSQDLGQGAGAKNIQYF

SEQ ID NO: 239925 - protein, 16 aa, Homo sapiens
  CDR3 for alpha chain variable domain of TCR clone 119963 (TRAV3, TRAJ10)
CAVRDMRAGGGNKLNF

SEQ ID NO: 239926 - protein, 13 aa, Homo sapiens
  CDR3 for beta chain variable domain of TCR clone 119963 (TRBV20-1, TRBJ2-7)
CSARWGYNYEQYF

SEQ ID NO: 239927 - protein, 13 aa, Homo sapiens
  CDR3 for alpha chain variable domain of TCR clone 119964 (TRAV2, TRAJ40)
CAVVTSGTYKYTL

SEQ ID NO: 239928 - protein, 14 aa, Homo sapiens
  CDR3 for beta chain variable domain of TCR clone 119964 (TRBV19, TRBJ2-1)
CASPTFVLSGEQFF

SEQ ID NO: 239929 - protein, 14 aa, Homo sapiens
  CDR3 for alpha chain variable domain of TCR clone 119965 (TRAV1-2, TRAJ16)
CAVNRFSDGQKLLF

SEQ ID NO: 239930 - protein, 14 aa, Homo sapiens
  CDR3 for beta chain variable domain of TCR clone 119965 (TRBV27, TRBJ2-1)
CASRHLGGGKEQFF

SEQ ID NO: 239931 - protein, 12 aa, Homo sapiens
  CDR3 for alpha chain variable domain of TCR clone 119966 (TRAV3, TRAJ39)
CAVIEWSNMRTF

SEQ ID NO: 239932 - protein, 14 aa, Homo sapiens
  CDR3 for beta chain variable domain of TCR clone 119966 (TRBV7-8, TRBJ2-3)
CASSFPDGQDTQYF

SEQ ID NO: 239933 - protein, 16 aa, Homo sapiens
  CDR3 for alpha chain variable domain of TCR clone 119967 (TRAV1-2, TRAJ18)
CAVRVERGSTLGRLYF

SEQ ID NO: 239934 - protein, 16 aa, Homo sapiens
  CDR3 for beta chain variable domain of TCR clone 119967 (TRBV20-1, TRBJ2-7)
GSASTSGRLSSYEQYF

SEQ ID NO: 239935 - protein, 14 aa, Homo sapiens
  CDR3 for alpha chain variable domain of TCR clone 119968 (TRAV2, TRAJ9)
CAVEDRSGGFKTIF

SEQ ID NO: 239936 - protein, 16 aa, Homo sapiens
  CDR3 for beta chain variable domain of TCR clone 119968 (TRBV28, TRBJ2-3)
CASSFFRDPRLGTQYF

SEQ ID NO: 239937 - protein, 15 aa, Homo sapiens
  CDR3 for alpha chain variable domain of TCR clone 119969 (TRAV35, TRAJ23)
CAGPLGNNQGGKPIF

SEQ ID NO: 239938 - protein, 14 aa, Homo sapiens
  CDR3 for beta chain variable domain of TCR clone 119969 (TRBV7-9, TRBJ1-1)
CASTPLQSYTEAFF

SEQ ID NO: 239939 - protein, 16 aa, Homo sapiens
  CDR3 for alpha chain variable domain of TCR clone 119970 (TRAV14/DV4, TRAJ53)
CAMREGGGGSNYKLTF

SEQ ID NO: 239940 - protein, 13 aa, Homo sapiens
  CDR3 for beta chain variable domain of TCR clone 119970 (TRBV12-4, TRBJ2-5)
CASSPGTEETQYF

SEQ ID NO: 239941 - protein, 16 aa, Homo sapiens
  CDR3 for alpha chain variable domain of TCR clone 119971 (TRAV12-2, TRAJ18)
CAVTTDRGSTLGRLYF

SEQ ID NO: 239942 - protein, 14 aa, Homo sapiens
  CDR3 for beta chain variable domain of TCR clone 119971 (TRBV4-2, TRBJ1-5)
CASSLDSINQPQHF

SEQ ID NO: 239943 - protein, 17 aa, Homo sapiens
  CDR3 for alpha chain variable domain of TCR clone 119972 (TRAV12-2, TRAJ22)
CAVNRIPFSGSARQLTL

SEQ ID NO: 239944 - protein, 13 aa, Homo sapiens
  CDR3 for beta chain variable domain of TCR clone 119972 (TRBV11-3, TRBJ1-1)
CASSSNRDTEAFF

SEQ ID NO: 239945 - protein, 13 aa, Homo sapiens
  CDR3 for alpha chain variable domain of TCR clone 119973 (TRAV8-3, TRAJ15)
CAVGIQAGTALIF

SEQ ID NO: 239946 - protein, 17 aa, Homo sapiens
  CDR3 for beta chain variable domain of TCR clone 119973 (TRBV20-1, TRBJ2-1)
CSARDTLAGVSYNEQFF

SEQ ID NO: 239947 - protein, 14 aa, Homo sapiens
  CDR3 for alpha chain variable domain of TCR clone 119974 (TRAV13-1, TRAJ10)
CAALFTVGGNKLTF

SEQ ID NO: 239948 - protein, 15 aa, Homo sapiens
  CDR3 for beta chain variable domain of TCR clone 119974 (TRBV10-3, TRBJ2-2)
CAISEGDRAAGELFF

SEQ ID NO: 239949 - protein, 15 aa, Homo sapiens
  CDR3 for alpha chain variable domain of TCR clone 119975 (TRAV12-1, TRAJ44)
CVADLPTGTASKLTF

SEQ ID NO: 239950 - protein, 15 aa, Homo sapiens
  CDR3 for beta chain variable domain of TCR clone 119975 (TRBV19, TRBJ1-5)
CASSIVWADNQPQHF

SEQ ID NO: 239951 - protein, 13 aa, Homo sapiens
  CDR3 for alpha chain variable domain of TCR clone 119976 (TRAV8-3, TRAJ28)
CAVGAVGSYQLTF

SEQ ID NO: 239952 - protein, 15 aa, Homo sapiens
  CDR3 for beta chain variable domain of TCR clone 119976 (TRBV7-9, TRBJ1-5)
CASSQGHQPNQPKHF

SEQ ID NO: 239953 - protein, 12 aa, Homo sapiens
  CDR3 for alpha chain variable domain of TCR clone 119977 (TRAV3, TRAJ31)
CAVRDGNARLMF

SEQ ID NO: 239954 - protein, 18 aa, Homo sapiens
  CDR3 for beta chain variable domain of TCR clone 119977 (TRBV7-2, TRBJ2-3)
CASSLKREVSGITDTQYF

SEQ ID NO: 239955 - protein, 11 aa, Homo sapiens
  CDR3 for alpha chain variable domain of TCR clone 119978 (TRAV2, TRAJ21)
CAVFNFNKFYF

SEQ ID NO: 239956 - protein, 16 aa, Homo sapiens
  CDR3 for beta chain variable domain of TCR clone 119978 (TRBV13, TRBJ2-2)
CASSPRTGEHTGELFF

SEQ ID NO: 239957 - protein, 14 aa, Homo sapiens
  CDR3 for alpha chain variable domain of TCR clone 119979 (TRAV12-3, TRAJ42)
CAMNYGGSQGNLIF

SEQ ID NO: 239958 - protein, 13 aa, Homo sapiens
  CDR3 for beta chain variable domain of TCR clone 119979 (TRBV11-3, TRBJ2-3)
CASSHDTKDTQYF

SEQ ID NO: 239959 - protein, 14 aa, Homo sapiens
  CDR3 for alpha chain variable domain of TCR clone 119980 (TRAV13-2, TRAJ11)
CAETGNSGYSTLTF

SEQ ID NO: 239960 - protein, 11 aa, Homo sapiens
  CDR3 for beta chain variable domain of TCR clone 119980 (TRBV10-3, TRBJ2-7)
CAISEGHEQYF

SEQ ID NO: 239961 - protein, 14 aa, Homo sapiens
  CDR3 for alpha chain variable domain of TCR clone 119981 (TRAV1-2, TRAJ29)
CAVRELTSATPLVF

SEQ ID NO: 239962 - protein, 14 aa, Homo sapiens
  CDR3 for beta chain variable domain of TCR clone 119981 (TRBV3-1, TRBJ2-5)
CASSQGPDQETQYV

SEQ ID NO: 239963 - protein, 15 aa, Homo sapiens
  CDR3 for alpha chain variable domain of TCR clone 119982 (TRAV12-3, TRAJ6)
CAMSATTGGSYIPTF

SEQ ID NO: 239964 - protein, 16 aa, Homo sapiens
  CDR3 for beta chain variable domain of TCR clone 119982 (TRBV20-1, TRBJ1-2)
CSASMGQGVAIYGYTF

SEQ ID NO: 239965 - protein, 11 aa, Homo sapiens
  CDR3 for alpha chain variable domain of TCR clone 119983 (TRAV12-1, TRAJ30)
CVVNGQDKIIF

SEQ ID NO: 239966 - protein, 13 aa, Homo sapiens
  CDR3 for beta chain variable domain of TCR clone 119983 (TRBV7-2, TRBJ2-7)
CASSSPSGSEQYF

SEQ ID NO: 239967 - protein, 14 aa, Homo sapiens
  CDR3 for alpha chain variable domain of TCR clone 119984 (TRAV12-2, TRAJ40)
CAVKIPSGTYKYIF

SEQ ID NO: 239968 - protein, 16 aa, Homo sapiens
  CDR3 for beta chain variable domain of TCR clone 119984 (TRBV7-3, TRBJ2-2)
CASGLKRGALSGELFF

SEQ ID NO: 239969 - protein, 13 aa, Homo sapiens
  CDR3 for alpha chain variable domain of TCR clone 119985 (TRAV17, TRAJ5)
CALRGTGRRALTF

SEQ ID NO: 239970 - protein, 16 aa, Homo sapiens
  CDR3 for beta chain variable domain of TCR clone 119985 (TRBV7-3, TRBJ2-2)
CASSLKRGTLSGELFF

SEQ ID NO: 239971 - protein, 13 aa, Homo sapiens
  CDR3 for alpha chain variable domain of TCR clone 119986 (TRAV1-2, TRAJ16)
CAPPGFHWPEAAL

SEQ ID NO: 239972 - protein, 15 aa, Homo sapiens
  CDR3 for beta chain variable domain of TCR clone 119986 (TRBV9, TRBJ1-6)
CASSVAGTGDSPLHF

SEQ ID NO: 239973 - protein, 12 aa, Homo sapiens
  CDR3 for alpha chain variable domain of TCR clone 119987 (TRAV13-1, TRAJ53)
AASGGSNYKLTF

SEQ ID NO: 239974 - protein, 15 aa, Homo sapiens
  CDR3 for beta chain variable domain of TCR clone 119987 (TRBV5-1, TRBJ2-1)
CASSPPRAPYNEHFF

SEQ ID NO: 239975 - protein, 15 aa, Homo sapiens
  CDR3 for alpha chain variable domain of TCR clone 119988 (TRAV26-1, TRAJ29)
CIVRVEGLGNTPLVF

SEQ ID NO: 239976 - protein, 14 aa, Homo sapiens
  CDR3 for beta chain variable domain of TCR clone 119988 (TRBV18, TRBJ2-5)
CASSPGVYQETQYF

SEQ ID NO: 239977 - protein, 12 aa, Homo sapiens
  CDR3 for alpha chain variable domain of TCR clone 119989 (TRAV21, TRAJ29)
CAVTSGKTPLVF

SEQ ID NO: 239978 - protein, 15 aa, Homo sapiens
  CDR3 for beta chain variable domain of TCR clone 119989 (TRBV12-4, TRBJ1-2)
CASRLGVAGNYGYTF

SEQ ID NO: 239979 - protein, 11 aa, Homo sapiens
  CDR3 for alpha chain variable domain of TCR clone 119990 (TRAV17, TRAJ36)
CAPTGANNLFF

SEQ ID NO: 239980 - protein, 13 aa, Homo sapiens
  CDR3 for beta chain variable domain of TCR clone 119990 (TRBV12-4, TRBJ2-7)
CASSPTETDEQYF

SEQ ID NO: 239981 - protein, 19 aa, Homo sapiens
  CDR3 for alpha chain variable domain of TCR clone 119991 (TRAV38-1, TRAJ53)
CAFMTHGLESGGSNYKLTF

SEQ ID NO: 239982 - protein, 13 aa, Homo sapiens
  CDR3 for beta chain variable domain of TCR clone 119991 (TRBV19, TRBJ2-7)
CASSPRQSYEQYF

SEQ ID NO: 239983 - protein, 11 aa, Homo sapiens
  CDR3 for alpha chain variable domain of TCR clone 119992 (TRAV12-1, TRAJ34)
CVVNKGRELIF

SEQ ID NO: 239984 - protein, 12 aa, Homo sapiens
  CDR3 for beta chain variable domain of TCR clone 119992 (TRBV20-1, TRBJ2-1)
CSAQYTYNEQFF

SEQ ID NO: 239985 - protein, 13 aa, Homo sapiens
  CDR3 for alpha chain variable domain of TCR clone 119993 (TRAV2, TRAJ26)
CAVVGNYGQNFAF

SEQ ID NO: 239986 - protein, 15 aa, Homo sapiens
  CDR3 for beta chain variable domain of TCR clone 119993 (TRBV27, TRBJ2-1)
CASSNGGGSSNEQFF

SEQ ID NO: 239987 - protein, 12 aa, Homo sapiens
  CDR3 for alpha chain variable domain of TCR clone 119994 (TRAV17, TRAJ21)
CALRYNFNKFYF

SEQ ID NO: 239988 - protein, 16 aa, Homo sapiens
  CDR3 for beta chain variable domain of TCR clone 119994 (TRBV6-1, TRBJ2-5)
CASSETLDRGAETQYF

SEQ ID NO: 239989 - protein, 15 aa, Homo sapiens
  CDR3 for alpha chain variable domain of TCR clone 119995 (TRAV17, TRAJ56)
CATEPFTGANSKLTF

SEQ ID NO: 239990 - protein, 15 aa, Homo sapiens
  CDR3 for beta chain variable domain of TCR clone 119995 (TRBV28, TRBJ1-5)
CASSRTGGYVQPKHF

SEQ ID NO: 239991 - protein, 15 aa, Homo sapiens
  CDR3 for alpha chain variable domain of TCR clone 119996 (TRAV17, TRAJ57)
CATGPSQGGSEKLVF

SEQ ID NO: 239992 - protein, 14 aa, Homo sapiens
  CDR3 for beta chain variable domain of TCR clone 119996 (TRBV12-5, TRBJ2-5)
CASGSRTDQETQYF

SEQ ID NO: 239993 - protein, 10 aa, Homo sapiens
  CDR3 for alpha chain variable domain of TCR clone 119997 (TRAV12-3, TRAJ49)
CAMNDDQFYF

SEQ ID NO: 239994 - protein, 13 aa, Homo sapiens
  CDR3 for beta chain variable domain of TCR clone 119997 (TRBV12-4, TRBJ1-1)
CASSPGTGFEFFF

SEQ ID NO: 239995 - protein, 17 aa, Homo sapiens
  CDR3 for alpha chain variable domain of TCR clone 119998 (TRAV3, TRAJ28)
CAVREAYSGAGSYQLTL

SEQ ID NO: 239996 - protein, 18 aa, Homo sapiens
  CDR3 for beta chain variable domain of TCR clone 119998 (TRBV27, TRBJ2-1)
CASGNRAVGVGSKNEQFF

SEQ ID NO: 239997 - protein, 12 aa, Homo sapiens
  CDR3 for alpha chain variable domain of TCR clone 119999 (TRAV21, TRAJ3)
CCCYSSASKIIF

SEQ ID NO: 239998 - protein, 16 aa, Homo sapiens
  CDR3 for beta chain variable domain of TCR clone 119999 (TRBV19, TRBJ2-1)
CASSKAGPSSYNEQFF

SEQ ID NO: 239999 - protein, 17 aa, Homo sapiens
  CDR3 for alpha chain variable domain of TCR clone 120000 (TRAV17, TRAJ7)
CATLGRLAFGKGNEVVV

SEQ ID NO: 240000 - protein, 13 aa, Homo sapiens
  CDR3 for beta chain variable domain of TCR clone 120000 (TRBV12-4, TRBJ2-7)
CASSLERVREQYF

SEQ ID NO: 240001 - protein, 15 aa, Homo sapiens
  CDR3 for alpha chain variable domain of TCR clone 120001 (TRAV27, TRAJ38)
CAGRFNAGNNRKLIW

SEQ ID NO: 240002 - protein, 15 aa, Homo sapiens
  CDR3 for beta chain variable domain of TCR clone 120001 (TRBV6-6, TRBJ2-7)
CASSYSYGGSYEQYF

SEQ ID NO: 240003 - protein, 14 aa, Homo sapiens
  CDR3 for alpha chain variable domain of TCR clone 120002 (TRAV4, TRAJ9)
CLVGSGTGGFKTIF

SEQ ID NO: 240004 - protein, 14 aa, Homo sapiens
  CDR3 for beta chain variable domain of TCR clone 120002 (TRBV7-2, TRBJ2-7)
CASSPKTSFYEQYF

SEQ ID NO: 240005 - protein, 14 aa, Homo sapiens
  CDR3 for alpha chain variable domain of TCR clone 120003 (TRAV17, TRAJ31)
CATVLRNNNARLMF

SEQ ID NO: 240006 - protein, 14 aa, Homo sapiens
  CDR3 for beta chain variable domain of TCR clone 120003 (TRBV12-4, TRBJ2-5)
CASSLWQKQETQYY

SEQ ID NO: 240007 - protein, 14 aa, Homo sapiens
  CDR3 for alpha chain variable domain of TCR clone 120004 (TRAV1-2, TRAJ8)
CAVREDTGFQKLVF

SEQ ID NO: 240008 - protein, 16 aa, Homo sapiens
  CDR3 for beta chain variable domain of TCR clone 120004 (TRBV4-1, TRBJ2-3)
CASSQRAGGLTDTQYF

SEQ ID NO: 240009 - protein, 22 aa, Homo sapiens
  CDR3 for alpha chain variable domain of TCR clone 120005 (TRAV27, )
CAARRNAGHNHIQNPDPAVYQL

SEQ ID NO: 240010 - protein, 13 aa, Homo sapiens
  CDR3 for beta chain variable domain of TCR clone 120005 (TRBV12-5, TRBJ2-3)
CASGDRQSDTQYF

SEQ ID NO: 240011 - protein, 16 aa, Homo sapiens
  CDR3 for alpha chain variable domain of TCR clone 120006 (TRAV21, TRAJ52)
CAVTNAVGTSYGKLTF

SEQ ID NO: 240012 - protein, 16 aa, Homo sapiens
  CDR3 for beta chain variable domain of TCR clone 120006 (TRBV2, TRBJ2-1)
CASSVGGSLSYNEQFF

SEQ ID NO: 240013 - protein, 12 aa, Homo sapiens
  CDR3 for alpha chain variable domain of TCR clone 120007 (TRAV16, TRAJ10)
CSRTGGGNKLTF

SEQ ID NO: 240014 - protein, 13 aa, Homo sapiens
  CDR3 for beta chain variable domain of TCR clone 120007 (TRBV24-1, TRBJ1-3)
CATMADSGNTIYF

SEQ ID NO: 240015 - protein, 15 aa, Homo sapiens
  CDR3 for alpha chain variable domain of TCR clone 120008 (TRAV12-3, TRAJ6)
CAMSATTGGSYIPTF

SEQ ID NO: 240016 - protein, 15 aa, Homo sapiens
  CDR3 for beta chain variable domain of TCR clone 120008 (TRBV19, TRBJ2-3)
CASSIEAGEADTQYF

SEQ ID NO: 240017 - protein, 14 aa, Homo sapiens
  CDR3 for alpha chain variable domain of TCR clone 120009 (TRAV16, TRAJ15)
CALSGPQAGTALIF

SEQ ID NO: 240018 - protein, 12 aa, Homo sapiens
  CDR3 for beta chain variable domain of TCR clone 120009 (TRBV18, TRBJ2-5)
CASSPSKESQYF

SEQ ID NO: 240019 - protein, 12 aa, Homo sapiens
  CDR3 for alpha chain variable domain of TCR clone 120010 (TRAV35, TRAJ39)
LAPNNAGNMLTF

SEQ ID NO: 240020 - protein, 16 aa, Homo sapiens
  CDR3 for beta chain variable domain of TCR clone 120010 (TRBV2, TRBJ2-3)
CANSTSVEGVTDTQYF

SEQ ID NO: 240021 - protein, 16 aa, Homo sapiens
  CDR3 for alpha chain variable domain of TCR clone 120011 (TRAV30, TRAJ24)
CGTELVDADSWGKFQF

SEQ ID NO: 240022 - protein, 14 aa, Homo sapiens
  CDR3 for beta chain variable domain of TCR clone 120011 (TRBV12-5, TRBJ2-5)
CASGSRTQQETQYF

SEQ ID NO: 240023 - protein, 12 aa, Homo sapiens
  CDR3 for alpha chain variable domain of TCR clone 120012 (TRAV12-3, TRAJ17)
CAMTLTGNKLTF

SEQ ID NO: 240024 - protein, 17 aa, Homo sapiens
  CDR3 for beta chain variable domain of TCR clone 120012 (TRBV7-8, TRBJ2-7)
CASSFTSGRPPSYEQYF

SEQ ID NO: 240025 - protein, 11 aa, Homo sapiens
  CDR3 for alpha chain variable domain of TCR clone 120013 (TRAV2, TRAJ13)
RASGGYQKVTF

SEQ ID NO: 240026 - protein, 15 aa, Homo sapiens
  CDR3 for beta chain variable domain of TCR clone 120013 (TRBV19, TRBJ1-1)
CASTSGQIQNTEAFF

SEQ ID NO: 240027 - protein, 14 aa, Homo sapiens
  CDR3 for alpha chain variable domain of TCR clone 120014 (TRAV12-3, TRAJ13)
CAMRNSGGYQKVTF

SEQ ID NO: 240028 - protein, 14 aa, Homo sapiens
  CDR3 for beta chain variable domain of TCR clone 120014 (TRBV4-1, TRBJ1-6)
CASSPGSDSSPHHF

SEQ ID NO: 240029 - protein, 16 aa, Homo sapiens
  CDR3 for alpha chain variable domain of TCR clone 120015 (TRAV30, TRAJ24)
CGTEIVDADSWGKFQF

SEQ ID NO: 240030 - protein, 13 aa, Homo sapiens
  CDR3 for beta chain variable domain of TCR clone 120015 (TRBV28, TRBJ1-2)
CASSRGQVYGYTF

SEQ ID NO: 240031 - protein, 14 aa, Homo sapiens
  CDR3 for alpha chain variable domain of TCR clone 120016 (TRAV12-2, TRAJ17)
CAVNIKAAGNKQTF

SEQ ID NO: 240032 - protein, 16 aa, Homo sapiens
  CDR3 for beta chain variable domain of TCR clone 120016 (TRBV20-1, TRBJ2-6)
CSASSQGYDGANVLTF

SEQ ID NO: 240033 - protein, 14 aa, Homo sapiens
  CDR3 for alpha chain variable domain of TCR clone 120017 (TRAV1-2, TRAJ16)
CAVNRLSDGQKLLF

SEQ ID NO: 240034 - protein, 14 aa, Homo sapiens
  CDR3 for beta chain variable domain of TCR clone 120017 (TRBV18, TRBJ2-7)
CASSPRGGAYEQYF

SEQ ID NO: 240035 - protein, 16 aa, Homo sapiens
  CDR3 for alpha chain variable domain of TCR clone 120018 (TRAV3, TRAJ37)
CAVRVRGSGNTGKLIF

SEQ ID NO: 240036 - protein, 14 aa, Homo sapiens
  CDR3 for beta chain variable domain of TCR clone 120018 (TRBV19, TRBJ2-1)
CASPTFVLSGEQFF

SEQ ID NO: 240037 - protein, 13 aa, Homo sapiens
  CDR3 for alpha chain variable domain of TCR clone 120019 (TRAV12-2, TRAJ7)
CAGLIYGNNRLAF

SEQ ID NO: 240038 - protein, 13 aa, Homo sapiens
  CDR3 for beta chain variable domain of TCR clone 120019 (TRBV28, TRBJ2-3)
CASSLPQVDTQYF

SEQ ID NO: 240039 - protein, 17 aa, Homo sapiens
  CDR3 for alpha chain variable domain of TCR clone 120020 (TRAV13-1, TRAJ52)
CAASSGAGGTSYGKLTF

SEQ ID NO: 240040 - protein, 15 aa, Homo sapiens
  CDR3 for beta chain variable domain of TCR clone 120020 (TRBV2, TRBJ2-1)
FASSELAGSYNEQFF

SEQ ID NO: 240041 - protein, 14 aa, Homo sapiens
  CDR3 for alpha chain variable domain of TCR clone 120021 (TRAV26-1, TRAJ5)
CIVRVRFNRRALTS

SEQ ID NO: 240042 - protein, 17 aa, Homo sapiens
  CDR3 for beta chain variable domain of TCR clone 120021 (TRBV29-1, TRBJ2-3)
CSVEVLAGETSTDTQYF

SEQ ID NO: 240043 - protein, 13 aa, Homo sapiens
  CDR3 for alpha chain variable domain of TCR clone 120022 (TRAV3, TRAJ21)
CAVREPDFNKFYF

SEQ ID NO: 240044 - protein, 15 aa, Homo sapiens
  CDR3 for beta chain variable domain of TCR clone 120022 (TRBV10-3, TRBJ2-3)
CAISLTSGGTDTQYF

SEQ ID NO: 240045 - protein, 14 aa, Homo sapiens
  CDR3 for alpha chain variable domain of TCR clone 120023 (TRAV12-2, TRAJ13)
CAVNPSGGYLKVTL

SEQ ID NO: 240046 - protein, 14 aa, Homo sapiens
  CDR3 for beta chain variable domain of TCR clone 120023 (TRBV12-4, TRBJ1-1)
CASSLGTGGTEAFF

SEQ ID NO: 240047 - protein, 11 aa, Homo sapiens
  CDR3 for alpha chain variable domain of TCR clone 120024 (TRAV1-1, TRAJ23)
CAVRQGGKLIF

SEQ ID NO: 240048 - protein, 20 aa, Homo sapiens
  CDR3 for beta chain variable domain of TCR clone 120024 (TRBV7-8, TRBJ2-2)
CACSHLFPGPTIHITGELFF

SEQ ID NO: 240049 - protein, 12 aa, Homo sapiens
  CDR3 for alpha chain variable domain of TCR clone 120025 (TRAV8-6, TRAJ43)
CAVSNNNNDMRF

SEQ ID NO: 240050 - protein, 15 aa, Homo sapiens
  CDR3 for beta chain variable domain of TCR clone 120025 (TRBV7-3, TRBJ2-6)
CASSLGGSGANVLTV

SEQ ID NO: 240051 - protein, 17 aa, Homo sapiens
  CDR3 for alpha chain variable domain of TCR clone 120026 (TRAV3, TRAJ42)
CAVRDRDYGGSQGNLIF

SEQ ID NO: 240052 - protein, 12 aa, Homo sapiens
  CDR3 for beta chain variable domain of TCR clone 120026 (TRBV11-2, TRBJ2-1)
CASSPGNNEQFL

SEQ ID NO: 240053 - protein, 11 aa, Homo sapiens
  CDR3 for alpha chain variable domain of TCR clone 120027 (TRAV2, TRAJ33)
CAVDSNHQLIW

SEQ ID NO: 240054 - protein, 14 aa, Homo sapiens
  CDR3 for beta chain variable domain of TCR clone 120027 (TRBV11-2, TRBJ2-3)
CASSRLARTDTQYF

SEQ ID NO: 240055 - protein, 16 aa, Homo sapiens
  CDR3 for alpha chain variable domain of TCR clone 120028 (TRAV16, TRAJ4)
CALSRMFSGGYDKLIF

SEQ ID NO: 240056 - protein, 16 aa, Homo sapiens
  CDR3 for beta chain variable domain of TCR clone 120028 (TRBV12-4, TRBJ1-5)
CASSRPVGGSNQPQHF

SEQ ID NO: 240057 - protein, 11 aa, Homo sapiens
  CDR3 for alpha chain variable domain of TCR clone 120029 (TRAV3, TRAJ21)
CTVGSFNKFYF

SEQ ID NO: 240058 - protein, 16 aa, Homo sapiens
  CDR3 for beta chain variable domain of TCR clone 120029 (TRBV19, TRBJ2-1)
CASSKAGPSSYNEQFF

SEQ ID NO: 240059 - protein, 14 aa, Homo sapiens
  CDR3 for alpha chain variable domain of TCR clone 120030 (TRAV26-1, TRAJ38)
CIADNAGNNRKLIW

SEQ ID NO: 240060 - protein, 16 aa, Homo sapiens
  CDR3 for beta chain variable domain of TCR clone 120030 (TRBV19, TRBJ1-2)
CASSKFRDTTNYGYTF

SEQ ID NO: 240061 - protein, 16 aa, Homo sapiens
  CDR3 for alpha chain variable domain of TCR clone 120031 (TRAV27, TRAJ13)
CAGAKSDSGGYQKVTF

SEQ ID NO: 240062 - protein, 14 aa, Homo sapiens
  CDR3 for beta chain variable domain of TCR clone 120031 (TRBV7-3, TRBJ2-1)
CASSLAGGTNEQFF

SEQ ID NO: 240063 - protein, 16 aa, Homo sapiens
  CDR3 for alpha chain variable domain of TCR clone 120032 (TRAV16, TRAJ52)
CALSAAGGTSYGKLTF

SEQ ID NO: 240064 - protein, 15 aa, Homo sapiens
  CDR3 for beta chain variable domain of TCR clone 120032 (TRBV29-1, TRBJ2-1)
CSVGRHALFYNEQFF

SEQ ID NO: 240065 - protein, 11 aa, Homo sapiens
  CDR3 for alpha chain variable domain of TCR clone 120033 (TRAV8-3, TRAJ15)
CAVGPGTALIF

SEQ ID NO: 240066 - protein, 18 aa, Homo sapiens
  CDR3 for beta chain variable domain of TCR clone 120033 (TRBV18, TRBJ2-3)
CASSYTSRAAGGTDTQYF

SEQ ID NO: 240067 - protein, 15 aa, Homo sapiens
  CDR3 for alpha chain variable domain of TCR clone 120034 (TRAV21, TRAJ52)
CAVRGGGNSYGKLTF

SEQ ID NO: 240068 - protein, 15 aa, Homo sapiens
  CDR3 for beta chain variable domain of TCR clone 120034 (TRBV18, TRBJ1-5)
CASSPSDRSNQPQHF

SEQ ID NO: 240069 - protein, 17 aa, Homo sapiens
  CDR3 for alpha chain variable domain of TCR clone 120035 (TRAV12-3, TRAJ6)
CAMSARGGAGGSYIPTF

SEQ ID NO: 240070 - protein, 15 aa, Homo sapiens
  CDR3 for beta chain variable domain of TCR clone 120035 (TRBV2, TRBJ2-2)
CASSRETVGTGELFF

SEQ ID NO: 240071 - protein, 13 aa, Homo sapiens
  CDR3 for alpha chain variable domain of TCR clone 120036 (TRAV12-1, TRAJ13)
CVVGTGGYQKVTF

SEQ ID NO: 240072 - protein, 13 aa, Homo sapiens
  CDR3 for beta chain variable domain of TCR clone 120036 (TRBV4-1, TRBJ2-3)
CSSSQPPTDTQYF

SEQ ID NO: 240073 - protein, 18 aa, Homo sapiens
  CDR3 for alpha chain variable domain of TCR clone 120037 (TRAV13-1, TRAJ52)
CAAKNPNAGGTSYGKLTF

SEQ ID NO: 240074 - protein, 15 aa, Homo sapiens
  CDR3 for beta chain variable domain of TCR clone 120037 (TRBV7-2, TRBJ1-2)
CASSLVSGGDYGYTF

SEQ ID NO: 240075 - protein, 17 aa, Homo sapiens
  CDR3 for alpha chain variable domain of TCR clone 120038 (TRAV26-1, TRAJ53)
CIVRVDDSGGSNYKLTS

SEQ ID NO: 240076 - protein, 14 aa, Homo sapiens
  CDR3 for beta chain variable domain of TCR clone 120038 (TRBV25-1, TRBJ1-1)
CASTHLGGNTEAFF

SEQ ID NO: 240077 - protein, 19 aa, Homo sapiens
  CDR3 for alpha chain variable domain of TCR clone 120039 (TRAV12-1, TRAJ45)
CVVTHDVGYSGGGADGLTF

SEQ ID NO: 240078 - protein, 12 aa, Homo sapiens
  CDR3 for beta chain variable domain of TCR clone 120039 (TRBV12-4, TRBJ2-7)
CASSLGGYEQYF

SEQ ID NO: 240079 - protein, 13 aa, Homo sapiens
  CDR3 for alpha chain variable domain of TCR clone 120040 (TRAV3, TRAJ21)
CAVKEPDFNKFYF

SEQ ID NO: 240080 - protein, 13 aa, Homo sapiens
  CDR3 for beta chain variable domain of TCR clone 120040 (TRBV9, TRBJ2-1)
CASSPSGGNEQFF

SEQ ID NO: 240081 - protein, 11 aa, Homo sapiens
  CDR3 for alpha chain variable domain of TCR clone 120041 (TRAV1-1, TRAJ23)
CAVRQGGKLIF

SEQ ID NO: 240082 - protein, 12 aa, Homo sapiens
  CDR3 for beta chain variable domain of TCR clone 120041 (TRBV19, TRBJ2-3)
CATTSSTDTQYF

SEQ ID NO: 240083 - protein, 12 aa, Homo sapiens
  CDR3 for alpha chain variable domain of TCR clone 120042 (TRAV21, TRAJ23)
CAVMLQGGKLIF

SEQ ID NO: 240084 - protein, 14 aa, Homo sapiens
  CDR3 for beta chain variable domain of TCR clone 120042 (TRBV7-9, TRBJ1-4)
CAITEVEANEKLFF

SEQ ID NO: 240085 - protein, 17 aa, Homo sapiens
  CDR3 for alpha chain variable domain of TCR clone 120043 (TRAV13-1, TRAJ28)
CAASPPYSGAGSYQLTF

SEQ ID NO: 240086 - protein, 15 aa, Homo sapiens
  CDR3 for beta chain variable domain of TCR clone 120043 (TRBV6-3, TRBJ2-2)
CASNFLATLTGELFF

SEQ ID NO: 240087 - protein, 13 aa, Homo sapiens
  CDR3 for alpha chain variable domain of TCR clone 120044 (TRAV20, TRAJ21)
CAVEGYNFNKFYF

SEQ ID NO: 240088 - protein, 14 aa, Homo sapiens
  CDR3 for beta chain variable domain of TCR clone 120044 (TRBV3-1, TRBJ2-5)
CASSQGPDQETQFF

SEQ ID NO: 240089 - protein, 12 aa, Homo sapiens
  CDR3 for alpha chain variable domain of TCR clone 120045 (TRAV13-1, TRAJ53)
AASGGSNYKLTF

SEQ ID NO: 240090 - protein, 15 aa, Homo sapiens
  CDR3 for beta chain variable domain of TCR clone 120045 (TRBV5-1, TRBJ2-1)
CASTPPRAPYNEQFF

SEQ ID NO: 240091 - protein, 15 aa, Homo sapiens
  CDR3 for alpha chain variable domain of TCR clone 120046 (TRAV12-2, TRAJ53)
FAVNGGGGSNYKLTF

SEQ ID NO: 240092 - protein, 13 aa, Homo sapiens
  CDR3 for beta chain variable domain of TCR clone 120046 (TRBV3-1, TRBJ1-1)
CASSPGVITEAFF

SEQ ID NO: 240093 - protein, 16 aa, Homo sapiens
  CDR3 for alpha chain variable domain of TCR clone 120047 (TRAV30, TRAJ24)
CGTEIVDADSWGKFQF

SEQ ID NO: 240094 - protein, 12 aa, Homo sapiens
  CDR3 for beta chain variable domain of TCR clone 120047 (TRBV27, TRBJ2-7)
CASSGGFYEQYF

SEQ ID NO: 240095 - protein, 13 aa, Homo sapiens
  CDR3 for alpha chain variable domain of TCR clone 120048 (TRAV16, TRAJ28)
CALTGAGSYQLTF

SEQ ID NO: 240096 - protein, 16 aa, Homo sapiens
  CDR3 for beta chain variable domain of TCR clone 120048 (TRBV28, TRBJ1-5)
CASSLTGHGWNQPQHF

SEQ ID NO: 240097 - protein, 15 aa, Homo sapiens
  CDR3 for alpha chain variable domain of TCR clone 120049 (TRAV13-1, TRAJ44)
CAASRNTGPASKLTF

SEQ ID NO: 240098 - protein, 14 aa, Homo sapiens
  CDR3 for beta chain variable domain of TCR clone 120049 (TRBV11-2, TRBJ1-2)
CASSLYRGNYGYTF

SEQ ID NO: 240099 - protein, 14 aa, Homo sapiens
  CDR3 for alpha chain variable domain of TCR clone 120050 (TRAV12-2, TRAJ44)
CAVNKAGTASKLTF

SEQ ID NO: 240100 - protein, 12 aa, Homo sapiens
  CDR3 for beta chain variable domain of TCR clone 120050 (TRBV19, TRBJ1-4)
CASKDWPGRLFF

SEQ ID NO: 240101 - protein, 21 aa, Homo sapiens
  CDR3 for alpha chain variable domain of TCR clone 120051 (TRAV12-1, TRAJ32)
SSVIQPPTSMNYGGATNKLIF

SEQ ID NO: 240102 - protein, 14 aa, Homo sapiens
  CDR3 for beta chain variable domain of TCR clone 120051 (TRBV20-1, TRBJ2-3)
RTSGGPGTTDTQYF

SEQ ID NO: 240103 - protein, 15 aa, Homo sapiens
  CDR3 for alpha chain variable domain of TCR clone 120052 (TRAV8-6, TRAJ11)
CAVSDRRSGYSTLTF

SEQ ID NO: 240104 - protein, 13 aa, Homo sapiens
  CDR3 for beta chain variable domain of TCR clone 120052 (TRBV2, TRBJ2-2)
CASSEEVTGELFF

SEQ ID NO: 240105 - protein, 16 aa, Homo sapiens
  CDR3 for alpha chain variable domain of TCR clone 120053 (TRAV1-2, TRAJ10)
CAVRGVLTGGGNKLTF

SEQ ID NO: 240106 - protein, 12 aa, Homo sapiens
  CDR3 for beta chain variable domain of TCR clone 120053 (TRBV7-8, TRBJ2-7)
CASSLGAREQYF

SEQ ID NO: 240107 - protein, 13 aa, Homo sapiens
  CDR3 for alpha chain variable domain of TCR clone 120054 (TRAV20, TRAJ37)
CAGCSSNTGKLIF

SEQ ID NO: 240108 - protein, 11 aa, Homo sapiens
  CDR3 for beta chain variable domain of TCR clone 120054 (TRBV12-4, TRBJ2-3)
CASTAKDTQYF

SEQ ID NO: 240109 - protein, 14 aa, Homo sapiens
  CDR3 for alpha chain variable domain of TCR clone 120055 (TRAV12-3, TRAJ10)
SHLPLTGVGNKLTF

SEQ ID NO: 240110 - protein, 15 aa, Homo sapiens
  CDR3 for beta chain variable domain of TCR clone 120055 (TRBV13, TRBJ2-1)
CASSLLSGLNNEQFF

SEQ ID NO: 240111 - protein, 16 aa, Homo sapiens
  CDR3 for alpha chain variable domain of TCR clone 120056 (TRAV30, TRAJ24)
CGTEIVDADSWGKFKF

SEQ ID NO: 240112 - protein, 15 aa, Homo sapiens
  CDR3 for beta chain variable domain of TCR clone 120056 (TRBV7-2, TRBJ2-3)
CASSLRGGSTDTQYF

SEQ ID NO: 240113 - protein, 14 aa, Homo sapiens
  CDR3 for alpha chain variable domain of TCR clone 120057 (TRAV4, TRAJ26)
CLVGPHNYGQNFVF

SEQ ID NO: 240114 - protein, 15 aa, Homo sapiens
  CDR3 for beta chain variable domain of TCR clone 120057 (TRBV5-5, TRBJ2-7)
CASSLAAPLSYEQYF

SEQ ID NO: 240115 - protein, 13 aa, Homo sapiens
  CDR3 for alpha chain variable domain of TCR clone 120058 (TRAV2, TRAJ15)
CAVASQAGTALIF

SEQ ID NO: 240116 - protein, 15 aa, Homo sapiens
  CDR3 for beta chain variable domain of TCR clone 120058 (TRBV11-2, TRBJ2-7)
CASSLNYGASYEQYF

SEQ ID NO: 240117 - protein, 12 aa, Homo sapiens
  CDR3 for alpha chain variable domain of TCR clone 120059 (TRAV20, TRAJ33)
CAVRGSNYQLIW

SEQ ID NO: 240118 - protein, 13 aa, Homo sapiens
  CDR3 for beta chain variable domain of TCR clone 120059 (TRBV9, TRBJ2-1)
CASSPSGGNEQFF

SEQ ID NO: 240119 - protein, 13 aa, Homo sapiens
  CDR3 for alpha chain variable domain of TCR clone 120060 (TRAV8-3, TRAJ28)
CAVGAAGSYQLTF

SEQ ID NO: 240120 - protein, 15 aa, Homo sapiens
  CDR3 for beta chain variable domain of TCR clone 120060 (TRBV20-1, TRBJ2-7)
CSARDRVSGMDEQYF

SEQ ID NO: 240121 - protein, 12 aa, Homo sapiens
  CDR3 for alpha chain variable domain of TCR clone 120061 (TRAV30, TRAJ43)
CGTEERGNDMRF

SEQ ID NO: 240122 - protein, 14 aa, Homo sapiens
  CDR3 for beta chain variable domain of TCR clone 120061 (TRBV12-4, TRBJ2-3)
CASTIAGWGDTQYF

SEQ ID NO: 240123 - protein, 14 aa, Homo sapiens
  CDR3 for alpha chain variable domain of TCR clone 120062 (TRAV8-3, TRAJ39)
CAVGANNAGNMLTL

SEQ ID NO: 240124 - protein, 15 aa, Homo sapiens
  CDR3 for beta chain variable domain of TCR clone 120062 (TRBV4-3, TRBJ1-1)
CASSQELGRGTEAFF

SEQ ID NO: 240125 - protein, 10 aa, Homo sapiens
  CDR3 for alpha chain variable domain of TCR clone 120063 (TRAV12-2, TRAJ52)
RSTSYGKLTF

SEQ ID NO: 240126 - protein, 11 aa, Homo sapiens
  CDR3 for beta chain variable domain of TCR clone 120063 (TRBV11-2, TRBJ2-2)
CQQLGGGELFF

SEQ ID NO: 240127 - protein, 13 aa, Homo sapiens
  CDR3 for alpha chain variable domain of TCR clone 120064 (TRAV30, TRAJ31)
CGTEITNNARLMF

SEQ ID NO: 240128 - protein, 15 aa, Homo sapiens
  CDR3 for beta chain variable domain of TCR clone 120064 (TRBV19, TRBJ1-1)
CASSIRRQMNTEAFF

SEQ ID NO: 240129 - protein, 12 aa, Homo sapiens
  CDR3 for alpha chain variable domain of TCR clone 120065 (TRAV12-2, TRAJ10)
WGVTGGGNKLTF

SEQ ID NO: 240130 - protein, 13 aa, Homo sapiens
  CDR3 for beta chain variable domain of TCR clone 120065 (TRBV12-4, TRBJ1-2)
CASSLRQGKGYTF

SEQ ID NO: 240131 - protein, 15 aa, Homo sapiens
  CDR3 for alpha chain variable domain of TCR clone 120066 (TRAV35, TRAJ23)
CAGPLGNNQGGKLIF

SEQ ID NO: 240132 - protein, 14 aa, Homo sapiens
  CDR3 for beta chain variable domain of TCR clone 120066 (TRBV7-9, TRBJ1-1)
CASTPLRSYTEAFF

SEQ ID NO: 240133 - protein, 12 aa, Homo sapiens
  CDR3 for alpha chain variable domain of TCR clone 120067 (TRAV8-3, TRAJ26)
CAGDNYGQNFVF

SEQ ID NO: 240134 - protein, 14 aa, Homo sapiens
  CDR3 for beta chain variable domain of TCR clone 120067 (TRBV20-1, TRBJ1-1)
CSAQTRIGGTEAFF

SEQ ID NO: 240135 - protein, 14 aa, Homo sapiens
  CDR3 for alpha chain variable domain of TCR clone 120068 (TRAV8-2, TRAJ4)
CVVGPSGGYNKLIF

SEQ ID NO: 240136 - protein, 15 aa, Homo sapiens
  CDR3 for beta chain variable domain of TCR clone 120068 (TRBV4-1, TRBJ1-4)
CASSDTGGNNEKLFF

SEQ ID NO: 240137 - protein, 13 aa, Homo sapiens
  CDR3 for alpha chain variable domain of TCR clone 120069 (TRAV8-4, TRAJ10)
CAAFTGGGNKLTF

SEQ ID NO: 240138 - protein, 13 aa, Homo sapiens
  CDR3 for beta chain variable domain of TCR clone 120069 (TRBV7-2, TRBJ2-7)
CASSSPSGSEQYF

SEQ ID NO: 240139 - protein, 10 aa, Homo sapiens
  CDR3 for alpha chain variable domain of TCR clone 120070 (TRAV12-1, TRAJ37)
ARGNTGKIIF

SEQ ID NO: 240140 - protein, 15 aa, Homo sapiens
  CDR3 for beta chain variable domain of TCR clone 120070 (TRBV7-2, TRBJ2-3)
CASSLEQGGTDTQYF

SEQ ID NO: 240141 - protein, 16 aa, Homo sapiens
  CDR3 for alpha chain variable domain of TCR clone 120071 (TRAV12-3, TRAJ18)
CAMRGSRGPTLGRLYF

SEQ ID NO: 240142 - protein, 19 aa, Homo sapiens
  CDR3 for beta chain variable domain of TCR clone 120071 (TRBV6-3, TRBJ2-7)
CASSYRTGLAGGVSGEQYF

SEQ ID NO: 240143 - protein, 16 aa, Homo sapiens
  CDR3 for alpha chain variable domain of TCR clone 120072 (TRAV3, TRAJ37)
CAVRPHGSGNTGKLIF

SEQ ID NO: 240144 - protein, 15 aa, Homo sapiens
  CDR3 for beta chain variable domain of TCR clone 120072 (TRBV6-3, TRBJ2-7)
CASSSPGTVFYEQYL

SEQ ID NO: 240145 - protein, 12 aa, Homo sapiens
  CDR3 for alpha chain variable domain of TCR clone 120073 (TRAV21, TRAJ13)
PGPSGGYQKVTF

SEQ ID NO: 240146 - protein, 13 aa, Homo sapiens
  CDR3 for beta chain variable domain of TCR clone 120073 (TRBV7-9, TRBJ1-2)
CASSLKQNYGYSF

SEQ ID NO: 240147 - protein, 15 aa, Homo sapiens
  CDR3 for alpha chain variable domain of TCR clone 120074 (TRAV8-2, TRAJ40)
CVVLGTTSGTYEYIF

SEQ ID NO: 240148 - protein, 16 aa, Homo sapiens
  CDR3 for beta chain variable domain of TCR clone 120074 (TRBV7-3, TRBJ2-1)
CASSLEGYRSYNEQFF

SEQ ID NO: 240149 - protein, 11 aa, Homo sapiens
  CDR3 for alpha chain variable domain of TCR clone 120075 (TRAV21, TRAJ20)
CAVRYDYKLSF

SEQ ID NO: 240150 - protein, 14 aa, Homo sapiens
  CDR3 for beta chain variable domain of TCR clone 120075 (TRBV12-4, TRBJ1-1)
CASSFSQMNTEAFF

SEQ ID NO: 240151 - protein, 11 aa, Homo sapiens
  CDR3 for alpha chain variable domain of TCR clone 120076 (TRAV23/DV6, TRAJ49)
CAARAGNQFYF

SEQ ID NO: 240152 - protein, 15 aa, Homo sapiens
  CDR3 for beta chain variable domain of TCR clone 120076 (TRBV20-1, TRBJ2-7)
CSARDRVSGMDEQYF

SEQ ID NO: 240153 - protein, 11 aa, Homo sapiens
  CDR3 for alpha chain variable domain of TCR clone 120077 (TRAV2, TRAJ33)
CAVDSNYQLIW

SEQ ID NO: 240154 - protein, 12 aa, Homo sapiens
  CDR3 for beta chain variable domain of TCR clone 120077 (TRBV11-2, TRBJ2-2)
CASSLGCGELFF

SEQ ID NO: 240155 - protein, 13 aa, Homo sapiens
  CDR3 for alpha chain variable domain of TCR clone 120078 (TRAV13-1, TRAJ9)
CAASGTGGFKTMF

SEQ ID NO: 240156 - protein, 13 aa, Homo sapiens
  CDR3 for beta chain variable domain of TCR clone 120078 (TRBV7-9, TRBJ1-2)
CASSLKQNYGYTF

SEQ ID NO: 240157 - protein, 11 aa, Homo sapiens
  CDR3 for alpha chain variable domain of TCR clone 120079 (TRAV3, TRAJ21)
CAVGNFNKFYF

SEQ ID NO: 240158 - protein, 16 aa, Homo sapiens
  CDR3 for beta chain variable domain of TCR clone 120079 (TRBV28, TRBJ2-6)
CASSNRRGSGANVLTF

SEQ ID NO: 240159 - protein, 12 aa, Homo sapiens
  CDR3 for alpha chain variable domain of TCR clone 120080 (TRAV13-2, TRAJ23)
CAERHRGGKLIF

SEQ ID NO: 240160 - protein, 13 aa, Homo sapiens
  CDR3 for beta chain variable domain of TCR clone 120080 (TRBV2, TRBJ1-6)
CADSGSYNSPLLF

SEQ ID NO: 240161 - protein, 11 aa, Homo sapiens
  CDR3 for alpha chain variable domain of TCR clone 120081 (TRAV1-1, TRAJ23)
CAVRQGGKLIF

SEQ ID NO: 240162 - protein, 16 aa, Homo sapiens
  CDR3 for beta chain variable domain of TCR clone 120081 (TRBV4-1, TRBJ2-3)
CASSQSTSGAEDTQYF

SEQ ID NO: 240163 - protein, 16 aa, Homo sapiens
  CDR3 for alpha chain variable domain of TCR clone 120082 (TRAV3, TRAJ37)
CAVRPHGSGNTGKLIF

SEQ ID NO: 240164 - protein, 15 aa, Homo sapiens
  CDR3 for beta chain variable domain of TCR clone 120082 (TRBV20-1, TRBJ2-7)
CSARDQVSGMDEQYF

SEQ ID NO: 240165 - protein, 12 aa, Homo sapiens
  CDR3 for alpha chain variable domain of TCR clone 120083 (TRAV12-3, TRAJ32)
RAGGGATNKLIF

SEQ ID NO: 240166 - protein, 15 aa, Homo sapiens
  CDR3 for beta chain variable domain of TCR clone 120083 (TRBV4-3, TRBJ2-1)
CASSQERAIYNEQFF

SEQ ID NO: 240167 - protein, 14 aa, Homo sapiens
  CDR3 for alpha chain variable domain of TCR clone 120084 (TRAV21, TRAJ12)
CAVRNGDSSYKFIF

SEQ ID NO: 240168 - protein, 14 aa, Homo sapiens
  CDR3 for beta chain variable domain of TCR clone 120084 (TRBV7-6, TRBJ2-7)
CASSLTGTGNEQYF

SEQ ID NO: 240169 - protein, 13 aa, Homo sapiens
  CDR3 for alpha chain variable domain of TCR clone 120085 (TRAV23/DV6, TRAJ10)
ASVPTGGGNKLTF

SEQ ID NO: 240170 - protein, 13 aa, Homo sapiens
  CDR3 for beta chain variable domain of TCR clone 120085 (TRBV11-1, TRBJ1-2)
CASVGSWGYGYTF

SEQ ID NO: 240171 - protein, 12 aa, Homo sapiens
  CDR3 for alpha chain variable domain of TCR clone 120086 (TRAV21, TRAJ39)
CAADNAGNMLTF

SEQ ID NO: 240172 - protein, 16 aa, Homo sapiens
  CDR3 for beta chain variable domain of TCR clone 120086 (TRBV2, TRBJ2-7)
CASRKGSLGLVYEQYF

SEQ ID NO: 240173 - protein, 14 aa, Homo sapiens
  CDR3 for alpha chain variable domain of TCR clone 120087 (TRAV13-2, TRAJ16)
CAENNWEDGQKLLF

SEQ ID NO: 240174 - protein, 14 aa, Homo sapiens
  CDR3 for beta chain variable domain of TCR clone 120087 (TRBV7-9, TRBJ1-1)
CASSLGGLKTDAFF

SEQ ID NO: 240175 - protein, 11 aa, Homo sapiens
  CDR3 for alpha chain variable domain of TCR clone 120088 (TRAV2, TRAJ13)
CASGGYQKVTF

SEQ ID NO: 240176 - protein, 16 aa, Homo sapiens
  CDR3 for beta chain variable domain of TCR clone 120088 (TRBV28, TRBJ2-1)
CASSSPEYPRDNEQFF

SEQ ID NO: 240177 - protein, 14 aa, Homo sapiens
  CDR3 for alpha chain variable domain of TCR clone 120089 (TRAV13-1, TRAJ44)
WAAKATGTASKLTF

SEQ ID NO: 240178 - protein, 17 aa, Homo sapiens
  CDR3 for beta chain variable domain of TCR clone 120089 (TRBV7-3, TRBJ2-3)
CASSLMKRMRGADTQYF

SEQ ID NO: 240179 - protein, 19 aa, Homo sapiens
  CDR3 for alpha chain variable domain of TCR clone 120090 (TRAV2, TRAJ20)
ILQVREADAAVYRDCKLSF

SEQ ID NO: 240180 - protein, 16 aa, Homo sapiens
  CDR3 for beta chain variable domain of TCR clone 120090 (TRBV9, TRBJ2-2)
CASSAMGKGNTGGLFF

SEQ ID NO: 240181 - protein, 14 aa, Homo sapiens
  CDR3 for alpha chain variable domain of TCR clone 120091 (TRAV12-3, TRAJ54)
CAMSALQGAQKLVF

SEQ ID NO: 240182 - protein, 15 aa, Homo sapiens
  CDR3 for beta chain variable domain of TCR clone 120091 (TRBV19, TRBJ2-4)
CASSTPGIAKNNQYF

SEQ ID NO: 240183 - protein, 14 aa, Homo sapiens
  CDR3 for alpha chain variable domain of TCR clone 120092 (TRAV12-2, TRAJ17)
CAVLFKAAGNKLTF

SEQ ID NO: 240184 - protein, 15 aa, Homo sapiens
  CDR3 for beta chain variable domain of TCR clone 120092 (TRBV20-1, TRBJ2-7)
CSARDRVSGKDEQYF

SEQ ID NO: 240185 - protein, 15 aa, Homo sapiens
  CDR3 for alpha chain variable domain of TCR clone 120093 (TRAV26-2, TRAJ13)
CILRDLSGGYQKVTF

SEQ ID NO: 240186 - protein, 14 aa, Homo sapiens
  CDR3 for beta chain variable domain of TCR clone 120093 (TRBV4-1, TRBJ2-3)
CASSQAGSTDTQYF

SEQ ID NO: 240187 - protein, 11 aa, Homo sapiens
  CDR3 for alpha chain variable domain of TCR clone 120094 (TRAV26-1, TRAJ27)
CIDPNAGKSTF

SEQ ID NO: 240188 - protein, 18 aa, Homo sapiens
  CDR3 for beta chain variable domain of TCR clone 120094 (TRBV7-9, TRBJ2-6)
CDSSFPGAGISGANVLTF

SEQ ID NO: 240189 - protein, 13 aa, Homo sapiens
  CDR3 for alpha chain variable domain of TCR clone 120095 (TRAV21, TRAJ27)
CAARPGNAGKSTF

SEQ ID NO: 240190 - protein, 16 aa, Homo sapiens
  CDR3 for beta chain variable domain of TCR clone 120095 (TRBV11-2, TRBJ2-4)
CASSQEGRGGLDIQYF

SEQ ID NO: 240191 - protein, 15 aa, Homo sapiens
  CDR3 for alpha chain variable domain of TCR clone 120096 (TRAV17, TRAJ57)
CATGPSQGGSEKLVF

SEQ ID NO: 240192 - protein, 18 aa, Homo sapiens
  CDR3 for beta chain variable domain of TCR clone 120096 (TRBV7-9, TRBJ2-7)
CARSLTTSGSRTWYEQYF

SEQ ID NO: 240193 - protein, 13 aa, Homo sapiens
  CDR3 for alpha chain variable domain of TCR clone 120097 (TRAV12-1, TRAJ31)
CVVNMNNNARLMF

SEQ ID NO: 240194 - protein, 15 aa, Homo sapiens
  CDR3 for beta chain variable domain of TCR clone 120097 (TRBV4-1, TRBJ1-2)
CASSQGQGAAYGYTC

SEQ ID NO: 240195 - protein, 15 aa, Homo sapiens
  CDR3 for alpha chain variable domain of TCR clone 120098 (TRAV27, TRAJ38)
CAARRNAGNNRKLIW

SEQ ID NO: 240196 - protein, 17 aa, Homo sapiens
  CDR3 for beta chain variable domain of TCR clone 120098 (TRBV20-1, TRBJ2-2)
CSASGSGQGGLTGELFS

SEQ ID NO: 240197 - protein, 19 aa, Homo sapiens
  CDR3 for alpha chain variable domain of TCR clone 120099 (TRAV2, TRAJ20)
ILQVREADAAVYRDCKLSF

SEQ ID NO: 240198 - protein, 15 aa, Homo sapiens
  CDR3 for beta chain variable domain of TCR clone 120099 (TRBV5-1, TRBJ1-4)
FAPAAWKDGNEKLFF

SEQ ID NO: 240199 - protein, 13 aa, Homo sapiens
  CDR3 for alpha chain variable domain of TCR clone 120100 (TRAV2, TRAJ40)
CAVVTSGTYKYIF

SEQ ID NO: 240200 - protein, 17 aa, Homo sapiens
  CDR3 for beta chain variable domain of TCR clone 120100 (TRBV13, TRBJ2-3)
CASSLSRVAGGGNTQYF

SEQ ID NO: 240201 - protein, 16 aa, Homo sapiens
  CDR3 for alpha chain variable domain of TCR clone 120101 (TRAV12-3, TRAJ53)
CAMSPRSGGGNYKLTF

SEQ ID NO: 240202 - protein, 11 aa, Homo sapiens
  CDR3 for beta chain variable domain of TCR clone 120101 (TRBV29-1, TRBJ2-5)
CSEDRTGTQYF

SEQ ID NO: 240203 - protein, 15 aa, Homo sapiens
  CDR3 for alpha chain variable domain of TCR clone 120102 (TRAV8-3, TRAJ40)
CAAPSLGSGTYKNIF

SEQ ID NO: 240204 - protein, 16 aa, Homo sapiens
  CDR3 for beta chain variable domain of TCR clone 120102 (TRBV7-3, TRBJ2-3)
CASSLSGYRPEDTQYF

SEQ ID NO: 240205 - protein, 14 aa, Homo sapiens
  CDR3 for alpha chain variable domain of TCR clone 120103 (TRAV1-2, TRAJ16)
CAVNRFSDGQKLLF

SEQ ID NO: 240206 - protein, 17 aa, Homo sapiens
  CDR3 for beta chain variable domain of TCR clone 120103 (TRBV7-8, TRBJ2-1)
CASSPPTGTLAYNEQFF

SEQ ID NO: 240207 - protein, 16 aa, Homo sapiens
  CDR3 for alpha chain variable domain of TCR clone 120104 (TRAV12-3, TRAJ53)
CAMSPGSGGSNYKLPF

SEQ ID NO: 240208 - protein, 17 aa, Homo sapiens
  CDR3 for beta chain variable domain of TCR clone 120104 (TRBV28, TRBJ2-5)
CASSTPEGDALQETQYF

SEQ ID NO: 240209 - protein, 13 aa, Homo sapiens
  CDR3 for alpha chain variable domain of TCR clone 120105 (TRAV36/DV7, TRAJ49)
CAGDSNTGNQFYF

SEQ ID NO: 240210 - protein, 13 aa, Homo sapiens
  CDR3 for beta chain variable domain of TCR clone 120105 (TRBV19, TRBJ1-2)
CASSVPGQDGYTF

SEQ ID NO: 240211 - protein, 13 aa, Homo sapiens
  CDR3 for alpha chain variable domain of TCR clone 120106 (TRAV12-1, TRAJ16)
CVVNWPDGQKLLF

SEQ ID NO: 240212 - protein, 13 aa, Homo sapiens
  CDR3 for beta chain variable domain of TCR clone 120106 (TRBV2, TRBJ1-1)
CARNPTGGFHAFF

SEQ ID NO: 240213 - protein, 12 aa, Homo sapiens
  CDR3 for alpha chain variable domain of TCR clone 120107 (TRAV17, TRAJ20)
CATDGADYKLSF

SEQ ID NO: 240214 - protein, 18 aa, Homo sapiens
  CDR3 for beta chain variable domain of TCR clone 120107 (TRBV6-5, TRBJ2-5)
CASSYSQAGGSYQETQYF

SEQ ID NO: 240215 - protein, 15 aa, Homo sapiens
  CDR3 for alpha chain variable domain of TCR clone 120108 (TRAV14/DV4, TRAJ26)
CAMREGQNYGQNFVF

SEQ ID NO: 240216 - protein, 13 aa, Homo sapiens
  CDR3 for beta chain variable domain of TCR clone 120108 (TRBV24-1, TRBJ2-2)
CATSEWSTGELFF

SEQ ID NO: 240217 - protein, 14 aa, Homo sapiens
  CDR3 for alpha chain variable domain of TCR clone 120109 (TRAV12-2, TRAJ13)
CAVKKTGGYQKVTF

SEQ ID NO: 240218 - protein, 15 aa, Homo sapiens
  CDR3 for beta chain variable domain of TCR clone 120109 (TRBV27, TRBJ2-1)
CASSNGGGSSPEQFF

SEQ ID NO: 240219 - protein, 16 aa, Homo sapiens
  CDR3 for alpha chain variable domain of TCR clone 120110 (TRAV17, TRAJ22)
CATDAISSGSARQLTF

SEQ ID NO: 240220 - protein, 15 aa, Homo sapiens
  CDR3 for beta chain variable domain of TCR clone 120110 (TRBV5-1, TRBJ2-1)
CATSPPRAPYNEQFF

SEQ ID NO: 240221 - protein, 15 aa, Homo sapiens
  CDR3 for alpha chain variable domain of TCR clone 120111 (TRAV13-1, TRAJ50)
CAAKGSETSYDKLIF

SEQ ID NO: 240222 - protein, 18 aa, Homo sapiens
  CDR3 for beta chain variable domain of TCR clone 120111 (TRBV10-3, TRBJ2-1)
CTSVPSVSLRGGVDEQFF

SEQ ID NO: 240223 - protein, 15 aa, Homo sapiens
  CDR3 for alpha chain variable domain of TCR clone 120112 (TRAV3, TRAJ5)
CAVRDLDTGRRALTF

SEQ ID NO: 240224 - protein, 16 aa, Homo sapiens
  CDR3 for beta chain variable domain of TCR clone 120112 (TRBV19, TRBJ2-1)
CASSKAGPSSYNEQFF

SEQ ID NO: 240225 - protein, 10 aa, Homo sapiens
  CDR3 for alpha chain variable domain of TCR clone 120113 (TRAV12-3, TRAJ34)
CAMSADKLIF

SEQ ID NO: 240226 - protein, 13 aa, Homo sapiens
  CDR3 for beta chain variable domain of TCR clone 120113 (TRBV11-2, TRBJ2-5)
CASSFSSQETQYF

SEQ ID NO: 240227 - protein, 13 aa, Homo sapiens
  CDR3 for alpha chain variable domain of TCR clone 120114 (TRAV35, TRAJ42)
CAGFPGSPGNLIF

SEQ ID NO: 240228 - protein, 14 aa, Homo sapiens
  CDR3 for beta chain variable domain of TCR clone 120114 (TRBV19, TRBJ2-1)
CASPTFVLSGEQFF

SEQ ID NO: 240229 - protein, 18 aa, Homo sapiens
  CDR3 for alpha chain variable domain of TCR clone 120115 (TRAV26-2, TRAJ45)
CILRVDKYSGGGADGLTF

SEQ ID NO: 240230 - protein, 11 aa, Homo sapiens
  CDR3 for beta chain variable domain of TCR clone 120115 (TRBV29-1, TRBJ2-5)
CSEDRTGTRYF

SEQ ID NO: 240231 - protein, 12 aa, Homo sapiens
  CDR3 for alpha chain variable domain of TCR clone 120116 (TRAV12-3, TRAJ17)
CAMTLTGNKLTF

SEQ ID NO: 240232 - protein, 14 aa, Homo sapiens
  CDR3 for beta chain variable domain of TCR clone 120116 (TRBV24-1, TRBJ1-1)
CATSIPRGDTEAFF

SEQ ID NO: 240233 - protein, 14 aa, Homo sapiens
  CDR3 for alpha chain variable domain of TCR clone 120117 (TRAV38-1, TRAJ45)
CASHSGGGADGLTF

SEQ ID NO: 240234 - protein, 13 aa, Homo sapiens
  CDR3 for beta chain variable domain of TCR clone 120117 (TRBV10-3, TRBJ1-2)
CATSERDSYGYTF

SEQ ID NO: 240235 - protein, 13 aa, Homo sapiens
  CDR3 for alpha chain variable domain of TCR clone 120118 (TRAV35, TRAJ36)
YAGPRIGANNLFF

SEQ ID NO: 240236 - protein, 15 aa, Homo sapiens
  CDR3 for beta chain variable domain of TCR clone 120118 (TRBV28, TRBJ2-5)
CASSPPWSYQETQYF

SEQ ID NO: 240237 - protein, 15 aa, Homo sapiens
  CDR3 for alpha chain variable domain of TCR clone 120119 (TRAV23/DV6, TRAJ18)
YAARYRGSTLGRLYF

SEQ ID NO: 240238 - protein, 13 aa, Homo sapiens
  CDR3 for beta chain variable domain of TCR clone 120119 (TRBV7-2, TRBJ2-7)
CASSSPSGSEQYF

SEQ ID NO: 240239 - protein, 16 aa, Homo sapiens
  CDR3 for alpha chain variable domain of TCR clone 120120 (TRAV30, TRAJ24)
CGTEIVDADSWGKFQF

SEQ ID NO: 240240 - protein, 12 aa, Homo sapiens
  CDR3 for beta chain variable domain of TCR clone 120120 (TRBV11-2, TRBJ2-4)
CASSSASGSEYF

SEQ ID NO: 240241 - protein, 13 aa, Homo sapiens
  CDR3 for alpha chain variable domain of TCR clone 120121 (TRAV38-2/DV8, TRAJ34)
RAYRTWNTDKLIF

SEQ ID NO: 240242 - protein, 20 aa, Homo sapiens
  CDR3 for beta chain variable domain of TCR clone 120121 (TRBV28, TRBJ2-1)
CASTPIGRSPGLAGGNEQFF

SEQ ID NO: 240243 - protein, 15 aa, Homo sapiens
  CDR3 for alpha chain variable domain of TCR clone 120122 (TRAV8-3, TRAJ44)
CAVGAGAGPASKLTF

SEQ ID NO: 240244 - protein, 12 aa, Homo sapiens
  CDR3 for beta chain variable domain of TCR clone 120122 (TRBV7-8, TRBJ2-4)
CASSLGGNIQYF

SEQ ID NO: 240245 - protein, 15 aa, Homo sapiens
  CDR3 for alpha chain variable domain of TCR clone 120123 (TRAV12-3, TRAJ6)
CAMSATTGGSYIPTF

SEQ ID NO: 240246 - protein, 19 aa, Homo sapiens
  CDR3 for beta chain variable domain of TCR clone 120123 (TRBV25-1, TRBJ2-2)
CAILVYRVDRGRKTGELVF

SEQ ID NO: 240247 - protein, 15 aa, Homo sapiens
  CDR3 for alpha chain variable domain of TCR clone 120124 (TRAV8-3, TRAJ15)
CAVGAPNQAGTALIF

SEQ ID NO: 240248 - protein, 14 aa, Homo sapiens
  CDR3 for beta chain variable domain of TCR clone 120124 (TRBV20-1, TRBJ2-1)
CSPNDEASYNVQFF

SEQ ID NO: 240249 - protein, 19 aa, Homo sapiens
  CDR3 for alpha chain variable domain of TCR clone 120125 (TRAV1-2, TRAJ26)
CLLPLCCERPDNYGQNFVF

SEQ ID NO: 240250 - protein, 15 aa, Homo sapiens
  CDR3 for beta chain variable domain of TCR clone 120125 (TRBV9, TRBJ1-6)
CASSVAGTGDSPLHC

SEQ ID NO: 240251 - protein, 17 aa, Homo sapiens
  CDR3 for alpha chain variable domain of TCR clone 120126 (TRAV35, TRAJ28)
CAGLQVYSRAGSYQLTF

SEQ ID NO: 240252 - protein, 15 aa, Homo sapiens
  CDR3 for beta chain variable domain of TCR clone 120126 (TRBV2, TRBJ1-2)
CASSEIGGANYGYTF

SEQ ID NO: 240253 - protein, 13 aa, Homo sapiens
  CDR3 for alpha chain variable domain of TCR clone 120127 (TRAV16, TRAJ11)
CAPTQSGYSTLTF

SEQ ID NO: 240254 - protein, 14 aa, Homo sapiens
  CDR3 for beta chain variable domain of TCR clone 120127 (TRBV19, TRBJ2-7)
CASSTTRSSYEQYF

SEQ ID NO: 240255 - protein, 11 aa, Homo sapiens
  CDR3 for alpha chain variable domain of TCR clone 120128 (TRAV17, TRAJ9)
CATTGGFKTIF

SEQ ID NO: 240256 - protein, 14 aa, Homo sapiens
  CDR3 for beta chain variable domain of TCR clone 120128 (TRBV7-9, TRBJ2-2)
CASSGIADTGELFF

SEQ ID NO: 240257 - protein, 15 aa, Homo sapiens
  CDR3 for alpha chain variable domain of TCR clone 120129 (TRAV3, TRAJ24)
CAVRDKMTAGGNCSL

SEQ ID NO: 240258 - protein, 14 aa, Homo sapiens
  CDR3 for beta chain variable domain of TCR clone 120129 (TRBV7-2, TRBJ2-3)
CASSQTGSSYSQYF

SEQ ID NO: 240259 - protein, 16 aa, Homo sapiens
  CDR3 for alpha chain variable domain of TCR clone 120130 (TRAV17, TRAJ52)
CATGIIGGTSYGKLTF

SEQ ID NO: 240260 - protein, 12 aa, Homo sapiens
  CDR3 for beta chain variable domain of TCR clone 120130 (TRBV7-3, TRBJ2-1)
CASSVINNEQFF

SEQ ID NO: 240261 - protein, 19 aa, Homo sapiens
  CDR3 for alpha chain variable domain of TCR clone 120131 (TRAV26-1, TRAJ28)
CIVRVAHAYSGAGSYQLTF

SEQ ID NO: 240262 - protein, 14 aa, Homo sapiens
  CDR3 for beta chain variable domain of TCR clone 120131 (TRBV12-5, TRBJ2-5)
CASGSRTHQETQYF

SEQ ID NO: 240263 - protein, 12 aa, Homo sapiens
  CDR3 for alpha chain variable domain of TCR clone 120132 (TRAV8-6, TRAJ43)
CAVSNNNNDMRF

SEQ ID NO: 240264 - protein, 15 aa, Homo sapiens
  CDR3 for beta chain variable domain of TCR clone 120132 (TRBV7-3, TRBJ2-6)
CASSLGGSGTNVLTF

SEQ ID NO: 240265 - protein, 14 aa, Homo sapiens
  CDR3 for alpha chain variable domain of TCR clone 120133 (TRAV2, TRAJ9)
CAVEDRRGGFKTIF

SEQ ID NO: 240266 - protein, 12 aa, Homo sapiens
  CDR3 for beta chain variable domain of TCR clone 120133 (TRBV12-4, TRBJ2-4)
CASSSSGNIQYF

SEQ ID NO: 240267 - protein, 12 aa, Homo sapiens
  CDR3 for alpha chain variable domain of TCR clone 120134 (TRAV8-3, TRAJ26)
CAGDNYVQNFVF

SEQ ID NO: 240268 - protein, 15 aa, Homo sapiens
  CDR3 for beta chain variable domain of TCR clone 120134 (TRBV20-1, TRBJ2-3)
CSARRGEAITDTQYF

SEQ ID NO: 240269 - protein, 14 aa, Homo sapiens
  CDR3 for alpha chain variable domain of TCR clone 120135 (TRAV12-2, TRAJ13)
CAVKKTGGYQKVTF

SEQ ID NO: 240270 - protein, 12 aa, Homo sapiens
  CDR3 for beta chain variable domain of TCR clone 120135 (TRBV12-4, TRBJ1-2)
CASSFIWLPLRF

SEQ ID NO: 240271 - protein, 16 aa, Homo sapiens
  CDR3 for alpha chain variable domain of TCR clone 120136 (TRAV12-1, TRAJ28)
CVVIAYSGAGSYQLTF

SEQ ID NO: 240272 - protein, 13 aa, Homo sapiens
  CDR3 for beta chain variable domain of TCR clone 120136 (TRBV7-6, TRBJ2-3)
CASSLRSDNTQYF

SEQ ID NO: 240273 - protein, 15 aa, Homo sapiens
  CDR3 for alpha chain variable domain of TCR clone 120137 (TRAV26-1, TRAJ22)
CIVRVSFWFCKATDL

SEQ ID NO: 240274 - protein, 13 aa, Homo sapiens
  CDR3 for beta chain variable domain of TCR clone 120137 (TRBV7-9, TRBJ1-2)
SASSLKQNYGYTF

SEQ ID NO: 240275 - protein, 15 aa, Homo sapiens
  CDR3 for alpha chain variable domain of TCR clone 120138 (TRAV26-1, TRAJ39)
CIVRGFNNAGNMLTF

SEQ ID NO: 240276 - protein, 14 aa, Homo sapiens
  CDR3 for beta chain variable domain of TCR clone 120138 (TRBV7-3, TRBJ2-2)
CASSSGGYTGELFF

SEQ ID NO: 240277 - protein, 13 aa, Homo sapiens
  CDR3 for alpha chain variable domain of TCR clone 120139 (TRAV8-1, TRAJ24)
CAGSTDSWGKLQF

SEQ ID NO: 240278 - protein, 14 aa, Homo sapiens
  CDR3 for beta chain variable domain of TCR clone 120139 (TRBV7-6, TRBJ2-3)
CASSVAGGTDTQYF

SEQ ID NO: 240279 - protein, 14 aa, Homo sapiens
  CDR3 for alpha chain variable domain of TCR clone 120140 (TRAV12-2, TRAJ40)
CAVKIPSGTYKYIF

SEQ ID NO: 240280 - protein, 16 aa, Homo sapiens
  CDR3 for beta chain variable domain of TCR clone 120140 (TRBV28, TRBJ1-5)
CASSLTGQGWNQPQHF

SEQ ID NO: 240281 - protein, 14 aa, Homo sapiens
  CDR3 for alpha chain variable domain of TCR clone 120141 (TRAV2, TRAJ9)
CTVEDRSGGFKTIF

SEQ ID NO: 240282 - protein, 13 aa, Homo sapiens
  CDR3 for beta chain variable domain of TCR clone 120141 (TRBV7-3, TRBJ1-1)
CASSQDWGAEAFF

SEQ ID NO: 240283 - protein, 16 aa, Homo sapiens
  CDR3 for alpha chain variable domain of TCR clone 120142 (TRAV17, TRAJ52)
CATGNAGGTSYGKLTF

SEQ ID NO: 240284 - protein, 13 aa, Homo sapiens
  CDR3 for beta chain variable domain of TCR clone 120142 (TRBV27, TRBJ1-6)
CASSLVLVSPLHF

SEQ ID NO: 240285 - protein, 13 aa, Homo sapiens
  CDR3 for alpha chain variable domain of TCR clone 120143 (TRAV21, TRAJ20)
CAVGVFADYKLSF

SEQ ID NO: 240286 - protein, 18 aa, Homo sapiens
  CDR3 for beta chain variable domain of TCR clone 120143 (TRBV20-1, TRBJ2-6)
CSAETTPTHGSGANVLTF

SEQ ID NO: 240287 - protein, 13 aa, Homo sapiens
  CDR3 for alpha chain variable domain of TCR clone 120144 (TRAV26-2, TRAJ43)
CILRAVNNNDMRF

SEQ ID NO: 240288 - protein, 15 aa, Homo sapiens
  CDR3 for beta chain variable domain of TCR clone 120144 (TRBV28, TRBJ2-1)
CASSIIAGGRSEQFF

SEQ ID NO: 240289 - protein, 19 aa, Homo sapiens
  CDR3 for alpha chain variable domain of TCR clone 120145 (TRAV25, TRAJ20)
TATQTTDVGILPHDYKLSF

SEQ ID NO: 240290 - protein, 16 aa, Homo sapiens
  CDR3 for beta chain variable domain of TCR clone 120145 (TRBV7-3, TRBJ2-1)
CASSKPLAGGYNEQFF

SEQ ID NO: 240291 - protein, 15 aa, Homo sapiens
  CDR3 for alpha chain variable domain of TCR clone 120146 (TRAV2, TRAJ15)
CAVEDREQAGTALIF

SEQ ID NO: 240292 - protein, 13 aa, Homo sapiens
  CDR3 for beta chain variable domain of TCR clone 120146 (TRBV10-2, TRBJ2-3)
FASSESGDHTQYF

SEQ ID NO: 240293 - protein, 12 aa, Homo sapiens
  CDR3 for alpha chain variable domain of TCR clone 120147 (TRAV13-1, TRAJ48)
CAANFGNEKLTF

SEQ ID NO: 240294 - protein, 13 aa, Homo sapiens
  CDR3 for beta chain variable domain of TCR clone 120147 (TRBV7-3, TRBJ1-1)
CASSHDWGAEAFF

SEQ ID NO: 240295 - protein, 18 aa, Homo sapiens
  CDR3 for alpha chain variable domain of TCR clone 120148 (TRAV13-1, TRAJ52)
CAASKRSAGGTSYGKLTV

SEQ ID NO: 240296 - protein, 13 aa, Homo sapiens
  CDR3 for beta chain variable domain of TCR clone 120148 (TRBV12-4, TRBJ1-2)
CASSLRQGKGYTF

SEQ ID NO: 240297 - protein, 14 aa, Homo sapiens
  CDR3 for alpha chain variable domain of TCR clone 120149 (TRAV1-2, TRAJ8)
CAVREDTGFQKLVF

SEQ ID NO: 240298 - protein, 14 aa, Homo sapiens
  CDR3 for beta chain variable domain of TCR clone 120149 (TRBV11-1, TRBJ2-7)
CASSFRQGSYEQYF

SEQ ID NO: 240299 - protein, 16 aa, Homo sapiens
  CDR3 for alpha chain variable domain of TCR clone 120150 (TRAV12-3, TRAJ53)
CAMSPGRGGSNYKLTF

SEQ ID NO: 240300 - protein, 13 aa, Homo sapiens
  CDR3 for beta chain variable domain of TCR clone 120150 (TRBV19, TRBJ1-2)
CASSVPGQDGYTF

SEQ ID NO: 240301 - protein, 13 aa, Homo sapiens
  CDR3 for alpha chain variable domain of TCR clone 120151 (TRAV12-2, TRAJ10)
CAVPTGGGNKLTF

SEQ ID NO: 240302 - protein, 14 aa, Homo sapiens
  CDR3 for beta chain variable domain of TCR clone 120151 (TRBV25-1, TRBJ1-1)
YASTHLGGNTEAFF

SEQ ID NO: 240303 - protein, 14 aa, Homo sapiens
  CDR3 for alpha chain variable domain of TCR clone 120152 (TRAV17, TRAJ35)
CATDRPGFGNVLHC

SEQ ID NO: 240304 - protein, 19 aa, Homo sapiens
  CDR3 for beta chain variable domain of TCR clone 120152 (TRBV11-3, TRBJ2-2)
CASSTRPGAKETNTGELFF
